United States Patent Application Publication US 2005/0255487 A1 - sequence listing, part 65

SEQ ID NO: 1783315 - RNA, 19 nt, Homo sapiens
  misc_RNA (1)...(19): siRNA sense strand
gaaaagagaaugcgaagag

SEQ ID NO: 1783316 - RNA, 19 nt, Homo sapiens
  misc_RNA (1)...(19): siRNA sense strand
gguaugcuguuuguacaau

SEQ ID NO: 1783317 - RNA, 19 nt, Homo sapiens
  misc_RNA (1)...(19): siRNA sense strand
ggcaaagaaugcgcucuau

SEQ ID NO: 1783318 - RNA, 19 nt, Homo sapiens
  misc_RNA (1)...(19): siRNA sense strand
gacagucaguuuugaauau

SEQ ID NO: 1783319 - RNA, 19 nt, Homo sapiens
  misc_RNA (1)...(19): siRNA sense strand
gguggcaggugguuagaag

SEQ ID NO: 1783320 - RNA, 19 nt, Homo sapiens
  misc_RNA (1)...(19): siRNA sense strand
uuaggugggcugauuaauu

SEQ ID NO: 1783321 - RNA, 19 nt, Homo sapiens
  misc_RNA (1)...(19): siRNA sense strand
uagaagaacgaugcuauga

SEQ ID NO: 1783322 - RNA, 19 nt, Homo sapiens
  misc_RNA (1)...(19): siRNA sense strand
aaaccaucauuuagcauca

SEQ ID NO: 1783323 - RNA, 19 nt, Homo sapiens
  misc_RNA (1)...(19): siRNA sense strand
ucgaaaccaucauuuagca

SEQ ID NO: 1783324 - RNA, 19 nt, Homo sapiens
  misc_RNA (1)...(19): siRNA sense strand
guuagaagaacgaugcuau

SEQ ID NO: 1783325 - RNA, 19 nt, Homo sapiens
  misc_RNA (1)...(19): siRNA sense strand
ggaugcacuugaacuaaac

SEQ ID NO: 1783326 - RNA, 19 nt, Homo sapiens
  misc_RNA (1)...(19): siRNA sense strand
aaauuaggugggcugauua

SEQ ID NO: 1783327 - RNA, 19 nt, Homo sapiens
  misc_RNA (1)...(19): siRNA sense strand
ggaaagucaagcagugugu

SEQ ID NO: 1783328 - RNA, 19 nt, Homo sapiens
  misc_RNA (1)...(19): siRNA sense strand
agaacgaugcuaugauuug

SEQ ID NO: 1783329 - RNA, 19 nt, Homo sapiens
  misc_RNA (1)...(19): siRNA sense strand
aaucugguaugcuguuugu

SEQ ID NO: 1783330 - RNA, 19 nt, Homo sapiens
  misc_RNA (1)...(19): siRNA sense strand
uuaucaauguccagaaguu

SEQ ID NO: 1783331 - RNA, 19 nt, Homo sapiens
  misc_RNA (1)...(19): siRNA sense strand
acagaacgucuccuaggua

SEQ ID NO: 1783332 - RNA, 19 nt, Homo sapiens
  misc_RNA (1)...(19): siRNA sense strand
gucaagcagugugugaauu

SEQ ID NO: 1783333 - RNA, 19 nt, Homo sapiens
  misc_RNA (1)...(19): siRNA sense strand
guaugcuguuuguacaauu

SEQ ID NO: 1783334 - RNA, 19 nt, Homo sapiens
  misc_RNA (1)...(19): siRNA sense strand
acucagugcuuucauggau

SEQ ID NO: 1783335 - RNA, 19 nt, Homo sapiens
  misc_RNA (1)...(19): siRNA sense strand
gcuaagaauaagccaguug

SEQ ID NO: 1783336 - RNA, 19 nt, Homo sapiens
  misc_RNA (1)...(19): siRNA sense strand
ucuuaccacuuaucaaugu

SEQ ID NO: 1783337 - RNA, 19 nt, Homo sapiens
  misc_RNA (1)...(19): siRNA sense strand
gugaaguuggcuuugaaua

SEQ ID NO: 1783338 - RNA, 19 nt, Homo sapiens
  misc_RNA (1)...(19): siRNA sense strand
uaugcuguuuguacaauug

SEQ ID NO: 1783339 - RNA, 19 nt, Homo sapiens
  misc_RNA (1)...(19): siRNA sense strand
ggacagucaguuuugaaua

SEQ ID NO: 1783340 - RNA, 19 nt, Homo sapiens
  misc_RNA (1)...(19): siRNA sense strand
aacagagugcuaagaauaa

SEQ ID NO: 1783341 - RNA, 19 nt, Homo sapiens
  misc_RNA (1)...(19): siRNA sense strand
uugcaagccucaaaacaua

SEQ ID NO: 1783342 - RNA, 19 nt, Homo sapiens
  misc_RNA (1)...(19): siRNA sense strand
gccaagcugucuucauggu

SEQ ID NO: 1783343 - RNA, 19 nt, Homo sapiens
  misc_RNA (1)...(19): siRNA sense strand
gacguguacuuuacuuguc

SEQ ID NO: 1783344 - RNA, 19 nt, Homo sapiens
  misc_RNA (1)...(19): siRNA sense strand
gauucaccaucuacuccaa

SEQ ID NO: 1783345 - RNA, 19 nt, Homo sapiens
  misc_RNA (1)...(19): siRNA sense strand
aaucaggaaucgagauguc

SEQ ID NO: 1783346 - RNA, 19 nt, Homo sapiens
  misc_RNA (1)...(19): siRNA sense strand
caucauuuagcaucauuug

SEQ ID NO: 1783347 - RNA, 19 nt, Homo sapiens
  misc_RNA (1)...(19): siRNA sense strand
ugaaguuggcuuugaauac

SEQ ID NO: 1783348 - RNA, 19 nt, Homo sapiens
  misc_RNA (1)...(19): siRNA sense strand
uauuugacguguacuuuac

SEQ ID NO: 1783349 - RNA, 19 nt, Homo sapiens
  misc_RNA (1)...(19): siRNA sense strand
ugaaagccaagcugucuuc

SEQ ID NO: 1783350 - RNA, 19 nt, Homo sapiens
  misc_RNA (1)...(19): siRNA sense strand
ucucuuaccacuuaucaau

SEQ ID NO: 1783351 - RNA, 19 nt, Homo sapiens
  misc_RNA (1)...(19): siRNA sense strand
acagugggacagucaguuu

SEQ ID NO: 1783352 - RNA, 19 nt, Homo sapiens
  misc_RNA (1)...(19): siRNA sense strand
aaagaaugcgcucuaugug

SEQ ID NO: 1783353 - RNA, 19 nt, Homo sapiens
  misc_RNA (1)...(19): siRNA sense strand
guuugcaacuuugacagaa

SEQ ID NO: 1783354 - RNA, 19 nt, Homo sapiens
  misc_RNA (1)...(19): siRNA sense strand
gcuaguuuggucccaguuu

SEQ ID NO: 1783355 - RNA, 19 nt, Homo sapiens
  misc_RNA (1)...(19): siRNA sense strand
ucuguuauuucugugcuaa

SEQ ID NO: 1783356 - RNA, 19 nt, Homo sapiens
  misc_RNA (1)...(19): siRNA sense strand
uggcaaagaaugcgcucua

SEQ ID NO: 1783357 - RNA, 19 nt, Homo sapiens
  misc_RNA (1)...(19): siRNA sense strand
guuggaugcacuugaacua

SEQ ID NO: 1783358 - RNA, 19 nt, Homo sapiens
  misc_RNA (1)...(19): siRNA sense strand
gauuuaaaccugggcuguu

SEQ ID NO: 1783359 - RNA, 19 nt, Homo sapiens
  misc_RNA (1)...(19): siRNA sense strand
gcuuugagccagaggugaa

SEQ ID NO: 1783360 - RNA, 19 nt, Homo sapiens
  misc_RNA (1)...(19): siRNA sense strand
gcaugguuuugcugaauuu

SEQ ID NO: 1783361 - RNA, 19 nt, Homo sapiens
  misc_RNA (1)...(19): siRNA sense strand
uacgugaaguuggcuuuga

SEQ ID NO: 1783362 - RNA, 19 nt, Homo sapiens
  misc_RNA (1)...(19): siRNA sense strand
ccuagguauucauucugua

SEQ ID NO: 1783363 - RNA, 19 nt, Homo sapiens
  misc_RNA (1)...(19): siRNA sense strand
uagcaucauuugggaaagu

SEQ ID NO: 1783364 - RNA, 19 nt, Homo sapiens
  misc_RNA (1)...(19): siRNA sense strand
ugacguguacuuuacuugu

SEQ ID NO: 1783365 - RNA, 19 nt, Homo sapiens
  misc_RNA (1)...(19): siRNA sense strand
agauaucagccacccagua

SEQ ID NO: 1783366 - RNA, 19 nt, Homo sapiens
  misc_RNA (1)...(19): siRNA sense strand
gagaaugcgaagagugcaa

SEQ ID NO: 1783367 - RNA, 19 nt, Homo sapiens
  misc_RNA (1)...(19): siRNA sense strand
aaagucaagcaguguguga

SEQ ID NO: 1783368 - RNA, 19 nt, Homo sapiens
  misc_RNA (1)...(19): siRNA sense strand
auacaugaauagggaacuu

SEQ ID NO: 1783369 - RNA, 19 nt, Homo sapiens
  misc_RNA (1)...(19): siRNA sense strand
accauaggaugugagcaua

SEQ ID NO: 1783370 - RNA, 19 nt, Homo sapiens
  misc_RNA (1)...(19): siRNA sense strand
caugguguauuccucuuac

SEQ ID NO: 1783371 - RNA, 19 nt, Homo sapiens
  misc_RNA (1)...(19): siRNA sense strand
ucuccuagguauucauucu

SEQ ID NO: 1783372 - RNA, 19 nt, Homo sapiens
  misc_RNA (1)...(19): siRNA sense strand
ggaaucgagaugucagaag

SEQ ID NO: 1783373 - RNA, 19 nt, Homo sapiens
  misc_RNA (1)...(19): siRNA sense strand
caaaacauacgugaaguug

SEQ ID NO: 1783374 - RNA, 19 nt, Homo sapiens
  misc_RNA (1)...(19): siRNA sense strand
ugcgaagagugcaaacaga

SEQ ID NO: 1783375 - RNA, 19 nt, Homo sapiens
  misc_RNA (1)...(19): siRNA sense strand
uguuauuucugugcuaaga

SEQ ID NO: 1783376 - RNA, 19 nt, Homo sapiens
  misc_RNA (1)...(19): siRNA sense strand
acagagugcuaagaauaag

SEQ ID NO: 1783377 - RNA, 19 nt, Homo sapiens
  misc_RNA (1)...(19): siRNA sense strand
caccuaauagugacaauac

SEQ ID NO: 1783378 - RNA, 19 nt, Homo sapiens
  misc_RNA (1)...(19): siRNA sense strand
ggagaacgcccacgacaag

SEQ ID NO: 1783379 - RNA, 19 nt, Homo sapiens
  misc_RNA (1)...(19): siRNA sense strand
cauccuagacuuaaugaaa

SEQ ID NO: 1783380 - RNA, 19 nt, Homo sapiens
  misc_RNA (1)...(19): siRNA sense strand
caaaauacccucaugaugu

SEQ ID NO: 1783381 - RNA, 19 nt, Homo sapiens
  misc_RNA (1)...(19): siRNA sense strand
gcaucgagcagaaguacaa

SEQ ID NO: 1783382 - RNA, 19 nt, Homo sapiens
  misc_RNA (1)...(19): siRNA sense strand
agagcuacauggaacacua

SEQ ID NO: 1783383 - RNA, 19 nt, Homo sapiens
  misc_RNA (1)...(19): siRNA sense strand
ugaaccaccucagcuguga

SEQ ID NO: 1783384 - RNA, 19 nt, Homo sapiens
  misc_RNA (1)...(19): siRNA sense strand
gaacgcccacgacaagauc

SEQ ID NO: 1783385 - RNA, 19 nt, Homo sapiens
  misc_RNA (1)...(19): siRNA sense strand
uaagcagccucagagcaaa

SEQ ID NO: 1783386 - RNA, 19 nt, Homo sapiens
  misc_RNA (1)...(19): siRNA sense strand
uagccaaagcaacgacuua

SEQ ID NO: 1783387 - RNA, 19 nt, Homo sapiens
  misc_RNA (1)...(19): siRNA sense strand
cggcccaucuccagcauug

SEQ ID NO: 1783388 - RNA, 19 nt, Homo sapiens
  misc_RNA (1)...(19): siRNA sense strand
cgacuuaagcagccucaga

SEQ ID NO: 1783389 - RNA, 19 nt, Homo sapiens
  misc_RNA (1)...(19): siRNA sense strand
caaagcaacgacuuaagca

SEQ ID NO: 1783390 - RNA, 19 nt, Homo sapiens
  misc_RNA (1)...(19): siRNA sense strand
uuaagcagccucagagcaa

SEQ ID NO: 1783391 - RNA, 19 nt, Homo sapiens
  misc_RNA (1)...(19): siRNA sense strand
gcaaaauacccucaugaug

SEQ ID NO: 1783392 - RNA, 19 nt, Homo sapiens
  misc_RNA (1)...(19): siRNA sense strand
aaaauacccucaugaugug

SEQ ID NO: 1783393 - RNA, 19 nt, Homo sapiens
  misc_RNA (1)...(19): siRNA sense strand
uuggacaggugcagagcua

SEQ ID NO: 1783394 - RNA, 19 nt, Homo sapiens
  misc_RNA (1)...(19): siRNA sense strand
gggagaacgcccacgacaa

SEQ ID NO: 1783395 - RNA, 19 nt, Homo sapiens
  misc_RNA (1)...(19): siRNA sense strand
ggacaggugcagagcuaca

SEQ ID NO: 1783396 - RNA, 19 nt, Homo sapiens
  misc_RNA (1)...(19): siRNA sense strand
ccaaagcaacgacuuaagc

SEQ ID NO: 1783397 - RNA, 19 nt, Homo sapiens
  misc_RNA (1)...(19): siRNA sense strand
ggcggguucugcucauguu

SEQ ID NO: 1783398 - RNA, 19 nt, Homo sapiens
  misc_RNA (1)...(19): siRNA sense strand
gcagcaucgagcagaagua

SEQ ID NO: 1783399 - RNA, 19 nt, Homo sapiens
  misc_RNA (1)...(19): siRNA sense strand
gagcaaaauacccucauga

SEQ ID NO: 1783400 - RNA, 19 nt, Homo sapiens
  misc_RNA (1)...(19): siRNA sense strand
gagaacgcccacgacaaga

SEQ ID NO: 1783401 - RNA, 19 nt, Homo sapiens
  misc_RNA (1)...(19): siRNA sense strand
cagcagcagcucaccuuca

SEQ ID NO: 1783402 - RNA, 19 nt, Homo sapiens
  misc_RNA (1)...(19): siRNA sense strand
aagaaucccuucgcagcau

SEQ ID NO: 1783403 - RNA, 19 nt, Homo sapiens
  misc_RNA (1)...(19): siRNA sense strand
ucaaagagcaaaucaaaga

SEQ ID NO: 1783404 - RNA, 19 nt, Homo sapiens
  misc_RNA (1)...(19): siRNA sense strand
gagcaaaucaaagaacuaa

SEQ ID NO: 1783405 - RNA, 19 nt, Homo sapiens
  misc_RNA (1)...(19): siRNA sense strand
gaaaagccauuugauguau

SEQ ID NO: 1783406 - RNA, 19 nt, Homo sapiens
  misc_RNA (1)...(19): siRNA sense strand
caagugugguagcuauuga

SEQ ID NO: 1783407 - RNA, 19 nt, Homo sapiens
  misc_RNA (1)...(19): siRNA sense strand
ccucaaagagcaaaucaaa

SEQ ID NO: 1783408 - RNA, 19 nt, Homo sapiens
  misc_RNA (1)...(19): siRNA sense strand
cgagcaagcuauggaucua

SEQ ID NO: 1783409 - RNA, 19 nt, Homo sapiens
  misc_RNA (1)...(19): siRNA sense strand
ggagaacaaucugcugaag

SEQ ID NO: 1783410 - RNA, 19 nt, Homo sapiens
  misc_RNA (1)...(19): siRNA sense strand
gugcaagugugguagcuau

SEQ ID NO: 1783411 - RNA, 19 nt, Homo sapiens
  misc_RNA (1)...(19): siRNA sense strand
gagaacaaucugcugaaga

SEQ ID NO: 1783412 - RNA, 19 nt, Homo sapiens
  misc_RNA (1)...(19): siRNA sense strand
gcaagugugguagcuauug

SEQ ID NO: 1783413 - RNA, 19 nt, Homo sapiens
  misc_RNA (1)...(19): siRNA sense strand
caaagagcaaaucaaagaa

SEQ ID NO: 1783414 - RNA, 19 nt, Homo sapiens
  misc_RNA (1)...(19): siRNA sense strand
cugagcagcuugcccaguu

SEQ ID NO: 1783415 - RNA, 19 nt, Homo sapiens
  misc_RNA (1)...(19): siRNA sense strand
agaacaaucugcugaagac

SEQ ID NO: 1783416 - RNA, 19 nt, Homo sapiens
  misc_RNA (1)...(19): siRNA sense strand
gguagcuauugacaacaaa

SEQ ID NO: 1783417 - RNA, 19 nt, Homo sapiens
  misc_RNA (1)...(19): siRNA sense strand
gauguaugcggucagagaa

SEQ ID NO: 1783418 - RNA, 19 nt, Homo sapiens
  misc_RNA (1)...(19): siRNA sense strand
ugagcagcuugcccaguuu

SEQ ID NO: 1783419 - RNA, 19 nt, Homo sapiens
  misc_RNA (1)...(19): siRNA sense strand
caagcuauggaucuaguga

SEQ ID NO: 1783420 - RNA, 19 nt, Homo sapiens
  misc_RNA (1)...(19): siRNA sense strand
ucgcagggcucaggaccaa

SEQ ID NO: 1783421 - RNA, 19 nt, Homo sapiens
  misc_RNA (1)...(19): siRNA sense strand
ugaaaagccauuugaugua

SEQ ID NO: 1783422 - RNA, 19 nt, Homo sapiens
  misc_RNA (1)...(19): siRNA sense strand
ugugguagcuauugacaac

SEQ ID NO: 1783423 - RNA, 19 nt, Homo sapiens
  misc_RNA (1)...(19): siRNA sense strand
agcuauggaucuagugaaa

SEQ ID NO: 1783424 - RNA, 19 nt, Homo sapiens
  misc_RNA (1)...(19): siRNA sense strand
ugguagcuauugacaacaa

SEQ ID NO: 1783425 - RNA, 19 nt, Homo sapiens
  misc_RNA (1)...(19): siRNA sense strand
uguaugcggucagagaaga

SEQ ID NO: 1783426 - RNA, 19 nt, Homo sapiens
  misc_RNA (1)...(19): siRNA sense strand
acaaucugcugaagacacu

SEQ ID NO: 1783427 - RNA, 19 nt, Homo sapiens
  misc_RNA (1)...(19): siRNA sense strand
gugaaaagccauuugaugu

SEQ ID NO: 1783428 - RNA, 19 nt, Homo sapiens
  misc_RNA (1)...(19): siRNA sense strand
ugauguaugcggucagaga

SEQ ID NO: 1783429 - RNA, 19 nt, Homo sapiens
  misc_RNA (1)...(19): siRNA sense strand
aagagcaaaucaaagaacu

SEQ ID NO: 1783430 - RNA, 19 nt, Homo sapiens
  misc_RNA (1)...(19): siRNA sense strand
caaaaucgagcaagcuaug

SEQ ID NO: 1783431 - RNA, 19 nt, Homo sapiens
  misc_RNA (1)...(19): siRNA sense strand
gagcagcuugcccaguuuc

SEQ ID NO: 1783432 - RNA, 19 nt, Homo sapiens
  misc_RNA (1)...(19): siRNA sense strand
ggccaguccugagcagcuu

SEQ ID NO: 1783433 - RNA, 19 nt, Homo sapiens
  misc_RNA (1)...(19): siRNA sense strand
gaacaaucugcugaagaca

SEQ ID NO: 1783434 - RNA, 19 nt, Homo sapiens
  misc_RNA (1)...(19): siRNA sense strand
aaagccauuugauguaugc

SEQ ID NO: 1783435 - RNA, 19 nt, Homo sapiens
  misc_RNA (1)...(19): siRNA sense strand
ucaaagagcaaaucaaaga

SEQ ID NO: 1783436 - RNA, 19 nt, Homo sapiens
  misc_RNA (1)...(19): siRNA sense strand
gagcaaaucaaagaacuaa

SEQ ID NO: 1783437 - RNA, 19 nt, Homo sapiens
  misc_RNA (1)...(19): siRNA sense strand
gaaaagccauuugauguau

SEQ ID NO: 1783438 - RNA, 19 nt, Homo sapiens
  misc_RNA (1)...(19): siRNA sense strand
caagugugguagcuauuga

SEQ ID NO: 1783439 - RNA, 19 nt, Homo sapiens
  misc_RNA (1)...(19): siRNA sense strand
ccucaaagagcaaaucaaa

SEQ ID NO: 1783440 - RNA, 19 nt, Homo sapiens
  misc_RNA (1)...(19): siRNA sense strand
cgagcaagcuauggaucua

SEQ ID NO: 1783441 - RNA, 19 nt, Homo sapiens
  misc_RNA (1)...(19): siRNA sense strand
ggagaacaaucugcugaag

SEQ ID NO: 1783442 - RNA, 19 nt, Homo sapiens
  misc_RNA (1)...(19): siRNA sense strand
gugcaagugugguagcuau

SEQ ID NO: 1783443 - RNA, 19 nt, Homo sapiens
  misc_RNA (1)...(19): siRNA sense strand
gagaacaaucugcugaaga

SEQ ID NO: 1783444 - RNA, 19 nt, Homo sapiens
  misc_RNA (1)...(19): siRNA sense strand
gcaagugugguagcuauug

SEQ ID NO: 1783445 - RNA, 19 nt, Homo sapiens
  misc_RNA (1)...(19): siRNA sense strand
caaagagcaaaucaaagaa

SEQ ID NO: 1783446 - RNA, 19 nt, Homo sapiens
  misc_RNA (1)...(19): siRNA sense strand
cugagcagcuugcccaguu

SEQ ID NO: 1783447 - RNA, 19 nt, Homo sapiens
  misc_RNA (1)...(19): siRNA sense strand
agaacaaucugcugaagac

SEQ ID NO: 1783448 - RNA, 19 nt, Homo sapiens
  misc_RNA (1)...(19): siRNA sense strand
gguagcuauugacaacaaa

SEQ ID NO: 1783449 - RNA, 19 nt, Homo sapiens
  misc_RNA (1)...(19): siRNA sense strand
gauguaugcggucagagaa

SEQ ID NO: 1783450 - RNA, 19 nt, Homo sapiens
  misc_RNA (1)...(19): siRNA sense strand
ugagcagcuugcccaguuu

SEQ ID NO: 1783451 - RNA, 19 nt, Homo sapiens
  misc_RNA (1)...(19): siRNA sense strand
caagcuauggaucuaguga

SEQ ID NO: 1783452 - RNA, 19 nt, Homo sapiens
  misc_RNA (1)...(19): siRNA sense strand
ucgcagggcucaggaccaa

SEQ ID NO: 1783453 - RNA, 19 nt, Homo sapiens
  misc_RNA (1)...(19): siRNA sense strand
ugaaaagccauuugaugua

SEQ ID NO: 1783454 - RNA, 19 nt, Homo sapiens
  misc_RNA (1)...(19): siRNA sense strand
ugugguagcuauugacaac

SEQ ID NO: 1783455 - RNA, 19 nt, Homo sapiens
  misc_RNA (1)...(19): siRNA sense strand
agcuauggaucuagugaaa

SEQ ID NO: 1783456 - RNA, 19 nt, Homo sapiens
  misc_RNA (1)...(19): siRNA sense strand
ugguagcuauugacaacaa

SEQ ID NO: 1783457 - RNA, 19 nt, Homo sapiens
  misc_RNA (1)...(19): siRNA sense strand
uguaugcggucagagaaga

SEQ ID NO: 1783458 - RNA, 19 nt, Homo sapiens
  misc_RNA (1)...(19): siRNA sense strand
acaaucugcugaagacacu

SEQ ID NO: 1783459 - RNA, 19 nt, Homo sapiens
  misc_RNA (1)...(19): siRNA sense strand
gugaaaagccauuugaugu

SEQ ID NO: 1783460 - RNA, 19 nt, Homo sapiens
  misc_RNA (1)...(19): siRNA sense strand
ugauguaugcggucagaga

SEQ ID NO: 1783461 - RNA, 19 nt, Homo sapiens
  misc_RNA (1)...(19): siRNA sense strand
aagagcaaaucaaagaacu

SEQ ID NO: 1783462 - RNA, 19 nt, Homo sapiens
  misc_RNA (1)...(19): siRNA sense strand
caaaaucgagcaagcuaug

SEQ ID NO: 1783463 - RNA, 19 nt, Homo sapiens
  misc_RNA (1)...(19): siRNA sense strand
gagcagcuugcccaguuuc

SEQ ID NO: 1783464 - RNA, 19 nt, Homo sapiens
  misc_RNA (1)...(19): siRNA sense strand
ggccaguccugagcagcuu

SEQ ID NO: 1783465 - RNA, 19 nt, Homo sapiens
  misc_RNA (1)...(19): siRNA sense strand
gaacaaucugcugaagaca

SEQ ID NO: 1783466 - RNA, 19 nt, Homo sapiens
  misc_RNA (1)...(19): siRNA sense strand
aaagccauuugauguaugc

SEQ ID NO: 1783467 - RNA, 19 nt, Homo sapiens
  misc_RNA (1)...(19): siRNA sense strand
gaaacaacuugaagaagaa

SEQ ID NO: 1783468 - RNA, 19 nt, Homo sapiens
  misc_RNA (1)...(19): siRNA sense strand
ugaaacaacuugaagaaga

SEQ ID NO: 1783469 - RNA, 19 nt, Homo sapiens
  misc_RNA (1)...(19): siRNA sense strand
caaaggaaaugcaaagaag

SEQ ID NO: 1783470 - RNA, 19 nt, Homo sapiens
  misc_RNA (1)...(19): siRNA sense strand
gacagaagauugaaaugug

SEQ ID NO: 1783471 - RNA, 19 nt, Homo sapiens
  misc_RNA (1)...(19): siRNA sense strand
ggagacagaagauugaaau

SEQ ID NO: 1783472 - RNA, 19 nt, Homo sapiens
  misc_RNA (1)...(19): siRNA sense strand
aaacggaaaucggacagaa

SEQ ID NO: 1783473 - RNA, 19 nt, Homo sapiens
  misc_RNA (1)...(19): siRNA sense strand
ggaaccugauguuguuguu

SEQ ID NO: 1783474 - RNA, 19 nt, Homo sapiens
  misc_RNA (1)...(19): siRNA sense strand
gaaccugauguuguuguua

SEQ ID NO: 1783475 - RNA, 19 nt, Homo sapiens
  misc_RNA (1)...(19): siRNA sense strand
aaccugauguuguuguuaa

SEQ ID NO: 1783476 - RNA, 19 nt, Homo sapiens
  misc_RNA (1)...(19): siRNA sense strand
gaaaaugcaagaagaacua

SEQ ID NO: 1783477 - RNA, 19 nt, Homo sapiens
  misc_RNA (1)...(19): siRNA sense strand
uguggaaccugauguuguu

SEQ ID NO: 1783478 - RNA, 19 nt, Homo sapiens
  misc_RNA (1)...(19): siRNA sense strand
ggacagcaugcaagaagga

SEQ ID NO: 1783479 - RNA, 19 nt, Homo sapiens
  misc_RNA (1)...(19): siRNA sense strand
aaaggagacagaagauuga

SEQ ID NO: 1783480 - RNA, 19 nt, Homo sapiens
  misc_RNA (1)...(19): siRNA sense strand
acaaaggaaaugcaaagaa

SEQ ID NO: 1783481 - RNA, 19 nt, Homo sapiens
  misc_RNA (1)...(19): siRNA sense strand
aaacugaaacaacuugaag

SEQ ID NO: 1783482 - RNA, 19 nt, Homo sapiens
  misc_RNA (1)...(19): siRNA sense strand
agacagaagauugaaaugu

SEQ ID NO: 1783483 - RNA, 19 nt, Homo sapiens
  misc_RNA (1)...(19): siRNA sense strand
gcugguacaucgucuucag

SEQ ID NO: 1783484 - RNA, 19 nt, Homo sapiens
  misc_RNA (1)...(19): siRNA sense strand
gaaacggaaaucggacaga

SEQ ID NO: 1783485 - RNA, 19 nt, Homo sapiens
  misc_RNA (1)...(19): siRNA sense strand
ucagcugcauccuucucua

SEQ ID NO: 1783486 - RNA, 19 nt, Homo sapiens
  misc_RNA (1)...(19): siRNA sense strand
gagacagaagauugaaaug

SEQ ID NO: 1783487 - RNA, 19 nt, Homo sapiens
  misc_RNA (1)...(19): siRNA sense strand
cccguugucuggugaagga

SEQ ID NO: 1783488 - RNA, 19 nt, Homo sapiens
  misc_RNA (1)...(19): siRNA sense strand
uuacaaaggaaaugcaaag

SEQ ID NO: 1783489 - RNA, 19 nt, Homo sapiens
  misc_RNA (1)...(19): siRNA sense strand
uuaaacgacaagaagcuuu

SEQ ID NO: 1783490 - RNA, 19 nt, Homo sapiens
  misc_RNA (1)...(19): siRNA sense strand
uaaaugcgcaaguugaaaa

SEQ ID NO: 1783491 - RNA, 19 nt, Homo sapiens
  misc_RNA (1)...(19): siRNA sense strand
aaaaggagacagaagauug

SEQ ID NO: 1783492 - RNA, 19 nt, Homo sapiens
  misc_RNA (1)...(19): siRNA sense strand
guccugggccuuccacuuc

SEQ ID NO: 1783493 - RNA, 19 nt, Homo sapiens
  misc_RNA (1)...(19): siRNA sense strand
cuaaaugcgcaaguugaaa

SEQ ID NO: 1783494 - RNA, 19 nt, Homo sapiens
  misc_RNA (1)...(19): siRNA sense strand
acugaaacaacuugaagaa

SEQ ID NO: 1783495 - RNA, 19 nt, Homo sapiens
  misc_RNA (1)...(19): siRNA sense strand
ugauguuguuguuaaacga

SEQ ID NO: 1783496 - RNA, 19 nt, Homo sapiens
  misc_RNA (1)...(19): siRNA sense strand
ucuacguggucuuucagaa

SEQ ID NO: 1783497 - RNA, 19 nt, Homo sapiens
  misc_RNA (1)...(19): siRNA sense strand
gacugaaaaugcaagaaga

SEQ ID NO: 1783498 - RNA, 19 nt, Homo sapiens
  misc_RNA (1)...(19): siRNA sense strand
acuaaaugcgcaaguugaa

SEQ ID NO: 1783499 - RNA, 19 nt, Homo sapiens
  misc_RNA (1)...(19): siRNA sense strand
ggacagaaauuuaacauug

SEQ ID NO: 1783500 - RNA, 19 nt, Homo sapiens
  misc_RNA (1)...(19): siRNA sense strand
gaaauugccaugauuguuu

SEQ ID NO: 1783501 - RNA, 19 nt, Homo sapiens
  misc_RNA (1)...(19): siRNA sense strand
ccacaguucugauaucuuu

SEQ ID NO: 1783502 - RNA, 19 nt, Homo sapiens
  misc_RNA (1)...(19): siRNA sense strand
gaugacagguuuaauucua

SEQ ID NO: 1783503 - RNA, 19 nt, Homo sapiens
  misc_RNA (1)...(19): siRNA sense strand
gaccagaacugcuaugaug

SEQ ID NO: 1783504 - RNA, 19 nt, Homo sapiens
  misc_RNA (1)...(19): siRNA sense strand
caacagacaugggcauauu

SEQ ID NO: 1783505 - RNA, 19 nt, Homo sapiens
  misc_RNA (1)...(19): siRNA sense strand
gggcauauucuuugaguua

SEQ ID NO: 1783506 - RNA, 19 nt, Homo sapiens
  misc_RNA (1)...(19): siRNA sense strand
gaacugcuaugaugauucu

SEQ ID NO: 1783507 - RNA, 19 nt, Homo sapiens
  misc_RNA (1)...(19): siRNA sense strand
ccauuugguucuaugauua

SEQ ID NO: 1783508 - RNA, 19 nt, Homo sapiens
  misc_RNA (1)...(19): siRNA sense strand
gcaauucacccauuugguu

SEQ ID NO: 1783509 - RNA, 19 nt, Homo sapiens
  misc_RNA (1)...(19): siRNA sense strand
aaacugaggauccaugaua

SEQ ID NO: 1783510 - RNA, 19 nt, Homo sapiens
  misc_RNA (1)...(19): siRNA sense strand
gcaggcaucuuguaucgau

SEQ ID NO: 1783511 - RNA, 19 nt, Homo sapiens
  misc_RNA (1)...(19): siRNA sense strand
caugauaaaugcagacuuc

SEQ ID NO: 1783512 - RNA, 19 nt, Homo sapiens
  misc_RNA (1)...(19): siRNA sense strand
gcuaugaugauucuguuua

SEQ ID NO: 1783513 - RNA, 19 nt, Homo sapiens
  misc_RNA (1)...(19): siRNA sense strand
ggguuuggcuuccucauga

SEQ ID NO: 1783514 - RNA, 19 nt, Homo sapiens
  misc_RNA (1)...(19): siRNA sense strand
cacaaugaauaccugguua

SEQ ID NO: 1783515 - RNA, 19 nt, Homo sapiens
  misc_RNA (1)...(19): siRNA sense strand
gaaaggggcaugaaaauga

SEQ ID NO: 1783516 - RNA, 19 nt, Homo sapiens
  misc_RNA (1)...(19): siRNA sense strand
ugaguuauauccucuguuc

SEQ ID NO: 1783517 - RNA, 19 nt, Homo sapiens
  misc_RNA (1)...(19): siRNA sense strand
augaauaccugguuaguga

SEQ ID NO: 1783518 - RNA, 19 nt, Homo sapiens
  misc_RNA (1)...(19): siRNA sense strand
guuccaagauguacauguu

SEQ ID NO: 1783519 - RNA, 19 nt, Homo sapiens
  misc_RNA (1)...(19): siRNA sense strand
gcaaagccagggacagaaa

SEQ ID NO: 1783520 - RNA, 19 nt, Homo sapiens
  misc_RNA (1)...(19): siRNA sense strand
guaucgaucuggacugaga

SEQ ID NO: 1783521 - RNA, 19 nt, Homo sapiens
  misc_RNA (1)...(19): siRNA sense strand
gaggcaagcucaacauggu

SEQ ID NO: 1783522 - RNA, 19 nt, Homo sapiens
  misc_RNA (1)...(19): siRNA sense strand
gcacuggguuccucuaucg

SEQ ID NO: 1783523 - RNA, 19 nt, Homo sapiens
  misc_RNA (1)...(19): siRNA sense strand
cggcuuaccugguguagug

SEQ ID NO: 1783524 - RNA, 19 nt, Homo sapiens
  misc_RNA (1)...(19): siRNA sense strand
gacagaaauuuaacauugg

SEQ ID NO: 1783525 - RNA, 19 nt, Homo sapiens
  misc_RNA (1)...(19): siRNA sense strand
caacaugguucacauucag

SEQ ID NO: 1783526 - RNA, 19 nt, Homo sapiens
  misc_RNA (1)...(19): siRNA sense strand
agacaugggcauauucuuu

SEQ ID NO: 1783527 - RNA, 19 nt, Homo sapiens
  misc_RNA (1)...(19): siRNA sense strand
gugcggauauggcaauuca

SEQ ID NO: 1783528 - RNA, 19 nt, Homo sapiens
  misc_RNA (1)...(19): siRNA sense strand
ggaaauugccaugauuguu

SEQ ID NO: 1783529 - RNA, 19 nt, Homo sapiens
  misc_RNA (1)...(19): siRNA sense strand
agacuuguuugcaaugauu

SEQ ID NO: 1783530 - RNA, 19 nt, Homo sapiens
  misc_RNA (1)...(19): siRNA sense strand
gaaacggaccagacuguuc

SEQ ID NO: 1783531 - RNA, 19 nt, Homo sapiens
  misc_RNA (1)...(19): siRNA sense strand
uauauccucuguuccaaga

SEQ ID NO: 1783532 - RNA, 19 nt, Homo sapiens
  misc_RNA (1)...(19): siRNA sense strand
gaggucugaugacagguuu

SEQ ID NO: 1783533 - RNA, 19 nt, Homo sapiens
  misc_RNA (1)...(19): siRNA sense strand
gagcaucaaugacgaucca

SEQ ID NO: 1783534 - RNA, 19 nt, Homo sapiens
  misc_RNA (1)...(19): siRNA sense strand
gcuauaguccuggaaauug

SEQ ID NO: 1783535 - RNA, 19 nt, Homo sapiens
  misc_RNA (1)...(19): siRNA sense strand
gacaugggcauauucuuug

SEQ ID NO: 1783536 - RNA, 19 nt, Homo sapiens
  misc_RNA (1)...(19): siRNA sense strand
ccugguuagugaaauauuu

SEQ ID NO: 1783537 - RNA, 19 nt, Homo sapiens
  misc_RNA (1)...(19): siRNA sense strand
gauaaaugcagacuucagu

SEQ ID NO: 1783538 - RNA, 19 nt, Homo sapiens
  misc_RNA (1)...(19): siRNA sense strand
gaauaccugguuagugaaa

SEQ ID NO: 1783539 - RNA, 19 nt, Homo sapiens
  misc_RNA (1)...(19): siRNA sense strand
caagauguacauguuauga

SEQ ID NO: 1783540 - RNA, 19 nt, Homo sapiens
  misc_RNA (1)...(19): siRNA sense strand
uaaggccucugacauugga

SEQ ID NO: 1783541 - RNA, 19 nt, Homo sapiens
  misc_RNA (1)...(19): siRNA sense strand
auaccugguuagugaaaua

SEQ ID NO: 1783542 - RNA, 19 nt, Homo sapiens
  misc_RNA (1)...(19): siRNA sense strand
gcacuauuguacagggaau

SEQ ID NO: 1783543 - RNA, 19 nt, Homo sapiens
  misc_RNA (1)...(19): siRNA sense strand
gccagggacagaaauuuaa

SEQ ID NO: 1783544 - RNA, 19 nt, Homo sapiens
  misc_RNA (1)...(19): siRNA sense strand
ccuggaaauugccaugauu

SEQ ID NO: 1783545 - RNA, 19 nt, Homo sapiens
  misc_RNA (1)...(19): siRNA sense strand
cagaacugcuaugaugauu

SEQ ID NO: 1783546 - RNA, 19 nt, Homo sapiens
  misc_RNA (1)...(19): siRNA sense strand
ucaacaugguucacauuca

SEQ ID NO: 1783547 - RNA, 19 nt, Homo sapiens
  misc_RNA (1)...(19): siRNA sense strand
gauugggacucucuuucug

SEQ ID NO: 1783548 - RNA, 19 nt, Homo sapiens
  misc_RNA (1)...(19): siRNA sense strand
auacuacucagacuuguuu

SEQ ID NO: 1783549 - RNA, 19 nt, Homo sapiens
  misc_RNA (1)...(19): siRNA sense strand
ggucugaugacagguuuaa

SEQ ID NO: 1783550 - RNA, 19 nt, Homo sapiens
  misc_RNA (1)...(19): siRNA sense strand
cccauuugguucuaugauu

SEQ ID NO: 1783551 - RNA, 19 nt, Homo sapiens
  misc_RNA (1)...(19): siRNA sense strand
caaaugcugaucaugacaa

SEQ ID NO: 1783552 - RNA, 19 nt, Homo sapiens
  misc_RNA (1)...(19): siRNA sense strand
ccacaaugaauaccugguu

SEQ ID NO: 1783553 - RNA, 19 nt, Homo sapiens
  misc_RNA (1)...(19): siRNA sense strand
augcugaucaugacaauuu

SEQ ID NO: 1783554 - RNA, 19 nt, Homo sapiens
  misc_RNA (1)...(19): siRNA sense strand
ucugaugacagguuuaauu

SEQ ID NO: 1783555 - RNA, 19 nt, Homo sapiens
  misc_RNA (1)...(19): siRNA sense strand
uagcaggcaucuuguaucg

SEQ ID NO: 1783556 - RNA, 19 nt, Homo sapiens
  misc_RNA (1)...(19): siRNA sense strand
uuuaaggccucugacauug

SEQ ID NO: 1783557 - RNA, 19 nt, Homo sapiens
  misc_RNA (1)...(19): siRNA sense strand
uccaagauguacauguuau

SEQ ID NO: 1783558 - RNA, 19 nt, Homo sapiens
  misc_RNA (1)...(19): siRNA sense strand
gcucaacaugguucacauu

SEQ ID NO: 1783559 - RNA, 19 nt, Homo sapiens
  misc_RNA (1)...(19): siRNA sense strand
ggcauauucuuugaguuau

SEQ ID NO: 1783560 - RNA, 19 nt, Homo sapiens
  misc_RNA (1)...(19): siRNA sense strand
ccauaaccuccacggcuua

SEQ ID NO: 1783561 - RNA, 19 nt, Homo sapiens
  misc_RNA (1)...(19): siRNA sense strand
cuacuaaacugaggaucca

SEQ ID NO: 1783562 - RNA, 19 nt, Homo sapiens
  misc_RNA (1)...(19): siRNA sense strand
ucagacuuguuugcaauga

SEQ ID NO: 1783563 - RNA, 19 nt, Homo sapiens
  misc_RNA (1)...(19): siRNA sense strand
uauccucuguuccaagaug

SEQ ID NO: 1783564 - RNA, 19 nt, Homo sapiens
  misc_RNA (1)...(19): siRNA sense strand
caacaucaccaagccaaca

SEQ ID NO: 1783565 - RNA, 19 nt, Homo sapiens
  misc_RNA (1)...(19): siRNA sense strand
ggaggucugaugacagguu

SEQ ID NO: 1783566 - RNA, 19 nt, Homo sapiens
  misc_RNA (1)...(19): siRNA sense strand
uaacucggccauugcugaa

SEQ ID NO: 1783567 - RNA, 19 nt, Homo sapiens
  misc_RNA (1)...(19): siRNA sense strand
caguguggguaucaaccua

SEQ ID NO: 1783568 - RNA, 19 nt, Homo sapiens
  misc_RNA (1)...(19): siRNA sense strand
gaaccuggagacaaacagu

SEQ ID NO: 1783569 - RNA, 19 nt, Homo sapiens
  misc_RNA (1)...(19): siRNA sense strand
ugcugaaccuggagacaaa

SEQ ID NO: 1783570 - RNA, 19 nt, Homo sapiens
  misc_RNA (1)...(19): siRNA sense strand
ugaagaguccgcauacuac

SEQ ID NO: 1783571 - RNA, 19 nt, Homo sapiens
  misc_RNA (1)...(19): siRNA sense strand
gggacagaaauuuaacauu

SEQ ID NO: 1783572 - RNA, 19 nt, Homo sapiens
  misc_RNA (1)...(19): siRNA sense strand
gaguugcugugggcacuug

SEQ ID NO: 1783573 - RNA, 19 nt, Homo sapiens
  misc_RNA (1)...(19): siRNA sense strand
ggacucucuuucuguggau

SEQ ID NO: 1783574 - RNA, 19 nt, Homo sapiens
  misc_RNA (1)...(19): siRNA sense strand
acucagacuuguuugcaau

SEQ ID NO: 1783575 - RNA, 19 nt, Homo sapiens
  misc_RNA (1)...(19): siRNA sense strand
agccagggacagaaauuua

SEQ ID NO: 1783576 - RNA, 19 nt, Homo sapiens
  misc_RNA (1)...(19): siRNA sense strand
ugaugauucuguuuauugg

SEQ ID NO: 1783577 - RNA, 19 nt, Homo sapiens
  misc_RNA (1)...(19): siRNA sense strand
ccagaacugcuaugaugau

SEQ ID NO: 1783578 - RNA, 19 nt, Homo sapiens
  misc_RNA (1)...(19): siRNA sense strand
aaacagugcagggccauug

SEQ ID NO: 1783579 - RNA, 19 nt, Homo sapiens
  misc_RNA (1)...(19): siRNA sense strand
gcauacuacucagacuugu

SEQ ID NO: 1783580 - RNA, 19 nt, Homo sapiens
  misc_RNA (1)...(19): siRNA sense strand
gcagccacaguucugauau

SEQ ID NO: 1783581 - RNA, 19 nt, Homo sapiens
  misc_RNA (1)...(19): siRNA sense strand
cagccacaguucugauauc

SEQ ID NO: 1783582 - RNA, 19 nt, Homo sapiens
  misc_RNA (1)...(19): siRNA sense strand
ucucugugcuuggauacaa

SEQ ID NO: 1783583 - RNA, 19 nt, Homo sapiens
  misc_RNA (1)...(19): siRNA sense strand
cacccuugcuggaggaguu

SEQ ID NO: 1783584 - RNA, 19 nt, Homo sapiens
  misc_RNA (1)...(19): siRNA sense strand
acaugggcauauucuuuga

SEQ ID NO: 1783585 - RNA, 19 nt, Homo sapiens
  misc_RNA (1)...(19): siRNA sense strand
ggcuguagcaggcaucuug

SEQ ID NO: 1783586 - RNA, 19 nt, Homo sapiens
  misc_RNA (1)...(19): siRNA sense strand
ccacccaaaugcugaucau

SEQ ID NO: 1783587 - RNA, 19 nt, Homo sapiens
  misc_RNA (1)...(19): siRNA sense strand
guuauauccucuguuccaa

SEQ ID NO: 1783588 - RNA, 19 nt, Homo sapiens
  misc_RNA (1)...(19): siRNA sense strand
gagaaaggggcaugaaaau

SEQ ID NO: 1783589 - RNA, 19 nt, Homo sapiens
  misc_RNA (1)...(19): siRNA sense strand
ucacccauuugguucuaug

SEQ ID NO: 1783590 - RNA, 19 nt, Homo sapiens
  misc_RNA (1)...(19): siRNA sense strand
augaagaguccgcauacua

SEQ ID NO: 1783591 - RNA, 19 nt, Homo sapiens
  misc_RNA (1)...(19): siRNA sense strand
aaaugcugaucaugacaau

SEQ ID NO: 1783592 - RNA, 19 nt, Homo sapiens
  misc_RNA (1)...(19): siRNA sense strand
acacgucuauggccaugca

SEQ ID NO: 1783593 - RNA, 19 nt, Homo sapiens
  misc_RNA (1)...(19): siRNA sense strand
uugcaggaauggucucugu

SEQ ID NO: 1783594 - RNA, 19 nt, Homo sapiens
  misc_RNA (1)...(19): siRNA sense strand
aaacggaccagacuguucu

SEQ ID NO: 1783595 - RNA, 19 nt, Homo sapiens
  misc_RNA (1)...(19): siRNA sense strand
gaagaguccgcauacuacu

SEQ ID NO: 1783596 - RNA, 19 nt, Homo sapiens
  misc_RNA (1)...(19): siRNA sense strand
ccuacucguugcugcuuug

SEQ ID NO: 1783597 - RNA, 19 nt, Homo sapiens
  misc_RNA (1)...(19): siRNA sense strand
ggcuauaguccuggaaauu

SEQ ID NO: 1783598 - RNA, 19 nt, Homo sapiens
  misc_RNA (1)...(19): siRNA sense strand
gccaacagacaugggcaua

SEQ ID NO: 1783599 - RNA, 19 nt, Homo sapiens
  misc_RNA (1)...(19): siRNA sense strand
gcaagaagcaggccuccaa

SEQ ID NO: 1783600 - RNA, 19 nt, Homo sapiens
  misc_RNA (1)...(19): siRNA sense strand
cgaaaugccuaucacuuca

SEQ ID NO: 1783601 - RNA, 19 nt, Homo sapiens
  misc_RNA (1)...(19): siRNA sense strand
caucagugcuguugaacuc

SEQ ID NO: 1783602 - RNA, 19 nt, Homo sapiens
  misc_RNA (1)...(19): siRNA sense strand
gcuacgacauggcccgaaa

SEQ ID NO: 1783603 - RNA, 19 nt, Homo sapiens
  misc_RNA (1)...(19): siRNA sense strand
gaauucugguagccucuga

SEQ ID NO: 1783604 - RNA, 19 nt, Homo sapiens
  misc_RNA (1)...(19): siRNA sense strand
ggacagcacaggucacuac

SEQ ID NO: 1783605 - RNA, 19 nt, Homo sapiens
  misc_RNA (1)...(19): siRNA sense strand
uuacaugccuccaccaucu

SEQ ID NO: 1783606 - RNA, 19 nt, Homo sapiens
  misc_RNA (1)...(19): siRNA sense strand
gaaaugccuaucacuucaa

SEQ ID NO: 1783607 - RNA, 19 nt, Homo sapiens
  misc_RNA (1)...(19): siRNA sense strand
ugaggucaccacagagaua

SEQ ID NO: 1783608 - RNA, 19 nt, Homo sapiens
  misc_RNA (1)...(19): siRNA sense strand
gcaccaagagcacaagucu

SEQ ID NO: 1783609 - RNA, 19 nt, Homo sapiens
  misc_RNA (1)...(19): siRNA sense strand
gaggucaccacagagauaa

SEQ ID NO: 1783610 - RNA, 19 nt, Homo sapiens
  misc_RNA (1)...(19): siRNA sense strand
ccgaaaugccuaucacuuc

SEQ ID NO: 1783611 - RNA, 19 nt, Homo sapiens
  misc_RNA (1)...(19): siRNA sense strand
cagcgugucccuagcaaga

SEQ ID NO: 1783612 - RNA, 19 nt, Homo sapiens
  misc_RNA (1)...(19): siRNA sense strand
aguccaagcucaaggucaa

SEQ ID NO: 1783613 - RNA, 19 nt, Homo sapiens
  misc_RNA (1)...(19): siRNA sense strand
aaaggcacuucgccacugu

SEQ ID NO: 1783614 - RNA, 19 nt, Homo sapiens
  misc_RNA (1)...(19): siRNA sense strand
ucaaggggcugguggacaa

SEQ ID NO: 1783615 - RNA, 19 nt, Homo sapiens
  misc_RNA (1)...(19): siRNA sense strand
ugagggcuguggcggacaa

SEQ ID NO: 1783616 - RNA, 19 nt, Homo sapiens
  misc_RNA (1)...(19): siRNA sense strand
gaccguccuugauccucuu

SEQ ID NO: 1783617 - RNA, 19 nt, Homo sapiens
  misc_RNA (1)...(19): siRNA sense strand
cuccaucagugcuguugaa

SEQ ID NO: 1783618 - RNA, 19 nt, Homo sapiens
  misc_RNA (1)...(19): siRNA sense strand
ggucacuacugggcuccaa

SEQ ID NO: 1783619 - RNA, 19 nt, Homo sapiens
  misc_RNA (1)...(19): siRNA sense strand
accaagagcacaagucugu

SEQ ID NO: 1783620 - RNA, 19 nt, Homo sapiens
  misc_RNA (1)...(19): siRNA sense strand
acagagauaaccucaccaa

SEQ ID NO: 1783621 - RNA, 19 nt, Homo sapiens
  misc_RNA (1)...(19): siRNA sense strand
ccacacagggagagaagca

SEQ ID NO: 1783622 - RNA, 19 nt, Homo sapiens
  misc_RNA (1)...(19): siRNA sense strand
agaagcaggccuccaaguc

SEQ ID NO: 1783623 - RNA, 19 nt, Homo sapiens
  misc_RNA (1)...(19): siRNA sense strand
gaagaaaugucagaaauga

SEQ ID NO: 1783624 - RNA, 19 nt, Homo sapiens
  misc_RNA (1)...(19): siRNA sense strand
aaacagagauccuaucaga

SEQ ID NO: 1783625 - RNA, 19 nt, Homo sapiens
  misc_RNA (1)...(19): siRNA sense strand
ggaaccagauuauuugcua

SEQ ID NO: 1783626 - RNA, 19 nt, Homo sapiens
  misc_RNA (1)...(19): siRNA sense strand
ggauacagcucuuacugaa

SEQ ID NO: 1783627 - RNA, 19 nt, Homo sapiens
  misc_RNA (1)...(19): siRNA sense strand
gauagcaguucauuagaaa

SEQ ID NO: 1783628 - RNA, 19 nt, Homo sapiens
  misc_RNA (1)...(19): siRNA sense strand
gaaagaaccaaugaugaua

SEQ ID NO: 1783629 - RNA, 19 nt, Homo sapiens
  misc_RNA (1)...(19): siRNA sense strand
gcagauagcaguucauuag

SEQ ID NO: 1783630 - RNA, 19 nt, Homo sapiens
  misc_RNA (1)...(19): siRNA sense strand
gauauuaccauucagcuuu

SEQ ID NO: 1783631 - RNA, 19 nt, Homo sapiens
  misc_RNA (1)...(19): siRNA sense strand
gaccaaagaagcagagaua

SEQ ID NO: 1783632 - RNA, 19 nt, Homo sapiens
  misc_RNA (1)...(19): siRNA sense strand
ccaaagucauugagaauau

SEQ ID NO: 1783633 - RNA, 19 nt, Homo sapiens
  misc_RNA (1)...(19): siRNA sense strand
gaaggugcauggaggaaga

SEQ ID NO: 1783634 - RNA, 19 nt, Homo sapiens
  misc_RNA (1)...(19): siRNA sense strand
caacagauggugagcuaua

SEQ ID NO: 1783635 - RNA, 19 nt, Homo sapiens
  misc_RNA (1)...(19): siRNA sense strand
gauaucggccuuauguaua

SEQ ID NO: 1783636 - RNA, 19 nt, Homo sapiens
  misc_RNA (1)...(19): siRNA sense strand
ucacacagcuuugauaaca

SEQ ID NO: 1783637 - RNA, 19 nt, Homo sapiens
  misc_RNA (1)...(19): siRNA sense strand
guagaaagccuuggagaaa

SEQ ID NO: 1783638 - RNA, 19 nt, Homo sapiens
  misc_RNA (1)...(19): siRNA sense strand
gacuuggacuggagaauuu

SEQ ID NO: 1783639 - RNA, 19 nt, Homo sapiens
  misc_RNA (1)...(19): siRNA sense strand
uagaugaaaugaccaaaga

SEQ ID NO: 1783640 - RNA, 19 nt, Homo sapiens
  misc_RNA (1)...(19): siRNA sense strand
gcagaaagaaccaaugaug

SEQ ID NO: 1783641 - RNA, 19 nt, Homo sapiens
  misc_RNA (1)...(19): siRNA sense strand
aagcagagauagauaauuc

SEQ ID NO: 1783642 - RNA, 19 nt, Homo sapiens
  misc_RNA (1)...(19): siRNA sense strand
gagagaaaccuccaagaga

SEQ ID NO: 1783643 - RNA, 19 nt, Homo sapiens
  misc_RNA (1)...(19): siRNA sense strand
cagaugaccuuacagacaa

SEQ ID NO: 1783644 - RNA, 19 nt, Homo sapiens
  misc_RNA (1)...(19): siRNA sense strand
cagauuauuugcuagauga

SEQ ID NO: 1783645 - RNA, 19 nt, Homo sapiens
  misc_RNA (1)...(19): siRNA sense strand
uaacagauaucggccuuau

SEQ ID NO: 1783646 - RNA, 19 nt, Homo sapiens
  misc_RNA (1)...(19): siRNA sense strand
cagaggaaccagauuauuu

SEQ ID NO: 1783647 - RNA, 19 nt, Homo sapiens
  misc_RNA (1)...(19): siRNA sense strand
gaaagaagggaaagcaugu

SEQ ID NO: 1783648 - RNA, 19 nt, Homo sapiens
  misc_RNA (1)...(19): siRNA sense strand
guuguuaccggaaauaaua

SEQ ID NO: 1783649 - RNA, 19 nt, Homo sapiens
  misc_RNA (1)...(19): siRNA sense strand
gaacacuaccuccaauaga

SEQ ID NO: 1783650 - RNA, 19 nt, Homo sapiens
  misc_RNA (1)...(19): siRNA sense strand
gagcagaaagaaccaauga

SEQ ID NO: 1783651 - RNA, 19 nt, Homo sapiens
  misc_RNA (1)...(19): siRNA sense strand
cagaauaucccaccaacaa

SEQ ID NO: 1783652 - RNA, 19 nt, Homo sapiens
  misc_RNA (1)...(19): siRNA sense strand
gagagugucuuaucugaac

SEQ ID NO: 1783653 - RNA, 19 nt, Homo sapiens
  misc_RNA (1)...(19): siRNA sense strand
cauccgagcauaagauuaa

SEQ ID NO: 1783654 - RNA, 19 nt, Homo sapiens
  misc_RNA (1)...(19): siRNA sense strand
aaggauacaugcuugauga

SEQ ID NO: 1783655 - RNA, 19 nt, Homo sapiens
  misc_RNA (1)...(19): siRNA sense strand
gggaucaaacaauaaguua

SEQ ID NO: 1783656 - RNA, 19 nt, Homo sapiens
  misc_RNA (1)...(19): siRNA sense strand
ggaaaccugucuccuggau

SEQ ID NO: 1783657 - RNA, 19 nt, Homo sapiens
  misc_RNA (1)...(19): siRNA sense strand
gcaagugaccauugggaaa

SEQ ID NO: 1783658 - RNA, 19 nt, Homo sapiens
  misc_RNA (1)...(19): siRNA sense strand
gaauaucccaccaacaaau

SEQ ID NO: 1783659 - RNA, 19 nt, Homo sapiens
  misc_RNA (1)...(19): siRNA sense strand
gaaaguguuccuacagguu

SEQ ID NO: 1783660 - RNA, 19 nt, Homo sapiens
  misc_RNA (1)...(19): siRNA sense strand
ggaaggagcagaggauuca

SEQ ID NO: 1783661 - RNA, 19 nt, Homo sapiens
  misc_RNA (1)...(19): siRNA sense strand
gagccugaauuccaaugaa

SEQ ID NO: 1783662 - RNA, 19 nt, Homo sapiens
  misc_RNA (1)...(19): siRNA sense strand
gauaauucuucaacuguag

SEQ ID NO: 1783663 - RNA, 19 nt, Homo sapiens
  misc_RNA (1)...(19): siRNA sense strand
caaagaagcagagauagau

SEQ ID NO: 1783664 - RNA, 19 nt, Homo sapiens
  misc_RNA (1)...(19): siRNA sense strand
ggacuuggacuggagaauu

SEQ ID NO: 1783665 - RNA, 19 nt, Homo sapiens
  misc_RNA (1)...(19): siRNA sense strand
caaaagaguccccucaaua

SEQ ID NO: 1783666 - RNA, 19 nt, Homo sapiens
  misc_RNA (1)...(19): siRNA sense strand
gaaacaacaccaagcaaag

SEQ ID NO: 1783667 - RNA, 19 nt, Homo sapiens
  misc_RNA (1)...(19): siRNA sense strand
gagaacacuaccuccaaua

SEQ ID NO: 1783668 - RNA, 19 nt, Homo sapiens
  misc_RNA (1)...(19): siRNA sense strand
ggagaaggugauccaagua

SEQ ID NO: 1783669 - RNA, 19 nt, Homo sapiens
  misc_RNA (1)...(19): siRNA sense strand
gagaaacuacugauaucuu

SEQ ID NO: 1783670 - RNA, 19 nt, Homo sapiens
  misc_RNA (1)...(19): siRNA sense strand
acacagcuuugauaacaga

SEQ ID NO: 1783671 - RNA, 19 nt, Homo sapiens
  misc_RNA (1)...(19): siRNA sense strand
caacaaauacagagagaag

SEQ ID NO: 1783672 - RNA, 19 nt, Homo sapiens
  misc_RNA (1)...(19): siRNA sense strand
agauagcaguucauuagaa

SEQ ID NO: 1783673 - RNA, 19 nt, Homo sapiens
  misc_RNA (1)...(19): siRNA sense strand
gaacgggccauuugugagu

SEQ ID NO: 1783674 - RNA, 19 nt, Homo sapiens
  misc_RNA (1)...(19): siRNA sense strand
cagaaagaaccaaugauga

SEQ ID NO: 1783675 - RNA, 19 nt, Homo sapiens
  misc_RNA (1)...(19): siRNA sense strand
gaagaaaacugugggagau

SEQ ID NO: 1783676 - RNA, 19 nt, Homo sapiens
  misc_RNA (1)...(19): siRNA sense strand
agcagaggaucaugaauuu

SEQ ID NO: 1783677 - RNA, 19 nt, Homo sapiens
  misc_RNA (1)...(19): siRNA sense strand
caaagcagaggaucaugaa

SEQ ID NO: 1783678 - RNA, 19 nt, Homo sapiens
  misc_RNA (1)...(19): siRNA sense strand
gguagaagcaaaugaggaa

SEQ ID NO: 1783679 - RNA, 19 nt, Homo sapiens
  misc_RNA (1)...(19): siRNA sense strand
gaaggaaggagcagaggau

SEQ ID NO: 1783680 - RNA, 19 nt, Homo sapiens
  misc_RNA (1)...(19): siRNA sense strand
agaaggaggcaauguauau

SEQ ID NO: 1783681 - RNA, 19 nt, Homo sapiens
  misc_RNA (1)...(19): siRNA sense strand
acagagauccuaucagaug

SEQ ID NO: 1783682 - RNA, 19 nt, Homo sapiens
  misc_RNA (1)...(19): siRNA sense strand
cuacgacuaucgaagcauu

SEQ ID NO: 1783683 - RNA, 19 nt, Homo sapiens
  misc_RNA (1)...(19): siRNA sense strand
ccaaagaagcagagauaga

SEQ ID NO: 1783684 - RNA, 19 nt, Homo sapiens
  misc_RNA (1)...(19): siRNA sense strand
gaagagcugaugcccgauu

SEQ ID NO: 1783685 - RNA, 19 nt, Homo sapiens
  misc_RNA (1)...(19): siRNA sense strand
gaagggcaaauugguuuaa

SEQ ID NO: 1783686 - RNA, 19 nt, Homo sapiens
  misc_RNA (1)...(19): siRNA sense strand
caacugguggaaauaauga

SEQ ID NO: 1783687 - RNA, 19 nt, Homo sapiens
  misc_RNA (1)...(19): siRNA sense strand
ugaaacaacaccaagcaaa

SEQ ID NO: 1783688 - RNA, 19 nt, Homo sapiens
  misc_RNA (1)...(19): siRNA sense strand
cgauucgggugcuguguuu

SEQ ID NO: 1783689 - RNA, 19 nt, Homo sapiens
  misc_RNA (1)...(19): siRNA sense strand
aaaguguuccuacagguua

SEQ ID NO: 1783690 - RNA, 19 nt, Homo sapiens
  misc_RNA (1)...(19): siRNA sense strand
gaagaaaggagaaaacaga

SEQ ID NO: 1783691 - RNA, 19 nt, Homo sapiens
  misc_RNA (1)...(19): siRNA sense strand
gggaaagcauguaaacaac

SEQ ID NO: 1783692 - RNA, 19 nt, Homo sapiens
  misc_RNA (1)...(19): siRNA sense strand
aaacgaugauagugaugaa

SEQ ID NO: 1783693 - RNA, 19 nt, Homo sapiens
  misc_RNA (1)...(19): siRNA sense strand
aacacuaccuccaauagaa

SEQ ID NO: 1783694 - RNA, 19 nt, Homo sapiens
  misc_RNA (1)...(19): siRNA sense strand
aacaacagauggugagcua

SEQ ID NO: 1783695 - RNA, 19 nt, Homo sapiens
  misc_RNA (1)...(19): siRNA sense strand
gaaauaaugaaggacaguu

SEQ ID NO: 1783696 - RNA, 19 nt, Homo sapiens
  misc_RNA (1)...(19): siRNA sense strand
gggagaugaugaaaguguu

SEQ ID NO: 1783697 - RNA, 19 nt, Homo sapiens
  misc_RNA (1)...(19): siRNA sense strand
cagagauccuaucagauga

SEQ ID NO: 1783698 - RNA, 19 nt, Homo sapiens
  misc_RNA (1)...(19): siRNA sense strand
gaagggaaagcauguaaac

SEQ ID NO: 1783699 - RNA, 19 nt, Homo sapiens
  misc_RNA (1)...(19): siRNA sense strand
ucacuucauuccuacuuug

SEQ ID NO: 1783700 - RNA, 19 nt, Homo sapiens
  misc_RNA (1)...(19): siRNA sense strand
gaacccaaagucauugaga

SEQ ID NO: 1783701 - RNA, 19 nt, Homo sapiens
  misc_RNA (1)...(19): siRNA sense strand
ugucugaaauuccggagaa

SEQ ID NO: 1783702 - RNA, 19 nt, Homo sapiens
  misc_RNA (1)...(19): siRNA sense strand
gagaccagaucauuuuaaa

SEQ ID NO: 1783703 - RNA, 19 nt, Homo sapiens
  misc_RNA (1)...(19): siRNA sense strand
gcagagauagauaauucuu

SEQ ID NO: 1783704 - RNA, 19 nt, Homo sapiens
  misc_RNA (1)...(19): siRNA sense strand
cagcuuugauaacagauau

SEQ ID NO: 1783705 - RNA, 19 nt, Homo sapiens
  misc_RNA (1)...(19): siRNA sense strand
gagaaaaucacacagcuuu

SEQ ID NO: 1783706 - RNA, 19 nt, Homo sapiens
  misc_RNA (1)...(19): siRNA sense strand
cuggaucucuuguggauau

SEQ ID NO: 1783707 - RNA, 19 nt, Homo sapiens
  misc_RNA (1)...(19): siRNA sense strand
aagcagaggaucaugaauu

SEQ ID NO: 1783708 - RNA, 19 nt, Homo sapiens
  misc_RNA (1)...(19): siRNA sense strand
cgaugauagugaugaauau

SEQ ID NO: 1783709 - RNA, 19 nt, Homo sapiens
  misc_RNA (1)...(19): siRNA sense strand
accaaucacuucauuccua

SEQ ID NO: 1783710 - RNA, 19 nt, Homo sapiens
  misc_RNA (1)...(19): siRNA sense strand
gagaauauuagggaucaaa

SEQ ID NO: 1783711 - RNA, 19 nt, Homo sapiens
  misc_RNA (1)...(19): siRNA sense strand
ucacggagaaugcugugua

SEQ ID NO: 1783712 - RNA, 19 nt, Homo sapiens
  misc_RNA (1)...(19): siRNA sense strand
cggagaaggugauccaagu

SEQ ID NO: 1783713 - RNA, 19 nt, Homo sapiens
  misc_RNA (1)...(19): siRNA sense strand
ggugcuguguuuacauuug

SEQ ID NO: 1783714 - RNA, 19 nt, Homo sapiens
  misc_RNA (1)...(19): siRNA sense strand
gcaacugguggaaauaaug

SEQ ID NO: 1783715 - RNA, 19 nt, Homo sapiens
  misc_RNA (1)...(19): siRNA sense strand
gucagaaucaucagaauau

SEQ ID NO: 1783716 - RNA, 19 nt, Homo sapiens
  misc_RNA (1)...(19): siRNA sense strand
gcacguaugcggcgaagag

SEQ ID NO: 1783717 - RNA, 19 nt, Homo sapiens
  misc_RNA (1)...(19): siRNA sense strand
acagauaucggccuuaugu

SEQ ID NO: 1783718 - RNA, 19 nt, Homo sapiens
  misc_RNA (1)...(19): siRNA sense strand
agaaugcuguguauaccuu

SEQ ID NO: 1783719 - RNA, 19 nt, Homo sapiens
  misc_RNA (1)...(19): siRNA sense strand
gcaagagguagaagcaaau

SEQ ID NO: 1783720 - RNA, 19 nt, Homo sapiens
  misc_RNA (1)...(19): siRNA sense strand
ugugggagaugaugaaagu

SEQ ID NO: 1783721 - RNA, 19 nt, Homo sapiens
  misc_RNA (1)...(19): siRNA sense strand
cauaggagaccagaucauu

SEQ ID NO: 1783722 - RNA, 19 nt, Homo sapiens
  misc_RNA (1)...(19): siRNA sense strand
agaaagaaccaaugaugau

SEQ ID NO: 1783723 - RNA, 19 nt, Homo sapiens
  misc_RNA (1)...(19): siRNA sense strand
ggaggaagaucaagaauaa

SEQ ID NO: 1783724 - RNA, 19 nt, Homo sapiens
  misc_RNA (1)...(19): siRNA sense strand
ggagaaagaagaaagaaua

SEQ ID NO: 1783725 - RNA, 19 nt, Homo sapiens
  misc_RNA (1)...(19): siRNA sense strand
ccagaaaccugcugaucua

SEQ ID NO: 1783726 - RNA, 19 nt, Homo sapiens
  misc_RNA (1)...(19): siRNA sense strand
gaaaguaggagaaagaaga

SEQ ID NO: 1783727 - RNA, 19 nt, Homo sapiens
  misc_RNA (1)...(19): siRNA sense strand
caacauccaucaagacaga

SEQ ID NO: 1783728 - RNA, 19 nt, Homo sapiens
  misc_RNA (1)...(19): siRNA sense strand
uccagaagcuucagacuuu

SEQ ID NO: 1783729 - RNA, 19 nt, Homo sapiens
  misc_RNA (1)...(19): siRNA sense strand
uaagauuucugcucaggaa

SEQ ID NO: 1783730 - RNA, 19 nt, Homo sapiens
  misc_RNA (1)...(19): siRNA sense strand
gaaugauccuuuccucuca

SEQ ID NO: 1783731 - RNA, 19 nt, Homo sapiens
  misc_RNA (1)...(19): siRNA sense strand
ggagaaggcccugaagaaa

SEQ ID NO: 1783732 - RNA, 19 nt, Homo sapiens
  misc_RNA (1)...(19): siRNA sense strand
gaaaccugcugaucuacga

SEQ ID NO: 1783733 - RNA, 19 nt, Homo sapiens
  misc_RNA (1)...(19): siRNA sense strand
ccucacggcuccucauaaa

SEQ ID NO: 1783734 - RNA, 19 nt, Homo sapiens
  misc_RNA (1)...(19): siRNA sense strand
gagaaaugguaccugucua

SEQ ID NO: 1783735 - RNA, 19 nt, Homo sapiens
  misc_RNA (1)...(19): siRNA sense strand
gcaccugccucaugguugu

SEQ ID NO: 1783736 - RNA, 19 nt, Homo sapiens
  misc_RNA (1)...(19): siRNA sense strand
agacagagccaauuacaga

SEQ ID NO: 1783737 - RNA, 19 nt, Homo sapiens
  misc_RNA (1)...(19): siRNA sense strand
gccagaccauuauuccuaa

SEQ ID NO: 1783738 - RNA, 19 nt, Homo sapiens
  misc_RNA (1)...(19): siRNA sense strand
uuucuaaacuucucuccua

SEQ ID NO: 1783739 - RNA, 19 nt, Homo sapiens
  misc_RNA (1)...(19): siRNA sense strand
ugaaguggaucaguuucua

SEQ ID NO: 1783740 - RNA, 19 nt, Homo sapiens
  misc_RNA (1)...(19): siRNA sense strand
gaaguggaucaguuucuaa

SEQ ID NO: 1783741 - RNA, 19 nt, Homo sapiens
  misc_RNA (1)...(19): siRNA sense strand
acgaugagguggaaaguga

SEQ ID NO: 1783742 - RNA, 19 nt, Homo sapiens
  misc_RNA (1)...(19): siRNA sense strand
gcuggagccucaugaagug

SEQ ID NO: 1783743 - RNA, 19 nt, Homo sapiens
  misc_RNA (1)...(19): siRNA sense strand
gagaagagugugucaaugg

SEQ ID NO: 1783744 - RNA, 19 nt, Homo sapiens
  misc_RNA (1)...(19): siRNA sense strand
ccagugacagcuucaauga

SEQ ID NO: 1783745 - RNA, 19 nt, Homo sapiens
  misc_RNA (1)...(19): siRNA sense strand
cuagagaacacuaauagga

SEQ ID NO: 1783746 - RNA, 19 nt, Homo sapiens
  misc_RNA (1)...(19): siRNA sense strand
cuaaacuucucuccuaaag

SEQ ID NO: 1783747 - RNA, 19 nt, Homo sapiens
  misc_RNA (1)...(19): siRNA sense strand
gaucuuccccauuucauua

SEQ ID NO: 1783748 - RNA, 19 nt, Homo sapiens
  misc_RNA (1)...(19): siRNA sense strand
caaugacgaugagguggaa

SEQ ID NO: 1783749 - RNA, 19 nt, Homo sapiens
  misc_RNA (1)...(19): siRNA sense strand
ucucgaaccugcaaguuag

SEQ ID NO: 1783750 - RNA, 19 nt, Homo sapiens
  misc_RNA (1)...(19): siRNA sense strand
aaaguggagucuuguucaa

SEQ ID NO: 1783751 - RNA, 19 nt, Homo sapiens
  misc_RNA (1)...(19): siRNA sense strand
gaaccuccucuggaaauga

SEQ ID NO: 1783752 - RNA, 19 nt, Homo sapiens
  misc_RNA (1)...(19): siRNA sense strand
agaagagugugucaaugga

SEQ ID NO: 1783753 - RNA, 19 nt, Homo sapiens
  misc_RNA (1)...(19): siRNA sense strand
cggaggaagaucaagaaua

SEQ ID NO: 1783754 - RNA, 19 nt, Homo sapiens
  misc_RNA (1)...(19): siRNA sense strand
caagacagagccaauuaca

SEQ ID NO: 1783755 - RNA, 19 nt, Homo sapiens
  misc_RNA (1)...(19): siRNA sense strand
ggaaccuccucuggaaaug

SEQ ID NO: 1783756 - RNA, 19 nt, Homo sapiens
  misc_RNA (1)...(19): siRNA sense strand
gaggagaaggcccugaaga

SEQ ID NO: 1783757 - RNA, 19 nt, Homo sapiens
  misc_RNA (1)...(19): siRNA sense strand
gguggaaagugagaaaugg

SEQ ID NO: 1783758 - RNA, 19 nt, Homo sapiens
  misc_RNA (1)...(19): siRNA sense strand
ggacucuccuucagcaacu

SEQ ID NO: 1783759 - RNA, 19 nt, Homo sapiens
  misc_RNA (1)...(19): siRNA sense strand
caggaaaguaggagaaaga

SEQ ID NO: 1783760 - RNA, 19 nt, Homo sapiens
  misc_RNA (1)...(19): siRNA sense strand
gagaaggcccugaagaaaa

SEQ ID NO: 1783761 - RNA, 19 nt, Homo sapiens
  misc_RNA (1)...(19): siRNA sense strand
cuacagacuucccuucaac

SEQ ID NO: 1783762 - RNA, 19 nt, Homo sapiens
  misc_RNA (1)...(19): siRNA sense strand
ggaggggaaugaaacacua

SEQ ID NO: 1783763 - RNA, 19 nt, Homo sapiens
  misc_RNA (1)...(19): siRNA sense strand
gagaaagaagaaagaauac

SEQ ID NO: 1783764 - RNA, 19 nt, Homo sapiens
  misc_RNA (1)...(19): siRNA sense strand
guaggagaaagaagaaaga

SEQ ID NO: 1783765 - RNA, 19 nt, Homo sapiens
  misc_RNA (1)...(19): siRNA sense strand
cagagaagagugugucaau

SEQ ID NO: 1783766 - RNA, 19 nt, Homo sapiens
  misc_RNA (1)...(19): siRNA sense strand
ggaagaucaagaauaagau

SEQ ID NO: 1783767 - RNA, 19 nt, Homo sapiens
  misc_RNA (1)...(19): siRNA sense strand
gcuccugaaugauccuuuc

SEQ ID NO: 1783768 - RNA, 19 nt, Homo sapiens
  misc_RNA (1)...(19): siRNA sense strand
ugacagaggaggagaagag

SEQ ID NO: 1783769 - RNA, 19 nt, Homo sapiens
  misc_RNA (1)...(19): siRNA sense strand
ccugaucgcugagggcuau

SEQ ID NO: 1783770 - RNA, 19 nt, Homo sapiens
  misc_RNA (1)...(19): siRNA sense strand
gaaaugguaccugucuaca

SEQ ID NO: 1783771 - RNA, 19 nt, Homo sapiens
  misc_RNA (1)...(19): siRNA sense strand
gcucaggaaaguaggagaa

SEQ ID NO: 1783772 - RNA, 19 nt, Homo sapiens
  misc_RNA (1)...(19): siRNA sense strand
ccagaccauuauuccuaaa

SEQ ID NO: 1783773 - RNA, 19 nt, Homo sapiens
  misc_RNA (1)...(19): siRNA sense strand
gaucuacgaggaacauucu

SEQ ID NO: 1783774 - RNA, 19 nt, Homo sapiens
  misc_RNA (1)...(19): siRNA sense strand
ccagaagcuucagacuuug

SEQ ID NO: 1783775 - RNA, 19 nt, Homo sapiens
  misc_RNA (1)...(19): siRNA sense strand
ucaugaaguggaucaguuu

SEQ ID NO: 1783776 - RNA, 19 nt, Homo sapiens
  misc_RNA (1)...(19): siRNA sense strand
caucaagacagagccaauu

SEQ ID NO: 1783777 - RNA, 19 nt, Homo sapiens
  misc_RNA (1)...(19): siRNA sense strand
aggaagaucaagaauaaga

SEQ ID NO: 1783778 - RNA, 19 nt, Homo sapiens
  misc_RNA (1)...(19): siRNA sense strand
agagaagagugugucaaug

SEQ ID NO: 1783779 - RNA, 19 nt, Homo sapiens
  misc_RNA (1)...(19): siRNA sense strand
aaaguaggagaaagaagaa

SEQ ID NO: 1783780 - RNA, 19 nt, Homo sapiens
  misc_RNA (1)...(19): siRNA sense strand
cucaugaaguggaucaguu

SEQ ID NO: 1783781 - RNA, 19 nt, Homo sapiens
  misc_RNA (1)...(19): siRNA sense strand
cuggagaagucagugcuuu

SEQ ID NO: 1783782 - RNA, 19 nt, Homo sapiens
  misc_RNA (1)...(19): siRNA sense strand
ccaaauugccccugucaaa

SEQ ID NO: 1783783 - RNA, 19 nt, Homo sapiens
  misc_RNA (1)...(19): siRNA sense strand
ugccagaccauuauuccua

SEQ ID NO: 1783784 - RNA, 19 nt, Homo sapiens
  misc_RNA (1)...(19): siRNA sense strand
agaaggcccugaagaaaau

SEQ ID NO: 1783785 - RNA, 19 nt, Homo sapiens
  misc_RNA (1)...(19): siRNA sense strand
cagcuucaaugacgaugag

SEQ ID NO: 1783786 - RNA, 19 nt, Homo sapiens
  misc_RNA (1)...(19): siRNA sense strand
aggagaaggcccugaagaa

SEQ ID NO: 1783787 - RNA, 19 nt, Homo sapiens
  misc_RNA (1)...(19): siRNA sense strand
ucacggcuccucauaaacu

SEQ ID NO: 1783788 - RNA, 19 nt, Homo sapiens
  misc_RNA (1)...(19): siRNA sense strand
gugcuuugccguugcauuc

SEQ ID NO: 1783789 - RNA, 19 nt, Homo sapiens
  misc_RNA (1)...(19): siRNA sense strand
uggaaagugagaaauggua

SEQ ID NO: 1783790 - RNA, 19 nt, Homo sapiens
  misc_RNA (1)...(19): siRNA sense strand
ucuacagacuucccuucaa

SEQ ID NO: 1783791 - RNA, 19 nt, Homo sapiens
  misc_RNA (1)...(19): siRNA sense strand
aaccuccucuggaaaugaa

SEQ ID NO: 1783792 - RNA, 19 nt, Homo sapiens
  misc_RNA (1)...(19): siRNA sense strand
ggaaugaaacacuaaaagu

SEQ ID NO: 1783793 - RNA, 19 nt, Homo sapiens
  misc_RNA (1)...(19): siRNA sense strand
gcucugcccagccagcauu

SEQ ID NO: 1783794 - RNA, 19 nt, Homo sapiens
  misc_RNA (1)...(19): siRNA sense strand
ggacucguuccgucuguca

SEQ ID NO: 1783795 - RNA, 19 nt, Homo sapiens
  misc_RNA (1)...(19): siRNA sense strand
cagaggagaaggcccugaa

SEQ ID NO: 1783796 - RNA, 19 nt, Homo sapiens
  misc_RNA (1)...(19): siRNA sense strand
gcauucggcagcuucuuuc

SEQ ID NO: 1783797 - RNA, 19 nt, Homo sapiens
  misc_RNA (1)...(19): siRNA sense strand
gaugagguggaaagugaga

SEQ ID NO: 1783798 - RNA, 19 nt, Homo sapiens
  misc_RNA (1)...(19): siRNA sense strand
gagucuuguucaacugaga

SEQ ID NO: 1783799 - RNA, 19 nt, Homo sapiens
  misc_RNA (1)...(19): siRNA sense strand
ccuucaacauccaucaaga

SEQ ID NO: 1783800 - RNA, 19 nt, Homo sapiens
  misc_RNA (1)...(19): siRNA sense strand
guagaacucgacagaagag

SEQ ID NO: 1783801 - RNA, 19 nt, Homo sapiens
  misc_RNA (1)...(19): siRNA sense strand
uuguagaacucgacagaag

SEQ ID NO: 1783802 - RNA, 19 nt, Homo sapiens
  misc_RNA (1)...(19): siRNA sense strand
gcaccuggucagcgccaaa

SEQ ID NO: 1783803 - RNA, 19 nt, Homo sapiens
  misc_RNA (1)...(19): siRNA sense strand
guggugagauccagaaacc

SEQ ID NO: 1783804 - RNA, 19 nt, Homo sapiens
  misc_RNA (1)...(19): siRNA sense strand
ugagaaaugguaccugucu

SEQ ID NO: 1783805 - RNA, 19 nt, Homo sapiens
  misc_RNA (1)...(19): siRNA sense strand
cccauuucauuaucucgaa

SEQ ID NO: 1783806 - RNA, 19 nt, Homo sapiens
  misc_RNA (1)...(19): siRNA sense strand
ggaaaguaggagaaagaag

SEQ ID NO: 1783807 - RNA, 19 nt, Homo sapiens
  misc_RNA (1)...(19): siRNA sense strand
uaaacuucucuccuaaaga

SEQ ID NO: 1783808 - RNA, 19 nt, Homo sapiens
  misc_RNA (1)...(19): siRNA sense strand
ugagguggaaagugagaaa

SEQ ID NO: 1783809 - RNA, 19 nt, Homo sapiens
  misc_RNA (1)...(19): siRNA sense strand
gcuucagacuuuggugaug

SEQ ID NO: 1783810 - RNA, 19 nt, Homo sapiens
  misc_RNA (1)...(19): siRNA sense strand
ugaagaaaauucggaggaa

SEQ ID NO: 1783811 - RNA, 19 nt, Homo sapiens
  misc_RNA (1)...(19): siRNA sense strand
caaauugccccugucaaaa

SEQ ID NO: 1783812 - RNA, 19 nt, Homo sapiens
  misc_RNA (1)...(19): siRNA sense strand
uaagcuggagccucaugaa

SEQ ID NO: 1783813 - RNA, 19 nt, Homo sapiens
  misc_RNA (1)...(19): siRNA sense strand
aucaagacagagccaauua

SEQ ID NO: 1783814 - RNA, 19 nt, Homo sapiens
  misc_RNA (1)...(19): siRNA sense strand
ggagaagaggacccugauc

SEQ ID NO: 1783815 - RNA, 19 nt, Homo sapiens
  misc_RNA (1)...(19): siRNA sense strand
ccucgugccagaccauuau

SEQ ID NO: 1783816 - RNA, 19 nt, Homo sapiens
  misc_RNA (1)...(19): siRNA sense strand
cagccuccguggugagauc

SEQ ID NO: 1783817 - RNA, 19 nt, Homo sapiens
  misc_RNA (1)...(19): siRNA sense strand
ucaggaaaguaggagaaag

SEQ ID NO: 1783818 - RNA, 19 nt, Homo sapiens
  misc_RNA (1)...(19): siRNA sense strand
ucuaaacuucucuccuaaa

SEQ ID NO: 1783819 - RNA, 19 nt, Homo sapiens
  misc_RNA (1)...(19): siRNA sense strand
ggaggaagaucaagaauaa

SEQ ID NO: 1783820 - RNA, 19 nt, Homo sapiens
  misc_RNA (1)...(19): siRNA sense strand
ggagaaagaagaaagaaua

SEQ ID NO: 1783821 - RNA, 19 nt, Homo sapiens
  misc_RNA (1)...(19): siRNA sense strand
ccagaaaccugcugaucua

SEQ ID NO: 1783822 - RNA, 19 nt, Homo sapiens
  misc_RNA (1)...(19): siRNA sense strand
gaaaguaggagaaagaaga

SEQ ID NO: 1783823 - RNA, 19 nt, Homo sapiens
  misc_RNA (1)...(19): siRNA sense strand
caacauccaucaagacaga

SEQ ID NO: 1783824 - RNA, 19 nt, Homo sapiens
  misc_RNA (1)...(19): siRNA sense strand
uccagaagcuucagacuuu

SEQ ID NO: 1783825 - RNA, 19 nt, Homo sapiens
  misc_RNA (1)...(19): siRNA sense strand
uaagauuucugcucaggaa

SEQ ID NO: 1783826 - RNA, 19 nt, Homo sapiens
  misc_RNA (1)...(19): siRNA sense strand
gaaugauccuuuccucuca

SEQ ID NO: 1783827 - RNA, 19 nt, Homo sapiens
  misc_RNA (1)...(19): siRNA sense strand
ggagaaggcccugaagaaa

SEQ ID NO: 1783828 - RNA, 19 nt, Homo sapiens
  misc_RNA (1)...(19): siRNA sense strand
gaaaccugcugaucuacga

SEQ ID NO: 1783829 - RNA, 19 nt, Homo sapiens
  misc_RNA (1)...(19): siRNA sense strand
ccucacggcuccucauaaa

SEQ ID NO: 1783830 - RNA, 19 nt, Homo sapiens
  misc_RNA (1)...(19): siRNA sense strand
gagaaaugguaccugucua

SEQ ID NO: 1783831 - RNA, 19 nt, Homo sapiens
  misc_RNA (1)...(19): siRNA sense strand
gcaccugccucaugguugu

SEQ ID NO: 1783832 - RNA, 19 nt, Homo sapiens
  misc_RNA (1)...(19): siRNA sense strand
agacagagccaauuacaga

SEQ ID NO: 1783833 - RNA, 19 nt, Homo sapiens
  misc_RNA (1)...(19): siRNA sense strand
gccagaccauuauuccuaa

SEQ ID NO: 1783834 - RNA, 19 nt, Homo sapiens
  misc_RNA (1)...(19): siRNA sense strand
uuucuaaacuucucuccua

SEQ ID NO: 1783835 - RNA, 19 nt, Homo sapiens
  misc_RNA (1)...(19): siRNA sense strand
ugaaguggaucaguuucua

SEQ ID NO: 1783836 - RNA, 19 nt, Homo sapiens
  misc_RNA (1)...(19): siRNA sense strand
gaaguggaucaguuucuaa

SEQ ID NO: 1783837 - RNA, 19 nt, Homo sapiens
  misc_RNA (1)...(19): siRNA sense strand
acgaugagguggaaaguga

SEQ ID NO: 1783838 - RNA, 19 nt, Homo sapiens
  misc_RNA (1)...(19): siRNA sense strand
gcuggagccucaugaagug

SEQ ID NO: 1783839 - RNA, 19 nt, Homo sapiens
  misc_RNA (1)...(19): siRNA sense strand
gagaagagugugucaaugg

SEQ ID NO: 1783840 - RNA, 19 nt, Homo sapiens
  misc_RNA (1)...(19): siRNA sense strand
ccagugacagcuucaauga

SEQ ID NO: 1783841 - RNA, 19 nt, Homo sapiens
  misc_RNA (1)...(19): siRNA sense strand
cuagagaacacuaauagga

SEQ ID NO: 1783842 - RNA, 19 nt, Homo sapiens
  misc_RNA (1)...(19): siRNA sense strand
cuaaacuucucuccuaaag

SEQ ID NO: 1783843 - RNA, 19 nt, Homo sapiens
  misc_RNA (1)...(19): siRNA sense strand
gaucuuccccauuucauua

SEQ ID NO: 1783844 - RNA, 19 nt, Homo sapiens
  misc_RNA (1)...(19): siRNA sense strand
caaugacgaugagguggaa

SEQ ID NO: 1783845 - RNA, 19 nt, Homo sapiens
  misc_RNA (1)...(19): siRNA sense strand
ucucgaaccugcaaguuag

SEQ ID NO: 1783846 - RNA, 19 nt, Homo sapiens
  misc_RNA (1)...(19): siRNA sense strand
aaaguggagucuuguucaa

SEQ ID NO: 1783847 - RNA, 19 nt, Homo sapiens
  misc_RNA (1)...(19): siRNA sense strand
gaaccuccucuggaaauga

SEQ ID NO: 1783848 - RNA, 19 nt, Homo sapiens
  misc_RNA (1)...(19): siRNA sense strand
agaagagugugucaaugga

SEQ ID NO: 1783849 - RNA, 19 nt, Homo sapiens
  misc_RNA (1)...(19): siRNA sense strand
cggaggaagaucaagaaua

SEQ ID NO: 1783850 - RNA, 19 nt, Homo sapiens
  misc_RNA (1)...(19): siRNA sense strand
caagacagagccaauuaca

SEQ ID NO: 1783851 - RNA, 19 nt, Homo sapiens
  misc_RNA (1)...(19): siRNA sense strand
ggaaccuccucuggaaaug

SEQ ID NO: 1783852 - RNA, 19 nt, Homo sapiens
  misc_RNA (1)...(19): siRNA sense strand
gaggagaaggcccugaaga

SEQ ID NO: 1783853 - RNA, 19 nt, Homo sapiens
  misc_RNA (1)...(19): siRNA sense strand
gguggaaagugagaaaugg

SEQ ID NO: 1783854 - RNA, 19 nt, Homo sapiens
  misc_RNA (1)...(19): siRNA sense strand
ggacucuccuucagcaacu

SEQ ID NO: 1783855 - RNA, 19 nt, Homo sapiens
  misc_RNA (1)...(19): siRNA sense strand
caggaaaguaggagaaaga

SEQ ID NO: 1783856 - RNA, 19 nt, Homo sapiens
  misc_RNA (1)...(19): siRNA sense strand
gagaaggcccugaagaaaa

SEQ ID NO: 1783857 - RNA, 19 nt, Homo sapiens
  misc_RNA (1)...(19): siRNA sense strand
cuacagacuucccuucaac

SEQ ID NO: 1783858 - RNA, 19 nt, Homo sapiens
  misc_RNA (1)...(19): siRNA sense strand
ggaggggaaugaaacacua

SEQ ID NO: 1783859 - RNA, 19 nt, Homo sapiens
  misc_RNA (1)...(19): siRNA sense strand
gagaaagaagaaagaauac

SEQ ID NO: 1783860 - RNA, 19 nt, Homo sapiens
  misc_RNA (1)...(19): siRNA sense strand
guaggagaaagaagaaaga

SEQ ID NO: 1783861 - RNA, 19 nt, Homo sapiens
  misc_RNA (1)...(19): siRNA sense strand
cagagaagagugugucaau

SEQ ID NO: 1783862 - RNA, 19 nt, Homo sapiens
  misc_RNA (1)...(19): siRNA sense strand
ggaagaucaagaauaagau

SEQ ID NO: 1783863 - RNA, 19 nt, Homo sapiens
  misc_RNA (1)...(19): siRNA sense strand
gcuccugaaugauccuuuc

SEQ ID NO: 1783864 - RNA, 19 nt, Homo sapiens
  misc_RNA (1)...(19): siRNA sense strand
ugacagaggaggagaagag

SEQ ID NO: 1783865 - RNA, 19 nt, Homo sapiens
  misc_RNA (1)...(19): siRNA sense strand
ccugaucgcugagggcuau

SEQ ID NO: 1783866 - RNA, 19 nt, Homo sapiens
  misc_RNA (1)...(19): siRNA sense strand
gaaaugguaccugucuaca

SEQ ID NO: 1783867 - RNA, 19 nt, Homo sapiens
  misc_RNA (1)...(19): siRNA sense strand
gcucaggaaaguaggagaa

SEQ ID NO: 1783868 - RNA, 19 nt, Homo sapiens
  misc_RNA (1)...(19): siRNA sense strand
ccagaccauuauuccuaaa

SEQ ID NO: 1783869 - RNA, 19 nt, Homo sapiens
  misc_RNA (1)...(19): siRNA sense strand
gaucuacgaggaacauucu

SEQ ID NO: 1783870 - RNA, 19 nt, Homo sapiens
  misc_RNA (1)...(19): siRNA sense strand
ccagaagcuucagacuuug

SEQ ID NO: 1783871 - RNA, 19 nt, Homo sapiens
  misc_RNA (1)...(19): siRNA sense strand
ucaugaaguggaucaguuu

SEQ ID NO: 1783872 - RNA, 19 nt, Homo sapiens
  misc_RNA (1)...(19): siRNA sense strand
caucaagacagagccaauu

SEQ ID NO: 1783873 - RNA, 19 nt, Homo sapiens
  misc_RNA (1)...(19): siRNA sense strand
aggaagaucaagaauaaga

SEQ ID NO: 1783874 - RNA, 19 nt, Homo sapiens
  misc_RNA (1)...(19): siRNA sense strand
agagaagagugugucaaug

SEQ ID NO: 1783875 - RNA, 19 nt, Homo sapiens
  misc_RNA (1)...(19): siRNA sense strand
aaaguaggagaaagaagaa

SEQ ID NO: 1783876 - RNA, 19 nt, Homo sapiens
  misc_RNA (1)...(19): siRNA sense strand
cucaugaaguggaucaguu

SEQ ID NO: 1783877 - RNA, 19 nt, Homo sapiens
  misc_RNA (1)...(19): siRNA sense strand
cuggagaagucagugcuuu

SEQ ID NO: 1783878 - RNA, 19 nt, Homo sapiens
  misc_RNA (1)...(19): siRNA sense strand
ccaaauugccccugucaaa

SEQ ID NO: 1783879 - RNA, 19 nt, Homo sapiens
  misc_RNA (1)...(19): siRNA sense strand
ugccagaccauuauuccua

SEQ ID NO: 1783880 - RNA, 19 nt, Homo sapiens
  misc_RNA (1)...(19): siRNA sense strand
agaaggcccugaagaaaau

SEQ ID NO: 1783881 - RNA, 19 nt, Homo sapiens
  misc_RNA (1)...(19): siRNA sense strand
cagcuucaaugacgaugag

SEQ ID NO: 1783882 - RNA, 19 nt, Homo sapiens
  misc_RNA (1)...(19): siRNA sense strand
aggagaaggcccugaagaa

SEQ ID NO: 1783883 - RNA, 19 nt, Homo sapiens
  misc_RNA (1)...(19): siRNA sense strand
ucacggcuccucauaaacu

SEQ ID NO: 1783884 - RNA, 19 nt, Homo sapiens
  misc_RNA (1)...(19): siRNA sense strand
gugcuuugccguugcauuc

SEQ ID NO: 1783885 - RNA, 19 nt, Homo sapiens
  misc_RNA (1)...(19): siRNA sense strand
uggaaagugagaaauggua

SEQ ID NO: 1783886 - RNA, 19 nt, Homo sapiens
  misc_RNA (1)...(19): siRNA sense strand
ucuacagacuucccuucaa

SEQ ID NO: 1783887 - RNA, 19 nt, Homo sapiens
  misc_RNA (1)...(19): siRNA sense strand
aaccuccucuggaaaugaa

SEQ ID NO: 1783888 - RNA, 19 nt, Homo sapiens
  misc_RNA (1)...(19): siRNA sense strand
ggaaugaaacacuaaaagu

SEQ ID NO: 1783889 - RNA, 19 nt, Homo sapiens
  misc_RNA (1)...(19): siRNA sense strand
gcucugcccagccagcauu

SEQ ID NO: 1783890 - RNA, 19 nt, Homo sapiens
  misc_RNA (1)...(19): siRNA sense strand
ggacucguuccgucuguca

SEQ ID NO: 1783891 - RNA, 19 nt, Homo sapiens
  misc_RNA (1)...(19): siRNA sense strand
cagaggagaaggcccugaa

SEQ ID NO: 1783892 - RNA, 19 nt, Homo sapiens
  misc_RNA (1)...(19): siRNA sense strand
gcauucggcagcuucuuuc

SEQ ID NO: 1783893 - RNA, 19 nt, Homo sapiens
  misc_RNA (1)...(19): siRNA sense strand
gaugagguggaaagugaga

SEQ ID NO: 1783894 - RNA, 19 nt, Homo sapiens
  misc_RNA (1)...(19): siRNA sense strand
gagucuuguucaacugaga

SEQ ID NO: 1783895 - RNA, 19 nt, Homo sapiens
  misc_RNA (1)...(19): siRNA sense strand
ccuucaacauccaucaaga

SEQ ID NO: 1783896 - RNA, 19 nt, Homo sapiens
  misc_RNA (1)...(19): siRNA sense strand
guagaacucgacagaagag

SEQ ID NO: 1783897 - RNA, 19 nt, Homo sapiens
  misc_RNA (1)...(19): siRNA sense strand
uuguagaacucgacagaag

SEQ ID NO: 1783898 - RNA, 19 nt, Homo sapiens
  misc_RNA (1)...(19): siRNA sense strand
gcaccuggucagcgccaaa

SEQ ID NO: 1783899 - RNA, 19 nt, Homo sapiens
  misc_RNA (1)...(19): siRNA sense strand
guggugagauccagaaacc

SEQ ID NO: 1783900 - RNA, 19 nt, Homo sapiens
  misc_RNA (1)...(19): siRNA sense strand
ugagaaaugguaccugucu

SEQ ID NO: 1783901 - RNA, 19 nt, Homo sapiens
  misc_RNA (1)...(19): siRNA sense strand
cccauuucauuaucucgaa

SEQ ID NO: 1783902 - RNA, 19 nt, Homo sapiens
  misc_RNA (1)...(19): siRNA sense strand
ggaaaguaggagaaagaag

SEQ ID NO: 1783903 - RNA, 19 nt, Homo sapiens
  misc_RNA (1)...(19): siRNA sense strand
uaaacuucucuccuaaaga

SEQ ID NO: 1783904 - RNA, 19 nt, Homo sapiens
  misc_RNA (1)...(19): siRNA sense strand
ugagguggaaagugagaaa

SEQ ID NO: 1783905 - RNA, 19 nt, Homo sapiens
  misc_RNA (1)...(19): siRNA sense strand
gcuucagacuuuggugaug

SEQ ID NO: 1783906 - RNA, 19 nt, Homo sapiens
  misc_RNA (1)...(19): siRNA sense strand
ugaagaaaauucggaggaa

SEQ ID NO: 1783907 - RNA, 19 nt, Homo sapiens
  misc_RNA (1)...(19): siRNA sense strand
caaauugccccugucaaaa

SEQ ID NO: 1783908 - RNA, 19 nt, Homo sapiens
  misc_RNA (1)...(19): siRNA sense strand
uaagcuggagccucaugaa

SEQ ID NO: 1783909 - RNA, 19 nt, Homo sapiens
  misc_RNA (1)...(19): siRNA sense strand
aucaagacagagccaauua

SEQ ID NO: 1783910 - RNA, 19 nt, Homo sapiens
  misc_RNA (1)...(19): siRNA sense strand
ggagaagaggacccugauc

SEQ ID NO: 1783911 - RNA, 19 nt, Homo sapiens
  misc_RNA (1)...(19): siRNA sense strand
ccucgugccagaccauuau

SEQ ID NO: 1783912 - RNA, 19 nt, Homo sapiens
  misc_RNA (1)...(19): siRNA sense strand
cagccuccguggugagauc

SEQ ID NO: 1783913 - RNA, 19 nt, Homo sapiens
  misc_RNA (1)...(19): siRNA sense strand
ucaggaaaguaggagaaag

SEQ ID NO: 1783914 - RNA, 19 nt, Homo sapiens
  misc_RNA (1)...(19): siRNA sense strand
ucuaaacuucucuccuaaa

SEQ ID NO: 1783915 - RNA, 19 nt, Homo sapiens
  misc_RNA (1)...(19): siRNA sense strand
gaacgaaaguuauauggaa

SEQ ID NO: 1783916 - RNA, 19 nt, Homo sapiens
  misc_RNA (1)...(19): siRNA sense strand
uggaaacacugaagaguua

SEQ ID NO: 1783917 - RNA, 19 nt, Homo sapiens
  misc_RNA (1)...(19): siRNA sense strand
gagacguccucaucaaaua

SEQ ID NO: 1783918 - RNA, 19 nt, Homo sapiens
  misc_RNA (1)...(19): siRNA sense strand
gggaugagcuucuuauugg

SEQ ID NO: 1783919 - RNA, 19 nt, Homo sapiens
  misc_RNA (1)...(19): siRNA sense strand
ccaaggaccagauugcuua

SEQ ID NO: 1783920 - RNA, 19 nt, Homo sapiens
  misc_RNA (1)...(19): siRNA sense strand
ucaaauagcagacuuguuc

SEQ ID NO: 1783921 - RNA, 19 nt, Homo sapiens
  misc_RNA (1)...(19): siRNA sense strand
gaagaguuaucgccagugu

SEQ ID NO: 1783922 - RNA, 19 nt, Homo sapiens
  misc_RNA (1)...(19): siRNA sense strand
gagaagaaaguuaaagcaa

SEQ ID NO: 1783923 - RNA, 19 nt, Homo sapiens
  misc_RNA (1)...(19): siRNA sense strand
ggaccagauugcuuacuca

SEQ ID NO: 1783924 - RNA, 19 nt, Homo sapiens
  misc_RNA (1)...(19): siRNA sense strand
ggaaggaaccgcuggaaac

SEQ ID NO: 1783925 - RNA, 19 nt, Homo sapiens
  misc_RNA (1)...(19): siRNA sense strand
ggcccaauauuguaauuuc

SEQ ID NO: 1783926 - RNA, 19 nt, Homo sapiens
  misc_RNA (1)...(19): siRNA sense strand
gaaggaaccgcuggaaaca

SEQ ID NO: 1783927 - RNA, 19 nt, Homo sapiens
  misc_RNA (1)...(19): siRNA sense strand
caacuucaggcccaauauu

SEQ ID NO: 1783928 - RNA, 19 nt, Homo sapiens
  misc_RNA (1)...(19): siRNA sense strand
ggaucuacccugugaaauc

SEQ ID NO: 1783929 - RNA, 19 nt, Homo sapiens
  misc_RNA (1)...(19): siRNA sense strand
cuucagaacgaaaguuaua

SEQ ID NO: 1783930 - RNA, 19 nt, Homo sapiens
  misc_RNA (1)...(19): siRNA sense strand
gacaccagcccauucuuga

SEQ ID NO: 1783931 - RNA, 19 nt, Homo sapiens
  misc_RNA (1)...(19): siRNA sense strand
aaagggugauggcuuguuc

SEQ ID NO: 1783932 - RNA, 19 nt, Homo sapiens
  misc_RNA (1)...(19): siRNA sense strand
cuacacaaaggaccuacua

SEQ ID NO: 1783933 - RNA, 19 nt, Homo sapiens
  misc_RNA (1)...(19): siRNA sense strand
gaucuacccugugaaaucc

SEQ ID NO: 1783934 - RNA, 19 nt, Homo sapiens
  misc_RNA (1)...(19): siRNA sense strand
gaccuacuacugccuauca

SEQ ID NO: 1783935 - RNA, 19 nt, Homo sapiens
  misc_RNA (1)...(19): siRNA sense strand
agaguuaucgccaguguga

SEQ ID NO: 1783936 - RNA, 19 nt, Homo sapiens
  misc_RNA (1)...(19): siRNA sense strand
gaaccgcuggaaacacuga

SEQ ID NO: 1783937 - RNA, 19 nt, Homo sapiens
  misc_RNA (1)...(19): siRNA sense strand
gcccaauauuguaauuuca

SEQ ID NO: 1783938 - RNA, 19 nt, Homo sapiens
  misc_RNA (1)...(19): siRNA sense strand
ggcuagagaagaaaguuaa

SEQ ID NO: 1783939 - RNA, 19 nt, Homo sapiens
  misc_RNA (1)...(19): siRNA sense strand
gcacuucgagccucacaag

SEQ ID NO: 1783940 - RNA, 19 nt, Homo sapiens
  misc_RNA (1)...(19): siRNA sense strand
gguuacugcucgccaggaa

SEQ ID NO: 1783941 - RNA, 19 nt, Homo sapiens
  misc_RNA (1)...(19): siRNA sense strand
caggagggaaacaugguua

SEQ ID NO: 1783942 - RNA, 19 nt, Homo sapiens
  misc_RNA (1)...(19): siRNA sense strand
ucaaaacgcccaccacaaa

SEQ ID NO: 1783943 - RNA, 19 nt, Homo sapiens
  misc_RNA (1)...(19): siRNA sense strand
cgagacguccucaucaaau

SEQ ID NO: 1783944 - RNA, 19 nt, Homo sapiens
  misc_RNA (1)...(19): siRNA sense strand
uggcgcagcucuggaucua

SEQ ID NO: 1783945 - RNA, 19 nt, Homo sapiens
  misc_RNA (1)...(19): siRNA sense strand
caaccaggagggaaacaug

SEQ ID NO: 1783946 - RNA, 19 nt, Homo sapiens
  misc_RNA (1)...(19): siRNA sense strand
acuccaggcuagagaagaa

SEQ ID NO: 1783947 - RNA, 19 nt, Homo sapiens
  misc_RNA (1)...(19): siRNA sense strand
gaaaaucaccacucuuugg

SEQ ID NO: 1783948 - RNA, 19 nt, Homo sapiens
  misc_RNA (1)...(19): siRNA sense strand
gcuagagaagaaaguuaaa

SEQ ID NO: 1783949 - RNA, 19 nt, Homo sapiens
  misc_RNA (1)...(19): siRNA sense strand
cgaccgagacguccucauc

SEQ ID NO: 1783950 - RNA, 19 nt, Homo sapiens
  misc_RNA (1)...(19): siRNA sense strand
ggaugagcuucuuauuggu

SEQ ID NO: 1783951 - RNA, 19 nt, Homo sapiens
  misc_RNA (1)...(19): siRNA sense strand
cuucaggcccaauauugua

SEQ ID NO: 1783952 - RNA, 19 nt, Homo sapiens
  misc_RNA (1)...(19): siRNA sense strand
ucagugcagccuacacaaa

SEQ ID NO: 1783953 - RNA, 19 nt, Homo sapiens
  misc_RNA (1)...(19): siRNA sense strand
gaaacacugaagaguuauc

SEQ ID NO: 1783954 - RNA, 19 nt, Homo sapiens
  misc_RNA (1)...(19): siRNA sense strand
cauucuugauccuuucuga

SEQ ID NO: 1783955 - RNA, 19 nt, Homo sapiens
  misc_RNA (1)...(19): siRNA sense strand
ggauaaccagcuuccugaa

SEQ ID NO: 1783956 - RNA, 19 nt, Homo sapiens
  misc_RNA (1)...(19): siRNA sense strand
ucagaacgaaaguuauaug

SEQ ID NO: 1783957 - RNA, 19 nt, Homo sapiens
  misc_RNA (1)...(19): siRNA sense strand
ugggaugagcuucuuauug

SEQ ID NO: 1783958 - RNA, 19 nt, Homo sapiens
  misc_RNA (1)...(19): siRNA sense strand
cgaugucuaugcagaggau

SEQ ID NO: 1783959 - RNA, 19 nt, Homo sapiens
  misc_RNA (1)...(19): siRNA sense strand
gaccgagacguccucauca

SEQ ID NO: 1783960 - RNA, 19 nt, Homo sapiens
  misc_RNA (1)...(19): siRNA sense strand
cacaaaggaccuacuacug

SEQ ID NO: 1783961 - RNA, 19 nt, Homo sapiens
  misc_RNA (1)...(19): siRNA sense strand
agacaccagcccauucuug

SEQ ID NO: 1783962 - RNA, 19 nt, Homo sapiens
  misc_RNA (1)...(19): siRNA sense strand
gugugacccuucagaacga

SEQ ID NO: 1783963 - RNA, 19 nt, Homo sapiens
  misc_RNA (1)...(19): siRNA sense strand
caggcccaauauuguaauu

SEQ ID NO: 1783964 - RNA, 19 nt, Homo sapiens
  misc_RNA (1)...(19): siRNA sense strand
gagggaaacaugguuacug

SEQ ID NO: 1783965 - RNA, 19 nt, Homo sapiens
  misc_RNA (1)...(19): siRNA sense strand
ccagugugacccuucagaa

SEQ ID NO: 1783966 - RNA, 19 nt, Homo sapiens
  misc_RNA (1)...(19): siRNA sense strand
ccgagacguccucaucaaa

SEQ ID NO: 1783967 - RNA, 19 nt, Homo sapiens
  misc_RNA (1)...(19): siRNA sense strand
gugauggcuuguuccagau

SEQ ID NO: 1783968 - RNA, 19 nt, Homo sapiens
  misc_RNA (1)...(19): siRNA sense strand
gcccauucuugauccuuuc

SEQ ID NO: 1783969 - RNA, 19 nt, Homo sapiens
  misc_RNA (1)...(19): siRNA sense strand
cagauugcuuacucagaca

SEQ ID NO: 1783970 - RNA, 19 nt, Homo sapiens
  misc_RNA (1)...(19): siRNA sense strand
gcuuguuccagaugcauuu

SEQ ID NO: 1783971 - RNA, 19 nt, Homo sapiens
  misc_RNA (1)...(19): siRNA sense strand
ucuuauuggugacguggaa

SEQ ID NO: 1783972 - RNA, 19 nt, Homo sapiens
  misc_RNA (1)...(19): siRNA sense strand
cagaggauucuugggauga

SEQ ID NO: 1783973 - RNA, 19 nt, Homo sapiens
  misc_RNA (1)...(19): siRNA sense strand
gguuuuggcuugugaucaa

SEQ ID NO: 1783974 - RNA, 19 nt, Homo sapiens
  misc_RNA (1)...(19): siRNA sense strand
ggaaaaucaccacucuuug

SEQ ID NO: 1783975 - RNA, 19 nt, Homo sapiens
  misc_RNA (1)...(19): siRNA sense strand
uggaaaaucaccacucuuu

SEQ ID NO: 1783976 - RNA, 19 nt, Homo sapiens
  misc_RNA (1)...(19): siRNA sense strand
ggaaacacugaagaguuau

SEQ ID NO: 1783977 - RNA, 19 nt, Homo sapiens
  misc_RNA (1)...(19): siRNA sense strand
cuggaaacacugaagaguu

SEQ ID NO: 1783978 - RNA, 19 nt, Homo sapiens
  misc_RNA (1)...(19): siRNA sense strand
aggaaccgcuggaaacacu

SEQ ID NO: 1783979 - RNA, 19 nt, Homo sapiens
  misc_RNA (1)...(19): siRNA sense strand
guuaaagcaaccaacuuca

SEQ ID NO: 1783980 - RNA, 19 nt, Homo sapiens
  misc_RNA (1)...(19): siRNA sense strand
aaacccagggaccaucaaa

SEQ ID NO: 1783981 - RNA, 19 nt, Homo sapiens
  misc_RNA (1)...(19): siRNA sense strand
ggaagaagaugauggugua

SEQ ID NO: 1783982 - RNA, 19 nt, Homo sapiens
  misc_RNA (1)...(19): siRNA sense strand
uaacaucccugucaccuuu

SEQ ID NO: 1783983 - RNA, 19 nt, Homo sapiens
  misc_RNA (1)...(19): siRNA sense strand
ccagaucccugcaagaaua

SEQ ID NO: 1783984 - RNA, 19 nt, Homo sapiens
  misc_RNA (1)...(19): siRNA sense strand
ggagauauguacuuccuuu

SEQ ID NO: 1783985 - RNA, 19 nt, Homo sapiens
  misc_RNA (1)...(19): siRNA sense strand
gcacagagaccaacuuuau

SEQ ID NO: 1783986 - RNA, 19 nt, Homo sapiens
  misc_RNA (1)...(19): siRNA sense strand
gcucacagcucauguaaca

SEQ ID NO: 1783987 - RNA, 19 nt, Homo sapiens
  misc_RNA (1)...(19): siRNA sense strand
ggcaagagccugauucaua

SEQ ID NO: 1783988 - RNA, 19 nt, Homo sapiens
  misc_RNA (1)...(19): siRNA sense strand
caucuuacguucauaguuu

SEQ ID NO: 1783989 - RNA, 19 nt, Homo sapiens
  misc_RNA (1)...(19): siRNA sense strand
gggcugaaguggagauuaa

SEQ ID NO: 1783990 - RNA, 19 nt, Homo sapiens
  misc_RNA (1)...(19): siRNA sense strand
ccaacuacauggauuguuu

SEQ ID NO: 1783991 - RNA, 19 nt, Homo sapiens
  misc_RNA (1)...(19): siRNA sense strand
gaaaggauuugaguuuguu

SEQ ID NO: 1783992 - RNA, 19 nt, Homo sapiens
  misc_RNA (1)...(19): siRNA sense strand
guacuuccuuugaauauug

SEQ ID NO: 1783993 - RNA, 19 nt, Homo sapiens
  misc_RNA (1)...(19): siRNA sense strand
ggaaaggauuugaguuugu

SEQ ID NO: 1783994 - RNA, 19 nt, Homo sapiens
  misc_RNA (1)...(19): siRNA sense strand
gcaagagccugauucauac

SEQ ID NO: 1783995 - RNA, 19 nt, Homo sapiens
  misc_RNA (1)...(19): siRNA sense strand
ggacuuggcuugaaucacu

SEQ ID NO: 1783996 - RNA, 19 nt, Homo sapiens
  misc_RNA (1)...(19): siRNA sense strand
gagaccaacuuuauuacaa

SEQ ID NO: 1783997 - RNA, 19 nt, Homo sapiens
  misc_RNA (1)...(19): siRNA sense strand
gauggaaccguuuacaaua

SEQ ID NO: 1783998 - RNA, 19 nt, Homo sapiens
  misc_RNA (1)...(19): siRNA sense strand
gauauguacuuccuuugaa

SEQ ID NO: 1783999 - RNA, 19 nt, Homo sapiens
  misc_RNA (1)...(19): siRNA sense strand
acagagaccaacuuuauua

SEQ ID NO: 1784000 - RNA, 19 nt, Homo sapiens
  misc_RNA (1)...(19): siRNA sense strand
caacaccuaugaagacaau

SEQ ID NO: 1784001 - RNA, 19 nt, Homo sapiens
  misc_RNA (1)...(19): siRNA sense strand
gcaacuaugucucugucaa

SEQ ID NO: 1784002 - RNA, 19 nt, Homo sapiens
  misc_RNA (1)...(19): siRNA sense strand
ugggaaaccuuacacauau

SEQ ID NO: 1784003 - RNA, 19 nt, Homo sapiens
  misc_RNA (1)...(19): siRNA sense strand
caaggaagauccaauaagc

SEQ ID NO: 1784004 - RNA, 19 nt, Homo sapiens
  misc_RNA (1)...(19): siRNA sense strand
ccagaaguauugugggaaa

SEQ ID NO: 1784005 - RNA, 19 nt, Homo sapiens
  misc_RNA (1)...(19): siRNA sense strand
gaaguuaggagauauguac

SEQ ID NO: 1784006 - RNA, 19 nt, Homo sapiens
  misc_RNA (1)...(19): siRNA sense strand
ucaaaucaauuaccagaag

SEQ ID NO: 1784007 - RNA, 19 nt, Homo sapiens
  misc_RNA (1)...(19): siRNA sense strand
gagauuaacaucccuguca

SEQ ID NO: 1784008 - RNA, 19 nt, Homo sapiens
  misc_RNA (1)...(19): siRNA sense strand
gugggaaaccuuacacaua

SEQ ID NO: 1784009 - RNA, 19 nt, Homo sapiens
  misc_RNA (1)...(19): siRNA sense strand
agacaaggaagauccaaua

SEQ ID NO: 1784010 - RNA, 19 nt, Homo sapiens
  misc_RNA (1)...(19): siRNA sense strand
caucagaacccaucuuugu

SEQ ID NO: 1784011 - RNA, 19 nt, Homo sapiens
  misc_RNA (1)...(19): siRNA sense strand
agagaucguuguacaauuc

SEQ ID NO: 1784012 - RNA, 19 nt, Homo sapiens
  misc_RNA (1)...(19): siRNA sense strand
ccagagaccuuggagacaa

SEQ ID NO: 1784013 - RNA, 19 nt, Homo sapiens
  misc_RNA (1)...(19): siRNA sense strand
gaagacaauggguuucuga

SEQ ID NO: 1784014 - RNA, 19 nt, Homo sapiens
  misc_RNA (1)...(19): siRNA sense strand
ggagccaacuacauggauu

SEQ ID NO: 1784015 - RNA, 19 nt, Homo sapiens
  misc_RNA (1)...(19): siRNA sense strand
ucaaguuccuuucuucaug

SEQ ID NO: 1784016 - RNA, 19 nt, Homo sapiens
  misc_RNA (1)...(19): siRNA sense strand
uuaagcagguugaucuuug

SEQ ID NO: 1784017 - RNA, 19 nt, Homo sapiens
  misc_RNA (1)...(19): siRNA sense strand
gaacugggaagaggugaaa

SEQ ID NO: 1784018 - RNA, 19 nt, Homo sapiens
  misc_RNA (1)...(19): siRNA sense strand
ccaggacucuuugaaguug

SEQ ID NO: 1784019 - RNA, 19 nt, Homo sapiens
  misc_RNA (1)...(19): siRNA sense strand
gccaaggacuuaagugaag

SEQ ID NO: 1784020 - RNA, 19 nt, Homo sapiens
  misc_RNA (1)...(19): siRNA sense strand
agaagaugaugguguaguu

SEQ ID NO: 1784021 - RNA, 19 nt, Homo sapiens
  misc_RNA (1)...(19): siRNA sense strand
ugacacaggcaagaauuua

SEQ ID NO: 1784022 - RNA, 19 nt, Homo sapiens
  misc_RNA (1)...(19): siRNA sense strand
ccaauaagcaagucagaga

SEQ ID NO: 1784023 - RNA, 19 nt, Homo sapiens
  misc_RNA (1)...(19): siRNA sense strand
ggaaccguuuacaauauug

SEQ ID NO: 1784024 - RNA, 19 nt, Homo sapiens
  misc_RNA (1)...(19): siRNA sense strand
ucagaacccaucuuuguuu

SEQ ID NO: 1784025 - RNA, 19 nt, Homo sapiens
  misc_RNA (1)...(19): siRNA sense strand
gaagguucauccgcacuga

SEQ ID NO: 1784026 - RNA, 19 nt, Homo sapiens
  misc_RNA (1)...(19): siRNA sense strand
ggccaggacucuuugaagu

SEQ ID NO: 1784027 - RNA, 19 nt, Homo sapiens
  misc_RNA (1)...(19): siRNA sense strand
gacaaggaagauccaauaa

SEQ ID NO: 1784028 - RNA, 19 nt, Homo sapiens
  misc_RNA (1)...(19): siRNA sense strand
gaacccaucuuuguuucuc

SEQ ID NO: 1784029 - RNA, 19 nt, Homo sapiens
  misc_RNA (1)...(19): siRNA sense strand
gaacuucuccuuucaaccu

SEQ ID NO: 1784030 - RNA, 19 nt, Homo sapiens
  misc_RNA (1)...(19): siRNA sense strand
ggcaagcccuccugcacaa

SEQ ID NO: 1784031 - RNA, 19 nt, Homo sapiens
  misc_RNA (1)...(19): siRNA sense strand
gaagauccaauaagcaagu

SEQ ID NO: 1784032 - RNA, 19 nt, Homo sapiens
  misc_RNA (1)...(19): siRNA sense strand
uaaagaaggacaugucaca

SEQ ID NO: 1784033 - RNA, 19 nt, Homo sapiens
  misc_RNA (1)...(19): siRNA sense strand
gcuuaucuccugauucuga

SEQ ID NO: 1784034 - RNA, 19 nt, Homo sapiens
  misc_RNA (1)...(19): siRNA sense strand
ucacccagaugccuuggaa

SEQ ID NO: 1784035 - RNA, 19 nt, Homo sapiens
  misc_RNA (1)...(19): siRNA sense strand
ucuguaagcugaaugucaa

SEQ ID NO: 1784036 - RNA, 19 nt, Homo sapiens
  misc_RNA (1)...(19): siRNA sense strand
gaucucugcugcuggaaag

SEQ ID NO: 1784037 - RNA, 19 nt, Homo sapiens
  misc_RNA (1)...(19): siRNA sense strand
cagagaucguuguacaauu

SEQ ID NO: 1784038 - RNA, 19 nt, Homo sapiens
  misc_RNA (1)...(19): siRNA sense strand
ggucugacucccaacuaua

SEQ ID NO: 1784039 - RNA, 19 nt, Homo sapiens
  misc_RNA (1)...(19): siRNA sense strand
caaaucaauuaccagaagu

SEQ ID NO: 1784040 - RNA, 19 nt, Homo sapiens
  misc_RNA (1)...(19): siRNA sense strand
gggaaaccuuacacauaug

SEQ ID NO: 1784041 - RNA, 19 nt, Homo sapiens
  misc_RNA (1)...(19): siRNA sense strand
uggaaccguuuacaauauu

SEQ ID NO: 1784042 - RNA, 19 nt, Homo sapiens
  misc_RNA (1)...(19): siRNA sense strand
guuaggagauauguacuuc

SEQ ID NO: 1784043 - RNA, 19 nt, Homo sapiens
  misc_RNA (1)...(19): siRNA sense strand
gaucgucauaacagaauuu

SEQ ID NO: 1784044 - RNA, 19 nt, Homo sapiens
  misc_RNA (1)...(19): siRNA sense strand
guauggacuuggcuugaau

SEQ ID NO: 1784045 - RNA, 19 nt, Homo sapiens
  misc_RNA (1)...(19): siRNA sense strand
aaccugaaguuaggagaua

SEQ ID NO: 1784046 - RNA, 19 nt, Homo sapiens
  misc_RNA (1)...(19): siRNA sense strand
caagccaucuuacguucau

SEQ ID NO: 1784047 - RNA, 19 nt, Homo sapiens
  misc_RNA (1)...(19): siRNA sense strand
caauuaagcagguugaucu

SEQ ID NO: 1784048 - RNA, 19 nt, Homo sapiens
  misc_RNA (1)...(19): siRNA sense strand
gaagauuacuacgcuugca

SEQ ID NO: 1784049 - RNA, 19 nt, Homo sapiens
  misc_RNA (1)...(19): siRNA sense strand
ccgcacugaugcuuacgua

SEQ ID NO: 1784050 - RNA, 19 nt, Homo sapiens
  misc_RNA (1)...(19): siRNA sense strand
caagucagagaucguugua

SEQ ID NO: 1784051 - RNA, 19 nt, Homo sapiens
  misc_RNA (1)...(19): siRNA sense strand
ggagacaauuaagcagguu

SEQ ID NO: 1784052 - RNA, 19 nt, Homo sapiens
  misc_RNA (1)...(19): siRNA sense strand
agucagagaucguuguaca

SEQ ID NO: 1784053 - RNA, 19 nt, Homo sapiens
  misc_RNA (1)...(19): siRNA sense strand
ccagaugccuuggaagaag

SEQ ID NO: 1784054 - RNA, 19 nt, Homo sapiens
  misc_RNA (1)...(19): siRNA sense strand
cagaacccaucuuuguuuc

SEQ ID NO: 1784055 - RNA, 19 nt, Homo sapiens
  misc_RNA (1)...(19): siRNA sense strand
uggaaaggauuugaguuug

SEQ ID NO: 1784056 - RNA, 19 nt, Homo sapiens
  misc_RNA (1)...(19): siRNA sense strand
ucacauaccacagaagguu

SEQ ID NO: 1784057 - RNA, 19 nt, Homo sapiens
  misc_RNA (1)...(19): siRNA sense strand
ggagacaccagucaaaauu

SEQ ID NO: 1784058 - RNA, 19 nt, Homo sapiens
  misc_RNA (1)...(19): siRNA sense strand
aaaggaucgucauaacaga

SEQ ID NO: 1784059 - RNA, 19 nt, Homo sapiens
  misc_RNA (1)...(19): siRNA sense strand
cugcuuaucuccugauucu

SEQ ID NO: 1784060 - RNA, 19 nt, Homo sapiens
  misc_RNA (1)...(19): siRNA sense strand
cagaugccuuggaagaaga

SEQ ID NO: 1784061 - RNA, 19 nt, Homo sapiens
  misc_RNA (1)...(19): siRNA sense strand
gaaucacuuuguuccagau

SEQ ID NO: 1784062 - RNA, 19 nt, Homo sapiens
  misc_RNA (1)...(19): siRNA sense strand
ggguuuggcuucauauugc

SEQ ID NO: 1784063 - RNA, 19 nt, Homo sapiens
  misc_RNA (1)...(19): siRNA sense strand
cuggaaaggauuugaguuu

SEQ ID NO: 1784064 - RNA, 19 nt, Homo sapiens
  misc_RNA (1)...(19): siRNA sense strand
gagaaaaggaucgucauaa

SEQ ID NO: 1784065 - RNA, 19 nt, Homo sapiens
  misc_RNA (1)...(19): siRNA sense strand
uggcuugaaucacuuuguu

SEQ ID NO: 1784066 - RNA, 19 nt, Homo sapiens
  misc_RNA (1)...(19): siRNA sense strand
caacuaugucucugucaau

SEQ ID NO: 1784067 - RNA, 19 nt, Homo sapiens
  misc_RNA (1)...(19): siRNA sense strand
cguauggacuuggcuugaa

SEQ ID NO: 1784068 - RNA, 19 nt, Homo sapiens
  misc_RNA (1)...(19): siRNA sense strand
ugauggaaccguuuacaau

SEQ ID NO: 1784069 - RNA, 19 nt, Homo sapiens
  misc_RNA (1)...(19): siRNA sense strand
gaaaaugauggaaccguuu

SEQ ID NO: 1784070 - RNA, 19 nt, Homo sapiens
  misc_RNA (1)...(19): siRNA sense strand
ucacaucaacaccuaugaa

SEQ ID NO: 1784071 - RNA, 19 nt, Homo sapiens
  misc_RNA (1)...(19): siRNA sense strand
gaaaaggaucgucauaaca

SEQ ID NO: 1784072 - RNA, 19 nt, Homo sapiens
  misc_RNA (1)...(19): siRNA sense strand
agacaauggguuucugauu

SEQ ID NO: 1784073 - RNA, 19 nt, Homo sapiens
  misc_RNA (1)...(19): siRNA sense strand
agacaccagucaaaauuaa

SEQ ID NO: 1784074 - RNA, 19 nt, Homo sapiens
  misc_RNA (1)...(19): siRNA sense strand
gcaagucagagaucguugu

SEQ ID NO: 1784075 - RNA, 19 nt, Homo sapiens
  misc_RNA (1)...(19): siRNA sense strand
gcaagcagacaaggaagau

SEQ ID NO: 1784076 - RNA, 19 nt, Homo sapiens
  misc_RNA (1)...(19): siRNA sense strand
cagagaccuuggagacaau

SEQ ID NO: 1784077 - RNA, 19 nt, Homo sapiens
  misc_RNA (1)...(19): siRNA sense strand
ggaucgucauaacagaauu

SEQ ID NO: 1784078 - RNA, 19 nt, Homo sapiens
  misc_RNA (1)...(19): siRNA sense strand
gcugacacaggcaagaauu

SEQ ID NO: 1784079 - RNA, 19 nt, Homo sapiens
  misc_RNA (1)...(19): siRNA sense strand
gaagaugaugguguaguuc

SEQ ID NO: 1784080 - RNA, 19 nt, Homo sapiens
  misc_RNA (1)...(19): siRNA sense strand
caacugccacugcaauucu

SEQ ID NO: 1784081 - RNA, 19 nt, Homo sapiens
  misc_RNA (1)...(19): siRNA sense strand
gaacaacaguggagaagca

SEQ ID NO: 1784082 - RNA, 19 nt, Homo sapiens
  misc_RNA (1)...(19): siRNA sense strand
gcaagauguucaagaagaa

SEQ ID NO: 1784083 - RNA, 19 nt, Homo sapiens
  misc_RNA (1)...(19): siRNA sense strand
acgcaaagcuccacacuga

SEQ ID NO: 1784084 - RNA, 19 nt, Homo sapiens
  misc_RNA (1)...(19): siRNA sense strand
ggcaagauguucaagaaga

SEQ ID NO: 1784085 - RNA, 19 nt, Homo sapiens
  misc_RNA (1)...(19): siRNA sense strand
ucacuucccugcuccugua

SEQ ID NO: 1784086 - RNA, 19 nt, Homo sapiens
  misc_RNA (1)...(19): siRNA sense strand
gagcugcaccugaagauga

SEQ ID NO: 1784087 - RNA, 19 nt, Homo sapiens
  misc_RNA (1)...(19): siRNA sense strand
gaagaccuuugucaaccuu

SEQ ID NO: 1784088 - RNA, 19 nt, Homo sapiens
  misc_RNA (1)...(19): siRNA sense strand
guggcaagauguucaagaa

SEQ ID NO: 1784089 - RNA, 19 nt, Homo sapiens
  misc_RNA (1)...(19): siRNA sense strand
cagcugagccaucaccuaa

SEQ ID NO: 1784090 - RNA, 19 nt, Homo sapiens
  misc_RNA (1)...(19): siRNA sense strand
uuaccaaguuccuuuauca

SEQ ID NO: 1784091 - RNA, 19 nt, Homo sapiens
  misc_RNA (1)...(19): siRNA sense strand
cuggagagguccuggcuaa

SEQ ID NO: 1784092 - RNA, 19 nt, Homo sapiens
  misc_RNA (1)...(19): siRNA sense strand
ggcaaagcguuccgucaga

SEQ ID NO: 1784093 - RNA, 19 nt, Homo sapiens
  misc_RNA (1)...(19): siRNA sense strand
uggaagccauugagaucua

SEQ ID NO: 1784094 - RNA, 19 nt, Homo sapiens
  misc_RNA (1)...(19): siRNA sense strand
uggaagaggugcuuaugca

SEQ ID NO: 1784095 - RNA, 19 nt, Homo sapiens
  misc_RNA (1)...(19): siRNA sense strand
gcaccaggccacucacuuc

SEQ ID NO: 1784096 - RNA, 19 nt, Homo sapiens
  misc_RNA (1)...(19): siRNA sense strand
cagcuucugaccacaguua

SEQ ID NO: 1784097 - RNA, 19 nt, Homo sapiens
  misc_RNA (1)...(19): siRNA sense strand
cagcauuuguggcaagaug

SEQ ID NO: 1784098 - RNA, 19 nt, Homo sapiens
  misc_RNA (1)...(19): siRNA sense strand
gugcagccgugaauuugga

SEQ ID NO: 1784099 - RNA, 19 nt, Homo sapiens
  misc_RNA (1)...(19): siRNA sense strand
ggcaaggcuuucacgcaaa

SEQ ID NO: 1784100 - RNA, 19 nt, Homo sapiens
  misc_RNA (1)...(19): siRNA sense strand
ggauugcaaggcucucuuu

SEQ ID NO: 1784101 - RNA, 19 nt, Homo sapiens
  misc_RNA (1)...(19): siRNA sense strand
agaggaaccugucauuggu

SEQ ID NO: 1784102 - RNA, 19 nt, Homo sapiens
  misc_RNA (1)...(19): siRNA sense strand
guuacgagcugcgcaaugg

SEQ ID NO: 1784103 - RNA, 19 nt, Homo sapiens
  misc_RNA (1)...(19): siRNA sense strand
gcugagccaucaccuaagg

SEQ ID NO: 1784104 - RNA, 19 nt, Homo sapiens
  misc_RNA (1)...(19): siRNA sense strand
ggaagaccuuugucaaccu

SEQ ID NO: 1784105 - RNA, 19 nt, Homo sapiens
  misc_RNA (1)...(19): siRNA sense strand
gguggaagccauugagauc

SEQ ID NO: 1784106 - RNA, 19 nt, Homo sapiens
  misc_RNA (1)...(19): siRNA sense strand
cagaggaaccugucauugg

SEQ ID NO: 1784107 - RNA, 19 nt, Homo sapiens
  misc_RNA (1)...(19): siRNA sense strand
guacauugagcaccgcuau

SEQ ID NO: 1784108 - RNA, 19 nt, Homo sapiens
  misc_RNA (1)...(19): siRNA sense strand
agaagucucacgugcguaa

SEQ ID NO: 1784109 - RNA, 19 nt, Homo sapiens
  misc_RNA (1)...(19): siRNA sense strand
gcuccaagcccuucaacuc

SEQ ID NO: 1784110 - RNA, 19 nt, Homo sapiens
  misc_RNA (1)...(19): siRNA sense strand
gaggaacaacaguggagaa

SEQ ID NO: 1784111 - RNA, 19 nt, Homo sapiens
  misc_RNA (1)...(19): siRNA sense strand
uggcaccuguggcaagaaa

SEQ ID NO: 1784112 - RNA, 19 nt, Homo sapiens
  misc_RNA (1)...(19): siRNA sense strand
guaaccaccugcgcacaca

SEQ ID NO: 1784113 - RNA, 19 nt, Homo sapiens
  misc_RNA (1)...(19): siRNA sense strand
ggagagguccuggcuaagg

SEQ ID NO: 1784114 - RNA, 19 nt, Homo sapiens
  misc_RNA (1)...(19): siRNA sense strand
guggucaacugcugauguc

SEQ ID NO: 1784115 - RNA, 19 nt, Homo sapiens
  misc_RNA (1)...(19): siRNA sense strand
ggaagccauugagaucuac

SEQ ID NO: 1784116 - RNA, 19 nt, Homo sapiens
  misc_RNA (1)...(19): siRNA sense strand
gagcggccauacccauguc

SEQ ID NO: 1784117 - RNA, 19 nt, Homo sapiens
  misc_RNA (1)...(19): siRNA sense strand
gcaccgcuaccaucacaca

SEQ ID NO: 1784118 - RNA, 19 nt, Homo sapiens
  misc_RNA (1)...(19): siRNA sense strand
gcauuuguggcaagauguu

SEQ ID NO: 1784119 - RNA, 19 nt, Homo sapiens
  misc_RNA (1)...(19): siRNA sense strand
cagaggugccugugucuca

SEQ ID NO: 1784120 - RNA, 19 nt, Homo sapiens
  misc_RNA (1)...(19): siRNA sense strand
ccagaggaaccugucauug

SEQ ID NO: 1784121 - RNA, 19 nt, Homo sapiens
  misc_RNA (1)...(19): siRNA sense strand
gcaccuguggcaagaaagu

SEQ ID NO: 1784122 - RNA, 19 nt, Homo sapiens
  misc_RNA (1)...(19): siRNA sense strand
ccugugcagccgugaauuu

SEQ ID NO: 1784123 - RNA, 19 nt, Homo sapiens
  misc_RNA (1)...(19): siRNA sense strand
ccagcaccauccacuacga

SEQ ID NO: 1784124 - RNA, 19 nt, Homo sapiens
  misc_RNA (1)...(19): siRNA sense strand
gcccuuugccugugaagug

SEQ ID NO: 1784125 - RNA, 19 nt, Homo sapiens
  misc_RNA (1)...(19): siRNA sense strand
uagcagcgagucacacuuc

SEQ ID NO: 1784126 - RNA, 19 nt, Homo sapiens
  misc_RNA (1)...(19): siRNA sense strand
ggcacgggccucuaucaga

SEQ ID NO: 1784127 - RNA, 19 nt, Homo sapiens
  misc_RNA (1)...(19): siRNA sense strand
ccacacaggagcucuucug

SEQ ID NO: 1784128 - RNA, 19 nt, Homo sapiens
  misc_RNA (1)...(19): siRNA sense strand
agaguacccaccugaaaga

SEQ ID NO: 1784129 - RNA, 19 nt, Homo sapiens
  misc_RNA (1)...(19): siRNA sense strand
cagaguacccaccugaaag

SEQ ID NO: 1784130 - RNA, 19 nt, Homo sapiens
  misc_RNA (1)...(19): siRNA sense strand
uugucaaccuuaccaaguu

SEQ ID NO: 1784131 - RNA, 19 nt, Homo sapiens
  misc_RNA (1)...(19): siRNA sense strand
gagcacucauaccgaaagg

SEQ ID NO: 1784132 - RNA, 19 nt, Homo sapiens
  misc_RNA (1)...(19): siRNA sense strand
aaagcguuccgucagagua

SEQ ID NO: 1784133 - RNA, 19 nt, Homo sapiens
  misc_RNA (1)...(19): siRNA sense strand
uaucaccggcguacucaug

SEQ ID NO: 1784134 - RNA, 19 nt, Homo sapiens
  misc_RNA (1)...(19): siRNA sense strand
ccugugcagucgugucuuc

SEQ ID NO: 1784135 - RNA, 19 nt, Homo sapiens
  misc_RNA (1)...(19): siRNA sense strand
ggagcacucauaccgaaag

SEQ ID NO: 1784136 - RNA, 19 nt, Homo sapiens
  misc_RNA (1)...(19): siRNA sense strand
ugucaaccuuaccaaguuc

SEQ ID NO: 1784137 - RNA, 19 nt, Homo sapiens
  misc_RNA (1)...(19): siRNA sense strand
gcuccagcaccauccacua

SEQ ID NO: 1784138 - RNA, 19 nt, Homo sapiens
  misc_RNA (1)...(19): siRNA sense strand
ccaugcgccuggcagaaca

SEQ ID NO: 1784139 - RNA, 19 nt, Homo sapiens
  misc_RNA (1)...(19): siRNA sense strand
gugaauaccccuacaagug

SEQ ID NO: 1784140 - RNA, 19 nt, Homo sapiens
  misc_RNA (1)...(19): siRNA sense strand
ugacccggcaccaacguuu

SEQ ID NO: 1784141 - RNA, 19 nt, Homo sapiens
  misc_RNA (1)...(19): siRNA sense strand
gugggaagaccuuugucaa

SEQ ID NO: 1784142 - RNA, 19 nt, Homo sapiens
  misc_RNA (1)...(19): siRNA sense strand
ggccacucgugcaccaguu

SEQ ID NO: 1784143 - RNA, 19 nt, Homo sapiens
  misc_RNA (1)...(19): siRNA sense strand
gcucaacagucaaggcuuu

SEQ ID NO: 1784144 - RNA, 19 nt, Homo sapiens
  misc_RNA (1)...(19): siRNA sense strand
gaacuggauuuacuacaag

SEQ ID NO: 1784145 - RNA, 19 nt, Homo sapiens
  misc_RNA (1)...(19): siRNA sense strand
gaaacaaccgggucuucua

SEQ ID NO: 1784146 - RNA, 19 nt, Homo sapiens
  misc_RNA (1)...(19): siRNA sense strand
caagugcgauugccaagga

SEQ ID NO: 1784147 - RNA, 19 nt, Homo sapiens
  misc_RNA (1)...(19): siRNA sense strand
ugaacuggauuuacuacaa

SEQ ID NO: 1784148 - RNA, 19 nt, Homo sapiens
  misc_RNA (1)...(19): siRNA sense strand
gaagccacauugggauuau

SEQ ID NO: 1784149 - RNA, 19 nt, Homo sapiens
  misc_RNA (1)...(19): siRNA sense strand
ggacaguagccagugguua

SEQ ID NO: 1784150 - RNA, 19 nt, Homo sapiens
  misc_RNA (1)...(19): siRNA sense strand
ccaaguacagcgugcagua

SEQ ID NO: 1784151 - RNA, 19 nt, Homo sapiens
  misc_RNA (1)...(19): siRNA sense strand
gaccagaucaccugcucua

SEQ ID NO: 1784152 - RNA, 19 nt, Homo sapiens
  misc_RNA (1)...(19): siRNA sense strand
uaugugggcugguauucuu

SEQ ID NO: 1784153 - RNA, 19 nt, Homo sapiens
  misc_RNA (1)...(19): siRNA sense strand
ucacaagccucuggguuuc

SEQ ID NO: 1784154 - RNA, 19 nt, Homo sapiens
  misc_RNA (1)...(19): siRNA sense strand
augaguggaugaccaagua

SEQ ID NO: 1784155 - RNA, 19 nt, Homo sapiens
  misc_RNA (1)...(19): siRNA sense strand
aaacaaccgggucuucuau

SEQ ID NO: 1784156 - RNA, 19 nt, Homo sapiens
  misc_RNA (1)...(19): siRNA sense strand
ccaccuccuuggacuguau

SEQ ID NO: 1784157 - RNA, 19 nt, Homo sapiens
  misc_RNA (1)...(19): siRNA sense strand
gcaccuccacgguucagaa

SEQ ID NO: 1784158 - RNA, 19 nt, Homo sapiens
  misc_RNA (1)...(19): siRNA sense strand
acauugggauuaucgucua

SEQ ID NO: 1784159 - RNA, 19 nt, Homo sapiens
  misc_RNA (1)...(19): siRNA sense strand
ccagaaugcccauaucaca

SEQ ID NO: 1784160 - RNA, 19 nt, Homo sapiens
  misc_RNA (1)...(19): siRNA sense strand
caucaucucccgcuucauc

SEQ ID NO: 1784161 - RNA, 19 nt, Homo sapiens
  misc_RNA (1)...(19): siRNA sense strand
ugaagccacauugggauua

SEQ ID NO: 1784162 - RNA, 19 nt, Homo sapiens
  misc_RNA (1)...(19): siRNA sense strand
ggaaacaaccgggucuucu

SEQ ID NO: 1784163 - RNA, 19 nt, Homo sapiens
  misc_RNA (1)...(19): siRNA sense strand
uuacuucucuuuggcuaug

SEQ ID NO: 1784164 - RNA, 19 nt, Homo sapiens
  misc_RNA (1)...(19): siRNA sense strand
cagaaugcccauaucacaa

SEQ ID NO: 1784165 - RNA, 19 nt, Homo sapiens
  misc_RNA (1)...(19): siRNA sense strand
gccagugguuacagauaga

SEQ ID NO: 1784166 - RNA, 19 nt, Homo sapiens
  misc_RNA (1)...(19): siRNA sense strand
gacaguagccagugguuac

SEQ ID NO: 1784167 - RNA, 19 nt, Homo sapiens
  misc_RNA (1)...(19): siRNA sense strand
cgccugaacuggauuuacu

SEQ ID NO: 1784168 - RNA, 19 nt, Homo sapiens
  misc_RNA (1)...(19): siRNA sense strand
uaucgucuaccgaggauga

SEQ ID NO: 1784169 - RNA, 19 nt, Homo sapiens
  misc_RNA (1)...(19): siRNA sense strand
cagaucaccugcucuaacc

SEQ ID NO: 1784170 - RNA, 19 nt, Homo sapiens
  misc_RNA (1)...(19): siRNA sense strand
gaggaccccugguaccaaa

SEQ ID NO: 1784171 - RNA, 19 nt, Homo sapiens
  misc_RNA (1)...(19): siRNA sense strand
acaaccgggucuucuaugg

SEQ ID NO: 1784172 - RNA, 19 nt, Homo sapiens
  misc_RNA (1)...(19): siRNA sense strand
cccaucaucucccgcuuca

SEQ ID NO: 1784173 - RNA, 19 nt, Homo sapiens
  misc_RNA (1)...(19): siRNA sense strand
gagcgccugaacuggauuu

SEQ ID NO: 1784174 - RNA, 19 nt, Homo sapiens
  misc_RNA (1)...(19): siRNA sense strand
uagccagugguuacagaua

SEQ ID NO: 1784175 - RNA, 19 nt, Homo sapiens
  misc_RNA (1)...(19): siRNA sense strand
ccagaucaccugcucuaac

SEQ ID NO: 1784176 - RNA, 19 nt, Homo sapiens
  misc_RNA (1)...(19): siRNA sense strand
ccaaguuccaggacaguag

SEQ ID NO: 1784177 - RNA, 19 nt, Homo sapiens
  misc_RNA (1)...(19): siRNA sense strand
gaugaguggaugaccaagu

SEQ ID NO: 1784178 - RNA, 19 nt, Homo sapiens
  misc_RNA (1)...(19): siRNA sense strand
gaugauggcuuccaaccua

SEQ ID NO: 1784179 - RNA, 19 nt, Homo sapiens
  misc_RNA (1)...(19): siRNA sense strand
gaaccugucaccuguaaua

SEQ ID NO: 1784180 - RNA, 19 nt, Homo sapiens
  misc_RNA (1)...(19): siRNA sense strand
gaaguuccgugccauaaag

SEQ ID NO: 1784181 - RNA, 19 nt, Homo sapiens
  misc_RNA (1)...(19): siRNA sense strand
ggaagaaggcccuggaaga

SEQ ID NO: 1784182 - RNA, 19 nt, Homo sapiens
  misc_RNA (1)...(19): siRNA sense strand
gcgcaguggugaugucuau

SEQ ID NO: 1784183 - RNA, 19 nt, Homo sapiens
  misc_RNA (1)...(19): siRNA sense strand
uaacccaacugccacauca

SEQ ID NO: 1784184 - RNA, 19 nt, Homo sapiens
  misc_RNA (1)...(19): siRNA sense strand
gcccaaagcucccagaaaa

SEQ ID NO: 1784185 - RNA, 19 nt, Homo sapiens
  misc_RNA (1)...(19): siRNA sense strand
ggucaaggcuaaggccaaa

SEQ ID NO: 1784186 - RNA, 19 nt, Homo sapiens
  misc_RNA (1)...(19): siRNA sense strand
ggugaugucuauggcuaua

SEQ ID NO: 1784187 - RNA, 19 nt, Homo sapiens
  misc_RNA (1)...(19): siRNA sense strand
gaagaaggcccuggaagag

SEQ ID NO: 1784188 - RNA, 19 nt, Homo sapiens
  misc_RNA (1)...(19): siRNA sense strand
aggcacugcuugucuuuaa

SEQ ID NO: 1784189 - RNA, 19 nt, Homo sapiens
  misc_RNA (1)...(19): siRNA sense strand
cagcacuggucaaggcuaa

SEQ ID NO: 1784190 - RNA, 19 nt, Homo sapiens
  misc_RNA (1)...(19): siRNA sense strand
ccaaagggaucugcuaagg

SEQ ID NO: 1784191 - RNA, 19 nt, Homo sapiens
  misc_RNA (1)...(19): siRNA sense strand
gaagaggcacugcuugucu

SEQ ID NO: 1784192 - RNA, 19 nt, Homo sapiens
  misc_RNA (1)...(19): siRNA sense strand
ccacagaggcccagcuugu

SEQ ID NO: 1784193 - RNA, 19 nt, Homo sapiens
  misc_RNA (1)...(19): siRNA sense strand
gcuaaggccagaacuacaa

SEQ ID NO: 1784194 - RNA, 19 nt, Homo sapiens
  misc_RNA (1)...(19): siRNA sense strand
gcgagaugauggcuuccaa

SEQ ID NO: 1784195 - RNA, 19 nt, Homo sapiens
  misc_RNA (1)...(19): siRNA sense strand
gcugagcucucugaagcaa

SEQ ID NO: 1784196 - RNA, 19 nt, Homo sapiens
  misc_RNA (1)...(19): siRNA sense strand
ggccaaagggaucugcuaa

SEQ ID NO: 1784197 - RNA, 19 nt, Homo sapiens
  misc_RNA (1)...(19): siRNA sense strand
uauaguucaugcacagcua

SEQ ID NO: 1784198 - RNA, 19 nt, Homo sapiens
  misc_RNA (1)...(19): siRNA sense strand
agccauugcugccauauuc

SEQ ID NO: 1784199 - RNA, 19 nt, Homo sapiens
  misc_RNA (1)...(19): siRNA sense strand
ugagcucucugaagcaauc

SEQ ID NO: 1784200 - RNA, 19 nt, Homo sapiens
  misc_RNA (1)...(19): siRNA sense strand
ucacugcagcucucacuug

SEQ ID NO: 1784201 - RNA, 19 nt, Homo sapiens
  misc_RNA (1)...(19): siRNA sense strand
gcggcucucuguuguccuu

SEQ ID NO: 1784202 - RNA, 19 nt, Homo sapiens
  misc_RNA (1)...(19): siRNA sense strand
gcugaaguuccgugccaua

SEQ ID NO: 1784203 - RNA, 19 nt, Homo sapiens
  misc_RNA (1)...(19): siRNA sense strand
aggcuaaggccaaagcuaa

SEQ ID NO: 1784204 - RNA, 19 nt, Homo sapiens
  misc_RNA (1)...(19): siRNA sense strand
ccaugcggcucucuguugu

SEQ ID NO: 1784205 - RNA, 19 nt, Homo sapiens
  misc_RNA (1)...(19): siRNA sense strand
gccaugcggcucucuguug

SEQ ID NO: 1784206 - RNA, 19 nt, Homo sapiens
  misc_RNA (1)...(19): siRNA sense strand
ugaaguuccgugccauaaa

SEQ ID NO: 1784207 - RNA, 19 nt, Homo sapiens
  misc_RNA (1)...(19): siRNA sense strand
gcaguggugaugucuaugg

SEQ ID NO: 1784208 - RNA, 19 nt, Homo sapiens
  misc_RNA (1)...(19): siRNA sense strand
ggaagaggcacugcuuguc

SEQ ID NO: 1784209 - RNA, 19 nt, Homo sapiens
  misc_RNA (1)...(19): siRNA sense strand
gcucucacuugcagacucu

SEQ ID NO: 1784210 - RNA, 19 nt, Homo sapiens
  misc_RNA (1)...(19): siRNA sense strand
ccaagcaugcuaccaccaa

SEQ ID NO: 1784211 - RNA, 19 nt, Homo sapiens
  misc_RNA (1)...(19): siRNA sense strand
aaaccgcccugagacuguu

SEQ ID NO: 1784212 - RNA, 19 nt, Homo sapiens
  misc_RNA (1)...(19): siRNA sense strand
gaggcacugcuugucuuua

SEQ ID NO: 1784213 - RNA, 19 nt, Homo sapiens
  misc_RNA (1)...(19): siRNA sense strand
aaacagcccaggccaaggu

SEQ ID NO: 1784214 - RNA, 19 nt, Homo sapiens
  misc_RNA (1)...(19): siRNA sense strand
ggcccaaagcucccagaaa

SEQ ID NO: 1784215 - RNA, 19 nt, Homo sapiens
  misc_RNA (1)...(19): siRNA sense strand
cccaguguccggcgaauga

SEQ ID NO: 1784216 - RNA, 19 nt, Homo sapiens
  misc_RNA (1)...(19): siRNA sense strand
gaggcccugguuccacuua

SEQ ID NO: 1784217 - RNA, 19 nt, Homo sapiens
  misc_RNA (1)...(19): siRNA sense strand
guuccgugccauaaaggua

SEQ ID NO: 1784218 - RNA, 19 nt, Homo sapiens
  misc_RNA (1)...(19): siRNA sense strand
agacucccaugcccugcuu

SEQ ID NO: 1784219 - RNA, 19 nt, Homo sapiens
  misc_RNA (1)...(19): siRNA sense strand
gagagaauauccagagauu

SEQ ID NO: 1784220 - RNA, 19 nt, Homo sapiens
  misc_RNA (1)...(19): siRNA sense strand
gaacuaugaugcugccaaa

SEQ ID NO: 1784221 - RNA, 19 nt, Homo sapiens
  misc_RNA (1)...(19): siRNA sense strand
gagagaagccaauuacauc

SEQ ID NO: 1784222 - RNA, 19 nt, Homo sapiens
  misc_RNA (1)...(19): siRNA sense strand
ccaauuacaucggcucaga

SEQ ID NO: 1784223 - RNA, 19 nt, Homo sapiens
  misc_RNA (1)...(19): siRNA sense strand
uuacaucggcucagacaaa

SEQ ID NO: 1784224 - RNA, 19 nt, Homo sapiens
  misc_RNA (1)...(19): siRNA sense strand
gcaaagaccccaaucacuu

SEQ ID NO: 1784225 - RNA, 19 nt, Homo sapiens
  misc_RNA (1)...(19): siRNA sense strand
ugaucaggcugccaaugaa

SEQ ID NO: 1784226 - RNA, 19 nt, Homo sapiens
  misc_RNA (1)...(19): siRNA sense strand
cagagagaauauccagaga

SEQ ID NO: 1784227 - RNA, 19 nt, Homo sapiens
  misc_RNA (1)...(19): siRNA sense strand
ugagagaagccaauuacau

SEQ ID NO: 1784228 - RNA, 19 nt, Homo sapiens
  misc_RNA (1)...(19): siRNA sense strand
gggcaggaguggcaaagac

SEQ ID NO: 1784229 - RNA, 19 nt, Homo sapiens
  misc_RNA (1)...(19): siRNA sense strand
gagauucuuuggccauggu

SEQ ID NO: 1784230 - RNA, 19 nt, Homo sapiens
  misc_RNA (1)...(19): siRNA sense strand
ugccugggcugcagaagug

SEQ ID NO: 1784231 - RNA, 19 nt, Homo sapiens
  misc_RNA (1)...(19): siRNA sense strand
cugcuggccugccugagaa

SEQ ID NO: 1784232 - RNA, 19 nt, Homo sapiens
  misc_RNA (1)...(19): siRNA sense strand
caugagagaagccaauuac

SEQ ID NO: 1784233 - RNA, 19 nt, Homo sapiens
  misc_RNA (1)...(19): siRNA sense strand
gaucaggcugccaaugaau

SEQ ID NO: 1784234 - RNA, 19 nt, Homo sapiens
  misc_RNA (1)...(19): siRNA sense strand
gacaugagagaagccaauu

SEQ ID NO: 1784235 - RNA, 19 nt, Homo sapiens
  misc_RNA (1)...(19): siRNA sense strand
cugaucaggcugccaauga

SEQ ID NO: 1784236 - RNA, 19 nt, Homo sapiens
  misc_RNA (1)...(19): siRNA sense strand
aggacucgcuggcugauca

SEQ ID NO: 1784237 - RNA, 19 nt, Homo sapiens
  misc_RNA (1)...(19): siRNA sense strand
agccuacucugacaugaga

SEQ ID NO: 1784238 - RNA, 19 nt, Homo sapiens
  misc_RNA (1)...(19): siRNA sense strand
cagcagccgaagcuucuuu

SEQ ID NO: 1784239 - RNA, 19 nt, Homo sapiens
  misc_RNA (1)...(19): siRNA sense strand
caucggcucagacaaauac

SEQ ID NO: 1784240 - RNA, 19 nt, Homo sapiens
  misc_RNA (1)...(19): siRNA sense strand
gcgaugccagagagaauau

SEQ ID NO: 1784241 - RNA, 19 nt, Homo sapiens
  misc_RNA (1)...(19): siRNA sense strand
uacaucggcucagacaaau

SEQ ID NO: 1784242 - RNA, 19 nt, Homo sapiens
  misc_RNA (1)...(19): siRNA sense strand
acaugagagaagccaauua

SEQ ID NO: 1784243 - RNA, 19 nt, Homo sapiens
  misc_RNA (1)...(19): siRNA sense strand
ugacaugagagaagccaau

SEQ ID NO: 1784244 - RNA, 19 nt, Homo sapiens
  misc_RNA (1)...(19): siRNA sense strand
agacaaauacuuccaugcu

SEQ ID NO: 1784245 - RNA, 19 nt, Homo sapiens
  misc_RNA (1)...(19): siRNA sense strand
caaagagaccgccaucaug

SEQ ID NO: 1784246 - RNA, 19 nt, Homo sapiens
  misc_RNA (1)...(19): siRNA sense strand
gaucaccgacuuccaguuc

SEQ ID NO: 1784247 - RNA, 19 nt, Homo sapiens
  misc_RNA (1)...(19): siRNA sense strand
gcacaggagagacguguca

SEQ ID NO: 1784248 - RNA, 19 nt, Homo sapiens
  misc_RNA (1)...(19): siRNA sense strand
ccaaagagaccgccaucau

SEQ ID NO: 1784249 - RNA, 19 nt, Homo sapiens
  misc_RNA (1)...(19): siRNA sense strand
acaucaaccugcaguauag

SEQ ID NO: 1784250 - RNA, 19 nt, Homo sapiens
  misc_RNA (1)...(19): siRNA sense strand
cacaucaaccugcaguaua

SEQ ID NO: 1784251 - RNA, 19 nt, Homo sapiens
  misc_RNA (1)...(19): siRNA sense strand
gagcacagaaccacgugaa

SEQ ID NO: 1784252 - RNA, 19 nt, Homo sapiens
  misc_RNA (1)...(19): siRNA sense strand
gagcugcacggacacuuga

SEQ ID NO: 1784253 - RNA, 19 nt, Homo sapiens
  misc_RNA (1)...(19): siRNA sense strand
ugaggaagaucugcagaca

SEQ ID NO: 1784254 - RNA, 19 nt, Homo sapiens
  misc_RNA (1)...(19): siRNA sense strand
agaagcuggugacggauga

SEQ ID NO: 1784255 - RNA, 19 nt, Homo sapiens
  misc_RNA (1)...(19): siRNA sense strand
ccacaucaaccugcaguau

SEQ ID NO: 1784256 - RNA, 19 nt, Homo sapiens
  misc_RNA (1)...(19): siRNA sense strand
ucaccgacuuccaguucaa

SEQ ID NO: 1784257 - RNA, 19 nt, Homo sapiens
  misc_RNA (1)...(19): siRNA sense strand
cccgcgagauugaccuuaa

SEQ ID NO: 1784258 - RNA, 19 nt, Homo sapiens
  misc_RNA (1)...(19): siRNA sense strand
ggagcugcacggacacuug

SEQ ID NO: 1784259 - RNA, 19 nt, Homo sapiens
  misc_RNA (1)...(19): siRNA sense strand
gaucugcagacaccuguuc

SEQ ID NO: 1784260 - RNA, 19 nt, Homo sapiens
  misc_RNA (1)...(19): siRNA sense strand
cuacugggcccacuucaag

SEQ ID NO: 1784261 - RNA, 19 nt, Homo sapiens
  misc_RNA (1)...(19): siRNA sense strand
uugagucccuggugaggaa

SEQ ID NO: 1784262 - RNA, 19 nt, Homo sapiens
  misc_RNA (1)...(19): siRNA sense strand
ccaaagccaagcccaaugg

SEQ ID NO: 1784263 - RNA, 19 nt, Homo sapiens
  misc_RNA (1)...(19): siRNA sense strand
cacagaaccacgugaagga

SEQ ID NO: 1784264 - RNA, 19 nt, Homo sapiens
  misc_RNA (1)...(19): siRNA sense strand
cagcaacaccacgacguuu

SEQ ID NO: 1784265 - RNA, 19 nt, Homo sapiens
  misc_RNA (1)...(19): siRNA sense strand
ccucuuugcucgggaguuc

SEQ ID NO: 1784266 - RNA, 19 nt, Homo sapiens
  misc_RNA (1)...(19): siRNA sense strand
gcucuacguccacuucauc

SEQ ID NO: 1784267 - RNA, 19 nt, Homo sapiens
  misc_RNA (1)...(19): siRNA sense strand
ccagcaacaccacgacguu

SEQ ID NO: 1784268 - RNA, 19 nt, Homo sapiens
  misc_RNA (1)...(19): siRNA sense strand
caaaauacggcagagaauu

SEQ ID NO: 1784269 - RNA, 19 nt, Homo sapiens
  misc_RNA (1)...(19): siRNA sense strand
caagcccaauggcaagaag

SEQ ID NO: 1784270 - RNA, 19 nt, Homo sapiens
  misc_RNA (1)...(19): siRNA sense strand
cacaguacguugacuucgu

SEQ ID NO: 1784271 - RNA, 19 nt, Homo sapiens
  misc_RNA (1)...(19): siRNA sense strand
gagagacgugucagacgau

SEQ ID NO: 1784272 - RNA, 19 nt, Homo sapiens
  misc_RNA (1)...(19): siRNA sense strand
ugacggaugaggacguguu

SEQ ID NO: 1784273 - RNA, 19 nt, Homo sapiens
  misc_RNA (1)...(19): siRNA sense strand
ccacgugaaggagagauga

SEQ ID NO: 1784274 - RNA, 19 nt, Homo sapiens
  misc_RNA (1)...(19): siRNA sense strand
gaccaaagcaccaauauca

SEQ ID NO: 1784275 - RNA, 19 nt, Homo sapiens
  misc_RNA (1)...(19): siRNA sense strand
caacaucuacuuccaagaa

SEQ ID NO: 1784276 - RNA, 19 nt, Homo sapiens
  misc_RNA (1)...(19): siRNA sense strand
gaacuucacguccaucuuc

SEQ ID NO: 1784277 - RNA, 19 nt, Homo sapiens
  misc_RNA (1)...(19): siRNA sense strand
gagcugagcccugcaacua

SEQ ID NO: 1784278 - RNA, 19 nt, Homo sapiens
  misc_RNA (1)...(19): siRNA sense strand
gcaaugacacccaguacaa

SEQ ID NO: 1784279 - RNA, 19 nt, Homo sapiens
  misc_RNA (1)...(19): siRNA sense strand
caaccacaauggcuuaaca

SEQ ID NO: 1784280 - RNA, 19 nt, Homo sapiens
  misc_RNA (1)...(19): siRNA sense strand
gauccuggccugccuauuc

SEQ ID NO: 1784281 - RNA, 19 nt, Homo sapiens
  misc_RNA (1)...(19): siRNA sense strand
ggaagggaauugucaagcu

SEQ ID NO: 1784282 - RNA, 19 nt, Homo sapiens
  misc_RNA (1)...(19): siRNA sense strand
ccaagcgcaucaucuguga

SEQ ID NO: 1784283 - RNA, 19 nt, Homo sapiens
  misc_RNA (1)...(19): siRNA sense strand
ggaccuggaugagcugaug

SEQ ID NO: 1784284 - RNA, 19 nt, Homo sapiens
  misc_RNA (1)...(19): siRNA sense strand
ggccaacccuggaacugaa

SEQ ID NO: 1784285 - RNA, 19 nt, Homo sapiens
  misc_RNA (1)...(19): siRNA sense strand
gaaguugauccuggacaua

SEQ ID NO: 1784286 - RNA, 19 nt, Homo sapiens
  misc_RNA (1)...(19): siRNA sense strand
ggagaucaucaucgacuuu

SEQ ID NO: 1784287 - RNA, 19 nt, Homo sapiens
  misc_RNA (1)...(19): siRNA sense strand
ggagaaauacugcaacaac

SEQ ID NO: 1784288 - RNA, 19 nt, Homo sapiens
  misc_RNA (1)...(19): siRNA sense strand
caucuacuuccaagaauuu

SEQ ID NO: 1784289 - RNA, 19 nt, Homo sapiens
  misc_RNA (1)...(19): siRNA sense strand
gaagaaucagcagccaaua

SEQ ID NO: 1784290 - RNA, 19 nt, Homo sapiens
  misc_RNA (1)...(19): siRNA sense strand
gagcuaagccaugccaaug

SEQ ID NO: 1784291 - RNA, 19 nt, Homo sapiens
  misc_RNA (1)...(19): siRNA sense strand
gcaggccaccaacaucuuu

SEQ ID NO: 1784292 - RNA, 19 nt, Homo sapiens
  misc_RNA (1)...(19): siRNA sense strand
caugguccuugaucucuuu

SEQ ID NO: 1784293 - RNA, 19 nt, Homo sapiens
  misc_RNA (1)...(19): siRNA sense strand
agacaaccacaauggcuua

SEQ ID NO: 1784294 - RNA, 19 nt, Homo sapiens
  misc_RNA (1)...(19): siRNA sense strand
uggcaacuguuacaucuuc

SEQ ID NO: 1784295 - RNA, 19 nt, Homo sapiens
  misc_RNA (1)...(19): siRNA sense strand
ggacauaggccaggaagac

SEQ ID NO: 1784296 - RNA, 19 nt, Homo sapiens
  misc_RNA (1)...(19): siRNA sense strand
gcccauugcuacucagauc

SEQ ID NO: 1784297 - RNA, 19 nt, Homo sapiens
  misc_RNA (1)...(19): siRNA sense strand
ggaauugucaagcucaaca

SEQ ID NO: 1784298 - RNA, 19 nt, Homo sapiens
  misc_RNA (1)...(19): siRNA sense strand
aagaaucagcagccaauaa

SEQ ID NO: 1784299 - RNA, 19 nt, Homo sapiens
  misc_RNA (1)...(19): siRNA sense strand
gucaccaucugcaaugcua

SEQ ID NO: 1784300 - RNA, 19 nt, Homo sapiens
  misc_RNA (1)...(19): siRNA sense strand
gaucaucaucgacuuugug

SEQ ID NO: 1784301 - RNA, 19 nt, Homo sapiens
  misc_RNA (1)...(19): siRNA sense strand
agaagaaagccaugugguu

SEQ ID NO: 1784302 - RNA, 19 nt, Homo sapiens
  misc_RNA (1)...(19): siRNA sense strand
gaagcuguccuggagagaa

SEQ ID NO: 1784303 - RNA, 19 nt, Homo sapiens
  misc_RNA (1)...(19): siRNA sense strand
uauggcaacuguuacaucu

SEQ ID NO: 1784304 - RNA, 19 nt, Homo sapiens
  misc_RNA (1)...(19): siRNA sense strand
gaagaaguaccugcugaag

SEQ ID NO: 1784305 - RNA, 19 nt, Homo sapiens
  misc_RNA (1)...(19): siRNA sense strand
aaccugaacuucuccaucu

SEQ ID NO: 1784306 - RNA, 19 nt, Homo sapiens
  misc_RNA (1)...(19): siRNA sense strand
ugaagaaucagcagccaau

SEQ ID NO: 1784307 - RNA, 19 nt, Homo sapiens
  misc_RNA (1)...(19): siRNA sense strand
uuaacuaucgcaccauuga

SEQ ID NO: 1784308 - RNA, 19 nt, Homo sapiens
  misc_RNA (1)...(19): siRNA sense strand
gguccuugaucucuuugga

SEQ ID NO: 1784309 - RNA, 19 nt, Homo sapiens
  misc_RNA (1)...(19): siRNA sense strand
gggagaucaucaucgacuu

SEQ ID NO: 1784310 - RNA, 19 nt, Homo sapiens
  misc_RNA (1)...(19): siRNA sense strand
ggaccaaagcaccaauauc

SEQ ID NO: 1784311 - RNA, 19 nt, Homo sapiens
  misc_RNA (1)...(19): siRNA sense strand
aagaccacaugauccguaa

SEQ ID NO: 1784312 - RNA, 19 nt, Homo sapiens
  misc_RNA (1)...(19): siRNA sense strand
gagacuauguagccucaac

SEQ ID NO: 1784313 - RNA, 19 nt, Homo sapiens
  misc_RNA (1)...(19): siRNA sense strand
caucuucuacccucacuau

SEQ ID NO: 1784314 - RNA, 19 nt, Homo sapiens
  misc_RNA (1)...(19): siRNA sense strand
gagaucaucaucgacuuug

SEQ ID NO: 1784315 - RNA, 19 nt, Homo sapiens
  misc_RNA (1)...(19): siRNA sense strand
ugaaguugauccuggacau

SEQ ID NO: 1784316 - RNA, 19 nt, Homo sapiens
  misc_RNA (1)...(19): siRNA sense strand
gcaggaagggaauugucaa

SEQ ID NO: 1784317 - RNA, 19 nt, Homo sapiens
  misc_RNA (1)...(19): siRNA sense strand
gagggcaucuacgccaugu

SEQ ID NO: 1784318 - RNA, 19 nt, Homo sapiens
  misc_RNA (1)...(19): siRNA sense strand
ggaggcccacaccaacuuu

SEQ ID NO: 1784319 - RNA, 19 nt, Homo sapiens
  misc_RNA (1)...(19): siRNA sense strand
acaucuacuuccaagaauu

SEQ ID NO: 1784320 - RNA, 19 nt, Homo sapiens
  misc_RNA (1)...(19): siRNA sense strand
uugucaagcucaacaucua

SEQ ID NO: 1784321 - RNA, 19 nt, Homo sapiens
  misc_RNA (1)...(19): siRNA sense strand
ccaagaagaaagccaugug

SEQ ID NO: 1784322 - RNA, 19 nt, Homo sapiens
  misc_RNA (1)...(19): siRNA sense strand
gcucaacaucuacuuccaa

SEQ ID NO: 1784323 - RNA, 19 nt, Homo sapiens
  misc_RNA (1)...(19): siRNA sense strand
gacacccaguacaagauga

SEQ ID NO: 1784324 - RNA, 19 nt, Homo sapiens
  misc_RNA (1)...(19): siRNA sense strand
aagcuguccuggagagaau

SEQ ID NO: 1784325 - RNA, 19 nt, Homo sapiens
  misc_RNA (1)...(19): siRNA sense strand
ucgcaccauugaagaauca

SEQ ID NO: 1784326 - RNA, 19 nt, Homo sapiens
  misc_RNA (1)...(19): siRNA sense strand
ugaagaaguaccugcugaa

SEQ ID NO: 1784327 - RNA, 19 nt, Homo sapiens
  misc_RNA (1)...(19): siRNA sense strand
aggagcugcugguguggua

SEQ ID NO: 1784328 - RNA, 19 nt, Homo sapiens
  misc_RNA (1)...(19): siRNA sense strand
caguguaccuuccggaacu

SEQ ID NO: 1784329 - RNA, 19 nt, Homo sapiens
  misc_RNA (1)...(19): siRNA sense strand
uccaagaauuuaacuaucg

SEQ ID NO: 1784330 - RNA, 19 nt, Homo sapiens
  misc_RNA (1)...(19): siRNA sense strand
caaaauggccaugagacua

SEQ ID NO: 1784331 - RNA, 19 nt, Homo sapiens
  misc_RNA (1)...(19): siRNA sense strand
acuguuacaucuucaacug

SEQ ID NO: 1784332 - RNA, 19 nt, Homo sapiens
  misc_RNA (1)...(19): siRNA sense strand
aagcagcucagcaucagaa

SEQ ID NO: 1784333 - RNA, 19 nt, Homo sapiens
  misc_RNA (1)...(19): siRNA sense strand
gaaucagcagccaauaaca

SEQ ID NO: 1784334 - RNA, 19 nt, Homo sapiens
  misc_RNA (1)...(19): siRNA sense strand
gagcaggaagggaauuguc

SEQ ID NO: 1784335 - RNA, 19 nt, Homo sapiens
  misc_RNA (1)...(19): siRNA sense strand
gggaccaaagcaccaauau

SEQ ID NO: 1784336 - RNA, 19 nt, Homo sapiens
  misc_RNA (1)...(19): siRNA sense strand
ccauugcuacucagaucua

SEQ ID NO: 1784337 - RNA, 19 nt, Homo sapiens
  misc_RNA (1)...(19): siRNA sense strand
agcaggagcuaguagagau

SEQ ID NO: 1784338 - RNA, 19 nt, Homo sapiens
  misc_RNA (1)...(19): siRNA sense strand
cagacugggcccauugcua

SEQ ID NO: 1784339 - RNA, 19 nt, Homo sapiens
  misc_RNA (1)...(19): siRNA sense strand
ggaucaccaucaucaagcu

SEQ ID NO: 1784340 - RNA, 19 nt, Homo sapiens
  misc_RNA (1)...(19): siRNA sense strand
ccaugguccuugaucucuu

SEQ ID NO: 1784341 - RNA, 19 nt, Homo sapiens
  misc_RNA (1)...(19): siRNA sense strand
gcaacuguuacaucuucaa

SEQ ID NO: 1784342 - RNA, 19 nt, Homo sapiens
  misc_RNA (1)...(19): siRNA sense strand
gcaggagcuaguagagaug

SEQ ID NO: 1784343 - RNA, 19 nt, Homo sapiens
  misc_RNA (1)...(19): siRNA sense strand
ccagugcuacccaggcauu

SEQ ID NO: 1784344 - RNA, 19 nt, Homo sapiens
  misc_RNA (1)...(19): siRNA sense strand
gcuagccccuucaaguauu

SEQ ID NO: 1784345 - RNA, 19 nt, Homo sapiens
  misc_RNA (1)...(19): siRNA sense strand
acaagcagcucagcaucag

SEQ ID NO: 1784346 - RNA, 19 nt, Homo sapiens
  misc_RNA (1)...(19): siRNA sense strand
uaacuaucgcaccauugaa

SEQ ID NO: 1784347 - RNA, 19 nt, Homo sapiens
  misc_RNA (1)...(19): siRNA sense strand
cagagagagaccugcauug

SEQ ID NO: 1784348 - RNA, 19 nt, Homo sapiens
  misc_RNA (1)...(19): siRNA sense strand
ggaacuucacguccaucuu

SEQ ID NO: 1784349 - RNA, 19 nt, Homo sapiens
  misc_RNA (1)...(19): siRNA sense strand
gcaacuaccggaacuucac

SEQ ID NO: 1784350 - RNA, 19 nt, Homo sapiens
  misc_RNA (1)...(19): siRNA sense strand
gcaucuucaucaggaccua

SEQ ID NO: 1784351 - RNA, 19 nt, Homo sapiens
  misc_RNA (1)...(19): siRNA sense strand
gcaccgugaaugguucuga

SEQ ID NO: 1784352 - RNA, 19 nt, Homo sapiens
  misc_RNA (1)...(19): siRNA sense strand
acauaggccaggaagacua

SEQ ID NO: 1784353 - RNA, 19 nt, Homo sapiens
  misc_RNA (1)...(19): siRNA sense strand
ucaucgagucugacaguga

SEQ ID NO: 1784354 - RNA, 19 nt, Homo sapiens
  misc_RNA (1)...(19): siRNA sense strand
agaaucagcagccaauaac

SEQ ID NO: 1784355 - RNA, 19 nt, Homo sapiens
  misc_RNA (1)...(19): siRNA sense strand
caagcucaacaucuacuuc

SEQ ID NO: 1784356 - RNA, 19 nt, Homo sapiens
  misc_RNA (1)...(19): siRNA sense strand
ugacacccaguacaagaug

SEQ ID NO: 1784357 - RNA, 19 nt, Homo sapiens
  misc_RNA (1)...(19): siRNA sense strand
gcgaaacgcugcacugguu

SEQ ID NO: 1784358 - RNA, 19 nt, Homo sapiens
  misc_RNA (1)...(19): siRNA sense strand
caagggagcugggccauga

SEQ ID NO: 1784359 - RNA, 19 nt, Homo sapiens
  misc_RNA (1)...(19): siRNA sense strand
gcuggagcgugauguauag

SEQ ID NO: 1784360 - RNA, 19 nt, Homo sapiens
  misc_RNA (1)...(19): siRNA sense strand
gugaugcccucgaccuaau

SEQ ID NO: 1784361 - RNA, 19 nt, Homo sapiens
  misc_RNA (1)...(19): siRNA sense strand
ggcuggagcgugauguaua

SEQ ID NO: 1784362 - RNA, 19 nt, Homo sapiens
  misc_RNA (1)...(19): siRNA sense strand
acgcugcacugguuaguuc

SEQ ID NO: 1784363 - RNA, 19 nt, Homo sapiens
  misc_RNA (1)...(19): siRNA sense strand
ggagcgugauguauagcau

SEQ ID NO: 1784364 - RNA, 19 nt, Homo sapiens
  misc_RNA (1)...(19): siRNA sense strand
cgaaacgcugcacugguua

SEQ ID NO: 1784365 - RNA, 19 nt, Homo sapiens
  misc_RNA (1)...(19): siRNA sense strand
ggugaugcccucgaccuaa

SEQ ID NO: 1784366 - RNA, 19 nt, Homo sapiens
  misc_RNA (1)...(19): siRNA sense strand
ccuccagccgcuugcauua

SEQ ID NO: 1784367 - RNA, 19 nt, Homo sapiens
  misc_RNA (1)...(19): siRNA sense strand
gaaugggcuaugccucuga

SEQ ID NO: 1784368 - RNA, 19 nt, Homo sapiens
  misc_RNA (1)...(19): siRNA sense strand
gcucgacggcuaccagauc

SEQ ID NO: 1784369 - RNA, 19 nt, Homo sapiens
  misc_RNA (1)...(19): siRNA sense strand
gaaacgcugcacugguuag

SEQ ID NO: 1784370 - RNA, 19 nt, Homo sapiens
  misc_RNA (1)...(19): siRNA sense strand
ggcucgcgcuuccacaguu

SEQ ID NO: 1784371 - RNA, 19 nt, Homo sapiens
  misc_RNA (1)...(19): siRNA sense strand
gcuaugggacaguguucaa

SEQ ID NO: 1784372 - RNA, 19 nt, Homo sapiens
  misc_RNA (1)...(19): siRNA sense strand
gcucgcgcuuccacaguuc

SEQ ID NO: 1784373 - RNA, 19 nt, Homo sapiens
  misc_RNA (1)...(19): siRNA sense strand
gcccucgaccuaaucauuc

SEQ ID NO: 1784374 - RNA, 19 nt, Homo sapiens
  misc_RNA (1)...(19): siRNA sense strand
gaagugcuguuuacucauu

SEQ ID NO: 1784375 - RNA, 19 nt, Homo sapiens
  misc_RNA (1)...(19): siRNA sense strand
ggaggaugcuguacacauu

SEQ ID NO: 1784376 - RNA, 19 nt, Homo sapiens
  misc_RNA (1)...(19): siRNA sense strand
ugacauggaugaaauugaa

SEQ ID NO: 1784377 - RNA, 19 nt, Homo sapiens
  misc_RNA (1)...(19): siRNA sense strand
ccaagcagcagaacaaaua

SEQ ID NO: 1784378 - RNA, 19 nt, Homo sapiens
  misc_RNA (1)...(19): siRNA sense strand
gagaugaacauucuagaaa

SEQ ID NO: 1784379 - RNA, 19 nt, Homo sapiens
  misc_RNA (1)...(19): siRNA sense strand
gagaugaacauucuagaaa

SEQ ID NO: 1784380 - RNA, 19 nt, Homo sapiens
  misc_RNA (1)...(19): siRNA sense strand
ucagaagccucaaagagaa

SEQ ID NO: 1784381 - RNA, 19 nt, Homo sapiens
  misc_RNA (1)...(19): siRNA sense strand
cagaagugcuguuuacuca

SEQ ID NO: 1784382 - RNA, 19 nt, Homo sapiens
  misc_RNA (1)...(19): siRNA sense strand
gccaucacuuguucaaaua

SEQ ID NO: 1784383 - RNA, 19 nt, Homo sapiens
  misc_RNA (1)...(19): siRNA sense strand
gccaucacuuguucaaaua

SEQ ID NO: 1784384 - RNA, 19 nt, Homo sapiens
  misc_RNA (1)...(19): siRNA sense strand
ucaggaugcucuaaacauu

SEQ ID NO: 1784385 - RNA, 19 nt, Homo sapiens
  misc_RNA (1)...(19): siRNA sense strand
ggauagauguuauucaacu

SEQ ID NO: 1784386 - RNA, 19 nt, Homo sapiens
  misc_RNA (1)...(19): siRNA sense strand
ugaaagugaugaugaggaa

SEQ ID NO: 1784387 - RNA, 19 nt, Homo sapiens
  misc_RNA (1)...(19): siRNA sense strand
gaugaacauucuagaaauc

SEQ ID NO: 1784388 - RNA, 19 nt, Homo sapiens
  misc_RNA (1)...(19): siRNA sense strand
gaggagcucaggcaauaua

SEQ ID NO: 1784389 - RNA, 19 nt, Homo sapiens
  misc_RNA (1)...(19): siRNA sense strand
gaugaacauucuagaaauc

SEQ ID NO: 1784390 - RNA, 19 nt, Homo sapiens
  misc_RNA (1)...(19): siRNA sense strand
gaggagcucaggcaauaua

SEQ ID NO: 1784391 - RNA, 19 nt, Homo sapiens
  misc_RNA (1)...(19): siRNA sense strand
gacagaagaaauacaagua

SEQ ID NO: 1784392 - RNA, 19 nt, Homo sapiens
  misc_RNA (1)...(19): siRNA sense strand
ggacaucggugggaucaag

SEQ ID NO: 1784393 - RNA, 19 nt, Homo sapiens
  misc_RNA (1)...(19): siRNA sense strand
ggaaugagcgacaguucaa

SEQ ID NO: 1784394 - RNA, 19 nt, Homo sapiens
  misc_RNA (1)...(19): siRNA sense strand
gcagaaggcugaagaaaag

SEQ ID NO: 1784395 - RNA, 19 nt, Homo sapiens
  misc_RNA (1)...(19): siRNA sense strand
ggaaugagcgacaguucaa

SEQ ID NO: 1784396 - RNA, 19 nt, Homo sapiens
  misc_RNA (1)...(19): siRNA sense strand
ugacgaagaugaggaugaa

SEQ ID NO: 1784397 - RNA, 19 nt, Homo sapiens
  misc_RNA (1)...(19): siRNA sense strand
acaaacagcaguucagaaa

SEQ ID NO: 1784398 - RNA, 19 nt, Homo sapiens
  misc_RNA (1)...(19): siRNA sense strand
ugaggaggaugagaaagua

SEQ ID NO: 1784399 - RNA, 19 nt, Homo sapiens
  misc_RNA (1)...(19): siRNA sense strand
gcacagcaccuuguccaaa

SEQ ID NO: 1784400 - RNA, 19 nt, Homo sapiens
  misc_RNA (1)...(19): siRNA sense strand
gcacagcaccuuguccaaa

SEQ ID NO: 1784401 - RNA, 19 nt, Homo sapiens
  misc_RNA (1)...(19): siRNA sense strand
ugauaacgaugacgaugaa

SEQ ID NO: 1784402 - RNA, 19 nt, Homo sapiens
  misc_RNA (1)...(19): siRNA sense strand
gaagaaacagcaguucaga

SEQ ID NO: 1784403 - RNA, 19 nt, Homo sapiens
  misc_RNA (1)...(19): siRNA sense strand
gaggaugcuguacacauua

SEQ ID NO: 1784404 - RNA, 19 nt, Homo sapiens
  misc_RNA (1)...(19): siRNA sense strand
ggaggaaugugccaucacu

SEQ ID NO: 1784405 - RNA, 19 nt, Homo sapiens
  misc_RNA (1)...(19): siRNA sense strand
caaauagccauggcccuua

SEQ ID NO: 1784406 - RNA, 19 nt, Homo sapiens
  misc_RNA (1)...(19): siRNA sense strand
aacgagagcugacccaguu

SEQ ID NO: 1784407 - RNA, 19 nt, Homo sapiens
  misc_RNA (1)...(19): siRNA sense strand
ggcaggaccuccaagaaca

SEQ ID NO: 1784408 - RNA, 19 nt, Homo sapiens
  misc_RNA (1)...(19): siRNA sense strand
aacgagagcugacccaguu

SEQ ID NO: 1784409 - RNA, 19 nt, Homo sapiens
  misc_RNA (1)...(19): siRNA sense strand
uaacucaaguggccugcuu

SEQ ID NO: 1784410 - RNA, 19 nt, Homo sapiens
  misc_RNA (1)...(19): siRNA sense strand
ggcaggaccuccaagaaca

SEQ ID NO: 1784411 - RNA, 19 nt, Homo sapiens
  misc_RNA (1)...(19): siRNA sense strand
agaaaguacuggaaucauc

SEQ ID NO: 1784412 - RNA, 19 nt, Homo sapiens
  misc_RNA (1)...(19): siRNA sense strand
cgaugacgaugaagauguu

SEQ ID NO: 1784413 - RNA, 19 nt, Homo sapiens
  misc_RNA (1)...(19): siRNA sense strand
cuggauagauguuauucaa

SEQ ID NO: 1784414 - RNA, 19 nt, Homo sapiens
  misc_RNA (1)...(19): siRNA sense strand
uggcuuggcuguugacaug

SEQ ID NO: 1784415 - RNA, 19 nt, Homo sapiens
  misc_RNA (1)...(19): siRNA sense strand
gaaaguacuggaaucaucu

SEQ ID NO: 1784416 - RNA, 19 nt, Homo sapiens
  misc_RNA (1)...(19): siRNA sense strand
gaaugugccaucacuuguu

SEQ ID NO: 1784417 - RNA, 19 nt, Homo sapiens
  misc_RNA (1)...(19): siRNA sense strand
ggaaucugcaggagucuga

SEQ ID NO: 1784418 - RNA, 19 nt, Homo sapiens
  misc_RNA (1)...(19): siRNA sense strand
aaagucgacucaacucuca

SEQ ID NO: 1784419 - RNA, 19 nt, Homo sapiens
  misc_RNA (1)...(19): siRNA sense strand
ccaaccgacagaagaaaua

SEQ ID NO: 1784420 - RNA, 19 nt, Homo sapiens
  misc_RNA (1)...(19): siRNA sense strand
ggaccaagaagaggaagaa

SEQ ID NO: 1784421 - RNA, 19 nt, Homo sapiens
  misc_RNA (1)...(19): siRNA sense strand
gagaagaaacagcaguuca

SEQ ID NO: 1784422 - RNA, 19 nt, Homo sapiens
  misc_RNA (1)...(19): siRNA sense strand
ggaagacaaagucaacuca

SEQ ID NO: 1784423 - RNA, 19 nt, Homo sapiens
  misc_RNA (1)...(19): siRNA sense strand
aauauaaaguccugguuca

SEQ ID NO: 1784424 - RNA, 19 nt, Homo sapiens
  misc_RNA (1)...(19): siRNA sense strand
ccaaccagccacauagaaa

SEQ ID NO: 1784425 - RNA, 19 nt, Homo sapiens
  misc_RNA (1)...(19): siRNA sense strand
ugagguggcugagaaagug

SEQ ID NO: 1784426 - RNA, 19 nt, Homo sapiens
  misc_RNA (1)...(19): siRNA sense strand
aauauaaaguccugguuca

SEQ ID NO: 1784427 - RNA, 19 nt, Homo sapiens
  misc_RNA (1)...(19): siRNA sense strand
gcagagaugaacauucuag

SEQ ID NO: 1784428 - RNA, 19 nt, Homo sapiens
  misc_RNA (1)...(19): siRNA sense strand
ggccagcccuacagaagug

SEQ ID NO: 1784429 - RNA, 19 nt, Homo sapiens
  misc_RNA (1)...(19): siRNA sense strand
gcagagaugaacauucuag

SEQ ID NO: 1784430 - RNA, 19 nt, Homo sapiens
  misc_RNA (1)...(19): siRNA sense strand
ugccaucacuuguucaaau

SEQ ID NO: 1784431 - RNA, 19 nt, Homo sapiens
  misc_RNA (1)...(19): siRNA sense strand
ggaagacaaagucgacuca

SEQ ID NO: 1784432 - RNA, 19 nt, Homo sapiens
  misc_RNA (1)...(19): siRNA sense strand
ugccaucacuuguucaaau

SEQ ID NO: 1784433 - RNA, 19 nt, Homo sapiens
  misc_RNA (1)...(19): siRNA sense strand
gaaaucaacgagaaauugc

SEQ ID NO: 1784434 - RNA, 19 nt, Homo sapiens
  misc_RNA (1)...(19): siRNA sense strand
cagcagaacaaauacaaau

SEQ ID NO: 1784435 - RNA, 19 nt, Homo sapiens
  misc_RNA (1)...(19): siRNA sense strand
aggcagagaugaacauucu

SEQ ID NO: 1784436 - RNA, 19 nt, Homo sapiens
  misc_RNA (1)...(19): siRNA sense strand
aggcagagaugaacauucu

SEQ ID NO: 1784437 - RNA, 19 nt, Homo sapiens
  misc_RNA (1)...(19): siRNA sense strand
acucaucucugguuguaga

SEQ ID NO: 1784438 - RNA, 19 nt, Homo sapiens
  misc_RNA (1)...(19): siRNA sense strand
gaaguuccuuuuaugcauu

SEQ ID NO: 1784439 - RNA, 19 nt, Homo sapiens
  misc_RNA (1)...(19): siRNA sense strand
gaagguuauucgacucucu

SEQ ID NO: 1784440 - RNA, 19 nt, Homo sapiens
  misc_RNA (1)...(19): siRNA sense strand
agaauccucucaugaugga

SEQ ID NO: 1784441 - RNA, 19 nt, Homo sapiens
  misc_RNA (1)...(19): siRNA sense strand
gagcucaggcaauauaaag

SEQ ID NO: 1784442 - RNA, 19 nt, Homo sapiens
  misc_RNA (1)...(19): siRNA sense strand
gcgagaaggcagagaugaa

SEQ ID NO: 1784443 - RNA, 19 nt, Homo sapiens
  misc_RNA (1)...(19): siRNA sense strand
aaauagccauggcccuuau

SEQ ID NO: 1784444 - RNA, 19 nt, Homo sapiens
  misc_RNA (1)...(19): siRNA sense strand
gagcucaggcaauauaaag

SEQ ID NO: 1784445 - RNA, 19 nt, Homo sapiens
  misc_RNA (1)...(19): siRNA sense strand
gcgagaaggcagagaugaa

SEQ ID NO: 1784446 - RNA, 19 nt, Homo sapiens
  misc_RNA (1)...(19): siRNA sense strand
ccacaaacgucagcauggu

SEQ ID NO: 1784447 - RNA, 19 nt, Homo sapiens
  misc_RNA (1)...(19): siRNA sense strand
ggaaugugccaucacuugu

SEQ ID NO: 1784448 - RNA, 19 nt, Homo sapiens
  misc_RNA (1)...(19): siRNA sense strand
gaugagaaaguacuggaau

SEQ ID NO: 1784449 - RNA, 19 nt, Homo sapiens
  misc_RNA (1)...(19): siRNA sense strand
agaaaucaacgagaaauug

SEQ ID NO: 1784450 - RNA, 19 nt, Homo sapiens
  misc_RNA (1)...(19): siRNA sense strand
agaugaggaugaagauguu

SEQ ID NO: 1784451 - RNA, 19 nt, Homo sapiens
  misc_RNA (1)...(19): siRNA sense strand
uaccuuggcuuggcucuug

SEQ ID NO: 1784452 - RNA, 19 nt, Homo sapiens
  misc_RNA (1)...(19): siRNA sense strand
cuggauagauguuauucga

SEQ ID NO: 1784453 - RNA, 19 nt, Homo sapiens
  misc_RNA (1)...(19): siRNA sense strand
ucggugggaucaagugaaa

SEQ ID NO: 1784454 - RNA, 19 nt, Homo sapiens
  misc_RNA (1)...(19): siRNA sense strand
cugagaaagugcagaaauc

SEQ ID NO: 1784455 - RNA, 19 nt, Homo sapiens
  misc_RNA (1)...(19): siRNA sense strand
gugcaaagaccucauaaaa

SEQ ID NO: 1784456 - RNA, 19 nt, Homo sapiens
  misc_RNA (1)...(19): siRNA sense strand
acaaguaugaagaguguaa

SEQ ID NO: 1784457 - RNA, 19 nt, Homo sapiens
  misc_RNA (1)...(19): siRNA sense strand
cauguuggcuuuucucuug

SEQ ID NO: 1784458 - RNA, 19 nt, Homo sapiens
  misc_RNA (1)...(19): siRNA sense strand
gaaggcagagaugaacauu

SEQ ID NO: 1784459 - RNA, 19 nt, Homo sapiens
  misc_RNA (1)...(19): siRNA sense strand
gccagugucucccaggaau

SEQ ID NO: 1784460 - RNA, 19 nt, Homo sapiens
  misc_RNA (1)...(19): siRNA sense strand
gaaggcagagaugaacauu

SEQ ID NO: 1784461 - RNA, 19 nt, Homo sapiens
  misc_RNA (1)...(19): siRNA sense strand
gcaauauaaaguccugguu

SEQ ID NO: 1784462 - RNA, 19 nt, Homo sapiens
  misc_RNA (1)...(19): siRNA sense strand
accaagaaguggaagaaga

SEQ ID NO: 1784463 - RNA, 19 nt, Homo sapiens
  misc_RNA (1)...(19): siRNA sense strand
guaccaagaaguggaagaa

SEQ ID NO: 1784464 - RNA, 19 nt, Homo sapiens
  misc_RNA (1)...(19): siRNA sense strand
guccugggaugaagguuau

SEQ ID NO: 1784465 - RNA, 19 nt, Homo sapiens
  misc_RNA (1)...(19): siRNA sense strand
uaacgaugacgaugaagau

SEQ ID NO: 1784466 - RNA, 19 nt, Homo sapiens
  misc_RNA (1)...(19): siRNA sense strand
gcaauauaaaguccugguu

SEQ ID NO: 1784467 - RNA, 19 nt, Homo sapiens
  misc_RNA (1)...(19): siRNA sense strand
gcagcagaacaaauacaaa

SEQ ID NO: 1784468 - RNA, 19 nt, Homo sapiens
  misc_RNA (1)...(19): siRNA sense strand
gaugucaggaugcucuaaa

SEQ ID NO: 1784469 - RNA, 19 nt, Homo sapiens
  misc_RNA (1)...(19): siRNA sense strand
aaacagcaguucagaaacc

SEQ ID NO: 1784470 - RNA, 19 nt, Homo sapiens
  misc_RNA (1)...(19): siRNA sense strand
gaguguaaagaccucauaa

SEQ ID NO: 1784471 - RNA, 19 nt, Homo sapiens
  misc_RNA (1)...(19): siRNA sense strand
uuauucgacucucucaauu

SEQ ID NO: 1784472 - RNA, 19 nt, Homo sapiens
  misc_RNA (1)...(19): siRNA sense strand
agaaacagcaguucagaag

SEQ ID NO: 1784473 - RNA, 19 nt, Homo sapiens
  misc_RNA (1)...(19): siRNA sense strand
aaaugaaagugaugaugag

SEQ ID NO: 1784474 - RNA, 19 nt, Homo sapiens
  misc_RNA (1)...(19): siRNA sense strand
ggaagugccugaagucuua

SEQ ID NO: 1784475 - RNA, 19 nt, Homo sapiens
  misc_RNA (1)...(19): siRNA sense strand
caacugcucuugacaauug

SEQ ID NO: 1784476 - RNA, 19 nt, Homo sapiens
  misc_RNA (1)...(19): siRNA sense strand
gaagugcuguuuacucauu

SEQ ID NO: 1784477 - RNA, 19 nt, Homo sapiens
  misc_RNA (1)...(19): siRNA sense strand
ggaggaugcuguacacauu

SEQ ID NO: 1784478 - RNA, 19 nt, Homo sapiens
  misc_RNA (1)...(19): siRNA sense strand
ugacauggaugaaauugaa

SEQ ID NO: 1784479 - RNA, 19 nt, Homo sapiens
  misc_RNA (1)...(19): siRNA sense strand
ccaagcagcagaacaaaua

SEQ ID NO: 1784480 - RNA, 19 nt, Homo sapiens
  misc_RNA (1)...(19): siRNA sense strand
gagaugaacauucuagaaa

SEQ ID NO: 1784481 - RNA, 19 nt, Homo sapiens
  misc_RNA (1)...(19): siRNA sense strand
gagaugaacauucuagaaa

SEQ ID NO: 1784482 - RNA, 19 nt, Homo sapiens
  misc_RNA (1)...(19): siRNA sense strand
ucagaagccucaaagagaa

SEQ ID NO: 1784483 - RNA, 19 nt, Homo sapiens
  misc_RNA (1)...(19): siRNA sense strand
cagaagugcuguuuacuca

SEQ ID NO: 1784484 - RNA, 19 nt, Homo sapiens
  misc_RNA (1)...(19): siRNA sense strand
gccaucacuuguucaaaua

SEQ ID NO: 1784485 - RNA, 19 nt, Homo sapiens
  misc_RNA (1)...(19): siRNA sense strand
gccaucacuuguucaaaua

SEQ ID NO: 1784486 - RNA, 19 nt, Homo sapiens
  misc_RNA (1)...(19): siRNA sense strand
ucaggaugcucuaaacauu

SEQ ID NO: 1784487 - RNA, 19 nt, Homo sapiens
  misc_RNA (1)...(19): siRNA sense strand
ggauagauguuauucaacu

SEQ ID NO: 1784488 - RNA, 19 nt, Homo sapiens
  misc_RNA (1)...(19): siRNA sense strand
ugaaagugaugaugaggaa

SEQ ID NO: 1784489 - RNA, 19 nt, Homo sapiens
  misc_RNA (1)...(19): siRNA sense strand
gaugaacauucuagaaauc

SEQ ID NO: 1784490 - RNA, 19 nt, Homo sapiens
  misc_RNA (1)...(19): siRNA sense strand
gaggagcucaggcaauaua

SEQ ID NO: 1784491 - RNA, 19 nt, Homo sapiens
  misc_RNA (1)...(19): siRNA sense strand
gaugaacauucuagaaauc

SEQ ID NO: 1784492 - RNA, 19 nt, Homo sapiens
  misc_RNA (1)...(19): siRNA sense strand
gaggagcucaggcaauaua

SEQ ID NO: 1784493 - RNA, 19 nt, Homo sapiens
  misc_RNA (1)...(19): siRNA sense strand
gacagaagaaauacaagua

SEQ ID NO: 1784494 - RNA, 19 nt, Homo sapiens
  misc_RNA (1)...(19): siRNA sense strand
ggacaucggugggaucaag

SEQ ID NO: 1784495 - RNA, 19 nt, Homo sapiens
  misc_RNA (1)...(19): siRNA sense strand
ggaaugagcgacaguucaa

SEQ ID NO: 1784496 - RNA, 19 nt, Homo sapiens
  misc_RNA (1)...(19): siRNA sense strand
gcagaaggcugaagaaaag

SEQ ID NO: 1784497 - RNA, 19 nt, Homo sapiens
  misc_RNA (1)...(19): siRNA sense strand
ggaaugagcgacaguucaa

SEQ ID NO: 1784498 - RNA, 19 nt, Homo sapiens
  misc_RNA (1)...(19): siRNA sense strand
ugacgaagaugaggaugaa

SEQ ID NO: 1784499 - RNA, 19 nt, Homo sapiens
  misc_RNA (1)...(19): siRNA sense strand
acaaacagcaguucagaaa

SEQ ID NO: 1784500 - RNA, 19 nt, Homo sapiens
  misc_RNA (1)...(19): siRNA sense strand
ugaggaggaugagaaagua

SEQ ID NO: 1784501 - RNA, 19 nt, Homo sapiens
  misc_RNA (1)...(19): siRNA sense strand
gcacagcaccuuguccaaa

SEQ ID NO: 1784502 - RNA, 19 nt, Homo sapiens
  misc_RNA (1)...(19): siRNA sense strand
gcacagcaccuuguccaaa

SEQ ID NO: 1784503 - RNA, 19 nt, Homo sapiens
  misc_RNA (1)...(19): siRNA sense strand
ugauaacgaugacgaugaa

SEQ ID NO: 1784504 - RNA, 19 nt, Homo sapiens
  misc_RNA (1)...(19): siRNA sense strand
gaagaaacagcaguucaga

SEQ ID NO: 1784505 - RNA, 19 nt, Homo sapiens
  misc_RNA (1)...(19): siRNA sense strand
gaggaugcuguacacauua

SEQ ID NO: 1784506 - RNA, 19 nt, Homo sapiens
  misc_RNA (1)...(19): siRNA sense strand
ggaggaaugugccaucacu

SEQ ID NO: 1784507 - RNA, 19 nt, Homo sapiens
  misc_RNA (1)...(19): siRNA sense strand
caaauagccauggcccuua

SEQ ID NO: 1784508 - RNA, 19 nt, Homo sapiens
  misc_RNA (1)...(19): siRNA sense strand
aacgagagcugacccaguu

SEQ ID NO: 1784509 - RNA, 19 nt, Homo sapiens
  misc_RNA (1)...(19): siRNA sense strand
ggcaggaccuccaagaaca

SEQ ID NO: 1784510 - RNA, 19 nt, Homo sapiens
  misc_RNA (1)...(19): siRNA sense strand
aacgagagcugacccaguu

SEQ ID NO: 1784511 - RNA, 19 nt, Homo sapiens
  misc_RNA (1)...(19): siRNA sense strand
uaacucaaguggccugcuu

SEQ ID NO: 1784512 - RNA, 19 nt, Homo sapiens
  misc_RNA (1)...(19): siRNA sense strand
ggcaggaccuccaagaaca

SEQ ID NO: 1784513 - RNA, 19 nt, Homo sapiens
  misc_RNA (1)...(19): siRNA sense strand
agaaaguacuggaaucauc

SEQ ID NO: 1784514 - RNA, 19 nt, Homo sapiens
  misc_RNA (1)...(19): siRNA sense strand
cgaugacgaugaagauguu

SEQ ID NO: 1784515 - RNA, 19 nt, Homo sapiens
  misc_RNA (1)...(19): siRNA sense strand
cuggauagauguuauucaa

SEQ ID NO: 1784516 - RNA, 19 nt, Homo sapiens
  misc_RNA (1)...(19): siRNA sense strand
uggcuuggcuguugacaug

SEQ ID NO: 1784517 - RNA, 19 nt, Homo sapiens
  misc_RNA (1)...(19): siRNA sense strand
gaaaguacuggaaucaucu

SEQ ID NO: 1784518 - RNA, 19 nt, Homo sapiens
  misc_RNA (1)...(19): siRNA sense strand
gaaugugccaucacuuguu

SEQ ID NO: 1784519 - RNA, 19 nt, Homo sapiens
  misc_RNA (1)...(19): siRNA sense strand
ggaaucugcaggagucuga

SEQ ID NO: 1784520 - RNA, 19 nt, Homo sapiens
  misc_RNA (1)...(19): siRNA sense strand
aaagucgacucaacucuca

SEQ ID NO: 1784521 - RNA, 19 nt, Homo sapiens
  misc_RNA (1)...(19): siRNA sense strand
ccaaccgacagaagaaaua

SEQ ID NO: 1784522 - RNA, 19 nt, Homo sapiens
  misc_RNA (1)...(19): siRNA sense strand
ggaccaagaagaggaagaa

SEQ ID NO: 1784523 - RNA, 19 nt, Homo sapiens
  misc_RNA (1)...(19): siRNA sense strand
gagaagaaacagcaguuca

SEQ ID NO: 1784524 - RNA, 19 nt, Homo sapiens
  misc_RNA (1)...(19): siRNA sense strand
ggaagacaaagucaacuca

SEQ ID NO: 1784525 - RNA, 19 nt, Homo sapiens
  misc_RNA (1)...(19): siRNA sense strand
aauauaaaguccugguuca

SEQ ID NO: 1784526 - RNA, 19 nt, Homo sapiens
  misc_RNA (1)...(19): siRNA sense strand
gaaguguguuuuacucauu

SEQ ID NO: 1784527 - RNA, 19 nt, Homo sapiens
  misc_RNA (1)...(19): siRNA sense strand
ccaaccagccacauagaaa

SEQ ID NO: 1784528 - RNA, 19 nt, Homo sapiens
  misc_RNA (1)...(19): siRNA sense strand
ugagguggcugagaaagug

SEQ ID NO: 1784529 - RNA, 19 nt, Homo sapiens
  misc_RNA (1)...(19): siRNA sense strand
aauauaaaguccugguuca

SEQ ID NO: 1784530 - RNA, 19 nt, Homo sapiens
  misc_RNA (1)...(19): siRNA sense strand
gcagagaugaacauucuag

SEQ ID NO: 1784531 - RNA, 19 nt, Homo sapiens
  misc_RNA (1)...(19): siRNA sense strand
ggccagcccuacagaagug

SEQ ID NO: 1784532 - RNA, 19 nt, Homo sapiens
  misc_RNA (1)...(19): siRNA sense strand
gcagagaugaacauucuag

SEQ ID NO: 1784533 - RNA, 19 nt, Homo sapiens
  misc_RNA (1)...(19): siRNA sense strand
gaaaucaacgagaaauugc

SEQ ID NO: 1784534 - RNA, 19 nt, Homo sapiens
  misc_RNA (1)...(19): siRNA sense strand
aggcagagaugaacauucu

SEQ ID NO: 1784535 - RNA, 19 nt, Homo sapiens
  misc_RNA (1)...(19): siRNA sense strand
ggaagacaaagucgacuca

SEQ ID NO: 1784536 - RNA, 19 nt, Homo sapiens
  misc_RNA (1)...(19): siRNA sense strand
ugccaucacuuguucaaau

SEQ ID NO: 1784537 - RNA, 19 nt, Homo sapiens
  misc_RNA (1)...(19): siRNA sense strand
cagcagaacaaauacaaau

SEQ ID NO: 1784538 - RNA, 19 nt, Homo sapiens
  misc_RNA (1)...(19): siRNA sense strand
aggcagagaugaacauucu

SEQ ID NO: 1784539 - RNA, 19 nt, Homo sapiens
  misc_RNA (1)...(19): siRNA sense strand
ugccaucacuuguucaaau

SEQ ID NO: 1784540 - RNA, 19 nt, Homo sapiens
  misc_RNA (1)...(19): siRNA sense strand
acucaucucugguuguaga

SEQ ID NO: 1784541 - RNA, 19 nt, Homo sapiens
  misc_RNA (1)...(19): siRNA sense strand
gaaguuccuuuuaugcauu

SEQ ID NO: 1784542 - RNA, 19 nt, Homo sapiens
  misc_RNA (1)...(19): siRNA sense strand
gaagguuauucgacucucu

SEQ ID NO: 1784543 - RNA, 19 nt, Homo sapiens
  misc_RNA (1)...(19): siRNA sense strand
agaauccucucaugaugga

SEQ ID NO: 1784544 - RNA, 19 nt, Homo sapiens
  misc_RNA (1)...(19): siRNA sense strand
gagcucaggcaauauaaag

SEQ ID NO: 1784545 - RNA, 19 nt, Homo sapiens
  misc_RNA (1)...(19): siRNA sense strand
aaauagccauggcccuuau

SEQ ID NO: 1784546 - RNA, 19 nt, Homo sapiens
  misc_RNA (1)...(19): siRNA sense strand
gagcucaggcaauauaaag

SEQ ID NO: 1784547 - RNA, 19 nt, Homo sapiens
  misc_RNA (1)...(19): siRNA sense strand
gcgagaaggcagagaugaa

SEQ ID NO: 1784548 - RNA, 19 nt, Homo sapiens
  misc_RNA (1)...(19): siRNA sense strand
gcgagaaggcagagaugaa

SEQ ID NO: 1784549 - RNA, 19 nt, Homo sapiens
  misc_RNA (1)...(19): siRNA sense strand
ccacaaacgucagcauggu

SEQ ID NO: 1784550 - RNA, 19 nt, Homo sapiens
  misc_RNA (1)...(19): siRNA sense strand
ggaaugugccaucacuugu

SEQ ID NO: 1784551 - RNA, 19 nt, Homo sapiens
  misc_RNA (1)...(19): siRNA sense strand
gaugagaaaguacuggaau

SEQ ID NO: 1784552 - RNA, 19 nt, Homo sapiens
  misc_RNA (1)...(19): siRNA sense strand
agaaaucaacgagaaauug

SEQ ID NO: 1784553 - RNA, 19 nt, Homo sapiens
  misc_RNA (1)...(19): siRNA sense strand
agaugaggaugaagauguu

SEQ ID NO: 1784554 - RNA, 19 nt, Homo sapiens
  misc_RNA (1)...(19): siRNA sense strand
uaccuuggcuuggcucuug

SEQ ID NO: 1784555 - RNA, 19 nt, Homo sapiens
  misc_RNA (1)...(19): siRNA sense strand
cuggauagauguuauucga

SEQ ID NO: 1784556 - RNA, 19 nt, Homo sapiens
  misc_RNA (1)...(19): siRNA sense strand
ucggugggaucaagugaaa

SEQ ID NO: 1784557 - RNA, 19 nt, Homo sapiens
  misc_RNA (1)...(19): siRNA sense strand
cugagaaagugcagaaauc

SEQ ID NO: 1784558 - RNA, 19 nt, Homo sapiens
  misc_RNA (1)...(19): siRNA sense strand
gugcaaagaccucauaaaa

SEQ ID NO: 1784559 - RNA, 19 nt, Homo sapiens
  misc_RNA (1)...(19): siRNA sense strand
acaaguaugaagaguguaa

SEQ ID NO: 1784560 - RNA, 19 nt, Homo sapiens
  misc_RNA (1)...(19): siRNA sense strand
cauguuggcuuuucucuug

SEQ ID NO: 1784561 - RNA, 19 nt, Homo sapiens
  misc_RNA (1)...(19): siRNA sense strand
gccagugucucccaggaau

SEQ ID NO: 1784562 - RNA, 19 nt, Homo sapiens
  misc_RNA (1)...(19): siRNA sense strand
gaaggcagagaugaacauu

SEQ ID NO: 1784563 - RNA, 19 nt, Homo sapiens
  misc_RNA (1)...(19): siRNA sense strand
gaaggcagagaugaacauu

SEQ ID NO: 1784564 - RNA, 19 nt, Homo sapiens
  misc_RNA (1)...(19): siRNA sense strand
gcaauauaaaguccugguu

SEQ ID NO: 1784565 - RNA, 19 nt, Homo sapiens
  misc_RNA (1)...(19): siRNA sense strand
accaagaaguggaagaaga

SEQ ID NO: 1784566 - RNA, 19 nt, Homo sapiens
  misc_RNA (1)...(19): siRNA sense strand
guaccaagaaguggaagaa

SEQ ID NO: 1784567 - RNA, 19 nt, Homo sapiens
  misc_RNA (1)...(19): siRNA sense strand
guccugggaugaagguuau

SEQ ID NO: 1784568 - RNA, 19 nt, Homo sapiens
  misc_RNA (1)...(19): siRNA sense strand
uaacgaugacgaugaagau

SEQ ID NO: 1784569 - RNA, 19 nt, Homo sapiens
  misc_RNA (1)...(19): siRNA sense strand
gcaauauaaaguccugguu

SEQ ID NO: 1784570 - RNA, 19 nt, Homo sapiens
  misc_RNA (1)...(19): siRNA sense strand
gcagcagaacaaauacaaa

SEQ ID NO: 1784571 - RNA, 19 nt, Homo sapiens
  misc_RNA (1)...(19): siRNA sense strand
gaugucaggaugcucuaaa

SEQ ID NO: 1784572 - RNA, 19 nt, Homo sapiens
  misc_RNA (1)...(19): siRNA sense strand
gaguguaaagaccucauaa

SEQ ID NO: 1784573 - RNA, 19 nt, Homo sapiens
  misc_RNA (1)...(19): siRNA sense strand
uuauucgacucucucaauu

SEQ ID NO: 1784574 - RNA, 19 nt, Homo sapiens
  misc_RNA (1)...(19): siRNA sense strand
ucaccaaccugucauauua

SEQ ID NO: 1784575 - RNA, 19 nt, Homo sapiens
  misc_RNA (1)...(19): siRNA sense strand
caacagagcauuuauuuga

SEQ ID NO: 1784576 - RNA, 19 nt, Homo sapiens
  misc_RNA (1)...(19): siRNA sense strand
cgaaagaucuccucuggau

SEQ ID NO: 1784577 - RNA, 19 nt, Homo sapiens
  misc_RNA (1)...(19): siRNA sense strand
gcaaauaccgaaacaauag

SEQ ID NO: 1784578 - RNA, 19 nt, Homo sapiens
  misc_RNA (1)...(19): siRNA sense strand
aaaggaagcccacgacaua

SEQ ID NO: 1784579 - RNA, 19 nt, Homo sapiens
  misc_RNA (1)...(19): siRNA sense strand
ucauaagcaugcccuguaa

SEQ ID NO: 1784580 - RNA, 19 nt, Homo sapiens
  misc_RNA (1)...(19): siRNA sense strand
gugcucaccuucuucgaaa

SEQ ID NO: 1784581 - RNA, 19 nt, Homo sapiens
  misc_RNA (1)...(19): siRNA sense strand
gaaaucaugagguccaaug

SEQ ID NO: 1784582 - RNA, 19 nt, Homo sapiens
  misc_RNA (1)...(19): siRNA sense strand
ggacccaacagagcauuua

SEQ ID NO: 1784583 - RNA, 19 nt, Homo sapiens
  misc_RNA (1)...(19): siRNA sense strand
aagcaugcccuguaaauau

SEQ ID NO: 1784584 - RNA, 19 nt, Homo sapiens
  misc_RNA (1)...(19): siRNA sense strand
ugaagacgaucauaagcau

SEQ ID NO: 1784585 - RNA, 19 nt, Homo sapiens
  misc_RNA (1)...(19): siRNA sense strand
acagagcauuuauuugaga

SEQ ID NO: 1784586 - RNA, 19 nt, Homo sapiens
  misc_RNA (1)...(19): siRNA sense strand
uaagcaugcccuguaaaua

SEQ ID NO: 1784587 - RNA, 19 nt, Homo sapiens
  misc_RNA (1)...(19): siRNA sense strand
cccaacagagcauuuauuu

SEQ ID NO: 1784588 - RNA, 19 nt, Homo sapiens
  misc_RNA (1)...(19): siRNA sense strand
uagcaaauaccgaaacaau

SEQ ID NO: 1784589 - RNA, 19 nt, Homo sapiens
  misc_RNA (1)...(19): siRNA sense strand
gacauagagaccaggcuua

SEQ ID NO: 1784590 - RNA, 19 nt, Homo sapiens
  misc_RNA (1)...(19): siRNA sense strand
uggagaagcugcugaagac

SEQ ID NO: 1784591 - RNA, 19 nt, Homo sapiens
  misc_RNA (1)...(19): siRNA sense strand
uuaaugagguggagaagcu

SEQ ID NO: 1784592 - RNA, 19 nt, Homo sapiens
  misc_RNA (1)...(19): siRNA sense strand
gaccacaguauaccaaaug

SEQ ID NO: 1784593 - RNA, 19 nt, Homo sapiens
  misc_RNA (1)...(19): siRNA sense strand
gagaauggcagugaguuuc

SEQ ID NO: 1784594 - RNA, 19 nt, Homo sapiens
  misc_RNA (1)...(19): siRNA sense strand
agcaugcccuguaaauauu

SEQ ID NO: 1784595 - RNA, 19 nt, Homo sapiens
  misc_RNA (1)...(19): siRNA sense strand
cagagcauuuauuugagaa

SEQ ID NO: 1784596 - RNA, 19 nt, Homo sapiens
  misc_RNA (1)...(19): siRNA sense strand
gacagacauuugggacuga

SEQ ID NO: 1784597 - RNA, 19 nt, Homo sapiens
  misc_RNA (1)...(19): siRNA sense strand
auagagaccaggcuuaaug

SEQ ID NO: 1784598 - RNA, 19 nt, Homo sapiens
  misc_RNA (1)...(19): siRNA sense strand
cacaguauaccaaauggaa

SEQ ID NO: 1784599 - RNA, 19 nt, Homo sapiens
  misc_RNA (1)...(19): siRNA sense strand
ugagaauggcagugaguuu

SEQ ID NO: 1784600 - RNA, 19 nt, Homo sapiens
  misc_RNA (1)...(19): siRNA sense strand
uaaaggaagcccacgacau

SEQ ID NO: 1784601 - RNA, 19 nt, Homo sapiens
  misc_RNA (1)...(19): siRNA sense strand
ugaccacaguauaccaaau

SEQ ID NO: 1784602 - RNA, 19 nt, Homo sapiens
  misc_RNA (1)...(19): siRNA sense strand
agaagcugcugaagacgau

SEQ ID NO: 1784603 - RNA, 19 nt, Homo sapiens
  misc_RNA (1)...(19): siRNA sense strand
guggagaagcugcugaaga

SEQ ID NO: 1784604 - RNA, 19 nt, Homo sapiens
  misc_RNA (1)...(19): siRNA sense strand
ucaaaguccagucaaaaua

SEQ ID NO: 1784605 - RNA, 19 nt, Homo sapiens
  misc_RNA (1)...(19): siRNA sense strand
caaggacugguugccauaa

SEQ ID NO: 1784606 - RNA, 19 nt, Homo sapiens
  misc_RNA (1)...(19): siRNA sense strand
aaggacugguugccauaaa

SEQ ID NO: 1784607 - RNA, 19 nt, Homo sapiens
  misc_RNA (1)...(19): siRNA sense strand
ccaacagagcauuuauuug

SEQ ID NO: 1784608 - RNA, 19 nt, Homo sapiens
  misc_RNA (1)...(19): siRNA sense strand
acauagagaccaggcuuaa

SEQ ID NO: 1784609 - RNA, 19 nt, Homo sapiens
  misc_RNA (1)...(19): siRNA sense strand
uagagaccaggcuuaauga

SEQ ID NO: 1784610 - RNA, 19 nt, Homo sapiens
  misc_RNA (1)...(19): siRNA sense strand
agcaaauaccgaaacaaua

SEQ ID NO: 1784611 - RNA, 19 nt, Homo sapiens
  misc_RNA (1)...(19): siRNA sense strand
uauucuagaucggaaguug

SEQ ID NO: 1784612 - RNA, 19 nt, Homo sapiens
  misc_RNA (1)...(19): siRNA sense strand
guuauugaccacaguauac

SEQ ID NO: 1784613 - RNA, 19 nt, Homo sapiens
  misc_RNA (1)...(19): siRNA sense strand
ggaagcccacgacauagag

SEQ ID NO: 1784614 - RNA, 19 nt, Homo sapiens
  misc_RNA (1)...(19): siRNA sense strand
caguauaccaaauggaaga

SEQ ID NO: 1784615 - RNA, 19 nt, Homo sapiens
  misc_RNA (1)...(19): siRNA sense strand
cugcugaagacgaucauaa

SEQ ID NO: 1784616 - RNA, 19 nt, Homo sapiens
  misc_RNA (1)...(19): siRNA sense strand
caaaguccagucaaaauau

SEQ ID NO: 1784617 - RNA, 19 nt, Homo sapiens
  misc_RNA (1)...(19): siRNA sense strand
cagaaaucaugagguccaa

SEQ ID NO: 1784618 - RNA, 19 nt, Homo sapiens
  misc_RNA (1)...(19): siRNA sense strand
cggaaguugugcucaccuu

SEQ ID NO: 1784619 - RNA, 19 nt, Homo sapiens
  misc_RNA (1)...(19): siRNA sense strand
caaauaccgaaacaauagu

SEQ ID NO: 1784620 - RNA, 19 nt, Homo sapiens
  misc_RNA (1)...(19): siRNA sense strand
gaagcccacgacauagaga

SEQ ID NO: 1784621 - RNA, 19 nt, Homo sapiens
  misc_RNA (1)...(19): siRNA sense strand
cuacgucaccaaccuguca

SEQ ID NO: 1784622 - RNA, 19 nt, Homo sapiens
  misc_RNA (1)...(19): siRNA sense strand
ggacugguugccauaaagg

SEQ ID NO: 1784623 - RNA, 19 nt, Homo sapiens
  misc_RNA (1)...(19): siRNA sense strand
gucaccaaccugucauauu

SEQ ID NO: 1784624 - RNA, 19 nt, Homo sapiens
  misc_RNA (1)...(19): siRNA sense strand
auaagcaugcccuguaaau

SEQ ID NO: 1784625 - RNA, 19 nt, Homo sapiens
  misc_RNA (1)...(19): siRNA sense strand
cauaagcaugcccuguaaa

SEQ ID NO: 1784626 - RNA, 19 nt, Homo sapiens
  misc_RNA (1)...(19): siRNA sense strand
ucaccaaccugucauauua

SEQ ID NO: 1784627 - RNA, 19 nt, Homo sapiens
  misc_RNA (1)...(19): siRNA sense strand
caacagagcauuuauuuga

SEQ ID NO: 1784628 - RNA, 19 nt, Homo sapiens
  misc_RNA (1)...(19): siRNA sense strand
cgaaagaucuccucuggau

SEQ ID NO: 1784629 - RNA, 19 nt, Homo sapiens
  misc_RNA (1)...(19): siRNA sense strand
gcaaauaccgaaacaauag

SEQ ID NO: 1784630 - RNA, 19 nt, Homo sapiens
  misc_RNA (1)...(19): siRNA sense strand
aaaggaagcccacgacaua

SEQ ID NO: 1784631 - RNA, 19 nt, Homo sapiens
  misc_RNA (1)...(19): siRNA sense strand
ucauaagcaugcccuguaa

SEQ ID NO: 1784632 - RNA, 19 nt, Homo sapiens
  misc_RNA (1)...(19): siRNA sense strand
gugcucaccuucuucgaaa

SEQ ID NO: 1784633 - RNA, 19 nt, Homo sapiens
  misc_RNA (1)...(19): siRNA sense strand
gaaaucaugagguccaaug

SEQ ID NO: 1784634 - RNA, 19 nt, Homo sapiens
  misc_RNA (1)...(19): siRNA sense strand
ggacccaacagagcauuua

SEQ ID NO: 1784635 - RNA, 19 nt, Homo sapiens
  misc_RNA (1)...(19): siRNA sense strand
aagcaugcccuguaaauau

SEQ ID NO: 1784636 - RNA, 19 nt, Homo sapiens
  misc_RNA (1)...(19): siRNA sense strand
ugaagacgaucauaagcau

SEQ ID NO: 1784637 - RNA, 19 nt, Homo sapiens
  misc_RNA (1)...(19): siRNA sense strand
acagagcauuuauuugaga

SEQ ID NO: 1784638 - RNA, 19 nt, Homo sapiens
  misc_RNA (1)...(19): siRNA sense strand
uaagcaugcccuguaaaua

SEQ ID NO: 1784639 - RNA, 19 nt, Homo sapiens
  misc_RNA (1)...(19): siRNA sense strand
cccaacagagcauuuauuu

SEQ ID NO: 1784640 - RNA, 19 nt, Homo sapiens
  misc_RNA (1)...(19): siRNA sense strand
uagcaaauaccgaaacaau

SEQ ID NO: 1784641 - RNA, 19 nt, Homo sapiens
  misc_RNA (1)...(19): siRNA sense strand
gacauagagaccaggcuua

SEQ ID NO: 1784642 - RNA, 19 nt, Homo sapiens
  misc_RNA (1)...(19): siRNA sense strand
uggagaagcugcugaagac

SEQ ID NO: 1784643 - RNA, 19 nt, Homo sapiens
  misc_RNA (1)...(19): siRNA sense strand
uuaaugagguggagaagcu

SEQ ID NO: 1784644 - RNA, 19 nt, Homo sapiens
  misc_RNA (1)...(19): siRNA sense strand
gaccacaguauaccaaaug

SEQ ID NO: 1784645 - RNA, 19 nt, Homo sapiens
  misc_RNA (1)...(19): siRNA sense strand
gagaauggcagugaguuuc

SEQ ID NO: 1784646 - RNA, 19 nt, Homo sapiens
  misc_RNA (1)...(19): siRNA sense strand
agcaugcccuguaaauauu

SEQ ID NO: 1784647 - RNA, 19 nt, Homo sapiens
  misc_RNA (1)...(19): siRNA sense strand
cagagcauuuauuugagaa

SEQ ID NO: 1784648 - RNA, 19 nt, Homo sapiens
  misc_RNA (1)...(19): siRNA sense strand
gacagacauuugggacuga

SEQ ID NO: 1784649 - RNA, 19 nt, Homo sapiens
  misc_RNA (1)...(19): siRNA sense strand
auagagaccaggcuuaaug

SEQ ID NO: 1784650 - RNA, 19 nt, Homo sapiens
  misc_RNA (1)...(19): siRNA sense strand
cacaguauaccaaauggaa

SEQ ID NO: 1784651 - RNA, 19 nt, Homo sapiens
  misc_RNA (1)...(19): siRNA sense strand
ugagaauggcagugaguuu

SEQ ID NO: 1784652 - RNA, 19 nt, Homo sapiens
  misc_RNA (1)...(19): siRNA sense strand
uaaaggaagcccacgacau

SEQ ID NO: 1784653 - RNA, 19 nt, Homo sapiens
  misc_RNA (1)...(19): siRNA sense strand
ugaccacaguauaccaaau

SEQ ID NO: 1784654 - RNA, 19 nt, Homo sapiens
  misc_RNA (1)...(19): siRNA sense strand
agaagcugcugaagacgau

SEQ ID NO: 1784655 - RNA, 19 nt, Homo sapiens
  misc_RNA (1)...(19): siRNA sense strand
guggagaagcugcugaaga

SEQ ID NO: 1784656 - RNA, 19 nt, Homo sapiens
  misc_RNA (1)...(19): siRNA sense strand
ucaaaguccagucaaaaua

SEQ ID NO: 1784657 - RNA, 19 nt, Homo sapiens
  misc_RNA (1)...(19): siRNA sense strand
caaggacugguugccauaa

SEQ ID NO: 1784658 - RNA, 19 nt, Homo sapiens
  misc_RNA (1)...(19): siRNA sense strand
aaggacugguugccauaaa

SEQ ID NO: 1784659 - RNA, 19 nt, Homo sapiens
  misc_RNA (1)...(19): siRNA sense strand
ccaacagagcauuuauuug

SEQ ID NO: 1784660 - RNA, 19 nt, Homo sapiens
  misc_RNA (1)...(19): siRNA sense strand
acauagagaccaggcuuaa

SEQ ID NO: 1784661 - RNA, 19 nt, Homo sapiens
  misc_RNA (1)...(19): siRNA sense strand
uagagaccaggcuuaauga

SEQ ID NO: 1784662 - RNA, 19 nt, Homo sapiens
  misc_RNA (1)...(19): siRNA sense strand
agcaaauaccgaaacaaua

SEQ ID NO: 1784663 - RNA, 19 nt, Homo sapiens
  misc_RNA (1)...(19): siRNA sense strand
uauucuagaucggaaguug

SEQ ID NO: 1784664 - RNA, 19 nt, Homo sapiens
  misc_RNA (1)...(19): siRNA sense strand
guuauugaccacaguauac

SEQ ID NO: 1784665 - RNA, 19 nt, Homo sapiens
  misc_RNA (1)...(19): siRNA sense strand
ggaagcccacgacauagag

SEQ ID NO: 1784666 - RNA, 19 nt, Homo sapiens
  misc_RNA (1)...(19): siRNA sense strand
caguauaccaaauggaaga

SEQ ID NO: 1784667 - RNA, 19 nt, Homo sapiens
  misc_RNA (1)...(19): siRNA sense strand
cugcugaagacgaucauaa

SEQ ID NO: 1784668 - RNA, 19 nt, Homo sapiens
  misc_RNA (1)...(19): siRNA sense strand
caaaguccagucaaaauau

SEQ ID NO: 1784669 - RNA, 19 nt, Homo sapiens
  misc_RNA (1)...(19): siRNA sense strand
cagaaaucaugagguccaa

SEQ ID NO: 1784670 - RNA, 19 nt, Homo sapiens
  misc_RNA (1)...(19): siRNA sense strand
cggaaguugugcucaccuu

SEQ ID NO: 1784671 - RNA, 19 nt, Homo sapiens
  misc_RNA (1)...(19): siRNA sense strand
caaauaccgaaacaauagu

SEQ ID NO: 1784672 - RNA, 19 nt, Homo sapiens
  misc_RNA (1)...(19): siRNA sense strand
gaagcccacgacauagaga

SEQ ID NO: 1784673 - RNA, 19 nt, Homo sapiens
  misc_RNA (1)...(19): siRNA sense strand
cuacgucaccaaccuguca

SEQ ID NO: 1784674 - RNA, 19 nt, Homo sapiens
  misc_RNA (1)...(19): siRNA sense strand
ggacugguugccauaaagg

SEQ ID NO: 1784675 - RNA, 19 nt, Homo sapiens
  misc_RNA (1)...(19): siRNA sense strand
gucaccaaccugucauauu

SEQ ID NO: 1784676 - RNA, 19 nt, Homo sapiens
  misc_RNA (1)...(19): siRNA sense strand
auaagcaugcccuguaaau

SEQ ID NO: 1784677 - RNA, 19 nt, Homo sapiens
  misc_RNA (1)...(19): siRNA sense strand
cauaagcaugcccuguaaa

SEQ ID NO: 1784678 - RNA, 19 nt, Homo sapiens
  misc_RNA (1)...(19): siRNA sense strand
caacacaccagcauuauua

SEQ ID NO: 1784679 - RNA, 19 nt, Homo sapiens
  misc_RNA (1)...(19): siRNA sense strand
gaagagagccagccuguuu

SEQ ID NO: 1784680 - RNA, 19 nt, Homo sapiens
  misc_RNA (1)...(19): siRNA sense strand
gagaagcuauuccaaucua

SEQ ID NO: 1784681 - RNA, 19 nt, Homo sapiens
  misc_RNA (1)...(19): siRNA sense strand
gaagaauucucuagacaca

SEQ ID NO: 1784682 - RNA, 19 nt, Homo sapiens
  misc_RNA (1)...(19): siRNA sense strand
gaagugugcuguccugugu

SEQ ID NO: 1784683 - RNA, 19 nt, Homo sapiens
  misc_RNA (1)...(19): siRNA sense strand
gaaagaaagggauacugua

SEQ ID NO: 1784684 - RNA, 19 nt, Homo sapiens
  misc_RNA (1)...(19): siRNA sense strand
caagguaccugaucagagu

SEQ ID NO: 1784685 - RNA, 19 nt, Homo sapiens
  misc_RNA (1)...(19): siRNA sense strand
cuagacacauuccuccuua

SEQ ID NO: 1784686 - RNA, 19 nt, Homo sapiens
  misc_RNA (1)...(19): siRNA sense strand
agaaagggauacuguaaug

SEQ ID NO: 1784687 - RNA, 19 nt, Homo sapiens
  misc_RNA (1)...(19): siRNA sense strand
ccauuucgcuuucaacuuc

SEQ ID NO: 1784688 - RNA, 19 nt, Homo sapiens
  misc_RNA (1)...(19): siRNA sense strand
uccaaucuaugcagaaaua

SEQ ID NO: 1784689 - RNA, 19 nt, Homo sapiens
  misc_RNA (1)...(19): siRNA sense strand
gaauuuccauuucgcuuuc

SEQ ID NO: 1784690 - RNA, 19 nt, Homo sapiens
  misc_RNA (1)...(19): siRNA sense strand
ucacauuccuggugcuaaa

SEQ ID NO: 1784691 - RNA, 19 nt, Homo sapiens
  misc_RNA (1)...(19): siRNA sense strand
agaauucucuagacacauu

SEQ ID NO: 1784692 - RNA, 19 nt, Homo sapiens
  misc_RNA (1)...(19): siRNA sense strand
ggacuauuccuuagcugua

SEQ ID NO: 1784693 - RNA, 19 nt, Homo sapiens
  misc_RNA (1)...(19): siRNA sense strand
gcuuucaacuuccaucuga

SEQ ID NO: 1784694 - RNA, 19 nt, Homo sapiens
  misc_RNA (1)...(19): siRNA sense strand
cagaguggacuauuccuua

SEQ ID NO: 1784695 - RNA, 19 nt, Homo sapiens
  misc_RNA (1)...(19): siRNA sense strand
aaagaaagggauacuguaa

SEQ ID NO: 1784696 - RNA, 19 nt, Homo sapiens
  misc_RNA (1)...(19): siRNA sense strand
uuccuuagcuguauacauu

SEQ ID NO: 1784697 - RNA, 19 nt, Homo sapiens
  misc_RNA (1)...(19): siRNA sense strand
ucgguacaauuccauauaa

SEQ ID NO: 1784698 - RNA, 19 nt, Homo sapiens
  misc_RNA (1)...(19): siRNA sense strand
cugaagcaccaccaaauua

SEQ ID NO: 1784699 - RNA, 19 nt, Homo sapiens
  misc_RNA (1)...(19): siRNA sense strand
ugucaacacaccagcauua

SEQ ID NO: 1784700 - RNA, 19 nt, Homo sapiens
  misc_RNA (1)...(19): siRNA sense strand
ugggaaauauggaagcauu

SEQ ID NO: 1784701 - RNA, 19 nt, Homo sapiens
  misc_RNA (1)...(19): siRNA sense strand
gaggaagaauucucuagac

SEQ ID NO: 1784702 - RNA, 19 nt, Homo sapiens
  misc_RNA (1)...(19): siRNA sense strand
gggauacuguaauggagaa

SEQ ID NO: 1784703 - RNA, 19 nt, Homo sapiens
  misc_RNA (1)...(19): siRNA sense strand
caacuuccaucugaaccuu

SEQ ID NO: 1784704 - RNA, 19 nt, Homo sapiens
  misc_RNA (1)...(19): siRNA sense strand
gagguugacccacauccua

SEQ ID NO: 1784705 - RNA, 19 nt, Homo sapiens
  misc_RNA (1)...(19): siRNA sense strand
uccaaacgcagacauauuu

SEQ ID NO: 1784706 - RNA, 19 nt, Homo sapiens
  misc_RNA (1)...(19): siRNA sense strand
gacccaagguaccugauca

SEQ ID NO: 1784707 - RNA, 19 nt, Homo sapiens
  misc_RNA (1)...(19): siRNA sense strand
cagcagaaacuccagcauu

SEQ ID NO: 1784708 - RNA, 19 nt, Homo sapiens
  misc_RNA (1)...(19): siRNA sense strand
gaagcaccaccaaauuaug

SEQ ID NO: 1784709 - RNA, 19 nt, Homo sapiens
  misc_RNA (1)...(19): siRNA sense strand
ugaaagaaagggauacugu

SEQ ID NO: 1784710 - RNA, 19 nt, Homo sapiens
  misc_RNA (1)...(19): siRNA sense strand
agcagaaacuccagcauug

SEQ ID NO: 1784711 - RNA, 19 nt, Homo sapiens
  misc_RNA (1)...(19): siRNA sense strand
cuggauugcugcauuauca

SEQ ID NO: 1784712 - RNA, 19 nt, Homo sapiens
  misc_RNA (1)...(19): siRNA sense strand
gcagacauauuuggcuagu

SEQ ID NO: 1784713 - RNA, 19 nt, Homo sapiens
  misc_RNA (1)...(19): siRNA sense strand
ggaaauauggaagcauuca

SEQ ID NO: 1784714 - RNA, 19 nt, Homo sapiens
  misc_RNA (1)...(19): siRNA sense strand
gaagcuauuccaaucuaug

SEQ ID NO: 1784715 - RNA, 19 nt, Homo sapiens
  misc_RNA (1)...(19): siRNA sense strand
guauggauaugagcugguu

SEQ ID NO: 1784716 - RNA, 19 nt, Homo sapiens
  misc_RNA (1)...(19): siRNA sense strand
gcacagacacauggaaugg

SEQ ID NO: 1784717 - RNA, 19 nt, Homo sapiens
  misc_RNA (1)...(19): siRNA sense strand
ugaagcaccaccaaauuau

SEQ ID NO: 1784718 - RNA, 19 nt, Homo sapiens
  misc_RNA (1)...(19): siRNA sense strand
gguacaauuccauauaaug

SEQ ID NO: 1784719 - RNA, 19 nt, Homo sapiens
  misc_RNA (1)...(19): siRNA sense strand
acaaagaccauucgacaca

SEQ ID NO: 1784720 - RNA, 19 nt, Homo sapiens
  misc_RNA (1)...(19): siRNA sense strand
auacaagaauuccgguuuc

SEQ ID NO: 1784721 - RNA, 19 nt, Homo sapiens
  misc_RNA (1)...(19): siRNA sense strand
gagcacagacacauggaau

SEQ ID NO: 1784722 - RNA, 19 nt, Homo sapiens
  misc_RNA (1)...(19): siRNA sense strand
gagccugggucugguguuc

SEQ ID NO: 1784723 - RNA, 19 nt, Homo sapiens
  misc_RNA (1)...(19): siRNA sense strand
ugaauuuccauuucgcuuu

SEQ ID NO: 1784724 - RNA, 19 nt, Homo sapiens
  misc_RNA (1)...(19): siRNA sense strand
uauacaagaauuccgguuu

SEQ ID NO: 1784725 - RNA, 19 nt, Homo sapiens
  misc_RNA (1)...(19): siRNA sense strand
uuagugaucgguacaauuc

SEQ ID NO: 1784726 - RNA, 19 nt, Homo sapiens
  misc_RNA (1)...(19): siRNA sense strand
caaagaccauucgacacau

SEQ ID NO: 1784727 - RNA, 19 nt, Homo sapiens
  misc_RNA (1)...(19): siRNA sense strand
ucaugucgaugucaacaca

SEQ ID NO: 1784728 - RNA, 19 nt, Homo sapiens
  misc_RNA (1)...(19): siRNA sense strand
gacuauuccuuagcuguau

SEQ ID NO: 1784729 - RNA, 19 nt, Homo sapiens
  misc_RNA (1)...(19): siRNA sense strand
aaagaccauucgacacaug

SEQ ID NO: 1784730 - RNA, 19 nt, Homo sapiens
  misc_RNA (1)...(19): siRNA sense strand
aaagggauacuguaaugga

SEQ ID NO: 1784731 - RNA, 19 nt, Homo sapiens
  misc_RNA (1)...(19): siRNA sense strand
gaugcucgaacugccauua

SEQ ID NO: 1784732 - RNA, 19 nt, Homo sapiens
  misc_RNA (1)...(19): siRNA sense strand
gugaaggcaucauuuuauu

SEQ ID NO: 1784733 - RNA, 19 nt, Homo sapiens
  misc_RNA (1)...(19): siRNA sense strand
aaauuaugcagauguggua

SEQ ID NO: 1784734 - RNA, 19 nt, Homo sapiens
  misc_RNA (1)...(19): siRNA sense strand
gaagcauucaguacugugu

SEQ ID NO: 1784735 - RNA, 19 nt, Homo sapiens
  misc_RNA (1)...(19): siRNA sense strand
aggaagaauucucuagaca

SEQ ID NO: 1784736 - RNA, 19 nt, Homo sapiens
  misc_RNA (1)...(19): siRNA sense strand
ucaacacaccagcauuauu

SEQ ID NO: 1784737 - RNA, 19 nt, Homo sapiens
  misc_RNA (1)...(19): siRNA sense strand
ggagaagcuauuccaaucu

SEQ ID NO: 1784738 - RNA, 19 nt, Homo sapiens
  misc_RNA (1)...(19): siRNA sense strand
gaucgguacaauuccauau

SEQ ID NO: 1784739 - RNA, 19 nt, Homo sapiens
  misc_RNA (1)...(19): siRNA sense strand
agugugcuguccuguguuu

SEQ ID NO: 1784740 - RNA, 19 nt, Homo sapiens
  misc_RNA (1)...(19): siRNA sense strand
caagaauuccgguuucaac

SEQ ID NO: 1784741 - RNA, 19 nt, Homo sapiens
  misc_RNA (1)...(19): siRNA sense strand
guaccugaucagaguguaa

SEQ ID NO: 1784742 - RNA, 19 nt, Homo sapiens
  misc_RNA (1)...(19): siRNA sense strand
agaguggacuauuccuuag

SEQ ID NO: 1784743 - RNA, 19 nt, Homo sapiens
  misc_RNA (1)...(19): siRNA sense strand
gugccaaaauugaaagaaa

SEQ ID NO: 1784744 - RNA, 19 nt, Homo sapiens
  misc_RNA (1)...(19): siRNA sense strand
uacaagaauuccgguuuca

SEQ ID NO: 1784745 - RNA, 19 nt, Homo sapiens
  misc_RNA (1)...(19): siRNA sense strand
guguuugccuguauacaag

SEQ ID NO: 1784746 - RNA, 19 nt, Homo sapiens
  misc_RNA (1)...(19): siRNA sense strand
ggauugcugcauuaucaga

SEQ ID NO: 1784747 - RNA, 19 nt, Homo sapiens
  misc_RNA (1)...(19): siRNA sense strand
gaaagggauacuguaaugg

SEQ ID NO: 1784748 - RNA, 19 nt, Homo sapiens
  misc_RNA (1)...(19): siRNA sense strand
cgcaagggcugcuauucca

SEQ ID NO: 1784749 - RNA, 19 nt, Homo sapiens
  misc_RNA (1)...(19): siRNA sense strand
cgggaacuccagguuguua

SEQ ID NO: 1784750 - RNA, 19 nt, Homo sapiens
  misc_RNA (1)...(19): siRNA sense strand
cagccuguuuccuucauuc

SEQ ID NO: 1784751 - RNA, 19 nt, Homo sapiens
  misc_RNA (1)...(19): siRNA sense strand
uaacugugagggagaagug

SEQ ID NO: 1784752 - RNA, 19 nt, Homo sapiens
  misc_RNA (1)...(19): siRNA sense strand
cagcauugccagccaguuc

SEQ ID NO: 1784753 - RNA, 19 nt, Homo sapiens
  misc_RNA (1)...(19): siRNA sense strand
gagcgcaagggcugcuauu

SEQ ID NO: 1784754 - RNA, 19 nt, Homo sapiens
  misc_RNA (1)...(19): siRNA sense strand
aauauggaagcauucagua

SEQ ID NO: 1784755 - RNA, 19 nt, Homo sapiens
  misc_RNA (1)...(19): siRNA sense strand
ccaccaaauuaugcagaug

SEQ ID NO: 1784756 - RNA, 19 nt, Homo sapiens
  misc_RNA (1)...(19): siRNA sense strand
ccaguucaguauggauaug

SEQ ID NO: 1784757 - RNA, 19 nt, Homo sapiens
  misc_RNA (1)...(19): siRNA sense strand
aauuguuccucucgucuga

SEQ ID NO: 1784758 - RNA, 19 nt, Homo sapiens
  misc_RNA (1)...(19): siRNA sense strand
acuauuccuuagcuguaua

SEQ ID NO: 1784759 - RNA, 19 nt, Homo sapiens
  misc_RNA (1)...(19): siRNA sense strand
agaagcuauuccaaucuau

SEQ ID NO: 1784760 - RNA, 19 nt, Homo sapiens
  misc_RNA (1)...(19): siRNA sense strand
gccagccaguucaguaugg

SEQ ID NO: 1784761 - RNA, 19 nt, Homo sapiens
  misc_RNA (1)...(19): siRNA sense strand
gcucgaacugccauuagug

SEQ ID NO: 1784762 - RNA, 19 nt, Homo sapiens
  misc_RNA (1)...(19): siRNA sense strand
ggaacuccagguuguuagu

SEQ ID NO: 1784763 - RNA, 19 nt, Homo sapiens
  misc_RNA (1)...(19): siRNA sense strand
guccuguguuugccuguau

SEQ ID NO: 1784764 - RNA, 19 nt, Homo sapiens
  misc_RNA (1)...(19): siRNA sense strand
cgguacaauuccauauaau

SEQ ID NO: 1784765 - RNA, 19 nt, Homo sapiens
  misc_RNA (1)...(19): siRNA sense strand
ggagcacagacacauggaa

SEQ ID NO: 1784766 - RNA, 19 nt, Homo sapiens
  misc_RNA (1)...(19): siRNA sense strand
guuccaaaggcugcuauuu

SEQ ID NO: 1784767 - RNA, 19 nt, Homo sapiens
  misc_RNA (1)...(19): siRNA sense strand
ggugaaggcaucauuuuau

SEQ ID NO: 1784768 - RNA, 19 nt, Homo sapiens
  misc_RNA (1)...(19): siRNA sense strand
uuagucaugucgaugucaa

SEQ ID NO: 1784769 - RNA, 19 nt, Homo sapiens
  misc_RNA (1)...(19): siRNA sense strand
uuaucagaguggacuauuc

SEQ ID NO: 1784770 - RNA, 19 nt, Homo sapiens
  misc_RNA (1)...(19): siRNA sense strand
ccagccuguuuccuucauu

SEQ ID NO: 1784771 - RNA, 19 nt, Homo sapiens
  misc_RNA (1)...(19): siRNA sense strand
gaaggcaucauuuuauuac

SEQ ID NO: 1784772 - RNA, 19 nt, Homo sapiens
  misc_RNA (1)...(19): siRNA sense strand
cgaacugccauuagugauc

SEQ ID NO: 1784773 - RNA, 19 nt, Homo sapiens
  misc_RNA (1)...(19): siRNA sense strand
gcuguauacauucacauuc

SEQ ID NO: 1784774 - RNA, 19 nt, Homo sapiens
  misc_RNA (1)...(19): siRNA sense strand
ccuuagcuguauacauuca

SEQ ID NO: 1784775 - RNA, 19 nt, Homo sapiens
  misc_RNA (1)...(19): siRNA sense strand
ggaaaccacaucgcuucug

SEQ ID NO: 1784776 - RNA, 19 nt, Homo sapiens
  misc_RNA (1)...(19): siRNA sense strand
aaauauggaagcauucagu

SEQ ID NO: 1784777 - RNA, 19 nt, Homo sapiens
  misc_RNA (1)...(19): siRNA sense strand
cauuagugaucgguacaau

SEQ ID NO: 1784778 - RNA, 19 nt, Homo sapiens
  misc_RNA (1)...(19): siRNA sense strand
caacacaccagcauuauua

SEQ ID NO: 1784779 - RNA, 19 nt, Homo sapiens
  misc_RNA (1)...(19): siRNA sense strand
gaagagagccagccuguuu

SEQ ID NO: 1784780 - RNA, 19 nt, Homo sapiens
  misc_RNA (1)...(19): siRNA sense strand
gagaagcuauuccaaucua

SEQ ID NO: 1784781 - RNA, 19 nt, Homo sapiens
  misc_RNA (1)...(19): siRNA sense strand
gaagaauucucuagacaca

SEQ ID NO: 1784782 - RNA, 19 nt, Homo sapiens
  misc_RNA (1)...(19): siRNA sense strand
gaagugugcuguccugugu

SEQ ID NO: 1784783 - RNA, 19 nt, Homo sapiens
  misc_RNA (1)...(19): siRNA sense strand
gaaagaaagggauacugua

SEQ ID NO: 1784784 - RNA, 19 nt, Homo sapiens
  misc_RNA (1)...(19): siRNA sense strand
caagguaccugaucagagu

SEQ ID NO: 1784785 - RNA, 19 nt, Homo sapiens
  misc_RNA (1)...(19): siRNA sense strand
cuagacacauuccuccuua

SEQ ID NO: 1784786 - RNA, 19 nt, Homo sapiens
  misc_RNA (1)...(19): siRNA sense strand
agaaagggauacuguaaug

SEQ ID NO: 1784787 - RNA, 19 nt, Homo sapiens
  misc_RNA (1)...(19): siRNA sense strand
ccauuucgcuuucaacuuc

SEQ ID NO: 1784788 - RNA, 19 nt, Homo sapiens
  misc_RNA (1)...(19): siRNA sense strand
uccaaucuaugcagaaaua

SEQ ID NO: 1784789 - RNA, 19 nt, Homo sapiens
  misc_RNA (1)...(19): siRNA sense strand
gaauuuccauuucgcuuuc

SEQ ID NO: 1784790 - RNA, 19 nt, Homo sapiens
  misc_RNA (1)...(19): siRNA sense strand
ucacauuccuggugcuaaa

SEQ ID NO: 1784791 - RNA, 19 nt, Homo sapiens
  misc_RNA (1)...(19): siRNA sense strand
agaauucucuagacacauu

SEQ ID NO: 1784792 - RNA, 19 nt, Homo sapiens
  misc_RNA (1)...(19): siRNA sense strand
ggacuauuccuuagcugua

SEQ ID NO: 1784793 - RNA, 19 nt, Homo sapiens
  misc_RNA (1)...(19): siRNA sense strand
gcuuucaacuuccaucuga

SEQ ID NO: 1784794 - RNA, 19 nt, Homo sapiens
  misc_RNA (1)...(19): siRNA sense strand
cagaguggacuauuccuua

SEQ ID NO: 1784795 - RNA, 19 nt, Homo sapiens
  misc_RNA (1)...(19): siRNA sense strand
aaagaaagggauacuguaa

SEQ ID NO: 1784796 - RNA, 19 nt, Homo sapiens
  misc_RNA (1)...(19): siRNA sense strand
uuccuuagcuguauacauu

SEQ ID NO: 1784797 - RNA, 19 nt, Homo sapiens
  misc_RNA (1)...(19): siRNA sense strand
ucgguacaauuccauauaa

SEQ ID NO: 1784798 - RNA, 19 nt, Homo sapiens
  misc_RNA (1)...(19): siRNA sense strand
cugaagcaccaccaaauua

SEQ ID NO: 1784799 - RNA, 19 nt, Homo sapiens
  misc_RNA (1)...(19): siRNA sense strand
ugucaacacaccagcauua

SEQ ID NO: 1784800 - RNA, 19 nt, Homo sapiens
  misc_RNA (1)...(19): siRNA sense strand
ugggaaauauggaagcauu

SEQ ID NO: 1784801 - RNA, 19 nt, Homo sapiens
  misc_RNA (1)...(19): siRNA sense strand
gaggaagaauucucuagac

SEQ ID NO: 1784802 - RNA, 19 nt, Homo sapiens
  misc_RNA (1)...(19): siRNA sense strand
gggauacuguaauggagaa

SEQ ID NO: 1784803 - RNA, 19 nt, Homo sapiens
  misc_RNA (1)...(19): siRNA sense strand
caacuuccaucugaaccuu

SEQ ID NO: 1784804 - RNA, 19 nt, Homo sapiens
  misc_RNA (1)...(19): siRNA sense strand
gagguugacccacauccua

SEQ ID NO: 1784805 - RNA, 19 nt, Homo sapiens
  misc_RNA (1)...(19): siRNA sense strand
uccaaacgcagacauauuu

SEQ ID NO: 1784806 - RNA, 19 nt, Homo sapiens
  misc_RNA (1)...(19): siRNA sense strand
gacccaagguaccugauca

SEQ ID NO: 1784807 - RNA, 19 nt, Homo sapiens
  misc_RNA (1)...(19): siRNA sense strand
cagcagaaacuccagcauu

SEQ ID NO: 1784808 - RNA, 19 nt, Homo sapiens
  misc_RNA (1)...(19): siRNA sense strand
gaagcaccaccaaauuaug

SEQ ID NO: 1784809 - RNA, 19 nt, Homo sapiens
  misc_RNA (1)...(19): siRNA sense strand
ugaaagaaagggauacugu

SEQ ID NO: 1784810 - RNA, 19 nt, Homo sapiens
  misc_RNA (1)...(19): siRNA sense strand
agcagaaacuccagcauug

SEQ ID NO: 1784811 - RNA, 19 nt, Homo sapiens
  misc_RNA (1)...(19): siRNA sense strand
cuggauugcugcauuauca

SEQ ID NO: 1784812 - RNA, 19 nt, Homo sapiens
  misc_RNA (1)...(19): siRNA sense strand
gcagacauauuuggcuagu

SEQ ID NO: 1784813 - RNA, 19 nt, Homo sapiens
  misc_RNA (1)...(19): siRNA sense strand
ggaaauauggaagcauuca

SEQ ID NO: 1784814 - RNA, 19 nt, Homo sapiens
  misc_RNA (1)...(19): siRNA sense strand
gaagcuauuccaaucuaug

SEQ ID NO: 1784815 - RNA, 19 nt, Homo sapiens
  misc_RNA (1)...(19): siRNA sense strand
guauggauaugagcugguu

SEQ ID NO: 1784816 - RNA, 19 nt, Homo sapiens
  misc_RNA (1)...(19): siRNA sense strand
gcacagacacauggaaugg

SEQ ID NO: 1784817 - RNA, 19 nt, Homo sapiens
  misc_RNA (1)...(19): siRNA sense strand
ugaagcaccaccaaauuau

SEQ ID NO: 1784818 - RNA, 19 nt, Homo sapiens
  misc_RNA (1)...(19): siRNA sense strand
gguacaauuccauauaaug

SEQ ID NO: 1784819 - RNA, 19 nt, Homo sapiens
  misc_RNA (1)...(19): siRNA sense strand
acaaagaccauucgacaca

SEQ ID NO: 1784820 - RNA, 19 nt, Homo sapiens
  misc_RNA (1)...(19): siRNA sense strand
auacaagaauuccgguuuc

SEQ ID NO: 1784821 - RNA, 19 nt, Homo sapiens
  misc_RNA (1)...(19): siRNA sense strand
gagcacagacacauggaau

SEQ ID NO: 1784822 - RNA, 19 nt, Homo sapiens
  misc_RNA (1)...(19): siRNA sense strand
gagccugggucugguguuc

SEQ ID NO: 1784823 - RNA, 19 nt, Homo sapiens
  misc_RNA (1)...(19): siRNA sense strand
caaagaccauucgacacau

SEQ ID NO: 1784824 - RNA, 19 nt, Homo sapiens
  misc_RNA (1)...(19): siRNA sense strand
uauacaagaauuccgguuu

SEQ ID NO: 1784825 - RNA, 19 nt, Homo sapiens
  misc_RNA (1)...(19): siRNA sense strand
ugaauuuccauuucgcuuu

SEQ ID NO: 1784826 - RNA, 19 nt, Homo sapiens
  misc_RNA (1)...(19): siRNA sense strand
uuagugaucgguacaauuc

SEQ ID NO: 1784827 - RNA, 19 nt, Homo sapiens
  misc_RNA (1)...(19): siRNA sense strand
ucaugucgaugucaacaca

SEQ ID NO: 1784828 - RNA, 19 nt, Homo sapiens
  misc_RNA (1)...(19): siRNA sense strand
gacuauuccuuagcuguau

SEQ ID NO: 1784829 - RNA, 19 nt, Homo sapiens
  misc_RNA (1)...(19): siRNA sense strand
aaagaccauucgacacaug

SEQ ID NO: 1784830 - RNA, 19 nt, Homo sapiens
  misc_RNA (1)...(19): siRNA sense strand
aaagggauacuguaaugga

SEQ ID NO: 1784831 - RNA, 19 nt, Homo sapiens
  misc_RNA (1)...(19): siRNA sense strand
gaugcucgaacugccauua

SEQ ID NO: 1784832 - RNA, 19 nt, Homo sapiens
  misc_RNA (1)...(19): siRNA sense strand
gugaaggcaucauuuuauu

SEQ ID NO: 1784833 - RNA, 19 nt, Homo sapiens
  misc_RNA (1)...(19): siRNA sense strand
aaauuaugcagauguggua

SEQ ID NO: 1784834 - RNA, 19 nt, Homo sapiens
  misc_RNA (1)...(19): siRNA sense strand
gaagcauucaguacugugu

SEQ ID NO: 1784835 - RNA, 19 nt, Homo sapiens
  misc_RNA (1)...(19): siRNA sense strand
aggaagaauucucuagaca

SEQ ID NO: 1784836 - RNA, 19 nt, Homo sapiens
  misc_RNA (1)...(19): siRNA sense strand
ucaacacaccagcauuauu

SEQ ID NO: 1784837 - RNA, 19 nt, Homo sapiens
  misc_RNA (1)...(19): siRNA sense strand
ggagaagcuauuccaaucu

SEQ ID NO: 1784838 - RNA, 19 nt, Homo sapiens
  misc_RNA (1)...(19): siRNA sense strand
gaucgguacaauuccauau

SEQ ID NO: 1784839 - RNA, 19 nt, Homo sapiens
  misc_RNA (1)...(19): siRNA sense strand
agugugcuguccuguguuu

SEQ ID NO: 1784840 - RNA, 19 nt, Homo sapiens
  misc_RNA (1)...(19): siRNA sense strand
caagaauuccgguuucaac

SEQ ID NO: 1784841 - RNA, 19 nt, Homo sapiens
  misc_RNA (1)...(19): siRNA sense strand
guaccugaucagaguguaa

SEQ ID NO: 1784842 - RNA, 19 nt, Homo sapiens
  misc_RNA (1)...(19): siRNA sense strand
agaguggacuauuccuuag

SEQ ID NO: 1784843 - RNA, 19 nt, Homo sapiens
  misc_RNA (1)...(19): siRNA sense strand
gugccaaaauugaaagaaa

SEQ ID NO: 1784844 - RNA, 19 nt, Homo sapiens
  misc_RNA (1)...(19): siRNA sense strand
uacaagaauuccgguuuca

SEQ ID NO: 1784845 - RNA, 19 nt, Homo sapiens
  misc_RNA (1)...(19): siRNA sense strand
guguuugccuguauacaag

SEQ ID NO: 1784846 - RNA, 19 nt, Homo sapiens
  misc_RNA (1)...(19): siRNA sense strand
cgcaagggcugcuauucca

SEQ ID NO: 1784847 - RNA, 19 nt, Homo sapiens
  misc_RNA (1)...(19): siRNA sense strand
ggauugcugcauuaucaga

SEQ ID NO: 1784848 - RNA, 19 nt, Homo sapiens
  misc_RNA (1)...(19): siRNA sense strand
gaaagggauacuguaaugg

SEQ ID NO: 1784849 - RNA, 19 nt, Homo sapiens
  misc_RNA (1)...(19): siRNA sense strand
cgggaacuccagguuguua

SEQ ID NO: 1784850 - RNA, 19 nt, Homo sapiens
  misc_RNA (1)...(19): siRNA sense strand
cagccuguuuccuucauuc

SEQ ID NO: 1784851 - RNA, 19 nt, Homo sapiens
  misc_RNA (1)...(19): siRNA sense strand
uaacugugagggagaagug

SEQ ID NO: 1784852 - RNA, 19 nt, Homo sapiens
  misc_RNA (1)...(19): siRNA sense strand
cagcauugccagccaguuc

SEQ ID NO: 1784853 - RNA, 19 nt, Homo sapiens
  misc_RNA (1)...(19): siRNA sense strand
gagcgcaagggcugcuauu

SEQ ID NO: 1784854 - RNA, 19 nt, Homo sapiens
  misc_RNA (1)...(19): siRNA sense strand
aauauggaagcauucagua

SEQ ID NO: 1784855 - RNA, 19 nt, Homo sapiens
  misc_RNA (1)...(19): siRNA sense strand
ccaccaaauuaugcagaug

SEQ ID NO: 1784856 - RNA, 19 nt, Homo sapiens
  misc_RNA (1)...(19): siRNA sense strand
ccaguucaguauggauaug

SEQ ID NO: 1784857 - RNA, 19 nt, Homo sapiens
  misc_RNA (1)...(19): siRNA sense strand
aauuguuccucucgucuga

SEQ ID NO: 1784858 - RNA, 19 nt, Homo sapiens
  misc_RNA (1)...(19): siRNA sense strand
acuauuccuuagcuguaua

SEQ ID NO: 1784859 - RNA, 19 nt, Homo sapiens
  misc_RNA (1)...(19): siRNA sense strand
agaagcuauuccaaucuau

SEQ ID NO: 1784860 - RNA, 19 nt, Homo sapiens
  misc_RNA (1)...(19): siRNA sense strand
gccagccaguucaguaugg

SEQ ID NO: 1784861 - RNA, 19 nt, Homo sapiens
  misc_RNA (1)...(19): siRNA sense strand
gcucgaacugccauuagug

SEQ ID NO: 1784862 - RNA, 19 nt, Homo sapiens
  misc_RNA (1)...(19): siRNA sense strand
ggaacuccagguuguuagu

SEQ ID NO: 1784863 - RNA, 19 nt, Homo sapiens
  misc_RNA (1)...(19): siRNA sense strand
guccuguguuugccuguau

SEQ ID NO: 1784864 - RNA, 19 nt, Homo sapiens
  misc_RNA (1)...(19): siRNA sense strand
ggugaaggcaucauuuuau

SEQ ID NO: 1784865 - RNA, 19 nt, Homo sapiens
  misc_RNA (1)...(19): siRNA sense strand
cgguacaauuccauauaau

SEQ ID NO: 1784866 - RNA, 19 nt, Homo sapiens
  misc_RNA (1)...(19): siRNA sense strand
ggagcacagacacauggaa

SEQ ID NO: 1784867 - RNA, 19 nt, Homo sapiens
  misc_RNA (1)...(19): siRNA sense strand
guuccaaaggcugcuauuu

SEQ ID NO: 1784868 - RNA, 19 nt, Homo sapiens
  misc_RNA (1)...(19): siRNA sense strand
uuagucaugucgaugucaa

SEQ ID NO: 1784869 - RNA, 19 nt, Homo sapiens
  misc_RNA (1)...(19): siRNA sense strand
uuaucagaguggacuauuc

SEQ ID NO: 1784870 - RNA, 19 nt, Homo sapiens
  misc_RNA (1)...(19): siRNA sense strand
ccagccuguuuccuucauu

SEQ ID NO: 1784871 - RNA, 19 nt, Homo sapiens
  misc_RNA (1)...(19): siRNA sense strand
gaaggcaucauuuuauuac

SEQ ID NO: 1784872 - RNA, 19 nt, Homo sapiens
  misc_RNA (1)...(19): siRNA sense strand
cgaacugccauuagugauc

SEQ ID NO: 1784873 - RNA, 19 nt, Homo sapiens
  misc_RNA (1)...(19): siRNA sense strand
gcuguauacauucacauuc

SEQ ID NO: 1784874 - RNA, 19 nt, Homo sapiens
  misc_RNA (1)...(19): siRNA sense strand
ccuuagcuguauacauuca

SEQ ID NO: 1784875 - RNA, 19 nt, Homo sapiens
  misc_RNA (1)...(19): siRNA sense strand
ggaaaccacaucgcuucug

SEQ ID NO: 1784876 - RNA, 19 nt, Homo sapiens
  misc_RNA (1)...(19): siRNA sense strand
cauuagugaucgguacaau

SEQ ID NO: 1784877 - RNA, 19 nt, Homo sapiens
  misc_RNA (1)...(19): siRNA sense strand
aaauauggaagcauucagu

SEQ ID NO: 1784878 - RNA, 19 nt, Homo sapiens
  misc_RNA (1)...(19): siRNA sense strand
caagagagcaucugagaaa

SEQ ID NO: 1784879 - RNA, 19 nt, Homo sapiens
  misc_RNA (1)...(19): siRNA sense strand
gaaagccauuccaaccaua

SEQ ID NO: 1784880 - RNA, 19 nt, Homo sapiens
  misc_RNA (1)...(19): siRNA sense strand
gaauaugucucacgugaag

SEQ ID NO: 1784881 - RNA, 19 nt, Homo sapiens
  misc_RNA (1)...(19): siRNA sense strand
gagagccuaugaccuauuu

SEQ ID NO: 1784882 - RNA, 19 nt, Homo sapiens
  misc_RNA (1)...(19): siRNA sense strand
gaacgucaauggcaucauc

SEQ ID NO: 1784883 - RNA, 19 nt, Homo sapiens
  misc_RNA (1)...(19): siRNA sense strand
gugggcaacucuucgauua

SEQ ID NO: 1784884 - RNA, 19 nt, Homo sapiens
  misc_RNA (1)...(19): siRNA sense strand
gcacagaucaggucauugu

SEQ ID NO: 1784885 - RNA, 19 nt, Homo sapiens
  misc_RNA (1)...(19): siRNA sense strand
agaaagagcucaugauugc

SEQ ID NO: 1784886 - RNA, 19 nt, Homo sapiens
  misc_RNA (1)...(19): siRNA sense strand
aaacacaaguuccugagaa

SEQ ID NO: 1784887 - RNA, 19 nt, Homo sapiens
  misc_RNA (1)...(19): siRNA sense strand
ggagaccauugaaauagaa

SEQ ID NO: 1784888 - RNA, 19 nt, Homo sapiens
  misc_RNA (1)...(19): siRNA sense strand
gcaaagaggagcguauuga

SEQ ID NO: 1784889 - RNA, 19 nt, Homo sapiens
  misc_RNA (1)...(19): siRNA sense strand
gagaaagccaugaagauga

SEQ ID NO: 1784890 - RNA, 19 nt, Homo sapiens
  misc_RNA (1)...(19): siRNA sense strand
uaaggagaccauugaaaua

SEQ ID NO: 1784891 - RNA, 19 nt, Homo sapiens
  misc_RNA (1)...(19): siRNA sense strand
gagaaagagcucaugauug

SEQ ID NO: 1784892 - RNA, 19 nt, Homo sapiens
  misc_RNA (1)...(19): siRNA sense strand
gaaauagaaacacaaguuc

SEQ ID NO: 1784893 - RNA, 19 nt, Homo sapiens
  misc_RNA (1)...(19): siRNA sense strand
ucacugcccuuuacacaau

SEQ ID NO: 1784894 - RNA, 19 nt, Homo sapiens
  misc_RNA (1)...(19): siRNA sense strand
caggagagccuaugaccua

SEQ ID NO: 1784895 - RNA, 19 nt, Homo sapiens
  misc_RNA (1)...(19): siRNA sense strand
ggagaaagccaugaagaug

SEQ ID NO: 1784896 - RNA, 19 nt, Homo sapiens
  misc_RNA (1)...(19): siRNA sense strand
agaaagccaugaagaugaa

SEQ ID NO: 1784897 - RNA, 19 nt, Homo sapiens
  misc_RNA (1)...(19): siRNA sense strand
ggacugauccuaggacuuc

SEQ ID NO: 1784898 - RNA, 19 nt, Homo sapiens
  misc_RNA (1)...(19): siRNA sense strand
caacaccaccuuucaggaa

SEQ ID NO: 1784899 - RNA, 19 nt, Homo sapiens
  misc_RNA (1)...(19): siRNA sense strand
gcaacugucccacgauuau

SEQ ID NO: 1784900 - RNA, 19 nt, Homo sapiens
  misc_RNA (1)...(19): siRNA sense strand
caucgccuauccaaccuua

SEQ ID NO: 1784901 - RNA, 19 nt, Homo sapiens
  misc_RNA (1)...(19): siRNA sense strand
gugcugggcuggcuguuug

SEQ ID NO: 1784902 - RNA, 19 nt, Homo sapiens
  misc_RNA (1)...(19): siRNA sense strand
gggauuucacguaugauua

SEQ ID NO: 1784903 - RNA, 19 nt, Homo sapiens
  misc_RNA (1)...(19): siRNA sense strand
gugcacagaucaggucauu

SEQ ID NO: 1784904 - RNA, 19 nt, Homo sapiens
  misc_RNA (1)...(19): siRNA sense strand
caagaugacugaggaagag

SEQ ID NO: 1784905 - RNA, 19 nt, Homo sapiens
  misc_RNA (1)...(19): siRNA sense strand
cagcaacugucccacgauu

SEQ ID NO: 1784906 - RNA, 19 nt, Homo sapiens
  misc_RNA (1)...(19): siRNA sense strand
uuacugaguuugcuuaugg

SEQ ID NO: 1784907 - RNA, 19 nt, Homo sapiens
  misc_RNA (1)...(19): siRNA sense strand
gauccuaggacuucugauu

SEQ ID NO: 1784908 - RNA, 19 nt, Homo sapiens
  misc_RNA (1)...(19): siRNA sense strand
caucaucguuaucuacuuc

SEQ ID NO: 1784909 - RNA, 19 nt, Homo sapiens
  misc_RNA (1)...(19): siRNA sense strand
ugaauggaaugcccugguu

SEQ ID NO: 1784910 - RNA, 19 nt, Homo sapiens
  misc_RNA (1)...(19): siRNA sense strand
gggcaacucuucgauuaca

SEQ ID NO: 1784911 - RNA, 19 nt, Homo sapiens
  misc_RNA (1)...(19): siRNA sense strand
ccucuuugcuaguaacauu

SEQ ID NO: 1784912 - RNA, 19 nt, Homo sapiens
  misc_RNA (1)...(19): siRNA sense strand
ccaaacccauuccggaugu

SEQ ID NO: 1784913 - RNA, 19 nt, Homo sapiens
  misc_RNA (1)...(19): siRNA sense strand
gagagcaucugagaaagag

SEQ ID NO: 1784914 - RNA, 19 nt, Homo sapiens
  misc_RNA (1)...(19): siRNA sense strand
cagaaugugagaaauauug

SEQ ID NO: 1784915 - RNA, 19 nt, Homo sapiens
  misc_RNA (1)...(19): siRNA sense strand
gcacaaagugggcaacucu

SEQ ID NO: 1784916 - RNA, 19 nt, Homo sapiens
  misc_RNA (1)...(19): siRNA sense strand
cuaaggagaccauugaaau

SEQ ID NO: 1784917 - RNA, 19 nt, Homo sapiens
  misc_RNA (1)...(19): siRNA sense strand
uaaagcugaugcccauguu

SEQ ID NO: 1784918 - RNA, 19 nt, Homo sapiens
  misc_RNA (1)...(19): siRNA sense strand
gaaacacaaguuccugaga

SEQ ID NO: 1784919 - RNA, 19 nt, Homo sapiens
  misc_RNA (1)...(19): siRNA sense strand
gauaucuccaucaucguua

SEQ ID NO: 1784920 - RNA, 19 nt, Homo sapiens
  misc_RNA (1)...(19): siRNA sense strand
ugucgucccuucagaaugu

SEQ ID NO: 1784921 - RNA, 19 nt, Homo sapiens
  misc_RNA (1)...(19): siRNA sense strand
gaggagaaagccaugaaga

SEQ ID NO: 1784922 - RNA, 19 nt, Homo sapiens
  misc_RNA (1)...(19): siRNA sense strand
gugcaucucuaccgucugu

SEQ ID NO: 1784923 - RNA, 19 nt, Homo sapiens
  misc_RNA (1)...(19): siRNA sense strand
ggacuucugauugggauuu

SEQ ID NO: 1784924 - RNA, 19 nt, Homo sapiens
  misc_RNA (1)...(19): siRNA sense strand
uccaguccaucaccaguua

SEQ ID NO: 1784925 - RNA, 19 nt, Homo sapiens
  misc_RNA (1)...(19): siRNA sense strand
gaggagaacauccaagaag

SEQ ID NO: 1784926 - RNA, 19 nt, Homo sapiens
  misc_RNA (1)...(19): siRNA sense strand
ccuuaggccugaaucugua

SEQ ID NO: 1784927 - RNA, 19 nt, Homo sapiens
  misc_RNA (1)...(19): siRNA sense strand
ggaggacaguguugaacgu

SEQ ID NO: 1784928 - RNA, 19 nt, Homo sapiens
  misc_RNA (1)...(19): siRNA sense strand
ugauugggauuucacguau

SEQ ID NO: 1784929 - RNA, 19 nt, Homo sapiens
  misc_RNA (1)...(19): siRNA sense strand
gcaagagagcaucugagaa

SEQ ID NO: 1784930 - RNA, 19 nt, Homo sapiens
  misc_RNA (1)...(19): siRNA sense strand
ugaaagccauuccaaccau

SEQ ID NO: 1784931 - RNA, 19 nt, Homo sapiens
  misc_RNA (1)...(19): siRNA sense strand
gaauggaaugcccugguuu

SEQ ID NO: 1784932 - RNA, 19 nt, Homo sapiens
  misc_RNA (1)...(19): siRNA sense strand
gugcacuacuuguacuuug

SEQ ID NO: 1784933 - RNA, 19 nt, Homo sapiens
  misc_RNA (1)...(19): siRNA sense strand
cuucagaaugugagaaaua

SEQ ID NO: 1784934 - RNA, 19 nt, Homo sapiens
  misc_RNA (1)...(19): siRNA sense strand
acaaguuccugagaagaaa

SEQ ID NO: 1784935 - RNA, 19 nt, Homo sapiens
  misc_RNA (1)...(19): siRNA sense strand
gaucucggcagacaucuuc

SEQ ID NO: 1784936 - RNA, 19 nt, Homo sapiens
  misc_RNA (1)...(19): siRNA sense strand
ccauugaaauagaaacaca

SEQ ID NO: 1784937 - RNA, 19 nt, Homo sapiens
  misc_RNA (1)...(19): siRNA sense strand
caagaucucggcagacauc

SEQ ID NO: 1784938 - RNA, 19 nt, Homo sapiens
  misc_RNA (1)...(19): siRNA sense strand
ugacggacaccucugagaa

SEQ ID NO: 1784939 - RNA, 19 nt, Homo sapiens
  misc_RNA (1)...(19): siRNA sense strand
gcccuaaggagaccauuga

SEQ ID NO: 1784940 - RNA, 19 nt, Homo sapiens
  misc_RNA (1)...(19): siRNA sense strand
guaccaacaucgccuaucc

SEQ ID NO: 1784941 - RNA, 19 nt, Homo sapiens
  misc_RNA (1)...(19): siRNA sense strand
ggaagaggagaacauccaa

SEQ ID NO: 1784942 - RNA, 19 nt, Homo sapiens
  misc_RNA (1)...(19): siRNA sense strand
uuagccaucuuucucuuau

SEQ ID NO: 1784943 - RNA, 19 nt, Homo sapiens
  misc_RNA (1)...(19): siRNA sense strand
ccaugaagaugaagaugac

SEQ ID NO: 1784944 - RNA, 19 nt, Homo sapiens
  misc_RNA (1)...(19): siRNA sense strand
gccaugaagaugaagauga

SEQ ID NO: 1784945 - RNA, 19 nt, Homo sapiens
  misc_RNA (1)...(19): siRNA sense strand
gauuacauccaguccauca

SEQ ID NO: 1784946 - RNA, 19 nt, Homo sapiens
  misc_RNA (1)...(19): siRNA sense strand
gcuaguaacauuggaagug

SEQ ID NO: 1784947 - RNA, 19 nt, Homo sapiens
  misc_RNA (1)...(19): siRNA sense strand
gaagaggagaaagccauga

SEQ ID NO: 1784948 - RNA, 19 nt, Homo sapiens
  misc_RNA (1)...(19): siRNA sense strand
ccaagaugacugaggaaga

SEQ ID NO: 1784949 - RNA, 19 nt, Homo sapiens
  misc_RNA (1)...(19): siRNA sense strand
uuucacguaugauuacuga

SEQ ID NO: 1784950 - RNA, 19 nt, Homo sapiens
  misc_RNA (1)...(19): siRNA sense strand
gcauggagcccagcaacug

SEQ ID NO: 1784951 - RNA, 19 nt, Homo sapiens
  misc_RNA (1)...(19): siRNA sense strand
cacaaguuccugagaagaa

SEQ ID NO: 1784952 - RNA, 19 nt, Homo sapiens
  misc_RNA (1)...(19): siRNA sense strand
agccaucuuucucuuauug

SEQ ID NO: 1784953 - RNA, 19 nt, Homo sapiens
  misc_RNA (1)...(19): siRNA sense strand
ggagagccuaugaccuauu

SEQ ID NO: 1784954 - RNA, 19 nt, Homo sapiens
  misc_RNA (1)...(19): siRNA sense strand
caaugagccaggagccuuu

SEQ ID NO: 1784955 - RNA, 19 nt, Homo sapiens
  misc_RNA (1)...(19): siRNA sense strand
ggaaugcccugguuuuggu

SEQ ID NO: 1784956 - RNA, 19 nt, Homo sapiens
  misc_RNA (1)...(19): siRNA sense strand
cuacuuguacuuugccauu

SEQ ID NO: 1784957 - RNA, 19 nt, Homo sapiens
  misc_RNA (1)...(19): siRNA sense strand
ggauuucacguaugauuac

SEQ ID NO: 1784958 - RNA, 19 nt, Homo sapiens
  misc_RNA (1)...(19): siRNA sense strand
gccggaagguuguuuaucc

SEQ ID NO: 1784959 - RNA, 19 nt, Homo sapiens
  misc_RNA (1)...(19): siRNA sense strand
auucaucaaucuggccuua

SEQ ID NO: 1784960 - RNA, 19 nt, Homo sapiens
  misc_RNA (1)...(19): siRNA sense strand
guggguaucuaaagcugau

SEQ ID NO: 1784961 - RNA, 19 nt, Homo sapiens
  misc_RNA (1)...(19): siRNA sense strand
ugacugaggaagaggagaa

SEQ ID NO: 1784962 - RNA, 19 nt, Homo sapiens
  misc_RNA (1)...(19): siRNA sense strand
caucgccauuggaggcuuu

SEQ ID NO: 1784963 - RNA, 19 nt, Homo sapiens
  misc_RNA (1)...(19): siRNA sense strand
aggagaccauugaaauaga

SEQ ID NO: 1784964 - RNA, 19 nt, Homo sapiens
  misc_RNA (1)...(19): siRNA sense strand
cagcaaagaggagcguauu

SEQ ID NO: 1784965 - RNA, 19 nt, Homo sapiens
  misc_RNA (1)...(19): siRNA sense strand
cacguaugauuacugaguu

SEQ ID NO: 1784966 - RNA, 19 nt, Homo sapiens
  misc_RNA (1)...(19): siRNA sense strand
ucccugaccuccaucuuca

SEQ ID NO: 1784967 - RNA, 19 nt, Homo sapiens
  misc_RNA (1)...(19): siRNA sense strand
gccagcggauccaggucua

SEQ ID NO: 1784968 - RNA, 19 nt, Homo sapiens
  misc_RNA (1)...(19): siRNA sense strand
ugauuacugaguuugcuua

SEQ ID NO: 1784969 - RNA, 19 nt, Homo sapiens
  misc_RNA (1)...(19): siRNA sense strand
gauugggauuucacguaug

SEQ ID NO: 1784970 - RNA, 19 nt, Homo sapiens
  misc_RNA (1)...(19): siRNA sense strand
aggccugaaucuguauuua

SEQ ID NO: 1784971 - RNA, 19 nt, Homo sapiens
  misc_RNA (1)...(19): siRNA sense strand
cagccaagaauaugucuca

SEQ ID NO: 1784972 - RNA, 19 nt, Homo sapiens
  misc_RNA (1)...(19): siRNA sense strand
uacuuguacuuugccauua

SEQ ID NO: 1784973 - RNA, 19 nt, Homo sapiens
  misc_RNA (1)...(19): siRNA sense strand
guccaucaccaguuacuug

SEQ ID NO: 1784974 - RNA, 19 nt, Homo sapiens
  misc_RNA (1)...(19): siRNA sense strand
gcaacucuucgauuacauc

SEQ ID NO: 1784975 - RNA, 19 nt, Homo sapiens
  misc_RNA (1)...(19): siRNA sense strand
ccuaaggagaccauugaaa

SEQ ID NO: 1784976 - RNA, 19 nt, Homo sapiens
  misc_RNA (1)...(19): siRNA sense strand
gcaaugcagccgauaucuc

SEQ ID NO: 1784977 - RNA, 19 nt, Homo sapiens
  misc_RNA (1)...(19): siRNA sense strand
cagccgauaucuccaucau

SEQ ID NO: 1784978 - RNA, 19 nt, Homo sapiens
  misc_RNA (1)...(19): siRNA sense strand
gaacaagcauguggaauuc

SEQ ID NO: 1784979 - RNA, 19 nt, Homo sapiens
  misc_RNA (1)...(19): siRNA sense strand
caaagaagcuucgggugaa

SEQ ID NO: 1784980 - RNA, 19 nt, Homo sapiens
  misc_RNA (1)...(19): siRNA sense strand
gcacuacuccggccucuau

SEQ ID NO: 1784981 - RNA, 19 nt, Homo sapiens
  misc_RNA (1)...(19): siRNA sense strand
gaagaacaagcauguggaa

SEQ ID NO: 1784982 - RNA, 19 nt, Homo sapiens
  misc_RNA (1)...(19): siRNA sense strand
ccuauucucucuacgacua

SEQ ID NO: 1784983 - RNA, 19 nt, Homo sapiens
  misc_RNA (1)...(19): siRNA sense strand
ggacguggccuaccaugug

SEQ ID NO: 1784984 - RNA, 19 nt, Homo sapiens
  misc_RNA (1)...(19): siRNA sense strand
ccaugagccuggccuugua

SEQ ID NO: 1784985 - RNA, 19 nt, Homo sapiens
  misc_RNA (1)...(19): siRNA sense strand
ggaaugugcagcugucaga

SEQ ID NO: 1784986 - RNA, 19 nt, Homo sapiens
  misc_RNA (1)...(19): siRNA sense strand
agaacaagcauguggaauu

SEQ ID NO: 1784987 - RNA, 19 nt, Homo sapiens
  misc_RNA (1)...(19): siRNA sense strand
cacuggaacucaccaaaga

SEQ ID NO: 1784988 - RNA, 19 nt, Homo sapiens
  misc_RNA (1)...(19): siRNA sense strand
gagacgcucuuccacacau

SEQ ID NO: 1784989 - RNA, 19 nt, Homo sapiens
  misc_RNA (1)...(19): siRNA sense strand
acaagcauguggaauucuu

SEQ ID NO: 1784990 - RNA, 19 nt, Homo sapiens
  misc_RNA (1)...(19): siRNA sense strand
ccucacgccuuacgucuuc

SEQ ID NO: 1784991 - RNA, 19 nt, Homo sapiens
  misc_RNA (1)...(19): siRNA sense strand
ucaacgcugugaucaagga

SEQ ID NO: 1784992 - RNA, 19 nt, Homo sapiens
  misc_RNA (1)...(19): siRNA sense strand
ccgcuaugauccucgcuuu

SEQ ID NO: 1784993 - RNA, 19 nt, Homo sapiens
  misc_RNA (1)...(19): siRNA sense strand
cgcagaagcucagcaguuc

SEQ ID NO: 1784994 - RNA, 19 nt, Homo sapiens
  misc_RNA (1)...(19): siRNA sense strand
cgaucggucuuguggagaa

SEQ ID NO: 1784995 - RNA, 19 nt, Homo sapiens
  misc_RNA (1)...(19): siRNA sense strand
gcuaugauccucgcuuugu

SEQ ID NO: 1784996 - RNA, 19 nt, Homo sapiens
  misc_RNA (1)...(19): siRNA sense strand
gaagaccccugcuuugagu

SEQ ID NO: 1784997 - RNA, 19 nt, Homo sapiens
  misc_RNA (1)...(19): siRNA sense strand
ggaaccugcugcggagaga

SEQ ID NO: 1784998 - RNA, 19 nt, Homo sapiens
  misc_RNA (1)...(19): siRNA sense strand
gcauguggccaucgugugu

SEQ ID NO: 1784999 - RNA, 19 nt, Homo sapiens
  misc_RNA (1)...(19): siRNA sense strand
ccacgcacccacagacuau

SEQ ID NO: 1785000 - RNA, 19 nt, Homo sapiens
  misc_RNA (1)...(19): siRNA sense strand
ggcccucuuugcucacuuu

SEQ ID NO: 1785001 - RNA, 19 nt, Homo sapiens
  misc_RNA (1)...(19): siRNA sense strand
gaacucaccaaagaagcuu

SEQ ID NO: 1785002 - RNA, 19 nt, Homo sapiens
  misc_RNA (1)...(19): siRNA sense strand
cuucaacgcugugaucaag

SEQ ID NO: 1785003 - RNA, 19 nt, Homo sapiens
  misc_RNA (1)...(19): siRNA sense strand
guaccugacagacgcagaa

SEQ ID NO: 1785004 - RNA, 19 nt, Homo sapiens
  misc_RNA (1)...(19): siRNA sense strand
agugcgagcucuugcaugu

SEQ ID NO: 1785005 - RNA, 19 nt, Homo sapiens
  misc_RNA (1)...(19): siRNA sense strand
ggagcucugggcccucuuu

SEQ ID NO: 1785006 - RNA, 19 nt, Homo sapiens
  misc_RNA (1)...(19): siRNA sense strand
gggcuucggcuggaacaaa

SEQ ID NO: 1785007 - RNA, 19 nt, Homo sapiens
  misc_RNA (1)...(19): siRNA sense strand
gcucggauuccuccuguuc

SEQ ID NO: 1785008 - RNA, 19 nt, Homo sapiens
  misc_RNA (1)...(19): siRNA sense strand
ugaccuuccuggaguacga

SEQ ID NO: 1785009 - RNA, 19 nt, Homo sapiens
  misc_RNA (1)...(19): siRNA sense strand
uggaugcccaggaauauga

SEQ ID NO: 1785010 - RNA, 19 nt, Homo sapiens
  misc_RNA (1)...(19): siRNA sense strand
cgaauuccaccaggacuug

SEQ ID NO: 1785011 - RNA, 19 nt, Homo sapiens
  misc_RNA (1)...(19): siRNA sense strand
uggcccagcuguccaugga

SEQ ID NO: 1785012 - RNA, 19 nt, Homo sapiens
  misc_RNA (1)...(19): siRNA sense strand
ucuaugggcuaaugaagcu

SEQ ID NO: 1785013 - RNA, 19 nt, Homo sapiens
  misc_RNA (1)...(19): siRNA sense strand
ucaaccagcuucgcaacgu

SEQ ID NO: 1785014 - RNA, 19 nt, Homo sapiens
  misc_RNA (1)...(19): siRNA sense strand
gcagcugucagaucacaca

SEQ ID NO: 1785015 - RNA, 19 nt, Homo sapiens
  misc_RNA (1)...(19): siRNA sense strand
gugcagcugucagaucaca

SEQ ID NO: 1785016 - RNA, 19 nt, Homo sapiens
  misc_RNA (1)...(19): siRNA sense strand
caccuucgccucugacauc

SEQ ID NO: 1785017 - RNA, 19 nt, Homo sapiens
  misc_RNA (1)...(19): siRNA sense strand
uggaccggcugcagauguu

SEQ ID NO: 1785018 - RNA, 19 nt, Homo sapiens
  misc_RNA (1)...(19): siRNA sense strand
ggaacucaccaaagaagcu

SEQ ID NO: 1785019 - RNA, 19 nt, Homo sapiens
  misc_RNA (1)...(19): siRNA sense strand
ccacuggaacucaccaaag

SEQ ID NO: 1785020 - RNA, 19 nt, Homo sapiens
  misc_RNA (1)...(19): siRNA sense strand
ugggcaaccucuggaagaa

SEQ ID NO: 1785021 - RNA, 19 nt, Homo sapiens
  misc_RNA (1)...(19): siRNA sense strand
gggugaagaacaagcaugu

SEQ ID NO: 1785022 - RNA, 19 nt, Homo sapiens
  misc_RNA (1)...(19): siRNA sense strand
ggcacucucuacaccuuca

SEQ ID NO: 1785023 - RNA, 19 nt, Homo sapiens
  misc_RNA (1)...(19): siRNA sense strand
ucacuuuccugccccauga

SEQ ID NO: 1785024 - RNA, 19 nt, Homo sapiens
  misc_RNA (1)...(19): siRNA sense strand
cgugucagcuuuuaucaug

SEQ ID NO: 1785025 - RNA, 19 nt, Homo sapiens
  misc_RNA (1)...(19): siRNA sense strand
ggcagcagcagcucacugu

SEQ ID NO: 1785026 - RNA, 19 nt, Homo sapiens
  misc_RNA (1)...(19): siRNA sense strand
acgcagaagcucagcaguu

SEQ ID NO: 1785027 - RNA, 19 nt, Homo sapiens
  misc_RNA (1)...(19): siRNA sense strand
ucagugacauugacuuccu

SEQ ID NO: 1785028 - RNA, 19 nt, Homo sapiens
  misc_RNA (1)...(19): siRNA sense strand
caucuucaacgcugugauc

SEQ ID NO: 1785029 - RNA, 19 nt, Homo sapiens
  misc_RNA (1)...(19): siRNA sense strand
gccacgcacccacagacua

SEQ ID NO: 1785030 - RNA, 19 nt, Homo sapiens
  misc_RNA (1)...(19): siRNA sense strand
gaaauuguuugcccagaaa

SEQ ID NO: 1785031 - RNA, 19 nt, Homo sapiens
  misc_RNA (1)...(19): siRNA sense strand
gcacucaaauaacauaguu

SEQ ID NO: 1785032 - RNA, 19 nt, Homo sapiens
  misc_RNA (1)...(19): siRNA sense strand
ugaaaggcuugccaucuua

SEQ ID NO: 1785033 - RNA, 19 nt, Homo sapiens
  misc_RNA (1)...(19): siRNA sense strand
ugacaaugccuuagaaauu

SEQ ID NO: 1785034 - RNA, 19 nt, Homo sapiens
  misc_RNA (1)...(19): siRNA sense strand
gccauugggucucuuguaa

SEQ ID NO: 1785035 - RNA, 19 nt, Homo sapiens
  misc_RNA (1)...(19): siRNA sense strand
ggaccgaaaucgucuaugg

SEQ ID NO: 1785036 - RNA, 19 nt, Homo sapiens
  misc_RNA (1)...(19): siRNA sense strand
gaaaucgucuaugguaugu

SEQ ID NO: 1785037 - RNA, 19 nt, Homo sapiens
  misc_RNA (1)...(19): siRNA sense strand
auaggaaucugcaccauuu

SEQ ID NO: 1785038 - RNA, 19 nt, Homo sapiens
  misc_RNA (1)...(19): siRNA sense strand
ggaacucccugacauccuu

SEQ ID NO: 1785039 - RNA, 19 nt, Homo sapiens
  misc_RNA (1)...(19): siRNA sense strand
ugaaggagcugcagacacu

SEQ ID NO: 1785040 - RNA, 19 nt, Homo sapiens
  misc_RNA (1)...(19): siRNA sense strand
ccaaucguuugcuaacuuu

SEQ ID NO: 1785041 - RNA, 19 nt, Homo sapiens
  misc_RNA (1)...(19): siRNA sense strand
uggaaaccgucuugcauuu

SEQ ID NO: 1785042 - RNA, 19 nt, Homo sapiens
  misc_RNA (1)...(19): siRNA sense strand
guagugagccuauguuuac

SEQ ID NO: 1785043 - RNA, 19 nt, Homo sapiens
  misc_RNA (1)...(19): siRNA sense strand
agaaauuggucgucugaga

SEQ ID NO: 1785044 - RNA, 19 nt, Homo sapiens
  misc_RNA (1)...(19): siRNA sense strand
cagaaaaccuugcucagaa

SEQ ID NO: 1785045 - RNA, 19 nt, Homo sapiens
  misc_RNA (1)...(19): siRNA sense strand
gcuaauaaccaacugcaau

SEQ ID NO: 1785046 - RNA, 19 nt, Homo sapiens
  misc_RNA (1)...(19): siRNA sense strand
gaacuauaccugcacucaa

SEQ ID NO: 1785047 - RNA, 19 nt, Homo sapiens
  misc_RNA (1)...(19): siRNA sense strand
caaaccuuguggaacuaua

SEQ ID NO: 1785048 - RNA, 19 nt, Homo sapiens
  misc_RNA (1)...(19): siRNA sense strand
aacuauaccugcacucaaa

SEQ ID NO: 1785049 - RNA, 19 nt, Homo sapiens
  misc_RNA (1)...(19): siRNA sense strand
cugaaaggcuugccaucuu

SEQ ID NO: 1785050 - RNA, 19 nt, Homo sapiens
  misc_RNA (1)...(19): siRNA sense strand
agaaauuguuugcccagaa

SEQ ID NO: 1785051 - RNA, 19 nt, Homo sapiens
  misc_RNA (1)...(19): siRNA sense strand
auacguggauaacaacauu

SEQ ID NO: 1785052 - RNA, 19 nt, Homo sapiens
  misc_RNA (1)...(19): siRNA sense strand
ccgagaggcuucacaugug

SEQ ID NO: 1785053 - RNA, 19 nt, Homo sapiens
  misc_RNA (1)...(19): siRNA sense strand
uggaguuacugaaagauga

SEQ ID NO: 1785054 - RNA, 19 nt, Homo sapiens
  misc_RNA (1)...(19): siRNA sense strand
uaccugcacucaaauaaca

SEQ ID NO: 1785055 - RNA, 19 nt, Homo sapiens
  misc_RNA (1)...(19): siRNA sense strand
cuaauaaccaacugcaauu

SEQ ID NO: 1785056 - RNA, 19 nt, Homo sapiens
  misc_RNA (1)...(19): siRNA sense strand
gaaaggcuugccaucuuau

SEQ ID NO: 1785057 - RNA, 19 nt, Homo sapiens
  misc_RNA (1)...(19): siRNA sense strand
cauuggaguuacugaaaga

SEQ ID NO: 1785058 - RNA, 19 nt, Homo sapiens
  misc_RNA (1)...(19): siRNA sense strand
cgaaaucgucuaugguaug

SEQ ID NO: 1785059 - RNA, 19 nt, Homo sapiens
  misc_RNA (1)...(19): siRNA sense strand
ucugagagcuuuacgucau

SEQ ID NO: 1785060 - RNA, 19 nt, Homo sapiens
  misc_RNA (1)...(19): siRNA sense strand
cuccagagguuggcgauuu

SEQ ID NO: 1785061 - RNA, 19 nt, Homo sapiens
  misc_RNA (1)...(19): siRNA sense strand
ccauagggacggagcauga

SEQ ID NO: 1785062 - RNA, 19 nt, Homo sapiens
  misc_RNA (1)...(19): siRNA sense strand
ccaaucucauuacccagaa

SEQ ID NO: 1785063 - RNA, 19 nt, Homo sapiens
  misc_RNA (1)...(19): siRNA sense strand
gcaggaauuggcuaugaga

SEQ ID NO: 1785064 - RNA, 19 nt, Homo sapiens
  misc_RNA (1)...(19): siRNA sense strand
ggaacuauaccugcacuca

SEQ ID NO: 1785065 - RNA, 19 nt, Homo sapiens
  misc_RNA (1)...(19): siRNA sense strand
ucagaagcuuccaaaccuu

SEQ ID NO: 1785066 - RNA, 19 nt, Homo sapiens
  misc_RNA (1)...(19): siRNA sense strand
cugcaggaauuggcuauga

SEQ ID NO: 1785067 - RNA, 19 nt, Homo sapiens
  misc_RNA (1)...(19): siRNA sense strand
uguagugagccuauguuua

SEQ ID NO: 1785068 - RNA, 19 nt, Homo sapiens
  misc_RNA (1)...(19): siRNA sense strand
uagugacaaugccuuagaa

SEQ ID NO: 1785069 - RNA, 19 nt, Homo sapiens
  misc_RNA (1)...(19): siRNA sense strand
ugaacuuucugucuccaau

SEQ ID NO: 1785070 - RNA, 19 nt, Homo sapiens
  misc_RNA (1)...(19): siRNA sense strand
cucgagaacuacaguaugu

SEQ ID NO: 1785071 - RNA, 19 nt, Homo sapiens
  misc_RNA (1)...(19): siRNA sense strand
ccgaaaucgucuaugguau

SEQ ID NO: 1785072 - RNA, 19 nt, Homo sapiens
  misc_RNA (1)...(19): siRNA sense strand
aaaccuugcucagaagcuu

SEQ ID NO: 1785073 - RNA, 19 nt, Homo sapiens
  misc_RNA (1)...(19): siRNA sense strand
ccauuggaguuacugaaag

SEQ ID NO: 1785074 - RNA, 19 nt, Homo sapiens
  misc_RNA (1)...(19): siRNA sense strand
ggugcucccauucaaguuu

SEQ ID NO: 1785075 - RNA, 19 nt, Homo sapiens
  misc_RNA (1)...(19): siRNA sense strand
uaaccaacugcaauuccua

SEQ ID NO: 1785076 - RNA, 19 nt, Homo sapiens
  misc_RNA (1)...(19): siRNA sense strand
uuuacgucaucuucgauua

SEQ ID NO: 1785077 - RNA, 19 nt, Homo sapiens
  misc_RNA (1)...(19): siRNA sense strand
gaaaaggaacucccugaca

SEQ ID NO: 1785078 - RNA, 19 nt, Homo sapiens
  misc_RNA (1)...(19): siRNA sense strand
gaagccauugggucucuug

SEQ ID NO: 1785079 - RNA, 19 nt, Homo sapiens
  misc_RNA (1)...(19): siRNA sense strand
ugacauccuugccagaaaa

SEQ ID NO: 1785080 - RNA, 19 nt, Homo sapiens
  misc_RNA (1)...(19): siRNA sense strand
gcuaugagagggcuguauc

SEQ ID NO: 1785081 - RNA, 19 nt, Homo sapiens
  misc_RNA (1)...(19): siRNA sense strand
accaaucguuugcuaacuu

SEQ ID NO: 1785082 - RNA, 19 nt, Homo sapiens
  misc_RNA (1)...(19): siRNA sense strand
cugcagacacuagacauuu

SEQ ID NO: 1785083 - RNA, 19 nt, Homo sapiens
  misc_RNA (1)...(19): siRNA sense strand
cauugggucucuuguaaaa

SEQ ID NO: 1785084 - RNA, 19 nt, Homo sapiens
  misc_RNA (1)...(19): siRNA sense strand
aaaaggaacucccugacau

SEQ ID NO: 1785085 - RNA, 19 nt, Homo sapiens
  misc_RNA (1)...(19): siRNA sense strand
uauaccugcacucaaauaa

SEQ ID NO: 1785086 - RNA, 19 nt, Homo sapiens
  misc_RNA (1)...(19): siRNA sense strand
uauaggaaucugcaccauu

SEQ ID NO: 1785087 - RNA, 19 nt, Homo sapiens
  misc_RNA (1)...(19): siRNA sense strand
gggcugcaccaguggaaga

SEQ ID NO: 1785088 - RNA, 19 nt, Homo sapiens
  misc_RNA (1)...(19): siRNA sense strand
gaacuuucugucuccaauc

SEQ ID NO: 1785089 - RNA, 19 nt, Homo sapiens
  misc_RNA (1)...(19): siRNA sense strand
gaucucgagaacuacagua

SEQ ID NO: 1785090 - RNA, 19 nt, Homo sapiens
  misc_RNA (1)...(19): siRNA sense strand
gcuggaaaccgucuugcau

SEQ ID NO: 1785091 - RNA, 19 nt, Homo sapiens
  misc_RNA (1)...(19): siRNA sense strand
ccacuugauuuaggucgau

SEQ ID NO: 1785092 - RNA, 19 nt, Homo sapiens
  misc_RNA (1)...(19): siRNA sense strand
aagaugagggacugcagua

SEQ ID NO: 1785093 - RNA, 19 nt, Homo sapiens
  misc_RNA (1)...(19): siRNA sense strand
cuauaccugcacucaaaua

SEQ ID NO: 1785094 - RNA, 19 nt, Homo sapiens
  misc_RNA (1)...(19): siRNA sense strand
gcacugucaucgguguagu

SEQ ID NO: 1785095 - RNA, 19 nt, Homo sapiens
  misc_RNA (1)...(19): siRNA sense strand
gugcucccauucaaguuuc

SEQ ID NO: 1785096 - RNA, 19 nt, Homo sapiens
  misc_RNA (1)...(19): siRNA sense strand
cgucaucuucgauuagcua

SEQ ID NO: 1785097 - RNA, 19 nt, Homo sapiens
  misc_RNA (1)...(19): siRNA sense strand
gugacaaugccuuagaaau

SEQ ID NO: 1785098 - RNA, 19 nt, Homo sapiens
  misc_RNA (1)...(19): siRNA sense strand
augagggacugcaguacuu

SEQ ID NO: 1785099 - RNA, 19 nt, Homo sapiens
  misc_RNA (1)...(19): siRNA sense strand
gcagacacuagacauuucu

SEQ ID NO: 1785100 - RNA, 19 nt, Homo sapiens
  misc_RNA (1)...(19): siRNA sense strand
ugcagacacuagacauuuc

SEQ ID NO: 1785101 - RNA, 19 nt, Homo sapiens
  misc_RNA (1)...(19): siRNA sense strand
gcugcagacacuagacauu

SEQ ID NO: 1785102 - RNA, 19 nt, Homo sapiens
  misc_RNA (1)...(19): siRNA sense strand
uccagagguuggcgauuug

SEQ ID NO: 1785103 - RNA, 19 nt, Homo sapiens
  misc_RNA (1)...(19): siRNA sense strand
gaacuuuguaagacgaucu

SEQ ID NO: 1785104 - RNA, 19 nt, Homo sapiens
  misc_RNA (1)...(19): siRNA sense strand
cugacauccuugccagaaa

SEQ ID NO: 1785105 - RNA, 19 nt, Homo sapiens
  misc_RNA (1)...(19): siRNA sense strand
ucagggcagcgaaccguuu

SEQ ID NO: 1785106 - RNA, 19 nt, Homo sapiens
  misc_RNA (1)...(19): siRNA sense strand
auguauacguggauaacaa

SEQ ID NO: 1785107 - RNA, 19 nt, Homo sapiens
  misc_RNA (1)...(19): siRNA sense strand
accgaaaucgucuauggua

SEQ ID NO: 1785108 - RNA, 19 nt, Homo sapiens
  misc_RNA (1)...(19): siRNA sense strand
gcucagaagcuuccaaacc

SEQ ID NO: 1785109 - RNA, 19 nt, Homo sapiens
  misc_RNA (1)...(19): siRNA sense strand
ccauugggucucuuguaaa

SEQ ID NO: 1785110 - RNA, 19 nt, Homo sapiens
  misc_RNA (1)...(19): siRNA sense strand
uggcuguggugcucccauu

SEQ ID NO: 1785111 - RNA, 19 nt, Homo sapiens
  misc_RNA (1)...(19): siRNA sense strand
ggcuugccaucuuaucugu

SEQ ID NO: 1785112 - RNA, 19 nt, Homo sapiens
  misc_RNA (1)...(19): siRNA sense strand
gaugagggacugcaguacu

SEQ ID NO: 1785113 - RNA, 19 nt, Homo sapiens
  misc_RNA (1)...(19): siRNA sense strand
acauuucuaccaaucguuu

SEQ ID NO: 1785114 - RNA, 19 nt, Homo sapiens
  misc_RNA (1)...(19): siRNA sense strand
agacauuucuaccaaucgu

SEQ ID NO: 1785115 - RNA, 19 nt, Homo sapiens
  misc_RNA (1)...(19): siRNA sense strand
gagcugcagacacuagaca

SEQ ID NO: 1785116 - RNA, 19 nt, Homo sapiens
  misc_RNA (1)...(19): siRNA sense strand
gaaggagcugcagacacua

SEQ ID NO: 1785117 - RNA, 19 nt, Homo sapiens
  misc_RNA (1)...(19): siRNA sense strand
ggaagccauugggucucuu

SEQ ID NO: 1785118 - RNA, 19 nt, Homo sapiens
  misc_RNA (1)...(19): siRNA sense strand
cucagaagcuuccaaaccu

SEQ ID NO: 1785119 - RNA, 19 nt, Homo sapiens
  misc_RNA (1)...(19): siRNA sense strand
ggaaaccgucuugcauuuu

SEQ ID NO: 1785120 - RNA, 19 nt, Homo sapiens
  misc_RNA (1)...(19): siRNA sense strand
cuggaaaccgucuugcauu

SEQ ID NO: 1785121 - RNA, 19 nt, Homo sapiens
  misc_RNA (1)...(19): siRNA sense strand
uaauaaccaacugcaauuc

SEQ ID NO: 1785122 - RNA, 19 nt, Homo sapiens
  misc_RNA (1)...(19): siRNA sense strand
acccagaagucuccuagag

SEQ ID NO: 1785123 - RNA, 19 nt, Homo sapiens
  misc_RNA (1)...(19): siRNA sense strand
ggacguggcuccuucaaga

SEQ ID NO: 1785124 - RNA, 19 nt, Homo sapiens
  misc_RNA (1)...(19): siRNA sense strand
gauugcagcugccauggua

SEQ ID NO: 1785125 - RNA, 19 nt, Homo sapiens
  misc_RNA (1)...(19): siRNA sense strand
cagcugccaugguauauaa

SEQ ID NO: 1785126 - RNA, 19 nt, Homo sapiens
  misc_RNA (1)...(19): siRNA sense strand
gaagggaugggacaaauga

SEQ ID NO: 1785127 - RNA, 19 nt, Homo sapiens
  misc_RNA (1)...(19): siRNA sense strand
cagcugagguggagaguga

SEQ ID NO: 1785128 - RNA, 19 nt, Homo sapiens
  misc_RNA (1)...(19): siRNA sense strand
ggacagcuaugccucagau

SEQ ID NO: 1785129 - RNA, 19 nt, Homo sapiens
  misc_RNA (1)...(19): siRNA sense strand
ggaggagccagcaccauua

SEQ ID NO: 1785130 - RNA, 19 nt, Homo sapiens
  misc_RNA (1)...(19): siRNA sense strand
ggacagcccggaagagauu

SEQ ID NO: 1785131 - RNA, 19 nt, Homo sapiens
  misc_RNA (1)...(19): siRNA sense strand
gggcugagcugcagagucu

SEQ ID NO: 1785132 - RNA, 19 nt, Homo sapiens
  misc_RNA (1)...(19): siRNA sense strand
gagaagggaugggacaaau

SEQ ID NO: 1785133 - RNA, 19 nt, Homo sapiens
  misc_RNA (1)...(19): siRNA sense strand
gauggugaccuuccgauuu

SEQ ID NO: 1785134 - RNA, 19 nt, Homo sapiens
  misc_RNA (1)...(19): siRNA sense strand
caacaucguccgcuucuau

SEQ ID NO: 1785135 - RNA, 19 nt, Homo sapiens
  misc_RNA (1)...(19): siRNA sense strand
gaagauacccgaggugaag

SEQ ID NO: 1785136 - RNA, 19 nt, Homo sapiens
  misc_RNA (1)...(19): siRNA sense strand
ucagagagcucagauacag

SEQ ID NO: 1785137 - RNA, 19 nt, Homo sapiens
  misc_RNA (1)...(19): siRNA sense strand
gaucucaagugcgacaaug

SEQ ID NO: 1785138 - RNA, 19 nt, Homo sapiens
  misc_RNA (1)...(19): siRNA sense strand
ggacuucauuuccuacacu

SEQ ID NO: 1785139 - RNA, 19 nt, Homo sapiens
  misc_RNA (1)...(19): siRNA sense strand
gagaagcugcguaaagcaa

SEQ ID NO: 1785140 - RNA, 19 nt, Homo sapiens
  misc_RNA (1)...(19): siRNA sense strand
caugguauauaacgaguuc

SEQ ID NO: 1785141 - RNA, 19 nt, Homo sapiens
  misc_RNA (1)...(19): siRNA sense strand
ggagaccaccguccucaug

SEQ ID NO: 1785142 - RNA, 19 nt, Homo sapiens
  misc_RNA (1)...(19): siRNA sense strand
guauauaacgaguucauuc

SEQ ID NO: 1785143 - RNA, 19 nt, Homo sapiens
  misc_RNA (1)...(19): siRNA sense strand
ggcagaagcacuugucaga

SEQ ID NO: 1785144 - RNA, 19 nt, Homo sapiens
  misc_RNA (1)...(19): siRNA sense strand
cgggcacgcucaagacgua

SEQ ID NO: 1785145 - RNA, 19 nt, Homo sapiens
  misc_RNA (1)...(19): siRNA sense strand
guggagacccuguugaaga

SEQ ID NO: 1785146 - RNA, 19 nt, Homo sapiens
  misc_RNA (1)...(19): siRNA sense strand
ggagaagggaugggacaaa

SEQ ID NO: 1785147 - RNA, 19 nt, Homo sapiens
  misc_RNA (1)...(19): siRNA sense strand
guucucaggucacucuuag

SEQ ID NO: 1785148 - RNA, 19 nt, Homo sapiens
  misc_RNA (1)...(19): siRNA sense strand
gaguggagacccuguugaa

SEQ ID NO: 1785149 - RNA, 19 nt, Homo sapiens
  misc_RNA (1)...(19): siRNA sense strand
caaccaggccaucgaguuc

SEQ ID NO: 1785150 - RNA, 19 nt, Homo sapiens
  misc_RNA (1)...(19): siRNA sense strand
ugucagagguggaaacacu

SEQ ID NO: 1785151 - RNA, 19 nt, Homo sapiens
  misc_RNA (1)...(19): siRNA sense strand
gcgggucacuagugucuca

SEQ ID NO: 1785152 - RNA, 19 nt, Homo sapiens
  misc_RNA (1)...(19): siRNA sense strand
gugagaagcugcguaaagc

SEQ ID NO: 1785153 - RNA, 19 nt, Homo sapiens
  misc_RNA (1)...(19): siRNA sense strand
gcacuugucagagguggaa

SEQ ID NO: 1785154 - RNA, 19 nt, Homo sapiens
  misc_RNA (1)...(19): siRNA sense strand
gcagcugccaugguauaua

SEQ ID NO: 1785155 - RNA, 19 nt, Homo sapiens
  misc_RNA (1)...(19): siRNA sense strand
guaaagcaagggaauugga

SEQ ID NO: 1785156 - RNA, 19 nt, Homo sapiens
  misc_RNA (1)...(19): siRNA sense strand
acagcaagauggugaccuu

SEQ ID NO: 1785157 - RNA, 19 nt, Homo sapiens
  misc_RNA (1)...(19): siRNA sense strand
caaguuugacaucgagauu

SEQ ID NO: 1785158 - RNA, 19 nt, Homo sapiens
  misc_RNA (1)...(19): siRNA sense strand
ucccaggucuccucaaauc

SEQ ID NO: 1785159 - RNA, 19 nt, Homo sapiens
  misc_RNA (1)...(19): siRNA sense strand
ggauuucucagacggauuc

SEQ ID NO: 1785160 - RNA, 19 nt, Homo sapiens
  misc_RNA (1)...(19): siRNA sense strand
gaugcagcuucaggccuua

SEQ ID NO: 1785161 - RNA, 19 nt, Homo sapiens
  misc_RNA (1)...(19): siRNA sense strand
ggaaacacuacagacacua

SEQ ID NO: 1785162 - RNA, 19 nt, Homo sapiens
  misc_RNA (1)...(19): siRNA sense strand
cgacuucuccaccuacguu

SEQ ID NO: 1785163 - RNA, 19 nt, Homo sapiens
  misc_RNA (1)...(19): siRNA sense strand
cauggaggcugcugaagac

SEQ ID NO: 1785164 - RNA, 19 nt, Homo sapiens
  misc_RNA (1)...(19): siRNA sense strand
agacggauucgggagauua

SEQ ID NO: 1785165 - RNA, 19 nt, Homo sapiens
  misc_RNA (1)...(19): siRNA sense strand
ccgccuagcuccaaagaac

SEQ ID NO: 1785166 - RNA, 19 nt, Homo sapiens
  misc_RNA (1)...(19): siRNA sense strand
gcguaaagcaagggaauug

SEQ ID NO: 1785167 - RNA, 19 nt, Homo sapiens
  misc_RNA (1)...(19): siRNA sense strand
caucuaccacuucggauug

SEQ ID NO: 1785168 - RNA, 19 nt, Homo sapiens
  misc_RNA (1)...(19): siRNA sense strand
cagaggagguggagaugcu

SEQ ID NO: 1785169 - RNA, 19 nt, Homo sapiens
  misc_RNA (1)...(19): siRNA sense strand
gaaacacuacagacacuac

SEQ ID NO: 1785170 - RNA, 19 nt, Homo sapiens
  misc_RNA (1)...(19): siRNA sense strand
ccagacccauccaaugaag

SEQ ID NO: 1785171 - RNA, 19 nt, Homo sapiens
  misc_RNA (1)...(19): siRNA sense strand
ccauggaggcugcugaaga

SEQ ID NO: 1785172 - RNA, 19 nt, Homo sapiens
  misc_RNA (1)...(19): siRNA sense strand
auggugaccuuccgauuug

SEQ ID NO: 1785173 - RNA, 19 nt, Homo sapiens
  misc_RNA (1)...(19): siRNA sense strand
gaggugaaggagaucauug

SEQ ID NO: 1785174 - RNA, 19 nt, Homo sapiens
  misc_RNA (1)...(19): siRNA sense strand
ggagguggcacaggagaug

SEQ ID NO: 1785175 - RNA, 19 nt, Homo sapiens
  misc_RNA (1)...(19): siRNA sense strand
gagcagcgaggagucagaa

SEQ ID NO: 1785176 - RNA, 19 nt, Homo sapiens
  misc_RNA (1)...(19): siRNA sense strand
ucccagacccauccaauga

SEQ ID NO: 1785177 - RNA, 19 nt, Homo sapiens
  misc_RNA (1)...(19): siRNA sense strand
gcuggucaccgaacucaug

SEQ ID NO: 1785178 - RNA, 19 nt, Homo sapiens
  misc_RNA (1)...(19): siRNA sense strand
ucucaggucacucuuaguu

SEQ ID NO: 1785179 - RNA, 19 nt, Homo sapiens
  misc_RNA (1)...(19): siRNA sense strand
ccucagacccugcccuuca

SEQ ID NO: 1785180 - RNA, 19 nt, Homo sapiens
  misc_RNA (1)...(19): siRNA sense strand
cuucccaggucuccucaaa

SEQ ID NO: 1785181 - RNA, 19 nt, Homo sapiens
  misc_RNA (1)...(19): siRNA sense strand
gguggaaacacuacagaca

SEQ ID NO: 1785182 - RNA, 19 nt, Homo sapiens
  misc_RNA (1)...(19): siRNA sense strand
uggaugaacuacuccuaca

SEQ ID NO: 1785183 - RNA, 19 nt, Homo sapiens
  misc_RNA (1)...(19): siRNA sense strand
gcucuccacuuccauucuc

SEQ ID NO: 1785184 - RNA, 19 nt, Homo sapiens
  misc_RNA (1)...(19): siRNA sense strand
cggauaagaacgagagguu

SEQ ID NO: 1785185 - RNA, 19 nt, Homo sapiens
  misc_RNA (1)...(19): siRNA sense strand
cccaccagcucuccacuuc

SEQ ID NO: 1785186 - RNA, 19 nt, Homo sapiens
  misc_RNA (1)...(19): siRNA sense strand
uggagacccuguugaagag

SEQ ID NO: 1785187 - RNA, 19 nt, Homo sapiens
  misc_RNA (1)...(19): siRNA sense strand
gauggccgauaccucaagu

SEQ ID NO: 1785188 - RNA, 19 nt, Homo sapiens
  misc_RNA (1)...(19): siRNA sense strand
ggaccuacuggcucuguca

SEQ ID NO: 1785189 - RNA, 19 nt, Homo sapiens
  misc_RNA (1)...(19): siRNA sense strand
gcagcgaggagucagaaag

SEQ ID NO: 1785190 - RNA, 19 nt, Homo sapiens
  misc_RNA (1)...(19): siRNA sense strand
cacgccagcuacucaucua

SEQ ID NO: 1785191 - RNA, 19 nt, Homo sapiens
  misc_RNA (1)...(19): siRNA sense strand
ggugaaggagaucauugaa

SEQ ID NO: 1785192 - RNA, 19 nt, Homo sapiens
  misc_RNA (1)...(19): siRNA sense strand
gagauggccaccucugagu

SEQ ID NO: 1785193 - RNA, 19 nt, Homo sapiens
  misc_RNA (1)...(19): siRNA sense strand
ggccaucgaguuccuguuc

SEQ ID NO: 1785194 - RNA, 19 nt, Homo sapiens
  misc_RNA (1)...(19): siRNA sense strand
cuacagacacuacagaaaa

SEQ ID NO: 1785195 - RNA, 19 nt, Homo sapiens
  misc_RNA (1)...(19): siRNA sense strand
ccucagcucacuucagaga

SEQ ID NO: 1785196 - RNA, 19 nt, Homo sapiens
  misc_RNA (1)...(19): siRNA sense strand
caccagcucuccacuucca

SEQ ID NO: 1785197 - RNA, 19 nt, Homo sapiens
  misc_RNA (1)...(19): siRNA sense strand
cagcaccagcccuuccuuu

SEQ ID NO: 1785198 - RNA, 19 nt, Homo sapiens
  misc_RNA (1)...(19): siRNA sense strand
gagguggaaacacuacaga

SEQ ID NO: 1785199 - RNA, 19 nt, Homo sapiens
  misc_RNA (1)...(19): siRNA sense strand
gggaagaugaggaguucug

SEQ ID NO: 1785200 - RNA, 19 nt, Homo sapiens
  misc_RNA (1)...(19): siRNA sense strand
gagaccaccguccucaugu

SEQ ID NO: 1785201 - RNA, 19 nt, Homo sapiens
  misc_RNA (1)...(19): siRNA sense strand
cuucaggccuuagcgaugu

SEQ ID NO: 1785202 - RNA, 19 nt, Homo sapiens
  misc_RNA (1)...(19): siRNA sense strand
uacccgaggugaaggagau

SEQ ID NO: 1785203 - RNA, 19 nt, Homo sapiens
  misc_RNA (1)...(19): siRNA sense strand
uggccgauaccucaaguuu

SEQ ID NO: 1785204 - RNA, 19 nt, Homo sapiens
  misc_RNA (1)...(19): siRNA sense strand
cgaacagcuuccacaaggu

SEQ ID NO: 1785205 - RNA, 19 nt, Homo sapiens
  misc_RNA (1)...(19): siRNA sense strand
uggaaacacuacagacacu

SEQ ID NO: 1785206 - RNA, 19 nt, Homo sapiens
  misc_RNA (1)...(19): siRNA sense strand
ccagaaugacagagugguu

SEQ ID NO: 1785207 - RNA, 19 nt, Homo sapiens
  misc_RNA (1)...(19): siRNA sense strand
ugaagauacccgaggugaa

SEQ ID NO: 1785208 - RNA, 19 nt, Homo sapiens
  misc_RNA (1)...(19): siRNA sense strand
caguguggaugaacuacuc

SEQ ID NO: 1785209 - RNA, 19 nt, Homo sapiens
  misc_RNA (1)...(19): siRNA sense strand
gcgaguggagacccuguug

SEQ ID NO: 1785210 - RNA, 19 nt, Homo sapiens
  misc_RNA (1)...(19): siRNA sense strand
cugaagcuguggcccuaga

SEQ ID NO: 1785211 - RNA, 19 nt, Homo sapiens
  misc_RNA (1)...(19): siRNA sense strand
gguauauaacgaguucauu

SEQ ID NO: 1785212 - RNA, 19 nt, Homo sapiens
  misc_RNA (1)...(19): siRNA sense strand
cgugagaagcugcguaaag

SEQ ID NO: 1785213 - RNA, 19 nt, Homo sapiens
  misc_RNA (1)...(19): siRNA sense strand
uacguucucucccacuugu

SEQ ID NO: 1785214 - RNA, 19 nt, Homo sapiens
  misc_RNA (1)...(19): siRNA sense strand
guucuggcccuggaaguga

SEQ ID NO: 1785215 - RNA, 19 nt, Homo sapiens
  misc_RNA (1)...(19): siRNA sense strand
ccuuagcgaugugggagaa

SEQ ID NO: 1785216 - RNA, 19 nt, Homo sapiens
  misc_RNA (1)...(19): siRNA sense strand
ucagacggauucgggagau

SEQ ID NO: 1785217 - RNA, 19 nt, Homo sapiens
  misc_RNA (1)...(19): siRNA sense strand
acaaccaggccaucgaguu

SEQ ID NO: 1785218 - RNA, 19 nt, Homo sapiens
  misc_RNA (1)...(19): siRNA sense strand
ccaacaucguccgcuucua

SEQ ID NO: 1785219 - RNA, 19 nt, Homo sapiens
  misc_RNA (1)...(19): siRNA sense strand
aggaggagccagcaccauu

SEQ ID NO: 1785220 - RNA, 19 nt, Homo sapiens
  misc_RNA (1)...(19): siRNA sense strand
ggccgauaccucaaguuug

SEQ ID NO: 1785221 - RNA, 19 nt, Homo sapiens
  misc_RNA (1)...(19): siRNA sense strand
agaaugacagagugguuga

SEQ ID NO: 1785222 - RNA, 19 nt, Homo sapiens
  misc_RNA (1)...(19): siRNA sense strand
ggaauuaucugcaccuucu

SEQ ID NO: 1785223 - RNA, 19 nt, Homo sapiens
  misc_RNA (1)...(19): siRNA sense strand
ccaggaaacucgugauuau

SEQ ID NO: 1785224 - RNA, 19 nt, Homo sapiens
  misc_RNA (1)...(19): siRNA sense strand
ggucaaggguccugaagaa

SEQ ID NO: 1785225 - RNA, 19 nt, Homo sapiens
  misc_RNA (1)...(19): siRNA sense strand
caaugaggaucgucuguuu

SEQ ID NO: 1785226 - RNA, 19 nt, Homo sapiens
  misc_RNA (1)...(19): siRNA sense strand
ggucuggacugauguguuc

SEQ ID NO: 1785227 - RNA, 19 nt, Homo sapiens
  misc_RNA (1)...(19): siRNA sense strand
ggaucaaccucauggacuu

SEQ ID NO: 1785228 - RNA, 19 nt, Homo sapiens
  misc_RNA (1)...(19): siRNA sense strand
gcugggagccuucaucuug

SEQ ID NO: 1785229 - RNA, 19 nt, Homo sapiens
  misc_RNA (1)...(19): siRNA sense strand
ggacuuugcaguacauugu

SEQ ID NO: 1785230 - RNA, 19 nt, Homo sapiens
  misc_RNA (1)...(19): siRNA sense strand
gcuguggucuggacugaug

SEQ ID NO: 1785231 - RNA, 19 nt, Homo sapiens
  misc_RNA (1)...(19): siRNA sense strand
gcuauacauucuggacuuu

SEQ ID NO: 1785232 - RNA, 19 nt, Homo sapiens
  misc_RNA (1)...(19): siRNA sense strand
cagaaccacucccggauca

SEQ ID NO: 1785233 - RNA, 19 nt, Homo sapiens
  misc_RNA (1)...(19): siRNA sense strand
gagaccagcaggagacaaa

SEQ ID NO: 1785234 - RNA, 19 nt, Homo sapiens
  misc_RNA (1)...(19): siRNA sense strand
uagaagaccucaucaaacc

SEQ ID NO: 1785235 - RNA, 19 nt, Homo sapiens
  misc_RNA (1)...(19): siRNA sense strand
uguagaagaccucaucaaa

SEQ ID NO: 1785236 - RNA, 19 nt, Homo sapiens
  misc_RNA (1)...(19): siRNA sense strand
gcuguacaccggcaucgua

SEQ ID NO: 1785237 - RNA, 19 nt, Homo sapiens
  misc_RNA (1)...(19): siRNA sense strand
gcuguggcaucgucauguu

SEQ ID NO: 1785238 - RNA, 19 nt, Homo sapiens
  misc_RNA (1)...(19): siRNA sense strand
gcaggagacaaaccucuga

SEQ ID NO: 1785239 - RNA, 19 nt, Homo sapiens
  misc_RNA (1)...(19): siRNA sense strand
ugguguggcucuccaugua

SEQ ID NO: 1785240 - RNA, 19 nt, Homo sapiens
  misc_RNA (1)...(19): siRNA sense strand
gaggagccgcuauacauuc

SEQ ID NO: 1785241 - RNA, 19 nt, Homo sapiens
  misc_RNA (1)...(19): siRNA sense strand
gaagaacuccccacuggaa

SEQ ID NO: 1785242 - RNA, 19 nt, Homo sapiens
  misc_RNA (1)...(19): siRNA sense strand
ggaaacucgugauuaucuc

SEQ ID NO: 1785243 - RNA, 19 nt, Homo sapiens
  misc_RNA (1)...(19): siRNA sense strand
guagaagaccucaucaaac

SEQ ID NO: 1785244 - RNA, 19 nt, Homo sapiens
  misc_RNA (1)...(19): siRNA sense strand
caaggguccugaagaacuc

SEQ ID NO: 1785245 - RNA, 19 nt, Homo sapiens
  misc_RNA (1)...(19): siRNA sense strand
acaccggcaucguaaucua

SEQ ID NO: 1785246 - RNA, 19 nt, Homo sapiens
  misc_RNA (1)...(19): siRNA sense strand
ucaaccucauggacuuuaa

SEQ ID NO: 1785247 - RNA, 19 nt, Homo sapiens
  misc_RNA (1)...(19): siRNA sense strand
ugaccgggcuggacaucug

SEQ ID NO: 1785248 - RNA, 19 nt, Homo sapiens
  misc_RNA (1)...(19): siRNA sense strand
cgaggagccgcuauacauu

SEQ ID NO: 1785249 - RNA, 19 nt, Homo sapiens
  misc_RNA (1)...(19): siRNA sense strand
guacaccggcaucguaauc

SEQ ID NO: 1785250 - RNA, 19 nt, Homo sapiens
  misc_RNA (1)...(19): siRNA sense strand
gaucaaccucauggacuuu

SEQ ID NO: 1785251 - RNA, 19 nt, Homo sapiens
  misc_RNA (1)...(19): siRNA sense strand
gacccgaggagccgcuaua

SEQ ID NO: 1785252 - RNA, 19 nt, Homo sapiens
  misc_RNA (1)...(19): siRNA sense strand
ccgaggagccgcuauacau

SEQ ID NO: 1785253 - RNA, 19 nt, Homo sapiens
  misc_RNA (1)...(19): siRNA sense strand
caucuccuaucucuauuac

SEQ ID NO: 1785254 - RNA, 19 nt, Homo sapiens
  misc_RNA (1)...(19): siRNA sense strand
cccaggaaacucgugauua

SEQ ID NO: 1785255 - RNA, 19 nt, Homo sapiens
  misc_RNA (1)...(19): siRNA sense strand
gagccuucaucuugggaau

SEQ ID NO: 1785256 - RNA, 19 nt, Homo sapiens
  misc_RNA (1)...(19): siRNA sense strand
ucaccagcaccuacgagua

SEQ ID NO: 1785257 - RNA, 19 nt, Homo sapiens
  misc_RNA (1)...(19): siRNA sense strand
ucuaugccaucuccuaucu

SEQ ID NO: 1785258 - RNA, 19 nt, Homo sapiens
  misc_RNA (1)...(19): siRNA sense strand
gcacagcauccaccagcau

SEQ ID NO: 1785259 - RNA, 19 nt, Homo sapiens
  misc_RNA (1)...(19): siRNA sense strand
gcuauggccucaaguuccu

SEQ ID NO: 1785260 - RNA, 19 nt, Homo sapiens
  misc_RNA (1)...(19): siRNA sense strand
ucaaguuccucuggaugug

SEQ ID NO: 1785261 - RNA, 19 nt, Homo sapiens
  misc_RNA (1)...(19): siRNA sense strand
ccaucuccuaucucuauua

SEQ ID NO: 1785262 - RNA, 19 nt, Homo sapiens
  misc_RNA (1)...(19): siRNA sense strand
ugccaucuccuaucucuau

SEQ ID NO: 1785263 - RNA, 19 nt, Homo sapiens
  misc_RNA (1)...(19): siRNA sense strand
gcguggcucucucagucaa

SEQ ID NO: 1785264 - RNA, 19 nt, Homo sapiens
  misc_RNA (1)...(19): siRNA sense strand
gcaucgucauguuuguguu

SEQ ID NO: 1785265 - RNA, 19 nt, Homo sapiens
  misc_RNA (1)...(19): siRNA sense strand
ggcacgcggugucaugcuu

SEQ ID NO: 1785266 - RNA, 19 nt, Homo sapiens
  misc_RNA (1)...(19): siRNA sense strand
ccaaugaggaucgucuguu

SEQ ID NO: 1785267 - RNA, 19 nt, Homo sapiens
  misc_RNA (1)...(19): siRNA sense strand
ucaccgcccugcucuucau

SEQ ID NO: 1785268 - RNA, 19 nt, Homo sapiens
  misc_RNA (1)...(19): siRNA sense strand
cggcucuccucccugcuaa

SEQ ID NO: 1785269 - RNA, 19 nt, Homo sapiens
  misc_RNA (1)...(19): siRNA sense strand
gcuccuguccaccggaauu

SEQ ID NO: 1785270 - RNA, 19 nt, Homo sapiens
  misc_RNA (1)...(19): siRNA sense strand
gccuucaucuugggaaugu

SEQ ID NO: 1785271 - RNA, 19 nt, Homo sapiens
  misc_RNA (1)...(19): siRNA sense strand
guguggcucuccauguaug

SEQ ID NO: 1785272 - RNA, 19 nt, Homo sapiens
  misc_RNA (1)...(19): siRNA sense strand
gaaccacucccggaucaac

SEQ ID NO: 1785273 - RNA, 19 nt, Homo sapiens
  misc_RNA (1)...(19): siRNA sense strand
gccaucuccuaucucuauu

SEQ ID NO: 1785274 - RNA, 19 nt, Homo sapiens
  misc_RNA (1)...(19): siRNA sense strand
cgcuauacauucuggacuu

SEQ ID NO: 1785275 - RNA, 19 nt, Homo sapiens
  misc_RNA (1)...(19): siRNA sense strand
cagagaagcaggccaagcu

SEQ ID NO: 1785276 - RNA, 19 nt, Homo sapiens
  misc_RNA (1)...(19): siRNA sense strand
uaugccaucuccuaucucu

SEQ ID NO: 1785277 - RNA, 19 nt, Homo sapiens
  misc_RNA (1)...(19): siRNA sense strand
gcauccaccagcaucaaug

SEQ ID NO: 1785278 - RNA, 19 nt, Homo sapiens
  misc_RNA (1)...(19): siRNA sense strand
gaauuaucugcaccuucua

SEQ ID NO: 1785279 - RNA, 19 nt, Homo sapiens
  misc_RNA (1)...(19): siRNA sense strand
ucaaggguccugaagaacu

SEQ ID NO: 1785280 - RNA, 19 nt, Homo sapiens
  misc_RNA (1)...(19): siRNA sense strand
gcgggacuuugcaguacau

SEQ ID NO: 1785281 - RNA, 19 nt, Homo sapiens
  misc_RNA (1)...(19): siRNA sense strand
uggcagcccuguccucacu

SEQ ID NO: 1785282 - RNA, 19 nt, Homo sapiens
  misc_RNA (1)...(19): siRNA sense strand
ugggcacgcugaccacugu

SEQ ID NO: 1785283 - RNA, 19 nt, Homo sapiens
  misc_RNA (1)...(19): siRNA sense strand
caccagcaccuacgaguac

SEQ ID NO: 1785284 - RNA, 19 nt, Homo sapiens
  misc_RNA (1)...(19): siRNA sense strand
gcuucuaugccaucuccua

SEQ ID NO: 1785285 - RNA, 19 nt, Homo sapiens
  misc_RNA (1)...(19): siRNA sense strand
ccaaauagauggaaacuac

SEQ ID NO: 1785286 - RNA, 19 nt, Homo sapiens
  misc_RNA (1)...(19): siRNA sense strand
gcauauaauuggccacauu

SEQ ID NO: 1785287 - RNA, 19 nt, Homo sapiens
  misc_RNA (1)...(19): siRNA sense strand
ggagacaaagugcauauaa

SEQ ID NO: 1785288 - RNA, 19 nt, Homo sapiens
  misc_RNA (1)...(19): siRNA sense strand
gaaagcauaccugucaaua

SEQ ID NO: 1785289 - RNA, 19 nt, Homo sapiens
  misc_RNA (1)...(19): siRNA sense strand
gcacugggaucaugacuac

SEQ ID NO: 1785290 - RNA, 19 nt, Homo sapiens
  misc_RNA (1)...(19): siRNA sense strand
gagacaaagugcauauaau

SEQ ID NO: 1785291 - RNA, 19 nt, Homo sapiens
  misc_RNA (1)...(19): siRNA sense strand
aaacauaccgggagccaua

SEQ ID NO: 1785292 - RNA, 19 nt, Homo sapiens
  misc_RNA (1)...(19): siRNA sense strand
gaacaucucuuugccuacu

SEQ ID NO: 1785293 - RNA, 19 nt, Homo sapiens
  misc_RNA (1)...(19): siRNA sense strand
ccucaucucucucaauaug

SEQ ID NO: 1785294 - RNA, 19 nt, Homo sapiens
  misc_RNA (1)...(19): siRNA sense strand
ggguaaccaugaaagcaua

SEQ ID NO: 1785295 - RNA, 19 nt, Homo sapiens
  misc_RNA (1)...(19): siRNA sense strand
aauuugaggucuucuauga

SEQ ID NO: 1785296 - RNA, 19 nt, Homo sapiens
  misc_RNA (1)...(19): siRNA sense strand
cgccucaucucucucaaua

SEQ ID NO: 1785297 - RNA, 19 nt, Homo sapiens
  misc_RNA (1)...(19): siRNA sense strand
ccagggcacugucugaaga

SEQ ID NO: 1785298 - RNA, 19 nt, Homo sapiens
  misc_RNA (1)...(19): siRNA sense strand
gaagaaggaacccaaugug

SEQ ID NO: 1785299 - RNA, 19 nt, Homo sapiens
  misc_RNA (1)...(19): siRNA sense strand
gcgaauacagcaaguguga

SEQ ID NO: 1785300 - RNA, 19 nt, Homo sapiens
  misc_RNA (1)...(19): siRNA sense strand
gacaaagugcauauaauug

SEQ ID NO: 1785301 - RNA, 19 nt, Homo sapiens
  misc_RNA (1)...(19): siRNA sense strand
caugaaagcauaccuguca

SEQ ID NO: 1785302 - RNA, 19 nt, Homo sapiens
  misc_RNA (1)...(19): siRNA sense strand
cagguuacaucgcauagug

SEQ ID NO: 1785303 - RNA, 19 nt, Homo sapiens
  misc_RNA (1)...(19): siRNA sense strand
gaaccucaccugcccaauc

SEQ ID NO: 1785304 - RNA, 19 nt, Homo sapiens
  misc_RNA (1)...(19): siRNA sense strand
gcauaccugucaauagcuu

SEQ ID NO: 1785305 - RNA, 19 nt, Homo sapiens
  misc_RNA (1)...(19): siRNA sense strand
caucuuggaacaucucuuu

SEQ ID NO: 1785306 - RNA, 19 nt, Homo sapiens
  misc_RNA (1)...(19): siRNA sense strand
gaacuucuggcucuugauc

SEQ ID NO: 1785307 - RNA, 19 nt, Homo sapiens
  misc_RNA (1)...(19): siRNA sense strand
ggaugaauuugaggucuuc

SEQ ID NO: 1785308 - RNA, 19 nt, Homo sapiens
  misc_RNA (1)...(19): siRNA sense strand
gaccugcacugggaucaug

SEQ ID NO: 1785309 - RNA, 19 nt, Homo sapiens
  misc_RNA (1)...(19): siRNA sense strand
gcuggagcuggaauuauua

SEQ ID NO: 1785310 - RNA, 19 nt, Homo sapiens
  misc_RNA (1)...(19): siRNA sense strand
aagcauaccugucaauagc

SEQ ID NO: 1785311 - RNA, 19 nt, Homo sapiens
  misc_RNA (1)...(19): siRNA sense strand
cuacagggcucgagaaacc

SEQ ID NO: 1785312 - RNA, 19 nt, Homo sapiens
  misc_RNA (1)...(19): siRNA sense strand
agaccuacauccugaaucu

SEQ ID NO: 1785313 - RNA, 19 nt, Homo sapiens
  misc_RNA (1)...(19): siRNA sense strand
gaggagacaaagugcauau

SEQ ID NO: 1785314 - RNA, 19 nt, Homo sapiens
  misc_RNA (1)...(19): siRNA sense strand
ggcacaaccugguauaucg

SEQ ID NO: 1785315 - RNA, 19 nt, Homo sapiens
  misc_RNA (1)...(19): siRNA sense strand
ccaucaagcugugcaaucu

SEQ ID NO: 1785316 - RNA, 19 nt, Homo sapiens
  misc_RNA (1)...(19): siRNA sense strand
cuaccuacaucggccuuaa

SEQ ID NO: 1785317 - RNA, 19 nt, Homo sapiens
  misc_RNA (1)...(19): siRNA sense strand
cacccuggcugcucaguuc

SEQ ID NO: 1785318 - RNA, 19 nt, Homo sapiens
  misc_RNA (1)...(19): siRNA sense strand
uuugaggucuucuaugaug

SEQ ID NO: 1785319 - RNA, 19 nt, Homo sapiens
  misc_RNA (1)...(19): siRNA sense strand
ugaagaaggaacccaaugu

SEQ ID NO: 1785320 - RNA, 19 nt, Homo sapiens
  misc_RNA (1)...(19): siRNA sense strand
guacuggacaggagacauc

SEQ ID NO: 1785321 - RNA, 19 nt, Homo sapiens
  misc_RNA (1)...(19): siRNA sense strand
gaauuugaggucuucuaug

SEQ ID NO: 1785322 - RNA, 19 nt, Homo sapiens
  misc_RNA (1)...(19): siRNA sense strand
gaauuguagccagguauga

SEQ ID NO: 1785323 - RNA, 19 nt, Homo sapiens
  misc_RNA (1)...(19): siRNA sense strand
ggaucgaggagacaaagug

SEQ ID NO: 1785324 - RNA, 19 nt, Homo sapiens
  misc_RNA (1)...(19): siRNA sense strand
caaggccacuguuuugcua

SEQ ID NO: 1785325 - RNA, 19 nt, Homo sapiens
  misc_RNA (1)...(19): siRNA sense strand
ugaauuugaggucuucuau

SEQ ID NO: 1785326 - RNA, 19 nt, Homo sapiens
  misc_RNA (1)...(19): siRNA sense strand
ugugggcacugggacauuu

SEQ ID NO: 1785327 - RNA, 19 nt, Homo sapiens
  misc_RNA (1)...(19): siRNA sense strand
acaaagugcauauaauugg

SEQ ID NO: 1785328 - RNA, 19 nt, Homo sapiens
  misc_RNA (1)...(19): siRNA sense strand
gggcgaauacagcaagugu

SEQ ID NO: 1785329 - RNA, 19 nt, Homo sapiens
  misc_RNA (1)...(19): siRNA sense strand
gcacuggcagcuucucuac

SEQ ID NO: 1785330 - RNA, 19 nt, Homo sapiens
  misc_RNA (1)...(19): siRNA sense strand
cugcgcacccucagaauug

SEQ ID NO: 1785331 - RNA, 19 nt, Homo sapiens
  misc_RNA (1)...(19): siRNA sense strand
cauauaauuggccacauuc

SEQ ID NO: 1785332 - RNA, 19 nt, Homo sapiens
  misc_RNA (1)...(19): siRNA sense strand
aaccucaccugcccaaucu

SEQ ID NO: 1785333 - RNA, 19 nt, Homo sapiens
  misc_RNA (1)...(19): siRNA sense strand
uaccguguguaccaaauag

SEQ ID NO: 1785334 - RNA, 19 nt, Homo sapiens
  misc_RNA (1)...(19): siRNA sense strand
ccuggcugcucaguucuuu

SEQ ID NO: 1785335 - RNA, 19 nt, Homo sapiens
  misc_RNA (1)...(19): siRNA sense strand
uggaugaauuugaggucuu

SEQ ID NO: 1785336 - RNA, 19 nt, Homo sapiens
  misc_RNA (1)...(19): siRNA sense strand
ccaucaaccucgggcugaa

SEQ ID NO: 1785337 - RNA, 19 nt, Homo sapiens
  misc_RNA (1)...(19): siRNA sense strand
ugaaagcauaccugucaau

SEQ ID NO: 1785338 - RNA, 19 nt, Homo sapiens
  misc_RNA (1)...(19): siRNA sense strand
cagugcaacuaccuacauc

SEQ ID NO: 1785339 - RNA, 19 nt, Homo sapiens
  misc_RNA (1)...(19): siRNA sense strand
cgaauuguagccagguaug

SEQ ID NO: 1785340 - RNA, 19 nt, Homo sapiens
  misc_RNA (1)...(19): siRNA sense strand
aaagcauaccugucaauag

SEQ ID NO: 1785341 - RNA, 19 nt, Homo sapiens
  misc_RNA (1)...(19): siRNA sense strand
guuaccguguguaccaaau

SEQ ID NO: 1785342 - RNA, 19 nt, Homo sapiens
  misc_RNA (1)...(19): siRNA sense strand
uguaccaaauagauggaaa

SEQ ID NO: 1785343 - RNA, 19 nt, Homo sapiens
  misc_RNA (1)...(19): siRNA sense strand
gcacugggacauuuucuca

SEQ ID NO: 1785344 - RNA, 19 nt, Homo sapiens
  misc_RNA (1)...(19): siRNA sense strand
gacauuuucucaucuugga

SEQ ID NO: 1785345 - RNA, 19 nt, Homo sapiens
  misc_RNA (1)...(19): siRNA sense strand
gaacaugccugagcagaag

SEQ ID NO: 1785346 - RNA, 19 nt, Homo sapiens
  misc_RNA (1)...(19): siRNA sense strand
gggacaaagugaugaguaa

SEQ ID NO: 1785347 - RNA, 19 nt, Homo sapiens
  misc_RNA (1)...(19): siRNA sense strand
aaacuuacguggcuacuca

SEQ ID NO: 1785348 - RNA, 19 nt, Homo sapiens
  misc_RNA (1)...(19): siRNA sense strand
guaaaguggucccagaugu

SEQ ID NO: 1785349 - RNA, 19 nt, Homo sapiens
  misc_RNA (1)...(19): siRNA sense strand
ggaacaugccugagcagaa

SEQ ID NO: 1785350 - RNA, 19 nt, Homo sapiens
  misc_RNA (1)...(19): siRNA sense strand
gggaggaggccaugcagaa

SEQ ID NO: 1785351 - RNA, 19 nt, Homo sapiens
  misc_RNA (1)...(19): siRNA sense strand
ccacuugcauggugcuuca

SEQ ID NO: 1785352 - RNA, 19 nt, Homo sapiens
  misc_RNA (1)...(19): siRNA sense strand
ggacaaagugaugaguaaa

SEQ ID NO: 1785353 - RNA, 19 nt, Homo sapiens
  misc_RNA (1)...(19): siRNA sense strand
ucaagguccugcagaagau

SEQ ID NO: 1785354 - RNA, 19 nt, Homo sapiens
  misc_RNA (1)...(19): siRNA sense strand
cagaagaucggaaaagaua

SEQ ID NO: 1785355 - RNA, 19 nt, Homo sapiens
  misc_RNA (1)...(19): siRNA sense strand
ccaagagcaucaucaacca

SEQ ID NO: 1785356 - RNA, 19 nt, Homo sapiens
  misc_RNA (1)...(19): siRNA sense strand
cggaaaagauacauucauu

SEQ ID NO: 1785357 - RNA, 19 nt, Homo sapiens
  misc_RNA (1)...(19): siRNA sense strand
gcuggaagucccucuaaga

SEQ ID NO: 1785358 - RNA, 19 nt, Homo sapiens
  misc_RNA (1)...(19): siRNA sense strand
acaaagugaugaguaaagu

SEQ ID NO: 1785359 - RNA, 19 nt, Homo sapiens
  misc_RNA (1)...(19): siRNA sense strand
agaucaagguccugcagaa

SEQ ID NO: 1785360 - RNA, 19 nt, Homo sapiens
  misc_RNA (1)...(19): siRNA sense strand
gagcagaagggugucauca

SEQ ID NO: 1785361 - RNA, 19 nt, Homo sapiens
  misc_RNA (1)...(19): siRNA sense strand
gggcauccuuagcaaccaa

SEQ ID NO: 1785362 - RNA, 19 nt, Homo sapiens
  misc_RNA (1)...(19): siRNA sense strand
gacaaagugaugaguaaag

SEQ ID NO: 1785363 - RNA, 19 nt, Homo sapiens
  misc_RNA (1)...(19): siRNA sense strand
gcuggaagaaggagaguca

SEQ ID NO: 1785364 - RNA, 19 nt, Homo sapiens
  misc_RNA (1)...(19): siRNA sense strand
uaaaguggucccagaugug

SEQ ID NO: 1785365 - RNA, 19 nt, Homo sapiens
  misc_RNA (1)...(19): siRNA sense strand
uuacguggcuacucagcau

SEQ ID NO: 1785366 - RNA, 19 nt, Homo sapiens
  misc_RNA (1)...(19): siRNA sense strand
gacacagacuucgggaaca

SEQ ID NO: 1785367 - RNA, 19 nt, Homo sapiens
  misc_RNA (1)...(19): siRNA sense strand
gaagucccucuaagaccaa

SEQ ID NO: 1785368 - RNA, 19 nt, Homo sapiens
  misc_RNA (1)...(19): siRNA sense strand
acacagacuucgggaacau

SEQ ID NO: 1785369 - RNA, 19 nt, Homo sapiens
  misc_RNA (1)...(19): siRNA sense strand
uggcuggcauggacacaga

SEQ ID NO: 1785370 - RNA, 19 nt, Homo sapiens
  misc_RNA (1)...(19): siRNA sense strand
caaagugaugaguaaagug

SEQ ID NO: 1785371 - RNA, 19 nt, Homo sapiens
  misc_RNA (1)...(19): siRNA sense strand
gaguaaaguggucccagau

SEQ ID NO: 1785372 - RNA, 19 nt, Homo sapiens
  misc_RNA (1)...(19): siRNA sense strand
gcaggacaauggggacaaa

SEQ ID NO: 1785373 - RNA, 19 nt, Homo sapiens
  misc_RNA (1)...(19): siRNA sense strand
gaucaagguccugcagaag

SEQ ID NO: 1785374 - RNA, 19 nt, Homo sapiens
  misc_RNA (1)...(19): siRNA sense strand
agagucagcaggacaaugg

SEQ ID NO: 1785375 - RNA, 19 nt, Homo sapiens
  misc_RNA (1)...(19): siRNA sense strand
ggaggaggccaugcagaag

SEQ ID NO: 1785376 - RNA, 19 nt, Homo sapiens
  misc_RNA (1)...(19): siRNA sense strand
caacagaccucaggaaaga

SEQ ID NO: 1785377 - RNA, 19 nt, Homo sapiens
  misc_RNA (1)...(19): siRNA sense strand
uagagaggaugaagcauua

SEQ ID NO: 1785378 - RNA, 19 nt, Homo sapiens
  misc_RNA (1)...(19): siRNA sense strand
gagaagaucccuagugaga

SEQ ID NO: 1785379 - RNA, 19 nt, Homo sapiens
  misc_RNA (1)...(19): siRNA sense strand
ccaagacacuauuugaauu

SEQ ID NO: 1785380 - RNA, 19 nt, Homo sapiens
  misc_RNA (1)...(19): siRNA sense strand
ggaaggcgaucaucuccaa

SEQ ID NO: 1785381 - RNA, 19 nt, Homo sapiens
  misc_RNA (1)...(19): siRNA sense strand
ugagagaccugcugaacaa

SEQ ID NO: 1785382 - RNA, 19 nt, Homo sapiens
  misc_RNA (1)...(19): siRNA sense strand
gaaaaucuguggcaaauca

SEQ ID NO: 1785383 - RNA, 19 nt, Homo sapiens
  misc_RNA (1)...(19): siRNA sense strand
gaagggagacaaucgcuuu

SEQ ID NO: 1785384 - RNA, 19 nt, Homo sapiens
  misc_RNA (1)...(19): siRNA sense strand
ggaaccacauaauuaaaga

SEQ ID NO: 1785385 - RNA, 19 nt, Homo sapiens
  misc_RNA (1)...(19): siRNA sense strand
gcaugacccucaccucuau

SEQ ID NO: 1785386 - RNA, 19 nt, Homo sapiens
  misc_RNA (1)...(19): siRNA sense strand
gcgaucaucuccaauaaag

SEQ ID NO: 1785387 - RNA, 19 nt, Homo sapiens
  misc_RNA (1)...(19): siRNA sense strand
ccacauuggugaugaaauc

SEQ ID NO: 1785388 - RNA, 19 nt, Homo sapiens
  misc_RNA (1)...(19): siRNA sense strand
acacgaugcuugaagguaa

SEQ ID NO: 1785389 - RNA, 19 nt, Homo sapiens
  misc_RNA (1)...(19): siRNA sense strand
gcuaaagucucuccaaggu

SEQ ID NO: 1785390 - RNA, 19 nt, Homo sapiens
  misc_RNA (1)...(19): siRNA sense strand
caucagggcucaacacgau

SEQ ID NO: 1785391 - RNA, 19 nt, Homo sapiens
  misc_RNA (1)...(19): siRNA sense strand
gaagaucccuagugagacu

SEQ ID NO: 1785392 - RNA, 19 nt, Homo sapiens
  misc_RNA (1)...(19): siRNA sense strand
gaaggagucuacacagucu

SEQ ID NO: 1785393 - RNA, 19 nt, Homo sapiens
  misc_RNA (1)...(19): siRNA sense strand
gcacuaauaggaaguacuu

SEQ ID NO: 1785394 - RNA, 19 nt, Homo sapiens
  misc_RNA (1)...(19): siRNA sense strand
ucgagaagaucccuaguga

SEQ ID NO: 1785395 - RNA, 19 nt, Homo sapiens
  misc_RNA (1)...(19): siRNA sense strand
cuaaugggauuguaacugu

SEQ ID NO: 1785396 - RNA, 19 nt, Homo sapiens
  misc_RNA (1)...(19): siRNA sense strand
ugaauuggcugcagagucu

SEQ ID NO: 1785397 - RNA, 19 nt, Homo sapiens
  misc_RNA (1)...(19): siRNA sense strand
cuaccacucucaaaccuuu

SEQ ID NO: 1785398 - RNA, 19 nt, Homo sapiens
  misc_RNA (1)...(19): siRNA sense strand
cuucggaaccacauaauua

SEQ ID NO: 1785399 - RNA, 19 nt, Homo sapiens
  misc_RNA (1)...(19): siRNA sense strand
ccaaugaggccuucgagaa

SEQ ID NO: 1785400 - RNA, 19 nt, Homo sapiens
  misc_RNA (1)...(19): siRNA sense strand
aagaccagcuggccucuaa

SEQ ID NO: 1785401 - RNA, 19 nt, Homo sapiens
  misc_RNA (1)...(19): siRNA sense strand
ccacuacauugaugagcua

SEQ ID NO: 1785402 - RNA, 19 nt, Homo sapiens
  misc_RNA (1)...(19): siRNA sense strand
gauuguaacugugaacugu

SEQ ID NO: 1785403 - RNA, 19 nt, Homo sapiens
  misc_RNA (1)...(19): siRNA sense strand
aaucaacagucaucagcua

SEQ ID NO: 1785404 - RNA, 19 nt, Homo sapiens
  misc_RNA (1)...(19): siRNA sense strand
gaacaaccacaucuugaag

SEQ ID NO: 1785405 - RNA, 19 nt, Homo sapiens
  misc_RNA (1)...(19): siRNA sense strand
ggaauuugcuucggaacca

SEQ ID NO: 1785406 - RNA, 19 nt, Homo sapiens
  misc_RNA (1)...(19): siRNA sense strand
caagacacuauuugaauug

SEQ ID NO: 1785407 - RNA, 19 nt, Homo sapiens
  misc_RNA (1)...(19): siRNA sense strand
uugccaacauccugaaaua

SEQ ID NO: 1785408 - RNA, 19 nt, Homo sapiens
  misc_RNA (1)...(19): siRNA sense strand
cgagugcuguccuggauau

SEQ ID NO: 1785409 - RNA, 19 nt, Homo sapiens
  misc_RNA (1)...(19): siRNA sense strand
gggaaggagucuacacagu

SEQ ID NO: 1785410 - RNA, 19 nt, Homo sapiens
  misc_RNA (1)...(19): siRNA sense strand
gaagguaacggccaguaca

SEQ ID NO: 1785411 - RNA, 19 nt, Homo sapiens
  misc_RNA (1)...(19): siRNA sense strand
gacagacccuggaaacucu

SEQ ID NO: 1785412 - RNA, 19 nt, Homo sapiens
  misc_RNA (1)...(19): siRNA sense strand
ggacagacccuggaaacuc

SEQ ID NO: 1785413 - RNA, 19 nt, Homo sapiens
  misc_RNA (1)...(19): siRNA sense strand
guaccagaauuccaacauc

SEQ ID NO: 1785414 - RNA, 19 nt, Homo sapiens
  misc_RNA (1)...(19): siRNA sense strand
ggugaugaaauccugguua

SEQ ID NO: 1785415 - RNA, 19 nt, Homo sapiens
  misc_RNA (1)...(19): siRNA sense strand
ccaacaacauccagcagau

SEQ ID NO: 1785416 - RNA, 19 nt, Homo sapiens
  misc_RNA (1)...(19): siRNA sense strand
gaagguuauuggcacuaau

SEQ ID NO: 1785417 - RNA, 19 nt, Homo sapiens
  misc_RNA (1)...(19): siRNA sense strand
gugaugaaauccugguuag

SEQ ID NO: 1785418 - RNA, 19 nt, Homo sapiens
  misc_RNA (1)...(19): siRNA sense strand
gcagugguaccaaaggaaa

SEQ ID NO: 1785419 - RNA, 19 nt, Homo sapiens
  misc_RNA (1)...(19): siRNA sense strand
gggacaugcucacuaucaa

SEQ ID NO: 1785420 - RNA, 19 nt, Homo sapiens
  misc_RNA (1)...(19): siRNA sense strand
gccaagacacuauuugaau

SEQ ID NO: 1785421 - RNA, 19 nt, Homo sapiens
  misc_RNA (1)...(19): siRNA sense strand
ucaccucuauguaccagaa

SEQ ID NO: 1785422 - RNA, 19 nt, Homo sapiens
  misc_RNA (1)...(19): siRNA sense strand
ggaugaacuugcagacucu

SEQ ID NO: 1785423 - RNA, 19 nt, Homo sapiens
  misc_RNA (1)...(19): siRNA sense strand
gugcuguccuggauaugaa

SEQ ID NO: 1785424 - RNA, 19 nt, Homo sapiens
  misc_RNA (1)...(19): siRNA sense strand
aaucaucucucuggaagug

SEQ ID NO: 1785425 - RNA, 19 nt, Homo sapiens
  misc_RNA (1)...(19): siRNA sense strand
gcugaacaaccacaucuug

SEQ ID NO: 1785426 - RNA, 19 nt, Homo sapiens
  misc_RNA (1)...(19): siRNA sense strand
caacauccagcagaucauu

SEQ ID NO: 1785427 - RNA, 19 nt, Homo sapiens
  misc_RNA (1)...(19): siRNA sense strand
ggaaagaggggaugaacuu

SEQ ID NO: 1785428 - RNA, 19 nt, Homo sapiens
  misc_RNA (1)...(19): siRNA sense strand
cagcuggccucuaaguauc

SEQ ID NO: 1785429 - RNA, 19 nt, Homo sapiens
  misc_RNA (1)...(19): siRNA sense strand
ccacagccauugaccuuuu

SEQ ID NO: 1785430 - RNA, 19 nt, Homo sapiens
  misc_RNA (1)...(19): siRNA sense strand
gaucaucuccaauaaagac

SEQ ID NO: 1785431 - RNA, 19 nt, Homo sapiens
  misc_RNA (1)...(19): siRNA sense strand
caacagucaucagcuacga

SEQ ID NO: 1785432 - RNA, 19 nt, Homo sapiens
  misc_RNA (1)...(19): siRNA sense strand
ccagcuggccucuaaguau

SEQ ID NO: 1785433 - RNA, 19 nt, Homo sapiens
  misc_RNA (1)...(19): siRNA sense strand
gccaacagaccucaggaaa

SEQ ID NO: 1785434 - RNA, 19 nt, Homo sapiens
  misc_RNA (1)...(19): siRNA sense strand
gaaagccgaccaccaugca

SEQ ID NO: 1785435 - RNA, 19 nt, Homo sapiens
  misc_RNA (1)...(19): siRNA sense strand
gaucuucaaacaagcauca

SEQ ID NO: 1785436 - RNA, 19 nt, Homo sapiens
  misc_RNA (1)...(19): siRNA sense strand
ugucauggauguccugaag

SEQ ID NO: 1785437 - RNA, 19 nt, Homo sapiens
  misc_RNA (1)...(19): siRNA sense strand
ugaacaaccacaucuugaa

SEQ ID NO: 1785438 - RNA, 19 nt, Homo sapiens
  misc_RNA (1)...(19): siRNA sense strand
ugagaucgaggacaccuuu

SEQ ID NO: 1785439 - RNA, 19 nt, Homo sapiens
  misc_RNA (1)...(19): siRNA sense strand
uggugcaccucaucgauaa

SEQ ID NO: 1785440 - RNA, 19 nt, Homo sapiens
  misc_RNA (1)...(19): siRNA sense strand
agaagguuauuggcacuaa

SEQ ID NO: 1785441 - RNA, 19 nt, Homo sapiens
  misc_RNA (1)...(19): siRNA sense strand
acucugcgcuugagaucuu

SEQ ID NO: 1785442 - RNA, 19 nt, Homo sapiens
  misc_RNA (1)...(19): siRNA sense strand
gagaagcugaggccugaga

SEQ ID NO: 1785443 - RNA, 19 nt, Homo sapiens
  misc_RNA (1)...(19): siRNA sense strand
cagccaagacacuauuuga

SEQ ID NO: 1785444 - RNA, 19 nt, Homo sapiens
  misc_RNA (1)...(19): siRNA sense strand
gugauccacuacauugaug

SEQ ID NO: 1785445 - RNA, 19 nt, Homo sapiens
  misc_RNA (1)...(19): siRNA sense strand
aggcgaucaucuccaauaa

SEQ ID NO: 1785446 - RNA, 19 nt, Homo sapiens
  misc_RNA (1)...(19): siRNA sense strand
ggcaugacccucaccucua

SEQ ID NO: 1785447 - RNA, 19 nt, Homo sapiens
  misc_RNA (1)...(19): siRNA sense strand
aaggucaucuccaccauca

SEQ ID NO: 1785448 - RNA, 19 nt, Homo sapiens
  misc_RNA (1)...(19): siRNA sense strand
uuagagaggaugaagcauu

SEQ ID NO: 1785449 - RNA, 19 nt, Homo sapiens
  misc_RNA (1)...(19): siRNA sense strand
ggagacaaucgcuuuagca

SEQ ID NO: 1785450 - RNA, 19 nt, Homo sapiens
  misc_RNA (1)...(19): siRNA sense strand
guggugcaccucaucgaua

SEQ ID NO: 1785451 - RNA, 19 nt, Homo sapiens
  misc_RNA (1)...(19): siRNA sense strand
gagcugaaacacggcauga

SEQ ID NO: 1785452 - RNA, 19 nt, Homo sapiens
  misc_RNA (1)...(19): siRNA sense strand
ccaacauccugaaauacca

SEQ ID NO: 1785453 - RNA, 19 nt, Homo sapiens
  misc_RNA (1)...(19): siRNA sense strand
gugagacuuugaaccguau

SEQ ID NO: 1785454 - RNA, 19 nt, Homo sapiens
  misc_RNA (1)...(19): siRNA sense strand
ugacugaugagcugaaaca

SEQ ID NO: 1785455 - RNA, 19 nt, Homo sapiens
  misc_RNA (1)...(19): siRNA sense strand
gcccuccgcuaccauaugg

SEQ ID NO: 1785456 - RNA, 19 nt, Homo sapiens
  misc_RNA (1)...(19): siRNA sense strand
gagacaaucgcuuuagcau

SEQ ID NO: 1785457 - RNA, 19 nt, Homo sapiens
  misc_RNA (1)...(19): siRNA sense strand
gagaccugcugaacaacca

SEQ ID NO: 1785458 - RNA, 19 nt, Homo sapiens
  misc_RNA (1)...(19): siRNA sense strand
gcaagcagugguaccaaag

SEQ ID NO: 1785459 - RNA, 19 nt, Homo sapiens
  misc_RNA (1)...(19): siRNA sense strand
ugcaagcagugguaccaaa

SEQ ID NO: 1785460 - RNA, 19 nt, Homo sapiens
  misc_RNA (1)...(19): siRNA sense strand
gacaucauggccacaaaug

SEQ ID NO: 1785461 - RNA, 19 nt, Homo sapiens
  misc_RNA (1)...(19): siRNA sense strand
ggagguacgggacccuguu

SEQ ID NO: 1785462 - RNA, 19 nt, Homo sapiens
  misc_RNA (1)...(19): siRNA sense strand
caauugaugcccauacaag

SEQ ID NO: 1785463 - RNA, 19 nt, Homo sapiens
  misc_RNA (1)...(19): siRNA sense strand
acaaccacaucuugaaguc

SEQ ID NO: 1785464 - RNA, 19 nt, Homo sapiens
  misc_RNA (1)...(19): siRNA sense strand
acacggaccgcacggagaa

SEQ ID NO: 1785465 - RNA, 19 nt, Homo sapiens
  misc_RNA (1)...(19): siRNA sense strand
aagcagugguaccaaagga

SEQ ID NO: 1785466 - RNA, 19 nt, Homo sapiens
  misc_RNA (1)...(19): siRNA sense strand
gcaaaucaacagucaucag

SEQ ID NO: 1785467 - RNA, 19 nt, Homo sapiens
  misc_RNA (1)...(19): siRNA sense strand
gaagcugaggccugagaug

SEQ ID NO: 1785468 - RNA, 19 nt, Homo sapiens
  misc_RNA (1)...(19): siRNA sense strand
aaggcgaucaucuccaaua

SEQ ID NO: 1785469 - RNA, 19 nt, Homo sapiens
  misc_RNA (1)...(19): siRNA sense strand
acauccagauccaccacua

SEQ ID NO: 1785470 - RNA, 19 nt, Homo sapiens
  misc_RNA (1)...(19): siRNA sense strand
ggacccuguucacgaugga

SEQ ID NO: 1785471 - RNA, 19 nt, Homo sapiens
  misc_RNA (1)...(19): siRNA sense strand
ccugaaagccgaccaccau

SEQ ID NO: 1785472 - RNA, 19 nt, Homo sapiens
  misc_RNA (1)...(19): siRNA sense strand
ugccgagccugacaucaug

SEQ ID NO: 1785473 - RNA, 19 nt, Homo sapiens
  misc_RNA (1)...(19): siRNA sense strand
gggagacaaucgcuuuagc

SEQ ID NO: 1785474 - RNA, 19 nt, Homo sapiens
  misc_RNA (1)...(19): siRNA sense strand
ggugauccacuacauugau

SEQ ID NO: 1785475 - RNA, 19 nt, Homo sapiens
  misc_RNA (1)...(19): siRNA sense strand
ccaacagaccucaggaaag

SEQ ID NO: 1785476 - RNA, 19 nt, Homo sapiens
  misc_RNA (1)...(19): siRNA sense strand
gaagacaccuccuacaaug

SEQ ID NO: 1785477 - RNA, 19 nt, Homo sapiens
  misc_RNA (1)...(19): siRNA sense strand
gggcagugcugaggauuaa

SEQ ID NO: 1785478 - RNA, 19 nt, Homo sapiens
  misc_RNA (1)...(19): siRNA sense strand
caaagaagaccaucagcuu

SEQ ID NO: 1785479 - RNA, 19 nt, Homo sapiens
  misc_RNA (1)...(19): siRNA sense strand
ucacuuaacccucucauau

SEQ ID NO: 1785480 - RNA, 19 nt, Homo sapiens
  misc_RNA (1)...(19): siRNA sense strand
uaauucgacucuccuguga

SEQ ID NO: 1785481 - RNA, 19 nt, Homo sapiens
  misc_RNA (1)...(19): siRNA sense strand
caaguucuuuggucucuuc

SEQ ID NO: 1785482 - RNA, 19 nt, Homo sapiens
  misc_RNA (1)...(19): siRNA sense strand
guucuuuggucucuucuau

SEQ ID NO: 1785483 - RNA, 19 nt, Homo sapiens
  misc_RNA (1)...(19): siRNA sense strand
ggucccagcucuaauucga

SEQ ID NO: 1785484 - RNA, 19 nt, Homo sapiens
  misc_RNA (1)...(19): siRNA sense strand
gcucagucauugcugucua

SEQ ID NO: 1785485 - RNA, 19 nt, Homo sapiens
  misc_RNA (1)...(19): siRNA sense strand
gaaauggggcucacacaaa

SEQ ID NO: 1785486 - RNA, 19 nt, Homo sapiens
  misc_RNA (1)...(19): siRNA sense strand
cacuuaacccucucauaua

SEQ ID NO: 1785487 - RNA, 19 nt, Homo sapiens
  misc_RNA (1)...(19): siRNA sense strand
gcuccacucuccaauguac

SEQ ID NO: 1785488 - RNA, 19 nt, Homo sapiens
  misc_RNA (1)...(19): siRNA sense strand
gugaagacaccuccuacaa

SEQ ID NO: 1785489 - RNA, 19 nt, Homo sapiens
  misc_RNA (1)...(19): siRNA sense strand
ugaagacaccuccuacaau

SEQ ID NO: 1785490 - RNA, 19 nt, Homo sapiens
  misc_RNA (1)...(19): siRNA sense strand
gcaacacacucaucauccu

SEQ ID NO: 1785491 - RNA, 19 nt, Homo sapiens
  misc_RNA (1)...(19): siRNA sense strand
gccucauccuugucucuua

SEQ ID NO: 1785492 - RNA, 19 nt, Homo sapiens
  misc_RNA (1)...(19): siRNA sense strand
aagcuccacucuccaaugu

SEQ ID NO: 1785493 - RNA, 19 nt, Homo sapiens
  misc_RNA (1)...(19): siRNA sense strand
ugaggucccagcucuaauu

SEQ ID NO: 1785494 - RNA, 19 nt, Homo sapiens
  misc_RNA (1)...(19): siRNA sense strand
ggagguaaccagggcauuc

SEQ ID NO: 1785495 - RNA, 19 nt, Homo sapiens
  misc_RNA (1)...(19): siRNA sense strand
gggcaacacacucaucauc

SEQ ID NO: 1785496 - RNA, 19 nt, Homo sapiens
  misc_RNA (1)...(19): siRNA sense strand
ucauauacacccugaggaa

SEQ ID NO: 1785497 - RNA, 19 nt, Homo sapiens
  misc_RNA (1)...(19): siRNA sense strand
ugacagugauggcuuuuga

SEQ ID NO: 1785498 - RNA, 19 nt, Homo sapiens
  misc_RNA (1)...(19): siRNA sense strand
ucuccaaccucuccuucuu

SEQ ID NO: 1785499 - RNA, 19 nt, Homo sapiens
  misc_RNA (1)...(19): siRNA sense strand
caacugagugcauccucuu

SEQ ID NO: 1785500 - RNA, 19 nt, Homo sapiens
  misc_RNA (1)...(19): siRNA sense strand
ugcauccucuugacaguga

SEQ ID NO: 1785501 - RNA, 19 nt, Homo sapiens
  misc_RNA (1)...(19): siRNA sense strand
ggagauugcuggggaagga

SEQ ID NO: 1785502 - RNA, 19 nt, Homo sapiens
  misc_RNA (1)...(19): siRNA sense strand
ucacuguggucacccucuu

SEQ ID NO: 1785503 - RNA, 19 nt, Homo sapiens
  misc_RNA (1)...(19): siRNA sense strand
uauacacccugaggaacaa

SEQ ID NO: 1785504 - RNA, 19 nt, Homo sapiens
  misc_RNA (1)...(19): siRNA sense strand
gggcacuccuucacuuaac

SEQ ID NO: 1785505 - RNA, 19 nt, Homo sapiens
  misc_RNA (1)...(19): siRNA sense strand
gcagguggaugauuuuguc

SEQ ID NO: 1785506 - RNA, 19 nt, Homo sapiens
  misc_RNA (1)...(19): siRNA sense strand
ccagggcauucaggagauu

SEQ ID NO: 1785507 - RNA, 19 nt, Homo sapiens
  misc_RNA (1)...(19): siRNA sense strand
acuuaacccucucauauac

SEQ ID NO: 1785508 - RNA, 19 nt, Homo sapiens
  misc_RNA (1)...(19): siRNA sense strand
ggacucucuucgugguugu

SEQ ID NO: 1785509 - RNA, 19 nt, Homo sapiens
  misc_RNA (1)...(19): siRNA sense strand
cuucugggcuucucugaac

SEQ ID NO: 1785510 - RNA, 19 nt, Homo sapiens
  misc_RNA (1)...(19): siRNA sense strand
gagguaaccagggcauuca

SEQ ID NO: 1785511 - RNA, 19 nt, Homo sapiens
  misc_RNA (1)...(19): siRNA sense strand
gugggcacuccuucacuua

SEQ ID NO: 1785512 - RNA, 19 nt, Homo sapiens
  misc_RNA (1)...(19): siRNA sense strand
ccacuaugccaccaucauc

SEQ ID NO: 1785513 - RNA, 19 nt, Homo sapiens
  misc_RNA (1)...(19): siRNA sense strand
gcaaguucuuuggucucuu

SEQ ID NO: 1785514 - RNA, 19 nt, Homo sapiens
  misc_RNA (1)...(19): siRNA sense strand
caagcuccacucuccaaug

SEQ ID NO: 1785515 - RNA, 19 nt, Homo sapiens
  misc_RNA (1)...(19): siRNA sense strand
ggcaaguucuuuggucucu

SEQ ID NO: 1785516 - RNA, 19 nt, Homo sapiens
  misc_RNA (1)...(19): siRNA sense strand
ucuugacagugauggcuuu

SEQ ID NO: 1785517 - RNA, 19 nt, Homo sapiens
  misc_RNA (1)...(19): siRNA sense strand
gcaaaagggcggaggaaag

SEQ ID NO: 1785518 - RNA, 19 nt, Homo sapiens
  misc_RNA (1)...(19): siRNA sense strand
gaucggcagguggaugauu

SEQ ID NO: 1785519 - RNA, 19 nt, Homo sapiens
  misc_RNA (1)...(19): siRNA sense strand
ggagucagugguccagaca

SEQ ID NO: 1785520 - RNA, 19 nt, Homo sapiens
  misc_RNA (1)...(19): siRNA sense strand
ggaaauggggcucacacaa

SEQ ID NO: 1785521 - RNA, 19 nt, Homo sapiens
  misc_RNA (1)...(19): siRNA sense strand
gcagugcugaggauuaacu

SEQ ID NO: 1785522 - RNA, 19 nt, Homo sapiens
  misc_RNA (1)...(19): siRNA sense strand
ucuguggccugggucauug

SEQ ID NO: 1785523 - RNA, 19 nt, Homo sapiens
  misc_RNA (1)...(19): siRNA sense strand
gacaccuccuacaaugaga

SEQ ID NO: 1785524 - RNA, 19 nt, Homo sapiens
  misc_RNA (1)...(19): siRNA sense strand
ugugaggucccagcucuaa

SEQ ID NO: 1785525 - RNA, 19 nt, Homo sapiens
  misc_RNA (1)...(19): siRNA sense strand
ccucauccuugucucuuac

SEQ ID NO: 1785526 - RNA, 19 nt, Homo sapiens
  misc_RNA (1)...(19): siRNA sense strand
cgacucuccugugaagaca

SEQ ID NO: 1785527 - RNA, 19 nt, Homo sapiens
  misc_RNA (1)...(19): siRNA sense strand
gauggcagcuucaagauug

SEQ ID NO: 1785528 - RNA, 19 nt, Homo sapiens
  misc_RNA (1)...(19): siRNA sense strand
gaacuggucuggugauuac

SEQ ID NO: 1785529 - RNA, 19 nt, Homo sapiens
  misc_RNA (1)...(19): siRNA sense strand
ggacaucaccuaccucuau

SEQ ID NO: 1785530 - RNA, 19 nt, Homo sapiens
  misc_RNA (1)...(19): siRNA sense strand
gacaucaccuaccucuaua

SEQ ID NO: 1785531 - RNA, 19 nt, Homo sapiens
  misc_RNA (1)...(19): siRNA sense strand
gcucgaaggcucuggguua

SEQ ID NO: 1785532 - RNA, 19 nt, Homo sapiens
  misc_RNA (1)...(19): siRNA sense strand
gcaggaguauguucuuaau

SEQ ID NO: 1785533 - RNA, 19 nt, Homo sapiens
  misc_RNA (1)...(19): siRNA sense strand
gcaaugagaucuacauccu

SEQ ID NO: 1785534 - RNA, 19 nt, Homo sapiens
  misc_RNA (1)...(19): siRNA sense strand
gcagcaaacccaaugugua

SEQ ID NO: 1785535 - RNA, 19 nt, Homo sapiens
  misc_RNA (1)...(19): siRNA sense strand
aggaguauguucuuaauga

SEQ ID NO: 1785536 - RNA, 19 nt, Homo sapiens
  misc_RNA (1)...(19): siRNA sense strand
ggugcuggaugccugcuua

SEQ ID NO: 1785537 - RNA, 19 nt, Homo sapiens
  misc_RNA (1)...(19): siRNA sense strand
gcuucaagauuguuuaugu

SEQ ID NO: 1785538 - RNA, 19 nt, Homo sapiens
  misc_RNA (1)...(19): siRNA sense strand
acacaucccuuaccaugga

SEQ ID NO: 1785539 - RNA, 19 nt, Homo sapiens
  misc_RNA (1)...(19): siRNA sense strand
ucgcaucacccuugaguua

SEQ ID NO: 1785540 - RNA, 19 nt, Homo sapiens
  misc_RNA (1)...(19): siRNA sense strand
ucaccuaccucuauaagca

SEQ ID NO: 1785541 - RNA, 19 nt, Homo sapiens
  misc_RNA (1)...(19): siRNA sense strand
gaugauggcagcuucaaga

SEQ ID NO: 1785542 - RNA, 19 nt, Homo sapiens
  misc_RNA (1)...(19): siRNA sense strand
ggaacuggucuggugauua

SEQ ID NO: 1785543 - RNA, 19 nt, Homo sapiens
  misc_RNA (1)...(19): siRNA sense strand
gaucugauggucucuguga

SEQ ID NO: 1785544 - RNA, 19 nt, Homo sapiens
  misc_RNA (1)...(19): siRNA sense strand
cagcaaacccaauguguau

SEQ ID NO: 1785545 - RNA, 19 nt, Homo sapiens
  misc_RNA (1)...(19): siRNA sense strand
guacgacacgccuuucauu

SEQ ID NO: 1785546 - RNA, 19 nt, Homo sapiens
  misc_RNA (1)...(19): siRNA sense strand
ucaaggagaccaagaagga

SEQ ID NO: 1785547 - RNA, 19 nt, Homo sapiens
  misc_RNA (1)...(19): siRNA sense strand
uugcugaggugaauaguga

SEQ ID NO: 1785548 - RNA, 19 nt, Homo sapiens
  misc_RNA (1)...(19): siRNA sense strand
uaaugagucugggagaauu

SEQ ID NO: 1785549 - RNA, 19 nt, Homo sapiens
  misc_RNA (1)...(19): siRNA sense strand
gggccaugcugcucaaugu

SEQ ID NO: 1785550 - RNA, 19 nt, Homo sapiens
  misc_RNA (1)...(19): siRNA sense strand
uggagcaccugaaccauga

SEQ ID NO: 1785551 - RNA, 19 nt, Homo sapiens
  misc_RNA (1)...(19): siRNA sense strand
cggcaggaguauguucuua

SEQ ID NO: 1785552 - RNA, 19 nt, Homo sapiens
  misc_RNA (1)...(19): siRNA sense strand
uggaacgacugcuggauga

SEQ ID NO: 1785553 - RNA, 19 nt, Homo sapiens
  misc_RNA (1)...(19): siRNA sense strand
ugaacucccuggaugacaa

SEQ ID NO: 1785554 - RNA, 19 nt, Homo sapiens
  misc_RNA (1)...(19): siRNA sense strand
gcgggcagccuuuccauau

SEQ ID NO: 1785555 - RNA, 19 nt, Homo sapiens
  misc_RNA (1)...(19): siRNA sense strand
agaauggccuggucuacau

SEQ ID NO: 1785556 - RNA, 19 nt, Homo sapiens
  misc_RNA (1)...(19): siRNA sense strand
gcccagaggacauugugua

SEQ ID NO: 1785557 - RNA, 19 nt, Homo sapiens
  misc_RNA (1)...(19): siRNA sense strand
ggaaagcccagguggucaa

SEQ ID NO: 1785558 - RNA, 19 nt, Homo sapiens
  misc_RNA (1)...(19): siRNA sense strand
gacacagacacaucccuua

SEQ ID NO: 1785559 - RNA, 19 nt, Homo sapiens
  misc_RNA (1)...(19): siRNA sense strand
ggaccuaugaauccucuga

SEQ ID NO: 1785560 - RNA, 19 nt, Homo sapiens
  misc_RNA (1)...(19): siRNA sense strand
ggagugugaaguacagauu

SEQ ID NO: 1785561 - RNA, 19 nt, Homo sapiens
  misc_RNA (1)...(19): siRNA sense strand
caaaggccaucagcuccaa

SEQ ID NO: 1785562 - RNA, 19 nt, Homo sapiens
  misc_RNA (1)...(19): siRNA sense strand
gagagggcaugcuaguagu

SEQ ID NO: 1785563 - RNA, 19 nt, Homo sapiens
  misc_RNA (1)...(19): siRNA sense strand
ggaguauguucuuaaugag

SEQ ID NO: 1785564 - RNA, 19 nt, Homo sapiens
  misc_RNA (1)...(19): siRNA sense strand
agaccucucccucacguua

SEQ ID NO: 1785565 - RNA, 19 nt, Homo sapiens
  misc_RNA (1)...(19): siRNA sense strand
cagaggacauuguguacgu

SEQ ID NO: 1785566 - RNA, 19 nt, Homo sapiens
  misc_RNA (1)...(19): siRNA sense strand
cgagagggcaugcuaguag

SEQ ID NO: 1785567 - RNA, 19 nt, Homo sapiens
  misc_RNA (1)...(19): siRNA sense strand
gcguggagauccugcuuag

SEQ ID NO: 1785568 - RNA, 19 nt, Homo sapiens
  misc_RNA (1)...(19): siRNA sense strand
ugaaguacgacacgccuuu

SEQ ID NO: 1785569 - RNA, 19 nt, Homo sapiens
  misc_RNA (1)...(19): siRNA sense strand
gacuagcaguggcaucuuc

SEQ ID NO: 1785570 - RNA, 19 nt, Homo sapiens
  misc_RNA (1)...(19): siRNA sense strand
caacuccgcccacgacaca

SEQ ID NO: 1785571 - RNA, 19 nt, Homo sapiens
  misc_RNA (1)...(19): siRNA sense strand
guacguggaccaugaggau

SEQ ID NO: 1785572 - RNA, 19 nt, Homo sapiens
  misc_RNA (1)...(19): siRNA sense strand
gggaacuggucuggugauu

SEQ ID NO: 1785573 - RNA, 19 nt, Homo sapiens
  misc_RNA (1)...(19): siRNA sense strand
gggcagccuuuccauaugc

SEQ ID NO: 1785574 - RNA, 19 nt, Homo sapiens
  misc_RNA (1)...(19): siRNA sense strand
ccaguggccuacaaggaau

SEQ ID NO: 1785575 - RNA, 19 nt, Homo sapiens
  misc_RNA (1)...(19): siRNA sense strand
gcagcuucaagauuguuua

SEQ ID NO: 1785576 - RNA, 19 nt, Homo sapiens
  misc_RNA (1)...(19): siRNA sense strand
gauccugcuuagcuaccua

SEQ ID NO: 1785577 - RNA, 19 nt, Homo sapiens
  misc_RNA (1)...(19): siRNA sense strand
gcaaguuucaguucacagu

SEQ ID NO: 1785578 - RNA, 19 nt, Homo sapiens
  misc_RNA (1)...(19): siRNA sense strand
gugguaccaucuucaagga

SEQ ID NO: 1785579 - RNA, 19 nt, Homo sapiens
  misc_RNA (1)...(19): siRNA sense strand
ccauggacaucuacuucga

SEQ ID NO: 1785580 - RNA, 19 nt, Homo sapiens
  misc_RNA (1)...(19): siRNA sense strand
ugacaauggaguccugauu

SEQ ID NO: 1785581 - RNA, 19 nt, Homo sapiens
  misc_RNA (1)...(19): siRNA sense strand
ggcaggaguauguucuuaa

SEQ ID NO: 1785582 - RNA, 19 nt, Homo sapiens
  misc_RNA (1)...(19): siRNA sense strand
guggagacccagucaaugu

SEQ ID NO: 1785583 - RNA, 19 nt, Homo sapiens
  misc_RNA (1)...(19): siRNA sense strand
aaguacagauugucuucaa

SEQ ID NO: 1785584 - RNA, 19 nt, Homo sapiens
  misc_RNA (1)...(19): siRNA sense strand
gcaucacccuugaguuacu

SEQ ID NO: 1785585 - RNA, 19 nt, Homo sapiens
  misc_RNA (1)...(19): siRNA sense strand
ugaguacgacgagcugaua

SEQ ID NO: 1785586 - RNA, 19 nt, Homo sapiens
  misc_RNA (1)...(19): siRNA sense strand
uggagauccugcuuagcua

SEQ ID NO: 1785587 - RNA, 19 nt, Homo sapiens
  misc_RNA (1)...(19): siRNA sense strand
gaacgacugcuggaugaag

SEQ ID NO: 1785588 - RNA, 19 nt, Homo sapiens
  misc_RNA (1)...(19): siRNA sense strand
ccucaccaaugucgucuuc

SEQ ID NO: 1785589 - RNA, 19 nt, Homo sapiens
  misc_RNA (1)...(19): siRNA sense strand
gaucgcaucacccuugagu

SEQ ID NO: 1785590 - RNA, 19 nt, Homo sapiens
  misc_RNA (1)...(19): siRNA sense strand
gcaaacccaauguguaugc

SEQ ID NO: 1785591 - RNA, 19 nt, Homo sapiens
  misc_RNA (1)...(19): siRNA sense strand
gcggaaggcaguagagaca

SEQ ID NO: 1785592 - RNA, 19 nt, Homo sapiens
  misc_RNA (1)...(19): siRNA sense strand
gggaggacaucaccuaccu

SEQ ID NO: 1785593 - RNA, 19 nt, Homo sapiens
  misc_RNA (1)...(19): siRNA sense strand
ggccaucggcacacucauu

SEQ ID NO: 1785594 - RNA, 19 nt, Homo sapiens
  misc_RNA (1)...(19): siRNA sense strand
ugaauagugacaaggugua

SEQ ID NO: 1785595 - RNA, 19 nt, Homo sapiens
  misc_RNA (1)...(19): siRNA sense strand
ggccuggucuacaugaagu

SEQ ID NO: 1785596 - RNA, 19 nt, Homo sapiens
  misc_RNA (1)...(19): siRNA sense strand
gaguuccaguugcccuuug

SEQ ID NO: 1785597 - RNA, 19 nt, Homo sapiens
  misc_RNA (1)...(19): siRNA sense strand
cgaaggcucuggguuacag

SEQ ID NO: 1785598 - RNA, 19 nt, Homo sapiens
  misc_RNA (1)...(19): siRNA sense strand
cuggaugccugcuuauaca

SEQ ID NO: 1785599 - RNA, 19 nt, Homo sapiens
  misc_RNA (1)...(19): siRNA sense strand
ggcccaagauccucaacgu

SEQ ID NO: 1785600 - RNA, 19 nt, Homo sapiens
  misc_RNA (1)...(19): siRNA sense strand
ucaagaauggccuggucua

SEQ ID NO: 1785601 - RNA, 19 nt, Homo sapiens
  misc_RNA (1)...(19): siRNA sense strand
gcaccugaaccaugauucu

SEQ ID NO: 1785602 - RNA, 19 nt, Homo sapiens
  misc_RNA (1)...(19): siRNA sense strand
gaacucccuggaugacaau

SEQ ID NO: 1785603 - RNA, 19 nt, Homo sapiens
  misc_RNA (1)...(19): siRNA sense strand
acagacacaucccuuacca

SEQ ID NO: 1785604 - RNA, 19 nt, Homo sapiens
  misc_RNA (1)...(19): siRNA sense strand
ccaggagugugaaguacag

SEQ ID NO: 1785605 - RNA, 19 nt, Homo sapiens
  misc_RNA (1)...(19): siRNA sense strand
cuucaagauuguuuaugug

SEQ ID NO: 1785606 - RNA, 19 nt, Homo sapiens
  misc_RNA (1)...(19): siRNA sense strand
gcuggaugccugcuuauac

SEQ ID NO: 1785607 - RNA, 19 nt, Homo sapiens
  misc_RNA (1)...(19): siRNA sense strand
gaaguacgacacgccuuuc

SEQ ID NO: 1785608 - RNA, 19 nt, Homo sapiens
  misc_RNA (1)...(19): siRNA sense strand
ggaugaagaggccggaucu

SEQ ID NO: 1785609 - RNA, 19 nt, Homo sapiens
  misc_RNA (1)...(19): siRNA sense strand
gagcaccugaaccaugauu

SEQ ID NO: 1785610 - RNA, 19 nt, Homo sapiens
  misc_RNA (1)...(19): siRNA sense strand
ggaccgaagcacagauugg

SEQ ID NO: 1785611 - RNA, 19 nt, Homo sapiens
  misc_RNA (1)...(19): siRNA sense strand
gagugugaaguacagauug

SEQ ID NO: 1785612 - RNA, 19 nt, Homo sapiens
  misc_RNA (1)...(19): siRNA sense strand
cauccgagagggcaugcua

SEQ ID NO: 1785613 - RNA, 19 nt, Homo sapiens
  misc_RNA (1)...(19): siRNA sense strand
ugucagugguaccaucuuc

SEQ ID NO: 1785614 - RNA, 19 nt, Homo sapiens
  misc_RNA (1)...(19): siRNA sense strand
ggaguuccaguugcccuuu

SEQ ID NO: 1785615 - RNA, 19 nt, Homo sapiens
  misc_RNA (1)...(19): siRNA sense strand
ggccaucagcuccaacaug

SEQ ID NO: 1785616 - RNA, 19 nt, Homo sapiens
  misc_RNA (1)...(19): siRNA sense strand
gccaucggcacacucauug

SEQ ID NO: 1785617 - RNA, 19 nt, Homo sapiens
  misc_RNA (1)...(19): siRNA sense strand
uacgacacgccuuucauuu

SEQ ID NO: 1785618 - RNA, 19 nt, Homo sapiens
  misc_RNA (1)...(19): siRNA sense strand
gagggcaugcuaguaguga

SEQ ID NO: 1785619 - RNA, 19 nt, Homo sapiens
  misc_RNA (1)...(19): siRNA sense strand
ggaggcaaugaaacaguga

SEQ ID NO: 1785620 - RNA, 19 nt, Homo sapiens
  misc_RNA (1)...(19): siRNA sense strand
caaggagaccaagaaggaa

SEQ ID NO: 1785621 - RNA, 19 nt, Homo sapiens
  misc_RNA (1)...(19): siRNA sense strand
gagcggaaggcaguagaga

SEQ ID NO: 1785622 - RNA, 19 nt, Homo sapiens
  misc_RNA (1)...(19): siRNA sense strand
guacugucaccaacuucaa

SEQ ID NO: 1785623 - RNA, 19 nt, Homo sapiens
  misc_RNA (1)...(19): siRNA sense strand
gauauuccguccccuaugg

SEQ ID NO: 1785624 - RNA, 19 nt, Homo sapiens
  misc_RNA (1)...(19): siRNA sense strand
guacgacgagcugauagug

SEQ ID NO: 1785625 - RNA, 19 nt, Homo sapiens
  misc_RNA (1)...(19): siRNA sense strand
cuuaaugagucugggagaa

SEQ ID NO: 1785626 - RNA, 19 nt, Homo sapiens
  misc_RNA (1)...(19): siRNA sense strand
cgggcagccuuuccauaug

SEQ ID NO: 1785627 - RNA, 19 nt, Homo sapiens
  misc_RNA (1)...(19): siRNA sense strand
cagcagagcuuacagauuu

SEQ ID NO: 1785628 - RNA, 19 nt, Homo sapiens
  misc_RNA (1)...(19): siRNA sense strand
caagaaagcuagcagaaau

SEQ ID NO: 1785629 - RNA, 19 nt, Homo sapiens
  misc_RNA (1)...(19): siRNA sense strand
gagaacacacucaucauua

SEQ ID NO: 1785630 - RNA, 19 nt, Homo sapiens
  misc_RNA (1)...(19): siRNA sense strand
gccaguaucuucaucuaug

SEQ ID NO: 1785631 - RNA, 19 nt, Homo sapiens
  misc_RNA (1)...(19): siRNA sense strand
ccacaaacccauguacuuu

SEQ ID NO: 1785632 - RNA, 19 nt, Homo sapiens
  misc_RNA (1)...(19): siRNA sense strand
guaugucacugucacuauu

SEQ ID NO: 1785633 - RNA, 19 nt, Homo sapiens
  misc_RNA (1)...(19): siRNA sense strand
gcuguacucugcaccugua

SEQ ID NO: 1785634 - RNA, 19 nt, Homo sapiens
  misc_RNA (1)...(19): siRNA sense strand
agaacacacucaucauuau

SEQ ID NO: 1785635 - RNA, 19 nt, Homo sapiens
  misc_RNA (1)...(19): siRNA sense strand
gaacacacucaucauuaug

SEQ ID NO: 1785636 - RNA, 19 nt, Homo sapiens
  misc_RNA (1)...(19): siRNA sense strand
caacaucaucaaccacuuu

SEQ ID NO: 1785637 - RNA, 19 nt, Homo sapiens
  misc_RNA (1)...(19): siRNA sense strand
ggacagcuaaucuccuuug

SEQ ID NO: 1785638 - RNA, 19 nt, Homo sapiens
  misc_RNA (1)...(19): siRNA sense strand
guuggucucuguacuguau

SEQ ID NO: 1785639 - RNA, 19 nt, Homo sapiens
  misc_RNA (1)...(19): siRNA sense strand
gaugcuugcuggcuuuguu

SEQ ID NO: 1785640 - RNA, 19 nt, Homo sapiens
  misc_RNA (1)...(19): siRNA sense strand
guacuauuguuugcccuuu

SEQ ID NO: 1785641 - RNA, 19 nt, Homo sapiens
  misc_RNA (1)...(19): siRNA sense strand
aaagcuagcagaaauguau

SEQ ID NO: 1785642 - RNA, 19 nt, Homo sapiens
  misc_RNA (1)...(19): siRNA sense strand
cuggagaucugguauguca

SEQ ID NO: 1785643 - RNA, 19 nt, Homo sapiens
  misc_RNA (1)...(19): siRNA sense strand
gaucauggacagcuaaucu

SEQ ID NO: 1785644 - RNA, 19 nt, Homo sapiens
  misc_RNA (1)...(19): siRNA sense strand
uagcuaauauguccuuucu

SEQ ID NO: 1785645 - RNA, 19 nt, Homo sapiens
  misc_RNA (1)...(19): siRNA sense strand
gaaagcuagcagaaaugua

SEQ ID NO: 1785646 - RNA, 19 nt, Homo sapiens
  misc_RNA (1)...(19): siRNA sense strand
ccaagaaagcuagcagaaa

SEQ ID NO: 1785647 - RNA, 19 nt, Homo sapiens
  misc_RNA (1)...(19): siRNA sense strand
cagccaguaucuucaucua

SEQ ID NO: 1785648 - RNA, 19 nt, Homo sapiens
  misc_RNA (1)...(19): siRNA sense strand
acuguaugcugucauugua

SEQ ID NO: 1785649 - RNA, 19 nt, Homo sapiens
  misc_RNA (1)...(19): siRNA sense strand
cuacagguacuauuguuug

SEQ ID NO: 1785650 - RNA, 19 nt, Homo sapiens
  misc_RNA (1)...(19): siRNA sense strand
gagagugagugaguuugug

SEQ ID NO: 1785651 - RNA, 19 nt, Homo sapiens
  misc_RNA (1)...(19): siRNA sense strand
gacagcuaaucuccuuuga

SEQ ID NO: 1785652 - RNA, 19 nt, Homo sapiens
  misc_RNA (1)...(19): siRNA sense strand
ccucucaucucacuguugu

SEQ ID NO: 1785653 - RNA, 19 nt, Homo sapiens
  misc_RNA (1)...(19): siRNA sense strand
gcaucuccauggucaaagu

SEQ ID NO: 1785654 - RNA, 19 nt, Homo sapiens
  misc_RNA (1)...(19): siRNA sense strand
ggccuaugaucgcuauaug

SEQ ID NO: 1785655 - RNA, 19 nt, Homo sapiens
  misc_RNA (1)...(19): siRNA sense strand
ucaaucccaucauuuacug

SEQ ID NO: 1785656 - RNA, 19 nt, Homo sapiens
  misc_RNA (1)...(19): siRNA sense strand
gcugcuggccuauguguug

SEQ ID NO: 1785657 - RNA, 19 nt, Homo sapiens
  misc_RNA (1)...(19): siRNA sense strand
ggagagugagugaguuugu

SEQ ID NO: 1785658 - RNA, 19 nt, Homo sapiens
  misc_RNA (1)...(19): siRNA sense strand
gauuucauccuggccauuu

SEQ ID NO: 1785659 - RNA, 19 nt, Homo sapiens
  misc_RNA (1)...(19): siRNA sense strand
ucugugaugucucuccauu

SEQ ID NO: 1785660 - RNA, 19 nt, Homo sapiens
  misc_RNA (1)...(19): siRNA sense strand
gcaugacacagcucuacuu

SEQ ID NO: 1785661 - RNA, 19 nt, Homo sapiens
  misc_RNA (1)...(19): siRNA sense strand
ccaaaggcacucucagcuu

SEQ ID NO: 1785662 - RNA, 19 nt, Homo sapiens
  misc_RNA (1)...(19): siRNA sense strand
gcuauauggccaucugcua

SEQ ID NO: 1785663 - RNA, 19 nt, Homo sapiens
  misc_RNA (1)...(19): siRNA sense strand
caugacacagcucuacuuu

SEQ ID NO: 1785664 - RNA, 19 nt, Homo sapiens
  misc_RNA (1)...(19): siRNA sense strand
ccacagcagagcuuacaga

SEQ ID NO: 1785665 - RNA, 19 nt, Homo sapiens
  misc_RNA (1)...(19): siRNA sense strand
ucgcuguuauggccuauga

SEQ ID NO: 1785666 - RNA, 19 nt, Homo sapiens
  misc_RNA (1)...(19): siRNA sense strand
gcaaucaagaggucaagag

SEQ ID NO: 1785667 - RNA, 19 nt, Homo sapiens
  misc_RNA (1)...(19): siRNA sense strand
uguacuguaugcugucauu

SEQ ID NO: 1785668 - RNA, 19 nt, Homo sapiens
  misc_RNA (1)...(19): siRNA sense strand
caaucaagaggucaagaga

SEQ ID NO: 1785669 - RNA, 19 nt, Homo sapiens
  misc_RNA (1)...(19): siRNA sense strand
gcucuugggcuggagguuu

SEQ ID NO: 1785670 - RNA, 19 nt, Homo sapiens
  misc_RNA (1)...(19): siRNA sense strand
caaguuggucucuguacug

SEQ ID NO: 1785671 - RNA, 19 nt, Homo sapiens
  misc_RNA (1)...(19): siRNA sense strand
cacuacagguacuauuguu

SEQ ID NO: 1785672 - RNA, 19 nt, Homo sapiens
  misc_RNA (1)...(19): siRNA sense strand
ccaacaucaucaaccacuu

SEQ ID NO: 1785673 - RNA, 19 nt, Homo sapiens
  misc_RNA (1)...(19): siRNA sense strand
gccacuacagguacuauug

SEQ ID NO: 1785674 - RNA, 19 nt, Homo sapiens
  misc_RNA (1)...(19): siRNA sense strand
aagagagcccuaugcugua

SEQ ID NO: 1785675 - RNA, 19 nt, Homo sapiens
  misc_RNA (1)...(19): siRNA sense strand
gguaugucacugucacuau

SEQ ID NO: 1785676 - RNA, 19 nt, Homo sapiens
  misc_RNA (1)...(19): siRNA sense strand
ugagugaguuuguguugcu

SEQ ID NO: 1785677 - RNA, 19 nt, Homo sapiens
  misc_RNA (1)...(19): siRNA sense strand
ccacuacagguacuauugu

SEQ ID NO: 1785678 - RNA, 19 nt, Homo sapiens
  misc_RNA (1)...(19): siRNA sense strand
acaggaucauggacagcua

SEQ ID NO: 1785679 - RNA, 19 nt, Homo sapiens
  misc_RNA (1)...(19): siRNA sense strand
caucuaugcucggccaaag

SEQ ID NO: 1785680 - RNA, 19 nt, Homo sapiens
  misc_RNA (1)...(19): siRNA sense strand
ggcuugggcugcacugagu

SEQ ID NO: 1785681 - RNA, 19 nt, Homo sapiens
  misc_RNA (1)...(19): siRNA sense strand
cuauauggccaucugcuau

SEQ ID NO: 1785682 - RNA, 19 nt, Homo sapiens
  misc_RNA (1)...(19): siRNA sense strand
ggagaucugguaugucacu

SEQ ID NO: 1785683 - RNA, 19 nt, Homo sapiens
  misc_RNA (1)...(19): siRNA sense strand
ugugaugucucuccauugc

SEQ ID NO: 1785684 - RNA, 19 nt, Homo sapiens
  misc_RNA (1)...(19): siRNA sense strand
uuucuggccucucuuacug

SEQ ID NO: 1785685 - RNA, 19 nt, Homo sapiens
  misc_RNA (1)...(19): siRNA sense strand
ugcucaaucccaucauuua

SEQ ID NO: 1785686 - RNA, 19 nt, Homo sapiens
  misc_RNA (1)...(19): siRNA sense strand
ccuccuauguggccauuac

SEQ ID NO: 1785687 - RNA, 19 nt, Homo sapiens
  misc_RNA (1)...(19): siRNA sense strand
uuauuucuggccucucuua

SEQ ID NO: 1785688 - RNA, 19 nt, Homo sapiens
  misc_RNA (1)...(19): siRNA sense strand
gcucaaucccaucauuuac

SEQ ID NO: 1785689 - RNA, 19 nt, Homo sapiens
  misc_RNA (1)...(19): siRNA sense strand
cauuacuggugcugugaug

SEQ ID NO: 1785690 - RNA, 19 nt, Homo sapiens
  misc_RNA (1)...(19): siRNA sense strand
ccucuccacuacccaguca

SEQ ID NO: 1785691 - RNA, 19 nt, Homo sapiens
  misc_RNA (1)...(19): siRNA sense strand
aaccauagugggagaguga

SEQ ID NO: 1785692 - RNA, 19 nt, Homo sapiens
  misc_RNA (1)...(19): siRNA sense strand
uguuggugcugacugagaa

SEQ ID NO: 1785693 - RNA, 19 nt, Homo sapiens
  misc_RNA (1)...(19): siRNA sense strand
ccacuacccagucauuguc

SEQ ID NO: 1785694 - RNA, 19 nt, Homo sapiens
  misc_RNA (1)...(19): siRNA sense strand
gcuguuauggccuaugauc

SEQ ID NO: 1785695 - RNA, 19 nt, Homo sapiens
  misc_RNA (1)...(19): siRNA sense strand
ggugcugacugagaacaca

SEQ ID NO: 1785696 - RNA, 19 nt, Homo sapiens
  misc_RNA (1)...(19): siRNA sense strand
gcagagcuuacagauuuca

SEQ ID NO: 1785697 - RNA, 19 nt, Homo sapiens
  misc_RNA (1)...(19): siRNA sense strand
aaccucucaugcacugaua

SEQ ID NO: 1785698 - RNA, 19 nt, Homo sapiens
  misc_RNA (1)...(19): siRNA sense strand
uauggccuaugaucgcuau

SEQ ID NO: 1785699 - RNA, 19 nt, Homo sapiens
  misc_RNA (1)...(19): siRNA sense strand
auggacagcuaaucuccuu

SEQ ID NO: 1785700 - RNA, 19 nt, Homo sapiens
  misc_RNA (1)...(19): siRNA sense strand
cccaagaaagcuagcagaa

SEQ ID NO: 1785701 - RNA, 19 nt, Homo sapiens
  misc_RNA (1)...(19): siRNA sense strand
ccaguaucuucaucuaugc

SEQ ID NO: 1785702 - RNA, 19 nt, Homo sapiens
  misc_RNA (1)...(19): siRNA sense strand
caaccucucaugcacugau

SEQ ID NO: 1785703 - RNA, 19 nt, Homo sapiens
  misc_RNA (1)...(19): siRNA sense strand
gaagguguuugagacguuu

SEQ ID NO: 1785704 - RNA, 19 nt, Homo sapiens
  misc_RNA (1)...(19): siRNA sense strand
ggaagcugauugcugagau

SEQ ID NO: 1785705 - RNA, 19 nt, Homo sapiens
  misc_RNA (1)...(19): siRNA sense strand
gaagcugauugcugagauc

SEQ ID NO: 1785706 - RNA, 19 nt, Homo sapiens
  misc_RNA (1)...(19): siRNA sense strand
guacaccgccgaggagauu

SEQ ID NO: 1785707 - RNA, 19 nt, Homo sapiens
  misc_RNA (1)...(19): siRNA sense strand
gagaucgccuuccaguaca

SEQ ID NO: 1785708 - RNA, 19 nt, Homo sapiens
  misc_RNA (1)...(19): siRNA sense strand
ugaagguguuugagacguu

SEQ ID NO: 1785709 - RNA, 19 nt, Homo sapiens
  misc_RNA (1)...(19): siRNA sense strand
uguccacgcugucaugguu

SEQ ID NO: 1785710 - RNA, 19 nt, Homo sapiens
  misc_RNA (1)...(19): siRNA sense strand
gagcugugaagguguuuga

SEQ ID NO: 1785711 - RNA, 19 nt, Homo sapiens
  misc_RNA (1)...(19): siRNA sense strand
ugagaucgccuuccaguac

SEQ ID NO: 1785712 - RNA, 19 nt, Homo sapiens
  misc_RNA (1)...(19): siRNA sense strand
gcaggcagaggccaucaug

SEQ ID NO: 1785713 - RNA, 19 nt, Homo sapiens
  misc_RNA (1)...(19): siRNA sense strand
gcaguucucgcaggacauu

SEQ ID NO: 1785714 - RNA, 19 nt, Homo sapiens
  misc_RNA (1)...(19): siRNA sense strand
guaccagucagucuacuuc

SEQ ID NO: 1785715 - RNA, 19 nt, Homo sapiens
  misc_RNA (1)...(19): siRNA sense strand
gcugugaagguguuugaga

SEQ ID NO: 1785716 - RNA, 19 nt, Homo sapiens
  misc_RNA (1)...(19): siRNA sense strand
cagucuacuucgugucuga

SEQ ID NO: 1785717 - RNA, 19 nt, Homo sapiens
  misc_RNA (1)...(19): siRNA sense strand
cguacacgcuggccaucga

SEQ ID NO: 1785718 - RNA, 19 nt, Homo sapiens
  misc_RNA (1)...(19): siRNA sense strand
ccuggaggccuuugcuuug

SEQ ID NO: 1785719 - RNA, 19 nt, Homo sapiens
  misc_RNA (1)...(19): siRNA sense strand
acccugaccuggacuugga

SEQ ID NO: 1785720 - RNA, 19 nt, Homo sapiens
  misc_RNA (1)...(19): siRNA sense strand
cggaugaggaaauugagaa

SEQ ID NO: 1785721 - RNA, 19 nt, Homo sapiens
  misc_RNA (1)...(19): siRNA sense strand
ucagugacgccaaggacaa

SEQ ID NO: 1785722 - RNA, 19 nt, Homo sapiens
  misc_RNA (1)...(19): siRNA sense strand
gaagcuguccacgcuguca

SEQ ID NO: 1785723 - RNA, 19 nt, Homo sapiens
  misc_RNA (1)...(19): siRNA sense strand
gaaugucgcuuuaagaaau

SEQ ID NO: 1785724 - RNA, 19 nt, Homo sapiens
  misc_RNA (1)...(19): siRNA sense strand
gcaugucucugucuucuuu

SEQ ID NO: 1785725 - RNA, 19 nt, Homo sapiens
  misc_RNA (1)...(19): siRNA sense strand
gggaagagcugcagaaguc

SEQ ID NO: 1785726 - RNA, 19 nt, Homo sapiens
  misc_RNA (1)...(19): siRNA sense strand
gcaagaggcuggccaagag

SEQ ID NO: 1785727 - RNA, 19 nt, Homo sapiens
  misc_RNA (1)...(19): siRNA sense strand
gaacagucgucgccacauc

SEQ ID NO: 1785728 - RNA, 19 nt, Homo sapiens
  misc_RNA (1)...(19): siRNA sense strand
ggaaugggagcucaucaaa

SEQ ID NO: 1785729 - RNA, 19 nt, Homo sapiens
  misc_RNA (1)...(19): siRNA sense strand
gcuaugacccggaaaguga

SEQ ID NO: 1785730 - RNA, 19 nt, Homo sapiens
  misc_RNA (1)...(19): siRNA sense strand
ucugaagccugccuacaua

SEQ ID NO: 1785731 - RNA, 19 nt, Homo sapiens
  misc_RNA (1)...(19): siRNA sense strand
ggacaagcaccaauaguca

SEQ ID NO: 1785732 - RNA, 19 nt, Homo sapiens
  misc_RNA (1)...(19): siRNA sense strand
caaccuggaugacacugaa

SEQ ID NO: 1785733 - RNA, 19 nt, Homo sapiens
  misc_RNA (1)...(19): siRNA sense strand
uagaagaaccauucagaaa

SEQ ID NO: 1785734 - RNA, 19 nt, Homo sapiens
  misc_RNA (1)...(19): siRNA sense strand
guggaaagguugacuugga

SEQ ID NO: 1785735 - RNA, 19 nt, Homo sapiens
  misc_RNA (1)...(19): siRNA sense strand
cgaaaucagugccaggaau

SEQ ID NO: 1785736 - RNA, 19 nt, Homo sapiens
  misc_RNA (1)...(19): siRNA sense strand
uggaaguguucgaggauua

SEQ ID NO: 1785737 - RNA, 19 nt, Homo sapiens
  misc_RNA (1)...(19): siRNA sense strand
gaaaauggccuuacagcuu

SEQ ID NO: 1785738 - RNA, 19 nt, Homo sapiens
  misc_RNA (1)...(19): siRNA sense strand
ggaaugucgcuuuaagaaa

SEQ ID NO: 1785739 - RNA, 19 nt, Homo sapiens
  misc_RNA (1)...(19): siRNA sense strand
ugacagaucugcggaugau

SEQ ID NO: 1785740 - RNA, 19 nt, Homo sapiens
  misc_RNA (1)...(19): siRNA sense strand
ugacaaagccaccggguau

SEQ ID NO: 1785741 - RNA, 19 nt, Homo sapiens
  misc_RNA (1)...(19): siRNA sense strand
gaaaucagugccaggaaug

SEQ ID NO: 1785742 - RNA, 19 nt, Homo sapiens
  misc_RNA (1)...(19): siRNA sense strand
aaacggaggagaagaaaug

SEQ ID NO: 1785743 - RNA, 19 nt, Homo sapiens
  misc_RNA (1)...(19): siRNA sense strand
cagauuuggugcuggauga

SEQ ID NO: 1785744 - RNA, 19 nt, Homo sapiens
  misc_RNA (1)...(19): siRNA sense strand
uuugugagcugccauguga

SEQ ID NO: 1785745 - RNA, 19 nt, Homo sapiens
  misc_RNA (1)...(19): siRNA sense strand
ggaagcugauagaggagaa

SEQ ID NO: 1785746 - RNA, 19 nt, Homo sapiens
  misc_RNA (1)...(19): siRNA sense strand
guacauccccaguuacuua

SEQ ID NO: 1785747 - RNA, 19 nt, Homo sapiens
  misc_RNA (1)...(19): siRNA sense strand
ccaggaaugucgcuuuaag

SEQ ID NO: 1785748 - RNA, 19 nt, Homo sapiens
  misc_RNA (1)...(19): siRNA sense strand
cugcaaggguuucuuuaga

SEQ ID NO: 1785749 - RNA, 19 nt, Homo sapiens
  misc_RNA (1)...(19): siRNA sense strand
cggaggagaagaaauguaa

SEQ ID NO: 1785750 - RNA, 19 nt, Homo sapiens
  misc_RNA (1)...(19): siRNA sense strand
ugccaggaaugucgcuuua

SEQ ID NO: 1785751 - RNA, 19 nt, Homo sapiens
  misc_RNA (1)...(19): siRNA sense strand
gagaggcgcagcacguuga

SEQ ID NO: 1785752 - RNA, 19 nt, Homo sapiens
  misc_RNA (1)...(19): siRNA sense strand
gggcuugccuguguugaga

SEQ ID NO: 1785753 - RNA, 19 nt, Homo sapiens
  misc_RNA (1)...(19): siRNA sense strand
ggugucagacgccaucuuu

SEQ ID NO: 1785754 - RNA, 19 nt, Homo sapiens
  misc_RNA (1)...(19): siRNA sense strand
cccagaagguggaaagguu

SEQ ID NO: 1785755 - RNA, 19 nt, Homo sapiens
  misc_RNA (1)...(19): siRNA sense strand
ccaguuacuuagacaagga

SEQ ID NO: 1785756 - RNA, 19 nt, Homo sapiens
  misc_RNA (1)...(19): siRNA sense strand
uggaaagguugacuuggaa

SEQ ID NO: 1785757 - RNA, 19 nt, Homo sapiens
  misc_RNA (1)...(19): siRNA sense strand
ggacaaaccgaagcacugu

SEQ ID NO: 1785758 - RNA, 19 nt, Homo sapiens
  misc_RNA (1)...(19): siRNA sense strand
uagacaaagucacgcgaaa

SEQ ID NO: 1785759 - RNA, 19 nt, Homo sapiens
  misc_RNA (1)...(19): siRNA sense strand
gacgagcucuguguagugu

SEQ ID NO: 1785760 - RNA, 19 nt, Homo sapiens
  misc_RNA (1)...(19): siRNA sense strand
ggccaaaacuccugaugaa

SEQ ID NO: 1785761 - RNA, 19 nt, Homo sapiens
  misc_RNA (1)...(19): siRNA sense strand
ccuuacagcuugggacaaa

SEQ ID NO: 1785762 - RNA, 19 nt, Homo sapiens
  misc_RNA (1)...(19): siRNA sense strand
ugaugaaggugacagaucu

SEQ ID NO: 1785763 - RNA, 19 nt, Homo sapiens
  misc_RNA (1)...(19): siRNA sense strand
gacaaagucacgcgaaauc

SEQ ID NO: 1785764 - RNA, 19 nt, Homo sapiens
  misc_RNA (1)...(19): siRNA sense strand
uguaguguguggugacaaa

SEQ ID NO: 1785765 - RNA, 19 nt, Homo sapiens
  misc_RNA (1)...(19): siRNA sense strand
ggaccaugaugaugugaac

SEQ ID NO: 1785766 - RNA, 19 nt, Homo sapiens
  misc_RNA (1)...(19): siRNA sense strand
gaaggaaaaugugucauag

SEQ ID NO: 1785767 - RNA, 19 nt, Homo sapiens
  misc_RNA (1)...(19): siRNA sense strand
cacuuggacuagcucaaua

SEQ ID NO: 1785768 - RNA, 19 nt, Homo sapiens
  misc_RNA (1)...(19): siRNA sense strand
ggcagccacuggaagcaaa

SEQ ID NO: 1785769 - RNA, 19 nt, Homo sapiens
  misc_RNA (1)...(19): siRNA sense strand
caaggacgagcucugugua

SEQ ID NO: 1785770 - RNA, 19 nt, Homo sapiens
  misc_RNA (1)...(19): siRNA sense strand
gaccagagugucucaagug

SEQ ID NO: 1785771 - RNA, 19 nt, Homo sapiens
  misc_RNA (1)...(19): siRNA sense strand
gaacgaccagagugucuca

SEQ ID NO: 1785772 - RNA, 19 nt, Homo sapiens
  misc_RNA (1)...(19): siRNA sense strand
ggacgagcucuguguagug

SEQ ID NO: 1785773 - RNA, 19 nt, Homo sapiens
  misc_RNA (1)...(19): siRNA sense strand
gcacuguccagaccgagaa

SEQ ID NO: 1785774 - RNA, 19 nt, Homo sapiens
  misc_RNA (1)...(19): siRNA sense strand
gaccuaggcaugucucugu

SEQ ID NO: 1785775 - RNA, 19 nt, Homo sapiens
  misc_RNA (1)...(19): siRNA sense strand
ugucagacgccaucuuuga

SEQ ID NO: 1785776 - RNA, 19 nt, Homo sapiens
  misc_RNA (1)...(19): siRNA sense strand
cuacauaggaagagccauu

SEQ ID NO: 1785777 - RNA, 19 nt, Homo sapiens
  misc_RNA (1)...(19): siRNA sense strand
ccaagaggaagcugauaga

SEQ ID NO: 1785778 - RNA, 19 nt, Homo sapiens
  misc_RNA (1)...(19): siRNA sense strand
aagaaaugcaucuauguug

SEQ ID NO: 1785779 - RNA, 19 nt, Homo sapiens
  misc_RNA (1)...(19): siRNA sense strand
aaucaucacaccagcaauu

SEQ ID NO: 1785780 - RNA, 19 nt, Homo sapiens
  misc_RNA (1)...(19): siRNA sense strand
gaggagaagaaauguaaag

SEQ ID NO: 1785781 - RNA, 19 nt, Homo sapiens
  misc_RNA (1)...(19): siRNA sense strand
aggaagagccauucagaga

SEQ ID NO: 1785782 - RNA, 19 nt, Homo sapiens
  misc_RNA (1)...(19): siRNA sense strand
ccagaucauccuccucaaa

SEQ ID NO: 1785783 - RNA, 19 nt, Homo sapiens
  misc_RNA (1)...(19): siRNA sense strand
gaagcuaguaggaaugucu

SEQ ID NO: 1785784 - RNA, 19 nt, Homo sapiens
  misc_RNA (1)...(19): siRNA sense strand
caccagcaauuaccagagu

SEQ ID NO: 1785785 - RNA, 19 nt, Homo sapiens
  misc_RNA (1)...(19): siRNA sense strand
cgaccagagugucucaagu

SEQ ID NO: 1785786 - RNA, 19 nt, Homo sapiens
  misc_RNA (1)...(19): siRNA sense strand
agugagacuuuaaccuuga

SEQ ID NO: 1785787 - RNA, 19 nt, Homo sapiens
  misc_RNA (1)...(19): siRNA sense strand
ggaggagaagaaauguaaa

SEQ ID NO: 1785788 - RNA, 19 nt, Homo sapiens
  misc_RNA (1)...(19): siRNA sense strand
gaaaacaccacgugacaca

SEQ ID NO: 1785789 - RNA, 19 nt, Homo sapiens
  misc_RNA (1)...(19): siRNA sense strand
cauccauccuauuccugua

SEQ ID NO: 1785790 - RNA, 19 nt, Homo sapiens
  misc_RNA (1)...(19): siRNA sense strand
cgagcucuguguagugugu

SEQ ID NO: 1785791 - RNA, 19 nt, Homo sapiens
  misc_RNA (1)...(19): siRNA sense strand
gacaagcaccaauagucaa

SEQ ID NO: 1785792 - RNA, 19 nt, Homo sapiens
  misc_RNA (1)...(19): siRNA sense strand
gaauagaaaaguaccaaga

SEQ ID NO: 1785793 - RNA, 19 nt, Homo sapiens
  misc_RNA (1)...(19): siRNA sense strand
aggaaugucgcuuuaagaa

SEQ ID NO: 1785794 - RNA, 19 nt, Homo sapiens
  misc_RNA (1)...(19): siRNA sense strand
acuggaagcuaguaggaau

SEQ ID NO: 1785795 - RNA, 19 nt, Homo sapiens
  misc_RNA (1)...(19): siRNA sense strand
ccaaacggaggagaagaaa

SEQ ID NO: 1785796 - RNA, 19 nt, Homo sapiens
  misc_RNA (1)...(19): siRNA sense strand
gcuggccuuugaacacuau

SEQ ID NO: 1785797 - RNA, 19 nt, Homo sapiens
  misc_RNA (1)...(19): siRNA sense strand
gugagacuuuaaccuugaa

SEQ ID NO: 1785798 - RNA, 19 nt, Homo sapiens
  misc_RNA (1)...(19): siRNA sense strand
agaagacauuggacaagca

SEQ ID NO: 1785799 - RNA, 19 nt, Homo sapiens
  misc_RNA (1)...(19): siRNA sense strand
uuagaagaaccauucagaa

SEQ ID NO: 1785800 - RNA, 19 nt, Homo sapiens
  misc_RNA (1)...(19): siRNA sense strand
aaggguacauccccaguua

SEQ ID NO: 1785801 - RNA, 19 nt, Homo sapiens
  misc_RNA (1)...(19): siRNA sense strand
uggacuagcucaauauucc

SEQ ID NO: 1785802 - RNA, 19 nt, Homo sapiens
  misc_RNA (1)...(19): siRNA sense strand
gaaaaguaccaagauaguu

SEQ ID NO: 1785803 - RNA, 19 nt, Homo sapiens
  misc_RNA (1)...(19): siRNA sense strand
cagaucauccuccucaaag

SEQ ID NO: 1785804 - RNA, 19 nt, Homo sapiens
  misc_RNA (1)...(19): siRNA sense strand
ccacuuggacuagcucaau

SEQ ID NO: 1785805 - RNA, 19 nt, Homo sapiens
  misc_RNA (1)...(19): siRNA sense strand
ugaaggaaaaugugucaua

SEQ ID NO: 1785806 - RNA, 19 nt, Homo sapiens
  misc_RNA (1)...(19): siRNA sense strand
gccagaagacauuggacaa

SEQ ID NO: 1785807 - RNA, 19 nt, Homo sapiens
  misc_RNA (1)...(19): siRNA sense strand
cgacuggaagcuaguagga

SEQ ID NO: 1785808 - RNA, 19 nt, Homo sapiens
  misc_RNA (1)...(19): siRNA sense strand
uggcauggcaacagauuug

SEQ ID NO: 1785809 - RNA, 19 nt, Homo sapiens
  misc_RNA (1)...(19): siRNA sense strand
aaaucuccauccauccuau

SEQ ID NO: 1785810 - RNA, 19 nt, Homo sapiens
  misc_RNA (1)...(19): siRNA sense strand
gccaagaggaagcugauag

SEQ ID NO: 1785811 - RNA, 19 nt, Homo sapiens
  misc_RNA (1)...(19): siRNA sense strand
uaucacuaccgcuguauca

SEQ ID NO: 1785812 - RNA, 19 nt, Homo sapiens
  misc_RNA (1)...(19): siRNA sense strand
ggaaguguucgaggauuag

SEQ ID NO: 1785813 - RNA, 19 nt, Homo sapiens
  misc_RNA (1)...(19): siRNA sense strand
gcacaugaagguggaaugc

SEQ ID NO: 1785814 - RNA, 19 nt, Homo sapiens
  misc_RNA (1)...(19): siRNA sense strand
gacagaaaauggccuuaca

SEQ ID NO: 1785815 - RNA, 19 nt, Homo sapiens
  misc_RNA (1)...(19): siRNA sense strand
caggaaugucgcuuuaaga

SEQ ID NO: 1785816 - RNA, 19 nt, Homo sapiens
  misc_RNA (1)...(19): siRNA sense strand
caaagucacgcgaaaucag

SEQ ID NO: 1785817 - RNA, 19 nt, Homo sapiens
  misc_RNA (1)...(19): siRNA sense strand
caaaacuccugaugaaggu

SEQ ID NO: 1785818 - RNA, 19 nt, Homo sapiens
  misc_RNA (1)...(19): siRNA sense strand
gcugcaaggguuucuuuag

SEQ ID NO: 1785819 - RNA, 19 nt, Homo sapiens
  misc_RNA (1)...(19): siRNA sense strand
gcuugccuguguugagaga

SEQ ID NO: 1785820 - RNA, 19 nt, Homo sapiens
  misc_RNA (1)...(19): siRNA sense strand
cuaggcaugucucugucuu

SEQ ID NO: 1785821 - RNA, 19 nt, Homo sapiens
  misc_RNA (1)...(19): siRNA sense strand
gaggagaaccgggagaaaa

SEQ ID NO: 1785822 - RNA, 19 nt, Homo sapiens
  misc_RNA (1)...(19): siRNA sense strand
gaaugggagcucaucaaaa

SEQ ID NO: 1785823 - RNA, 19 nt, Homo sapiens
  misc_RNA (1)...(19): siRNA sense strand
gaaacaggaucaacgauaa

SEQ ID NO: 1785824 - RNA, 19 nt, Homo sapiens
  misc_RNA (1)...(19): siRNA sense strand
gaucaacgauaaccagaaa

SEQ ID NO: 1785825 - RNA, 19 nt, Homo sapiens
  misc_RNA (1)...(19): siRNA sense strand
ggaaggugcuggccauuga

SEQ ID NO: 1785826 - RNA, 19 nt, Homo sapiens
  misc_RNA (1)...(19): siRNA sense strand
agaagaagaugaagaagaa

SEQ ID NO: 1785827 - RNA, 19 nt, Homo sapiens
  misc_RNA (1)...(19): siRNA sense strand
ggaagaagcagcuguugaa

SEQ ID NO: 1785828 - RNA, 19 nt, Homo sapiens
  misc_RNA (1)...(19): siRNA sense strand
gcagaaauaugagaucaau

SEQ ID NO: 1785829 - RNA, 19 nt, Homo sapiens
  misc_RNA (1)...(19): siRNA sense strand
ggaaugagcgggagaagga

SEQ ID NO: 1785830 - RNA, 19 nt, Homo sapiens
  misc_RNA (1)...(19): siRNA sense strand
gagagagaguggacuuuga

SEQ ID NO: 1785831 - RNA, 19 nt, Homo sapiens
  misc_RNA (1)...(19): siRNA sense strand
agaaggaccugaaugaguu

SEQ ID NO: 1785832 - RNA, 19 nt, Homo sapiens
  misc_RNA (1)...(19): siRNA sense strand
uagaagaggugguggaaga

SEQ ID NO: 1785833 - RNA, 19 nt, Homo sapiens
  misc_RNA (1)...(19): siRNA sense strand
ggaggaaggcugaggauga

SEQ ID NO: 1785834 - RNA, 19 nt, Homo sapiens
  misc_RNA (1)...(19): siRNA sense strand
ucaagcagcagaaauauga

SEQ ID NO: 1785835 - RNA, 19 nt, Homo sapiens
  misc_RNA (1)...(19): siRNA sense strand
ggagcucguuucucucaaa

SEQ ID NO: 1785836 - RNA, 19 nt, Homo sapiens
  misc_RNA (1)...(19): siRNA sense strand
cgaaacaggaucaacgaua

SEQ ID NO: 1785837 - RNA, 19 nt, Homo sapiens
  misc_RNA (1)...(19): siRNA sense strand
ggaagcgcauggagaagga

SEQ ID NO: 1785838 - RNA, 19 nt, Homo sapiens
  misc_RNA (1)...(19): siRNA sense strand
agaagcagcuguugaagag

SEQ ID NO: 1785839 - RNA, 19 nt, Homo sapiens
  misc_RNA (1)...(19): siRNA sense strand
gcagagcaucuauaacuug

SEQ ID NO: 1785840 - RNA, 19 nt, Homo sapiens
  misc_RNA (1)...(19): siRNA sense strand
gagaaggaccugaaugagu

SEQ ID NO: 1785841 - RNA, 19 nt, Homo sapiens
  misc_RNA (1)...(19): siRNA sense strand
uguccaacaugaugcauuu

SEQ ID NO: 1785842 - RNA, 19 nt, Homo sapiens
  misc_RNA (1)...(19): siRNA sense strand
ggaagaagaaggcuuuguc

SEQ ID NO: 1785843 - RNA, 19 nt, Homo sapiens
  misc_RNA (1)...(19): siRNA sense strand
ggagagagaguggacuuug

SEQ ID NO: 1785844 - RNA, 19 nt, Homo sapiens
  misc_RNA (1)...(19): siRNA sense strand
ggcagagcaucuauaacuu

SEQ ID NO: 1785845 - RNA, 19 nt, Homo sapiens
  misc_RNA (1)...(19): siRNA sense strand
cagcagaaauaugagauca

SEQ ID NO: 1785846 - RNA, 19 nt, Homo sapiens
  misc_RNA (1)...(19): siRNA sense strand
gaccagggcagaagaagau

SEQ ID NO: 1785847 - RNA, 19 nt, Homo sapiens
  misc_RNA (1)...(19): siRNA sense strand
gaggaaggcugaggaugag

SEQ ID NO: 1785848 - RNA, 19 nt, Homo sapiens
  misc_RNA (1)...(19): siRNA sense strand
gcaggaagaagcagcuguu

SEQ ID NO: 1785849 - RNA, 19 nt, Homo sapiens
  misc_RNA (1)...(19): siRNA sense strand
ggcagaagaagaugaagaa

SEQ ID NO: 1785850 - RNA, 19 nt, Homo sapiens
  misc_RNA (1)...(19): siRNA sense strand
cagaagaagaugaagaaga

SEQ ID NO: 1785851 - RNA, 19 nt, Homo sapiens
  misc_RNA (1)...(19): siRNA sense strand
gaucaauguucuccgaaac

SEQ ID NO: 1785852 - RNA, 19 nt, Homo sapiens
  misc_RNA (1)...(19): siRNA sense strand
gaggagcucguuucucuca

SEQ ID NO: 1785853 - RNA, 19 nt, Homo sapiens
  misc_RNA (1)...(19): siRNA sense strand
aagaggugguggaagagua

SEQ ID NO: 1785854 - RNA, 19 nt, Homo sapiens
  misc_RNA (1)...(19): siRNA sense strand
aggaggagcucguuucucu

SEQ ID NO: 1785855 - RNA, 19 nt, Homo sapiens
  misc_RNA (1)...(19): siRNA sense strand
gaaguucaagcagcagaaa

SEQ ID NO: 1785856 - RNA, 19 nt, Homo sapiens
  misc_RNA (1)...(19): siRNA sense strand
aagaucagcugagggagaa

SEQ ID NO: 1785857 - RNA, 19 nt, Homo sapiens
  misc_RNA (1)...(19): siRNA sense strand
agaagaaggcuuuguccaa

SEQ ID NO: 1785858 - RNA, 19 nt, Homo sapiens
  misc_RNA (1)...(19): siRNA sense strand
ggcugaagauggcccaaug

SEQ ID NO: 1785859 - RNA, 19 nt, Homo sapiens
  misc_RNA (1)...(19): siRNA sense strand
gaaaagaagaagaagauuc

SEQ ID NO: 1785860 - RNA, 19 nt, Homo sapiens
  misc_RNA (1)...(19): siRNA sense strand
ggucguucaugcccaacuu

SEQ ID NO: 1785861 - RNA, 19 nt, Homo sapiens
  misc_RNA (1)...(19): siRNA sense strand
gacgagaggaggaggagaa

SEQ ID NO: 1785862 - RNA, 19 nt, Homo sapiens
  misc_RNA (1)...(19): siRNA sense strand
cagcagcgcauccggaaug

SEQ ID NO: 1785863 - RNA, 19 nt, Homo sapiens
  misc_RNA (1)...(19): siRNA sense strand
ggaggcagcggaagaggau

SEQ ID NO: 1785864 - RNA, 19 nt, Homo sapiens
  misc_RNA (1)...(19): siRNA sense strand
uggagaaggaccugaauga

SEQ ID NO: 1785865 - RNA, 19 nt, Homo sapiens
  misc_RNA (1)...(19): siRNA sense strand
gcaaaggaggcugaagaug

SEQ ID NO: 1785866 - RNA, 19 nt, Homo sapiens
  misc_RNA (1)...(19): siRNA sense strand
gcucguuucucucaaagac

SEQ ID NO: 1785867 - RNA, 19 nt, Homo sapiens
  misc_RNA (1)...(19): siRNA sense strand
gcauggagaaggaccugaa

SEQ ID NO: 1785868 - RNA, 19 nt, Homo sapiens
  misc_RNA (1)...(19): siRNA sense strand
ggagaccagggcagaagaa

SEQ ID NO: 1785869 - RNA, 19 nt, Homo sapiens
  misc_RNA (1)...(19): siRNA sense strand
gggcagaagaagaugaaga

SEQ ID NO: 1785870 - RNA, 19 nt, Homo sapiens
  misc_RNA (1)...(19): siRNA sense strand
aagcaaaggaggcugaaga

SEQ ID NO: 1785871 - RNA, 19 nt, Homo sapiens
  misc_RNA (1)...(19): siRNA sense strand
ccaaagcccaggucguuca

SEQ ID NO: 1785872 - RNA, 19 nt, Homo sapiens
  misc_RNA (1)...(19): siRNA sense strand
ggaggaguccaaaccaaag

SEQ ID NO: 1785873 - RNA, 19 nt, Homo sapiens
  misc_RNA (1)...(19): siRNA sense strand
agaucaauguucuccgaaa

SEQ ID NO: 1785874 - RNA, 19 nt, Homo sapiens
  misc_RNA (1)...(19): siRNA sense strand
gagcucguuucucucaaag

SEQ ID NO: 1785875 - RNA, 19 nt, Homo sapiens
  misc_RNA (1)...(19): siRNA sense strand
gaaggaccugaaugaguug

SEQ ID NO: 1785876 - RNA, 19 nt, Homo sapiens
  misc_RNA (1)...(19): siRNA sense strand
ggaggaggagcaggaagaa

SEQ ID NO: 1785877 - RNA, 19 nt, Homo sapiens
  misc_RNA (1)...(19): siRNA sense strand
uggcagagcaucuauaacu

SEQ ID NO: 1785878 - RNA, 19 nt, Homo sapiens
  misc_RNA (1)...(19): siRNA sense strand
aagaagaagaggaagcaaa

SEQ ID NO: 1785879 - RNA, 19 nt, Homo sapiens
  misc_RNA (1)...(19): siRNA sense strand
gaguggacuuugaugacau

SEQ ID NO: 1785880 - RNA, 19 nt, Homo sapiens
  misc_RNA (1)...(19): siRNA sense strand
agaaccgccuggcugaaga

SEQ ID NO: 1785881 - RNA, 19 nt, Homo sapiens
  misc_RNA (1)...(19): siRNA sense strand
ggaucaacgauaaccagaa

SEQ ID NO: 1785882 - RNA, 19 nt, Homo sapiens
  misc_RNA (1)...(19): siRNA sense strand
uaacuuggaggcagagaag

SEQ ID NO: 1785883 - RNA, 19 nt, Homo sapiens
  misc_RNA (1)...(19): siRNA sense strand
gagaggaggaggagaacag

SEQ ID NO: 1785884 - RNA, 19 nt, Homo sapiens
  misc_RNA (1)...(19): siRNA sense strand
caaagacaggaucgagaga

SEQ ID NO: 1785885 - RNA, 19 nt, Homo sapiens
  misc_RNA (1)...(19): siRNA sense strand
aguucaagcagcagaaaua

SEQ ID NO: 1785886 - RNA, 19 nt, Homo sapiens
  misc_RNA (1)...(19): siRNA sense strand
uguggcagagcaucuauaa

SEQ ID NO: 1785887 - RNA, 19 nt, Homo sapiens
  misc_RNA (1)...(19): siRNA sense strand
gugggaagaggcagacuga

SEQ ID NO: 1785888 - RNA, 19 nt, Homo sapiens
  misc_RNA (1)...(19): siRNA sense strand
agaagcaggcccagacaga

SEQ ID NO: 1785889 - RNA, 19 nt, Homo sapiens
  misc_RNA (1)...(19): siRNA sense strand
gaagaagcagcuguugaag

SEQ ID NO: 1785890 - RNA, 19 nt, Homo sapiens
  misc_RNA (1)...(19): siRNA sense strand
agaagaagaggaagcaaag

SEQ ID NO: 1785891 - RNA, 19 nt, Homo sapiens
  misc_RNA (1)...(19): siRNA sense strand
gagaguggacuuugaugac

SEQ ID NO: 1785892 - RNA, 19 nt, Homo sapiens
  misc_RNA (1)...(19): siRNA sense strand
ugagggagaaggccaagga

SEQ ID NO: 1785893 - RNA, 19 nt, Homo sapiens
  misc_RNA (1)...(19): siRNA sense strand
aagaaggcuuuguccaaca

SEQ ID NO: 1785894 - RNA, 19 nt, Homo sapiens
  misc_RNA (1)...(19): siRNA sense strand
ggagaaggaccugaaugag

SEQ ID NO: 1785895 - RNA, 19 nt, Homo sapiens
  misc_RNA (1)...(19): siRNA sense strand
agaguggacuuugaugaca

SEQ ID NO: 1785896 - RNA, 19 nt, Homo sapiens
  misc_RNA (1)...(19): siRNA sense strand
aagaagcagcuguugaaga

SEQ ID NO: 1785897 - RNA, 19 nt, Homo sapiens
  misc_RNA (1)...(19): siRNA sense strand
agaaggcuuuguccaacau

SEQ ID NO: 1785898 - RNA, 19 nt, Homo sapiens
  misc_RNA (1)...(19): siRNA sense strand
aagaagaggaagcaaagga

SEQ ID NO: 1785899 - RNA, 19 nt, Homo sapiens
  misc_RNA (1)...(19): siRNA sense strand
ggaggaggagcucguuucu

SEQ ID NO: 1785900 - RNA, 19 nt, Homo sapiens
  misc_RNA (1)...(19): siRNA sense strand
gaggaggaggagcucguuu

SEQ ID NO: 1785901 - RNA, 19 nt, Homo sapiens
  misc_RNA (1)...(19): siRNA sense strand
gaagaagaagaggaagcaa

SEQ ID NO: 1785902 - RNA, 19 nt, Homo sapiens
  misc_RNA (1)...(19): siRNA sense strand
cauagaagaggugguggaa

SEQ ID NO: 1785903 - RNA, 19 nt, Homo sapiens
  misc_RNA (1)...(19): siRNA sense strand
aaccaaagcccaggucguu

SEQ ID NO: 1785904 - RNA, 19 nt, Homo sapiens
  misc_RNA (1)...(19): siRNA sense strand
uugaccaccugaaugaaga

SEQ ID NO: 1785905 - RNA, 19 nt, Homo sapiens
  misc_RNA (1)...(19): siRNA sense strand
gaagaggugguggaagagu

SEQ ID NO: 1785906 - RNA, 19 nt, Homo sapiens
  misc_RNA (1)...(19): siRNA sense strand
gggaaaagaagaagaagau

SEQ ID NO: 1785907 - RNA, 19 nt, Homo sapiens
  misc_RNA (1)...(19): siRNA sense strand
gagagaguggacuuugaug

SEQ ID NO: 1785908 - RNA, 19 nt, Homo sapiens
  misc_RNA (1)...(19): siRNA sense strand
guucaagcagcagaaauau

SEQ ID NO: 1785909 - RNA, 19 nt, Homo sapiens
  misc_RNA (1)...(19): siRNA sense strand
agaugaagaagaagaggaa

SEQ ID NO: 1785910 - RNA, 19 nt, Homo sapiens
  misc_RNA (1)...(19): siRNA sense strand
ucaacgauaaccagaaagu

SEQ ID NO: 1785911 - RNA, 19 nt, Homo sapiens
  misc_RNA (1)...(19): siRNA sense strand
agagaguggacuuugauga

SEQ ID NO: 1785912 - RNA, 19 nt, Homo sapiens
  misc_RNA (1)...(19): siRNA sense strand
agacugagcgggaaaagaa

SEQ ID NO: 1785913 - RNA, 19 nt, Homo sapiens
  misc_RNA (1)...(19): siRNA sense strand
gcagaaccgccuggcugaa

SEQ ID NO: 1785914 - RNA, 19 nt, Homo sapiens
  misc_RNA (1)...(19): siRNA sense strand
aagaagaugaagaagaaga

SEQ ID NO: 1785915 - RNA, 19 nt, Homo sapiens
  misc_RNA (1)...(19): siRNA sense strand
gggagaaggagcggcagaa

SEQ ID NO: 1785916 - RNA, 19 nt, Homo sapiens
  misc_RNA (1)...(19): siRNA sense strand
ggaggagcaggaagaagca

SEQ ID NO: 1785917 - RNA, 19 nt, Homo sapiens
  misc_RNA (1)...(19): siRNA sense strand
ggccauugaccaccugaau

SEQ ID NO: 1785918 - RNA, 19 nt, Homo sapiens
  misc_RNA (1)...(19): siRNA sense strand
ugaagaagaagaggaagca

SEQ ID NO: 1785919 - RNA, 19 nt, Homo sapiens
  misc_RNA (1)...(19): siRNA sense strand
gcagcagaaauaugagauc

SEQ ID NO: 1785920 - RNA, 19 nt, Homo sapiens
  misc_RNA (1)...(19): siRNA sense strand
gaggagaccagggcagaag

SEQ ID NO: 1785921 - RNA, 19 nt, Homo sapiens
  misc_RNA (1)...(19): siRNA sense strand
ggaagcaaaggaggcugaa

SEQ ID NO: 1785922 - RNA, 19 nt, Homo sapiens
  misc_RNA (1)...(19): siRNA sense strand
gcagcaaaguucuuauuua

SEQ ID NO: 1785923 - RNA, 19 nt, Homo sapiens
  misc_RNA (1)...(19): siRNA sense strand
gaagauugcugcuguacuu

SEQ ID NO: 1785924 - RNA, 19 nt, Homo sapiens
  misc_RNA (1)...(19): siRNA sense strand
ggaauaugguggugaagaa

SEQ ID NO: 1785925 - RNA, 19 nt, Homo sapiens
  misc_RNA (1)...(19): siRNA sense strand
gggaacaacuacaaacaaa

SEQ ID NO: 1785926 - RNA, 19 nt, Homo sapiens
  misc_RNA (1)...(19): siRNA sense strand
agaaauaagugcagaucua

SEQ ID NO: 1785927 - RNA, 19 nt, Homo sapiens
  misc_RNA (1)...(19): siRNA sense strand
ggaauggaaucaaggcuau

SEQ ID NO: 1785928 - RNA, 19 nt, Homo sapiens
  misc_RNA (1)...(19): siRNA sense strand
gcaaaguucuuauuuacag

SEQ ID NO: 1785929 - RNA, 19 nt, Homo sapiens
  misc_RNA (1)...(19): siRNA sense strand
cagcaaaguucuuauuuac

SEQ ID NO: 1785930 - RNA, 19 nt, Homo sapiens
  misc_RNA (1)...(19): siRNA sense strand
caagaagauugcugcugua

SEQ ID NO: 1785931 - RNA, 19 nt, Homo sapiens
  misc_RNA (1)...(19): siRNA sense strand
agcagaauguccagaaaua

SEQ ID NO: 1785932 - RNA, 19 nt, Homo sapiens
  misc_RNA (1)...(19): siRNA sense strand
cauccgagcuuauuguaca

SEQ ID NO: 1785933 - RNA, 19 nt, Homo sapiens
  misc_RNA (1)...(19): siRNA sense strand
gauuaucucagcagcauuu

SEQ ID NO: 1785934 - RNA, 19 nt, Homo sapiens
  misc_RNA (1)...(19): siRNA sense strand
gcagaauguccagaaauaa

SEQ ID NO: 1785935 - RNA, 19 nt, Homo sapiens
  misc_RNA (1)...(19): siRNA sense strand
cuaaucacauccgagcuua

SEQ ID NO: 1785936 - RNA, 19 nt, Homo sapiens
  misc_RNA (1)...(19): siRNA sense strand
ugacguauuucgaguaagu

SEQ ID NO: 1785937 - RNA, 19 nt, Homo sapiens
  misc_RNA (1)...(19): siRNA sense strand
uaugacguauuucgaguaa

SEQ ID NO: 1785938 - RNA, 19 nt, Homo sapiens
  misc_RNA (1)...(19): siRNA sense strand
gaguaagucuaaucacauc

SEQ ID NO: 1785939 - RNA, 19 nt, Homo sapiens
  misc_RNA (1)...(19): siRNA sense strand
gaaacucagcggaauggaa

SEQ ID NO: 1785940 - RNA, 19 nt, Homo sapiens
  misc_RNA (1)...(19): siRNA sense strand
gguagaaacucagcggaau

SEQ ID NO: 1785941 - RNA, 19 nt, Homo sapiens
  misc_RNA (1)...(19): siRNA sense strand
gaaaguucguggcauccau

SEQ ID NO: 1785942 - RNA, 19 nt, Homo sapiens
  misc_RNA (1)...(19): siRNA sense strand
ucaaaccauuccugacuga

SEQ ID NO: 1785943 - RNA, 19 nt, Homo sapiens
  misc_RNA (1)...(19): siRNA sense strand
gugaagaauucuccaugga

SEQ ID NO: 1785944 - RNA, 19 nt, Homo sapiens
  misc_RNA (1)...(19): siRNA sense strand
guauuucgaguaagucuaa

SEQ ID NO: 1785945 - RNA, 19 nt, Homo sapiens
  misc_RNA (1)...(19): siRNA sense strand
gaacaacuacaaacaaagc

SEQ ID NO: 1785946 - RNA, 19 nt, Homo sapiens
  misc_RNA (1)...(19): siRNA sense strand
ggaaucaaggcuaucuuug

SEQ ID NO: 1785947 - RNA, 19 nt, Homo sapiens
  misc_RNA (1)...(19): siRNA sense strand
ccuaaaggcuggcuaccau

SEQ ID NO: 1785948 - RNA, 19 nt, Homo sapiens
  misc_RNA (1)...(19): siRNA sense strand
gaucaaaccauuccugacu

SEQ ID NO: 1785949 - RNA, 19 nt, Homo sapiens
  misc_RNA (1)...(19): siRNA sense strand
gcaguuuucucaugcuuuu

SEQ ID NO: 1785950 - RNA, 19 nt, Homo sapiens
  misc_RNA (1)...(19): siRNA sense strand
gaaauaagugcagaucuac

SEQ ID NO: 1785951 - RNA, 19 nt, Homo sapiens
  misc_RNA (1)...(19): siRNA sense strand
gagagcagaauguccagaa

SEQ ID NO: 1785952 - RNA, 19 nt, Homo sapiens
  misc_RNA (1)...(19): siRNA sense strand
gagcagaauguccagaaau

SEQ ID NO: 1785953 - RNA, 19 nt, Homo sapiens
  misc_RNA (1)...(19): siRNA sense strand
cagcauuucugagagcauu

SEQ ID NO: 1785954 - RNA, 19 nt, Homo sapiens
  misc_RNA (1)...(19): siRNA sense strand
cuacacccuagaaguauua

SEQ ID NO: 1785955 - RNA, 19 nt, Homo sapiens
  misc_RNA (1)...(19): siRNA sense strand
ggcagcaaaguucuuauuu

SEQ ID NO: 1785956 - RNA, 19 nt, Homo sapiens
  misc_RNA (1)...(19): siRNA sense strand
guucguggcauccauuuga

SEQ ID NO: 1785957 - RNA, 19 nt, Homo sapiens
  misc_RNA (1)...(19): siRNA sense strand
ucuggaagguuggcaguuu

SEQ ID NO: 1785958 - RNA, 19 nt, Homo sapiens
  misc_RNA (1)...(19): siRNA sense strand
uacaggagguagaaacuca

SEQ ID NO: 1785959 - RNA, 19 nt, Homo sapiens
  misc_RNA (1)...(19): siRNA sense strand
ggaucccacuggcagcaaa

SEQ ID NO: 1785960 - RNA, 19 nt, Homo sapiens
  misc_RNA (1)...(19): siRNA sense strand
ucgaguaagucuaaucaca

SEQ ID NO: 1785961 - RNA, 19 nt, Homo sapiens
  misc_RNA (1)...(19): siRNA sense strand
guacuuacggauucauuuc

SEQ ID NO: 1785962 - RNA, 19 nt, Homo sapiens
  misc_RNA (1)...(19): siRNA sense strand
aaacucagcggaauggaau

SEQ ID NO: 1785963 - RNA, 19 nt, Homo sapiens
  misc_RNA (1)...(19): siRNA sense strand
cacccuagaaguauuauug

SEQ ID NO: 1785964 - RNA, 19 nt, Homo sapiens
  misc_RNA (1)...(19): siRNA sense strand
uacagcuuaugacguauuu

SEQ ID NO: 1785965 - RNA, 19 nt, Homo sapiens
  misc_RNA (1)...(19): siRNA sense strand
ggaacggauucacaugcau

SEQ ID NO: 1785966 - RNA, 19 nt, Homo sapiens
  misc_RNA (1)...(19): siRNA sense strand
agagcagaauguccagaaa

SEQ ID NO: 1785967 - RNA, 19 nt, Homo sapiens
  misc_RNA (1)...(19): siRNA sense strand
aaaccauuccugacugaaa

SEQ ID NO: 1785968 - RNA, 19 nt, Homo sapiens
  misc_RNA (1)...(19): siRNA sense strand
gcaugggaacaacuacaaa

SEQ ID NO: 1785969 - RNA, 19 nt, Homo sapiens
  misc_RNA (1)...(19): siRNA sense strand
guagaaacucagcggaaug

SEQ ID NO: 1785970 - RNA, 19 nt, Homo sapiens
  misc_RNA (1)...(19): siRNA sense strand
uggaaucaaggcuaucuuu

SEQ ID NO: 1785971 - RNA, 19 nt, Homo sapiens
  misc_RNA (1)...(19): siRNA sense strand
gucaggaauggacaaauuu

SEQ ID NO: 1785972 - RNA, 19 nt, Homo sapiens
  misc_RNA (1)...(19): siRNA sense strand
gcauuucccagacauucuu

SEQ ID NO: 1785973 - RNA, 19 nt, Homo sapiens
  misc_RNA (1)...(19): siRNA sense strand
cagaauguccagaaauaag

SEQ ID NO: 1785974 - RNA, 19 nt, Homo sapiens
  misc_RNA (1)...(19): siRNA sense strand
aaucacauccgagcuuauu

SEQ ID NO: 1785975 - RNA, 19 nt, Homo sapiens
  misc_RNA (1)...(19): siRNA sense strand
gaauaugguggugaagaau

SEQ ID NO: 1785976 - RNA, 19 nt, Homo sapiens
  misc_RNA (1)...(19): siRNA sense strand
ucuggaauaugguggugaa

SEQ ID NO: 1785977 - RNA, 19 nt, Homo sapiens
  misc_RNA (1)...(19): siRNA sense strand
ggaacaacuacaaacaaag

SEQ ID NO: 1785978 - RNA, 19 nt, Homo sapiens
  misc_RNA (1)...(19): siRNA sense strand
gaauguccagaaauaagug

SEQ ID NO: 1785979 - RNA, 19 nt, Homo sapiens
  misc_RNA (1)...(19): siRNA sense strand
cguggcauccauuugauaa

SEQ ID NO: 1785980 - RNA, 19 nt, Homo sapiens
  misc_RNA (1)...(19): siRNA sense strand
cgaguaagucuaaucacau

SEQ ID NO: 1785981 - RNA, 19 nt, Homo sapiens
  misc_RNA (1)...(19): siRNA sense strand
ggcuaucuuugaucuggaa

SEQ ID NO: 1785982 - RNA, 19 nt, Homo sapiens
  misc_RNA (1)...(19): siRNA sense strand
ucacauccgagcuuauugu

SEQ ID NO: 1785983 - RNA, 19 nt, Homo sapiens
  misc_RNA (1)...(19): siRNA sense strand
uaaguggagagcagaaugu

SEQ ID NO: 1785984 - RNA, 19 nt, Homo sapiens
  misc_RNA (1)...(19): siRNA sense strand
cugcuguacuuacggauuc

SEQ ID NO: 1785985 - RNA, 19 nt, Homo sapiens
  misc_RNA (1)...(19): siRNA sense strand
ucacaugcaugggaacaac

SEQ ID NO: 1785986 - RNA, 19 nt, Homo sapiens
  misc_RNA (1)...(19): siRNA sense strand
acggauucauuuccauuga

SEQ ID NO: 1785987 - RNA, 19 nt, Homo sapiens
  misc_RNA (1)...(19): siRNA sense strand
uaaggaacggauucacaug

SEQ ID NO: 1785988 - RNA, 19 nt, Homo sapiens
  misc_RNA (1)...(19): siRNA sense strand
auaugguggugaagaauuc

SEQ ID NO: 1785989 - RNA, 19 nt, Homo sapiens
  misc_RNA (1)...(19): siRNA sense strand
uggcagcaaaguucuuauu

SEQ ID NO: 1785990 - RNA, 19 nt, Homo sapiens
  misc_RNA (1)...(19): siRNA sense strand
cacauccgagcuuauugua

SEQ ID NO: 1785991 - RNA, 19 nt, Homo sapiens
  misc_RNA (1)...(19): siRNA sense strand
aauaugguggugaagaauu

SEQ ID NO: 1785992 - RNA, 19 nt, Homo sapiens
  misc_RNA (1)...(19): siRNA sense strand
uuaaggaacggauucacau

SEQ ID NO: 1785993 - RNA, 19 nt, Homo sapiens
  misc_RNA (1)...(19): siRNA sense strand
ucagcggaauggaaucaag

SEQ ID NO: 1785994 - RNA, 19 nt, Homo sapiens
  misc_RNA (1)...(19): siRNA sense strand
uuuuacagcuuaugacgua

SEQ ID NO: 1785995 - RNA, 19 nt, Homo sapiens
  misc_RNA (1)...(19): siRNA sense strand
uaucucagcagcauuucug

SEQ ID NO: 1785996 - RNA, 19 nt, Homo sapiens
  misc_RNA (1)...(19): siRNA sense strand
cagcauuucccagacauuc

SEQ ID NO: 1785997 - RNA, 19 nt, Homo sapiens
  misc_RNA (1)...(19): siRNA sense strand
ccagaaauaagugcagauc

SEQ ID NO: 1785998 - RNA, 19 nt, Homo sapiens
  misc_RNA (1)...(19): siRNA sense strand
gaacaaagaugugaaauuc

SEQ ID NO: 1785999 - RNA, 19 nt, Homo sapiens
  misc_RNA (1)...(19): siRNA sense strand
gaagaugacuggaagaauu

SEQ ID NO: 1786000 - RNA, 19 nt, Homo sapiens
  misc_RNA (1)...(19): siRNA sense strand
ggaauggacuugaagaauu

SEQ ID NO: 1786001 - RNA, 19 nt, Homo sapiens
  misc_RNA (1)...(19): siRNA sense strand
gaaauuaacagacaaguug

SEQ ID NO: 1786002 - RNA, 19 nt, Homo sapiens
  misc_RNA (1)...(19): siRNA sense strand
ggacaagauugguggguua

SEQ ID NO: 1786003 - RNA, 19 nt, Homo sapiens
  misc_RNA (1)...(19): siRNA sense strand
ucaaggaguucacauauuu

SEQ ID NO: 1786004 - RNA, 19 nt, Homo sapiens
  misc_RNA (1)...(19): siRNA sense strand
gaugugaaauucuguguaa

SEQ ID NO: 1786005 - RNA, 19 nt, Homo sapiens
  misc_RNA (1)...(19): siRNA sense strand
ccaaauuguugcacuaaua

SEQ ID NO: 1786006 - RNA, 19 nt, Homo sapiens
  misc_RNA (1)...(19): siRNA sense strand
ggagagaguugacuguaaa

SEQ ID NO: 1786007 - RNA, 19 nt, Homo sapiens
  misc_RNA (1)...(19): siRNA sense strand
gaacaaugccaucaaauau

SEQ ID NO: 1786008 - RNA, 19 nt, Homo sapiens
  misc_RNA (1)...(19): siRNA sense strand
uccaagaucucuaaaguua

SEQ ID NO: 1786009 - RNA, 19 nt, Homo sapiens
  misc_RNA (1)...(19): siRNA sense strand
gaacaaagagaucaacuga

SEQ ID NO: 1786010 - RNA, 19 nt, Homo sapiens
  misc_RNA (1)...(19): siRNA sense strand
gaauggacuugaagaauug

SEQ ID NO: 1786011 - RNA, 19 nt, Homo sapiens
  misc_RNA (1)...(19): siRNA sense strand
ggaagagacuaaauauaga

SEQ ID NO: 1786012 - RNA, 19 nt, Homo sapiens
  misc_RNA (1)...(19): siRNA sense strand
gcaaguuuauggacuauga

SEQ ID NO: 1786013 - RNA, 19 nt, Homo sapiens
  misc_RNA (1)...(19): siRNA sense strand
gcagaagacuacaauacaa

SEQ ID NO: 1786014 - RNA, 19 nt, Homo sapiens
  misc_RNA (1)...(19): siRNA sense strand
ccaagcaacuucagucaaa

SEQ ID NO: 1786015 - RNA, 19 nt, Homo sapiens
  misc_RNA (1)...(19): siRNA sense strand
gaaucaagcuauagaagug

SEQ ID NO: 1786016 - RNA, 19 nt, Homo sapiens
  misc_RNA (1)...(19): siRNA sense strand
gagcccagcuuuacuguga

SEQ ID NO: 1786017 - RNA, 19 nt, Homo sapiens
  misc_RNA (1)...(19): siRNA sense strand
gccaagaacuuacacaaga

SEQ ID NO: 1786018 - RNA, 19 nt, Homo sapiens
  misc_RNA (1)...(19): siRNA sense strand
gaucaggugucacgucuug

SEQ ID NO: 1786019 - RNA, 19 nt, Homo sapiens
  misc_RNA (1)...(19): siRNA sense strand
ccaguuaccugccaaguau

SEQ ID NO: 1786020 - RNA, 19 nt, Homo sapiens
  misc_RNA (1)...(19): siRNA sense strand
gaaauggaaccucuucuga

SEQ ID NO: 1786021 - RNA, 19 nt, Homo sapiens
  misc_RNA (1)...(19): siRNA sense strand
gcuggaaacugacaccaaa

SEQ ID NO: 1786022 - RNA, 19 nt, Homo sapiens
  misc_RNA (1)...(19): siRNA sense strand
caaagcaacagcaaaguaa

SEQ ID NO: 1786023 - RNA, 19 nt, Homo sapiens
  misc_RNA (1)...(19): siRNA sense strand
gggaaucacugaaucuaau

SEQ ID NO: 1786024 - RNA, 19 nt, Homo sapiens
  misc_RNA (1)...(19): siRNA sense strand
agaaaggaaugaugaaaga

SEQ ID NO: 1786025 - RNA, 19 nt, Homo sapiens
  misc_RNA (1)...(19): siRNA sense strand
cuacauccuuuacuuguuu

SEQ ID NO: 1786026 - RNA, 19 nt, Homo sapiens
  misc_RNA (1)...(19): siRNA sense strand
gcauguagcuaaagaaacu

SEQ ID NO: 1786027 - RNA, 19 nt, Homo sapiens
  misc_RNA (1)...(19): siRNA sense strand
gaagagaccagaaaggaau

SEQ ID NO: 1786028 - RNA, 19 nt, Homo sapiens
  misc_RNA (1)...(19): siRNA sense strand
gggcagauaucaguauuau

SEQ ID NO: 1786029 - RNA, 19 nt, Homo sapiens
  misc_RNA (1)...(19): siRNA sense strand
ugccaaguauccagaauua

SEQ ID NO: 1786030 - RNA, 19 nt, Homo sapiens
  misc_RNA (1)...(19): siRNA sense strand
caagaucucuaaaguuaca

SEQ ID NO: 1786031 - RNA, 19 nt, Homo sapiens
  misc_RNA (1)...(19): siRNA sense strand
ggaacaaagaugugaaauu

SEQ ID NO: 1786032 - RNA, 19 nt, Homo sapiens
  misc_RNA (1)...(19): siRNA sense strand
caucaucaguagcaaguuu

SEQ ID NO: 1786033 - RNA, 19 nt, Homo sapiens
  misc_RNA (1)...(19): siRNA sense strand
gaaguuaggcagauacuca

SEQ ID NO: 1786034 - RNA, 19 nt, Homo sapiens
  misc_RNA (1)...(19): siRNA sense strand
ccaaagcaaucuguaaaga

SEQ ID NO: 1786035 - RNA, 19 nt, Homo sapiens
  misc_RNA (1)...(19): siRNA sense strand
cagcugaugucucuuguug

SEQ ID NO: 1786036 - RNA, 19 nt, Homo sapiens
  misc_RNA (1)...(19): siRNA sense strand
gugaggaaauugacuuuau

SEQ ID NO: 1786037 - RNA, 19 nt, Homo sapiens
  misc_RNA (1)...(19): siRNA sense strand
guagcaaguuuauggacua

SEQ ID NO: 1786038 - RNA, 19 nt, Homo sapiens
  misc_RNA (1)...(19): siRNA sense strand
gaacuuacacaagaacaaa

SEQ ID NO: 1786039 - RNA, 19 nt, Homo sapiens
  misc_RNA (1)...(19): siRNA sense strand
gauuugagcucacaauguc

SEQ ID NO: 1786040 - RNA, 19 nt, Homo sapiens
  misc_RNA (1)...(19): siRNA sense strand
ccaaguauccagaauuauu

SEQ ID NO: 1786041 - RNA, 19 nt, Homo sapiens
  misc_RNA (1)...(19): siRNA sense strand
ugaacaaugccaucaaaua

SEQ ID NO: 1786042 - RNA, 19 nt, Homo sapiens
  misc_RNA (1)...(19): siRNA sense strand
ggguuuaacugaaaucaau

SEQ ID NO: 1786043 - RNA, 19 nt, Homo sapiens
  misc_RNA (1)...(19): siRNA sense strand
uggaagcucuuaugaauca

SEQ ID NO: 1786044 - RNA, 19 nt, Homo sapiens
  misc_RNA (1)...(19): siRNA sense strand
ucaguuggauggaguagaa

SEQ ID NO: 1786045 - RNA, 19 nt, Homo sapiens
  misc_RNA (1)...(19): siRNA sense strand
ccaagaacuuacacaagaa

SEQ ID NO: 1786046 - RNA, 19 nt, Homo sapiens
  misc_RNA (1)...(19): siRNA sense strand
gaauguggcuuagaucagu

SEQ ID NO: 1786047 - RNA, 19 nt, Homo sapiens
  misc_RNA (1)...(19): siRNA sense strand
ggugucacgucuugaaauu

SEQ ID NO: 1786048 - RNA, 19 nt, Homo sapiens
  misc_RNA (1)...(19): siRNA sense strand
acaagaggguugccaagaa

SEQ ID NO: 1786049 - RNA, 19 nt, Homo sapiens
  misc_RNA (1)...(19): siRNA sense strand
acaccaaacuccuuauuca

SEQ ID NO: 1786050 - RNA, 19 nt, Homo sapiens
  misc_RNA (1)...(19): siRNA sense strand
aauggaaccucuucugauu

SEQ ID NO: 1786051 - RNA, 19 nt, Homo sapiens
  misc_RNA (1)...(19): siRNA sense strand
gaggaagagacuaaauaua

SEQ ID NO: 1786052 - RNA, 19 nt, Homo sapiens
  misc_RNA (1)...(19): siRNA sense strand
gcacgagagaguagaauga

SEQ ID NO: 1786053 - RNA, 19 nt, Homo sapiens
  misc_RNA (1)...(19): siRNA sense strand
uuagaucagucccuuguuu

SEQ ID NO: 1786054 - RNA, 19 nt, Homo sapiens
  misc_RNA (1)...(19): siRNA sense strand
agucagagauuccaguuga

SEQ ID NO: 1786055 - RNA, 19 nt, Homo sapiens
  misc_RNA (1)...(19): siRNA sense strand
acaaagaugugaaauucug

SEQ ID NO: 1786056 - RNA, 19 nt, Homo sapiens
  misc_RNA (1)...(19): siRNA sense strand
aagauggacugaaggaauu

SEQ ID NO: 1786057 - RNA, 19 nt, Homo sapiens
  misc_RNA (1)...(19): siRNA sense strand
ccaaagcaacagcaaagua

SEQ ID NO: 1786058 - RNA, 19 nt, Homo sapiens
  misc_RNA (1)...(19): siRNA sense strand
gaaaauguggcugaaauua

SEQ ID NO: 1786059 - RNA, 19 nt, Homo sapiens
  misc_RNA (1)...(19): siRNA sense strand
gaaguuaccccuaaaauuc

SEQ ID NO: 1786060 - RNA, 19 nt, Homo sapiens
  misc_RNA (1)...(19): siRNA sense strand
ggaagagaccagaaaggaa

SEQ ID NO: 1786061 - RNA, 19 nt, Homo sapiens
  misc_RNA (1)...(19): siRNA sense strand
gagggcagauaucaguauu

SEQ ID NO: 1786062 - RNA, 19 nt, Homo sapiens
  misc_RNA (1)...(19): siRNA sense strand
ggacugugauauaaacaag

SEQ ID NO: 1786063 - RNA, 19 nt, Homo sapiens
  misc_RNA (1)...(19): siRNA sense strand
gaaguuugguugcacugau

SEQ ID NO: 1786064 - RNA, 19 nt, Homo sapiens
  misc_RNA (1)...(19): siRNA sense strand
caauacaaguccuucuaga

SEQ ID NO: 1786065 - RNA, 19 nt, Homo sapiens
  misc_RNA (1)...(19): siRNA sense strand
ucucuaaaguuacaaccua

SEQ ID NO: 1786066 - RNA, 19 nt, Homo sapiens
  misc_RNA (1)...(19): siRNA sense strand
ucaccagccugcauucuug

SEQ ID NO: 1786067 - RNA, 19 nt, Homo sapiens
  misc_RNA (1)...(19): siRNA sense strand
cauaaacacugugccauuc

SEQ ID NO: 1786068 - RNA, 19 nt, Homo sapiens
  misc_RNA (1)...(19): siRNA sense strand
gaucaacaaacguacauau

SEQ ID NO: 1786069 - RNA, 19 nt, Homo sapiens
  misc_RNA (1)...(19): siRNA sense strand
cacacaagaccauccauua

SEQ ID NO: 1786070 - RNA, 19 nt, Homo sapiens
  misc_RNA (1)...(19): siRNA sense strand
gauagugaccuaagucugu

SEQ ID NO: 1786071 - RNA, 19 nt, Homo sapiens
  misc_RNA (1)...(19): siRNA sense strand
ggauggaguagaaggcuua

SEQ ID NO: 1786072 - RNA, 19 nt, Homo sapiens
  misc_RNA (1)...(19): siRNA sense strand
aaacuuggacucucaaaug

SEQ ID NO: 1786073 - RNA, 19 nt, Homo sapiens
  misc_RNA (1)...(19): siRNA sense strand
caaacuggaugcccaugug

SEQ ID NO: 1786074 - RNA, 19 nt, Homo sapiens
  misc_RNA (1)...(19): siRNA sense strand
aaagcaaucuguaaagaag

SEQ ID NO: 1786075 - RNA, 19 nt, Homo sapiens
  misc_RNA (1)...(19): siRNA sense strand
gcuggaaacuaaagaugga

SEQ ID NO: 1786076 - RNA, 19 nt, Homo sapiens
  misc_RNA (1)...(19): siRNA sense strand
gaggaagaauuuauuaagc

SEQ ID NO: 1786077 - RNA, 19 nt, Homo sapiens
  misc_RNA (1)...(19): siRNA sense strand
gguaauaucagaggaagaa

SEQ ID NO: 1786078 - RNA, 19 nt, Homo sapiens
  misc_RNA (1)...(19): siRNA sense strand
cuagagagaauuuaccuaa

SEQ ID NO: 1786079 - RNA, 19 nt, Homo sapiens
  misc_RNA (1)...(19): siRNA sense strand
caugggaccaggaauauuu

SEQ ID NO: 1786080 - RNA, 19 nt, Homo sapiens
  misc_RNA (1)...(19): siRNA sense strand
gaccagaaaggaaugauga

SEQ ID NO: 1786081 - RNA, 19 nt, Homo sapiens
  misc_RNA (1)...(19): siRNA sense strand
aagcugaugcugaauauaa

SEQ ID NO: 1786082 - RNA, 19 nt, Homo sapiens
  misc_RNA (1)...(19): siRNA sense strand
caaagcaaucuguaaagaa

SEQ ID NO: 1786083 - RNA, 19 nt, Homo sapiens
  misc_RNA (1)...(19): siRNA sense strand
gaaccaaccaggaccaauc

SEQ ID NO: 1786084 - RNA, 19 nt, Homo sapiens
  misc_RNA (1)...(19): siRNA sense strand
gcuuaggccuggucgacua

SEQ ID NO: 1786085 - RNA, 19 nt, Homo sapiens
  misc_RNA (1)...(19): siRNA sense strand
gagagaguagaaugaauuu

SEQ ID NO: 1786086 - RNA, 19 nt, Homo sapiens
  misc_RNA (1)...(19): siRNA sense strand
guaaagaagcauuugacaa

SEQ ID NO: 1786087 - RNA, 19 nt, Homo sapiens
  misc_RNA (1)...(19): siRNA sense strand
gauguagagcccagcuuua

SEQ ID NO: 1786088 - RNA, 19 nt, Homo sapiens
  misc_RNA (1)...(19): siRNA sense strand
aaucagaacuuggaaaugg

SEQ ID NO: 1786089 - RNA, 19 nt, Homo sapiens
  misc_RNA (1)...(19): siRNA sense strand
uacuggagcugaucugaaa

SEQ ID NO: 1786090 - RNA, 19 nt, Homo sapiens
  misc_RNA (1)...(19): siRNA sense strand
cagaugauguugaccuuca

SEQ ID NO: 1786091 - RNA, 19 nt, Homo sapiens
  misc_RNA (1)...(19): siRNA sense strand
caaauacauuggagcaagu

SEQ ID NO: 1786092 - RNA, 19 nt, Homo sapiens
  misc_RNA (1)...(19): siRNA sense strand
uaaacaaguucaccgaucu

SEQ ID NO: 1786093 - RNA, 19 nt, Homo sapiens
  misc_RNA (1)...(19): siRNA sense strand
ugagaaggccugugugcua

SEQ ID NO: 1786094 - RNA, 19 nt, Homo sapiens
  misc_RNA (1)...(19): siRNA sense strand
agacauaagugaagaagac

SEQ ID NO: 1786095 - RNA, 19 nt, Homo sapiens
  misc_RNA (1)...(19): siRNA sense strand
ggagaggacgaauccauga

SEQ ID NO: 1786096 - RNA, 19 nt, Homo sapiens
  misc_RNA (1)...(19): siRNA sense strand
cgagagaguagaaugaauu

SEQ ID NO: 1786097 - RNA, 19 nt, Homo sapiens
  misc_RNA (1)...(19): siRNA sense strand
gaauggagcucuuuuacuc

SEQ ID NO: 1786098 - RNA, 19 nt, Homo sapiens
  misc_RNA (1)...(19): siRNA sense strand
gggugggucugaaauauua

SEQ ID NO: 1786099 - RNA, 19 nt, Homo sapiens
  misc_RNA (1)...(19): siRNA sense strand
gaggaaggcuuuuguguuu

SEQ ID NO: 1786100 - RNA, 19 nt, Homo sapiens
  misc_RNA (1)...(19): siRNA sense strand
ggucuaaggauauaggaua

SEQ ID NO: 1786101 - RNA, 19 nt, Homo sapiens
  misc_RNA (1)...(19): siRNA sense strand
ccaaagagucggauacuuc

SEQ ID NO: 1786102 - RNA, 19 nt, Homo sapiens
  misc_RNA (1)...(19): siRNA sense strand
cagaugagauuaacaccau

SEQ ID NO: 1786103 - RNA, 19 nt, Homo sapiens
  misc_RNA (1)...(19): siRNA sense strand
ucaaagcaccguuaacgaa

SEQ ID NO: 1786104 - RNA, 19 nt, Homo sapiens
  misc_RNA (1)...(19): siRNA sense strand
gaacaugugggacuuugug

SEQ ID NO: 1786105 - RNA, 19 nt, Homo sapiens
  misc_RNA (1)...(19): siRNA sense strand
ggugggaacuuugaaggaa

SEQ ID NO: 1786106 - RNA, 19 nt, Homo sapiens
  misc_RNA (1)...(19): siRNA sense strand
gagacaagacaaugagauu

SEQ ID NO: 1786107 - RNA, 19 nt, Homo sapiens
  misc_RNA (1)...(19): siRNA sense strand
uaacgaagccucucaaagc

SEQ ID NO: 1786108 - RNA, 19 nt, Homo sapiens
  misc_RNA (1)...(19): siRNA sense strand
ccucagggaucguggaguu

SEQ ID NO: 1786109 - RNA, 19 nt, Homo sapiens
  misc_RNA (1)...(19): siRNA sense strand
ccaagagacaagacaauga

SEQ ID NO: 1786110 - RNA, 19 nt, Homo sapiens
  misc_RNA (1)...(19): siRNA sense strand
ugaggaagagucugaagaa

SEQ ID NO: 1786111 - RNA, 19 nt, Homo sapiens
  misc_RNA (1)...(19): siRNA sense strand
cacaguagcuccaguacac

SEQ ID NO: 1786112 - RNA, 19 nt, Homo sapiens
  misc_RNA (1)...(19): siRNA sense strand
gugggugggucugaaauau

SEQ ID NO: 1786113 - RNA, 19 nt, Homo sapiens
  misc_RNA (1)...(19): siRNA sense strand
ggauauaggauacaguuuu

SEQ ID NO: 1786114 - RNA, 19 nt, Homo sapiens
  misc_RNA (1)...(19): siRNA sense strand
gaggaagagucugaagaag

SEQ ID NO: 1786115 - RNA, 19 nt, Homo sapiens
  misc_RNA (1)...(19): siRNA sense strand
gucggauacuuccuaugua

SEQ ID NO: 1786116 - RNA, 19 nt, Homo sapiens
  misc_RNA (1)...(19): siRNA sense strand
gugaacaugugggacuuug

SEQ ID NO: 1786117 - RNA, 19 nt, Homo sapiens
  misc_RNA (1)...(19): siRNA sense strand
cgagguuccugaagucaca

SEQ ID NO: 1786118 - RNA, 19 nt, Homo sapiens
  misc_RNA (1)...(19): siRNA sense strand
gaagcuguuguguuucuug

SEQ ID NO: 1786119 - RNA, 19 nt, Homo sapiens
  misc_RNA (1)...(19): siRNA sense strand
guccuaauguccugaacug

SEQ ID NO: 1786120 - RNA, 19 nt, Homo sapiens
  misc_RNA (1)...(19): siRNA sense strand
gacaagacaaugagauucu

SEQ ID NO: 1786121 - RNA, 19 nt, Homo sapiens
  misc_RNA (1)...(19): siRNA sense strand
gauuaacaccaucuaucuu

SEQ ID NO: 1786122 - RNA, 19 nt, Homo sapiens
  misc_RNA (1)...(19): siRNA sense strand
cucaaagccuucacugugu

SEQ ID NO: 1786123 - RNA, 19 nt, Homo sapiens
  misc_RNA (1)...(19): siRNA sense strand
caagagacaagacaaugag

SEQ ID NO: 1786124 - RNA, 19 nt, Homo sapiens
  misc_RNA (1)...(19): siRNA sense strand
guagcuccaguacacauuu

SEQ ID NO: 1786125 - RNA, 19 nt, Homo sapiens
  misc_RNA (1)...(19): siRNA sense strand
ggugggagacauuggaaau

SEQ ID NO: 1786126 - RNA, 19 nt, Homo sapiens
  misc_RNA (1)...(19): siRNA sense strand
gcagaagcaagcaucaucu

SEQ ID NO: 1786127 - RNA, 19 nt, Homo sapiens
  misc_RNA (1)...(19): siRNA sense strand
ugaagaagggauacacugu

SEQ ID NO: 1786128 - RNA, 19 nt, Homo sapiens
  misc_RNA (1)...(19): siRNA sense strand
gguacaguauuuucucgua

SEQ ID NO: 1786129 - RNA, 19 nt, Homo sapiens
  misc_RNA (1)...(19): siRNA sense strand
uagcuccaguacacauuug

SEQ ID NO: 1786130 - RNA, 19 nt, Homo sapiens
  misc_RNA (1)...(19): siRNA sense strand
ggaagcccagggugaggaa

SEQ ID NO: 1786131 - RNA, 19 nt, Homo sapiens
  misc_RNA (1)...(19): siRNA sense strand
gcccuucaguccuaauguc

SEQ ID NO: 1786132 - RNA, 19 nt, Homo sapiens
  misc_RNA (1)...(19): siRNA sense strand
aaggauauaggauacaguu

SEQ ID NO: 1786133 - RNA, 19 nt, Homo sapiens
  misc_RNA (1)...(19): siRNA sense strand
acugaaguaugaagugcaa

SEQ ID NO: 1786134 - RNA, 19 nt, Homo sapiens
  misc_RNA (1)...(19): siRNA sense strand
ggcagaagcaagcaucauc

SEQ ID NO: 1786135 - RNA, 19 nt, Homo sapiens
  misc_RNA (1)...(19): siRNA sense strand
gugaggaagagucugaaga

SEQ ID NO: 1786136 - RNA, 19 nt, Homo sapiens
  misc_RNA (1)...(19): siRNA sense strand
cuauguaucccucaaagca

SEQ ID NO: 1786137 - RNA, 19 nt, Homo sapiens
  misc_RNA (1)...(19): siRNA sense strand
gaagugcaaggcgaagugu

SEQ ID NO: 1786138 - RNA, 19 nt, Homo sapiens
  misc_RNA (1)...(19): siRNA sense strand
agagucggauacuuccuau

SEQ ID NO: 1786139 - RNA, 19 nt, Homo sapiens
  misc_RNA (1)...(19): siRNA sense strand
guggaguucuggguagaug

SEQ ID NO: 1786140 - RNA, 19 nt, Homo sapiens
  misc_RNA (1)...(19): siRNA sense strand
guuaacgaagccucucaaa

SEQ ID NO: 1786141 - RNA, 19 nt, Homo sapiens
  misc_RNA (1)...(19): siRNA sense strand
ggcgaaguguucaccaaac

SEQ ID NO: 1786142 - RNA, 19 nt, Homo sapiens
  misc_RNA (1)...(19): siRNA sense strand
cagccucucucaugcuuuu

SEQ ID NO: 1786143 - RNA, 19 nt, Homo sapiens
  misc_RNA (1)...(19): siRNA sense strand
uauucgagguuccugaagu

SEQ ID NO: 1786144 - RNA, 19 nt, Homo sapiens
  misc_RNA (1)...(19): siRNA sense strand
guacaguauuuucucguau

SEQ ID NO: 1786145 - RNA, 19 nt, Homo sapiens
  misc_RNA (1)...(19): siRNA sense strand
ccaccaagagacaagacaa

SEQ ID NO: 1786146 - RNA, 19 nt, Homo sapiens
  misc_RNA (1)...(19): siRNA sense strand
cagaagcaagcaucaucuu

SEQ ID NO: 1786147 - RNA, 19 nt, Homo sapiens
  misc_RNA (1)...(19): siRNA sense strand
agucggauacuuccuaugu

SEQ ID NO: 1786148 - RNA, 19 nt, Homo sapiens
  misc_RNA (1)...(19): siRNA sense strand
aagagucggauacuuccua

SEQ ID NO: 1786149 - RNA, 19 nt, Homo sapiens
  misc_RNA (1)...(19): siRNA sense strand
cccaaagagucggauacuu

SEQ ID NO: 1786150 - RNA, 19 nt, Homo sapiens
  misc_RNA (1)...(19): siRNA sense strand
auuaacaccaucuaucuug

SEQ ID NO: 1786151 - RNA, 19 nt, Homo sapiens
  misc_RNA (1)...(19): siRNA sense strand
cugugugccuccacuucua

SEQ ID NO: 1786152 - RNA, 19 nt, Homo sapiens
  misc_RNA (1)...(19): siRNA sense strand
gcgaaguguucaccaaacc

SEQ ID NO: 1786153 - RNA, 19 nt, Homo sapiens
  misc_RNA (1)...(19): siRNA sense strand
cuaaggauauaggauacag

SEQ ID NO: 1786154 - RNA, 19 nt, Homo sapiens
  misc_RNA (1)...(19): siRNA sense strand
gcaaagacaggaaguauuu

SEQ ID NO: 1786155 - RNA, 19 nt, Homo sapiens
  misc_RNA (1)...(19): siRNA sense strand
gaagaacacugcucugcau

SEQ ID NO: 1786156 - RNA, 19 nt, Homo sapiens
  misc_RNA (1)...(19): siRNA sense strand
ugcauaaggucacauauuu

SEQ ID NO: 1786157 - RNA, 19 nt, Homo sapiens
  misc_RNA (1)...(19): siRNA sense strand
ggucacauauuuacagaau

SEQ ID NO: 1786158 - RNA, 19 nt, Homo sapiens
  misc_RNA (1)...(19): siRNA sense strand
gcauaaggucacauauuua

SEQ ID NO: 1786159 - RNA, 19 nt, Homo sapiens
  misc_RNA (1)...(19): siRNA sense strand
ggacuauauuucucuguga

SEQ ID NO: 1786160 - RNA, 19 nt, Homo sapiens
  misc_RNA (1)...(19): siRNA sense strand
ggacacaggacuauauuuc

SEQ ID NO: 1786161 - RNA, 19 nt, Homo sapiens
  misc_RNA (1)...(19): siRNA sense strand
gaacacugcucugcauaag

SEQ ID NO: 1786162 - RNA, 19 nt, Homo sapiens
  misc_RNA (1)...(19): siRNA sense strand
gaacaucaccaucacucaa

SEQ ID NO: 1786163 - RNA, 19 nt, Homo sapiens
  misc_RNA (1)...(19): siRNA sense strand
caacugcucugcuacuucu

SEQ ID NO: 1786164 - RNA, 19 nt, Homo sapiens
  misc_RNA (1)...(19): siRNA sense strand
caccaucacucaagguuug

SEQ ID NO: 1786165 - RNA, 19 nt, Homo sapiens
  misc_RNA (1)...(19): siRNA sense strand
ggacugaagaucucccaaa

SEQ ID NO: 1786166 - RNA, 19 nt, Homo sapiens
  misc_RNA (1)...(19): siRNA sense strand
ucacauauuuacagaaugg

SEQ ID NO: 1786167 - RNA, 19 nt, Homo sapiens
  misc_RNA (1)...(19): siRNA sense strand
cacagugguuucacaauga

SEQ ID NO: 1786168 - RNA, 19 nt, Homo sapiens
  misc_RNA (1)...(19): siRNA sense strand
acacagugguuucacaaug

SEQ ID NO: 1786169 - RNA, 19 nt, Homo sapiens
  misc_RNA (1)...(19): siRNA sense strand
ugucaaccaucucaucauu

SEQ ID NO: 1786170 - RNA, 19 nt, Homo sapiens
  misc_RNA (1)...(19): siRNA sense strand
ugucacagcuggaagaaca

SEQ ID NO: 1786171 - RNA, 19 nt, Homo sapiens
  misc_RNA (1)...(19): siRNA sense strand
gaguacaggugccagacaa

SEQ ID NO: 1786172 - RNA, 19 nt, Homo sapiens
  misc_RNA (1)...(19): siRNA sense strand
caacgacaguggagaguac

SEQ ID NO: 1786173 - RNA, 19 nt, Homo sapiens
  misc_RNA (1)...(19): siRNA sense strand
gcucugcuacuucuaguuu

SEQ ID NO: 1786174 - RNA, 19 nt, Homo sapiens
  misc_RNA (1)...(19): siRNA sense strand
gauagcggcuccuacuucu

SEQ ID NO: 1786175 - RNA, 19 nt, Homo sapiens
  misc_RNA (1)...(19): siRNA sense strand
gacuauauuucucugugaa

SEQ ID NO: 1786176 - RNA, 19 nt, Homo sapiens
  misc_RNA (1)...(19): siRNA sense strand
acacugcucugcauaaggu

SEQ ID NO: 1786177 - RNA, 19 nt, Homo sapiens
  misc_RNA (1)...(19): siRNA sense strand
ucaaccaucucaucauucu

SEQ ID NO: 1786178 - RNA, 19 nt, Homo sapiens
  misc_RNA (1)...(19): siRNA sense strand
gacugaagaucucccaaag

SEQ ID NO: 1786179 - RNA, 19 nt, Homo sapiens
  misc_RNA (1)...(19): siRNA sense strand
gaggacaauuccacacagu

SEQ ID NO: 1786180 - RNA, 19 nt, Homo sapiens
  misc_RNA (1)...(19): siRNA sense strand
gguacagcgugcuugagaa

SEQ ID NO: 1786181 - RNA, 19 nt, Homo sapiens
  misc_RNA (1)...(19): siRNA sense strand
gccucgagcuacuucauug

SEQ ID NO: 1786182 - RNA, 19 nt, Homo sapiens
  misc_RNA (1)...(19): siRNA sense strand
ccucccaacugcucugcua

SEQ ID NO: 1786183 - RNA, 19 nt, Homo sapiens
  misc_RNA (1)...(19): siRNA sense strand
acacaggacuauauuucuc

SEQ ID NO: 1786184 - RNA, 19 nt, Homo sapiens
  misc_RNA (1)...(19): siRNA sense strand
aaagccacacucaaagaua

SEQ ID NO: 1786185 - RNA, 19 nt, Homo sapiens
  misc_RNA (1)...(19): siRNA sense strand
cccaaaggcugugguguuc

SEQ ID NO: 1786186 - RNA, 19 nt, Homo sapiens
  misc_RNA (1)...(19): siRNA sense strand
ggcaaagacaggaaguauu

SEQ ID NO: 1786187 - RNA, 19 nt, Homo sapiens
  misc_RNA (1)...(19): siRNA sense strand
caaggaggaagacccuauu

SEQ ID NO: 1786188 - RNA, 19 nt, Homo sapiens
  misc_RNA (1)...(19): siRNA sense strand
gcagcuagaaguccauauc

SEQ ID NO: 1786189 - RNA, 19 nt, Homo sapiens
  misc_RNA (1)...(19): siRNA sense strand
cauaaggucacauauuuac

SEQ ID NO: 1786190 - RNA, 19 nt, Homo sapiens
  misc_RNA (1)...(19): siRNA sense strand
aagccacacucaaagauag

SEQ ID NO: 1786191 - RNA, 19 nt, Homo sapiens
  misc_RNA (1)...(19): siRNA sense strand
gcaguggacacaggacuau

SEQ ID NO: 1786192 - RNA, 19 nt, Homo sapiens
  misc_RNA (1)...(19): siRNA sense strand
acagcgugcuugagaagga

SEQ ID NO: 1786193 - RNA, 19 nt, Homo sapiens
  misc_RNA (1)...(19): siRNA sense strand
agaacacugcucugcauaa

SEQ ID NO: 1786194 - RNA, 19 nt, Homo sapiens
  misc_RNA (1)...(19): siRNA sense strand
cagcuggcaugcggacuga

SEQ ID NO: 1786195 - RNA, 19 nt, Homo sapiens
  misc_RNA (1)...(19): siRNA sense strand
caagccaggccucgagcua

SEQ ID NO: 1786196 - RNA, 19 nt, Homo sapiens
  misc_RNA (1)...(19): siRNA sense strand
ucaaagauagcggcuccua

SEQ ID NO: 1786197 - RNA, 19 nt, Homo sapiens
  misc_RNA (1)...(19): siRNA sense strand
cuauauuucucugugaaga

SEQ ID NO: 1786198 - RNA, 19 nt, Homo sapiens
  misc_RNA (1)...(19): siRNA sense strand
ggaggaagacccuauucac

SEQ ID NO: 1786199 - RNA, 19 nt, Homo sapiens
  misc_RNA (1)...(19): siRNA sense strand
gguaccaagucucuuucug

SEQ ID NO: 1786200 - RNA, 19 nt, Homo sapiens
  misc_RNA (1)...(19): siRNA sense strand
cugcauaaggucacauauu

SEQ ID NO: 1786201 - RNA, 19 nt, Homo sapiens
  misc_RNA (1)...(19): siRNA sense strand
aaagauagcggcuccuacu

SEQ ID NO: 1786202 - RNA, 19 nt, Homo sapiens
  misc_RNA (1)...(19): siRNA sense strand
guacagcgugcuugagaag

SEQ ID NO: 1786203 - RNA, 19 nt, Homo sapiens
  misc_RNA (1)...(19): siRNA sense strand
caaaggcugugguguuccu

SEQ ID NO: 1786204 - RNA, 19 nt, Homo sapiens
  misc_RNA (1)...(19): siRNA sense strand
ucaaggaggaagacccuau

SEQ ID NO: 1786205 - RNA, 19 nt, Homo sapiens
  misc_RNA (1)...(19): siRNA sense strand
ccaccuggguaccaagucu

SEQ ID NO: 1786206 - RNA, 19 nt, Homo sapiens
  misc_RNA (1)...(19): siRNA sense strand
aaggucacauauuuacaga

SEQ ID NO: 1786207 - RNA, 19 nt, Homo sapiens
  misc_RNA (1)...(19): siRNA sense strand
ucagagacugugaacauca

SEQ ID NO: 1786208 - RNA, 19 nt, Homo sapiens
  misc_RNA (1)...(19): siRNA sense strand
uaaggucacauauuuacag

SEQ ID NO: 1786209 - RNA, 19 nt, Homo sapiens
  misc_RNA (1)...(19): siRNA sense strand
gacacaggacuauauuucu

SEQ ID NO: 1786210 - RNA, 19 nt, Homo sapiens
  misc_RNA (1)...(19): siRNA sense strand
ccauaucggcuggcuguug

SEQ ID NO: 1786211 - RNA, 19 nt, Homo sapiens
  misc_RNA (1)...(19): siRNA sense strand
guggacacaggacuauauu

SEQ ID NO: 1786212 - RNA, 19 nt, Homo sapiens
  misc_RNA (1)...(19): siRNA sense strand
caaaagccacacucaaaga

SEQ ID NO: 1786213 - RNA, 19 nt, Homo sapiens
  misc_RNA (1)...(19): siRNA sense strand
uccuggagccucaauggua

SEQ ID NO: 1786214 - RNA, 19 nt, Homo sapiens
  misc_RNA (1)...(19): siRNA sense strand
aauucugacuuccacauuc

SEQ ID NO: 1786215 - RNA, 19 nt, Homo sapiens
  misc_RNA (1)...(19): siRNA sense strand
uaauucugacuuccacauu

SEQ ID NO: 1786216 - RNA, 19 nt, Homo sapiens
  misc_RNA (1)...(19): siRNA sense strand
cagcugcuccucccaacug

SEQ ID NO: 1786217 - RNA, 19 nt, Homo sapiens
  misc_RNA (1)...(19): siRNA sense strand
uggcaaagacaggaaguau

SEQ ID NO: 1786218 - RNA, 19 nt, Homo sapiens
  misc_RNA (1)...(19): siRNA sense strand
gacaggaaguauuuucauc

SEQ ID NO: 1786219 - RNA, 19 nt, Homo sapiens
  misc_RNA (1)...(19): siRNA sense strand
agauagcggcuccuacuuc

SEQ ID NO: 1786220 - RNA, 19 nt, Homo sapiens
  misc_RNA (1)...(19): siRNA sense strand
uaacuugccuucagaauuu

SEQ ID NO: 1786221 - RNA, 19 nt, Homo sapiens
  misc_RNA (1)...(19): siRNA sense strand
gaagaguucugcaaucgua

SEQ ID NO: 1786222 - RNA, 19 nt, Homo sapiens
  misc_RNA (1)...(19): siRNA sense strand
uaacacaggguacaaauua

SEQ ID NO: 1786223 - RNA, 19 nt, Homo sapiens
  misc_RNA (1)...(19): siRNA sense strand
gaagaaagcuuugugaaaa

SEQ ID NO: 1786224 - RNA, 19 nt, Homo sapiens
  misc_RNA (1)...(19): siRNA sense strand
ggucagauauugaagaguu

SEQ ID NO: 1786225 - RNA, 19 nt, Homo sapiens
  misc_RNA (1)...(19): siRNA sense strand
ucagaaaccuaccacagua

SEQ ID NO: 1786226 - RNA, 19 nt, Homo sapiens
  misc_RNA (1)...(19): siRNA sense strand
guacuguuguggaauauga

SEQ ID NO: 1786227 - RNA, 19 nt, Homo sapiens
  misc_RNA (1)...(19): siRNA sense strand
guacaaaugugaagaaagc

SEQ ID NO: 1786228 - RNA, 19 nt, Homo sapiens
  misc_RNA (1)...(19): siRNA sense strand
aauaaaggauucaccauga

SEQ ID NO: 1786229 - RNA, 19 nt, Homo sapiens
  misc_RNA (1)...(19): siRNA sense strand
gaaauggucagauugaugu

SEQ ID NO: 1786230 - RNA, 19 nt, Homo sapiens
  misc_RNA (1)...(19): siRNA sense strand
uguaccagguggcauauua

SEQ ID NO: 1786231 - RNA, 19 nt, Homo sapiens
  misc_RNA (1)...(19): siRNA sense strand
guaauaacguacaaaugug

SEQ ID NO: 1786232 - RNA, 19 nt, Homo sapiens
  misc_RNA (1)...(19): siRNA sense strand
gaaaaucucuaacuuccaa

SEQ ID NO: 1786233 - RNA, 19 nt, Homo sapiens
  misc_RNA (1)...(19): siRNA sense strand
ggcagucaauggucagaua

SEQ ID NO: 1786234 - RNA, 19 nt, Homo sapiens
  misc_RNA (1)...(19): siRNA sense strand
aaacuaacuugccuucaga

SEQ ID NO: 1786235 - RNA, 19 nt, Homo sapiens
  misc_RNA (1)...(19): siRNA sense strand
ugaagaaagcuuugugaaa

SEQ ID NO: 1786236 - RNA, 19 nt, Homo sapiens
  misc_RNA (1)...(19): siRNA sense strand
gagaaggacucagugaucu

SEQ ID NO: 1786237 - RNA, 19 nt, Homo sapiens
  misc_RNA (1)...(19): siRNA sense strand
ccaaauaaaggaaguggaa

SEQ ID NO: 1786238 - RNA, 19 nt, Homo sapiens
  misc_RNA (1)...(19): siRNA sense strand
ucagugaucugccuuaagg

SEQ ID NO: 1786239 - RNA, 19 nt, Homo sapiens
  misc_RNA (1)...(19): siRNA sense strand
caaacagccuuauaucacu

SEQ ID NO: 1786240 - RNA, 19 nt, Homo sapiens
  misc_RNA (1)...(19): siRNA sense strand
guccacagcagucgaauuu

SEQ ID NO: 1786241 - RNA, 19 nt, Homo sapiens
  misc_RNA (1)...(19): siRNA sense strand
ccaugggcuugcugacuua

SEQ ID NO: 1786242 - RNA, 19 nt, Homo sapiens
  misc_RNA (1)...(19): siRNA sense strand
caaaugugaagaaagcuuu

SEQ ID NO: 1786243 - RNA, 19 nt, Homo sapiens
  misc_RNA (1)...(19): siRNA sense strand
uuauuuggcucgacuucua

SEQ ID NO: 1786244 - RNA, 19 nt, Homo sapiens
  misc_RNA (1)...(19): siRNA sense strand
ccagguggcauauuauuug

SEQ ID NO: 1786245 - RNA, 19 nt, Homo sapiens
  misc_RNA (1)...(19): siRNA sense strand
aauacgaaauggucagauu

SEQ ID NO: 1786246 - RNA, 19 nt, Homo sapiens
  misc_RNA (1)...(19): siRNA sense strand
ggaaccacuucagguacua

SEQ ID NO: 1786247 - RNA, 19 nt, Homo sapiens
  misc_RNA (1)...(19): siRNA sense strand
gcaaccaucuccuucucau

SEQ ID NO: 1786248 - RNA, 19 nt, Homo sapiens
  misc_RNA (1)...(19): siRNA sense strand
ucccgaggauacuguaaua

SEQ ID NO: 1786249 - RNA, 19 nt, Homo sapiens
  misc_RNA (1)...(19): siRNA sense strand
guacugugaauaaugauga

SEQ ID NO: 1786250 - RNA, 19 nt, Homo sapiens
  misc_RNA (1)...(19): siRNA sense strand
gaaaauuccuggcgagaag

SEQ ID NO: 1786251 - RNA, 19 nt, Homo sapiens
  misc_RNA (1)...(19): siRNA sense strand
ccagagugcagagaaauuu

SEQ ID NO: 1786252 - RNA, 19 nt, Homo sapiens
  misc_RNA (1)...(19): siRNA sense strand
uaucugggcacacguguuu

SEQ ID NO: 1786253 - RNA, 19 nt, Homo sapiens
  misc_RNA (1)...(19): siRNA sense strand
ccaccugaaugcagaggaa

SEQ ID NO: 1786254 - RNA, 19 nt, Homo sapiens
  misc_RNA (1)...(19): siRNA sense strand
uaaaggauucaccaugauu

SEQ ID NO: 1786255 - RNA, 19 nt, Homo sapiens
  misc_RNA (1)...(19): siRNA sense strand
ucgguacuguuguggaaua

SEQ ID NO: 1786256 - RNA, 19 nt, Homo sapiens
  misc_RNA (1)...(19): siRNA sense strand
gaaacaaccccaaauaaag

SEQ ID NO: 1786257 - RNA, 19 nt, Homo sapiens
  misc_RNA (1)...(19): siRNA sense strand
gaaauacgaaauggucaga

SEQ ID NO: 1786258 - RNA, 19 nt, Homo sapiens
  misc_RNA (1)...(19): siRNA sense strand
aaagaaaucaugcccuaau

SEQ ID NO: 1786259 - RNA, 19 nt, Homo sapiens
  misc_RNA (1)...(19): siRNA sense strand
ccaggacaaccaagcauuu

SEQ ID NO: 1786260 - RNA, 19 nt, Homo sapiens
  misc_RNA (1)...(19): siRNA sense strand
caguaaauguuccaacuac

SEQ ID NO: 1786261 - RNA, 19 nt, Homo sapiens
  misc_RNA (1)...(19): siRNA sense strand
guaugcauguaauaaagga

SEQ ID NO: 1786262 - RNA, 19 nt, Homo sapiens
  misc_RNA (1)...(19): siRNA sense strand
guaacacaggguacaaauu

SEQ ID NO: 1786263 - RNA, 19 nt, Homo sapiens
  misc_RNA (1)...(19): siRNA sense strand
gcucaagcaacacggagua

SEQ ID NO: 1786264 - RNA, 19 nt, Homo sapiens
  misc_RNA (1)...(19): siRNA sense strand
ccacagcagucgaauuuug

SEQ ID NO: 1786265 - RNA, 19 nt, Homo sapiens
  misc_RNA (1)...(19): siRNA sense strand
caaccaagcauuuucauga

SEQ ID NO: 1786266 - RNA, 19 nt, Homo sapiens
  misc_RNA (1)...(19): siRNA sense strand
cgaaauggucagauugaug

SEQ ID NO: 1786267 - RNA, 19 nt, Homo sapiens
  misc_RNA (1)...(19): siRNA sense strand
acacggaguacaccuguuu

SEQ ID NO: 1786268 - RNA, 19 nt, Homo sapiens
  misc_RNA (1)...(19): siRNA sense strand
cagagugcagagaaauuua

SEQ ID NO: 1786269 - RNA, 19 nt, Homo sapiens
  misc_RNA (1)...(19): siRNA sense strand
ggaaggccguacaaguuuu

SEQ ID NO: 1786270 - RNA, 19 nt, Homo sapiens
  misc_RNA (1)...(19): siRNA sense strand
uaaauguuccaacuacaga

SEQ ID NO: 1786271 - RNA, 19 nt, Homo sapiens
  misc_RNA (1)...(19): siRNA sense strand
gaaaccuaccacaguaaau

SEQ ID NO: 1786272 - RNA, 19 nt, Homo sapiens
  misc_RNA (1)...(19): siRNA sense strand
acacaggguacaaauuauu

SEQ ID NO: 1786273 - RNA, 19 nt, Homo sapiens
  misc_RNA (1)...(19): siRNA sense strand
cgagaaggacucagugauc

SEQ ID NO: 1786274 - RNA, 19 nt, Homo sapiens
  misc_RNA (1)...(19): siRNA sense strand
uggaaggccguacaaguuu

SEQ ID NO: 1786275 - RNA, 19 nt, Homo sapiens
  misc_RNA (1)...(19): siRNA sense strand
caaggucccaccaacaguu

SEQ ID NO: 1786276 - RNA, 19 nt, Homo sapiens
  misc_RNA (1)...(19): siRNA sense strand
gugcagagaaauuuauugu

SEQ ID NO: 1786277 - RNA, 19 nt, Homo sapiens
  misc_RNA (1)...(19): siRNA sense strand
ccaucuccuucucauguaa

SEQ ID NO: 1786278 - RNA, 19 nt, Homo sapiens
  misc_RNA (1)...(19): siRNA sense strand
cuaacuugccuucagaauu

SEQ ID NO: 1786279 - RNA, 19 nt, Homo sapiens
  misc_RNA (1)...(19): siRNA sense strand
ccuuauaucacucagaauu

SEQ ID NO: 1786280 - RNA, 19 nt, Homo sapiens
  misc_RNA (1)...(19): siRNA sense strand
gcugcgaggugccaacaag

SEQ ID NO: 1786281 - RNA, 19 nt, Homo sapiens
  misc_RNA (1)...(19): siRNA sense strand
aggauacuguaauaacgua

SEQ ID NO: 1786282 - RNA, 19 nt, Homo sapiens
  misc_RNA (1)...(19): siRNA sense strand
ugauguaccagguggcaua

SEQ ID NO: 1786283 - RNA, 19 nt, Homo sapiens
  misc_RNA (1)...(19): siRNA sense strand
ccaacaaggcuaaauucug

SEQ ID NO: 1786284 - RNA, 19 nt, Homo sapiens
  misc_RNA (1)...(19): siRNA sense strand
aagaaaucaugcccuaauc

SEQ ID NO: 1786285 - RNA, 19 nt, Homo sapiens
  misc_RNA (1)...(19): siRNA sense strand
ugaaacaaccccaaauaaa

SEQ ID NO: 1786286 - RNA, 19 nt, Homo sapiens
  misc_RNA (1)...(19): siRNA sense strand
cagaaaccuaccacaguaa

SEQ ID NO: 1786287 - RNA, 19 nt, Homo sapiens
  misc_RNA (1)...(19): siRNA sense strand
guaacguaugcauguaaua

SEQ ID NO: 1786288 - RNA, 19 nt, Homo sapiens
  misc_RNA (1)...(19): siRNA sense strand
cauuauggauauagacagu

SEQ ID NO: 1786289 - RNA, 19 nt, Homo sapiens
  misc_RNA (1)...(19): siRNA sense strand
gcagucaauggucagauau

SEQ ID NO: 1786290 - RNA, 19 nt, Homo sapiens
  misc_RNA (1)...(19): siRNA sense strand
gugaagaaagcuuugugaa

SEQ ID NO: 1786291 - RNA, 19 nt, Homo sapiens
  misc_RNA (1)...(19): siRNA sense strand
cacaguaaauguuccaacu

SEQ ID NO: 1786292 - RNA, 19 nt, Homo sapiens
  misc_RNA (1)...(19): siRNA sense strand
cagcaccaccacaaauuga

SEQ ID NO: 1786293 - RNA, 19 nt, Homo sapiens
  misc_RNA (1)...(19): siRNA sense strand
ucaaacagccuuauaucac

SEQ ID NO: 1786294 - RNA, 19 nt, Homo sapiens
  misc_RNA (1)...(19): siRNA sense strand
agccuuauaucacucagaa

SEQ ID NO: 1786295 - RNA, 19 nt, Homo sapiens
  misc_RNA (1)...(19): siRNA sense strand
aaaccuaccacaguaaaug

SEQ ID NO: 1786296 - RNA, 19 nt, Homo sapiens
  misc_RNA (1)...(19): siRNA sense strand
cuaaugcccagccagcuuu

SEQ ID NO: 1786297 - RNA, 19 nt, Homo sapiens
  misc_RNA (1)...(19): siRNA sense strand
aaccuucucuaucaccaaa

SEQ ID NO: 1786298 - RNA, 19 nt, Homo sapiens
  misc_RNA (1)...(19): siRNA sense strand
cgaggauacuguaauaacg

SEQ ID NO: 1786299 - RNA, 19 nt, Homo sapiens
  misc_RNA (1)...(19): siRNA sense strand
gaggugccaacaaggcuaa

SEQ ID NO: 1786300 - RNA, 19 nt, Homo sapiens
  misc_RNA (1)...(19): siRNA sense strand
guacuacccgucuucuauc

SEQ ID NO: 1786301 - RNA, 19 nt, Homo sapiens
  misc_RNA (1)...(19): siRNA sense strand
gugccaacaaggcuaaauu

SEQ ID NO: 1786302 - RNA, 19 nt, Homo sapiens
  misc_RNA (1)...(19): siRNA sense strand
guaaauguuccaacuacag

SEQ ID NO: 1786303 - RNA, 19 nt, Homo sapiens
  misc_RNA (1)...(19): siRNA sense strand
ugugaauaaugaugaagga

SEQ ID NO: 1786304 - RNA, 19 nt, Homo sapiens
  misc_RNA (1)...(19): siRNA sense strand
gagcacucuauuuauugua

SEQ ID NO: 1786305 - RNA, 19 nt, Homo sapiens
  misc_RNA (1)...(19): siRNA sense strand
auaaaggauucaccaugau

SEQ ID NO: 1786306 - RNA, 19 nt, Homo sapiens
  misc_RNA (1)...(19): siRNA sense strand
ccagcaccaccacaaauug

SEQ ID NO: 1786307 - RNA, 19 nt, Homo sapiens
  misc_RNA (1)...(19): siRNA sense strand
gagugcagagaaauuuauu

SEQ ID NO: 1786308 - RNA, 19 nt, Homo sapiens
  misc_RNA (1)...(19): siRNA sense strand
guaccagguggcauauuau

SEQ ID NO: 1786309 - RNA, 19 nt, Homo sapiens
  misc_RNA (1)...(19): siRNA sense strand
acaguaaauguuccaacua

SEQ ID NO: 1786310 - RNA, 19 nt, Homo sapiens
  misc_RNA (1)...(19): siRNA sense strand
agaaaccuaccacaguaaa

SEQ ID NO: 1786311 - RNA, 19 nt, Homo sapiens
  misc_RNA (1)...(19): siRNA sense strand
uguaacguaugcauguaau

SEQ ID NO: 1786312 - RNA, 19 nt, Homo sapiens
  misc_RNA (1)...(19): siRNA sense strand
caugaaacaaccccaaaua

SEQ ID NO: 1786313 - RNA, 19 nt, Homo sapiens
  misc_RNA (1)...(19): siRNA sense strand
uuggaaggccguacaaguu

SEQ ID NO: 1786314 - RNA, 19 nt, Homo sapiens
  misc_RNA (1)...(19): siRNA sense strand
aaaggauucaccaugauug

SEQ ID NO: 1786315 - RNA, 19 nt, Homo sapiens
  misc_RNA (1)...(19): siRNA sense strand
gaaccuucucuaucaccaa

SEQ ID NO: 1786316 - RNA, 19 nt, Homo sapiens
  misc_RNA (1)...(19): siRNA sense strand
acucagugaucugccuuaa

SEQ ID NO: 1786317 - RNA, 19 nt, Homo sapiens
  misc_RNA (1)...(19): siRNA sense strand
gccagagugcagagaaauu

SEQ ID NO: 1786318 - RNA, 19 nt, Homo sapiens
  misc_RNA (1)...(19): siRNA sense strand
gugcaaccaucuccuucuc

SEQ ID NO: 1786319 - RNA, 19 nt, Homo sapiens
  misc_RNA (1)...(19): siRNA sense strand
accaugggcuugcugacuu

SEQ ID NO: 1786320 - RNA, 19 nt, Homo sapiens
  misc_RNA (1)...(19): siRNA sense strand
gggcagagcuccaccauga

SEQ ID NO: 1786321 - RNA, 19 nt, Homo sapiens
  misc_RNA (1)...(19): siRNA sense strand
caacauguacuuccugauu

SEQ ID NO: 1786322 - RNA, 19 nt, Homo sapiens
  misc_RNA (1)...(19): siRNA sense strand
ccaauggccugcugaacaa

SEQ ID NO: 1786323 - RNA, 19 nt, Homo sapiens
  misc_RNA (1)...(19): siRNA sense strand
gggccuggcuuccucauga

SEQ ID NO: 1786324 - RNA, 19 nt, Homo sapiens
  misc_RNA (1)...(19): siRNA sense strand
gcacggccauugcauucaa

SEQ ID NO: 1786325 - RNA, 19 nt, Homo sapiens
  misc_RNA (1)...(19): siRNA sense strand
gcucucagcuggacgaauc

SEQ ID NO: 1786326 - RNA, 19 nt, Homo sapiens
  misc_RNA (1)...(19): siRNA sense strand
caggaaacaucgagucaga

SEQ ID NO: 1786327 - RNA, 19 nt, Homo sapiens
  misc_RNA (1)...(19): siRNA sense strand
ucaaugaucugcucaacgu

SEQ ID NO: 1786328 - RNA, 19 nt, Homo sapiens
  misc_RNA (1)...(19): siRNA sense strand
ggacuccuuauaaccauua

SEQ ID NO: 1786329 - RNA, 19 nt, Homo sapiens
  misc_RNA (1)...(19): siRNA sense strand
ucagagaagccaacaugua

SEQ ID NO: 1786330 - RNA, 19 nt, Homo sapiens
  misc_RNA (1)...(19): siRNA sense strand
uguaugggcuccuugaaga

SEQ ID NO: 1786331 - RNA, 19 nt, Homo sapiens
  misc_RNA (1)...(19): siRNA sense strand
gccaagaucuuccccauga

SEQ ID NO: 1786332 - RNA, 19 nt, Homo sapiens
  misc_RNA (1)...(19): siRNA sense strand
ggaaacaucgagucagauc

SEQ ID NO: 1786333 - RNA, 19 nt, Homo sapiens
  misc_RNA (1)...(19): siRNA sense strand
caucagagaagccaacaug

SEQ ID NO: 1786334 - RNA, 19 nt, Homo sapiens
  misc_RNA (1)...(19): siRNA sense strand
ggacuugucgggccucaau

SEQ ID NO: 1786335 - RNA, 19 nt, Homo sapiens
  misc_RNA (1)...(19): siRNA sense strand
cgucaccucuuccaucaug

SEQ ID NO: 1786336 - RNA, 19 nt, Homo sapiens
  misc_RNA (1)...(19): siRNA sense strand
gagaagccaacauguacuu

SEQ ID NO: 1786337 - RNA, 19 nt, Homo sapiens
  misc_RNA (1)...(19): siRNA sense strand
gagcagggagcgcuucuuc

SEQ ID NO: 1786338 - RNA, 19 nt, Homo sapiens
  misc_RNA (1)...(19): siRNA sense strand
agaccuaccugagugagaa

SEQ ID NO: 1786339 - RNA, 19 nt, Homo sapiens
  misc_RNA (1)...(19): siRNA sense strand
ccaucgagcuagccauugu

SEQ ID NO: 1786340 - RNA, 19 nt, Homo sapiens
  misc_RNA (1)...(19): siRNA sense strand
ggucugccaucucuacuac

SEQ ID NO: 1786341 - RNA, 19 nt, Homo sapiens
  misc_RNA (1)...(19): siRNA sense strand
aaacaucgagucagaucuu

SEQ ID NO: 1786342 - RNA, 19 nt, Homo sapiens
  misc_RNA (1)...(19): siRNA sense strand
acauguacuuccugauuga

SEQ ID NO: 1786343 - RNA, 19 nt, Homo sapiens
  misc_RNA (1)...(19): siRNA sense strand
gaccaucgagcuagccauu

SEQ ID NO: 1786344 - RNA, 19 nt, Homo sapiens
  misc_RNA (1)...(19): siRNA sense strand
gcuccgacaugcaggaagu

SEQ ID NO: 1786345 - RNA, 19 nt, Homo sapiens
  misc_RNA (1)...(19): siRNA sense strand
ccguggccguggacauuua

SEQ ID NO: 1786346 - RNA, 19 nt, Homo sapiens
  misc_RNA (1)...(19): siRNA sense strand
caaccaggcugcguucaac

SEQ ID NO: 1786347 - RNA, 19 nt, Homo sapiens
  misc_RNA (1)...(19): siRNA sense strand
cagagaagccaacauguac

SEQ ID NO: 1786348 - RNA, 19 nt, Homo sapiens
  misc_RNA (1)...(19): siRNA sense strand
gaccuuuggcuaugaguau

SEQ ID NO: 1786349 - RNA, 19 nt, Homo sapiens
  misc_RNA (1)...(19): siRNA sense strand
caccaccacuuccuguaug

SEQ ID NO: 1786350 - RNA, 19 nt, Homo sapiens
  misc_RNA (1)...(19): siRNA sense strand
ggcaagcaccucccagaga

SEQ ID NO: 1786351 - RNA, 19 nt, Homo sapiens
  misc_RNA (1)...(19): siRNA sense strand
aacauguacuuccugauug

SEQ ID NO: 1786352 - RNA, 19 nt, Homo sapiens
  misc_RNA (1)...(19): siRNA sense strand
acagcagccuccacgacua

SEQ ID NO: 1786353 - RNA, 19 nt, Homo sapiens
  misc_RNA (1)...(19): siRNA sense strand
ccacggagccaccuuucug

SEQ ID NO: 1786354 - RNA, 19 nt, Homo sapiens
  misc_RNA (1)...(19): siRNA sense strand
gcuaagcggguccagcuau

SEQ ID NO: 1786355 - RNA, 19 nt, Homo sapiens
  misc_RNA (1)...(19): siRNA sense strand
ggcgaggucugccaucucu

SEQ ID NO: 1786356 - RNA, 19 nt, Homo sapiens
  misc_RNA (1)...(19): siRNA sense strand
cauuauggccuugaccuuu

SEQ ID NO: 1786357 - RNA, 19 nt, Homo sapiens
  misc_RNA (1)...(19): siRNA sense strand
gauccugggcugccuguuc

SEQ ID NO: 1786358 - RNA, 19 nt, Homo sapiens
  misc_RNA (1)...(19): siRNA sense strand
gugcuagucugcgccauca

SEQ ID NO: 1786359 - RNA, 19 nt, Homo sapiens
  misc_RNA (1)...(19): siRNA sense strand
cuaagcggguccagcuaug

SEQ ID NO: 1786360 - RNA, 19 nt, Homo sapiens
  misc_RNA (1)...(19): siRNA sense strand
gucgucaccucuuccauca

SEQ ID NO: 1786361 - RNA, 19 nt, Homo sapiens
  misc_RNA (1)...(19): siRNA sense strand
guggcgggauucaaacuuc

SEQ ID NO: 1786362 - RNA, 19 nt, Homo sapiens
  misc_RNA (1)...(19): siRNA sense strand
cgacuacgccaagaucuuc

SEQ ID NO: 1786363 - RNA, 19 nt, Homo sapiens
  misc_RNA (1)...(19): siRNA sense strand
gagagaccuaccugaguga

SEQ ID NO: 1786364 - RNA, 19 nt, Homo sapiens
  misc_RNA (1)...(19): siRNA sense strand
gcaccuacgcgggacaguu

SEQ ID NO: 1786365 - RNA, 19 nt, Homo sapiens
  misc_RNA (1)...(19): siRNA sense strand
caucaaccucuuugucaug

SEQ ID NO: 1786366 - RNA, 19 nt, Homo sapiens
  misc_RNA (1)...(19): siRNA sense strand
ggccuugaccuuuggcuau

SEQ ID NO: 1786367 - RNA, 19 nt, Homo sapiens
  misc_RNA (1)...(19): siRNA sense strand
auuauggccuugaccuuug

SEQ ID NO: 1786368 - RNA, 19 nt, Homo sapiens
  misc_RNA (1)...(19): siRNA sense strand
cgacaugcaggaagucauc

SEQ ID NO: 1786369 - RNA, 19 nt, Homo sapiens
  misc_RNA (1)...(19): siRNA sense strand
ccaccaccacuuccuguau

SEQ ID NO: 1786370 - RNA, 19 nt, Homo sapiens
  misc_RNA (1)...(19): siRNA sense strand
ugucgggccucaaugaucu

SEQ ID NO: 1786371 - RNA, 19 nt, Homo sapiens
  misc_RNA (1)...(19): siRNA sense strand
gcccuguccgucuccuuua

SEQ ID NO: 1786372 - RNA, 19 nt, Homo sapiens
  misc_RNA (1)...(19): siRNA sense strand
cgggacaguucgugaugga

SEQ ID NO: 1786373 - RNA, 19 nt, Homo sapiens
  misc_RNA (1)...(19): siRNA sense strand
cagagagaccuaccugagu

SEQ ID NO: 1786374 - RNA, 19 nt, Homo sapiens
  misc_RNA (1)...(19): siRNA sense strand
ccaucaaccucuacuucgu

SEQ ID NO: 1786375 - RNA, 19 nt, Homo sapiens
  misc_RNA (1)...(19): siRNA sense strand
ugcaggaguuugccaaugg

SEQ ID NO: 1786376 - RNA, 19 nt, Homo sapiens
  misc_RNA (1)...(19): siRNA sense strand
ucaucaaccucuuugucau

SEQ ID NO: 1786377 - RNA, 19 nt, Homo sapiens
  misc_RNA (1)...(19): siRNA sense strand
ccacgacuacgccaagauc

SEQ ID NO: 1786378 - RNA, 19 nt, Homo sapiens
  misc_RNA (1)...(19): siRNA sense strand
caucguggacaccuucuuc

SEQ ID NO: 1786379 - RNA, 19 nt, Homo sapiens
  misc_RNA (1)...(19): siRNA sense strand
ccaaccaggcugcguucaa

SEQ ID NO: 1786380 - RNA, 19 nt, Homo sapiens
  misc_RNA (1)...(19): siRNA sense strand
gccuugaccuuuggcuaug

SEQ ID NO: 1786381 - RNA, 19 nt, Homo sapiens
  misc_RNA (1)...(19): siRNA sense strand
acucggcccuggucaaguc

SEQ ID NO: 1786382 - RNA, 19 nt, Homo sapiens
  misc_RNA (1)...(19): siRNA sense strand
ugacaaggguccccaaagg

SEQ ID NO: 1786383 - RNA, 19 nt, Homo sapiens
  misc_RNA (1)...(19): siRNA sense strand
gaaacaucgagucagaucu

SEQ ID NO: 1786384 - RNA, 19 nt, Homo sapiens
  misc_RNA (1)...(19): siRNA sense strand
caccuacgcgggacaguuc

SEQ ID NO: 1786385 - RNA, 19 nt, Homo sapiens
  misc_RNA (1)...(19): siRNA sense strand
caccguggccguggacauu

SEQ ID NO: 1786386 - RNA, 19 nt, Homo sapiens
  misc_RNA (1)...(19): siRNA sense strand
uaucaucaaccucuuuguc

SEQ ID NO: 1786387 - RNA, 19 nt, Homo sapiens
  misc_RNA (1)...(19): siRNA sense strand
gagagaagcuggccacagu

SEQ ID NO: 1786388 - RNA, 19 nt, Homo sapiens
  misc_RNA (1)...(19): siRNA sense strand
caacacgucugacuucucu

SEQ ID NO: 1786389 - RNA, 19 nt, Homo sapiens
  misc_RNA (1)...(19): siRNA sense strand
ugaccaaccuguucugcuu

SEQ ID NO: 1786390 - RNA, 19 nt, Homo sapiens
  misc_RNA (1)...(19): siRNA sense strand
ugucugcuaugaucucuuu

SEQ ID NO: 1786391 - RNA, 19 nt, Homo sapiens
  misc_RNA (1)...(19): siRNA sense strand
ugcaauggcuccaagauag

SEQ ID NO: 1786392 - RNA, 19 nt, Homo sapiens
  misc_RNA (1)...(19): siRNA sense strand
cgacccgccuugucugcua

SEQ ID NO: 1786393 - RNA, 19 nt, Homo sapiens
  misc_RNA (1)...(19): siRNA sense strand
ccuaggaagguguaugaua

SEQ ID NO: 1786394 - RNA, 19 nt, Homo sapiens
  misc_RNA (1)...(19): siRNA sense strand
ucacugggccugccucaau

SEQ ID NO: 1786395 - RNA, 19 nt, Homo sapiens
  misc_RNA (1)...(19): siRNA sense strand
gcuccaagauagcgacuac

SEQ ID NO: 1786396 - RNA, 19 nt, Homo sapiens
  misc_RNA (1)...(19): siRNA sense strand
gcacacagugauccacaug

SEQ ID NO: 1786397 - RNA, 19 nt, Homo sapiens
  misc_RNA (1)...(19): siRNA sense strand
caaccuggacccacucaug

SEQ ID NO: 1786398 - RNA, 19 nt, Homo sapiens
  misc_RNA (1)...(19): siRNA sense strand
gagaagcuggccacaguca

SEQ ID NO: 1786399 - RNA, 19 nt, Homo sapiens
  misc_RNA (1)...(19): siRNA sense strand
cugcaauggcuccaagaua

SEQ ID NO: 1786400 - RNA, 19 nt, Homo sapiens
  misc_RNA (1)...(19): siRNA sense strand
guaagugccccaagagaaa

SEQ ID NO: 1786401 - RNA, 19 nt, Homo sapiens
  misc_RNA (1)...(19): siRNA sense strand
gaagcuggccacagucaac

SEQ ID NO: 1786402 - RNA, 19 nt, Homo sapiens
  misc_RNA (1)...(19): siRNA sense strand
cgccuugucugcuaugauc

SEQ ID NO: 1786403 - RNA, 19 nt, Homo sapiens
  misc_RNA (1)...(19): siRNA sense strand
caaccuguucugcuucgaa

SEQ ID NO: 1786404 - RNA, 19 nt, Homo sapiens
  misc_RNA (1)...(19): siRNA sense strand
ccucaacacgucugacuuc

SEQ ID NO: 1786405 - RNA, 19 nt, Homo sapiens
  misc_RNA (1)...(19): siRNA sense strand
gcaccugccggcuaucagu

SEQ ID NO: 1786406 - RNA, 19 nt, Homo sapiens
  misc_RNA (1)...(19): siRNA sense strand
ccauggagacugugacgau

SEQ ID NO: 1786407 - RNA, 19 nt, Homo sapiens
  misc_RNA (1)...(19): siRNA sense strand
ugacuggucuaguuuuaau

SEQ ID NO: 1786408 - RNA, 19 nt, Homo sapiens
  misc_RNA (1)...(19): siRNA sense strand
gacccgccuugucugcuau

SEQ ID NO: 1786409 - RNA, 19 nt, Homo sapiens
  misc_RNA (1)...(19): siRNA sense strand
acacgucugacuucucuga

SEQ ID NO: 1786410 - RNA, 19 nt, Homo sapiens
  misc_RNA (1)...(19): siRNA sense strand
ccaagagaaaggugaccaa

SEQ ID NO: 1786411 - RNA, 19 nt, Homo sapiens
  misc_RNA (1)...(19): siRNA sense strand
gggccucccucugaucgau

SEQ ID NO: 1786412 - RNA, 19 nt, Homo sapiens
  misc_RNA (1)...(19): siRNA sense strand
ucucugacuggucuaguuu

SEQ ID NO: 1786413 - RNA, 19 nt, Homo sapiens
  misc_RNA (1)...(19): siRNA sense strand
cacugggccugccucaaug

SEQ ID NO: 1786414 - RNA, 19 nt, Homo sapiens
  misc_RNA (1)...(19): siRNA sense strand
aaccuggacccacucauga

SEQ ID NO: 1786415 - RNA, 19 nt, Homo sapiens
  misc_RNA (1)...(19): siRNA sense strand
ccuccgcacugagagagaa

SEQ ID NO: 1786416 - RNA, 19 nt, Homo sapiens
  misc_RNA (1)...(19): siRNA sense strand
ggacagacccuuccucuuu

SEQ ID NO: 1786417 - RNA, 19 nt, Homo sapiens
  misc_RNA (1)...(19): siRNA sense strand
gcuaugggauucaagauug

SEQ ID NO: 1786418 - RNA, 19 nt, Homo sapiens
  misc_RNA (1)...(19): siRNA sense strand
ggagagagccagauucauc

SEQ ID NO: 1786419 - RNA, 19 nt, Homo sapiens
  misc_RNA (1)...(19): siRNA sense strand
gacagacccuuccucuuug

SEQ ID NO: 1786420 - RNA, 19 nt, Homo sapiens
  misc_RNA (1)...(19): siRNA sense strand
gggaaugaccgacauguuc

SEQ ID NO: 1786421 - RNA, 19 nt, Homo sapiens
  misc_RNA (1)...(19): siRNA sense strand
ccgaggagaucaucaugga

SEQ ID NO: 1786422 - RNA, 19 nt, Homo sapiens
  misc_RNA (1)...(19): siRNA sense strand
cuagagaaccugggaauga

SEQ ID NO: 1786423 - RNA, 19 nt, Homo sapiens
  misc_RNA (1)...(19): siRNA sense strand
ggaaugaccgacauguuca

SEQ ID NO: 1786424 - RNA, 19 nt, Homo sapiens
  misc_RNA (1)...(19): siRNA sense strand
ggagcacggucaagcaagu

SEQ ID NO: 1786425 - RNA, 19 nt, Homo sapiens
  misc_RNA (1)...(19): siRNA sense strand
ucaagcagcuaugggauuc

SEQ ID NO: 1786426 - RNA, 19 nt, Homo sapiens
  misc_RNA (1)...(19): siRNA sense strand
gagagagccagauucauca

SEQ ID NO: 1786427 - RNA, 19 nt, Homo sapiens
  misc_RNA (1)...(19): siRNA sense strand
caaaagguaugaucagcaa

SEQ ID NO: 1786428 - RNA, 19 nt, Homo sapiens
  misc_RNA (1)...(19): siRNA sense strand
cgacauguucagacaguuu

SEQ ID NO: 1786429 - RNA, 19 nt, Homo sapiens
  misc_RNA (1)...(19): siRNA sense strand
caacuugcuugggaaagga

SEQ ID NO: 1786430 - RNA, 19 nt, Homo sapiens
  misc_RNA (1)...(19): siRNA sense strand
ugaccgacauguucagaca

SEQ ID NO: 1786431 - RNA, 19 nt, Homo sapiens
  misc_RNA (1)...(19): siRNA sense strand
gcucaucagccacuggaaa

SEQ ID NO: 1786432 - RNA, 19 nt, Homo sapiens
  misc_RNA (1)...(19): siRNA sense strand
gagaaacccagcagcagau

SEQ ID NO: 1786433 - RNA, 19 nt, Homo sapiens
  misc_RNA (1)...(19): siRNA sense strand
ggugaaugcccucuacuuc

SEQ ID NO: 1786434 - RNA, 19 nt, Homo sapiens
  misc_RNA (1)...(19): siRNA sense strand
gagccagauucaucaucaa

SEQ ID NO: 1786435 - RNA, 19 nt, Homo sapiens
  misc_RNA (1)...(19): siRNA sense strand
ccaccuggccucagacuuc

SEQ ID NO: 1786436 - RNA, 19 nt, Homo sapiens
  misc_RNA (1)...(19): siRNA sense strand
gcagcuaugggauucaaga

SEQ ID NO: 1786437 - RNA, 19 nt, Homo sapiens
  misc_RNA (1)...(19): siRNA sense strand
agagccagauucaucauca

SEQ ID NO: 1786438 - RNA, 19 nt, Homo sapiens
  misc_RNA (1)...(19): siRNA sense strand
gcucagaccaacaaguuca

SEQ ID NO: 1786439 - RNA, 19 nt, Homo sapiens
  misc_RNA (1)...(19): siRNA sense strand
gcugacaacaggaggagaa

SEQ ID NO: 1786440 - RNA, 19 nt, Homo sapiens
  misc_RNA (1)...(19): siRNA sense strand
gggacacccucagcauguu

SEQ ID NO: 1786441 - RNA, 19 nt, Homo sapiens
  misc_RNA (1)...(19): siRNA sense strand
gggugaagacacacacaaa

SEQ ID NO: 1786442 - RNA, 19 nt, Homo sapiens
  misc_RNA (1)...(19): siRNA sense strand
aaacccagcagcagauuca

SEQ ID NO: 1786443 - RNA, 19 nt, Homo sapiens
  misc_RNA (1)...(19): siRNA sense strand
aagugaagaucgaggugaa

SEQ ID NO: 1786444 - RNA, 19 nt, Homo sapiens
  misc_RNA (1)...(19): siRNA sense strand
guggagagagccagauuca

SEQ ID NO: 1786445 - RNA, 19 nt, Homo sapiens
  misc_RNA (1)...(19): siRNA sense strand
gcuggugaaugcccucuac

SEQ ID NO: 1786446 - RNA, 19 nt, Homo sapiens
  misc_RNA (1)...(19): siRNA sense strand
ucucugcccucaccaacau

SEQ ID NO: 1786447 - RNA, 19 nt, Homo sapiens
  misc_RNA (1)...(19): siRNA sense strand
gaaacccagcagcagauuc

SEQ ID NO: 1786448 - RNA, 19 nt, Homo sapiens
  misc_RNA (1)...(19): siRNA sense strand
uggcucagaccaacaaguu

SEQ ID NO: 1786449 - RNA, 19 nt, Homo sapiens
  misc_RNA (1)...(19): siRNA sense strand
ggacacccucagcauguuc

SEQ ID NO: 1786450 - RNA, 19 nt, Homo sapiens
  misc_RNA (1)...(19): siRNA sense strand
auccacagcugucauaguc

SEQ ID NO: 1786451 - RNA, 19 nt, Homo sapiens
  misc_RNA (1)...(19): siRNA sense strand
ccacuggaaaggcaacaug

SEQ ID NO: 1786452 - RNA, 19 nt, Homo sapiens
  misc_RNA (1)...(19): siRNA sense strand
gcagauucaagcagcuaug

SEQ ID NO: 1786453 - RNA, 19 nt, Homo sapiens
  misc_RNA (1)...(19): siRNA sense strand
guucauugcugccccuuau

SEQ ID NO: 1786454 - RNA, 19 nt, Homo sapiens
  misc_RNA (1)...(19): siRNA sense strand
aagcagcuaugggauucaa

SEQ ID NO: 1786455 - RNA, 19 nt, Homo sapiens
  misc_RNA (1)...(19): siRNA sense strand
uccggcaucuguacaagga

SEQ ID NO: 1786456 - RNA, 19 nt, Homo sapiens
  misc_RNA (1)...(19): siRNA sense strand
uagagaaccugggaaugac

SEQ ID NO: 1786457 - RNA, 19 nt, Homo sapiens
  misc_RNA (1)...(19): siRNA sense strand
uuacuacgacauccuggaa

SEQ ID NO: 1786458 - RNA, 19 nt, Homo sapiens
  misc_RNA (1)...(19): siRNA sense strand
gcccucaccaacauucuga

SEQ ID NO: 1786459 - RNA, 19 nt, Homo sapiens
  misc_RNA (1)...(19): siRNA sense strand
ugcagaaagugaagaucga

SEQ ID NO: 1786460 - RNA, 19 nt, Homo sapiens
  misc_RNA (1)...(19): siRNA sense strand
caaggaccgcaacgugguu

SEQ ID NO: 1786461 - RNA, 19 nt, Homo sapiens
  misc_RNA (1)...(19): siRNA sense strand
ucaggaagccccuagagaa

SEQ ID NO: 1786462 - RNA, 19 nt, Homo sapiens
  misc_RNA (1)...(19): siRNA sense strand
acagacccuuccucuuugu

SEQ ID NO: 1786463 - RNA, 19 nt, Homo sapiens
  misc_RNA (1)...(19): siRNA sense strand
ggagaucaucauggacaga

SEQ ID NO: 1786464 - RNA, 19 nt, Homo sapiens
  misc_RNA (1)...(19): siRNA sense strand
gaagaagaccuuuaaagaa

SEQ ID NO: 1786465 - RNA, 19 nt, Homo sapiens
  misc_RNA (1)...(19): siRNA sense strand
ggaagaagaccuuuaaaga

SEQ ID NO: 1786466 - RNA, 19 nt, Homo sapiens
  misc_RNA (1)...(19): siRNA sense strand
gaacagcacaagaguuaua

SEQ ID NO: 1786467 - RNA, 19 nt, Homo sapiens
  misc_RNA (1)...(19): siRNA sense strand
gcacaagaguuauaagauc

SEQ ID NO: 1786468 - RNA, 19 nt, Homo sapiens
  misc_RNA (1)...(19): siRNA sense strand
ugaagcaccuggagaauga

SEQ ID NO: 1786469 - RNA, 19 nt, Homo sapiens
  misc_RNA (1)...(19): siRNA sense strand
cggaacagcacaagaguua

SEQ ID NO: 1786470 - RNA, 19 nt, Homo sapiens
  misc_RNA (1)...(19): siRNA sense strand
aagaagaccuuuaaagaag

SEQ ID NO: 1786471 - RNA, 19 nt, Homo sapiens
  misc_RNA (1)...(19): siRNA sense strand
gaagaccuuuaaagaagug

SEQ ID NO: 1786472 - RNA, 19 nt, Homo sapiens
  misc_RNA (1)...(19): siRNA sense strand
ccaggaagaagaccuuuaa

SEQ ID NO: 1786473 - RNA, 19 nt, Homo sapiens
  misc_RNA (1)...(19): siRNA sense strand
gcacgaggaaccuguguga

SEQ ID NO: 1786474 - RNA, 19 nt, Homo sapiens
  misc_RNA (1)...(19): siRNA sense strand
caaguucccucgugugaag

SEQ ID NO: 1786475 - RNA, 19 nt, Homo sapiens
  misc_RNA (1)...(19): siRNA sense strand
cacaggaaauguucaccua

SEQ ID NO: 1786476 - RNA, 19 nt, Homo sapiens
  misc_RNA (1)...(19): siRNA sense strand
gcaccggcaucaccaggaa

SEQ ID NO: 1786477 - RNA, 19 nt, Homo sapiens
  misc_RNA (1)...(19): siRNA sense strand
uacuacagcuccauuaaga

SEQ ID NO: 1786478 - RNA, 19 nt, Homo sapiens
  misc_RNA (1)...(19): siRNA sense strand
acaggcaccuaccagcuua

SEQ ID NO: 1786479 - RNA, 19 nt, Homo sapiens
  misc_RNA (1)...(19): siRNA sense strand
gcaaccacaucaaguaugc

SEQ ID NO: 1786480 - RNA, 19 nt, Homo sapiens
  misc_RNA (1)...(19): siRNA sense strand
cgaggagacuuccgaaucu

SEQ ID NO: 1786481 - RNA, 19 nt, Homo sapiens
  misc_RNA (1)...(19): siRNA sense strand
ccaacaugcugcuggaaau

SEQ ID NO: 1786482 - RNA, 19 nt, Homo sapiens
  misc_RNA (1)...(19): siRNA sense strand
ucaccgagcucugcauuca

SEQ ID NO: 1786483 - RNA, 19 nt, Homo sapiens
  misc_RNA (1)...(19): siRNA sense strand
aggagauggucaacuauuu

SEQ ID NO: 1786484 - RNA, 19 nt, Homo sapiens
  misc_RNA (1)...(19): siRNA sense strand
uauaagauccgcuucaaca

SEQ ID NO: 1786485 - RNA, 19 nt, Homo sapiens
  misc_RNA (1)...(19): siRNA sense strand
gcugguacaugagcacuga

SEQ ID NO: 1786486 - RNA, 19 nt, Homo sapiens
  misc_RNA (1)...(19): siRNA sense strand
guuauaagauccgcuucaa

SEQ ID NO: 1786487 - RNA, 19 nt, Homo sapiens
  misc_RNA (1)...(19): siRNA sense strand
gccacggccucuuucauga

SEQ ID NO: 1786488 - RNA, 19 nt, Homo sapiens
  misc_RNA (1)...(19): siRNA sense strand
gaaggaguccaguaacaca

SEQ ID NO: 1786489 - RNA, 19 nt, Homo sapiens
  misc_RNA (1)...(19): siRNA sense strand
caggaaauguucaccuaca

SEQ ID NO: 1786490 - RNA, 19 nt, Homo sapiens
  misc_RNA (1)...(19): siRNA sense strand
ggagauggucaacuauuuc

SEQ ID NO: 1786491 - RNA, 19 nt, Homo sapiens
  misc_RNA (1)...(19): siRNA sense strand
gggacuucaucaaccagua

SEQ ID NO: 1786492 - RNA, 19 nt, Homo sapiens
  misc_RNA (1)...(19): siRNA sense strand
agacaaggcagcaguggaa

SEQ ID NO: 1786493 - RNA, 19 nt, Homo sapiens
  misc_RNA (1)...(19): siRNA sense strand
ggaggugacaagccgcaua

SEQ ID NO: 1786494 - RNA, 19 nt, Homo sapiens
  misc_RNA (1)...(19): siRNA sense strand
cagcugcccugauggagau

SEQ ID NO: 1786495 - RNA, 19 nt, Homo sapiens
  misc_RNA (1)...(19): siRNA sense strand
gagaauggagagagcuuug

SEQ ID NO: 1786496 - RNA, 19 nt, Homo sapiens
  misc_RNA (1)...(19): siRNA sense strand
gcucggccaucacaguguu

SEQ ID NO: 1786497 - RNA, 19 nt, Homo sapiens
  misc_RNA (1)...(19): siRNA sense strand
gccaggcucucaccuucuu

SEQ ID NO: 1786498 - RNA, 19 nt, Homo sapiens
  misc_RNA (1)...(19): siRNA sense strand
acaauccgcucaguggaaa

SEQ ID NO: 1786499 - RNA, 19 nt, Homo sapiens
  misc_RNA (1)...(19): siRNA sense strand
agaggaaggaguccaguaa

SEQ ID NO: 1786500 - RNA, 19 nt, Homo sapiens
  misc_RNA (1)...(19): siRNA sense strand
cagcacaagaguuauaaga

SEQ ID NO: 1786501 - RNA, 19 nt, Homo sapiens
  misc_RNA (1)...(19): siRNA sense strand
gcucccaacuugaccaucu

SEQ ID NO: 1786502 - RNA, 19 nt, Homo sapiens
  misc_RNA (1)...(19): siRNA sense strand
gaucaccgagcucugcauu

SEQ ID NO: 1786503 - RNA, 19 nt, Homo sapiens
  misc_RNA (1)...(19): siRNA sense strand
guuaccagcuagccaaagu

SEQ ID NO: 1786504 - RNA, 19 nt, Homo sapiens
  misc_RNA (1)...(19): siRNA sense strand
uucaguggcugguacauga

SEQ ID NO: 1786505 - RNA, 19 nt, Homo sapiens
  misc_RNA (1)...(19): siRNA sense strand
caacaugcugcuggaaauu

SEQ ID NO: 1786506 - RNA, 19 nt, Homo sapiens
  misc_RNA (1)...(19): siRNA sense strand
gagauccaccucacuguag

SEQ ID NO: 1786507 - RNA, 19 nt, Homo sapiens
  misc_RNA (1)...(19): siRNA sense strand
cagaagagcccagggaaca

SEQ ID NO: 1786508 - RNA, 19 nt, Homo sapiens
  misc_RNA (1)...(19): siRNA sense strand
gaaggcgacaauccuguau

SEQ ID NO: 1786509 - RNA, 19 nt, Homo sapiens
  misc_RNA (1)...(19): siRNA sense strand
ccucgucccuguggaaaga

SEQ ID NO: 1786510 - RNA, 19 nt, Homo sapiens
  misc_RNA (1)...(19): siRNA sense strand
caguagagcagcuggagaa

SEQ ID NO: 1786511 - RNA, 19 nt, Homo sapiens
  misc_RNA (1)...(19): siRNA sense strand
acacacggcuggaggaacu

SEQ ID NO: 1786512 - RNA, 19 nt, Homo sapiens
  misc_RNA (1)...(19): siRNA sense strand
aucaggagauggucaacua

SEQ ID NO: 1786513 - RNA, 19 nt, Homo sapiens
  misc_RNA (1)...(19): siRNA sense strand
ggucugcacaggaaauguu

SEQ ID NO: 1786514 - RNA, 19 nt, Homo sapiens
  misc_RNA (1)...(19): siRNA sense strand
ucaugaagcaccuggagaa

SEQ ID NO: 1786515 - RNA, 19 nt, Homo sapiens
  misc_RNA (1)...(19): siRNA sense strand
gcaugacauugagagcaaa

SEQ ID NO: 1786516 - RNA, 19 nt, Homo sapiens
  misc_RNA (1)...(19): siRNA sense strand
gcucagcaccuuggcagaa

SEQ ID NO: 1786517 - RNA, 19 nt, Homo sapiens
  misc_RNA (1)...(19): siRNA sense strand
guacuacagcuccauuaag

SEQ ID NO: 1786518 - RNA, 19 nt, Homo sapiens
  misc_RNA (1)...(19): siRNA sense strand
ggagaauggagagagcuuu

SEQ ID NO: 1786519 - RNA, 19 nt, Homo sapiens
  misc_RNA (1)...(19): siRNA sense strand
ugaaggcgacaauccugua

SEQ ID NO: 1786520 - RNA, 19 nt, Homo sapiens
  misc_RNA (1)...(19): siRNA sense strand
agaagaccuuuaaagaagu

SEQ ID NO: 1786521 - RNA, 19 nt, Homo sapiens
  misc_RNA (1)...(19): siRNA sense strand
guacaugagcacugagauc

SEQ ID NO: 1786522 - RNA, 19 nt, Homo sapiens
  misc_RNA (1)...(19): siRNA sense strand
gaggagacuuccgaaucug

SEQ ID NO: 1786523 - RNA, 19 nt, Homo sapiens
  misc_RNA (1)...(19): siRNA sense strand
gugcacaggcggaagaugu

SEQ ID NO: 1786524 - RNA, 19 nt, Homo sapiens
  misc_RNA (1)...(19): siRNA sense strand
aggaaggaguccaguaaca

SEQ ID NO: 1786525 - RNA, 19 nt, Homo sapiens
  misc_RNA (1)...(19): siRNA sense strand
caggagauggucaacuauu

SEQ ID NO: 1786526 - RNA, 19 nt, Homo sapiens
  misc_RNA (1)...(19): siRNA sense strand
caaggcagcaguggaaauc

SEQ ID NO: 1786527 - RNA, 19 nt, Homo sapiens
  misc_RNA (1)...(19): siRNA sense strand
ugccgaugcucccaacuug

SEQ ID NO: 1786528 - RNA, 19 nt, Homo sapiens
  misc_RNA (1)...(19): siRNA sense strand
ggacacacggcuggaggaa

SEQ ID NO: 1786529 - RNA, 19 nt, Homo sapiens
  misc_RNA (1)...(19): siRNA sense strand
ggagagcgagcugguguuc

SEQ ID NO: 1786530 - RNA, 19 nt, Homo sapiens
  misc_RNA (1)...(19): siRNA sense strand
ugccugggcucccugguau

SEQ ID NO: 1786531 - RNA, 19 nt, Homo sapiens
  misc_RNA (1)...(19): siRNA sense strand
gaucuccgccucgcucaug

SEQ ID NO: 1786532 - RNA, 19 nt, Homo sapiens
  misc_RNA (1)...(19): siRNA sense strand
gaauggagagagcuuugca

SEQ ID NO: 1786533 - RNA, 19 nt, Homo sapiens
  misc_RNA (1)...(19): siRNA sense strand
ugcaugacauugagagcaa

SEQ ID NO: 1786534 - RNA, 19 nt, Homo sapiens
  misc_RNA (1)...(19): siRNA sense strand
agagauccaccucacugua

SEQ ID NO: 1786535 - RNA, 19 nt, Homo sapiens
  misc_RNA (1)...(19): siRNA sense strand
aggcagcaguggaaaucaa

SEQ ID NO: 1786536 - RNA, 19 nt, Homo sapiens
  misc_RNA (1)...(19): siRNA sense strand
ucccaugacuuugguguuc

SEQ ID NO: 1786537 - RNA, 19 nt, Homo sapiens
  misc_RNA (1)...(19): siRNA sense strand
ccacucccaugacuuuggu

SEQ ID NO: 1786538 - RNA, 19 nt, Homo sapiens
  misc_RNA (1)...(19): siRNA sense strand
gcagcccacucccaugacu

SEQ ID NO: 1786539 - RNA, 19 nt, Homo sapiens
  misc_RNA (1)...(19): siRNA sense strand
ucugcaaccacaucaagua

SEQ ID NO: 1786540 - RNA, 19 nt, Homo sapiens
  misc_RNA (1)...(19): siRNA sense strand
gagagauccaccucacugu

SEQ ID NO: 1786541 - RNA, 19 nt, Homo sapiens
  misc_RNA (1)...(19): siRNA sense strand
ccgaggagacuuccgaauc

SEQ ID NO: 1786542 - RNA, 19 nt, Homo sapiens
  misc_RNA (1)...(19): siRNA sense strand
gagacccugugcccugcuu

SEQ ID NO: 1786543 - RNA, 19 nt, Homo sapiens
  misc_RNA (1)...(19): siRNA sense strand
cuguagcugugcuggcaua

SEQ ID NO: 1786544 - RNA, 19 nt, Homo sapiens
  misc_RNA (1)...(19): siRNA sense strand
ccacggccucuuucaugaa

SEQ ID NO: 1786545 - RNA, 19 nt, Homo sapiens
  misc_RNA (1)...(19): siRNA sense strand
gggagcaucaccuaugaca

SEQ ID NO: 1786546 - RNA, 19 nt, Homo sapiens
  misc_RNA (1)...(19): siRNA sense strand
ggcaucaccaggaagaaga

SEQ ID NO: 1786547 - RNA, 19 nt, Homo sapiens
  misc_RNA (1)...(19): siRNA sense strand
acgaacagcggcuucaaga

SEQ ID NO: 1786548 - RNA, 19 nt, Homo sapiens
  misc_RNA (1)...(19): siRNA sense strand
caguacuacagcuccauua

SEQ ID NO: 1786549 - RNA, 19 nt, Homo sapiens
  misc_RNA (1)...(19): siRNA sense strand
ccugugagaccuucugugu

SEQ ID NO: 1786550 - RNA, 19 nt, Homo sapiens
  misc_RNA (1)...(19): siRNA sense strand
ggcagccucacuccuguuu

SEQ ID NO: 1786551 - RNA, 19 nt, Homo sapiens
  misc_RNA (1)...(19): siRNA sense strand
agaccuacgugcaggacau

SEQ ID NO: 1786552 - RNA, 19 nt, Homo sapiens
  misc_RNA (1)...(19): siRNA sense strand
cuuugcagcugcccugaug

SEQ ID NO: 1786553 - RNA, 19 nt, Homo sapiens
  misc_RNA (1)...(19): siRNA sense strand
ggacuucaucaaccaguac

SEQ ID NO: 1786554 - RNA, 19 nt, Homo sapiens
  misc_RNA (1)...(19): siRNA sense strand
ggaagcugcagguguucga

SEQ ID NO: 1786555 - RNA, 19 nt, Homo sapiens
  misc_RNA (1)...(19): siRNA sense strand
aaccuucgcucggccauca

SEQ ID NO: 1786556 - RNA, 19 nt, Homo sapiens
  misc_RNA (1)...(19): siRNA sense strand
gaagauguuccaggcuaca

SEQ ID NO: 1786557 - RNA, 19 nt, Homo sapiens
  misc_RNA (1)...(19): siRNA sense strand
gcacaggcggaagauguuc

SEQ ID NO: 1786558 - RNA, 19 nt, Homo sapiens
  misc_RNA (1)...(19): siRNA sense strand
ggccaacgccgugaagauc

SEQ ID NO: 1786559 - RNA, 19 nt, Homo sapiens
  misc_RNA (1)...(19): siRNA sense strand
caggaagaagaccuuuaaa

SEQ ID NO: 1786560 - RNA, 19 nt, Homo sapiens
  misc_RNA (1)...(19): siRNA sense strand
ggaaggaguccaguaacac

SEQ ID NO: 1786561 - RNA, 19 nt, Homo sapiens
  misc_RNA (1)...(19): siRNA sense strand
ccugggcucccugguauuu

SEQ ID NO: 1786562 - RNA, 19 nt, Homo sapiens
  misc_RNA (1)...(19): siRNA sense strand
ucagcaccuuggcagaaga

SEQ ID NO: 1786563 - RNA, 19 nt, Homo sapiens
  misc_RNA (1)...(19): siRNA sense strand
ucagcaacgcuaccacgaa

SEQ ID NO: 1786564 - RNA, 19 nt, Homo sapiens
  misc_RNA (1)...(19): siRNA sense strand
ggacagagcuccaccauga

SEQ ID NO: 1786565 - RNA, 19 nt, Homo sapiens
  misc_RNA (1)...(19): siRNA sense strand
ggacuaggcuggcggauug

SEQ ID NO: 1786566 - RNA, 19 nt, Homo sapiens
  misc_RNA (1)...(19): siRNA sense strand
guugaagucuguacaaaua

SEQ ID NO: 1786567 - RNA, 19 nt, Homo sapiens
  misc_RNA (1)...(19): siRNA sense strand
uaacagggaugaaugacuu

SEQ ID NO: 1786568 - RNA, 19 nt, Homo sapiens
  misc_RNA (1)...(19): siRNA sense strand
gaacagaagaugucagaug

SEQ ID NO: 1786569 - RNA, 19 nt, Homo sapiens
  misc_RNA (1)...(19): siRNA sense strand
guaccugcauucugccuua

SEQ ID NO: 1786570 - RNA, 19 nt, Homo sapiens
  misc_RNA (1)...(19): siRNA sense strand
guacuucgccacuuacuuu

SEQ ID NO: 1786571 - RNA, 19 nt, Homo sapiens
  misc_RNA (1)...(19): siRNA sense strand
ccacuuacuuuaaugagaa

SEQ ID NO: 1786572 - RNA, 19 nt, Homo sapiens
  misc_RNA (1)...(19): siRNA sense strand
caucaucaaugucuuuguu

SEQ ID NO: 1786573 - RNA, 19 nt, Homo sapiens
  misc_RNA (1)...(19): siRNA sense strand
cuaaaggccugcugacaga

SEQ ID NO: 1786574 - RNA, 19 nt, Homo sapiens
  misc_RNA (1)...(19): siRNA sense strand
ugaaugacuuucugaaugu

SEQ ID NO: 1786575 - RNA, 19 nt, Homo sapiens
  misc_RNA (1)...(19): siRNA sense strand
gcucagacaugcaagaagu

SEQ ID NO: 1786576 - RNA, 19 nt, Homo sapiens
  misc_RNA (1)...(19): siRNA sense strand
cagguaaaccggaacaaua

SEQ ID NO: 1786577 - RNA, 19 nt, Homo sapiens
  misc_RNA (1)...(19): siRNA sense strand
gcauugcacucuuuguuuc

SEQ ID NO: 1786578 - RNA, 19 nt, Homo sapiens
  misc_RNA (1)...(19): siRNA sense strand
gaggaguacucuuguuuua

SEQ ID NO: 1786579 - RNA, 19 nt, Homo sapiens
  misc_RNA (1)...(19): siRNA sense strand
gcaucuugcugaaguaugu

SEQ ID NO: 1786580 - RNA, 19 nt, Homo sapiens
  misc_RNA (1)...(19): siRNA sense strand
gcaggugguugaagucugu

SEQ ID NO: 1786581 - RNA, 19 nt, Homo sapiens
  misc_RNA (1)...(19): siRNA sense strand
aacagaagaugucagauga

SEQ ID NO: 1786582 - RNA, 19 nt, Homo sapiens
  misc_RNA (1)...(19): siRNA sense strand
caucaacccugccuauagu

SEQ ID NO: 1786583 - RNA, 19 nt, Homo sapiens
  misc_RNA (1)...(19): siRNA sense strand
cgugggagcugucaucaug

SEQ ID NO: 1786584 - RNA, 19 nt, Homo sapiens
  misc_RNA (1)...(19): siRNA sense strand
gcucagccauugcuaucaa

SEQ ID NO: 1786585 - RNA, 19 nt, Homo sapiens
  misc_RNA (1)...(19): siRNA sense strand
uaucaucuguuccaucaau

SEQ ID NO: 1786586 - RNA, 19 nt, Homo sapiens
  misc_RNA (1)...(19): siRNA sense strand
gugcugggauguuacuuug

SEQ ID NO: 1786587 - RNA, 19 nt, Homo sapiens
  misc_RNA (1)...(19): siRNA sense strand
aggaguacuucgccacuua

SEQ ID NO: 1786588 - RNA, 19 nt, Homo sapiens
  misc_RNA (1)...(19): siRNA sense strand
uagggcauguggcauuaua

SEQ ID NO: 1786589 - RNA, 19 nt, Homo sapiens
  misc_RNA (1)...(19): siRNA sense strand
gaggaggaguacucuuguu

SEQ ID NO: 1786590 - RNA, 19 nt, Homo sapiens
  misc_RNA (1)...(19): siRNA sense strand
gauuuaaguugcucuggau

SEQ ID NO: 1786591 - RNA, 19 nt, Homo sapiens
  misc_RNA (1)...(19): siRNA sense strand
gaaguucgagaagccaaua

SEQ ID NO: 1786592 - RNA, 19 nt, Homo sapiens
  misc_RNA (1)...(19): siRNA sense strand
uauuauggcccucacauuu

SEQ ID NO: 1786593 - RNA, 19 nt, Homo sapiens
  misc_RNA (1)...(19): siRNA sense strand
ggaccagguuuucuuauga

SEQ ID NO: 1786594 - RNA, 19 nt, Homo sapiens
  misc_RNA (1)...(19): siRNA sense strand
agucaagucuagacaggua

SEQ ID NO: 1786595 - RNA, 19 nt, Homo sapiens
  misc_RNA (1)...(19): siRNA sense strand
gagcaguggcuggauuuaa

SEQ ID NO: 1786596 - RNA, 19 nt, Homo sapiens
  misc_RNA (1)...(19): siRNA sense strand
gaaugacuuucugaauguu

SEQ ID NO: 1786597 - RNA, 19 nt, Homo sapiens
  misc_RNA (1)...(19): siRNA sense strand
gagaagccaauaaguacuu

SEQ ID NO: 1786598 - RNA, 19 nt, Homo sapiens
  misc_RNA (1)...(19): siRNA sense strand
uaacaucaacccugccuau

SEQ ID NO: 1786599 - RNA, 19 nt, Homo sapiens
  misc_RNA (1)...(19): siRNA sense strand
gaacaauaagcaggaaguu

SEQ ID NO: 1786600 - RNA, 19 nt, Homo sapiens
  misc_RNA (1)...(19): siRNA sense strand
gagcauugccuaccuggau

SEQ ID NO: 1786601 - RNA, 19 nt, Homo sapiens
  misc_RNA (1)...(19): siRNA sense strand
ccuagggcauguggcauua

SEQ ID NO: 1786602 - RNA, 19 nt, Homo sapiens
  misc_RNA (1)...(19): siRNA sense strand
ggcuuucucaucacuauua

SEQ ID NO: 1786603 - RNA, 19 nt, Homo sapiens
  misc_RNA (1)...(19): siRNA sense strand
caauauguacuuuguagug

SEQ ID NO: 1786604 - RNA, 19 nt, Homo sapiens
  misc_RNA (1)...(19): siRNA sense strand
gaugaaugacuuucugaau

SEQ ID NO: 1786605 - RNA, 19 nt, Homo sapiens
  misc_RNA (1)...(19): siRNA sense strand
cugcugcacucuacauuug

SEQ ID NO: 1786606 - RNA, 19 nt, Homo sapiens
  misc_RNA (1)...(19): siRNA sense strand
gcuuacagcuucccuuugc

SEQ ID NO: 1786607 - RNA, 19 nt, Homo sapiens
  misc_RNA (1)...(19): siRNA sense strand
cuacuuggguuggcaaugu

SEQ ID NO: 1786608 - RNA, 19 nt, Homo sapiens
  misc_RNA (1)...(19): siRNA sense strand
ccaucaauauguacuuugu

SEQ ID NO: 1786609 - RNA, 19 nt, Homo sapiens
  misc_RNA (1)...(19): siRNA sense strand
uauaguaaucccucucuuu

SEQ ID NO: 1786610 - RNA, 19 nt, Homo sapiens
  misc_RNA (1)...(19): siRNA sense strand
cuuaucaucuguuccauca

SEQ ID NO: 1786611 - RNA, 19 nt, Homo sapiens
  misc_RNA (1)...(19): siRNA sense strand
auacccauccucacauuua

SEQ ID NO: 1786612 - RNA, 19 nt, Homo sapiens
  misc_RNA (1)...(19): siRNA sense strand
gauaugaguauguuacagu

SEQ ID NO: 1786613 - RNA, 19 nt, Homo sapiens
  misc_RNA (1)...(19): siRNA sense strand
ucuguuccaucaauaugua

SEQ ID NO: 1786614 - RNA, 19 nt, Homo sapiens
  misc_RNA (1)...(19): siRNA sense strand
augaaugacuuucugaaug

SEQ ID NO: 1786615 - RNA, 19 nt, Homo sapiens
  misc_RNA (1)...(19): siRNA sense strand
guguugugcugggauguua

SEQ ID NO: 1786616 - RNA, 19 nt, Homo sapiens
  misc_RNA (1)...(19): siRNA sense strand
caaugucuuuguugucuca

SEQ ID NO: 1786617 - RNA, 19 nt, Homo sapiens
  misc_RNA (1)...(19): siRNA sense strand
cguaaacucugggcuuuca

SEQ ID NO: 1786618 - RNA, 19 nt, Homo sapiens
  misc_RNA (1)...(19): siRNA sense strand
gcauguggcauuauaugug

SEQ ID NO: 1786619 - RNA, 19 nt, Homo sapiens
  misc_RNA (1)...(19): siRNA sense strand
gagggauuccugaaccuaa

SEQ ID NO: 1786620 - RNA, 19 nt, Homo sapiens
  misc_RNA (1)...(19): siRNA sense strand
cuaucaaucuucugucugu

SEQ ID NO: 1786621 - RNA, 19 nt, Homo sapiens
  misc_RNA (1)...(19): siRNA sense strand
gccacuuacuuuaaugaga

SEQ ID NO: 1786622 - RNA, 19 nt, Homo sapiens
  misc_RNA (1)...(19): siRNA sense strand
ugagugacuuugccaaugg

SEQ ID NO: 1786623 - RNA, 19 nt, Homo sapiens
  misc_RNA (1)...(19): siRNA sense strand
cagcuucccuuugcucuca

SEQ ID NO: 1786624 - RNA, 19 nt, Homo sapiens
  misc_RNA (1)...(19): siRNA sense strand
ugacaguguuucuggagau

SEQ ID NO: 1786625 - RNA, 19 nt, Homo sapiens
  misc_RNA (1)...(19): siRNA sense strand
ucauacccauccucacauu

SEQ ID NO: 1786626 - RNA, 19 nt, Homo sapiens
  misc_RNA (1)...(19): siRNA sense strand
aaccuauucuggccaguuu

SEQ ID NO: 1786627 - RNA, 19 nt, Homo sapiens
  misc_RNA (1)...(19): siRNA sense strand
uaucaucggcucagacaug

SEQ ID NO: 1786628 - RNA, 19 nt, Homo sapiens
  misc_RNA (1)...(19): siRNA sense strand
ugaauguucuacagagcuu

SEQ ID NO: 1786629 - RNA, 19 nt, Homo sapiens
  misc_RNA (1)...(19): siRNA sense strand
gcuuguugcugucuuccaa

SEQ ID NO: 1786630 - RNA, 19 nt, Homo sapiens
  misc_RNA (1)...(19): siRNA sense strand
gaaccuauucuggccaguu

SEQ ID NO: 1786631 - RNA, 19 nt, Homo sapiens
  misc_RNA (1)...(19): siRNA sense strand
cacaacauguaccugcauu

SEQ ID NO: 1786632 - RNA, 19 nt, Homo sapiens
  misc_RNA (1)...(19): siRNA sense strand
gcacuccacagauugaaca

SEQ ID NO: 1786633 - RNA, 19 nt, Homo sapiens
  misc_RNA (1)...(19): siRNA sense strand
gaaucuugguccuuaucau

SEQ ID NO: 1786634 - RNA, 19 nt, Homo sapiens
  misc_RNA (1)...(19): siRNA sense strand
gaggaguacuucgccacuu

SEQ ID NO: 1786635 - RNA, 19 nt, Homo sapiens
  misc_RNA (1)...(19): siRNA sense strand
ggaacaauaagcaggaagu

SEQ ID NO: 1786636 - RNA, 19 nt, Homo sapiens
  misc_RNA (1)...(19): siRNA sense strand
agacaugcaagaagucauu

SEQ ID NO: 1786637 - RNA, 19 nt, Homo sapiens
  misc_RNA (1)...(19): siRNA sense strand
ugacuuugccaauggacua

SEQ ID NO: 1786638 - RNA, 19 nt, Homo sapiens
  misc_RNA (1)...(19): siRNA sense strand
ggaugaaugacuuucugaa

SEQ ID NO: 1786639 - RNA, 19 nt, Homo sapiens
  misc_RNA (1)...(19): siRNA sense strand
agguaaaccggaacaauaa

SEQ ID NO: 1786640 - RNA, 19 nt, Homo sapiens
  misc_RNA (1)...(19): siRNA sense strand
ugaguauguuacagugaaa

SEQ ID NO: 1786641 - RNA, 19 nt, Homo sapiens
  misc_RNA (1)...(19): siRNA sense strand
gacacuggcuguggacauc

SEQ ID NO: 1786642 - RNA, 19 nt, Homo sapiens
  misc_RNA (1)...(19): siRNA sense strand
uggcuuaucugggcuuugu

SEQ ID NO: 1786643 - RNA, 19 nt, Homo sapiens
  misc_RNA (1)...(19): siRNA sense strand
gagcuugcggccaguaaug

SEQ ID NO: 1786644 - RNA, 19 nt, Homo sapiens
  misc_RNA (1)...(19): siRNA sense strand
ugcggaagcuagaagcauu

SEQ ID NO: 1786645 - RNA, 19 nt, Homo sapiens
  misc_RNA (1)...(19): siRNA sense strand
gggcauguggcauuauaug

SEQ ID NO: 1786646 - RNA, 19 nt, Homo sapiens
  misc_RNA (1)...(19): siRNA sense strand
augcuggccucuuuccuaa

SEQ ID NO: 1786647 - RNA, 19 nt, Homo sapiens
  misc_RNA (1)...(19): siRNA sense strand
ggagcaguggcuggauuua

SEQ ID NO: 1786648 - RNA, 19 nt, Homo sapiens
  misc_RNA (1)...(19): siRNA sense strand
ggagggauuccugaaccua

SEQ ID NO: 1786649 - RNA, 19 nt, Homo sapiens
  misc_RNA (1)...(19): siRNA sense strand
gcugcaucuugcugaagua

SEQ ID NO: 1786650 - RNA, 19 nt, Homo sapiens
  misc_RNA (1)...(19): siRNA sense strand
uauguacuuuguagugguu

SEQ ID NO: 1786651 - RNA, 19 nt, Homo sapiens
  misc_RNA (1)...(19): siRNA sense strand
agaagccaauaaguacuuu

SEQ ID NO: 1786652 - RNA, 19 nt, Homo sapiens
  misc_RNA (1)...(19): siRNA sense strand
ucaucaaugucuuuguugu

SEQ ID NO: 1786653 - RNA, 19 nt, Homo sapiens
  misc_RNA (1)...(19): siRNA sense strand
ggaaucuugguccuuauca

SEQ ID NO: 1786654 - RNA, 19 nt, Homo sapiens
  misc_RNA (1)...(19): siRNA sense strand
caugcuggccucuuuccua

SEQ ID NO: 1786655 - RNA, 19 nt, Homo sapiens
  misc_RNA (1)...(19): siRNA sense strand
gcucuggauccuucuguug

SEQ ID NO: 1786656 - RNA, 19 nt, Homo sapiens
  misc_RNA (1)...(19): siRNA sense strand
gggcauacgguaagcaucu

SEQ ID NO: 1786657 - RNA, 19 nt, Homo sapiens
  misc_RNA (1)...(19): siRNA sense strand
uaucugggcuuuguguucu

SEQ ID NO: 1786658 - RNA, 19 nt, Homo sapiens
  misc_RNA (1)...(19): siRNA sense strand
caacauguaccugcauucu

SEQ ID NO: 1786659 - RNA, 19 nt, Homo sapiens
  misc_RNA (1)...(19): siRNA sense strand
gcggaagcuagaagcauuu

SEQ ID NO: 1786660 - RNA, 19 nt, Homo sapiens
  misc_RNA (1)...(19): siRNA sense strand
cuucgccacuuacuuuaau

SEQ ID NO: 1786661 - RNA, 19 nt, Homo sapiens
  misc_RNA (1)...(19): siRNA sense strand
gcuggguccugaacagaag

SEQ ID NO: 1786662 - RNA, 19 nt, Homo sapiens
  misc_RNA (1)...(19): siRNA sense strand
gagugacuuugccaaugga

SEQ ID NO: 1786663 - RNA, 19 nt, Homo sapiens
  misc_RNA (1)...(19): siRNA sense strand
gggaugaaugacuuucuga

SEQ ID NO: 1786664 - RNA, 19 nt, Homo sapiens
  misc_RNA (1)...(19): siRNA sense strand
gaacugaaauuucuucuug

SEQ ID NO: 1786665 - RNA, 19 nt, Homo sapiens
  misc_RNA (1)...(19): siRNA sense strand
uaaauaagcuggauggauu

SEQ ID NO: 1786666 - RNA, 19 nt, Homo sapiens
  misc_RNA (1)...(19): siRNA sense strand
uaaguaagcucauucauca

SEQ ID NO: 1786667 - RNA, 19 nt, Homo sapiens
  misc_RNA (1)...(19): siRNA sense strand
gcaguagugugauuucaua

SEQ ID NO: 1786668 - RNA, 19 nt, Homo sapiens
  misc_RNA (1)...(19): siRNA sense strand
gaagaaacaagucauauug

SEQ ID NO: 1786669 - RNA, 19 nt, Homo sapiens
  misc_RNA (1)...(19): siRNA sense strand
gaacuugcaucuuugaauc

SEQ ID NO: 1786670 - RNA, 19 nt, Homo sapiens
  misc_RNA (1)...(19): siRNA sense strand
uaacacagaucugcauaaa

SEQ ID NO: 1786671 - RNA, 19 nt, Homo sapiens
  misc_RNA (1)...(19): siRNA sense strand
ggaaauauauagaggucaa

SEQ ID NO: 1786672 - RNA, 19 nt, Homo sapiens
  misc_RNA (1)...(19): siRNA sense strand
acacagaucugcauaaagu

SEQ ID NO: 1786673 - RNA, 19 nt, Homo sapiens
  misc_RNA (1)...(19): siRNA sense strand
gaacuccucuuuucuuuaa

SEQ ID NO: 1786674 - RNA, 19 nt, Homo sapiens
  misc_RNA (1)...(19): siRNA sense strand
ugaagaaacugccauaucu

SEQ ID NO: 1786675 - RNA, 19 nt, Homo sapiens
  misc_RNA (1)...(19): siRNA sense strand
ggacacaguuucucucagu

SEQ ID NO: 1786676 - RNA, 19 nt, Homo sapiens
  misc_RNA (1)...(19): siRNA sense strand
gucaggaacuugcaucuuu

SEQ ID NO: 1786677 - RNA, 19 nt, Homo sapiens
  misc_RNA (1)...(19): siRNA sense strand
ggaagaaacaagucauauu

SEQ ID NO: 1786678 - RNA, 19 nt, Homo sapiens
  misc_RNA (1)...(19): siRNA sense strand
ggacuggugucacugaaug

SEQ ID NO: 1786679 - RNA, 19 nt, Homo sapiens
  misc_RNA (1)...(19): siRNA sense strand
cugcaacucugaauauuaa

SEQ ID NO: 1786680 - RNA, 19 nt, Homo sapiens
  misc_RNA (1)...(19): siRNA sense strand
gguaagaugugacaguuca

SEQ ID NO: 1786681 - RNA, 19 nt, Homo sapiens
  misc_RNA (1)...(19): siRNA sense strand
gaaauggagaguggaaaua

SEQ ID NO: 1786682 - RNA, 19 nt, Homo sapiens
  misc_RNA (1)...(19): siRNA sense strand
caacagcauuacaggaauu

SEQ ID NO: 1786683 - RNA, 19 nt, Homo sapiens
  misc_RNA (1)...(19): siRNA sense strand
gaaacugccauaucugauu

SEQ ID NO: 1786684 - RNA, 19 nt, Homo sapiens
  misc_RNA (1)...(19): siRNA sense strand
ccauagaccaucugaauuu

SEQ ID NO: 1786685 - RNA, 19 nt, Homo sapiens
  misc_RNA (1)...(19): siRNA sense strand
guaaagacccauuucucua

SEQ ID NO: 1786686 - RNA, 19 nt, Homo sapiens
  misc_RNA (1)...(19): siRNA sense strand
gcccagagguccuuugaau

SEQ ID NO: 1786687 - RNA, 19 nt, Homo sapiens
  misc_RNA (1)...(19): siRNA sense strand
aaacugccauaucugauuu

SEQ ID NO: 1786688 - RNA, 19 nt, Homo sapiens
  misc_RNA (1)...(19): siRNA sense strand
caacugcaacucugaauau

SEQ ID NO: 1786689 - RNA, 19 nt, Homo sapiens
  misc_RNA (1)...(19): siRNA sense strand
gcaguuaauuggacuuuac

SEQ ID NO: 1786690 - RNA, 19 nt, Homo sapiens
  misc_RNA (1)...(19): siRNA sense strand
caacugcuguaaagaacuu

SEQ ID NO: 1786691 - RNA, 19 nt, Homo sapiens
  misc_RNA (1)...(19): siRNA sense strand
gagcuuaucacaacaaaca

SEQ ID NO: 1786692 - RNA, 19 nt, Homo sapiens
  misc_RNA (1)...(19): siRNA sense strand
cuacagagaacugaaauuu

SEQ ID NO: 1786693 - RNA, 19 nt, Homo sapiens
  misc_RNA (1)...(19): siRNA sense strand
cuucauugcuccaucagua

SEQ ID NO: 1786694 - RNA, 19 nt, Homo sapiens
  misc_RNA (1)...(19): siRNA sense strand
ucaaaucccuccacucucu

SEQ ID NO: 1786695 - RNA, 19 nt, Homo sapiens
  misc_RNA (1)...(19): siRNA sense strand
ccaggugcauuucaaguga

SEQ ID NO: 1786696 - RNA, 19 nt, Homo sapiens
  misc_RNA (1)...(19): siRNA sense strand
uggaugagauucuucaaau

SEQ ID NO: 1786697 - RNA, 19 nt, Homo sapiens
  misc_RNA (1)...(19): siRNA sense strand
ccacuugcuuuaccaguug

SEQ ID NO: 1786698 - RNA, 19 nt, Homo sapiens
  misc_RNA (1)...(19): siRNA sense strand
uugcaugccuuucauuaaa

SEQ ID NO: 1786699 - RNA, 19 nt, Homo sapiens
  misc_RNA (1)...(19): siRNA sense strand
aaacugcgaucgcuuugga

SEQ ID NO: 1786700 - RNA, 19 nt, Homo sapiens
  misc_RNA (1)...(19): siRNA sense strand
aguaugagcucuuuaaguc

SEQ ID NO: 1786701 - RNA, 19 nt, Homo sapiens
  misc_RNA (1)...(19): siRNA sense strand
ucacuugucuacuguaaca

SEQ ID NO: 1786702 - RNA, 19 nt, Homo sapiens
  misc_RNA (1)...(19): siRNA sense strand
gcucacaauccuaauauga

SEQ ID NO: 1786703 - RNA, 19 nt, Homo sapiens
  misc_RNA (1)...(19): siRNA sense strand
ucuacaacguggugauaua

SEQ ID NO: 1786704 - RNA, 19 nt, Homo sapiens
  misc_RNA (1)...(19): siRNA sense strand
ccagagguccuuugaauca

SEQ ID NO: 1786705 - RNA, 19 nt, Homo sapiens
  misc_RNA (1)...(19): siRNA sense strand
ugacccauuugaagauuaa

SEQ ID NO: 1786706 - RNA, 19 nt, Homo sapiens
  misc_RNA (1)...(19): siRNA sense strand
gcagccaggugcauuucaa

SEQ ID NO: 1786707 - RNA, 19 nt, Homo sapiens
  misc_RNA (1)...(19): siRNA sense strand
uaaagacccauuucucuau

SEQ ID NO: 1786708 - RNA, 19 nt, Homo sapiens
  misc_RNA (1)...(19): siRNA sense strand
caucacuugucuacuguaa

SEQ ID NO: 1786709 - RNA, 19 nt, Homo sapiens
  misc_RNA (1)...(19): siRNA sense strand
agaaaggaauccguaaaga

SEQ ID NO: 1786710 - RNA, 19 nt, Homo sapiens
  misc_RNA (1)...(19): siRNA sense strand
aauggagaguggaaauaua

SEQ ID NO: 1786711 - RNA, 19 nt, Homo sapiens
  misc_RNA (1)...(19): siRNA sense strand
gaccaacugcuguaaagaa

SEQ ID NO: 1786712 - RNA, 19 nt, Homo sapiens
  misc_RNA (1)...(19): siRNA sense strand
gaaacaagucauauugaag

SEQ ID NO: 1786713 - RNA, 19 nt, Homo sapiens
  misc_RNA (1)...(19): siRNA sense strand
gugagaagccacagaaaug

SEQ ID NO: 1786714 - RNA, 19 nt, Homo sapiens
  misc_RNA (1)...(19): siRNA sense strand
acaacaaacaacagcauua

SEQ ID NO: 1786715 - RNA, 19 nt, Homo sapiens
  misc_RNA (1)...(19): siRNA sense strand
ugacauaguauucauagug

SEQ ID NO: 1786716 - RNA, 19 nt, Homo sapiens
  misc_RNA (1)...(19): siRNA sense strand
uggacaaacuaaagaaaga

SEQ ID NO: 1786717 - RNA, 19 nt, Homo sapiens
  misc_RNA (1)...(19): siRNA sense strand
caacuguggugcaaaauga

SEQ ID NO: 1786718 - RNA, 19 nt, Homo sapiens
  misc_RNA (1)...(19): siRNA sense strand
uaguggaaguaacaguuua

SEQ ID NO: 1786719 - RNA, 19 nt, Homo sapiens
  misc_RNA (1)...(19): siRNA sense strand
gaaaggaauccguaaagac

SEQ ID NO: 1786720 - RNA, 19 nt, Homo sapiens
  misc_RNA (1)...(19): siRNA sense strand
caagucauauugaagaacu

SEQ ID NO: 1786721 - RNA, 19 nt, Homo sapiens
  misc_RNA (1)...(19): siRNA sense strand
gagcaacuguggugcaaaa

SEQ ID NO: 1786722 - RNA, 19 nt, Homo sapiens
  misc_RNA (1)...(19): siRNA sense strand
ggaauuucugaaugacuua

SEQ ID NO: 1786723 - RNA, 19 nt, Homo sapiens
  misc_RNA (1)...(19): siRNA sense strand
caggaauugucuuauaugu

SEQ ID NO: 1786724 - RNA, 19 nt, Homo sapiens
  misc_RNA (1)...(19): siRNA sense strand
gaaggcaaggcaguuaauu

SEQ ID NO: 1786725 - RNA, 19 nt, Homo sapiens
  misc_RNA (1)...(19): siRNA sense strand
ucaggaacuugcaucuuug

SEQ ID NO: 1786726 - RNA, 19 nt, Homo sapiens
  misc_RNA (1)...(19): siRNA sense strand
uauauguggucaguuguaa

SEQ ID NO: 1786727 - RNA, 19 nt, Homo sapiens
  misc_RNA (1)...(19): siRNA sense strand
ugccauaucugauuucucu

SEQ ID NO: 1786728 - RNA, 19 nt, Homo sapiens
  misc_RNA (1)...(19): siRNA sense strand
gagcaguagugugauuuca

SEQ ID NO: 1786729 - RNA, 19 nt, Homo sapiens
  misc_RNA (1)...(19): siRNA sense strand
ggauggauuuggugauucu

SEQ ID NO: 1786730 - RNA, 19 nt, Homo sapiens
  misc_RNA (1)...(19): siRNA sense strand
ucuuauauguggucaguug

SEQ ID NO: 1786731 - RNA, 19 nt, Homo sapiens
  misc_RNA (1)...(19): siRNA sense strand
ggacuauuccaguucaaau

SEQ ID NO: 1786732 - RNA, 19 nt, Homo sapiens
  misc_RNA (1)...(19): siRNA sense strand
cagaccaacugcuguaaag

SEQ ID NO: 1786733 - RNA, 19 nt, Homo sapiens
  misc_RNA (1)...(19): siRNA sense strand
ggaacuugcaucuuugaau

SEQ ID NO: 1786734 - RNA, 19 nt, Homo sapiens
  misc_RNA (1)...(19): siRNA sense strand
gaagaaacugccauaucug

SEQ ID NO: 1786735 - RNA, 19 nt, Homo sapiens
  misc_RNA (1)...(19): siRNA sense strand
gcgaucgcuuuggauauuu

SEQ ID NO: 1786736 - RNA, 19 nt, Homo sapiens
  misc_RNA (1)...(19): siRNA sense strand
uaauuggacuuuacaccau

SEQ ID NO: 1786737 - RNA, 19 nt, Homo sapiens
  misc_RNA (1)...(19): siRNA sense strand
aaagaaaggaauccguaaa

SEQ ID NO: 1786738 - RNA, 19 nt, Homo sapiens
  misc_RNA (1)...(19): siRNA sense strand
gagaguggaaauauauaga

SEQ ID NO: 1786739 - RNA, 19 nt, Homo sapiens
  misc_RNA (1)...(19): siRNA sense strand
cuaugaggcugauguccaa

SEQ ID NO: 1786740 - RNA, 19 nt, Homo sapiens
  misc_RNA (1)...(19): siRNA sense strand
ccuaauaugacccauuuga

SEQ ID NO: 1786741 - RNA, 19 nt, Homo sapiens
  misc_RNA (1)...(19): siRNA sense strand
ggcaguuaauuggacuuua

SEQ ID NO: 1786742 - RNA, 19 nt, Homo sapiens
  misc_RNA (1)...(19): siRNA sense strand
gauauacaagaacagguuu

SEQ ID NO: 1786743 - RNA, 19 nt, Homo sapiens
  misc_RNA (1)...(19): siRNA sense strand
guagugugauuucauacca

SEQ ID NO: 1786744 - RNA, 19 nt, Homo sapiens
  misc_RNA (1)...(19): siRNA sense strand
ggagugaucuugauuuugc

SEQ ID NO: 1786745 - RNA, 19 nt, Homo sapiens
  misc_RNA (1)...(19): siRNA sense strand
aaagacccauuucucuaug

SEQ ID NO: 1786746 - RNA, 19 nt, Homo sapiens
  misc_RNA (1)...(19): siRNA sense strand
ggaguccuguggaugagau

SEQ ID NO: 1786747 - RNA, 19 nt, Homo sapiens
  misc_RNA (1)...(19): siRNA sense strand
uaaguccucugccuuggau

SEQ ID NO: 1786748 - RNA, 19 nt, Homo sapiens
  misc_RNA (1)...(19): siRNA sense strand
cauuacaggaauugucuua

SEQ ID NO: 1786749 - RNA, 19 nt, Homo sapiens
  misc_RNA (1)...(19): siRNA sense strand
ggaaggcaaggcaguuaau

SEQ ID NO: 1786750 - RNA, 19 nt, Homo sapiens
  misc_RNA (1)...(19): siRNA sense strand
ggagaguggaaauauauag

SEQ ID NO: 1786751 - RNA, 19 nt, Homo sapiens
  misc_RNA (1)...(19): siRNA sense strand
gcaugccuuucauuaaauc

SEQ ID NO: 1786752 - RNA, 19 nt, Homo sapiens
  misc_RNA (1)...(19): siRNA sense strand
gaggacuggugucacugaa

SEQ ID NO: 1786753 - RNA, 19 nt, Homo sapiens
  misc_RNA (1)...(19): siRNA sense strand
uaauaugacccauuugaag

SEQ ID NO: 1786754 - RNA, 19 nt, Homo sapiens
  misc_RNA (1)...(19): siRNA sense strand
aaagugagaagccacagaa

SEQ ID NO: 1786755 - RNA, 19 nt, Homo sapiens
  misc_RNA (1)...(19): siRNA sense strand
uuucauaggucaggaacuu

SEQ ID NO: 1786756 - RNA, 19 nt, Homo sapiens
  misc_RNA (1)...(19): siRNA sense strand
gggaaggcaaggcaguuaa

SEQ ID NO: 1786757 - RNA, 19 nt, Homo sapiens
  misc_RNA (1)...(19): siRNA sense strand
caguagauauacaagaaca

SEQ ID NO: 1786758 - RNA, 19 nt, Homo sapiens
  misc_RNA (1)...(19): siRNA sense strand
ggaaccauggacacaguuu

SEQ ID NO: 1786759 - RNA, 19 nt, Homo sapiens
  misc_RNA (1)...(19): siRNA sense strand
gcucauucaucagucuuau

SEQ ID NO: 1786760 - RNA, 19 nt, Homo sapiens
  misc_RNA (1)...(19): siRNA sense strand
aaaaugagcaguaguguga

SEQ ID NO: 1786761 - RNA, 19 nt, Homo sapiens
  misc_RNA (1)...(19): siRNA sense strand
auccuaauaugacccauuu

SEQ ID NO: 1786762 - RNA, 19 nt, Homo sapiens
  misc_RNA (1)...(19): siRNA sense strand
aagaaacugccauaucuga

SEQ ID NO: 1786763 - RNA, 19 nt, Homo sapiens
  misc_RNA (1)...(19): siRNA sense strand
caacaugaacuccucuuuu

SEQ ID NO: 1786764 - RNA, 19 nt, Homo sapiens
  misc_RNA (1)...(19): siRNA sense strand
gaaagaagacugggaagua

SEQ ID NO: 1786765 - RNA, 19 nt, Homo sapiens
  misc_RNA (1)...(19): siRNA sense strand
ggacggcaauacuacuuua

SEQ ID NO: 1786766 - RNA, 19 nt, Homo sapiens
  misc_RNA (1)...(19): siRNA sense strand
ucucaaaucuuccauguug

SEQ ID NO: 1786767 - RNA, 19 nt, Homo sapiens
  misc_RNA (1)...(19): siRNA sense strand
ggaaaggaauaaaucuaga

SEQ ID NO: 1786768 - RNA, 19 nt, Homo sapiens
  misc_RNA (1)...(19): siRNA sense strand
cggcaauacuacuuuaaua

SEQ ID NO: 1786769 - RNA, 19 nt, Homo sapiens
  misc_RNA (1)...(19): siRNA sense strand
ggacuuauucuacuccuuu

SEQ ID NO: 1786770 - RNA, 19 nt, Homo sapiens
  misc_RNA (1)...(19): siRNA sense strand
guagaugguuugccuaugu

SEQ ID NO: 1786771 - RNA, 19 nt, Homo sapiens
  misc_RNA (1)...(19): siRNA sense strand
cuguauagcuccugccuua

SEQ ID NO: 1786772 - RNA, 19 nt, Homo sapiens
  misc_RNA (1)...(19): siRNA sense strand
ggagaaguguuaccagcaa

SEQ ID NO: 1786773 - RNA, 19 nt, Homo sapiens
  misc_RNA (1)...(19): siRNA sense strand
gaacuuguggcuauucauu

SEQ ID NO: 1786774 - RNA, 19 nt, Homo sapiens
  misc_RNA (1)...(19): siRNA sense strand
gacagcggcuucacagauu

SEQ ID NO: 1786775 - RNA, 19 nt, Homo sapiens
  misc_RNA (1)...(19): siRNA sense strand
ggacuaauguacacucaag

SEQ ID NO: 1786776 - RNA, 19 nt, Homo sapiens
  misc_RNA (1)...(19): siRNA sense strand
gagcugugcuguagguuuc

SEQ ID NO: 1786777 - RNA, 19 nt, Homo sapiens
  misc_RNA (1)...(19): siRNA sense strand
cuggauaucaggauuauua

SEQ ID NO: 1786778 - RNA, 19 nt, Homo sapiens
  misc_RNA (1)...(19): siRNA sense strand
caacaucugguucuucuug

SEQ ID NO: 1786779 - RNA, 19 nt, Homo sapiens
  misc_RNA (1)...(19): siRNA sense strand
gaaccugacuucaaaagga

SEQ ID NO: 1786780 - RNA, 19 nt, Homo sapiens
  misc_RNA (1)...(19): siRNA sense strand
guagguuucucaggaguuu

SEQ ID NO: 1786781 - RNA, 19 nt, Homo sapiens
  misc_RNA (1)...(19): siRNA sense strand
cagauucgauagccaguga

SEQ ID NO: 1786782 - RNA, 19 nt, Homo sapiens
  misc_RNA (1)...(19): siRNA sense strand
ucaagggccucugaagaaa

SEQ ID NO: 1786783 - RNA, 19 nt, Homo sapiens
  misc_RNA (1)...(19): siRNA sense strand
gagaaguguuaccagcaaa

SEQ ID NO: 1786784 - RNA, 19 nt, Homo sapiens
  misc_RNA (1)...(19): siRNA sense strand
ugaaaguucuuaacaacca

SEQ ID NO: 1786785 - RNA, 19 nt, Homo sapiens
  misc_RNA (1)...(19): siRNA sense strand
cgaggaaauaccagaaaua

SEQ ID NO: 1786786 - RNA, 19 nt, Homo sapiens
  misc_RNA (1)...(19): siRNA sense strand
uaccugcucuugcaauuug

SEQ ID NO: 1786787 - RNA, 19 nt, Homo sapiens
  misc_RNA (1)...(19): siRNA sense strand
cagcaggacugagugaaga

SEQ ID NO: 1786788 - RNA, 19 nt, Homo sapiens
  misc_RNA (1)...(19): siRNA sense strand
acuuguggcuauucauuua

SEQ ID NO: 1786789 - RNA, 19 nt, Homo sapiens
  misc_RNA (1)...(19): siRNA sense strand
aaagaagacugggaaguag

SEQ ID NO: 1786790 - RNA, 19 nt, Homo sapiens
  misc_RNA (1)...(19): siRNA sense strand
ccucagaagccacuguaua

SEQ ID NO: 1786791 - RNA, 19 nt, Homo sapiens
  misc_RNA (1)...(19): siRNA sense strand
gaggaaauaccagaaauag

SEQ ID NO: 1786792 - RNA, 19 nt, Homo sapiens
  misc_RNA (1)...(19): siRNA sense strand
guacacagcaggacugagu

SEQ ID NO: 1786793 - RNA, 19 nt, Homo sapiens
  misc_RNA (1)...(19): siRNA sense strand
ggccagaucacuaugaaga

SEQ ID NO: 1786794 - RNA, 19 nt, Homo sapiens
  misc_RNA (1)...(19): siRNA sense strand
cagaagaaaugaggagaca

SEQ ID NO: 1786795 - RNA, 19 nt, Homo sapiens
  misc_RNA (1)...(19): siRNA sense strand
gaucaagagggauaaauac

SEQ ID NO: 1786796 - RNA, 19 nt, Homo sapiens
  misc_RNA (1)...(19): siRNA sense strand
gcugaugauuggcauuugu

SEQ ID NO: 1786797 - RNA, 19 nt, Homo sapiens
  misc_RNA (1)...(19): siRNA sense strand
gcucuggauaucaggauua

SEQ ID NO: 1786798 - RNA, 19 nt, Homo sapiens
  misc_RNA (1)...(19): siRNA sense strand
gggauaaauacuggacuua

SEQ ID NO: 1786799 - RNA, 19 nt, Homo sapiens
  misc_RNA (1)...(19): siRNA sense strand
gauuggcauuuguauuuca

SEQ ID NO: 1786800 - RNA, 19 nt, Homo sapiens
  misc_RNA (1)...(19): siRNA sense strand
gaaaguucuuaacaaccau

SEQ ID NO: 1786801 - RNA, 19 nt, Homo sapiens
  misc_RNA (1)...(19): siRNA sense strand
gggucgaacuuguggcuau

SEQ ID NO: 1786802 - RNA, 19 nt, Homo sapiens
  misc_RNA (1)...(19): siRNA sense strand
uauaccugcucuugcaauu

SEQ ID NO: 1786803 - RNA, 19 nt, Homo sapiens
  misc_RNA (1)...(19): siRNA sense strand
agaucaagagggauaaaua

SEQ ID NO: 1786804 - RNA, 19 nt, Homo sapiens
  misc_RNA (1)...(19): siRNA sense strand
ggucgaacuuguggcuauu

SEQ ID NO: 1786805 - RNA, 19 nt, Homo sapiens
  misc_RNA (1)...(19): siRNA sense strand
guaccgaacagauuugcuu

SEQ ID NO: 1786806 - RNA, 19 nt, Homo sapiens
  misc_RNA (1)...(19): siRNA sense strand
ggagcugugcuguagguuu

SEQ ID NO: 1786807 - RNA, 19 nt, Homo sapiens
  misc_RNA (1)...(19): siRNA sense strand
gaagaagcacccaggaacu

SEQ ID NO: 1786808 - RNA, 19 nt, Homo sapiens
  misc_RNA (1)...(19): siRNA sense strand
gcaucuggcugggauucuu

SEQ ID NO: 1786809 - RNA, 19 nt, Homo sapiens
  misc_RNA (1)...(19): siRNA sense strand
uuauugcccuggaggcuuu

SEQ ID NO: 1786810 - RNA, 19 nt, Homo sapiens
  misc_RNA (1)...(19): siRNA sense strand
ucaccaugcugaugauugg

SEQ ID NO: 1786811 - RNA, 19 nt, Homo sapiens
  misc_RNA (1)...(19): siRNA sense strand
ccgaggaaauaccagaaau

SEQ ID NO: 1786812 - RNA, 19 nt, Homo sapiens
  misc_RNA (1)...(19): siRNA sense strand
caggccagaucacuaugaa

SEQ ID NO: 1786813 - RNA, 19 nt, Homo sapiens
  misc_RNA (1)...(19): siRNA sense strand
gaugauuggcauuuguauu

SEQ ID NO: 1786814 - RNA, 19 nt, Homo sapiens
  misc_RNA (1)...(19): siRNA sense strand
ggcaauacuacuuuaauag

SEQ ID NO: 1786815 - RNA, 19 nt, Homo sapiens
  misc_RNA (1)...(19): siRNA sense strand
ccagaucacuaugaagaag

SEQ ID NO: 1786816 - RNA, 19 nt, Homo sapiens
  misc_RNA (1)...(19): siRNA sense strand
gcaggccagaucacuauga

SEQ ID NO: 1786817 - RNA, 19 nt, Homo sapiens
  misc_RNA (1)...(19): siRNA sense strand
ucaggcagcucuggauauc

SEQ ID NO: 1786818 - RNA, 19 nt, Homo sapiens
  misc_RNA (1)...(19): siRNA sense strand
uagaugguuugccuauguu

SEQ ID NO: 1786819 - RNA, 19 nt, Homo sapiens
  misc_RNA (1)...(19): siRNA sense strand
cuacggguuucaucucuca

SEQ ID NO: 1786820 - RNA, 19 nt, Homo sapiens
  misc_RNA (1)...(19): siRNA sense strand
uguacuuacuggaguggua

SEQ ID NO: 1786821 - RNA, 19 nt, Homo sapiens
  misc_RNA (1)...(19): siRNA sense strand
gaagcacccaggaacuaug

SEQ ID NO: 1786822 - RNA, 19 nt, Homo sapiens
  misc_RNA (1)...(19): siRNA sense strand
aaaaggagcugugcuguag

SEQ ID NO: 1786823 - RNA, 19 nt, Homo sapiens
  misc_RNA (1)...(19): siRNA sense strand
gcucuggaaaggaauaaau

SEQ ID NO: 1786824 - RNA, 19 nt, Homo sapiens
  misc_RNA (1)...(19): siRNA sense strand
gauucuuguuggacuaaug

SEQ ID NO: 1786825 - RNA, 19 nt, Homo sapiens
  misc_RNA (1)...(19): siRNA sense strand
ccaggaacuaugacacgua

SEQ ID NO: 1786826 - RNA, 19 nt, Homo sapiens
  misc_RNA (1)...(19): siRNA sense strand
cggcuucacagauucgaua

SEQ ID NO: 1786827 - RNA, 19 nt, Homo sapiens
  misc_RNA (1)...(19): siRNA sense strand
uuucaucucucaccagaag

SEQ ID NO: 1786828 - RNA, 19 nt, Homo sapiens
  misc_RNA (1)...(19): siRNA sense strand
guauagcuccugccuuagu

SEQ ID NO: 1786829 - RNA, 19 nt, Homo sapiens
  misc_RNA (1)...(19): siRNA sense strand
guucaggcagcucuggaua

SEQ ID NO: 1786830 - RNA, 19 nt, Homo sapiens
  misc_RNA (1)...(19): siRNA sense strand
uggaggcuuugucaacauu

SEQ ID NO: 1786831 - RNA, 19 nt, Homo sapiens
  misc_RNA (1)...(19): siRNA sense strand
caacuuuggcccucaacau

SEQ ID NO: 1786832 - RNA, 19 nt, Homo sapiens
  misc_RNA (1)...(19): siRNA sense strand
cucaagggccucugaagaa

SEQ ID NO: 1786833 - RNA, 19 nt, Homo sapiens
  misc_RNA (1)...(19): siRNA sense strand
uuaguguggagaaguguua

SEQ ID NO: 1786834 - RNA, 19 nt, Homo sapiens
  misc_RNA (1)...(19): siRNA sense strand
ggagaucaagagggauaaa

SEQ ID NO: 1786835 - RNA, 19 nt, Homo sapiens
  misc_RNA (1)...(19): siRNA sense strand
aagaagcacccaggaacua

SEQ ID NO: 1786836 - RNA, 19 nt, Homo sapiens
  misc_RNA (1)...(19): siRNA sense strand
ggcuauucauuuauucuca

SEQ ID NO: 1786837 - RNA, 19 nt, Homo sapiens
  misc_RNA (1)...(19): siRNA sense strand
ccuauguuaucaccgcauu

SEQ ID NO: 1786838 - RNA, 19 nt, Homo sapiens
  misc_RNA (1)...(19): siRNA sense strand
ucaagagggauaaauacug

SEQ ID NO: 1786839 - RNA, 19 nt, Homo sapiens
  misc_RNA (1)...(19): siRNA sense strand
gaacuaugacacguacaca

SEQ ID NO: 1786840 - RNA, 19 nt, Homo sapiens
  misc_RNA (1)...(19): siRNA sense strand
agacagcggcuucacagau

SEQ ID NO: 1786841 - RNA, 19 nt, Homo sapiens
  misc_RNA (1)...(19): siRNA sense strand
uauagcuccugccuuagug

SEQ ID NO: 1786842 - RNA, 19 nt, Homo sapiens
  misc_RNA (1)...(19): siRNA sense strand
gagaucaagagggauaaau

SEQ ID NO: 1786843 - RNA, 19 nt, Homo sapiens
  misc_RNA (1)...(19): siRNA sense strand
agaagaacagcucgagaga

SEQ ID NO: 1786844 - RNA, 19 nt, Homo sapiens
  misc_RNA (1)...(19): siRNA sense strand
caaaaggagcugugcugua

SEQ ID NO: 1786845 - RNA, 19 nt, Homo sapiens
  misc_RNA (1)...(19): siRNA sense strand
ugguauaccugcucuugca

SEQ ID NO: 1786846 - RNA, 19 nt, Homo sapiens
  misc_RNA (1)...(19): siRNA sense strand
acugggaaguagaugguuu

SEQ ID NO: 1786847 - RNA, 19 nt, Homo sapiens
  misc_RNA (1)...(19): siRNA sense strand
uggaaaggaauaaaucuag

SEQ ID NO: 1786848 - RNA, 19 nt, Homo sapiens
  misc_RNA (1)...(19): siRNA sense strand
cuacuccuuucucaaaucu

SEQ ID NO: 1786849 - RNA, 19 nt, Homo sapiens
  misc_RNA (1)...(19): siRNA sense strand
uuucucaaaucuuccaugu

SEQ ID NO: 1786850 - RNA, 19 nt, Homo sapiens
  misc_RNA (1)...(19): siRNA sense strand
auacuggacuuauucuacu

SEQ ID NO: 1786851 - RNA, 19 nt, Homo sapiens
  misc_RNA (1)...(19): siRNA sense strand
ugauuggcauuuguauuuc

SEQ ID NO: 1786852 - RNA, 19 nt, Homo sapiens
  misc_RNA (1)...(19): siRNA sense strand
aggacugagugaagaagaa

SEQ ID NO: 1786853 - RNA, 19 nt, Homo sapiens
  misc_RNA (1)...(19): siRNA sense strand
uagcaacuuuggcccucaa

SEQ ID NO: 1786854 - RNA, 19 nt, Homo sapiens
  misc_RNA (1)...(19): siRNA sense strand
gacggcaauacuacuuuaa

SEQ ID NO: 1786855 - RNA, 19 nt, Homo sapiens
  misc_RNA (1)...(19): siRNA sense strand
ccuggaggcuuugucaaca

SEQ ID NO: 1786856 - RNA, 19 nt, Homo sapiens
  misc_RNA (1)...(19): siRNA sense strand
uugccgaauuuauggauga

SEQ ID NO: 1786857 - RNA, 19 nt, Homo sapiens
  misc_RNA (1)...(19): siRNA sense strand
gaugguuugccuauguuau

SEQ ID NO: 1786858 - RNA, 19 nt, Homo sapiens
  misc_RNA (1)...(19): siRNA sense strand
agggauaaauacuggacuu

SEQ ID NO: 1786859 - RNA, 19 nt, Homo sapiens
  misc_RNA (1)...(19): siRNA sense strand
gaccgaggaaauaccagaa

SEQ ID NO: 1786860 - RNA, 19 nt, Homo sapiens
  misc_RNA (1)...(19): siRNA sense strand
ucucucaccagaagaaaug

SEQ ID NO: 1786861 - RNA, 19 nt, Homo sapiens
  misc_RNA (1)...(19): siRNA sense strand
auucuacuccuuucucaaa

SEQ ID NO: 1786862 - RNA, 19 nt, Homo sapiens
  misc_RNA (1)...(19): siRNA sense strand
gccuuaguguggagaagug

SEQ ID NO: 1786863 - RNA, 19 nt, Homo sapiens
  misc_RNA (1)...(19): siRNA sense strand
gccagaucacuaugaagaa

SEQ ID NO: 1786864 - RNA, 19 nt, Homo sapiens
  misc_RNA (1)...(19): siRNA sense strand
gaaacgagaugacuucgaa

SEQ ID NO: 1786865 - RNA, 19 nt, Homo sapiens
  misc_RNA (1)...(19): siRNA sense strand
ucgaaaagcugacuaauua

SEQ ID NO: 1786866 - RNA, 19 nt, Homo sapiens
  misc_RNA (1)...(19): siRNA sense strand
ggagucagaugcuguuuca

SEQ ID NO: 1786867 - RNA, 19 nt, Homo sapiens
  misc_RNA (1)...(19): siRNA sense strand
gagccaaauugucuccuuu

SEQ ID NO: 1786868 - RNA, 19 nt, Homo sapiens
  misc_RNA (1)...(19): siRNA sense strand
gcaaagcaauacaugaacu

SEQ ID NO: 1786869 - RNA, 19 nt, Homo sapiens
  misc_RNA (1)...(19): siRNA sense strand
ucgaagagcaucccaguaa

SEQ ID NO: 1786870 - RNA, 19 nt, Homo sapiens
  misc_RNA (1)...(19): siRNA sense strand
gaaagaggagagugacaga

SEQ ID NO: 1786871 - RNA, 19 nt, Homo sapiens
  misc_RNA (1)...(19): siRNA sense strand
uuucagcucugcaucguuu

SEQ ID NO: 1786872 - RNA, 19 nt, Homo sapiens
  misc_RNA (1)...(19): siRNA sense strand
gcagaaaaccuuaagaaau

SEQ ID NO: 1786873 - RNA, 19 nt, Homo sapiens
  misc_RNA (1)...(19): siRNA sense strand
uggguucucuuggcuguua

SEQ ID NO: 1786874 - RNA, 19 nt, Homo sapiens
  misc_RNA (1)...(19): siRNA sense strand
cuaauuauucgguaacuga

SEQ ID NO: 1786875 - RNA, 19 nt, Homo sapiens
  misc_RNA (1)...(19): siRNA sense strand
ggacccauauguaaaagaa

SEQ ID NO: 1786876 - RNA, 19 nt, Homo sapiens
  misc_RNA (1)...(19): siRNA sense strand
gcggauaauggaacucuuu

SEQ ID NO: 1786877 - RNA, 19 nt, Homo sapiens
  misc_RNA (1)...(19): siRNA sense strand
auucagauguagcggauaa

SEQ ID NO: 1786878 - RNA, 19 nt, Homo sapiens
  misc_RNA (1)...(19): siRNA sense strand
caacgcaaagcaauacaug

SEQ ID NO: 1786879 - RNA, 19 nt, Homo sapiens
  misc_RNA (1)...(19): siRNA sense strand
aaagaaacgagaugacuuc

SEQ ID NO: 1786880 - RNA, 19 nt, Homo sapiens
  misc_RNA (1)...(19): siRNA sense strand
gccaaauugucuccuuuua

SEQ ID NO: 1786881 - RNA, 19 nt, Homo sapiens
  misc_RNA (1)...(19): siRNA sense strand
gaccagagcauccaaaaga

SEQ ID NO: 1786882 - RNA, 19 nt, Homo sapiens
  misc_RNA (1)...(19): siRNA sense strand
gcaggucauucagauguag

SEQ ID NO: 1786883 - RNA, 19 nt, Homo sapiens
  misc_RNA (1)...(19): siRNA sense strand
caucaaggaagacaugaau

SEQ ID NO: 1786884 - RNA, 19 nt, Homo sapiens
  misc_RNA (1)...(19): siRNA sense strand
ugccaggacccauauguaa

SEQ ID NO: 1786885 - RNA, 19 nt, Homo sapiens
  misc_RNA (1)...(19): siRNA sense strand
aagaggagagugacagaaa

SEQ ID NO: 1786886 - RNA, 19 nt, Homo sapiens
  misc_RNA (1)...(19): siRNA sense strand
gccaggacccauauguaaa

SEQ ID NO: 1786887 - RNA, 19 nt, Homo sapiens
  misc_RNA (1)...(19): siRNA sense strand
caaauugucuccuuuuacu

SEQ ID NO: 1786888 - RNA, 19 nt, Homo sapiens
  misc_RNA (1)...(19): siRNA sense strand
uggagaccaucaaggaaga

SEQ ID NO: 1786889 - RNA, 19 nt, Homo sapiens
  misc_RNA (1)...(19): siRNA sense strand
gaacugucgccagcagcua

SEQ ID NO: 1786890 - RNA, 19 nt, Homo sapiens
  misc_RNA (1)...(19): siRNA sense strand
gaccaucaaggaagacaug

SEQ ID NO: 1786891 - RNA, 19 nt, Homo sapiens
  misc_RNA (1)...(19): siRNA sense strand
acgcaaagcaauacaugaa

SEQ ID NO: 1786892 - RNA, 19 nt, Homo sapiens
  misc_RNA (1)...(19): siRNA sense strand
aaaagaagcagaaaaccuu

SEQ ID NO: 1786893 - RNA, 19 nt, Homo sapiens
  misc_RNA (1)...(19): siRNA sense strand
gaauguccaacgcaaagca

SEQ ID NO: 1786894 - RNA, 19 nt, Homo sapiens
  misc_RNA (1)...(19): siRNA sense strand
uucgguaacugacuugaau

SEQ ID NO: 1786895 - RNA, 19 nt, Homo sapiens
  misc_RNA (1)...(19): siRNA sense strand
cugacuaauuauucgguaa

SEQ ID NO: 1786896 - RNA, 19 nt, Homo sapiens
  misc_RNA (1)...(19): siRNA sense strand
aauaaugcagagccaaauu

SEQ ID NO: 1786897 - RNA, 19 nt, Homo sapiens
  misc_RNA (1)...(19): siRNA sense strand
agauguagcggauaaugga

SEQ ID NO: 1786898 - RNA, 19 nt, Homo sapiens
  misc_RNA (1)...(19): siRNA sense strand
aaagcugacuaauuauucg

SEQ ID NO: 1786899 - RNA, 19 nt, Homo sapiens
  misc_RNA (1)...(19): siRNA sense strand
guuacugccaggacccaua

SEQ ID NO: 1786900 - RNA, 19 nt, Homo sapiens
  misc_RNA (1)...(19): siRNA sense strand
uaaugcagagccaaauugu

SEQ ID NO: 1786901 - RNA, 19 nt, Homo sapiens
  misc_RNA (1)...(19): siRNA sense strand
auaaugcagagccaaauug

SEQ ID NO: 1786902 - RNA, 19 nt, Homo sapiens
  misc_RNA (1)...(19): siRNA sense strand
ugcaggucauucagaugua

SEQ ID NO: 1786903 - RNA, 19 nt, Homo sapiens
  misc_RNA (1)...(19): siRNA sense strand
aaaggagucagaugcuguu

SEQ ID NO: 1786904 - RNA, 19 nt, Homo sapiens
  misc_RNA (1)...(19): siRNA sense strand
caagugauggcugaacugu

SEQ ID NO: 1786905 - RNA, 19 nt, Homo sapiens
  misc_RNA (1)...(19): siRNA sense strand
uguccaacgcaaagcaaua

SEQ ID NO: 1786906 - RNA, 19 nt, Homo sapiens
  misc_RNA (1)...(19): siRNA sense strand
guguggagaccaucaagga

SEQ ID NO: 1786907 - RNA, 19 nt, Homo sapiens
  misc_RNA (1)...(19): siRNA sense strand
agagccaaauugucuccuu

SEQ ID NO: 1786908 - RNA, 19 nt, Homo sapiens
  misc_RNA (1)...(19): siRNA sense strand
gauguagcggauaauggaa

SEQ ID NO: 1786909 - RNA, 19 nt, Homo sapiens
  misc_RNA (1)...(19): siRNA sense strand
gggcuggccuggacaauua

SEQ ID NO: 1786910 - RNA, 19 nt, Homo sapiens
  misc_RNA (1)...(19): siRNA sense strand
gcggaaagcugaaggagaa

SEQ ID NO: 1786911 - RNA, 19 nt, Homo sapiens
  misc_RNA (1)...(19): siRNA sense strand
cacaaggaaugaacuauug

SEQ ID NO: 1786912 - RNA, 19 nt, Homo sapiens
  misc_RNA (1)...(19): siRNA sense strand
aaucuacacucguugcaaa

SEQ ID NO: 1786913 - RNA, 19 nt, Homo sapiens
  misc_RNA (1)...(19): siRNA sense strand
uaaagagacacaaggaaug

SEQ ID NO: 1786914 - RNA, 19 nt, Homo sapiens
  misc_RNA (1)...(19): siRNA sense strand
gaaagcugaaggagaacaa

SEQ ID NO: 1786915 - RNA, 19 nt, Homo sapiens
  misc_RNA (1)...(19): siRNA sense strand
acacaaggaaugaacuauu

SEQ ID NO: 1786916 - RNA, 19 nt, Homo sapiens
  misc_RNA (1)...(19): siRNA sense strand
uggcaaggcuggaagaaac

SEQ ID NO: 1786917 - RNA, 19 nt, Homo sapiens
  misc_RNA (1)...(19): siRNA sense strand
aaagagacacaaggaauga

SEQ ID NO: 1786918 - RNA, 19 nt, Homo sapiens
  misc_RNA (1)...(19): siRNA sense strand
uuaaagagacacaaggaau

SEQ ID NO: 1786919 - RNA, 19 nt, Homo sapiens
  misc_RNA (1)...(19): siRNA sense strand
uaugagagcggcuacaaca

SEQ ID NO: 1786920 - RNA, 19 nt, Homo sapiens
  misc_RNA (1)...(19): siRNA sense strand
ucacugaugaccucacaga

SEQ ID NO: 1786921 - RNA, 19 nt, Homo sapiens
  misc_RNA (1)...(19): siRNA sense strand
agacacaaggaaugaacua

SEQ ID NO: 1786922 - RNA, 19 nt, Homo sapiens
  misc_RNA (1)...(19): siRNA sense strand
guuaaagagacacaaggaa

SEQ ID NO: 1786923 - RNA, 19 nt, Homo sapiens
  misc_RNA (1)...(19): siRNA sense strand
cuacacucguugcaaacug

SEQ ID NO: 1786924 - RNA, 19 nt, Homo sapiens
  misc_RNA (1)...(19): siRNA sense strand
aaacugggcuacuccauga

SEQ ID NO: 1786925 - RNA, 19 nt, Homo sapiens
  misc_RNA (1)...(19): siRNA sense strand
guggaucacuggaacaaug

SEQ ID NO: 1786926 - RNA, 19 nt, Homo sapiens
  misc_RNA (1)...(19): siRNA sense strand
cuacggagaauuccaguuu

SEQ ID NO: 1786927 - RNA, 19 nt, Homo sapiens
  misc_RNA (1)...(19): siRNA sense strand
cagcaucucugugucaguu

SEQ ID NO: 1786928 - RNA, 19 nt, Homo sapiens
  misc_RNA (1)...(19): siRNA sense strand
cagggaguguggcugcuua

SEQ ID NO: 1786929 - RNA, 19 nt, Homo sapiens
  misc_RNA (1)...(19): siRNA sense strand
uaaauacgacuucaucagu

SEQ ID NO: 1786930 - RNA, 19 nt, Homo sapiens
  misc_RNA (1)...(19): siRNA sense strand
cuucaaggcucuguuaauc

SEQ ID NO: 1786931 - RNA, 19 nt, Homo sapiens
  misc_RNA (1)...(19): siRNA sense strand
ucaacaagcgagaagguuu

SEQ ID NO: 1786932 - RNA, 19 nt, Homo sapiens
  misc_RNA (1)...(19): siRNA sense strand
gcgagaagguuuugggauu

SEQ ID NO: 1786933 - RNA, 19 nt, Homo sapiens
  misc_RNA (1)...(19): siRNA sense strand
ucaaggcucuguuaaucca

SEQ ID NO: 1786934 - RNA, 19 nt, Homo sapiens
  misc_RNA (1)...(19): siRNA sense strand
caaagucguccuuccuuca

SEQ ID NO: 1786935 - RNA, 19 nt, Homo sapiens
  misc_RNA (1)...(19): siRNA sense strand
caaggaguacuucguguuc

SEQ ID NO: 1786936 - RNA, 19 nt, Homo sapiens
  misc_RNA (1)...(19): siRNA sense strand
caacgcaguagacaccauu

SEQ ID NO: 1786937 - RNA, 19 nt, Homo sapiens
  misc_RNA (1)...(19): siRNA sense strand
guuaauccaagcugucaaa

SEQ ID NO: 1786938 - RNA, 19 nt, Homo sapiens
  misc_RNA (1)...(19): siRNA sense strand
caguagacaccauuuccua

SEQ ID NO: 1786939 - RNA, 19 nt, Homo sapiens
  misc_RNA (1)...(19): siRNA sense strand
agucguccuuccuucauaa

SEQ ID NO: 1786940 - RNA, 19 nt, Homo sapiens
  misc_RNA (1)...(19): siRNA sense strand
aagcuucaaggcucuguua

SEQ ID NO: 1786941 - RNA, 19 nt, Homo sapiens
  misc_RNA (1)...(19): siRNA sense strand
guaaauacgacuucaucag

SEQ ID NO: 1786942 - RNA, 19 nt, Homo sapiens
  misc_RNA (1)...(19): siRNA sense strand
cuaugccacuuucacagaa

SEQ ID NO: 1786943 - RNA, 19 nt, Homo sapiens
  misc_RNA (1)...(19): siRNA sense strand
ucauguccuucauuaacaa

SEQ ID NO: 1786944 - RNA, 19 nt, Homo sapiens
  misc_RNA (1)...(19): siRNA sense strand
agucccugcuuaucuguaa

SEQ ID NO: 1786945 - RNA, 19 nt, Homo sapiens
  misc_RNA (1)...(19): siRNA sense strand
cuaccaacgugcccuaugc

SEQ ID NO: 1786946 - RNA, 19 nt, Homo sapiens
  misc_RNA (1)...(19): siRNA sense strand
cugcuuaucuguaaauacg

SEQ ID NO: 1786947 - RNA, 19 nt, Homo sapiens
  misc_RNA (1)...(19): siRNA sense strand
gauggaaucccuggucuac

SEQ ID NO: 1786948 - RNA, 19 nt, Homo sapiens
  misc_RNA (1)...(19): siRNA sense strand
cguccuuccuucauaaaca

SEQ ID NO: 1786949 - RNA, 19 nt, Homo sapiens
  misc_RNA (1)...(19): siRNA sense strand
ucaaggaguacuucguguu

SEQ ID NO: 1786950 - RNA, 19 nt, Homo sapiens
  misc_RNA (1)...(19): siRNA sense strand
gaauucagugggacaagca

SEQ ID NO: 1786951 - RNA, 19 nt, Homo sapiens
  misc_RNA (1)...(19): siRNA sense strand
uaacaacgaggcgaaacug

SEQ ID NO: 1786952 - RNA, 19 nt, Homo sapiens
  misc_RNA (1)...(19): siRNA sense strand
caccauuuccuacggagaa

SEQ ID NO: 1786953 - RNA, 19 nt, Homo sapiens
  misc_RNA (1)...(19): siRNA sense strand
gacaagcaaagucguccuu

SEQ ID NO: 1786954 - RNA, 19 nt, Homo sapiens
  misc_RNA (1)...(19): siRNA sense strand
aagucguccuuccuucaua

SEQ ID NO: 1786955 - RNA, 19 nt, Homo sapiens
  misc_RNA (1)...(19): siRNA sense strand
caacaagcgagaagguuuu

SEQ ID NO: 1786956 - RNA, 19 nt, Homo sapiens
  misc_RNA (1)...(19): siRNA sense strand
gcuucaaggcucuguuaau

SEQ ID NO: 1786957 - RNA, 19 nt, Homo sapiens
  misc_RNA (1)...(19): siRNA sense strand
gaucacuggaacaaugaga

SEQ ID NO: 1786958 - RNA, 19 nt, Homo sapiens
  misc_RNA (1)...(19): siRNA sense strand
gauagcgcucaacgcagua

SEQ ID NO: 1786959 - RNA, 19 nt, Homo sapiens
  misc_RNA (1)...(19): siRNA sense strand
gcucaacaagcgagaaggu

SEQ ID NO: 1786960 - RNA, 19 nt, Homo sapiens
  misc_RNA (1)...(19): siRNA sense strand
ccuaugccacuuucacaga

SEQ ID NO: 1786961 - RNA, 19 nt, Homo sapiens
  misc_RNA (1)...(19): siRNA sense strand
cucauguccuucauuaaca

SEQ ID NO: 1786962 - RNA, 19 nt, Homo sapiens
  misc_RNA (1)...(19): siRNA sense strand
cagaagauguguguuccua

SEQ ID NO: 1786963 - RNA, 19 nt, Homo sapiens
  misc_RNA (1)...(19): siRNA sense strand
cagaagagguccgggaaga

SEQ ID NO: 1786964 - RNA, 19 nt, Homo sapiens
  misc_RNA (1)...(19): siRNA sense strand
aaacacagccagaccagaa

SEQ ID NO: 1786965 - RNA, 19 nt, Homo sapiens
  misc_RNA (1)...(19): siRNA sense strand
gggcugcuguaaauuguga

SEQ ID NO: 1786966 - RNA, 19 nt, Homo sapiens
  misc_RNA (1)...(19): siRNA sense strand
cauuagcccugaagacaug

SEQ ID NO: 1786967 - RNA, 19 nt, Homo sapiens
  misc_RNA (1)...(19): siRNA sense strand
ggcggugacugugaccuua

SEQ ID NO: 1786968 - RNA, 19 nt, Homo sapiens
  misc_RNA (1)...(19): siRNA sense strand
ggaggaggucccugucuug

SEQ ID NO: 1786969 - RNA, 19 nt, Homo sapiens
  misc_RNA (1)...(19): siRNA sense strand
cugaagacauggcaaguag

SEQ ID NO: 1786970 - RNA, 19 nt, Homo sapiens
  misc_RNA (1)...(19): siRNA sense strand
gaccagaagauguguguuc

SEQ ID NO: 1786971 - RNA, 19 nt, Homo sapiens
  misc_RNA (1)...(19): siRNA sense strand
ggauggaggcggugacugu

SEQ ID NO: 1786972 - RNA, 19 nt, Homo sapiens
  misc_RNA (1)...(19): siRNA sense strand
uuccuccgcuugaguagua

SEQ ID NO: 1786973 - RNA, 19 nt, Homo sapiens
  misc_RNA (1)...(19): siRNA sense strand
cuuaaccaccuacaaauau

SEQ ID NO: 1786974 - RNA, 19 nt, Homo sapiens
  misc_RNA (1)...(19): siRNA sense strand
caccuacaaauauuccuua

SEQ ID NO: 1786975 - RNA, 19 nt, Homo sapiens
  misc_RNA (1)...(19): siRNA sense strand
ucuuaaccaccuacaaaua

SEQ ID NO: 1786976 - RNA, 19 nt, Homo sapiens
  misc_RNA (1)...(19): siRNA sense strand
acugugaccuuacggaauc

SEQ ID NO: 1786977 - RNA, 19 nt, Homo sapiens
  misc_RNA (1)...(19): siRNA sense strand
uuucuuaaccaccuacaaa

SEQ ID NO: 1786978 - RNA, 19 nt, Homo sapiens
  misc_RNA (1)...(19): siRNA sense strand
gcauuagcccugaagacau

SEQ ID NO: 1786979 - RNA, 19 nt, Homo sapiens
  misc_RNA (1)...(19): siRNA sense strand
aagcuugucuuugccuuca

SEQ ID NO: 1786980 - RNA, 19 nt, Homo sapiens
  misc_RNA (1)...(19): siRNA sense strand
uaaccaccuacaaauauuc

SEQ ID NO: 1786981 - RNA, 19 nt, Homo sapiens
  misc_RNA (1)...(19): siRNA sense strand
ccugaagacauggcaagua

SEQ ID NO: 1786982 - RNA, 19 nt, Homo sapiens
  misc_RNA (1)...(19): siRNA sense strand
gcguggggcugcuguaaau

SEQ ID NO: 1786983 - RNA, 19 nt, Homo sapiens
  misc_RNA (1)...(19): siRNA sense strand
gcugcuguaaauugugaua

SEQ ID NO: 1786984 - RNA, 19 nt, Homo sapiens
  misc_RNA (1)...(19): siRNA sense strand
guuaugcauuagcccugaa

SEQ ID NO: 1786985 - RNA, 19 nt, Homo sapiens
  misc_RNA (1)...(19): siRNA sense strand
ggucaagauucacagauaa

SEQ ID NO: 1786986 - RNA, 19 nt, Homo sapiens
  misc_RNA (1)...(19): siRNA sense strand
acagauaauuccuuccuua

SEQ ID NO: 1786987 - RNA, 19 nt, Homo sapiens
  misc_RNA (1)...(19): siRNA sense strand
uaaguguaguggacauuua

SEQ ID NO: 1786988 - RNA, 19 nt, Homo sapiens
  misc_RNA (1)...(19): siRNA sense strand
aguagugacuggaaauuua

SEQ ID NO: 1786989 - RNA, 19 nt, Homo sapiens
  misc_RNA (1)...(19): siRNA sense strand
ggauucuguuguuucauaa

SEQ ID NO: 1786990 - RNA, 19 nt, Homo sapiens
  misc_RNA (1)...(19): siRNA sense strand
aggauucuguuguuucaua

SEQ ID NO: 1786991 - RNA, 19 nt, Homo sapiens
  misc_RNA (1)...(19): siRNA sense strand
ggaaaauggucaagauuca

SEQ ID NO: 1786992 - RNA, 19 nt, Homo sapiens
  misc_RNA (1)...(19): siRNA sense strand
gacuggaaauuuaggauuc

SEQ ID NO: 1786993 - RNA, 19 nt, Homo sapiens
  misc_RNA (1)...(19): siRNA sense strand
ccuuauuccuuacagauuu

SEQ ID NO: 1786994 - RNA, 19 nt, Homo sapiens
  misc_RNA (1)...(19): siRNA sense strand
gaaauuuaggauucuguug

SEQ ID NO: 1786995 - RNA, 19 nt, Homo sapiens
  misc_RNA (1)...(19): siRNA sense strand
cguaacauguguacuucaa

SEQ ID NO: 1786996 - RNA, 19 nt, Homo sapiens
  misc_RNA (1)...(19): siRNA sense strand
uggucaagauucacagaua

SEQ ID NO: 1786997 - RNA, 19 nt, Homo sapiens
  misc_RNA (1)...(19): siRNA sense strand
cauguguacuucaaauugu

SEQ ID NO: 1786998 - RNA, 19 nt, Homo sapiens
  misc_RNA (1)...(19): siRNA sense strand
ggaaauuuaggauucuguu

SEQ ID NO: 1786999 - RNA, 19 nt, Homo sapiens
  misc_RNA (1)...(19): siRNA sense strand
cagcguaacauguguacuu

SEQ ID NO: 1787000 - RNA, 19 nt, Homo sapiens
  misc_RNA (1)...(19): siRNA sense strand
caagauucacagauaauuc

SEQ ID NO: 1787001 - RNA, 19 nt, Homo sapiens
  misc_RNA (1)...(19): siRNA sense strand
uuaggauucuguuguuuca

SEQ ID NO: 1787002 - RNA, 19 nt, Homo sapiens
  misc_RNA (1)...(19): siRNA sense strand
gguuauuucugaauuuggu

SEQ ID NO: 1787003 - RNA, 19 nt, Homo sapiens
  misc_RNA (1)...(19): siRNA sense strand
ugacuggaaauuuaggauu

SEQ ID NO: 1787004 - RNA, 19 nt, Homo sapiens
  misc_RNA (1)...(19): siRNA sense strand
auuccuuccuuauuccuua

SEQ ID NO: 1787005 - RNA, 19 nt, Homo sapiens
  misc_RNA (1)...(19): siRNA sense strand
acauguguacuucaaauug

SEQ ID NO: 1787006 - RNA, 19 nt, Homo sapiens
  misc_RNA (1)...(19): siRNA sense strand
guagugacuggaaauuuag

SEQ ID NO: 1787007 - RNA, 19 nt, Homo sapiens
  misc_RNA (1)...(19): siRNA sense strand
guaguagugacuggaaauu

SEQ ID NO: 1787008 - RNA, 19 nt, Homo sapiens
  misc_RNA (1)...(19): siRNA sense strand
guaacauguguacuucaaa

SEQ ID NO: 1787009 - RNA, 19 nt, Homo sapiens
  misc_RNA (1)...(19): siRNA sense strand
ucaggaaaauggucaagau

SEQ ID NO: 1787010 - RNA, 19 nt, Homo sapiens
  misc_RNA (1)...(19): siRNA sense strand
cacagauaauuccuuccuu

SEQ ID NO: 1787011 - RNA, 19 nt, Homo sapiens
  misc_RNA (1)...(19): siRNA sense strand
uaguagugacuggaaauuu

SEQ ID NO: 1787012 - RNA, 19 nt, Homo sapiens
  misc_RNA (1)...(19): siRNA sense strand
aaguguaguggacauuuaa

SEQ ID NO: 1787013 - RNA, 19 nt, Homo sapiens
  misc_RNA (1)...(19): siRNA sense strand
ggaaagguuugcagaauaa

SEQ ID NO: 1787014 - RNA, 19 nt, Homo sapiens
  misc_RNA (1)...(19): siRNA sense strand
caaaucagaugcuaacauu

SEQ ID NO: 1787015 - RNA, 19 nt, Homo sapiens
  misc_RNA (1)...(19): siRNA sense strand
cuaaauaucuuggcuguaa

SEQ ID NO: 1787016 - RNA, 19 nt, Homo sapiens
  misc_RNA (1)...(19): siRNA sense strand
ugaagaaacucauguguug

SEQ ID NO: 1787017 - RNA, 19 nt, Homo sapiens
  misc_RNA (1)...(19): siRNA sense strand
gaagguaccagaugaaauu

SEQ ID NO: 1787018 - RNA, 19 nt, Homo sapiens
  misc_RNA (1)...(19): siRNA sense strand
ccaccaaacuugaucuuaa

SEQ ID NO: 1787019 - RNA, 19 nt, Homo sapiens
  misc_RNA (1)...(19): siRNA sense strand
guacaaacccaguccauuu

SEQ ID NO: 1787020 - RNA, 19 nt, Homo sapiens
  misc_RNA (1)...(19): siRNA sense strand
ugaagacaauggagguuua

SEQ ID NO: 1787021 - RNA, 19 nt, Homo sapiens
  misc_RNA (1)...(19): siRNA sense strand
gaaagaaacccauccugau

SEQ ID NO: 1787022 - RNA, 19 nt, Homo sapiens
  misc_RNA (1)...(19): siRNA sense strand
aaacaucccuucuggaaca

SEQ ID NO: 1787023 - RNA, 19 nt, Homo sapiens
  misc_RNA (1)...(19): siRNA sense strand
ccaaauguguccucagaug

SEQ ID NO: 1787024 - RNA, 19 nt, Homo sapiens
  misc_RNA (1)...(19): siRNA sense strand
guguagagaugguaaagaa

SEQ ID NO: 1787025 - RNA, 19 nt, Homo sapiens
  misc_RNA (1)...(19): siRNA sense strand
gcaaugcaguucaguugau

SEQ ID NO: 1787026 - RNA, 19 nt, Homo sapiens
  misc_RNA (1)...(19): siRNA sense strand
cagaauaagagucaguuua

SEQ ID NO: 1787027 - RNA, 19 nt, Homo sapiens
  misc_RNA (1)...(19): siRNA sense strand
cagugaagcugagaaauga

SEQ ID NO: 1787028 - RNA, 19 nt, Homo sapiens
  misc_RNA (1)...(19): siRNA sense strand
ccagaaugcugccauguca

SEQ ID NO: 1787029 - RNA, 19 nt, Homo sapiens
  misc_RNA (1)...(19): siRNA sense strand
auaauucacucacuccuaa

SEQ ID NO: 1787030 - RNA, 19 nt, Homo sapiens
  misc_RNA (1)...(19): siRNA sense strand
ggccgacugugauaagaua

SEQ ID NO: 1787031 - RNA, 19 nt, Homo sapiens
  misc_RNA (1)...(19): siRNA sense strand
gaucgaacuuuccagugaa

SEQ ID NO: 1787032 - RNA, 19 nt, Homo sapiens
  misc_RNA (1)...(19): siRNA sense strand
gaaacuuccuauuccuaga

SEQ ID NO: 1787033 - RNA, 19 nt, Homo sapiens
  misc_RNA (1)...(19): siRNA sense strand
gaaaaggcauccugagaga

SEQ ID NO: 1787034 - RNA, 19 nt, Homo sapiens
  misc_RNA (1)...(19): siRNA sense strand
ggcagacgaagucaaauua

SEQ ID NO: 1787035 - RNA, 19 nt, Homo sapiens
  misc_RNA (1)...(19): siRNA sense strand
aggaaagguuugcagaaua

SEQ ID NO: 1787036 - RNA, 19 nt, Homo sapiens
  misc_RNA (1)...(19): siRNA sense strand
caaaucaaauguggucguu

SEQ ID NO: 1787037 - RNA, 19 nt, Homo sapiens
  misc_RNA (1)...(19): siRNA sense strand
caggagacauaccaaagaa

SEQ ID NO: 1787038 - RNA, 19 nt, Homo sapiens
  misc_RNA (1)...(19): siRNA sense strand
uaagaagccuuggcacaga

SEQ ID NO: 1787039 - RNA, 19 nt, Homo sapiens
  misc_RNA (1)...(19): siRNA sense strand
ggaaguaccaucacuagag

SEQ ID NO: 1787040 - RNA, 19 nt, Homo sapiens
  misc_RNA (1)...(19): siRNA sense strand
uaaauacggucuccaacca

SEQ ID NO: 1787041 - RNA, 19 nt, Homo sapiens
  misc_RNA (1)...(19): siRNA sense strand
ccaaagaacagagacauga

SEQ ID NO: 1787042 - RNA, 19 nt, Homo sapiens
  misc_RNA (1)...(19): siRNA sense strand
gacaauggagguuuacaaa

SEQ ID NO: 1787043 - RNA, 19 nt, Homo sapiens
  misc_RNA (1)...(19): siRNA sense strand
ucaaacaucccuucuggaa

SEQ ID NO: 1787044 - RNA, 19 nt, Homo sapiens
  misc_RNA (1)...(19): siRNA sense strand
ugaucgaacuuuccaguga

SEQ ID NO: 1787045 - RNA, 19 nt, Homo sapiens
  misc_RNA (1)...(19): siRNA sense strand
ggcuuuaacugccugcuuu

SEQ ID NO: 1787046 - RNA, 19 nt, Homo sapiens
  misc_RNA (1)...(19): siRNA sense strand
ggugagaaccgucugaaga

SEQ ID NO: 1787047 - RNA, 19 nt, Homo sapiens
  misc_RNA (1)...(19): siRNA sense strand
gcagagugccugugaaagu

SEQ ID NO: 1787048 - RNA, 19 nt, Homo sapiens
  misc_RNA (1)...(19): siRNA sense strand
gaccuaaggccgacuguga

SEQ ID NO: 1787049 - RNA, 19 nt, Homo sapiens
  misc_RNA (1)...(19): siRNA sense strand
gauaacaucuaguaaaccu

SEQ ID NO: 1787050 - RNA, 19 nt, Homo sapiens
  misc_RNA (1)...(19): siRNA sense strand
caaagcaucaagaaagaaa

SEQ ID NO: 1787051 - RNA, 19 nt, Homo sapiens
  misc_RNA (1)...(19): siRNA sense strand
ccagaacuaugcccugaug

SEQ ID NO: 1787052 - RNA, 19 nt, Homo sapiens
  misc_RNA (1)...(19): siRNA sense strand
gcaguucaguugaucucuu

SEQ ID NO: 1787053 - RNA, 19 nt, Homo sapiens
  misc_RNA (1)...(19): siRNA sense strand
gaacaauacagaguaggaa

SEQ ID NO: 1787054 - RNA, 19 nt, Homo sapiens
  misc_RNA (1)...(19): siRNA sense strand
caacagacgcccuuacagu

SEQ ID NO: 1787055 - RNA, 19 nt, Homo sapiens
  misc_RNA (1)...(19): siRNA sense strand
uguggucguugucagauua

SEQ ID NO: 1787056 - RNA, 19 nt, Homo sapiens
  misc_RNA (1)...(19): siRNA sense strand
uaguaaaccuucugcuguu

SEQ ID NO: 1787057 - RNA, 19 nt, Homo sapiens
  misc_RNA (1)...(19): siRNA sense strand
gaugguaaagaaagaguaa

SEQ ID NO: 1787058 - RNA, 19 nt, Homo sapiens
  misc_RNA (1)...(19): siRNA sense strand
ccacccuacucaagaauga

SEQ ID NO: 1787059 - RNA, 19 nt, Homo sapiens
  misc_RNA (1)...(19): siRNA sense strand
gcaaagcuccugcccaaac

SEQ ID NO: 1787060 - RNA, 19 nt, Homo sapiens
  misc_RNA (1)...(19): siRNA sense strand
caauuuaucaccaaccauu

SEQ ID NO: 1787061 - RNA, 19 nt, Homo sapiens
  misc_RNA (1)...(19): siRNA sense strand
ggagacauaccaaagaaca

SEQ ID NO: 1787062 - RNA, 19 nt, Homo sapiens
  misc_RNA (1)...(19): siRNA sense strand
aaucaaauguggucguugu

SEQ ID NO: 1787063 - RNA, 19 nt, Homo sapiens
  misc_RNA (1)...(19): siRNA sense strand
uaggaaagguuugcagaau

SEQ ID NO: 1787064 - RNA, 19 nt, Homo sapiens
  misc_RNA (1)...(19): siRNA sense strand
gagaccacaugaauacaca

SEQ ID NO: 1787065 - RNA, 19 nt, Homo sapiens
  misc_RNA (1)...(19): siRNA sense strand
gacaggauguuuuguuaaa

SEQ ID NO: 1787066 - RNA, 19 nt, Homo sapiens
  misc_RNA (1)...(19): siRNA sense strand
ggaacaauacagaguagga

SEQ ID NO: 1787067 - RNA, 19 nt, Homo sapiens
  misc_RNA (1)...(19): siRNA sense strand
caauggagguuuacaaaau

SEQ ID NO: 1787068 - RNA, 19 nt, Homo sapiens
  misc_RNA (1)...(19): siRNA sense strand
uagcaaagcaucaagaaag

SEQ ID NO: 1787069 - RNA, 19 nt, Homo sapiens
  misc_RNA (1)...(19): siRNA sense strand
ccagugaagcugagaaaug

SEQ ID NO: 1787070 - RNA, 19 nt, Homo sapiens
  misc_RNA (1)...(19): siRNA sense strand
gagggaagccggagaaggu

SEQ ID NO: 1787071 - RNA, 19 nt, Homo sapiens
  misc_RNA (1)...(19): siRNA sense strand
ugagaaccgucugaagaaa

SEQ ID NO: 1787072 - RNA, 19 nt, Homo sapiens
  misc_RNA (1)...(19): siRNA sense strand
caucccuucuggaacaaua

SEQ ID NO: 1787073 - RNA, 19 nt, Homo sapiens
  misc_RNA (1)...(19): siRNA sense strand
gaauaagagucaguuuagg

SEQ ID NO: 1787074 - RNA, 19 nt, Homo sapiens
  misc_RNA (1)...(19): siRNA sense strand
ggaagcaccagcauaacug

SEQ ID NO: 1787075 - RNA, 19 nt, Homo sapiens
  misc_RNA (1)...(19): siRNA sense strand
ccuuacaguugucggauuu

SEQ ID NO: 1787076 - RNA, 19 nt, Homo sapiens
  misc_RNA (1)...(19): siRNA sense strand
gaauacacacaccaacaga

SEQ ID NO: 1787077 - RNA, 19 nt, Homo sapiens
  misc_RNA (1)...(19): siRNA sense strand
aagaguggcuguagcaaag

SEQ ID NO: 1787078 - RNA, 19 nt, Homo sapiens
  misc_RNA (1)...(19): siRNA sense strand
cagacgaagucaaauuaca

SEQ ID NO: 1787079 - RNA, 19 nt, Homo sapiens
  misc_RNA (1)...(19): siRNA sense strand
gugagaaccgucugaagaa

SEQ ID NO: 1787080 - RNA, 19 nt, Homo sapiens
  misc_RNA (1)...(19): siRNA sense strand
gaacaguggagcagcaaag

SEQ ID NO: 1787081 - RNA, 19 nt, Homo sapiens
  misc_RNA (1)...(19): siRNA sense strand
gaaugucccuaccugaaaa

SEQ ID NO: 1787082 - RNA, 19 nt, Homo sapiens
  misc_RNA (1)...(19): siRNA sense strand
ugaggacccuuccaaacug

SEQ ID NO: 1787083 - RNA, 19 nt, Homo sapiens
  misc_RNA (1)...(19): siRNA sense strand
ccaggcagacgaagucaaa

SEQ ID NO: 1787084 - RNA, 19 nt, Homo sapiens
  misc_RNA (1)...(19): siRNA sense strand
ccagcuccguguucagaaa

SEQ ID NO: 1787085 - RNA, 19 nt, Homo sapiens
  misc_RNA (1)...(19): siRNA sense strand
uagagaugguaaagaaaga

SEQ ID NO: 1787086 - RNA, 19 nt, Homo sapiens
  misc_RNA (1)...(19): siRNA sense strand
ggauguccacccagaacua

SEQ ID NO: 1787087 - RNA, 19 nt, Homo sapiens
  misc_RNA (1)...(19): siRNA sense strand
gcagaauaagagucaguuu

SEQ ID NO: 1787088 - RNA, 19 nt, Homo sapiens
  misc_RNA (1)...(19): siRNA sense strand
ggauuugucgcaaguccua

SEQ ID NO: 1787089 - RNA, 19 nt, Homo sapiens
  misc_RNA (1)...(19): siRNA sense strand
gcaaccaccacuuccaguu

SEQ ID NO: 1787090 - RNA, 19 nt, Homo sapiens
  misc_RNA (1)...(19): siRNA sense strand
cagcagagugccugugaaa

SEQ ID NO: 1787091 - RNA, 19 nt, Homo sapiens
  misc_RNA (1)...(19): siRNA sense strand
gcucugaucaggugaaucu

SEQ ID NO: 1787092 - RNA, 19 nt, Homo sapiens
  misc_RNA (1)...(19): siRNA sense strand
gacgaagucaaauuacaaa

SEQ ID NO: 1787093 - RNA, 19 nt, Homo sapiens
  misc_RNA (1)...(19): siRNA sense strand
agaauaagagucaguuuag

SEQ ID NO: 1787094 - RNA, 19 nt, Homo sapiens
  misc_RNA (1)...(19): siRNA sense strand
ggaagguaccagaugaaau

SEQ ID NO: 1787095 - RNA, 19 nt, Homo sapiens
  misc_RNA (1)...(19): siRNA sense strand
cagagugccugugaaagug

SEQ ID NO: 1787096 - RNA, 19 nt, Homo sapiens
  misc_RNA (1)...(19): siRNA sense strand
cagaggagccugccaagca

SEQ ID NO: 1787097 - RNA, 19 nt, Homo sapiens
  misc_RNA (1)...(19): siRNA sense strand
gcaaagcaucaagaaagaa

SEQ ID NO: 1787098 - RNA, 19 nt, Homo sapiens
  misc_RNA (1)...(19): siRNA sense strand
cagaaugucccuaccugaa

SEQ ID NO: 1787099 - RNA, 19 nt, Homo sapiens
  misc_RNA (1)...(19): siRNA sense strand
gaggggacauuuucucuug

SEQ ID NO: 1787100 - RNA, 19 nt, Homo sapiens
  misc_RNA (1)...(19): siRNA sense strand
aaagaaacccauccugauc

SEQ ID NO: 1787101 - RNA, 19 nt, Homo sapiens
  misc_RNA (1)...(19): siRNA sense strand
guagagaugguaaagaaag

SEQ ID NO: 1787102 - RNA, 19 nt, Homo sapiens
  misc_RNA (1)...(19): siRNA sense strand
guaggaaagguuugcagaa

SEQ ID NO: 1787103 - RNA, 19 nt, Homo sapiens
  misc_RNA (1)...(19): siRNA sense strand
ggaccucacagcucuuuca

SEQ ID NO: 1787104 - RNA, 19 nt, Homo sapiens
  misc_RNA (1)...(19): siRNA sense strand
gaggaaguaccaucacuag

SEQ ID NO: 1787105 - RNA, 19 nt, Homo sapiens
  misc_RNA (1)...(19): siRNA sense strand
uaagaguggcuguagcaaa

SEQ ID NO: 1787106 - RNA, 19 nt, Homo sapiens
  misc_RNA (1)...(19): siRNA sense strand
cagcucagccaauucagaa

SEQ ID NO: 1787107 - RNA, 19 nt, Homo sapiens
  misc_RNA (1)...(19): siRNA sense strand
ccaggagacauaccaaaga

SEQ ID NO: 1787108 - RNA, 19 nt, Homo sapiens
  misc_RNA (1)...(19): siRNA sense strand
aaaaugauccccaagaauu

SEQ ID NO: 1787109 - RNA, 19 nt, Homo sapiens
  misc_RNA (1)...(19): siRNA sense strand
acucaagaaugaagacaau

SEQ ID NO: 1787110 - RNA, 19 nt, Homo sapiens
  misc_RNA (1)...(19): siRNA sense strand
gacuugagaccaccaguga

SEQ ID NO: 1787111 - RNA, 19 nt, Homo sapiens
  misc_RNA (1)...(19): siRNA sense strand
guggaaaugcucauggaaa

SEQ ID NO: 1787112 - RNA, 19 nt, Homo sapiens
  misc_RNA (1)...(19): siRNA sense strand
uccaaacugugggcuauuu

SEQ ID NO: 1787113 - RNA, 19 nt, Homo sapiens
  misc_RNA (1)...(19): siRNA sense strand
ugaagaagaugaagaagaa

SEQ ID NO: 1787114 - RNA, 19 nt, Homo sapiens
  misc_RNA (1)...(19): siRNA sense strand
gagcauaccaggauaaauu

SEQ ID NO: 1787115 - RNA, 19 nt, Homo sapiens
  misc_RNA (1)...(19): siRNA sense strand
gcuaugaccuuuguuuauu

SEQ ID NO: 1787116 - RNA, 19 nt, Homo sapiens
  misc_RNA (1)...(19): siRNA sense strand
gaaaccaaguacgaaauuu

SEQ ID NO: 1787117 - RNA, 19 nt, Homo sapiens
  misc_RNA (1)...(19): siRNA sense strand
gaagaaaccaaguacgaaa

SEQ ID NO: 1787118 - RNA, 19 nt, Homo sapiens
  misc_RNA (1)...(19): siRNA sense strand
gggauugucuucaucauca

SEQ ID NO: 1787119 - RNA, 19 nt, Homo sapiens
  misc_RNA (1)...(19): siRNA sense strand
caagagggcuaaauuuacu

SEQ ID NO: 1787120 - RNA, 19 nt, Homo sapiens
  misc_RNA (1)...(19): siRNA sense strand
cauaauaggugauccuucu

SEQ ID NO: 1787121 - RNA, 19 nt, Homo sapiens
  misc_RNA (1)...(19): siRNA sense strand
ggagaaaauuguucccuaa

SEQ ID NO: 1787122 - RNA, 19 nt, Homo sapiens
  misc_RNA (1)...(19): siRNA sense strand
cuaauacaguugaagaaga

SEQ ID NO: 1787123 - RNA, 19 nt, Homo sapiens
  misc_RNA (1)...(19): siRNA sense strand
cauuauaucuggcaaagag

SEQ ID NO: 1787124 - RNA, 19 nt, Homo sapiens
  misc_RNA (1)...(19): siRNA sense strand
gggcuaaauuuacuauaag

SEQ ID NO: 1787125 - RNA, 19 nt, Homo sapiens
  misc_RNA (1)...(19): siRNA sense strand
gaaacuacaacagagauga

SEQ ID NO: 1787126 - RNA, 19 nt, Homo sapiens
  misc_RNA (1)...(19): siRNA sense strand
gcaccaacccauuauaucu

SEQ ID NO: 1787127 - RNA, 19 nt, Homo sapiens
  misc_RNA (1)...(19): siRNA sense strand
uaagugagcauaccaggau

SEQ ID NO: 1787128 - RNA, 19 nt, Homo sapiens
  misc_RNA (1)...(19): siRNA sense strand
ccacaccaguagauuguuc

SEQ ID NO: 1787129 - RNA, 19 nt, Homo sapiens
  misc_RNA (1)...(19): siRNA sense strand
ccauugcaccaacccauua

SEQ ID NO: 1787130 - RNA, 19 nt, Homo sapiens
  misc_RNA (1)...(19): siRNA sense strand
uggauggacugcugcugua

SEQ ID NO: 1787131 - RNA, 19 nt, Homo sapiens
  misc_RNA (1)...(19): siRNA sense strand
ucauacaacucacugucaa

SEQ ID NO: 1787132 - RNA, 19 nt, Homo sapiens
  misc_RNA (1)...(19): siRNA sense strand
uucaagagggcuaaauuua

SEQ ID NO: 1787133 - RNA, 19 nt, Homo sapiens
  misc_RNA (1)...(19): siRNA sense strand
uccaugggcuuuagggaaa

SEQ ID NO: 1787134 - RNA, 19 nt, Homo sapiens
  misc_RNA (1)...(19): siRNA sense strand
gaugacgauuuaauucaag

SEQ ID NO: 1787135 - RNA, 19 nt, Homo sapiens
  misc_RNA (1)...(19): siRNA sense strand
acaacucacugucaaugga

SEQ ID NO: 1787136 - RNA, 19 nt, Homo sapiens
  misc_RNA (1)...(19): siRNA sense strand
acaaguaucuuuuggcuau

SEQ ID NO: 1787137 - RNA, 19 nt, Homo sapiens
  misc_RNA (1)...(19): siRNA sense strand
caucaucuuuauccaguca

SEQ ID NO: 1787138 - RNA, 19 nt, Homo sapiens
  misc_RNA (1)...(19): siRNA sense strand
guaagcaggcgauguugug

SEQ ID NO: 1787139 - RNA, 19 nt, Homo sapiens
  misc_RNA (1)...(19): siRNA sense strand
gaccuuuguuuauuucaag

SEQ ID NO: 1787140 - RNA, 19 nt, Homo sapiens
  misc_RNA (1)...(19): siRNA sense strand
guggagcugucagaaacua

SEQ ID NO: 1787141 - RNA, 19 nt, Homo sapiens
  misc_RNA (1)...(19): siRNA sense strand
caguggagcugucagaaac

SEQ ID NO: 1787142 - RNA, 19 nt, Homo sapiens
  misc_RNA (1)...(19): siRNA sense strand
ugucagaaacuacaacaga

SEQ ID NO: 1787143 - RNA, 19 nt, Homo sapiens
  misc_RNA (1)...(19): siRNA sense strand
ggugauccuucucaagcuu

SEQ ID NO: 1787144 - RNA, 19 nt, Homo sapiens
  misc_RNA (1)...(19): siRNA sense strand
ggacugcugcuguaaaauu

SEQ ID NO: 1787145 - RNA, 19 nt, Homo sapiens
  misc_RNA (1)...(19): siRNA sense strand
cagcaggggugacagaaaa

SEQ ID NO: 1787146 - RNA, 19 nt, Homo sapiens
  misc_RNA (1)...(19): siRNA sense strand
cuacaacagagaugaaguu

SEQ ID NO: 1787147 - RNA, 19 nt, Homo sapiens
  misc_RNA (1)...(19): siRNA sense strand
gaagaagaugaagaagaaa

SEQ ID NO: 1787148 - RNA, 19 nt, Homo sapiens
  misc_RNA (1)...(19): siRNA sense strand
ucaucuuuauccagucaua

SEQ ID NO: 1787149 - RNA, 19 nt, Homo sapiens
  misc_RNA (1)...(19): siRNA sense strand
agaaaccaaguacgaaauu

SEQ ID NO: 1787150 - RNA, 19 nt, Homo sapiens
  misc_RNA (1)...(19): siRNA sense strand
ucaagagggcuaaauuuac

SEQ ID NO: 1787151 - RNA, 19 nt, Homo sapiens
  misc_RNA (1)...(19): siRNA sense strand
ucucaggacucauacaacu

SEQ ID NO: 1787152 - RNA, 19 nt, Homo sapiens
  misc_RNA (1)...(19): siRNA sense strand
gauggacugcugcuguaaa

SEQ ID NO: 1787153 - RNA, 19 nt, Homo sapiens
  misc_RNA (1)...(19): siRNA sense strand
ggcuaugaccuuuguuuau

SEQ ID NO: 1787154 - RNA, 19 nt, Homo sapiens
  misc_RNA (1)...(19): siRNA sense strand
aagaagaaaccaaguacga

SEQ ID NO: 1787155 - RNA, 19 nt, Homo sapiens
  misc_RNA (1)...(19): siRNA sense strand
uggcuaugaccuuuguuua

SEQ ID NO: 1787156 - RNA, 19 nt, Homo sapiens
  misc_RNA (1)...(19): siRNA sense strand
aaacuacaacagagaugaa

SEQ ID NO: 1787157 - RNA, 19 nt, Homo sapiens
  misc_RNA (1)...(19): siRNA sense strand
ccaguagauuguucacucu

SEQ ID NO: 1787158 - RNA, 19 nt, Homo sapiens
  misc_RNA (1)...(19): siRNA sense strand
ucagaaacuacaacagaga

SEQ ID NO: 1787159 - RNA, 19 nt, Homo sapiens
  misc_RNA (1)...(19): siRNA sense strand
aacauucucaggacucaua

SEQ ID NO: 1787160 - RNA, 19 nt, Homo sapiens
  misc_RNA (1)...(19): siRNA sense strand
uuucaagagggcuaaauuu

SEQ ID NO: 1787161 - RNA, 19 nt, Homo sapiens
  misc_RNA (1)...(19): siRNA sense strand
agaagaaaccaaguacgaa

SEQ ID NO: 1787162 - RNA, 19 nt, Homo sapiens
  misc_RNA (1)...(19): siRNA sense strand
gcucugggauagaauugac

SEQ ID NO: 1787163 - RNA, 19 nt, Homo sapiens
  misc_RNA (1)...(19): siRNA sense strand
gcuaauacaguugaagaag

SEQ ID NO: 1787164 - RNA, 19 nt, Homo sapiens
  misc_RNA (1)...(19): siRNA sense strand
ucucaagcuuauacugguu

SEQ ID NO: 1787165 - RNA, 19 nt, Homo sapiens
  misc_RNA (1)...(19): siRNA sense strand
ucaggacucauacaacuca

SEQ ID NO: 1787166 - RNA, 19 nt, Homo sapiens
  misc_RNA (1)...(19): siRNA sense strand
gauuguucacucuguggua

SEQ ID NO: 1787167 - RNA, 19 nt, Homo sapiens
  misc_RNA (1)...(19): siRNA sense strand
ugaagaagaaaccaaguac

SEQ ID NO: 1787168 - RNA, 19 nt, Homo sapiens
  misc_RNA (1)...(19): siRNA sense strand
gcucuguaucuggcuaaua

SEQ ID NO: 1787169 - RNA, 19 nt, Homo sapiens
  misc_RNA (1)...(19): siRNA sense strand
gugauccuucucaagcuua

SEQ ID NO: 1787170 - RNA, 19 nt, Homo sapiens
  misc_RNA (1)...(19): siRNA sense strand
gcuguaaaauugcagacaa

SEQ ID NO: 1787171 - RNA, 19 nt, Homo sapiens
  misc_RNA (1)...(19): siRNA sense strand
gcgauguugugaggagguu

SEQ ID NO: 1787172 - RNA, 19 nt, Homo sapiens
  misc_RNA (1)...(19): siRNA sense strand
aagcuuauacugguucuga

SEQ ID NO: 1787173 - RNA, 19 nt, Homo sapiens
  misc_RNA (1)...(19): siRNA sense strand
uaauaggugauccuucuca

SEQ ID NO: 1787174 - RNA, 19 nt, Homo sapiens
  misc_RNA (1)...(19): siRNA sense strand
gcagacaaguaucuuuugg

SEQ ID NO: 1787175 - RNA, 19 nt, Homo sapiens
  misc_RNA (1)...(19): siRNA sense strand
ggauggacugcugcuguaa

SEQ ID NO: 1787176 - RNA, 19 nt, Homo sapiens
  misc_RNA (1)...(19): siRNA sense strand
gauguugugaggagguuau

SEQ ID NO: 1787177 - RNA, 19 nt, Homo sapiens
  misc_RNA (1)...(19): siRNA sense strand
guaaaauugcagacaagua

SEQ ID NO: 1787178 - RNA, 19 nt, Homo sapiens
  misc_RNA (1)...(19): siRNA sense strand
aauaggugauccuucucaa

SEQ ID NO: 1787179 - RNA, 19 nt, Homo sapiens
  misc_RNA (1)...(19): siRNA sense strand
gucuucaucaucaucuuua

SEQ ID NO: 1787180 - RNA, 19 nt, Homo sapiens
  misc_RNA (1)...(19): siRNA sense strand
gagggcuaaauuuacuaua

SEQ ID NO: 1787181 - RNA, 19 nt, Homo sapiens
  misc_RNA (1)...(19): siRNA sense strand
ggacauaauaggugauccu

SEQ ID NO: 1787182 - RNA, 19 nt, Homo sapiens
  misc_RNA (1)...(19): siRNA sense strand
gccauugcaccaacccauu

SEQ ID NO: 1787183 - RNA, 19 nt, Homo sapiens
  misc_RNA (1)...(19): siRNA sense strand
cagaaacuacaacagagau

SEQ ID NO: 1787184 - RNA, 19 nt, Homo sapiens
  misc_RNA (1)...(19): siRNA sense strand
ggagcugucagaaacuaca

SEQ ID NO: 1787185 - RNA, 19 nt, Homo sapiens
  misc_RNA (1)...(19): siRNA sense strand
uugaagaagaugaagaaga

SEQ ID NO: 1787186 - RNA, 19 nt, Homo sapiens
  misc_RNA (1)...(19): siRNA sense strand
ggauugucuucaucaucau

SEQ ID NO: 1787187 - RNA, 19 nt, Homo sapiens
  misc_RNA (1)...(19): siRNA sense strand
augaagaagaaaccaagua

SEQ ID NO: 1787188 - RNA, 19 nt, Homo sapiens
  misc_RNA (1)...(19): siRNA sense strand
gaugaagaagaaaccaagu

SEQ ID NO: 1787189 - RNA, 19 nt, Homo sapiens
  misc_RNA (1)...(19): siRNA sense strand
ggauaugacugcuuucuuu

SEQ ID NO: 1787190 - RNA, 19 nt, Homo sapiens
  misc_RNA (1)...(19): siRNA sense strand
ugaagaagaugaagaagaa

SEQ ID NO: 1787191 - RNA, 19 nt, Homo sapiens
  misc_RNA (1)...(19): siRNA sense strand
gagcauaccaggauaaauu

SEQ ID NO: 1787192 - RNA, 19 nt, Homo sapiens
  misc_RNA (1)...(19): siRNA sense strand
gcuaugaccuuuguuuauu

SEQ ID NO: 1787193 - RNA, 19 nt, Homo sapiens
  misc_RNA (1)...(19): siRNA sense strand
gaaaccaaguacgaaauuu

SEQ ID NO: 1787194 - RNA, 19 nt, Homo sapiens
  misc_RNA (1)...(19): siRNA sense strand
gaagaaaccaaguacgaaa

SEQ ID NO: 1787195 - RNA, 19 nt, Homo sapiens
  misc_RNA (1)...(19): siRNA sense strand
gggauugucuucaucauca

SEQ ID NO: 1787196 - RNA, 19 nt, Homo sapiens
  misc_RNA (1)...(19): siRNA sense strand
gauaugacugcuuucuuua

SEQ ID NO: 1787197 - RNA, 19 nt, Homo sapiens
  misc_RNA (1)...(19): siRNA sense strand
caagagggcuaaauuuacu

SEQ ID NO: 1787198 - RNA, 19 nt, Homo sapiens
  misc_RNA (1)...(19): siRNA sense strand
cauaauaggugauccuucu

SEQ ID NO: 1787199 - RNA, 19 nt, Homo sapiens
  misc_RNA (1)...(19): siRNA sense strand
aaucagauguguugugaga

SEQ ID NO: 1787200 - RNA, 19 nt, Homo sapiens
  misc_RNA (1)...(19): siRNA sense strand
gaagcguccuauuuguaaa

SEQ ID NO: 1787201 - RNA, 19 nt, Homo sapiens
  misc_RNA (1)...(19): siRNA sense strand
ggagaaaauuguucccuaa

SEQ ID NO: 1787202 - RNA, 19 nt, Homo sapiens
  misc_RNA (1)...(19): siRNA sense strand
caccuacugucacuguuua

SEQ ID NO: 1787203 - RNA, 19 nt, Homo sapiens
  misc_RNA (1)...(19): siRNA sense strand
gaccuugucugguuauaca

SEQ ID NO: 1787204 - RNA, 19 nt, Homo sapiens
  misc_RNA (1)...(19): siRNA sense strand
cguccuauuuguaaagaua

SEQ ID NO: 1787205 - RNA, 19 nt, Homo sapiens
  misc_RNA (1)...(19): siRNA sense strand
cuaauacaguugaagaaga

SEQ ID NO: 1787206 - RNA, 19 nt, Homo sapiens
  misc_RNA (1)...(19): siRNA sense strand
cauuauaucuggcaaagag

SEQ ID NO: 1787207 - RNA, 19 nt, Homo sapiens
  misc_RNA (1)...(19): siRNA sense strand
gggcuaaauuuacuauaag

SEQ ID NO: 1787208 - RNA, 19 nt, Homo sapiens
  misc_RNA (1)...(19): siRNA sense strand
ugaagcguccuauuuguaa

SEQ ID NO: 1787209 - RNA, 19 nt, Homo sapiens
  misc_RNA (1)...(19): siRNA sense strand
gaaacuacaacagagauga

SEQ ID NO: 1787210 - RNA, 19 nt, Homo sapiens
  misc_RNA (1)...(19): siRNA sense strand
gcaccaacccauuauaucu

SEQ ID NO: 1787211 - RNA, 19 nt, Homo sapiens
  misc_RNA (1)...(19): siRNA sense strand
aaagauaauuggcaagcau

SEQ ID NO: 1787212 - RNA, 19 nt, Homo sapiens
  misc_RNA (1)...(19): siRNA sense strand
ccacaccaguagauuguuc

SEQ ID NO: 1787213 - RNA, 19 nt, Homo sapiens
  misc_RNA (1)...(19): siRNA sense strand
ccauugcaccaacccauua

SEQ ID NO: 1787214 - RNA, 19 nt, Homo sapiens
  misc_RNA (1)...(19): siRNA sense strand
ucagauguguugugagaca

SEQ ID NO: 1787215 - RNA, 19 nt, Homo sapiens
  misc_RNA (1)...(19): siRNA sense strand
uaagugagcauaccaggau

SEQ ID NO: 1787216 - RNA, 19 nt, Homo sapiens
  misc_RNA (1)...(19): siRNA sense strand
uggauggacugcugcugua

SEQ ID NO: 1787217 - RNA, 19 nt, Homo sapiens
  misc_RNA (1)...(19): siRNA sense strand
ucauacaacucacugucaa

SEQ ID NO: 1787218 - RNA, 19 nt, Homo sapiens
  misc_RNA (1)...(19): siRNA sense strand
uucaagagggcuaaauuua

SEQ ID NO: 1787219 - RNA, 19 nt, Homo sapiens
  misc_RNA (1)...(19): siRNA sense strand
uccaugggcuuuagggaaa

SEQ ID NO: 1787220 - RNA, 19 nt, Homo sapiens
  misc_RNA (1)...(19): siRNA sense strand
uacugucacuguuuaugua

SEQ ID NO: 1787221 - RNA, 19 nt, Homo sapiens
  misc_RNA (1)...(19): siRNA sense strand
acaacucacugucaaugga

SEQ ID NO: 1787222 - RNA, 19 nt, Homo sapiens
  misc_RNA (1)...(19): siRNA sense strand
gaugacgauuuaauucaag

SEQ ID NO: 1787223 - RNA, 19 nt, Homo sapiens
  misc_RNA (1)...(19): siRNA sense strand
acaaguaucuuuuggcuau

SEQ ID NO: 1787224 - RNA, 19 nt, Homo sapiens
  misc_RNA (1)...(19): siRNA sense strand
caucaucuuuauccaguca

SEQ ID NO: 1787225 - RNA, 19 nt, Homo sapiens
  misc_RNA (1)...(19): siRNA sense strand
guaagcaggcgauguugug

SEQ ID NO: 1787226 - RNA, 19 nt, Homo sapiens
  misc_RNA (1)...(19): siRNA sense strand
ggucaaauagaucacauca

SEQ ID NO: 1787227 - RNA, 19 nt, Homo sapiens
  misc_RNA (1)...(19): siRNA sense strand
gaccuuuguuuauuucaag

SEQ ID NO: 1787228 - RNA, 19 nt, Homo sapiens
  misc_RNA (1)...(19): siRNA sense strand
guggagcugucagaaacua

SEQ ID NO: 1787229 - RNA, 19 nt, Homo sapiens
  misc_RNA (1)...(19): siRNA sense strand
acucugaagcguccuauuu

SEQ ID NO: 1787230 - RNA, 19 nt, Homo sapiens
  misc_RNA (1)...(19): siRNA sense strand
caguggagcugucagaaac

SEQ ID NO: 1787231 - RNA, 19 nt, Homo sapiens
  misc_RNA (1)...(19): siRNA sense strand
guuauacagcgucaggaua

SEQ ID NO: 1787232 - RNA, 19 nt, Homo sapiens
  misc_RNA (1)...(19): siRNA sense strand
ggugauccuucucaagcuu

SEQ ID NO: 1787233 - RNA, 19 nt, Homo sapiens
  misc_RNA (1)...(19): siRNA sense strand
cagcaggggugacagaaaa

SEQ ID NO: 1787234 - RNA, 19 nt, Homo sapiens
  misc_RNA (1)...(19): siRNA sense strand
cuacaacagagaugaaguu

SEQ ID NO: 1787235 - RNA, 19 nt, Homo sapiens
  misc_RNA (1)...(19): siRNA sense strand
ugucagaaacuacaacaga

SEQ ID NO: 1787236 - RNA, 19 nt, Homo sapiens
  misc_RNA (1)...(19): siRNA sense strand
aaaucagggucaaauagau

SEQ ID NO: 1787237 - RNA, 19 nt, Homo sapiens
  misc_RNA (1)...(19): siRNA sense strand
ggacugcugcuguaaaauu

SEQ ID NO: 1787238 - RNA, 19 nt, Homo sapiens
  misc_RNA (1)...(19): siRNA sense strand
gauaauuggcaagcauuug

SEQ ID NO: 1787239 - RNA, 19 nt, Homo sapiens
  misc_RNA (1)...(19): siRNA sense strand
ucaucuuuauccagucaua

SEQ ID NO: 1787240 - RNA, 19 nt, Homo sapiens
  misc_RNA (1)...(19): siRNA sense strand
agaaaccaaguacgaaauu

SEQ ID NO: 1787241 - RNA, 19 nt, Homo sapiens
  misc_RNA (1)...(19): siRNA sense strand
gaagaagaugaagaagaaa

SEQ ID NO: 1787242 - RNA, 19 nt, Homo sapiens
  misc_RNA (1)...(19): siRNA sense strand
gauggacugcugcuguaaa

SEQ ID NO: 1787243 - RNA, 19 nt, Homo sapiens
  misc_RNA (1)...(19): siRNA sense strand
ucucaggacucauacaacu

SEQ ID NO: 1787244 - RNA, 19 nt, Homo sapiens
  misc_RNA (1)...(19): siRNA sense strand
ucaagagggcuaaauuuac

SEQ ID NO: 1787245 - RNA, 19 nt, Homo sapiens
  misc_RNA (1)...(19): siRNA sense strand
ggcuaugaccuuuguuuau

SEQ ID NO: 1787246 - RNA, 19 nt, Homo sapiens
  misc_RNA (1)...(19): siRNA sense strand
ccaccuacugucacuguuu

SEQ ID NO: 1787247 - RNA, 19 nt, Homo sapiens
  misc_RNA (1)...(19): siRNA sense strand
uaaagauaauuggcaagca

SEQ ID NO: 1787248 - RNA, 19 nt, Homo sapiens
  misc_RNA (1)...(19): siRNA sense strand
aagaagaaaccaaguacga

SEQ ID NO: 1787249 - RNA, 19 nt, Homo sapiens
  misc_RNA (1)...(19): siRNA sense strand
uggcuaugaccuuuguuua

SEQ ID NO: 1787250 - RNA, 19 nt, Homo sapiens
  misc_RNA (1)...(19): siRNA sense strand
guaaaaucagggucaaaua

SEQ ID NO: 1787251 - RNA, 19 nt, Homo sapiens
  misc_RNA (1)...(19): siRNA sense strand
uagaucacaucagccuaaa

SEQ ID NO: 1787252 - RNA, 19 nt, Homo sapiens
  misc_RNA (1)...(19): siRNA sense strand
aaacuacaacagagaugaa

SEQ ID NO: 1787253 - RNA, 19 nt, Homo sapiens
  misc_RNA (1)...(19): siRNA sense strand
uuauacagcgucaggauau

SEQ ID NO: 1787254 - RNA, 19 nt, Homo sapiens
  misc_RNA (1)...(19): siRNA sense strand
auaauuggcaagcauuuga

SEQ ID NO: 1787255 - RNA, 19 nt, Homo sapiens
  misc_RNA (1)...(19): siRNA sense strand
ccaguagauuguucacucu

SEQ ID NO: 1787256 - RNA, 19 nt, Homo sapiens
  misc_RNA (1)...(19): siRNA sense strand
ucugaagcguccuauuugu

SEQ ID NO: 1787257 - RNA, 19 nt, Homo sapiens
  misc_RNA (1)...(19): siRNA sense strand
cugaagcguccuauuugua

SEQ ID NO: 1787258 - RNA, 19 nt, Homo sapiens
  misc_RNA (1)...(19): siRNA sense strand
aacauucucaggacucaua

SEQ ID NO: 1787259 - RNA, 19 nt, Homo sapiens
  misc_RNA (1)...(19): siRNA sense strand
ucagaaacuacaacagaga

SEQ ID NO: 1787260 - RNA, 19 nt, Homo sapiens
  misc_RNA (1)...(19): siRNA sense strand
auagaucacaucagccuaa

SEQ ID NO: 1787261 - RNA, 19 nt, Homo sapiens
  misc_RNA (1)...(19): siRNA sense strand
uuucaagagggcuaaauuu

SEQ ID NO: 1787262 - RNA, 19 nt, Homo sapiens
  misc_RNA (1)...(19): siRNA sense strand
agaagaaaccaaguacgaa

SEQ ID NO: 1787263 - RNA, 19 nt, Homo sapiens
  misc_RNA (1)...(19): siRNA sense strand
gcucugggauagaauugac

SEQ ID NO: 1787264 - RNA, 19 nt, Homo sapiens
  misc_RNA (1)...(19): siRNA sense strand
gcuaauacaguugaagaag

SEQ ID NO: 1787265 - RNA, 19 nt, Homo sapiens
  misc_RNA (1)...(19): siRNA sense strand
ucucaagcuuauacugguu

SEQ ID NO: 1787266 - RNA, 19 nt, Homo sapiens
  misc_RNA (1)...(19): siRNA sense strand
ucaggacucauacaacuca

SEQ ID NO: 1787267 - RNA, 19 nt, Homo sapiens
  misc_RNA (1)...(19): siRNA sense strand
gauuguucacucuguggua

SEQ ID NO: 1787268 - RNA, 19 nt, Homo sapiens
  misc_RNA (1)...(19): siRNA sense strand
ugaagaagaaaccaaguac

SEQ ID NO: 1787269 - RNA, 19 nt, Homo sapiens
  misc_RNA (1)...(19): siRNA sense strand
gcuguaaaauugcagacaa

SEQ ID NO: 1787270 - RNA, 19 nt, Homo sapiens
  misc_RNA (1)...(19): siRNA sense strand
gugauccuucucaagcuua

SEQ ID NO: 1787271 - RNA, 19 nt, Homo sapiens
  misc_RNA (1)...(19): siRNA sense strand
gcucuguaucuggcuaaua

SEQ ID NO: 1787272 - RNA, 19 nt, Homo sapiens
  misc_RNA (1)...(19): siRNA sense strand
gcagacaaguaucuuuugg

SEQ ID NO: 1787273 - RNA, 19 nt, Homo sapiens
  misc_RNA (1)...(19): siRNA sense strand
aagcuuauacugguucuga

SEQ ID NO: 1787274 - RNA, 19 nt, Homo sapiens
  misc_RNA (1)...(19): siRNA sense strand
uaauaggugauccuucuca

SEQ ID NO: 1787275 - RNA, 19 nt, Homo sapiens
  misc_RNA (1)...(19): siRNA sense strand
ggauggacugcugcuguaa

SEQ ID NO: 1787276 - RNA, 19 nt, Homo sapiens
  misc_RNA (1)...(19): siRNA sense strand
gauguugugaggagguuau

SEQ ID NO: 1787277 - RNA, 19 nt, Homo sapiens
  misc_RNA (1)...(19): siRNA sense strand
gcgauguugugaggagguu

SEQ ID NO: 1787278 - RNA, 19 nt, Homo sapiens
  misc_RNA (1)...(19): siRNA sense strand
cuacugucacuguuuaugu

SEQ ID NO: 1787279 - RNA, 19 nt, Homo sapiens
  misc_RNA (1)...(19): siRNA sense strand
aauaggugauccuucucaa

SEQ ID NO: 1787280 - RNA, 19 nt, Homo sapiens
  misc_RNA (1)...(19): siRNA sense strand
guaaaauugcagacaagua

SEQ ID NO: 1787281 - RNA, 19 nt, Homo sapiens
  misc_RNA (1)...(19): siRNA sense strand
gucuucaucaucaucuuua

SEQ ID NO: 1787282 - RNA, 19 nt, Homo sapiens
  misc_RNA (1)...(19): siRNA sense strand
gagggcuaaauuuacuaua

SEQ ID NO: 1787283 - RNA, 19 nt, Homo sapiens
  misc_RNA (1)...(19): siRNA sense strand
ggacauaauaggugauccu

SEQ ID NO: 1787284 - RNA, 19 nt, Homo sapiens
  misc_RNA (1)...(19): siRNA sense strand
gccauugcaccaacccauu

SEQ ID NO: 1787285 - RNA, 19 nt, Homo sapiens
  misc_RNA (1)...(19): siRNA sense strand
cagaaacuacaacagagau

SEQ ID NO: 1787286 - RNA, 19 nt, Homo sapiens
  misc_RNA (1)...(19): siRNA sense strand
ggagcugucagaaacuaca

SEQ ID NO: 1787287 - RNA, 19 nt, Homo sapiens
  misc_RNA (1)...(19): siRNA sense strand
uaaaaucagggucaaauag

SEQ ID NO: 1787288 - RNA, 19 nt, Homo sapiens
  misc_RNA (1)...(19): siRNA sense strand
ggauugucuucaucaucau

SEQ ID NO: 1787289 - RNA, 19 nt, Homo sapiens
  misc_RNA (1)...(19): siRNA sense strand
gcagguaacugaagcaaua

SEQ ID NO: 1787290 - RNA, 19 nt, Homo sapiens
  misc_RNA (1)...(19): siRNA sense strand
uaacaugccuuuagaauug

SEQ ID NO: 1787291 - RNA, 19 nt, Homo sapiens
  misc_RNA (1)...(19): siRNA sense strand
gaagauaauuucucacuga

SEQ ID NO: 1787292 - RNA, 19 nt, Homo sapiens
  misc_RNA (1)...(19): siRNA sense strand
ggagaaagagcacgaauua

SEQ ID NO: 1787293 - RNA, 19 nt, Homo sapiens
  misc_RNA (1)...(19): siRNA sense strand
gaacagagccgucccuuug

SEQ ID NO: 1787294 - RNA, 19 nt, Homo sapiens
  misc_RNA (1)...(19): siRNA sense strand
gaaggugguucuuuaguaa

SEQ ID NO: 1787295 - RNA, 19 nt, Homo sapiens
  misc_RNA (1)...(19): siRNA sense strand
gcagaugacucaguuuaua

SEQ ID NO: 1787296 - RNA, 19 nt, Homo sapiens
  misc_RNA (1)...(19): siRNA sense strand
ggaaggugguucuuuagua

SEQ ID NO: 1787297 - RNA, 19 nt, Homo sapiens
  misc_RNA (1)...(19): siRNA sense strand
guuggaagguuuaugauua

SEQ ID NO: 1787298 - RNA, 19 nt, Homo sapiens
  misc_RNA (1)...(19): siRNA sense strand
cgaaagaacuccuauuugg

SEQ ID NO: 1787299 - RNA, 19 nt, Homo sapiens
  misc_RNA (1)...(19): siRNA sense strand
caagauguccuuauaauug

SEQ ID NO: 1787300 - RNA, 19 nt, Homo sapiens
  misc_RNA (1)...(19): siRNA sense strand
ggaaagauacccgucaaua

SEQ ID NO: 1787301 - RNA, 19 nt, Homo sapiens
  misc_RNA (1)...(19): siRNA sense strand
gcacuagccaagccuauua

SEQ ID NO: 1787302 - RNA, 19 nt, Homo sapiens
  misc_RNA (1)...(19): siRNA sense strand
gauaauuucucacugaugu

SEQ ID NO: 1787303 - RNA, 19 nt, Homo sapiens
  misc_RNA (1)...(19): siRNA sense strand
gcaagggacuucucuaaac

SEQ ID NO: 1787304 - RNA, 19 nt, Homo sapiens
  misc_RNA (1)...(19): siRNA sense strand
gaauuggcauguagaguug

SEQ ID NO: 1787305 - RNA, 19 nt, Homo sapiens
  misc_RNA (1)...(19): siRNA sense strand
gaagaugggacaauuauca

SEQ ID NO: 1787306 - RNA, 19 nt, Homo sapiens
  misc_RNA (1)...(19): siRNA sense strand
gaucuuuccucaucuauca

SEQ ID NO: 1787307 - RNA, 19 nt, Homo sapiens
  misc_RNA (1)...(19): siRNA sense strand
gcauuaagcaccucaauau

SEQ ID NO: 1787308 - RNA, 19 nt, Homo sapiens
  misc_RNA (1)...(19): siRNA sense strand
gaacugcuguagucacuuc

SEQ ID NO: 1787309 - RNA, 19 nt, Homo sapiens
  misc_RNA (1)...(19): siRNA sense strand
acacugcaaucuguuauua

SEQ ID NO: 1787310 - RNA, 19 nt, Homo sapiens
  misc_RNA (1)...(19): siRNA sense strand
ugacagaugugccuuggaa

SEQ ID NO: 1787311 - RNA, 19 nt, Homo sapiens
  misc_RNA (1)...(19): siRNA sense strand
gaugggacaauuaucauua

SEQ ID NO: 1787312 - RNA, 19 nt, Homo sapiens
  misc_RNA (1)...(19): siRNA sense strand
gaacuccuauuuggucauu

SEQ ID NO: 1787313 - RNA, 19 nt, Homo sapiens
  misc_RNA (1)...(19): siRNA sense strand
ggaauggacagaagaacua

SEQ ID NO: 1787314 - RNA, 19 nt, Homo sapiens
  misc_RNA (1)...(19): siRNA sense strand
gaugagaggugcugggaau

SEQ ID NO: 1787315 - RNA, 19 nt, Homo sapiens
  misc_RNA (1)...(19): siRNA sense strand
gauguugacucuuccaguu

SEQ ID NO: 1787316 - RNA, 19 nt, Homo sapiens
  misc_RNA (1)...(19): siRNA sense strand
agaaagagcacgaauuauu

SEQ ID NO: 1787317 - RNA, 19 nt, Homo sapiens
  misc_RNA (1)...(19): siRNA sense strand
gaccuggacucauguguga

SEQ ID NO: 1787318 - RNA, 19 nt, Homo sapiens
  misc_RNA (1)...(19): siRNA sense strand
gaaacaggcacuuuggaaa

SEQ ID NO: 1787319 - RNA, 19 nt, Homo sapiens
  misc_RNA (1)...(19): siRNA sense strand
gaaagauacccgucaauag

SEQ ID NO: 1787320 - RNA, 19 nt, Homo sapiens
  misc_RNA (1)...(19): siRNA sense strand
gagcaagggacuucucuaa

SEQ ID NO: 1787321 - RNA, 19 nt, Homo sapiens
  misc_RNA (1)...(19): siRNA sense strand
ggacucaugugugaucuug

SEQ ID NO: 1787322 - RNA, 19 nt, Homo sapiens
  misc_RNA (1)...(19): siRNA sense strand
cagaagauggucacaguua

SEQ ID NO: 1787323 - RNA, 19 nt, Homo sapiens
  misc_RNA (1)...(19): siRNA sense strand
ggagauguguguuuggaau

SEQ ID NO: 1787324 - RNA, 19 nt, Homo sapiens
  misc_RNA (1)...(19): siRNA sense strand
cuacaugaaugaaaggaaa

SEQ ID NO: 1787325 - RNA, 19 nt, Homo sapiens
  misc_RNA (1)...(19): siRNA sense strand
ucuggaaggugguucuuua

SEQ ID NO: 1787326 - RNA, 19 nt, Homo sapiens
  misc_RNA (1)...(19): siRNA sense strand
cagcaucacugccaucaug

SEQ ID NO: 1787327 - RNA, 19 nt, Homo sapiens
  misc_RNA (1)...(19): siRNA sense strand
cagcuucgguaacauguuu

SEQ ID NO: 1787328 - RNA, 19 nt, Homo sapiens
  misc_RNA (1)...(19): siRNA sense strand
caacaacacaugaagaguu

SEQ ID NO: 1787329 - RNA, 19 nt, Homo sapiens
  misc_RNA (1)...(19): siRNA sense strand
guuuauaucugggaaauug

SEQ ID NO: 1787330 - RNA, 19 nt, Homo sapiens
  misc_RNA (1)...(19): siRNA sense strand
ugacugaaguuaguagaaa

SEQ ID NO: 1787331 - RNA, 19 nt, Homo sapiens
  misc_RNA (1)...(19): siRNA sense strand
aaagcaagaugucuaugaa

SEQ ID NO: 1787332 - RNA, 19 nt, Homo sapiens
  misc_RNA (1)...(19): siRNA sense strand
gacagaagauggucacagu

SEQ ID NO: 1787333 - RNA, 19 nt, Homo sapiens
  misc_RNA (1)...(19): siRNA sense strand
ucacugauguugccagguu

SEQ ID NO: 1787334 - RNA, 19 nt, Homo sapiens
  misc_RNA (1)...(19): siRNA sense strand
caagggacuucucuaaaca

SEQ ID NO: 1787335 - RNA, 19 nt, Homo sapiens
  misc_RNA (1)...(19): siRNA sense strand
ugugugaucuugugggaua

SEQ ID NO: 1787336 - RNA, 19 nt, Homo sapiens
  misc_RNA (1)...(19): siRNA sense strand
gaagucucaggaagaauua

SEQ ID NO: 1787337 - RNA, 19 nt, Homo sapiens
  misc_RNA (1)...(19): siRNA sense strand
ggaguaacguuggcuuuca

SEQ ID NO: 1787338 - RNA, 19 nt, Homo sapiens
  misc_RNA (1)...(19): siRNA sense strand
ggaagagugcuuaaagaga

SEQ ID NO: 1787339 - RNA, 19 nt, Homo sapiens
  misc_RNA (1)...(19): siRNA sense strand
gaaguucaacaacacauga

SEQ ID NO: 1787340 - RNA, 19 nt, Homo sapiens
  misc_RNA (1)...(19): siRNA sense strand
ggacuugucagauaaauac

SEQ ID NO: 1787341 - RNA, 19 nt, Homo sapiens
  misc_RNA (1)...(19): siRNA sense strand
cacaugaacuaaagauuuc

SEQ ID NO: 1787342 - RNA, 19 nt, Homo sapiens
  misc_RNA (1)...(19): siRNA sense strand
gggaauuucuuugaaugaa

SEQ ID NO: 1787343 - RNA, 19 nt, Homo sapiens
  misc_RNA (1)...(19): siRNA sense strand
gguuacugaugccaaauuu

SEQ ID NO: 1787344 - RNA, 19 nt, Homo sapiens
  misc_RNA (1)...(19): siRNA sense strand
uaagguuacugaugccaaa

SEQ ID NO: 1787345 - RNA, 19 nt, Homo sapiens
  misc_RNA (1)...(19): siRNA sense strand
guuaugggcuacaugaaug

SEQ ID NO: 1787346 - RNA, 19 nt, Homo sapiens
  misc_RNA (1)...(19): siRNA sense strand
ucuggaaucucucacauga

SEQ ID NO: 1787347 - RNA, 19 nt, Homo sapiens
  misc_RNA (1)...(19): siRNA sense strand
gcacauauacugagagacu

SEQ ID NO: 1787348 - RNA, 19 nt, Homo sapiens
  misc_RNA (1)...(19): siRNA sense strand
gaagaguuugggaaagaua

SEQ ID NO: 1787349 - RNA, 19 nt, Homo sapiens
  misc_RNA (1)...(19): siRNA sense strand
ucagugauguugacucuuc

SEQ ID NO: 1787350 - RNA, 19 nt, Homo sapiens
  misc_RNA (1)...(19): siRNA sense strand
cagagacacuuaagcacaa

SEQ ID NO: 1787351 - RNA, 19 nt, Homo sapiens
  misc_RNA (1)...(19): siRNA sense strand
gaaaugggcaguucuuugc

SEQ ID NO: 1787352 - RNA, 19 nt, Homo sapiens
  misc_RNA (1)...(19): siRNA sense strand
cuaaacagcccuacauugu

SEQ ID NO: 1787353 - RNA, 19 nt, Homo sapiens
  misc_RNA (1)...(19): siRNA sense strand
aacaacacaugaagaguuu

SEQ ID NO: 1787354 - RNA, 19 nt, Homo sapiens
  misc_RNA (1)...(19): siRNA sense strand
gaaaugguaagaaugaauc

SEQ ID NO: 1787355 - RNA, 19 nt, Homo sapiens
  misc_RNA (1)...(19): siRNA sense strand
uuuaaugucuugccuguga

SEQ ID NO: 1787356 - RNA, 19 nt, Homo sapiens
  misc_RNA (1)...(19): siRNA sense strand
gaucuugugggauaucuuu

SEQ ID NO: 1787357 - RNA, 19 nt, Homo sapiens
  misc_RNA (1)...(19): siRNA sense strand
caugagaauucaagaagau

SEQ ID NO: 1787358 - RNA, 19 nt, Homo sapiens
  misc_RNA (1)...(19): siRNA sense strand
cagccacucuuccaaauca

SEQ ID NO: 1787359 - RNA, 19 nt, Homo sapiens
  misc_RNA (1)...(19): siRNA sense strand
gugcagaugacucaguuua

SEQ ID NO: 1787360 - RNA, 19 nt, Homo sapiens
  misc_RNA (1)...(19): siRNA sense strand
gguaacauguuuggcaaga

SEQ ID NO: 1787361 - RNA, 19 nt, Homo sapiens
  misc_RNA (1)...(19): siRNA sense strand
gcgaaagaacuccuauuug

SEQ ID NO: 1787362 - RNA, 19 nt, Homo sapiens
  misc_RNA (1)...(19): siRNA sense strand
uagccaagccuauuacuga

SEQ ID NO: 1787363 - RNA, 19 nt, Homo sapiens
  misc_RNA (1)...(19): siRNA sense strand
cauauacccugcugaugga

SEQ ID NO: 1787364 - RNA, 19 nt, Homo sapiens
  misc_RNA (1)...(19): siRNA sense strand
gaaagaacuccuauuuggu

SEQ ID NO: 1787365 - RNA, 19 nt, Homo sapiens
  misc_RNA (1)...(19): siRNA sense strand
gaaucucucacaugaacua

SEQ ID NO: 1787366 - RNA, 19 nt, Homo sapiens
  misc_RNA (1)...(19): siRNA sense strand
cagauaauuugcugugugu

SEQ ID NO: 1787367 - RNA, 19 nt, Homo sapiens
  misc_RNA (1)...(19): siRNA sense strand
cagaguauauuccaagucu

SEQ ID NO: 1787368 - RNA, 19 nt, Homo sapiens
  misc_RNA (1)...(19): siRNA sense strand
uaacguuggcuuucauauu

SEQ ID NO: 1787369 - RNA, 19 nt, Homo sapiens
  misc_RNA (1)...(19): siRNA sense strand
uacaguugcuuacgaaaug

SEQ ID NO: 1787370 - RNA, 19 nt, Homo sapiens
  misc_RNA (1)...(19): siRNA sense strand
agagucagauacuauaguu

SEQ ID NO: 1787371 - RNA, 19 nt, Homo sapiens
  misc_RNA (1)...(19): siRNA sense strand
gcgagagucagauacuaua

SEQ ID NO: 1787372 - RNA, 19 nt, Homo sapiens
  misc_RNA (1)...(19): siRNA sense strand
gguugggauuuaugcaaua

SEQ ID NO: 1787373 - RNA, 19 nt, Homo sapiens
  misc_RNA (1)...(19): siRNA sense strand
ggaauuucuuugaaugaag

SEQ ID NO: 1787374 - RNA, 19 nt, Homo sapiens
  misc_RNA (1)...(19): siRNA sense strand
ggagauaauaccaucaaau

SEQ ID NO: 1787375 - RNA, 19 nt, Homo sapiens
  misc_RNA (1)...(19): siRNA sense strand
uaugggaucuuuccucauc

SEQ ID NO: 1787376 - RNA, 19 nt, Homo sapiens
  misc_RNA (1)...(19): siRNA sense strand
aaagauacccgucaauagu

SEQ ID NO: 1787377 - RNA, 19 nt, Homo sapiens
  misc_RNA (1)...(19): siRNA sense strand
gaggcugaccuuucacuuu

SEQ ID NO: 1787378 - RNA, 19 nt, Homo sapiens
  misc_RNA (1)...(19): siRNA sense strand
cagguggagucuucaugua

SEQ ID NO: 1787379 - RNA, 19 nt, Homo sapiens
  misc_RNA (1)...(19): siRNA sense strand
ggcacccgguugagaauuu

SEQ ID NO: 1787380 - RNA, 19 nt, Homo sapiens
  misc_RNA (1)...(19): siRNA sense strand
ugggauaucuuuacugaag

SEQ ID NO: 1787381 - RNA, 19 nt, Homo sapiens
  misc_RNA (1)...(19): siRNA sense strand
cauggucucucuucgaaau

SEQ ID NO: 1787382 - RNA, 19 nt, Homo sapiens
  misc_RNA (1)...(19): siRNA sense strand
cacauggucucucuucgaa

SEQ ID NO: 1787383 - RNA, 19 nt, Homo sapiens
  misc_RNA (1)...(19): siRNA sense strand
gacuauuucucugggcuua

SEQ ID NO: 1787384 - RNA, 19 nt, Homo sapiens
  misc_RNA (1)...(19): siRNA sense strand
aacguuggcuuucauauuc

SEQ ID NO: 1787385 - RNA, 19 nt, Homo sapiens
  misc_RNA (1)...(19): siRNA sense strand
ugugggauaucuuuacuga

SEQ ID NO: 1787386 - RNA, 19 nt, Homo sapiens
  misc_RNA (1)...(19): siRNA sense strand
caaaauuguuucugucuug

SEQ ID NO: 1787387 - RNA, 19 nt, Homo sapiens
  misc_RNA (1)...(19): siRNA sense strand
aaugguaacugugagauga

SEQ ID NO: 1787388 - RNA, 19 nt, Homo sapiens
  misc_RNA (1)...(19): siRNA sense strand
uaagaaugaaucccaugua

SEQ ID NO: 1787389 - RNA, 19 nt, Homo sapiens
  misc_RNA (1)...(19): siRNA sense strand
gcagguaacugaagcaaua

SEQ ID NO: 1787390 - RNA, 19 nt, Homo sapiens
  misc_RNA (1)...(19): siRNA sense strand
uaacaugccuuuagaauug

SEQ ID NO: 1787391 - RNA, 19 nt, Homo sapiens
  misc_RNA (1)...(19): siRNA sense strand
gaagauaauuucucacuga

SEQ ID NO: 1787392 - RNA, 19 nt, Homo sapiens
  misc_RNA (1)...(19): siRNA sense strand
ggagaaagagcacgaauua

SEQ ID NO: 1787393 - RNA, 19 nt, Homo sapiens
  misc_RNA (1)...(19): siRNA sense strand
gaacagagccgucccuuug

SEQ ID NO: 1787394 - RNA, 19 nt, Homo sapiens
  misc_RNA (1)...(19): siRNA sense strand
gaaggugguucuuuaguaa

SEQ ID NO: 1787395 - RNA, 19 nt, Homo sapiens
  misc_RNA (1)...(19): siRNA sense strand
gcagaugacucaguuuaua

SEQ ID NO: 1787396 - RNA, 19 nt, Homo sapiens
  misc_RNA (1)...(19): siRNA sense strand
ggaaggugguucuuuagua

SEQ ID NO: 1787397 - RNA, 19 nt, Homo sapiens
  misc_RNA (1)...(19): siRNA sense strand
guuggaagguuuaugauua

SEQ ID NO: 1787398 - RNA, 19 nt, Homo sapiens
  misc_RNA (1)...(19): siRNA sense strand
cgaaagaacuccuauuugg

SEQ ID NO: 1787399 - RNA, 19 nt, Homo sapiens
  misc_RNA (1)...(19): siRNA sense strand
caagauguccuuauaauug

SEQ ID NO: 1787400 - RNA, 19 nt, Homo sapiens
  misc_RNA (1)...(19): siRNA sense strand
ggaaagauacccgucaaua

SEQ ID NO: 1787401 - RNA, 19 nt, Homo sapiens
  misc_RNA (1)...(19): siRNA sense strand
gcacuagccaagccuauua

SEQ ID NO: 1787402 - RNA, 19 nt, Homo sapiens
  misc_RNA (1)...(19): siRNA sense strand
gauaauuucucacugaugu

SEQ ID NO: 1787403 - RNA, 19 nt, Homo sapiens
  misc_RNA (1)...(19): siRNA sense strand
gcaagggacuucucuaaac

SEQ ID NO: 1787404 - RNA, 19 nt, Homo sapiens
  misc_RNA (1)...(19): siRNA sense strand
gaauuggcauguagaguug

SEQ ID NO: 1787405 - RNA, 19 nt, Homo sapiens
  misc_RNA (1)...(19): siRNA sense strand
gaagaugggacaauuauca

SEQ ID NO: 1787406 - RNA, 19 nt, Homo sapiens
  misc_RNA (1)...(19): siRNA sense strand
gaucuuuccucaucuauca

SEQ ID NO: 1787407 - RNA, 19 nt, Homo sapiens
  misc_RNA (1)...(19): siRNA sense strand
gcauuaagcaccucaauau

SEQ ID NO: 1787408 - RNA, 19 nt, Homo sapiens
  misc_RNA (1)...(19): siRNA sense strand
gaacugcuguagucacuuc

SEQ ID NO: 1787409 - RNA, 19 nt, Homo sapiens
  misc_RNA (1)...(19): siRNA sense strand
acacugcaaucuguuauua

SEQ ID NO: 1787410 - RNA, 19 nt, Homo sapiens
  misc_RNA (1)...(19): siRNA sense strand
ugacagaugugccuuggaa

SEQ ID NO: 1787411 - RNA, 19 nt, Homo sapiens
  misc_RNA (1)...(19): siRNA sense strand
gaugggacaauuaucauua

SEQ ID NO: 1787412 - RNA, 19 nt, Homo sapiens
  misc_RNA (1)...(19): siRNA sense strand
gaacuccuauuuggucauu

SEQ ID NO: 1787413 - RNA, 19 nt, Homo sapiens
  misc_RNA (1)...(19): siRNA sense strand
ggaauggacagaagaacua

SEQ ID NO: 1787414 - RNA, 19 nt, Homo sapiens
  misc_RNA (1)...(19): siRNA sense strand
gaugagaggugcugggaau

SEQ ID NO: 1787415 - RNA, 19 nt, Homo sapiens
  misc_RNA (1)...(19): siRNA sense strand
gauguugacucuuccaguu

SEQ ID NO: 1787416 - RNA, 19 nt, Homo sapiens
  misc_RNA (1)...(19): siRNA sense strand
agaaagagcacgaauuauu

SEQ ID NO: 1787417 - RNA, 19 nt, Homo sapiens
  misc_RNA (1)...(19): siRNA sense strand
gaccuggacucauguguga

SEQ ID NO: 1787418 - RNA, 19 nt, Homo sapiens
  misc_RNA (1)...(19): siRNA sense strand
gaaacaggcacuuuggaaa

SEQ ID NO: 1787419 - RNA, 19 nt, Homo sapiens
  misc_RNA (1)...(19): siRNA sense strand
gaaagauacccgucaauag

SEQ ID NO: 1787420 - RNA, 19 nt, Homo sapiens
  misc_RNA (1)...(19): siRNA sense strand
gagcaagggacuucucuaa

SEQ ID NO: 1787421 - RNA, 19 nt, Homo sapiens
  misc_RNA (1)...(19): siRNA sense strand
ggacucaugugugaucuug

SEQ ID NO: 1787422 - RNA, 19 nt, Homo sapiens
  misc_RNA (1)...(19): siRNA sense strand
cagaagauggucacaguua

SEQ ID NO: 1787423 - RNA, 19 nt, Homo sapiens
  misc_RNA (1)...(19): siRNA sense strand
ggagauguguguuuggaau

SEQ ID NO: 1787424 - RNA, 19 nt, Homo sapiens
  misc_RNA (1)...(19): siRNA sense strand
cuacaugaaugaaaggaaa

SEQ ID NO: 1787425 - RNA, 19 nt, Homo sapiens
  misc_RNA (1)...(19): siRNA sense strand
ucuggaaggugguucuuua

SEQ ID NO: 1787426 - RNA, 19 nt, Homo sapiens
  misc_RNA (1)...(19): siRNA sense strand
cagcaucacugccaucaug

SEQ ID NO: 1787427 - RNA, 19 nt, Homo sapiens
  misc_RNA (1)...(19): siRNA sense strand
cagcuucgguaacauguuu

SEQ ID NO: 1787428 - RNA, 19 nt, Homo sapiens
  misc_RNA (1)...(19): siRNA sense strand
caacaacacaugaagaguu

SEQ ID NO: 1787429 - RNA, 19 nt, Homo sapiens
  misc_RNA (1)...(19): siRNA sense strand
guuuauaucugggaaauug

SEQ ID NO: 1787430 - RNA, 19 nt, Homo sapiens
  misc_RNA (1)...(19): siRNA sense strand
ugacugaaguuaguagaaa

SEQ ID NO: 1787431 - RNA, 19 nt, Homo sapiens
  misc_RNA (1)...(19): siRNA sense strand
aaagcaagaugucuaugaa

SEQ ID NO: 1787432 - RNA, 19 nt, Homo sapiens
  misc_RNA (1)...(19): siRNA sense strand
gacagaagauggucacagu

SEQ ID NO: 1787433 - RNA, 19 nt, Homo sapiens
  misc_RNA (1)...(19): siRNA sense strand
ucacugauguugccagguu

SEQ ID NO: 1787434 - RNA, 19 nt, Homo sapiens
  misc_RNA (1)...(19): siRNA sense strand
caagggacuucucuaaaca

SEQ ID NO: 1787435 - RNA, 19 nt, Homo sapiens
  misc_RNA (1)...(19): siRNA sense strand
ugugugaucuugugggaua

SEQ ID NO: 1787436 - RNA, 19 nt, Homo sapiens
  misc_RNA (1)...(19): siRNA sense strand
gaagucucaggaagaauua

SEQ ID NO: 1787437 - RNA, 19 nt, Homo sapiens
  misc_RNA (1)...(19): siRNA sense strand
ggaguaacguuggcuuuca

SEQ ID NO: 1787438 - RNA, 19 nt, Homo sapiens
  misc_RNA (1)...(19): siRNA sense strand
ggaagagugcuuaaagaga

SEQ ID NO: 1787439 - RNA, 19 nt, Homo sapiens
  misc_RNA (1)...(19): siRNA sense strand
gaaguucaacaacacauga

SEQ ID NO: 1787440 - RNA, 19 nt, Homo sapiens
  misc_RNA (1)...(19): siRNA sense strand
ggacuugucagauaaauac

SEQ ID NO: 1787441 - RNA, 19 nt, Homo sapiens
  misc_RNA (1)...(19): siRNA sense strand
cacaugaacuaaagauuuc

SEQ ID NO: 1787442 - RNA, 19 nt, Homo sapiens
  misc_RNA (1)...(19): siRNA sense strand
gggaauuucuuugaaugaa

SEQ ID NO: 1787443 - RNA, 19 nt, Homo sapiens
  misc_RNA (1)...(19): siRNA sense strand
gguuacugaugccaaauuu

SEQ ID NO: 1787444 - RNA, 19 nt, Homo sapiens
  misc_RNA (1)...(19): siRNA sense strand
uaagguuacugaugccaaa

SEQ ID NO: 1787445 - RNA, 19 nt, Homo sapiens
  misc_RNA (1)...(19): siRNA sense strand
guuaugggcuacaugaaug

SEQ ID NO: 1787446 - RNA, 19 nt, Homo sapiens
  misc_RNA (1)...(19): siRNA sense strand
ucuggaaucucucacauga

SEQ ID NO: 1787447 - RNA, 19 nt, Homo sapiens
  misc_RNA (1)...(19): siRNA sense strand
gcacauauacugagagacu

SEQ ID NO: 1787448 - RNA, 19 nt, Homo sapiens
  misc_RNA (1)...(19): siRNA sense strand
gaagaguuugggaaagaua

SEQ ID NO: 1787449 - RNA, 19 nt, Homo sapiens
  misc_RNA (1)...(19): siRNA sense strand
ucagugauguugacucuuc

SEQ ID NO: 1787450 - RNA, 19 nt, Homo sapiens
  misc_RNA (1)...(19): siRNA sense strand
cagagacacuuaagcacaa

SEQ ID NO: 1787451 - RNA, 19 nt, Homo sapiens
  misc_RNA (1)...(19): siRNA sense strand
gaaaugggcaguucuuugc

SEQ ID NO: 1787452 - RNA, 19 nt, Homo sapiens
  misc_RNA (1)...(19): siRNA sense strand
cuaaacagcccuacauugu

SEQ ID NO: 1787453 - RNA, 19 nt, Homo sapiens
  misc_RNA (1)...(19): siRNA sense strand
aacaacacaugaagaguuu

SEQ ID NO: 1787454 - RNA, 19 nt, Homo sapiens
  misc_RNA (1)...(19): siRNA sense strand
gaaaugguaagaaugaauc

SEQ ID NO: 1787455 - RNA, 19 nt, Homo sapiens
  misc_RNA (1)...(19): siRNA sense strand
uuuaaugucuugccuguga

SEQ ID NO: 1787456 - RNA, 19 nt, Homo sapiens
  misc_RNA (1)...(19): siRNA sense strand
gaucuugugggauaucuuu

SEQ ID NO: 1787457 - RNA, 19 nt, Homo sapiens
  misc_RNA (1)...(19): siRNA sense strand
caugagaauucaagaagau

SEQ ID NO: 1787458 - RNA, 19 nt, Homo sapiens
  misc_RNA (1)...(19): siRNA sense strand
cagccacucuuccaaauca

SEQ ID NO: 1787459 - RNA, 19 nt, Homo sapiens
  misc_RNA (1)...(19): siRNA sense strand
gugcagaugacucaguuua

SEQ ID NO: 1787460 - RNA, 19 nt, Homo sapiens
  misc_RNA (1)...(19): siRNA sense strand
gguaacauguuuggcaaga

SEQ ID NO: 1787461 - RNA, 19 nt, Homo sapiens
  misc_RNA (1)...(19): siRNA sense strand
gcgaaagaacuccuauuug

SEQ ID NO: 1787462 - RNA, 19 nt, Homo sapiens
  misc_RNA (1)...(19): siRNA sense strand
uagccaagccuauuacuga

SEQ ID NO: 1787463 - RNA, 19 nt, Homo sapiens
  misc_RNA (1)...(19): siRNA sense strand
cauauacccugcugaugga

SEQ ID NO: 1787464 - RNA, 19 nt, Homo sapiens
  misc_RNA (1)...(19): siRNA sense strand
gaaagaacuccuauuuggu

SEQ ID NO: 1787465 - RNA, 19 nt, Homo sapiens
  misc_RNA (1)...(19): siRNA sense strand
gaaucucucacaugaacua

SEQ ID NO: 1787466 - RNA, 19 nt, Homo sapiens
  misc_RNA (1)...(19): siRNA sense strand
cagauaauuugcugugugu

SEQ ID NO: 1787467 - RNA, 19 nt, Homo sapiens
  misc_RNA (1)...(19): siRNA sense strand
cagaguauauuccaagucu

SEQ ID NO: 1787468 - RNA, 19 nt, Homo sapiens
  misc_RNA (1)...(19): siRNA sense strand
uaacguuggcuuucauauu

SEQ ID NO: 1787469 - RNA, 19 nt, Homo sapiens
  misc_RNA (1)...(19): siRNA sense strand
uacaguugcuuacgaaaug

SEQ ID NO: 1787470 - RNA, 19 nt, Homo sapiens
  misc_RNA (1)...(19): siRNA sense strand
agagucagauacuauaguu

SEQ ID NO: 1787471 - RNA, 19 nt, Homo sapiens
  misc_RNA (1)...(19): siRNA sense strand
gcgagagucagauacuaua

SEQ ID NO: 1787472 - RNA, 19 nt, Homo sapiens
  misc_RNA (1)...(19): siRNA sense strand
gguugggauuuaugcaaua

SEQ ID NO: 1787473 - RNA, 19 nt, Homo sapiens
  misc_RNA (1)...(19): siRNA sense strand
ggaauuucuuugaaugaag

SEQ ID NO: 1787474 - RNA, 19 nt, Homo sapiens
  misc_RNA (1)...(19): siRNA sense strand
ggagauaauaccaucaaau

SEQ ID NO: 1787475 - RNA, 19 nt, Homo sapiens
  misc_RNA (1)...(19): siRNA sense strand
uaugggaucuuuccucauc

SEQ ID NO: 1787476 - RNA, 19 nt, Homo sapiens
  misc_RNA (1)...(19): siRNA sense strand
aaagauacccgucaauagu

SEQ ID NO: 1787477 - RNA, 19 nt, Homo sapiens
  misc_RNA (1)...(19): siRNA sense strand
gaggcugaccuuucacuuu

SEQ ID NO: 1787478 - RNA, 19 nt, Homo sapiens
  misc_RNA (1)...(19): siRNA sense strand
cagguggagucuucaugua

SEQ ID NO: 1787479 - RNA, 19 nt, Homo sapiens
  misc_RNA (1)...(19): siRNA sense strand
ggcacccgguugagaauuu

SEQ ID NO: 1787480 - RNA, 19 nt, Homo sapiens
  misc_RNA (1)...(19): siRNA sense strand
ugggauaucuuuacugaag

SEQ ID NO: 1787481 - RNA, 19 nt, Homo sapiens
  misc_RNA (1)...(19): siRNA sense strand
cauggucucucuucgaaau

SEQ ID NO: 1787482 - RNA, 19 nt, Homo sapiens
  misc_RNA (1)...(19): siRNA sense strand
cacauggucucucuucgaa

SEQ ID NO: 1787483 - RNA, 19 nt, Homo sapiens
  misc_RNA (1)...(19): siRNA sense strand
gacuauuucucugggcuua

SEQ ID NO: 1787484 - RNA, 19 nt, Homo sapiens
  misc_RNA (1)...(19): siRNA sense strand
aacguuggcuuucauauuc

SEQ ID NO: 1787485 - RNA, 19 nt, Homo sapiens
  misc_RNA (1)...(19): siRNA sense strand
ugugggauaucuuuacuga

SEQ ID NO: 1787486 - RNA, 19 nt, Homo sapiens
  misc_RNA (1)...(19): siRNA sense strand
caaaauuguuucugucuug

SEQ ID NO: 1787487 - RNA, 19 nt, Homo sapiens
  misc_RNA (1)...(19): siRNA sense strand
aaugguaacugugagauga

SEQ ID NO: 1787488 - RNA, 19 nt, Homo sapiens
  misc_RNA (1)...(19): siRNA sense strand
uaagaaugaaucccaugua

SEQ ID NO: 1787489 - RNA, 19 nt, Homo sapiens
  misc_RNA (1)...(19): siRNA sense strand
ccaccaaggucacacgaua

SEQ ID NO: 1787490 - RNA, 19 nt, Homo sapiens
  misc_RNA (1)...(19): siRNA sense strand
cagagaugguggugucaga

SEQ ID NO: 1787491 - RNA, 19 nt, Homo sapiens
  misc_RNA (1)...(19): siRNA sense strand
gcucccagacggugaaaug

SEQ ID NO: 1787492 - RNA, 19 nt, Homo sapiens
  misc_RNA (1)...(19): siRNA sense strand
gcaguggacacaaagucaa

SEQ ID NO: 1787493 - RNA, 19 nt, Homo sapiens
  misc_RNA (1)...(19): siRNA sense strand
gagaugguggugucagaug

SEQ ID NO: 1787494 - RNA, 19 nt, Homo sapiens
  misc_RNA (1)...(19): siRNA sense strand
ggugaaaugcuccuguuuu

SEQ ID NO: 1787495 - RNA, 19 nt, Homo sapiens
  misc_RNA (1)...(19): siRNA sense strand
acggugaaaugcuccuguu

SEQ ID NO: 1787496 - RNA, 19 nt, Homo sapiens
  misc_RNA (1)...(19): siRNA sense strand
gaacucaacuggcuauuug

SEQ ID NO: 1787497 - RNA, 19 nt, Homo sapiens
  misc_RNA (1)...(19): siRNA sense strand
gaggaggccugcauaauag

SEQ ID NO: 1787498 - RNA, 19 nt, Homo sapiens
  misc_RNA (1)...(19): siRNA sense strand
gacagaggcugagaaguuu

SEQ ID NO: 1787499 - RNA, 19 nt, Homo sapiens
  misc_RNA (1)...(19): siRNA sense strand
ggaaagaccgagugaagaa

SEQ ID NO: 1787500 - RNA, 19 nt, Homo sapiens
  misc_RNA (1)...(19): siRNA sense strand
cgaggaggccugcauaaua

SEQ ID NO: 1787501 - RNA, 19 nt, Homo sapiens
  misc_RNA (1)...(19): siRNA sense strand
aagaaacgcuuaacccaaa

SEQ ID NO: 1787502 - RNA, 19 nt, Homo sapiens
  misc_RNA (1)...(19): siRNA sense strand
ugacagaggcugagaaguu

SEQ ID NO: 1787503 - RNA, 19 nt, Homo sapiens
  misc_RNA (1)...(19): siRNA sense strand
uuacauggaugccuaugaa

SEQ ID NO: 1787504 - RNA, 19 nt, Homo sapiens
  misc_RNA (1)...(19): siRNA sense strand
gguuauggcuuauacaaca

SEQ ID NO: 1787505 - RNA, 19 nt, Homo sapiens
  misc_RNA (1)...(19): siRNA sense strand
cagaugauccucagauaaa

SEQ ID NO: 1787506 - RNA, 19 nt, Homo sapiens
  misc_RNA (1)...(19): siRNA sense strand
gcgaggagaguuacuauug

SEQ ID NO: 1787507 - RNA, 19 nt, Homo sapiens
  misc_RNA (1)...(19): siRNA sense strand
cgaggagaguuacuauuga

SEQ ID NO: 1787508 - RNA, 19 nt, Homo sapiens
  misc_RNA (1)...(19): siRNA sense strand
gggccugacucuacuauuc

SEQ ID NO: 1787509 - RNA, 19 nt, Homo sapiens
  misc_RNA (1)...(19): siRNA sense strand
gaggagaguuacuauugau

SEQ ID NO: 1787510 - RNA, 19 nt, Homo sapiens
  misc_RNA (1)...(19): siRNA sense strand
gaaguuuggcgacuccuuu

SEQ ID NO: 1787511 - RNA, 19 nt, Homo sapiens
  misc_RNA (1)...(19): siRNA sense strand
gccauaggucuuauuguua

SEQ ID NO: 1787512 - RNA, 19 nt, Homo sapiens
  misc_RNA (1)...(19): siRNA sense strand
caucccugcuggaguauuu

SEQ ID NO: 1787513 - RNA, 19 nt, Homo sapiens
  misc_RNA (1)...(19): siRNA sense strand
ugccauaggucuuauuguu

SEQ ID NO: 1787514 - RNA, 19 nt, Homo sapiens
  misc_RNA (1)...(19): siRNA sense strand
cacagaugauccucagaua

SEQ ID NO: 1787515 - RNA, 19 nt, Homo sapiens
  misc_RNA (1)...(19): siRNA sense strand
aaagguggauccuacaugu

SEQ ID NO: 1787516 - RNA, 19 nt, Homo sapiens
  misc_RNA (1)...(19): siRNA sense strand
gcacagaugauccucagau

SEQ ID NO: 1787517 - RNA, 19 nt, Homo sapiens
  misc_RNA (1)...(19): siRNA sense strand
gagcaagugaagaccaaua

SEQ ID NO: 1787518 - RNA, 19 nt, Homo sapiens
  misc_RNA (1)...(19): siRNA sense strand
gcaccugcgaggagaguua

SEQ ID NO: 1787519 - RNA, 19 nt, Homo sapiens
  misc_RNA (1)...(19): siRNA sense strand
caagugaagaccaauauuc

SEQ ID NO: 1787520 - RNA, 19 nt, Homo sapiens
  misc_RNA (1)...(19): siRNA sense strand
ccaaggaacugcgccuguu

SEQ ID NO: 1787521 - RNA, 19 nt, Homo sapiens
  misc_RNA (1)...(19): siRNA sense strand
gaagaccaauauucaacag

SEQ ID NO: 1787522 - RNA, 19 nt, Homo sapiens
  misc_RNA (1)...(19): siRNA sense strand
gaaagguggauccuacaug

SEQ ID NO: 1787523 - RNA, 19 nt, Homo sapiens
  misc_RNA (1)...(19): siRNA sense strand
ucccaaugguuauggcuua

SEQ ID NO: 1787524 - RNA, 19 nt, Homo sapiens
  misc_RNA (1)...(19): siRNA sense strand
gaaagaccgagugaagaaa

SEQ ID NO: 1787525 - RNA, 19 nt, Homo sapiens
  misc_RNA (1)...(19): siRNA sense strand
gauacucgcgggaggcuaa

SEQ ID NO: 1787526 - RNA, 19 nt, Homo sapiens
  misc_RNA (1)...(19): siRNA sense strand
ccauaggucuuauuguuac

SEQ ID NO: 1787527 - RNA, 19 nt, Homo sapiens
  misc_RNA (1)...(19): siRNA sense strand
gcaagugaagaccaauauu

SEQ ID NO: 1787528 - RNA, 19 nt, Homo sapiens
  misc_RNA (1)...(19): siRNA sense strand
gguggacuguucaucauuc

SEQ ID NO: 1787529 - RNA, 19 nt, Homo sapiens
  misc_RNA (1)...(19): siRNA sense strand
gcuggaguauuuacaaugg

SEQ ID NO: 1787530 - RNA, 19 nt, Homo sapiens
  misc_RNA (1)...(19): siRNA sense strand
gauccuacaugugccauag

SEQ ID NO: 1787531 - RNA, 19 nt, Homo sapiens
  misc_RNA (1)...(19): siRNA sense strand
ggucuuauuguuacaggua

SEQ ID NO: 1787532 - RNA, 19 nt, Homo sapiens
  misc_RNA (1)...(19): siRNA sense strand
ugauagcucugcuucgaau

SEQ ID NO: 1787533 - RNA, 19 nt, Homo sapiens
  misc_RNA (1)...(19): siRNA sense strand
ggacuguucaucauucugu

SEQ ID NO: 1787534 - RNA, 19 nt, Homo sapiens
  misc_RNA (1)...(19): siRNA sense strand
gcgacuccuuugucuuuga

SEQ ID NO: 1787535 - RNA, 19 nt, Homo sapiens
  misc_RNA (1)...(19): siRNA sense strand
gaauuugagaaguuuguga

SEQ ID NO: 1787536 - RNA, 19 nt, Homo sapiens
  misc_RNA (1)...(19): siRNA sense strand
cgacuccuuugucuuugaa

SEQ ID NO: 1787537 - RNA, 19 nt, Homo sapiens
  misc_RNA (1)...(19): siRNA sense strand
uugaaggcauguugaguga

SEQ ID NO: 1787538 - RNA, 19 nt, Homo sapiens
  misc_RNA (1)...(19): siRNA sense strand
cagaagggccugacucuac

SEQ ID NO: 1787539 - RNA, 19 nt, Homo sapiens
  misc_RNA (1)...(19): siRNA sense strand
gaagcugagugggaauaca

SEQ ID NO: 1787540 - RNA, 19 nt, Homo sapiens
  misc_RNA (1)...(19): siRNA sense strand
ccugauagcucugcuucga

SEQ ID NO: 1787541 - RNA, 19 nt, Homo sapiens
  misc_RNA (1)...(19): siRNA sense strand
gcaacucgcgcacucaaag

SEQ ID NO: 1787542 - RNA, 19 nt, Homo sapiens
  misc_RNA (1)...(19): siRNA sense strand
cauguguccuggaaugaug

SEQ ID NO: 1787543 - RNA, 19 nt, Homo sapiens
  misc_RNA (1)...(19): siRNA sense strand
gggaaagaccgagugaaga

SEQ ID NO: 1787544 - RNA, 19 nt, Homo sapiens
  misc_RNA (1)...(19): siRNA sense strand
ccuaugaagucaguaauac

SEQ ID NO: 1787545 - RNA, 19 nt, Homo sapiens
  misc_RNA (1)...(19): siRNA sense strand
caaugguuauggcuuauac

SEQ ID NO: 1787546 - RNA, 19 nt, Homo sapiens
  misc_RNA (1)...(19): siRNA sense strand
gcccaaaggccagcauuau

SEQ ID NO: 1787547 - RNA, 19 nt, Homo sapiens
  misc_RNA (1)...(19): siRNA sense strand
gugagcaagugaagaccaa

SEQ ID NO: 1787548 - RNA, 19 nt, Homo sapiens
  misc_RNA (1)...(19): siRNA sense strand
uggcgacuccuuugucuuu

SEQ ID NO: 1787549 - RNA, 19 nt, Homo sapiens
  misc_RNA (1)...(19): siRNA sense strand
gccuaugaagucaguaaua

SEQ ID NO: 1787550 - RNA, 19 nt, Homo sapiens
  misc_RNA (1)...(19): siRNA sense strand
acagaugauccucagauaa

SEQ ID NO: 1787551 - RNA, 19 nt, Homo sapiens
  misc_RNA (1)...(19): siRNA sense strand
ggaugccuaugaagucagu

SEQ ID NO: 1787552 - RNA, 19 nt, Homo sapiens
  misc_RNA (1)...(19): siRNA sense strand
agccagaacacaccugaua

SEQ ID NO: 1787553 - RNA, 19 nt, Homo sapiens
  misc_RNA (1)...(19): siRNA sense strand
ucagacugguggacuguuc

SEQ ID NO: 1787554 - RNA, 19 nt, Homo sapiens
  misc_RNA (1)...(19): siRNA sense strand
caacaaacugcagcccaaa

SEQ ID NO: 1787555 - RNA, 19 nt, Homo sapiens
  misc_RNA (1)...(19): siRNA sense strand
gcgguugccuacugcacuu

SEQ ID NO: 1787556 - RNA, 19 nt, Homo sapiens
  misc_RNA (1)...(19): siRNA sense strand
gaagggccugacucuacua

SEQ ID NO: 1787557 - RNA, 19 nt, Homo sapiens
  misc_RNA (1)...(19): siRNA sense strand
ugaacucaacuggcuauuu

SEQ ID NO: 1787558 - RNA, 19 nt, Homo sapiens
  misc_RNA (1)...(19): siRNA sense strand
caaggaacugcgccuguug

SEQ ID NO: 1787559 - RNA, 19 nt, Homo sapiens
  misc_RNA (1)...(19): siRNA sense strand
caacuggcuauuugacaga

SEQ ID NO: 1787560 - RNA, 19 nt, Homo sapiens
  misc_RNA (1)...(19): siRNA sense strand
gggcugguguguggacguu

SEQ ID NO: 1787561 - RNA, 19 nt, Homo sapiens
  misc_RNA (1)...(19): siRNA sense strand
caacucgcgcacucaaaga

SEQ ID NO: 1787562 - RNA, 19 nt, Homo sapiens
  misc_RNA (1)...(19): siRNA sense strand
ccaaugguuauggcuuaua

SEQ ID NO: 1787563 - RNA, 19 nt, Homo sapiens
  misc_RNA (1)...(19): siRNA sense strand
uuacaaugggcacagauga

SEQ ID NO: 1787564 - RNA, 19 nt, Homo sapiens
  misc_RNA (1)...(19): siRNA sense strand
gcaugggaauggacuucag

SEQ ID NO: 1787565 - RNA, 19 nt, Homo sapiens
  misc_RNA (1)...(19): siRNA sense strand
agaagggccugacucuacu

SEQ ID NO: 1787566 - RNA, 19 nt, Homo sapiens
  misc_RNA (1)...(19): siRNA sense strand
ugaagaaagguggauccua

SEQ ID NO: 1787567 - RNA, 19 nt, Homo sapiens
  misc_RNA (1)...(19): siRNA sense strand
gggaacgcaugggaaugga

SEQ ID NO: 1787568 - RNA, 19 nt, Homo sapiens
  misc_RNA (1)...(19): siRNA sense strand
cauguugagugagcaagug

SEQ ID NO: 1787569 - RNA, 19 nt, Homo sapiens
  misc_RNA (1)...(19): siRNA sense strand
ccagaagggccugacucua

SEQ ID NO: 1787570 - RNA, 19 nt, Homo sapiens
  misc_RNA (1)...(19): siRNA sense strand
cccaaaggccagcauuaug

SEQ ID NO: 1787571 - RNA, 19 nt, Homo sapiens
  misc_RNA (1)...(19): siRNA sense strand
ggaacugcgccuguugaug

SEQ ID NO: 1787572 - RNA, 19 nt, Homo sapiens
  misc_RNA (1)...(19): siRNA sense strand
gcgaguuuccggugaccaa

SEQ ID NO: 1787573 - RNA, 19 nt, Homo sapiens
  misc_RNA (1)...(19): siRNA sense strand
acaugugccauaggucuua

SEQ ID NO: 1787574 - RNA, 19 nt, Homo sapiens
  misc_RNA (1)...(19): siRNA sense strand
guuauggcuuauacaacau

SEQ ID NO: 1787575 - RNA, 19 nt, Homo sapiens
  misc_RNA (1)...(19): siRNA sense strand
gcugcucccuggugguuac

SEQ ID NO: 1787576 - RNA, 19 nt, Homo sapiens
  misc_RNA (1)...(19): siRNA sense strand
gacuguucaucauucuguu

SEQ ID NO: 1787577 - RNA, 19 nt, Homo sapiens
  misc_RNA (1)...(19): siRNA sense strand
cauggaugccuaugaaguc

SEQ ID NO: 1787578 - RNA, 19 nt, Homo sapiens
  misc_RNA (1)...(19): siRNA sense strand
ggagaaagagcaugaggaa

SEQ ID NO: 1787579 - RNA, 19 nt, Homo sapiens
  misc_RNA (1)...(19): siRNA sense strand
gaaggaggaggaagagaaa

SEQ ID NO: 1787580 - RNA, 19 nt, Homo sapiens
  misc_RNA (1)...(19): siRNA sense strand
gaggaggaauccagagaau

SEQ ID NO: 1787581 - RNA, 19 nt, Homo sapiens
  misc_RNA (1)...(19): siRNA sense strand
gaaaggggcaugaaaauau

SEQ ID NO: 1787582 - RNA, 19 nt, Homo sapiens
  misc_RNA (1)...(19): siRNA sense strand
gaaagagcaugaggaaagg

SEQ ID NO: 1787583 - RNA, 19 nt, Homo sapiens
  misc_RNA (1)...(19): siRNA sense strand
ggagacagaggaaacuuug

SEQ ID NO: 1787584 - RNA, 19 nt, Homo sapiens
  misc_RNA (1)...(19): siRNA sense strand
gaagagaaaccagaagcaa

SEQ ID NO: 1787585 - RNA, 19 nt, Homo sapiens
  misc_RNA (1)...(19): siRNA sense strand
ggaggaauccagagaauac

SEQ ID NO: 1787586 - RNA, 19 nt, Homo sapiens
  misc_RNA (1)...(19): siRNA sense strand
gaaaggacagaaucagaca

SEQ ID NO: 1787587 - RNA, 19 nt, Homo sapiens
  misc_RNA (1)...(19): siRNA sense strand
agaaagagcaugaggaaag

SEQ ID NO: 1787588 - RNA, 19 nt, Homo sapiens
  misc_RNA (1)...(19): siRNA sense strand
ggaggaagagaaaccagaa

SEQ ID NO: 1787589 - RNA, 19 nt, Homo sapiens
  misc_RNA (1)...(19): siRNA sense strand
ccaggagcaugugcaguuu

SEQ ID NO: 1787590 - RNA, 19 nt, Homo sapiens
  misc_RNA (1)...(19): siRNA sense strand
gacaaaagaggaaacauuu

SEQ ID NO: 1787591 - RNA, 19 nt, Homo sapiens
  misc_RNA (1)...(19): siRNA sense strand
ggaggaggaauccagagaa

SEQ ID NO: 1787592 - RNA, 19 nt, Homo sapiens
  misc_RNA (1)...(19): siRNA sense strand
uggaagaagugacccuuuc

SEQ ID NO: 1787593 - RNA, 19 nt, Homo sapiens
  misc_RNA (1)...(19): siRNA sense strand
ggaaaggggcaugaaaaua

SEQ ID NO: 1787594 - RNA, 19 nt, Homo sapiens
  misc_RNA (1)...(19): siRNA sense strand
gggaggagaaagagcauga

SEQ ID NO: 1787595 - RNA, 19 nt, Homo sapiens
  misc_RNA (1)...(19): siRNA sense strand
aaaggggcaugaaaauaua

SEQ ID NO: 1787596 - RNA, 19 nt, Homo sapiens
  misc_RNA (1)...(19): siRNA sense strand
gggagacagaggaaacuuu

SEQ ID NO: 1787597 - RNA, 19 nt, Homo sapiens
  misc_RNA (1)...(19): siRNA sense strand
gcucacaacaugucuccuu

SEQ ID NO: 1787598 - RNA, 19 nt, Homo sapiens
  misc_RNA (1)...(19): siRNA sense strand
aaugaagagucccaggaaa

SEQ ID NO: 1787599 - RNA, 19 nt, Homo sapiens
  misc_RNA (1)...(19): siRNA sense strand
cuacaugcagguacaaaug

SEQ ID NO: 1787600 - RNA, 19 nt, Homo sapiens
  misc_RNA (1)...(19): siRNA sense strand
ggaagagaaaccagaagca

SEQ ID NO: 1787601 - RNA, 19 nt, Homo sapiens
  misc_RNA (1)...(19): siRNA sense strand
agaaggaggaggaagagaa

SEQ ID NO: 1787602 - RNA, 19 nt, Homo sapiens
  misc_RNA (1)...(19): siRNA sense strand
gcagguacaaaugaacaaa

SEQ ID NO: 1787603 - RNA, 19 nt, Homo sapiens
  misc_RNA (1)...(19): siRNA sense strand
ccaggaaaccgcugagaag

SEQ ID NO: 1787604 - RNA, 19 nt, Homo sapiens
  misc_RNA (1)...(19): siRNA sense strand
aaagaggaaacauuuggaa

SEQ ID NO: 1787605 - RNA, 19 nt, Homo sapiens
  misc_RNA (1)...(19): siRNA sense strand
aagagaaaccagaagcaaa

SEQ ID NO: 1787606 - RNA, 19 nt, Homo sapiens
  misc_RNA (1)...(19): siRNA sense strand
agacuuguguguccucucu

SEQ ID NO: 1787607 - RNA, 19 nt, Homo sapiens
  misc_RNA (1)...(19): siRNA sense strand
gaggaaaggggcaugaaaa

SEQ ID NO: 1787608 - RNA, 19 nt, Homo sapiens
  misc_RNA (1)...(19): siRNA sense strand
gagaaagagcaugaggaaa

SEQ ID NO: 1787609 - RNA, 19 nt, Homo sapiens
  misc_RNA (1)...(19): siRNA sense strand
acaugcagguacaaaugaa

SEQ ID NO: 1787610 - RNA, 19 nt, Homo sapiens
  misc_RNA (1)...(19): siRNA sense strand
uauacuacaugcagguaca

SEQ ID NO: 1787611 - RNA, 19 nt, Homo sapiens
  misc_RNA (1)...(19): siRNA sense strand
gggaggaggaauccagaga

SEQ ID NO: 1787612 - RNA, 19 nt, Homo sapiens
  misc_RNA (1)...(19): siRNA sense strand
agagaaaccagaagcaaag

SEQ ID NO: 1787613 - RNA, 19 nt, Homo sapiens
  misc_RNA (1)...(19): siRNA sense strand
ggaggaaaauggaaaugag

SEQ ID NO: 1787614 - RNA, 19 nt, Homo sapiens
  misc_RNA (1)...(19): siRNA sense strand
aaaugaagagucccaggaa

SEQ ID NO: 1787615 - RNA, 19 nt, Homo sapiens
  misc_RNA (1)...(19): siRNA sense strand
agacagaggaaacuuugga

SEQ ID NO: 1787616 - RNA, 19 nt, Homo sapiens
  misc_RNA (1)...(19): siRNA sense strand
ggaauccagagaauacauc

SEQ ID NO: 1787617 - RNA, 19 nt, Homo sapiens
  misc_RNA (1)...(19): siRNA sense strand
ggaaacuuuggaguccuua

SEQ ID NO: 1787618 - RNA, 19 nt, Homo sapiens
  misc_RNA (1)...(19): siRNA sense strand
cgacaaaagaggaaacauu

SEQ ID NO: 1787619 - RNA, 19 nt, Homo sapiens
  misc_RNA (1)...(19): siRNA sense strand
cguccuauucauccuauaa

SEQ ID NO: 1787620 - RNA, 19 nt, Homo sapiens
  misc_RNA (1)...(19): siRNA sense strand
aaacuuuggaguccuuaga

SEQ ID NO: 1787621 - RNA, 19 nt, Homo sapiens
  misc_RNA (1)...(19): siRNA sense strand
aagaggaaacauuuggaaa

SEQ ID NO: 1787622 - RNA, 19 nt, Homo sapiens
  misc_RNA (1)...(19): siRNA sense strand
ccaaggauggaagaaguga

SEQ ID NO: 1787623 - RNA, 19 nt, Homo sapiens
  misc_RNA (1)...(19): siRNA sense strand
caugugcaguuugggauca

SEQ ID NO: 1787624 - RNA, 19 nt, Homo sapiens
  misc_RNA (1)...(19): siRNA sense strand
cagagaauacaucgagaca

SEQ ID NO: 1787625 - RNA, 19 nt, Homo sapiens
  misc_RNA (1)...(19): siRNA sense strand
gcccacagaagaagaccuu

SEQ ID NO: 1787626 - RNA, 19 nt, Homo sapiens
  misc_RNA (1)...(19): siRNA sense strand
ugaggaaaggacagaauca

SEQ ID NO: 1787627 - RNA, 19 nt, Homo sapiens
  misc_RNA (1)...(19): siRNA sense strand
agccaaggauggaagaagu

SEQ ID NO: 1787628 - RNA, 19 nt, Homo sapiens
  misc_RNA (1)...(19): siRNA sense strand
uacaugcagguacaaauga

SEQ ID NO: 1787629 - RNA, 19 nt, Homo sapiens
  misc_RNA (1)...(19): siRNA sense strand
cauccuauaagacuugugu

SEQ ID NO: 1787630 - RNA, 19 nt, Homo sapiens
  misc_RNA (1)...(19): siRNA sense strand
uguccucucuguguguaaa

SEQ ID NO: 1787631 - RNA, 19 nt, Homo sapiens
  misc_RNA (1)...(19): siRNA sense strand
acuuuggaguccuuagaaa

SEQ ID NO: 1787632 - RNA, 19 nt, Homo sapiens
  misc_RNA (1)...(19): siRNA sense strand
ugagaagggaggaggaauc

SEQ ID NO: 1787633 - RNA, 19 nt, Homo sapiens
  misc_RNA (1)...(19): siRNA sense strand
uccaggagcaugugcaguu

SEQ ID NO: 1787634 - RNA, 19 nt, Homo sapiens
  misc_RNA (1)...(19): siRNA sense strand
caccagaaaccuccugucu

SEQ ID NO: 1787635 - RNA, 19 nt, Homo sapiens
  misc_RNA (1)...(19): siRNA sense strand
ugacauaacucaacuaaga

SEQ ID NO: 1787636 - RNA, 19 nt, Homo sapiens
  misc_RNA (1)...(19): siRNA sense strand
caccauagcuugcaaagua

SEQ ID NO: 1787637 - RNA, 19 nt, Homo sapiens
  misc_RNA (1)...(19): siRNA sense strand
ugacagaaaugguguguuu

SEQ ID NO: 1787638 - RNA, 19 nt, Homo sapiens
  misc_RNA (1)...(19): siRNA sense strand
caaggaaguuucuguauga

SEQ ID NO: 1787639 - RNA, 19 nt, Homo sapiens
  misc_RNA (1)...(19): siRNA sense strand
ggaagcaggugaaguaguu

SEQ ID NO: 1787640 - RNA, 19 nt, Homo sapiens
  misc_RNA (1)...(19): siRNA sense strand
gcacaguucucuaucacua

SEQ ID NO: 1787641 - RNA, 19 nt, Homo sapiens
  misc_RNA (1)...(19): siRNA sense strand
gagaugcacuuguuugauu

SEQ ID NO: 1787642 - RNA, 19 nt, Homo sapiens
  misc_RNA (1)...(19): siRNA sense strand
aaacauaucuccaguugug

SEQ ID NO: 1787643 - RNA, 19 nt, Homo sapiens
  misc_RNA (1)...(19): siRNA sense strand
gaaauaacaggaagagaaa

SEQ ID NO: 1787644 - RNA, 19 nt, Homo sapiens
  misc_RNA (1)...(19): siRNA sense strand
ggagaaaggaaagaaauua

SEQ ID NO: 1787645 - RNA, 19 nt, Homo sapiens
  misc_RNA (1)...(19): siRNA sense strand
aaucaagucugcuccuuua

SEQ ID NO: 1787646 - RNA, 19 nt, Homo sapiens
  misc_RNA (1)...(19): siRNA sense strand
gcacaugcccaucagagua

SEQ ID NO: 1787647 - RNA, 19 nt, Homo sapiens
  misc_RNA (1)...(19): siRNA sense strand
gaaagaaugguauguagga

SEQ ID NO: 1787648 - RNA, 19 nt, Homo sapiens
  misc_RNA (1)...(19): siRNA sense strand
ugacaagccacaagauuua

SEQ ID NO: 1787649 - RNA, 19 nt, Homo sapiens
  misc_RNA (1)...(19): siRNA sense strand
ggaagaauugcacaaagua

SEQ ID NO: 1787650 - RNA, 19 nt, Homo sapiens
  misc_RNA (1)...(19): siRNA sense strand
caggacagcuuacaauuuc

SEQ ID NO: 1787651 - RNA, 19 nt, Homo sapiens
  misc_RNA (1)...(19): siRNA sense strand
gguaauguaucuagugguu

SEQ ID NO: 1787652 - RNA, 19 nt, Homo sapiens
  misc_RNA (1)...(19): siRNA sense strand
uagcugauguccuggguua

SEQ ID NO: 1787653 - RNA, 19 nt, Homo sapiens
  misc_RNA (1)...(19): siRNA sense strand
ggaaaccugccuaugauuu

SEQ ID NO: 1787654 - RNA, 19 nt, Homo sapiens
  misc_RNA (1)...(19): siRNA sense strand
caaauuugauugacaugga

SEQ ID NO: 1787655 - RNA, 19 nt, Homo sapiens
  misc_RNA (1)...(19): siRNA sense strand
gacaaagcaagauugauua

SEQ ID NO: 1787656 - RNA, 19 nt, Homo sapiens
  misc_RNA (1)...(19): siRNA sense strand
acagagagaugcacuuguu

SEQ ID NO: 1787657 - RNA, 19 nt, Homo sapiens
  misc_RNA (1)...(19): siRNA sense strand
gaagcaaauuugauugaca

SEQ ID NO: 1787658 - RNA, 19 nt, Homo sapiens
  misc_RNA (1)...(19): siRNA sense strand
gauagugucuuuacaacca

SEQ ID NO: 1787659 - RNA, 19 nt, Homo sapiens
  misc_RNA (1)...(19): siRNA sense strand
caagauugauuacuuccuu

SEQ ID NO: 1787660 - RNA, 19 nt, Homo sapiens
  misc_RNA (1)...(19): siRNA sense strand
caaaguaaaccaucaagga

SEQ ID NO: 1787661 - RNA, 19 nt, Homo sapiens
  misc_RNA (1)...(19): siRNA sense strand
caagucugcuccuuuauca

SEQ ID NO: 1787662 - RNA, 19 nt, Homo sapiens
  misc_RNA (1)...(19): siRNA sense strand
gaaaucaagucugcuccuu

SEQ ID NO: 1787663 - RNA, 19 nt, Homo sapiens
  misc_RNA (1)...(19): siRNA sense strand
caaaggagcaaguaauguu

SEQ ID NO: 1787664 - RNA, 19 nt, Homo sapiens
  misc_RNA (1)...(19): siRNA sense strand
caaaguaugucugaagcaa

SEQ ID NO: 1787665 - RNA, 19 nt, Homo sapiens
  misc_RNA (1)...(19): siRNA sense strand
gccacaagauuuaaguauu

SEQ ID NO: 1787666 - RNA, 19 nt, Homo sapiens
  misc_RNA (1)...(19): siRNA sense strand
cagacuugcuucacaauug

SEQ ID NO: 1787667 - RNA, 19 nt, Homo sapiens
  misc_RNA (1)...(19): siRNA sense strand
gaagauugccacacagaga

SEQ ID NO: 1787668 - RNA, 19 nt, Homo sapiens
  misc_RNA (1)...(19): siRNA sense strand
gaaaauggauugccaagag

SEQ ID NO: 1787669 - RNA, 19 nt, Homo sapiens
  misc_RNA (1)...(19): siRNA sense strand
gcuaaucacugaaagaaaa

SEQ ID NO: 1787670 - RNA, 19 nt, Homo sapiens
  misc_RNA (1)...(19): siRNA sense strand
caaagaaucagagaaaguu

SEQ ID NO: 1787671 - RNA, 19 nt, Homo sapiens
  misc_RNA (1)...(19): siRNA sense strand
agacaaagaaucagagaaa

SEQ ID NO: 1787672 - RNA, 19 nt, Homo sapiens
  misc_RNA (1)...(19): siRNA sense strand
ugacuuauaucuacucagu

SEQ ID NO: 1787673 - RNA, 19 nt, Homo sapiens
  misc_RNA (1)...(19): siRNA sense strand
agacaaagcaagauugauu

SEQ ID NO: 1787674 - RNA, 19 nt, Homo sapiens
  misc_RNA (1)...(19): siRNA sense strand
gaucuuucgugcacuguga

SEQ ID NO: 1787675 - RNA, 19 nt, Homo sapiens
  misc_RNA (1)...(19): siRNA sense strand
aaaggaagauugccacaca

SEQ ID NO: 1787676 - RNA, 19 nt, Homo sapiens
  misc_RNA (1)...(19): siRNA sense strand
guaauaaugcuuccaaagu

SEQ ID NO: 1787677 - RNA, 19 nt, Homo sapiens
  misc_RNA (1)...(19): siRNA sense strand
gaaggagaaaggaaagaaa

SEQ ID NO: 1787678 - RNA, 19 nt, Homo sapiens
  misc_RNA (1)...(19): siRNA sense strand
gaugacauaacucaacuaa

SEQ ID NO: 1787679 - RNA, 19 nt, Homo sapiens
  misc_RNA (1)...(19): siRNA sense strand
agaaauaacaggaagagaa

SEQ ID NO: 1787680 - RNA, 19 nt, Homo sapiens
  misc_RNA (1)...(19): siRNA sense strand
uauuguggcucuucugaaa

SEQ ID NO: 1787681 - RNA, 19 nt, Homo sapiens
  misc_RNA (1)...(19): siRNA sense strand
cagauuguccugccuuuaa

SEQ ID NO: 1787682 - RNA, 19 nt, Homo sapiens
  misc_RNA (1)...(19): siRNA sense strand
gcacaaaguaugucugaag

SEQ ID NO: 1787683 - RNA, 19 nt, Homo sapiens
  misc_RNA (1)...(19): siRNA sense strand
gaagaaggaggaaaucaag

SEQ ID NO: 1787684 - RNA, 19 nt, Homo sapiens
  misc_RNA (1)...(19): siRNA sense strand
cagcuuacaauuucugaua

SEQ ID NO: 1787685 - RNA, 19 nt, Homo sapiens
  misc_RNA (1)...(19): siRNA sense strand
gcuccugccuugauuugaa

SEQ ID NO: 1787686 - RNA, 19 nt, Homo sapiens
  misc_RNA (1)...(19): siRNA sense strand
cagacuuccucaagaaauu

SEQ ID NO: 1787687 - RNA, 19 nt, Homo sapiens
  misc_RNA (1)...(19): siRNA sense strand
gcaaguaauguuuauguca

SEQ ID NO: 1787688 - RNA, 19 nt, Homo sapiens
  misc_RNA (1)...(19): siRNA sense strand
gagcaaguaauguuuaugu

SEQ ID NO: 1787689 - RNA, 19 nt, Homo sapiens
  misc_RNA (1)...(19): siRNA sense strand
ucaaggugauuucaaagga

SEQ ID NO: 1787690 - RNA, 19 nt, Homo sapiens
  misc_RNA (1)...(19): siRNA sense strand
gugaaagaaugguauguag

SEQ ID NO: 1787691 - RNA, 19 nt, Homo sapiens
  misc_RNA (1)...(19): siRNA sense strand
guuggaagcaggugaagua

SEQ ID NO: 1787692 - RNA, 19 nt, Homo sapiens
  misc_RNA (1)...(19): siRNA sense strand
gcaacugcuacauuuauaa

SEQ ID NO: 1787693 - RNA, 19 nt, Homo sapiens
  misc_RNA (1)...(19): siRNA sense strand
uaugucagauagugucuuu

SEQ ID NO: 1787694 - RNA, 19 nt, Homo sapiens
  misc_RNA (1)...(19): siRNA sense strand
guggaaaccugccuaugau

SEQ ID NO: 1787695 - RNA, 19 nt, Homo sapiens
  misc_RNA (1)...(19): siRNA sense strand
acaaggaaguuucuguaug

SEQ ID NO: 1787696 - RNA, 19 nt, Homo sapiens
  misc_RNA (1)...(19): siRNA sense strand
gaaauucuggaagaucuaa

SEQ ID NO: 1787697 - RNA, 19 nt, Homo sapiens
  misc_RNA (1)...(19): siRNA sense strand
uaacugcauucuccacuuc

SEQ ID NO: 1787698 - RNA, 19 nt, Homo sapiens
  misc_RNA (1)...(19): siRNA sense strand
ggagggaacuagcugaaaa

SEQ ID NO: 1787699 - RNA, 19 nt, Homo sapiens
  misc_RNA (1)...(19): siRNA sense strand
gagguaagauuggacuugu

SEQ ID NO: 1787700 - RNA, 19 nt, Homo sapiens
  misc_RNA (1)...(19): siRNA sense strand
gagagaugcacuuguuuga

SEQ ID NO: 1787701 - RNA, 19 nt, Homo sapiens
  misc_RNA (1)...(19): siRNA sense strand
gcacagagagaugcacuug

SEQ ID NO: 1787702 - RNA, 19 nt, Homo sapiens
  misc_RNA (1)...(19): siRNA sense strand
ccaggacagcuuacaauuu

SEQ ID NO: 1787703 - RNA, 19 nt, Homo sapiens
  misc_RNA (1)...(19): siRNA sense strand
caaccucaauacaauggaa

SEQ ID NO: 1787704 - RNA, 19 nt, Homo sapiens
  misc_RNA (1)...(19): siRNA sense strand
gauccuacuacacgacuua

SEQ ID NO: 1787705 - RNA, 19 nt, Homo sapiens
  misc_RNA (1)...(19): siRNA sense strand
acaauuggccggaugcuuu

SEQ ID NO: 1787706 - RNA, 19 nt, Homo sapiens
  misc_RNA (1)...(19): siRNA sense strand
gaagaauugcacaaaguau

SEQ ID NO: 1787707 - RNA, 19 nt, Homo sapiens
  misc_RNA (1)...(19): siRNA sense strand
caaauggaggcauaugaaa

SEQ ID NO: 1787708 - RNA, 19 nt, Homo sapiens
  misc_RNA (1)...(19): siRNA sense strand
aaucagacaucacuguuca

SEQ ID NO: 1787709 - RNA, 19 nt, Homo sapiens
  misc_RNA (1)...(19): siRNA sense strand
guaaauucuuuggagguuu

SEQ ID NO: 1787710 - RNA, 19 nt, Homo sapiens
  misc_RNA (1)...(19): siRNA sense strand
uaaacacuggagagaauua

SEQ ID NO: 1787711 - RNA, 19 nt, Homo sapiens
  misc_RNA (1)...(19): siRNA sense strand
ucacaaagcaacaaaugga

SEQ ID NO: 1787712 - RNA, 19 nt, Homo sapiens
  misc_RNA (1)...(19): siRNA sense strand
aauaaugcuuccaaaguug

SEQ ID NO: 1787713 - RNA, 19 nt, Homo sapiens
  misc_RNA (1)...(19): siRNA sense strand
ucagucagcuuuggacaga

SEQ ID NO: 1787714 - RNA, 19 nt, Homo sapiens
  misc_RNA (1)...(19): siRNA sense strand
caaggagggucaguacaau

SEQ ID NO: 1787715 - RNA, 19 nt, Homo sapiens
  misc_RNA (1)...(19): siRNA sense strand
gaaaauuggggcugaagua

SEQ ID NO: 1787716 - RNA, 19 nt, Homo sapiens
  misc_RNA (1)...(19): siRNA sense strand
uaaaauggcuugguuaagu

SEQ ID NO: 1787717 - RNA, 19 nt, Homo sapiens
  misc_RNA (1)...(19): siRNA sense strand
guaacugcauucuccacuu

SEQ ID NO: 1787718 - RNA, 19 nt, Homo sapiens
  misc_RNA (1)...(19): siRNA sense strand
acuaaacacuggagagaau

SEQ ID NO: 1787719 - RNA, 19 nt, Homo sapiens
  misc_RNA (1)...(19): siRNA sense strand
uaagacaaagcaagauuga

SEQ ID NO: 1787720 - RNA, 19 nt, Homo sapiens
  misc_RNA (1)...(19): siRNA sense strand
gacagaaggagaaaggaaa

SEQ ID NO: 1787721 - RNA, 19 nt, Homo sapiens
  misc_RNA (1)...(19): siRNA sense strand
gcuaagacaaagcaagauu

SEQ ID NO: 1787722 - RNA, 19 nt, Homo sapiens
  misc_RNA (1)...(19): siRNA sense strand
uaggcaaccucaauacaau

SEQ ID NO: 1787723 - RNA, 19 nt, Homo sapiens
  misc_RNA (1)...(19): siRNA sense strand
gcccaucagaguauacaua

SEQ ID NO: 1787724 - RNA, 19 nt, Homo sapiens
  misc_RNA (1)...(19): siRNA sense strand
gaaguuaaaggaagauugc

SEQ ID NO: 1787725 - RNA, 19 nt, Homo sapiens
  misc_RNA (1)...(19): siRNA sense strand
guugcaauauuacagaaug

SEQ ID NO: 1787726 - RNA, 19 nt, Homo sapiens
  misc_RNA (1)...(19): siRNA sense strand
cgacuuagaguggcuuaaa

SEQ ID NO: 1787727 - RNA, 19 nt, Homo sapiens
  misc_RNA (1)...(19): siRNA sense strand
aaauauauccaucccaguu

SEQ ID NO: 1787728 - RNA, 19 nt, Homo sapiens
  misc_RNA (1)...(19): siRNA sense strand
gaacuuauuguggcucuuc

SEQ ID NO: 1787729 - RNA, 19 nt, Homo sapiens
  misc_RNA (1)...(19): siRNA sense strand
acuuauaucuacucaguug

SEQ ID NO: 1787730 - RNA, 19 nt, Homo sapiens
  misc_RNA (1)...(19): siRNA sense strand
caaagugaaagaaugguau

SEQ ID NO: 1787731 - RNA, 19 nt, Homo sapiens
  misc_RNA (1)...(19): siRNA sense strand
gacccagacuugcuucaca

SEQ ID NO: 1787732 - RNA, 19 nt, Homo sapiens
  misc_RNA (1)...(19): siRNA sense strand
gcacgucucauccaagaag

SEQ ID NO: 1787733 - RNA, 19 nt, Homo sapiens
  misc_RNA (1)...(19): siRNA sense strand
gacaaagaaucagagaaag

SEQ ID NO: 1787734 - RNA, 19 nt, Homo sapiens
  misc_RNA (1)...(19): siRNA sense strand
ucagauagugucuuuacaa

SEQ ID NO: 1787735 - RNA, 19 nt, Homo sapiens
  misc_RNA (1)...(19): siRNA sense strand
ugacauaacucaacuaaga

SEQ ID NO: 1787736 - RNA, 19 nt, Homo sapiens
  misc_RNA (1)...(19): siRNA sense strand
caccauagcuugcaaagua

SEQ ID NO: 1787737 - RNA, 19 nt, Homo sapiens
  misc_RNA (1)...(19): siRNA sense strand
ugacagaaaugguguguuu

SEQ ID NO: 1787738 - RNA, 19 nt, Homo sapiens
  misc_RNA (1)...(19): siRNA sense strand
caaggaaguuucuguauga

SEQ ID NO: 1787739 - RNA, 19 nt, Homo sapiens
  misc_RNA (1)...(19): siRNA sense strand
ggaagcaggugaaguaguu

SEQ ID NO: 1787740 - RNA, 19 nt, Homo sapiens
  misc_RNA (1)...(19): siRNA sense strand
gcacaguucucuaucacua

SEQ ID NO: 1787741 - RNA, 19 nt, Homo sapiens
  misc_RNA (1)...(19): siRNA sense strand
gagaugcacuuguuugauu

SEQ ID NO: 1787742 - RNA, 19 nt, Homo sapiens
  misc_RNA (1)...(19): siRNA sense strand
aaacauaucuccaguugug

SEQ ID NO: 1787743 - RNA, 19 nt, Homo sapiens
  misc_RNA (1)...(19): siRNA sense strand
gaaauaacaggaagagaaa

SEQ ID NO: 1787744 - RNA, 19 nt, Homo sapiens
  misc_RNA (1)...(19): siRNA sense strand
ggagaaaggaaagaaauua

SEQ ID NO: 1787745 - RNA, 19 nt, Homo sapiens
  misc_RNA (1)...(19): siRNA sense strand
aaucaagucugcuccuuua

SEQ ID NO: 1787746 - RNA, 19 nt, Homo sapiens
  misc_RNA (1)...(19): siRNA sense strand
gcacaugcccaucagagua

SEQ ID NO: 1787747 - RNA, 19 nt, Homo sapiens
  misc_RNA (1)...(19): siRNA sense strand
gaaagaaugguauguagga

SEQ ID NO: 1787748 - RNA, 19 nt, Homo sapiens
  misc_RNA (1)...(19): siRNA sense strand
ugacaagccacaagauuua

SEQ ID NO: 1787749 - RNA, 19 nt, Homo sapiens
  misc_RNA (1)...(19): siRNA sense strand
ggaagaauugcacaaagua

SEQ ID NO: 1787750 - RNA, 19 nt, Homo sapiens
  misc_RNA (1)...(19): siRNA sense strand
caggacagcuuacaauuuc

SEQ ID NO: 1787751 - RNA, 19 nt, Homo sapiens
  misc_RNA (1)...(19): siRNA sense strand
gguaauguaucuagugguu

SEQ ID NO: 1787752 - RNA, 19 nt, Homo sapiens
  misc_RNA (1)...(19): siRNA sense strand
uagcugauguccuggguua

SEQ ID NO: 1787753 - RNA, 19 nt, Homo sapiens
  misc_RNA (1)...(19): siRNA sense strand
ggaaaccugccuaugauuu

SEQ ID NO: 1787754 - RNA, 19 nt, Homo sapiens
  misc_RNA (1)...(19): siRNA sense strand
caaauuugauugacaugga

SEQ ID NO: 1787755 - RNA, 19 nt, Homo sapiens
  misc_RNA (1)...(19): siRNA sense strand
gacaaagcaagauugauua

SEQ ID NO: 1787756 - RNA, 19 nt, Homo sapiens
  misc_RNA (1)...(19): siRNA sense strand
acagagagaugcacuuguu

SEQ ID NO: 1787757 - RNA, 19 nt, Homo sapiens
  misc_RNA (1)...(19): siRNA sense strand
gaagcaaauuugauugaca

SEQ ID NO: 1787758 - RNA, 19 nt, Homo sapiens
  misc_RNA (1)...(19): siRNA sense strand
gauagugucuuuacaacca

SEQ ID NO: 1787759 - RNA, 19 nt, Homo sapiens
  misc_RNA (1)...(19): siRNA sense strand
caagauugauuacuuccuu

SEQ ID NO: 1787760 - RNA, 19 nt, Homo sapiens
  misc_RNA (1)...(19): siRNA sense strand
caaaguaaaccaucaagga

SEQ ID NO: 1787761 - RNA, 19 nt, Homo sapiens
  misc_RNA (1)...(19): siRNA sense strand
caagucugcuccuuuauca

SEQ ID NO: 1787762 - RNA, 19 nt, Homo sapiens
  misc_RNA (1)...(19): siRNA sense strand
gaaaucaagucugcuccuu

SEQ ID NO: 1787763 - RNA, 19 nt, Homo sapiens
  misc_RNA (1)...(19): siRNA sense strand
caaaggagcaaguaauguu

SEQ ID NO: 1787764 - RNA, 19 nt, Homo sapiens
  misc_RNA (1)...(19): siRNA sense strand
caaaguaugucugaagcaa

SEQ ID NO: 1787765 - RNA, 19 nt, Homo sapiens
  misc_RNA (1)...(19): siRNA sense strand
gccacaagauuuaaguauu

SEQ ID NO: 1787766 - RNA, 19 nt, Homo sapiens
  misc_RNA (1)...(19): siRNA sense strand
cagacuugcuucacaauug

SEQ ID NO: 1787767 - RNA, 19 nt, Homo sapiens
  misc_RNA (1)...(19): siRNA sense strand
gaagauugccacacagaga

SEQ ID NO: 1787768 - RNA, 19 nt, Homo sapiens
  misc_RNA (1)...(19): siRNA sense strand
gaaaauggauugccaagag

SEQ ID NO: 1787769 - RNA, 19 nt, Homo sapiens
  misc_RNA (1)...(19): siRNA sense strand
gcuaaucacugaaagaaaa

SEQ ID NO: 1787770 - RNA, 19 nt, Homo sapiens
  misc_RNA (1)...(19): siRNA sense strand
caaagaaucagagaaaguu

SEQ ID NO: 1787771 - RNA, 19 nt, Homo sapiens
  misc_RNA (1)...(19): siRNA sense strand
agacaaagaaucagagaaa

SEQ ID NO: 1787772 - RNA, 19 nt, Homo sapiens
  misc_RNA (1)...(19): siRNA sense strand
ugacuuauaucuacucagu

SEQ ID NO: 1787773 - RNA, 19 nt, Homo sapiens
  misc_RNA (1)...(19): siRNA sense strand
agacaaagcaagauugauu

SEQ ID NO: 1787774 - RNA, 19 nt, Homo sapiens
  misc_RNA (1)...(19): siRNA sense strand
gaucuuucgugcacuguga

SEQ ID NO: 1787775 - RNA, 19 nt, Homo sapiens
  misc_RNA (1)...(19): siRNA sense strand
aaaggaagauugccacaca

SEQ ID NO: 1787776 - RNA, 19 nt, Homo sapiens
  misc_RNA (1)...(19): siRNA sense strand
guaauaaugcuuccaaagu

SEQ ID NO: 1787777 - RNA, 19 nt, Homo sapiens
  misc_RNA (1)...(19): siRNA sense strand
gaaggagaaaggaaagaaa

SEQ ID NO: 1787778 - RNA, 19 nt, Homo sapiens
  misc_RNA (1)...(19): siRNA sense strand
gaugacauaacucaacuaa

SEQ ID NO: 1787779 - RNA, 19 nt, Homo sapiens
  misc_RNA (1)...(19): siRNA sense strand
agaaauaacaggaagagaa

SEQ ID NO: 1787780 - RNA, 19 nt, Homo sapiens
  misc_RNA (1)...(19): siRNA sense strand
uauuguggcucuucugaaa

SEQ ID NO: 1787781 - RNA, 19 nt, Homo sapiens
  misc_RNA (1)...(19): siRNA sense strand
cagauuguccugccuuuaa

SEQ ID NO: 1787782 - RNA, 19 nt, Homo sapiens
  misc_RNA (1)...(19): siRNA sense strand
gcacaaaguaugucugaag

SEQ ID NO: 1787783 - RNA, 19 nt, Homo sapiens
  misc_RNA (1)...(19): siRNA sense strand
gaagaaggaggaaaucaag

SEQ ID NO: 1787784 - RNA, 19 nt, Homo sapiens
  misc_RNA (1)...(19): siRNA sense strand
cagcuuacaauuucugaua

SEQ ID NO: 1787785 - RNA, 19 nt, Homo sapiens
  misc_RNA (1)...(19): siRNA sense strand
gcuccugccuugauuugaa

SEQ ID NO: 1787786 - RNA, 19 nt, Homo sapiens
  misc_RNA (1)...(19): siRNA sense strand
cagacuuccucaagaaauu

SEQ ID NO: 1787787 - RNA, 19 nt, Homo sapiens
  misc_RNA (1)...(19): siRNA sense strand
gcaaguaauguuuauguca

SEQ ID NO: 1787788 - RNA, 19 nt, Homo sapiens
  misc_RNA (1)...(19): siRNA sense strand
gagcaaguaauguuuaugu

SEQ ID NO: 1787789 - RNA, 19 nt, Homo sapiens
  misc_RNA (1)...(19): siRNA sense strand
ucaaggugauuucaaagga

SEQ ID NO: 1787790 - RNA, 19 nt, Homo sapiens
  misc_RNA (1)...(19): siRNA sense strand
gugaaagaaugguauguag

SEQ ID NO: 1787791 - RNA, 19 nt, Homo sapiens
  misc_RNA (1)...(19): siRNA sense strand
guuggaagcaggugaagua

SEQ ID NO: 1787792 - RNA, 19 nt, Homo sapiens
  misc_RNA (1)...(19): siRNA sense strand
gcaacugcuacauuuauaa

SEQ ID NO: 1787793 - RNA, 19 nt, Homo sapiens
  misc_RNA (1)...(19): siRNA sense strand
uaugucagauagugucuuu

SEQ ID NO: 1787794 - RNA, 19 nt, Homo sapiens
  misc_RNA (1)...(19): siRNA sense strand
guggaaaccugccuaugau

SEQ ID NO: 1787795 - RNA, 19 nt, Homo sapiens
  misc_RNA (1)...(19): siRNA sense strand
acaaggaaguuucuguaug

SEQ ID NO: 1787796 - RNA, 19 nt, Homo sapiens
  misc_RNA (1)...(19): siRNA sense strand
gaaauucuggaagaucuaa

SEQ ID NO: 1787797 - RNA, 19 nt, Homo sapiens
  misc_RNA (1)...(19): siRNA sense strand
uaacugcauucuccacuuc

SEQ ID NO: 1787798 - RNA, 19 nt, Homo sapiens
  misc_RNA (1)...(19): siRNA sense strand
ggagggaacuagcugaaaa

SEQ ID NO: 1787799 - RNA, 19 nt, Homo sapiens
  misc_RNA (1)...(19): siRNA sense strand
gagguaagauuggacuugu

SEQ ID NO: 1787800 - RNA, 19 nt, Homo sapiens
  misc_RNA (1)...(19): siRNA sense strand
gagagaugcacuuguuuga

SEQ ID NO: 1787801 - RNA, 19 nt, Homo sapiens
  misc_RNA (1)...(19): siRNA sense strand
gcacagagagaugcacuug

SEQ ID NO: 1787802 - RNA, 19 nt, Homo sapiens
  misc_RNA (1)...(19): siRNA sense strand
ccaggacagcuuacaauuu

SEQ ID NO: 1787803 - RNA, 19 nt, Homo sapiens
  misc_RNA (1)...(19): siRNA sense strand
caaccucaauacaauggaa

SEQ ID NO: 1787804 - RNA, 19 nt, Homo sapiens
  misc_RNA (1)...(19): siRNA sense strand
gauccuacuacacgacuua

SEQ ID NO: 1787805 - RNA, 19 nt, Homo sapiens
  misc_RNA (1)...(19): siRNA sense strand
acaauuggccggaugcuuu

SEQ ID NO: 1787806 - RNA, 19 nt, Homo sapiens
  misc_RNA (1)...(19): siRNA sense strand
gaagaauugcacaaaguau

SEQ ID NO: 1787807 - RNA, 19 nt, Homo sapiens
  misc_RNA (1)...(19): siRNA sense strand
caaauggaggcauaugaaa

SEQ ID NO: 1787808 - RNA, 19 nt, Homo sapiens
  misc_RNA (1)...(19): siRNA sense strand
aaucagacaucacuguuca

SEQ ID NO: 1787809 - RNA, 19 nt, Homo sapiens
  misc_RNA (1)...(19): siRNA sense strand
guaaauucuuuggagguuu

SEQ ID NO: 1787810 - RNA, 19 nt, Homo sapiens
  misc_RNA (1)...(19): siRNA sense strand
uaaacacuggagagaauua

SEQ ID NO: 1787811 - RNA, 19 nt, Homo sapiens
  misc_RNA (1)...(19): siRNA sense strand
ucacaaagcaacaaaugga

SEQ ID NO: 1787812 - RNA, 19 nt, Homo sapiens
  misc_RNA (1)...(19): siRNA sense strand
aauaaugcuuccaaaguug

SEQ ID NO: 1787813 - RNA, 19 nt, Homo sapiens
  misc_RNA (1)...(19): siRNA sense strand
ucagucagcuuuggacaga

SEQ ID NO: 1787814 - RNA, 19 nt, Homo sapiens
  misc_RNA (1)...(19): siRNA sense strand
caaggagggucaguacaau

SEQ ID NO: 1787815 - RNA, 19 nt, Homo sapiens
  misc_RNA (1)...(19): siRNA sense strand
gaaaauuggggcugaagua

SEQ ID NO: 1787816 - RNA, 19 nt, Homo sapiens
  misc_RNA (1)...(19): siRNA sense strand
uaaaauggcuugguuaagu

SEQ ID NO: 1787817 - RNA, 19 nt, Homo sapiens
  misc_RNA (1)...(19): siRNA sense strand
guaacugcauucuccacuu

SEQ ID NO: 1787818 - RNA, 19 nt, Homo sapiens
  misc_RNA (1)...(19): siRNA sense strand
acuaaacacuggagagaau

SEQ ID NO: 1787819 - RNA, 19 nt, Homo sapiens
  misc_RNA (1)...(19): siRNA sense strand
uaagacaaagcaagauuga

SEQ ID NO: 1787820 - RNA, 19 nt, Homo sapiens
  misc_RNA (1)...(19): siRNA sense strand
gacagaaggagaaaggaaa

SEQ ID NO: 1787821 - RNA, 19 nt, Homo sapiens
  misc_RNA (1)...(19): siRNA sense strand
gcuaagacaaagcaagauu

SEQ ID NO: 1787822 - RNA, 19 nt, Homo sapiens
  misc_RNA (1)...(19): siRNA sense strand
uaggcaaccucaauacaau

SEQ ID NO: 1787823 - RNA, 19 nt, Homo sapiens
  misc_RNA (1)...(19): siRNA sense strand
gcccaucagaguauacaua

SEQ ID NO: 1787824 - RNA, 19 nt, Homo sapiens
  misc_RNA (1)...(19): siRNA sense strand
gaaguuaaaggaagauugc

SEQ ID NO: 1787825 - RNA, 19 nt, Homo sapiens
  misc_RNA (1)...(19): siRNA sense strand
guugcaauauuacagaaug

SEQ ID NO: 1787826 - RNA, 19 nt, Homo sapiens
  misc_RNA (1)...(19): siRNA sense strand
cgacuuagaguggcuuaaa

SEQ ID NO: 1787827 - RNA, 19 nt, Homo sapiens
  misc_RNA (1)...(19): siRNA sense strand
aaauauauccaucccaguu

SEQ ID NO: 1787828 - RNA, 19 nt, Homo sapiens
  misc_RNA (1)...(19): siRNA sense strand
gaacuuauuguggcucuuc

SEQ ID NO: 1787829 - RNA, 19 nt, Homo sapiens
  misc_RNA (1)...(19): siRNA sense strand
acuuauaucuacucaguug

SEQ ID NO: 1787830 - RNA, 19 nt, Homo sapiens
  misc_RNA (1)...(19): siRNA sense strand
caaagugaaagaaugguau

SEQ ID NO: 1787831 - RNA, 19 nt, Homo sapiens
  misc_RNA (1)...(19): siRNA sense strand
gacccagacuugcuucaca

SEQ ID NO: 1787832 - RNA, 19 nt, Homo sapiens
  misc_RNA (1)...(19): siRNA sense strand
gcacgucucauccaagaag

SEQ ID NO: 1787833 - RNA, 19 nt, Homo sapiens
  misc_RNA (1)...(19): siRNA sense strand
gacaaagaaucagagaaag

SEQ ID NO: 1787834 - RNA, 19 nt, Homo sapiens
  misc_RNA (1)...(19): siRNA sense strand
ucagauagugucuuuacaa

SEQ ID NO: 1787835 - RNA, 19 nt, Homo sapiens
  misc_RNA (1)...(19): siRNA sense strand
ugacauaacucaacuaaga

SEQ ID NO: 1787836 - RNA, 19 nt, Homo sapiens
  misc_RNA (1)...(19): siRNA sense strand
caccauagcuugcaaagua

SEQ ID NO: 1787837 - RNA, 19 nt, Homo sapiens
  misc_RNA (1)...(19): siRNA sense strand
ugacagaaaugguguguuu

SEQ ID NO: 1787838 - RNA, 19 nt, Homo sapiens
  misc_RNA (1)...(19): siRNA sense strand
caaggaaguuucuguauga

SEQ ID NO: 1787839 - RNA, 19 nt, Homo sapiens
  misc_RNA (1)...(19): siRNA sense strand
ggaagcaggugaaguaguu

SEQ ID NO: 1787840 - RNA, 19 nt, Homo sapiens
  misc_RNA (1)...(19): siRNA sense strand
gcacaguucucuaucacua

SEQ ID NO: 1787841 - RNA, 19 nt, Homo sapiens
  misc_RNA (1)...(19): siRNA sense strand
gagaugcacuuguuugauu

SEQ ID NO: 1787842 - RNA, 19 nt, Homo sapiens
  misc_RNA (1)...(19): siRNA sense strand
aaacauaucuccaguugug

SEQ ID NO: 1787843 - RNA, 19 nt, Homo sapiens
  misc_RNA (1)...(19): siRNA sense strand
gaaauaacaggaagagaaa

SEQ ID NO: 1787844 - RNA, 19 nt, Homo sapiens
  misc_RNA (1)...(19): siRNA sense strand
ggagaaaggaaagaaauua

SEQ ID NO: 1787845 - RNA, 19 nt, Homo sapiens
  misc_RNA (1)...(19): siRNA sense strand
aaucaagucugcuccuuua

SEQ ID NO: 1787846 - RNA, 19 nt, Homo sapiens
  misc_RNA (1)...(19): siRNA sense strand
gcacaugcccaucagagua

SEQ ID NO: 1787847 - RNA, 19 nt, Homo sapiens
  misc_RNA (1)...(19): siRNA sense strand
gaaagaaugguauguagga

SEQ ID NO: 1787848 - RNA, 19 nt, Homo sapiens
  misc_RNA (1)...(19): siRNA sense strand
ugacaagccacaagauuua

SEQ ID NO: 1787849 - RNA, 19 nt, Homo sapiens
  misc_RNA (1)...(19): siRNA sense strand
ggaagaauugcacaaagua

SEQ ID NO: 1787850 - RNA, 19 nt, Homo sapiens
  misc_RNA (1)...(19): siRNA sense strand
caggacagcuuacaauuuc

SEQ ID NO: 1787851 - RNA, 19 nt, Homo sapiens
  misc_RNA (1)...(19): siRNA sense strand
gguaauguaucuagugguu

SEQ ID NO: 1787852 - RNA, 19 nt, Homo sapiens
  misc_RNA (1)...(19): siRNA sense strand
uagcugauguccuggguua

SEQ ID NO: 1787853 - RNA, 19 nt, Homo sapiens
  misc_RNA (1)...(19): siRNA sense strand
ggaaaccugccuaugauuu

SEQ ID NO: 1787854 - RNA, 19 nt, Homo sapiens
  misc_RNA (1)...(19): siRNA sense strand
caaauuugauugacaugga

SEQ ID NO: 1787855 - RNA, 19 nt, Homo sapiens
  misc_RNA (1)...(19): siRNA sense strand
gacaaagcaagauugauua

SEQ ID NO: 1787856 - RNA, 19 nt, Homo sapiens
  misc_RNA (1)...(19): siRNA sense strand
acagagagaugcacuuguu

SEQ ID NO: 1787857 - RNA, 19 nt, Homo sapiens
  misc_RNA (1)...(19): siRNA sense strand
gaagcaaauuugauugaca

SEQ ID NO: 1787858 - RNA, 19 nt, Homo sapiens
  misc_RNA (1)...(19): siRNA sense strand
gauagugucuuuacaacca

SEQ ID NO: 1787859 - RNA, 19 nt, Homo sapiens
  misc_RNA (1)...(19): siRNA sense strand
caagauugauuacuuccuu

SEQ ID NO: 1787860 - RNA, 19 nt, Homo sapiens
  misc_RNA (1)...(19): siRNA sense strand
caaaguaaaccaucaagga

SEQ ID NO: 1787861 - RNA, 19 nt, Homo sapiens
  misc_RNA (1)...(19): siRNA sense strand
caagucugcuccuuuauca

SEQ ID NO: 1787862 - RNA, 19 nt, Homo sapiens
  misc_RNA (1)...(19): siRNA sense strand
gaaaucaagucugcuccuu

SEQ ID NO: 1787863 - RNA, 19 nt, Homo sapiens
  misc_RNA (1)...(19): siRNA sense strand
caaaggagcaaguaauguu

SEQ ID NO: 1787864 - RNA, 19 nt, Homo sapiens
  misc_RNA (1)...(19): siRNA sense strand
caaaguaugucugaagcaa

SEQ ID NO: 1787865 - RNA, 19 nt, Homo sapiens
  misc_RNA (1)...(19): siRNA sense strand
gccacaagauuuaaguauu

SEQ ID NO: 1787866 - RNA, 19 nt, Homo sapiens
  misc_RNA (1)...(19): siRNA sense strand
cagacuugcuucacaauug

SEQ ID NO: 1787867 - RNA, 19 nt, Homo sapiens
  misc_RNA (1)...(19): siRNA sense strand
gaagauugccacacagaga

SEQ ID NO: 1787868 - RNA, 19 nt, Homo sapiens
  misc_RNA (1)...(19): siRNA sense strand
gaaaauggauugccaagag

SEQ ID NO: 1787869 - RNA, 19 nt, Homo sapiens
  misc_RNA (1)...(19): siRNA sense strand
gcuaaucacugaaagaaaa

SEQ ID NO: 1787870 - RNA, 19 nt, Homo sapiens
  misc_RNA (1)...(19): siRNA sense strand
caaagaaucagagaaaguu

SEQ ID NO: 1787871 - RNA, 19 nt, Homo sapiens
  misc_RNA (1)...(19): siRNA sense strand
agacaaagaaucagagaaa

SEQ ID NO: 1787872 - RNA, 19 nt, Homo sapiens
  misc_RNA (1)...(19): siRNA sense strand
ugacuuauaucuacucagu

SEQ ID NO: 1787873 - RNA, 19 nt, Homo sapiens
  misc_RNA (1)...(19): siRNA sense strand
agacaaagcaagauugauu

SEQ ID NO: 1787874 - RNA, 19 nt, Homo sapiens
  misc_RNA (1)...(19): siRNA sense strand
gaucuuucgugcacuguga

SEQ ID NO: 1787875 - RNA, 19 nt, Homo sapiens
  misc_RNA (1)...(19): siRNA sense strand
aaaggaagauugccacaca

SEQ ID NO: 1787876 - RNA, 19 nt, Homo sapiens
  misc_RNA (1)...(19): siRNA sense strand
guaauaaugcuuccaaagu

SEQ ID NO: 1787877 - RNA, 19 nt, Homo sapiens
  misc_RNA (1)...(19): siRNA sense strand
gaaggagaaaggaaagaaa

SEQ ID NO: 1787878 - RNA, 19 nt, Homo sapiens
  misc_RNA (1)...(19): siRNA sense strand
gaugacauaacucaacuaa

SEQ ID NO: 1787879 - RNA, 19 nt, Homo sapiens
  misc_RNA (1)...(19): siRNA sense strand
agaaauaacaggaagagaa

SEQ ID NO: 1787880 - RNA, 19 nt, Homo sapiens
  misc_RNA (1)...(19): siRNA sense strand
uauuguggcucuucugaaa

SEQ ID NO: 1787881 - RNA, 19 nt, Homo sapiens
  misc_RNA (1)...(19): siRNA sense strand
cagauuguccugccuuuaa

SEQ ID NO: 1787882 - RNA, 19 nt, Homo sapiens
  misc_RNA (1)...(19): siRNA sense strand
gcacaaaguaugucugaag

SEQ ID NO: 1787883 - RNA, 19 nt, Homo sapiens
  misc_RNA (1)...(19): siRNA sense strand
gaagaaggaggaaaucaag

SEQ ID NO: 1787884 - RNA, 19 nt, Homo sapiens
  misc_RNA (1)...(19): siRNA sense strand
cagcuuacaauuucugaua

SEQ ID NO: 1787885 - RNA, 19 nt, Homo sapiens
  misc_RNA (1)...(19): siRNA sense strand
gcuccugccuugauuugaa

SEQ ID NO: 1787886 - RNA, 19 nt, Homo sapiens
  misc_RNA (1)...(19): siRNA sense strand
cagacuuccucaagaaauu

SEQ ID NO: 1787887 - RNA, 19 nt, Homo sapiens
  misc_RNA (1)...(19): siRNA sense strand
gcaaguaauguuuauguca

SEQ ID NO: 1787888 - RNA, 19 nt, Homo sapiens
  misc_RNA (1)...(19): siRNA sense strand
gagcaaguaauguuuaugu

SEQ ID NO: 1787889 - RNA, 19 nt, Homo sapiens
  misc_RNA (1)...(19): siRNA sense strand
ucaaggugauuucaaagga

SEQ ID NO: 1787890 - RNA, 19 nt, Homo sapiens
  misc_RNA (1)...(19): siRNA sense strand
gugaaagaaugguauguag

SEQ ID NO: 1787891 - RNA, 19 nt, Homo sapiens
  misc_RNA (1)...(19): siRNA sense strand
guuggaagcaggugaagua

SEQ ID NO: 1787892 - RNA, 19 nt, Homo sapiens
  misc_RNA (1)...(19): siRNA sense strand
gcaacugcuacauuuauaa

SEQ ID NO: 1787893 - RNA, 19 nt, Homo sapiens
  misc_RNA (1)...(19): siRNA sense strand
uaugucagauagugucuuu

SEQ ID NO: 1787894 - RNA, 19 nt, Homo sapiens
  misc_RNA (1)...(19): siRNA sense strand
guggaaaccugccuaugau

SEQ ID NO: 1787895 - RNA, 19 nt, Homo sapiens
  misc_RNA (1)...(19): siRNA sense strand
acaaggaaguuucuguaug

SEQ ID NO: 1787896 - RNA, 19 nt, Homo sapiens
  misc_RNA (1)...(19): siRNA sense strand
gaaauucuggaagaucuaa

SEQ ID NO: 1787897 - RNA, 19 nt, Homo sapiens
  misc_RNA (1)...(19): siRNA sense strand
uaacugcauucuccacuuc

SEQ ID NO: 1787898 - RNA, 19 nt, Homo sapiens
  misc_RNA (1)...(19): siRNA sense strand
ggagggaacuagcugaaaa

SEQ ID NO: 1787899 - RNA, 19 nt, Homo sapiens
  misc_RNA (1)...(19): siRNA sense strand
gagguaagauuggacuugu

SEQ ID NO: 1787900 - RNA, 19 nt, Homo sapiens
  misc_RNA (1)...(19): siRNA sense strand
gagagaugcacuuguuuga

SEQ ID NO: 1787901 - RNA, 19 nt, Homo sapiens
  misc_RNA (1)...(19): siRNA sense strand
gcacagagagaugcacuug

SEQ ID NO: 1787902 - RNA, 19 nt, Homo sapiens
  misc_RNA (1)...(19): siRNA sense strand
ccaggacagcuuacaauuu

SEQ ID NO: 1787903 - RNA, 19 nt, Homo sapiens
  misc_RNA (1)...(19): siRNA sense strand
caaccucaauacaauggaa

SEQ ID NO: 1787904 - RNA, 19 nt, Homo sapiens
  misc_RNA (1)...(19): siRNA sense strand
gauccuacuacacgacuua

SEQ ID NO: 1787905 - RNA, 19 nt, Homo sapiens
  misc_RNA (1)...(19): siRNA sense strand
acaauuggccggaugcuuu

SEQ ID NO: 1787906 - RNA, 19 nt, Homo sapiens
  misc_RNA (1)...(19): siRNA sense strand
gaagaauugcacaaaguau

SEQ ID NO: 1787907 - RNA, 19 nt, Homo sapiens
  misc_RNA (1)...(19): siRNA sense strand
caaauggaggcauaugaaa

SEQ ID NO: 1787908 - RNA, 19 nt, Homo sapiens
  misc_RNA (1)...(19): siRNA sense strand
aaucagacaucacuguuca

SEQ ID NO: 1787909 - RNA, 19 nt, Homo sapiens
  misc_RNA (1)...(19): siRNA sense strand
guaaauucuuuggagguuu

SEQ ID NO: 1787910 - RNA, 19 nt, Homo sapiens
  misc_RNA (1)...(19): siRNA sense strand
uaaacacuggagagaauua

SEQ ID NO: 1787911 - RNA, 19 nt, Homo sapiens
  misc_RNA (1)...(19): siRNA sense strand
ucacaaagcaacaaaugga

SEQ ID NO: 1787912 - RNA, 19 nt, Homo sapiens
  misc_RNA (1)...(19): siRNA sense strand
aauaaugcuuccaaaguug

SEQ ID NO: 1787913 - RNA, 19 nt, Homo sapiens
  misc_RNA (1)...(19): siRNA sense strand
ucagucagcuuuggacaga

SEQ ID NO: 1787914 - RNA, 19 nt, Homo sapiens
  misc_RNA (1)...(19): siRNA sense strand
caaggagggucaguacaau

SEQ ID NO: 1787915 - RNA, 19 nt, Homo sapiens
  misc_RNA (1)...(19): siRNA sense strand
gaaaauuggggcugaagua

SEQ ID NO: 1787916 - RNA, 19 nt, Homo sapiens
  misc_RNA (1)...(19): siRNA sense strand
uaaaauggcuugguuaagu

SEQ ID NO: 1787917 - RNA, 19 nt, Homo sapiens
  misc_RNA (1)...(19): siRNA sense strand
guaacugcauucuccacuu

SEQ ID NO: 1787918 - RNA, 19 nt, Homo sapiens
  misc_RNA (1)...(19): siRNA sense strand
acuaaacacuggagagaau

SEQ ID NO: 1787919 - RNA, 19 nt, Homo sapiens
  misc_RNA (1)...(19): siRNA sense strand
uaagacaaagcaagauuga

SEQ ID NO: 1787920 - RNA, 19 nt, Homo sapiens
  misc_RNA (1)...(19): siRNA sense strand
gacagaaggagaaaggaaa

SEQ ID NO: 1787921 - RNA, 19 nt, Homo sapiens
  misc_RNA (1)...(19): siRNA sense strand
gcuaagacaaagcaagauu

SEQ ID NO: 1787922 - RNA, 19 nt, Homo sapiens
  misc_RNA (1)...(19): siRNA sense strand
uaggcaaccucaauacaau

SEQ ID NO: 1787923 - RNA, 19 nt, Homo sapiens
  misc_RNA (1)...(19): siRNA sense strand
gcccaucagaguauacaua

SEQ ID NO: 1787924 - RNA, 19 nt, Homo sapiens
  misc_RNA (1)...(19): siRNA sense strand
gaaguuaaaggaagauugc

SEQ ID NO: 1787925 - RNA, 19 nt, Homo sapiens
  misc_RNA (1)...(19): siRNA sense strand
guugcaauauuacagaaug

SEQ ID NO: 1787926 - RNA, 19 nt, Homo sapiens
  misc_RNA (1)...(19): siRNA sense strand
cgacuuagaguggcuuaaa

SEQ ID NO: 1787927 - RNA, 19 nt, Homo sapiens
  misc_RNA (1)...(19): siRNA sense strand
aaauauauccaucccaguu

SEQ ID NO: 1787928 - RNA, 19 nt, Homo sapiens
  misc_RNA (1)...(19): siRNA sense strand
gaacuuauuguggcucuuc

SEQ ID NO: 1787929 - RNA, 19 nt, Homo sapiens
  misc_RNA (1)...(19): siRNA sense strand
acuuauaucuacucaguug

SEQ ID NO: 1787930 - RNA, 19 nt, Homo sapiens
  misc_RNA (1)...(19): siRNA sense strand
caaagugaaagaaugguau

SEQ ID NO: 1787931 - RNA, 19 nt, Homo sapiens
  misc_RNA (1)...(19): siRNA sense strand
gacccagacuugcuucaca

SEQ ID NO: 1787932 - RNA, 19 nt, Homo sapiens
  misc_RNA (1)...(19): siRNA sense strand
gcacgucucauccaagaag

SEQ ID NO: 1787933 - RNA, 19 nt, Homo sapiens
  misc_RNA (1)...(19): siRNA sense strand
gacaaagaaucagagaaag

SEQ ID NO: 1787934 - RNA, 19 nt, Homo sapiens
  misc_RNA (1)...(19): siRNA sense strand
ucagauagugucuuuacaa

SEQ ID NO: 1787935 - RNA, 19 nt, Homo sapiens
  misc_RNA (1)...(19): siRNA sense strand
gcauagagcuguuugaaua

SEQ ID NO: 1787936 - RNA, 19 nt, Homo sapiens
  misc_RNA (1)...(19): siRNA sense strand
gaaagcaacuguucgagaa

SEQ ID NO: 1787937 - RNA, 19 nt, Homo sapiens
  misc_RNA (1)...(19): siRNA sense strand
gacaauggcugcauagaug

SEQ ID NO: 1787938 - RNA, 19 nt, Homo sapiens
  misc_RNA (1)...(19): siRNA sense strand
ggaagaggguguccuacuu

SEQ ID NO: 1787939 - RNA, 19 nt, Homo sapiens
  misc_RNA (1)...(19): siRNA sense strand
gggcugagcuggaguaugg

SEQ ID NO: 1787940 - RNA, 19 nt, Homo sapiens
  misc_RNA (1)...(19): siRNA sense strand
gcaggaaacugugaaggaa

SEQ ID NO: 1787941 - RNA, 19 nt, Homo sapiens
  misc_RNA (1)...(19): siRNA sense strand
gugaggagcucuuugauca

SEQ ID NO: 1787942 - RNA, 19 nt, Homo sapiens
  misc_RNA (1)...(19): siRNA sense strand
gaccaaagauuuaaagcau

SEQ ID NO: 1787943 - RNA, 19 nt, Homo sapiens
  misc_RNA (1)...(19): siRNA sense strand
ucaagaagguggacagguu

SEQ ID NO: 1787944 - RNA, 19 nt, Homo sapiens
  misc_RNA (1)...(19): siRNA sense strand
aaagaaggccuugcuaaua

SEQ ID NO: 1787945 - RNA, 19 nt, Homo sapiens
  misc_RNA (1)...(19): siRNA sense strand
gaagaggguguccuacuuu

SEQ ID NO: 1787946 - RNA, 19 nt, Homo sapiens
  misc_RNA (1)...(19): siRNA sense strand
gcaggcagaugagcauuga

SEQ ID NO: 1787947 - RNA, 19 nt, Homo sapiens
  misc_RNA (1)...(19): siRNA sense strand
caugaagaccaaagauuua

SEQ ID NO: 1787948 - RNA, 19 nt, Homo sapiens
  misc_RNA (1)...(19): siRNA sense strand
ggaggucagugcgaaugua

SEQ ID NO: 1787949 - RNA, 19 nt, Homo sapiens
  misc_RNA (1)...(19): siRNA sense strand
aguaugggcugaagaagaa

SEQ ID NO: 1787950 - RNA, 19 nt, Homo sapiens
  misc_RNA (1)...(19): siRNA sense strand
gcacagagaaaggaaaguu

SEQ ID NO: 1787951 - RNA, 19 nt, Homo sapiens
  misc_RNA (1)...(19): siRNA sense strand
caucggaacuggcaccaau

SEQ ID NO: 1787952 - RNA, 19 nt, Homo sapiens
  misc_RNA (1)...(19): siRNA sense strand
gcuaugaagauccuaauug

SEQ ID NO: 1787953 - RNA, 19 nt, Homo sapiens
  misc_RNA (1)...(19): siRNA sense strand
ucaugaagaccaaagauuu

SEQ ID NO: 1787954 - RNA, 19 nt, Homo sapiens
  misc_RNA (1)...(19): siRNA sense strand
ggagcucuuugaucacauu

SEQ ID NO: 1787955 - RNA, 19 nt, Homo sapiens
  misc_RNA (1)...(19): siRNA sense strand
cuucugcucuccacacuaa

SEQ ID NO: 1787956 - RNA, 19 nt, Homo sapiens
  misc_RNA (1)...(19): siRNA sense strand
gaauauugcaggaaacugu

SEQ ID NO: 1787957 - RNA, 19 nt, Homo sapiens
  misc_RNA (1)...(19): siRNA sense strand
uaaagaaggccuugcuaau

SEQ ID NO: 1787958 - RNA, 19 nt, Homo sapiens
  misc_RNA (1)...(19): siRNA sense strand
aagaaggccuugcuaauac

SEQ ID NO: 1787959 - RNA, 19 nt, Homo sapiens
  misc_RNA (1)...(19): siRNA sense strand
ucuagaauauugcaggaaa

SEQ ID NO: 1787960 - RNA, 19 nt, Homo sapiens
  misc_RNA (1)...(19): siRNA sense strand
gauccuaauugugagauug

SEQ ID NO: 1787961 - RNA, 19 nt, Homo sapiens
  misc_RNA (1)...(19): siRNA sense strand
cuaugaagauccuaauugu

SEQ ID NO: 1787962 - RNA, 19 nt, Homo sapiens
  misc_RNA (1)...(19): siRNA sense strand
gaugaccuguggcuaugaa

SEQ ID NO: 1787963 - RNA, 19 nt, Homo sapiens
  misc_RNA (1)...(19): siRNA sense strand
gaggagcucuuugaucaca

SEQ ID NO: 1787964 - RNA, 19 nt, Homo sapiens
  misc_RNA (1)...(19): siRNA sense strand
gggaggauuuggagacaau

SEQ ID NO: 1787965 - RNA, 19 nt, Homo sapiens
  misc_RNA (1)...(19): siRNA sense strand
gaacaggcagcaacaugug

SEQ ID NO: 1787966 - RNA, 19 nt, Homo sapiens
  misc_RNA (1)...(19): siRNA sense strand
agaagggccuggcaaagga

SEQ ID NO: 1787967 - RNA, 19 nt, Homo sapiens
  misc_RNA (1)...(19): siRNA sense strand
caagcagggucuccucuuc

SEQ ID NO: 1787968 - RNA, 19 nt, Homo sapiens
  misc_RNA (1)...(19): siRNA sense strand
gaugaucaguggccuguac

SEQ ID NO: 1787969 - RNA, 19 nt, Homo sapiens
  misc_RNA (1)...(19): siRNA sense strand
caaggccacugacugugaa

SEQ ID NO: 1787970 - RNA, 19 nt, Homo sapiens
  misc_RNA (1)...(19): siRNA sense strand
ugacaagggaacacucaua

SEQ ID NO: 1787971 - RNA, 19 nt, Homo sapiens
  misc_RNA (1)...(19): siRNA sense strand
gaccaaagccaugagaaga

SEQ ID NO: 1787972 - RNA, 19 nt, Homo sapiens
  misc_RNA (1)...(19): siRNA sense strand
ggaacaggcagcaacaugu

SEQ ID NO: 1787973 - RNA, 19 nt, Homo sapiens
  misc_RNA (1)...(19): siRNA sense strand
ucaggaugcugcccaccua

SEQ ID NO: 1787974 - RNA, 19 nt, Homo sapiens
  misc_RNA (1)...(19): siRNA sense strand
gaagaccaaagauuuaaag

SEQ ID NO: 1787975 - RNA, 19 nt, Homo sapiens
  misc_RNA (1)...(19): siRNA sense strand
gugcgaauguacaacaaga

SEQ ID NO: 1787976 - RNA, 19 nt, Homo sapiens
  misc_RNA (1)...(19): siRNA sense strand
cgaaguuggugucaucauc

SEQ ID NO: 1787977 - RNA, 19 nt, Homo sapiens
  misc_RNA (1)...(19): siRNA sense strand
gaagacacaaggacaugga

SEQ ID NO: 1787978 - RNA, 19 nt, Homo sapiens
  misc_RNA (1)...(19): siRNA sense strand
caagauacacccucaguac

SEQ ID NO: 1787979 - RNA, 19 nt, Homo sapiens
  misc_RNA (1)...(19): siRNA sense strand
gcauugccguccagcaugu

SEQ ID NO: 1787980 - RNA, 19 nt, Homo sapiens
  misc_RNA (1)...(19): siRNA sense strand
gcaagcagagauacgagaa

SEQ ID NO: 1787981 - RNA, 19 nt, Homo sapiens
  misc_RNA (1)...(19): siRNA sense strand
gaauguacaacaagaucuu

SEQ ID NO: 1787982 - RNA, 19 nt, Homo sapiens
  misc_RNA (1)...(19): siRNA sense strand
ggacgugcaggccaagauu

SEQ ID NO: 1787983 - RNA, 19 nt, Homo sapiens
  misc_RNA (1)...(19): siRNA sense strand
ggacggcacccucuacaag

SEQ ID NO: 1787984 - RNA, 19 nt, Homo sapiens
  misc_RNA (1)...(19): siRNA sense strand
ccaaagccaugagaagaca

SEQ ID NO: 1787985 - RNA, 19 nt, Homo sapiens
  misc_RNA (1)...(19): siRNA sense strand
ccaaguuccugucccagau

SEQ ID NO: 1787986 - RNA, 19 nt, Homo sapiens
  misc_RNA (1)...(19): siRNA sense strand
uggagacaauggcugcaua

SEQ ID NO: 1787987 - RNA, 19 nt, Homo sapiens
  misc_RNA (1)...(19): siRNA sense strand
gaguaugggcugaagaaga

SEQ ID NO: 1787988 - RNA, 19 nt, Homo sapiens
  misc_RNA (1)...(19): siRNA sense strand
ccauggagaaguauaaaga

SEQ ID NO: 1787989 - RNA, 19 nt, Homo sapiens
  misc_RNA (1)...(19): siRNA sense strand
ggacauggacguggacauc

SEQ ID NO: 1787990 - RNA, 19 nt, Homo sapiens
  misc_RNA (1)...(19): siRNA sense strand
ggaguuccuuucccuggau

SEQ ID NO: 1787991 - RNA, 19 nt, Homo sapiens
  misc_RNA (1)...(19): siRNA sense strand
augaagauccuaauuguga

SEQ ID NO: 1787992 - RNA, 19 nt, Homo sapiens
  misc_RNA (1)...(19): siRNA sense strand
gaacggcauagagcuguuu

SEQ ID NO: 1787993 - RNA, 19 nt, Homo sapiens
  misc_RNA (1)...(19): siRNA sense strand
ggaacggcauagagcuguu

SEQ ID NO: 1787994 - RNA, 19 nt, Homo sapiens
  misc_RNA (1)...(19): siRNA sense strand
gcagauggagagucaguuc

SEQ ID NO: 1787995 - RNA, 19 nt, Homo sapiens
  misc_RNA (1)...(19): siRNA sense strand
aggcacagaaggagaaaua

SEQ ID NO: 1787996 - RNA, 19 nt, Homo sapiens
  misc_RNA (1)...(19): siRNA sense strand
gaggacaugagcaacauug

SEQ ID NO: 1787997 - RNA, 19 nt, Homo sapiens
  misc_RNA (1)...(19): siRNA sense strand
gaaaauggggaguuccuuu

SEQ ID NO: 1787998 - RNA, 19 nt, Homo sapiens
  misc_RNA (1)...(19): siRNA sense strand
gaagauccuaauugugaga

SEQ ID NO: 1787999 - RNA, 19 nt, Homo sapiens
  misc_RNA (1)...(19): siRNA sense strand
acagggugcuggcuuuguu

SEQ ID NO: 1788000 - RNA, 19 nt, Homo sapiens
  misc_RNA (1)...(19): siRNA sense strand
gagcuugucaggcuuaucu

SEQ ID NO: 1788001 - RNA, 19 nt, Homo sapiens
  misc_RNA (1)...(19): siRNA sense strand
caacuguucgagaagauga

SEQ ID NO: 1788002 - RNA, 19 nt, Homo sapiens
  misc_RNA (1)...(19): siRNA sense strand
caagcugcacccucacuuu

SEQ ID NO: 1788003 - RNA, 19 nt, Homo sapiens
  misc_RNA (1)...(19): siRNA sense strand
gagaagggccuggcaaagg

SEQ ID NO: 1788004 - RNA, 19 nt, Homo sapiens
  misc_RNA (1)...(19): siRNA sense strand
acaugcggcucuccgauga

SEQ ID NO: 1788005 - RNA, 19 nt, Homo sapiens
  misc_RNA (1)...(19): siRNA sense strand
gggaggacgugguggacau

SEQ ID NO: 1788006 - RNA, 19 nt, Homo sapiens
  misc_RNA (1)...(19): siRNA sense strand
gacaagggaacacucauag

SEQ ID NO: 1788007 - RNA, 19 nt, Homo sapiens
  misc_RNA (1)...(19): siRNA sense strand
auaaagaaggccuugcuaa

SEQ ID NO: 1788008 - RNA, 19 nt, Homo sapiens
  misc_RNA (1)...(19): siRNA sense strand
gagaagacacaaggacaug

SEQ ID NO: 1788009 - RNA, 19 nt, Homo sapiens
  misc_RNA (1)...(19): siRNA sense strand
gcacaagguggugaggaaa

SEQ ID NO: 1788010 - RNA, 19 nt, Homo sapiens
  misc_RNA (1)...(19): siRNA sense strand
agagcuguuugaauaugua

SEQ ID NO: 1788011 - RNA, 19 nt, Homo sapiens
  misc_RNA (1)...(19): siRNA sense strand
caugaugaccuguggcuau

SEQ ID NO: 1788012 - RNA, 19 nt, Homo sapiens
  misc_RNA (1)...(19): siRNA sense strand
gaagccaucaagaggagaa

SEQ ID NO: 1788013 - RNA, 19 nt, Homo sapiens
  misc_RNA (1)...(19): siRNA sense strand
ucaaggccacugacuguga

SEQ ID NO: 1788014 - RNA, 19 nt, Homo sapiens
  misc_RNA (1)...(19): siRNA sense strand
ggacggcacagagaaagga

SEQ ID NO: 1788015 - RNA, 19 nt, Homo sapiens
  misc_RNA (1)...(19): siRNA sense strand
ggacauucgcacugaguuc

SEQ ID NO: 1788016 - RNA, 19 nt, Homo sapiens
  misc_RNA (1)...(19): siRNA sense strand
caugaugaccugugccuau

SEQ ID NO: 1788017 - RNA, 19 nt, Homo sapiens
  misc_RNA (1)...(19): siRNA sense strand
cagauuucaugaagaccaa

SEQ ID NO: 1788018 - RNA, 19 nt, Homo sapiens
  misc_RNA (1)...(19): siRNA sense strand
ccuguuugguggugagaaa

SEQ ID NO: 1788019 - RNA, 19 nt, Homo sapiens
  misc_RNA (1)...(19): siRNA sense strand
gaaggaggaccagaucaag

SEQ ID NO: 1788020 - RNA, 19 nt, Homo sapiens
  misc_RNA (1)...(19): siRNA sense strand
cggcugcagugaagauguu

SEQ ID NO: 1788021 - RNA, 19 nt, Homo sapiens
  misc_RNA (1)...(19): siRNA sense strand
gaaggugcaagucgcugaa

SEQ ID NO: 1788022 - RNA, 19 nt, Homo sapiens
  misc_RNA (1)...(19): siRNA sense strand
ggugagccgucugaccaaa

SEQ ID NO: 1788023 - RNA, 19 nt, Homo sapiens
  misc_RNA (1)...(19): siRNA sense strand
ugaaggaggaccagaucaa

SEQ ID NO: 1788024 - RNA, 19 nt, Homo sapiens
  misc_RNA (1)...(19): siRNA sense strand
gguuacagcaggcacagaa

SEQ ID NO: 1788025 - RNA, 19 nt, Homo sapiens
  misc_RNA (1)...(19): siRNA sense strand
ucacugcuguggccaagag

SEQ ID NO: 1788026 - RNA, 19 nt, Homo sapiens
  misc_RNA (1)...(19): siRNA sense strand
ggaacuagccccucgaugu

SEQ ID NO: 1788027 - RNA, 19 nt, Homo sapiens
  misc_RNA (1)...(19): siRNA sense strand
cuagagcaccugaggauca

SEQ ID NO: 1788028 - RNA, 19 nt, Homo sapiens
  misc_RNA (1)...(19): siRNA sense strand
uggaggacauucgcacuga

SEQ ID NO: 1788029 - RNA, 19 nt, Homo sapiens
  misc_RNA (1)...(19): siRNA sense strand
gaagcgacacgugcagaug

SEQ ID NO: 1788030 - RNA, 19 nt, Homo sapiens
  misc_RNA (1)...(19): siRNA sense strand
gcaggaacaggcagcaaca

SEQ ID NO: 1788031 - RNA, 19 nt, Homo sapiens
  misc_RNA (1)...(19): siRNA sense strand
gcagaugagcauugacaag

SEQ ID NO: 1788032 - RNA, 19 nt, Homo sapiens
  misc_RNA (1)...(19): siRNA sense strand
ggucagugcgaauguacaa

SEQ ID NO: 1788033 - RNA, 19 nt, Homo sapiens
  misc_RNA (1)...(19): siRNA sense strand
ucgacagggugcuggcuuu

SEQ ID NO: 1788034 - RNA, 19 nt, Homo sapiens
  misc_RNA (1)...(19): siRNA sense strand
ugaucgaccugaccaagca

SEQ ID NO: 1788035 - RNA, 19 nt, Homo sapiens
  misc_RNA (1)...(19): siRNA sense strand
cagcaaggaugacguggaa

SEQ ID NO: 1788036 - RNA, 19 nt, Homo sapiens
  misc_RNA (1)...(19): siRNA sense strand
gaugauggccgagaugauu

SEQ ID NO: 1788037 - RNA, 19 nt, Homo sapiens
  misc_RNA (1)...(19): siRNA sense strand
gcaccgaccucaacaucca

SEQ ID NO: 1788038 - RNA, 19 nt, Homo sapiens
  misc_RNA (1)...(19): siRNA sense strand
cgagaugauuggcgaguuc

SEQ ID NO: 1788039 - RNA, 19 nt, Homo sapiens
  misc_RNA (1)...(19): siRNA sense strand
gcaagagggacguugugaa

SEQ ID NO: 1788040 - RNA, 19 nt, Homo sapiens
  misc_RNA (1)...(19): siRNA sense strand
ucguggagcucugccaaua

SEQ ID NO: 1788041 - RNA, 19 nt, Homo sapiens
  misc_RNA (1)...(19): siRNA sense strand
guggagcucugccaauauc

SEQ ID NO: 1788042 - RNA, 19 nt, Homo sapiens
  misc_RNA (1)...(19): siRNA sense strand
caagagggacguugugaag

SEQ ID NO: 1788043 - RNA, 19 nt, Homo sapiens
  misc_RNA (1)...(19): siRNA sense strand
ggagcgcgacgucuaccua

SEQ ID NO: 1788044 - RNA, 19 nt, Homo sapiens
  misc_RNA (1)...(19): siRNA sense strand
gagcgcgacgucuaccuaa

SEQ ID NO: 1788045 - RNA, 19 nt, Homo sapiens
  misc_RNA (1)...(19): siRNA sense strand
ucgcagcgcucuccuucug

SEQ ID NO: 1788046 - RNA, 19 nt, Homo sapiens
  misc_RNA (1)...(19): siRNA sense strand
gagcaccgaccucaacauc

SEQ ID NO: 1788047 - RNA, 19 nt, Homo sapiens
  misc_RNA (1)...(19): siRNA sense strand
caacauccaggagaucaug

SEQ ID NO: 1788048 - RNA, 19 nt, Homo sapiens
  misc_RNA (1)...(19): siRNA sense strand
gcagaugauggccgagaug

SEQ ID NO: 1788049 - RNA, 19 nt, Homo sapiens
  misc_RNA (1)...(19): siRNA sense strand
gccaauaucguguguccau

SEQ ID NO: 1788050 - RNA, 19 nt, Homo sapiens
  misc_RNA (1)...(19): siRNA sense strand
agagggacguugugaagac

SEQ ID NO: 1788051 - RNA, 19 nt, Homo sapiens
  misc_RNA (1)...(19): siRNA sense strand
gcaagcagaaggaccuacu

SEQ ID NO: 1788052 - RNA, 19 nt, Homo sapiens
  misc_RNA (1)...(19): siRNA sense strand
ucucggagcgcgacgucua

SEQ ID NO: 1788053 - RNA, 19 nt, Homo sapiens
  misc_RNA (1)...(19): siRNA sense strand
guguguccaugcugaagau

SEQ ID NO: 1788054 - RNA, 19 nt, Homo sapiens
  misc_RNA (1)...(19): siRNA sense strand
cgacguggacgccuucaac

SEQ ID NO: 1788055 - RNA, 19 nt, Homo sapiens
  misc_RNA (1)...(19): siRNA sense strand
cagaugauggccgagauga

SEQ ID NO: 1788056 - RNA, 19 nt, Homo sapiens
  misc_RNA (1)...(19): siRNA sense strand
ggaaagcaguacaugauuu

SEQ ID NO: 1788057 - RNA, 19 nt, Homo sapiens
  misc_RNA (1)...(19): siRNA sense strand
gaaagaagcugcugaaaac

SEQ ID NO: 1788058 - RNA, 19 nt, Homo sapiens
  misc_RNA (1)...(19): siRNA sense strand
gaagaaagaagcugcugaa

SEQ ID NO: 1788059 - RNA, 19 nt, Homo sapiens
  misc_RNA (1)...(19): siRNA sense strand
ccaauuugccuugauguua

SEQ ID NO: 1788060 - RNA, 19 nt, Homo sapiens
  misc_RNA (1)...(19): siRNA sense strand
gagagaaccaccaccaauu

SEQ ID NO: 1788061 - RNA, 19 nt, Homo sapiens
  misc_RNA (1)...(19): siRNA sense strand
ggaaagggaaggagucaga

SEQ ID NO: 1788062 - RNA, 19 nt, Homo sapiens
  misc_RNA (1)...(19): siRNA sense strand
ggccaaauuuccacuuuca

SEQ ID NO: 1788063 - RNA, 19 nt, Homo sapiens
  misc_RNA (1)...(19): siRNA sense strand
caauuugccuugauguuag

SEQ ID NO: 1788064 - RNA, 19 nt, Homo sapiens
  misc_RNA (1)...(19): siRNA sense strand
gaaguucaccugcacaucu

SEQ ID NO: 1788065 - RNA, 19 nt, Homo sapiens
  misc_RNA (1)...(19): siRNA sense strand
acucugggauuaaugcuaa

SEQ ID NO: 1788066 - RNA, 19 nt, Homo sapiens
  misc_RNA (1)...(19): siRNA sense strand
caucaagaaugugagagaa

SEQ ID NO: 1788067 - RNA, 19 nt, Homo sapiens
  misc_RNA (1)...(19): siRNA sense strand
ugaagacucugggauuaau

SEQ ID NO: 1788068 - RNA, 19 nt, Homo sapiens
  misc_RNA (1)...(19): siRNA sense strand
ccaccaauuugccuugaug

SEQ ID NO: 1788069 - RNA, 19 nt, Homo sapiens
  misc_RNA (1)...(19): siRNA sense strand
gagaaccaccaccaauuug

SEQ ID NO: 1788070 - RNA, 19 nt, Homo sapiens
  misc_RNA (1)...(19): siRNA sense strand
agagaaccaccaccaauuu

SEQ ID NO: 1788071 - RNA, 19 nt, Homo sapiens
  misc_RNA (1)...(19): siRNA sense strand
ggagccaaaggccaaauuu

SEQ ID NO: 1788072 - RNA, 19 nt, Homo sapiens
  misc_RNA (1)...(19): siRNA sense strand
gcuguuagcccgaagaaag

SEQ ID NO: 1788073 - RNA, 19 nt, Homo sapiens
  misc_RNA (1)...(19): siRNA sense strand
gaaagcaguacaugauuuu

SEQ ID NO: 1788074 - RNA, 19 nt, Homo sapiens
  misc_RNA (1)...(19): siRNA sense strand
gggauuaaugcuaaauuug

SEQ ID NO: 1788075 - RNA, 19 nt, Homo sapiens
  misc_RNA (1)...(19): siRNA sense strand
gccacugccucauuuaaca

SEQ ID NO: 1788076 - RNA, 19 nt, Homo sapiens
  misc_RNA (1)...(19): siRNA sense strand
auugaagacucugggauua

SEQ ID NO: 1788077 - RNA, 19 nt, Homo sapiens
  misc_RNA (1)...(19): siRNA sense strand
uaacaccauugaagacucu

SEQ ID NO: 1788078 - RNA, 19 nt, Homo sapiens
  misc_RNA (1)...(19): siRNA sense strand
agaugccacugccucauuu

SEQ ID NO: 1788079 - RNA, 19 nt, Homo sapiens
  misc_RNA (1)...(19): siRNA sense strand
gugaaugcuguguaugaua

SEQ ID NO: 1788080 - RNA, 19 nt, Homo sapiens
  misc_RNA (1)...(19): siRNA sense strand
guuaagucaucaggagauu

SEQ ID NO: 1788081 - RNA, 19 nt, Homo sapiens
  misc_RNA (1)...(19): siRNA sense strand
gaaccuauucuuccuaucc

SEQ ID NO: 1788082 - RNA, 19 nt, Homo sapiens
  misc_RNA (1)...(19): siRNA sense strand
aaggccaaauuuccacuuu

SEQ ID NO: 1788083 - RNA, 19 nt, Homo sapiens
  misc_RNA (1)...(19): siRNA sense strand
gagccaaaggccaaauuuc

SEQ ID NO: 1788084 - RNA, 19 nt, Homo sapiens
  misc_RNA (1)...(19): siRNA sense strand
ccaaaacugugaaagacuu

SEQ ID NO: 1788085 - RNA, 19 nt, Homo sapiens
  misc_RNA (1)...(19): siRNA sense strand
cuaacaacguuugauucuu

SEQ ID NO: 1788086 - RNA, 19 nt, Homo sapiens
  misc_RNA (1)...(19): siRNA sense strand
ugagagaaccaccaccaau

SEQ ID NO: 1788087 - RNA, 19 nt, Homo sapiens
  misc_RNA (1)...(19): siRNA sense strand
cauugaagacucugggauu

SEQ ID NO: 1788088 - RNA, 19 nt, Homo sapiens
  misc_RNA (1)...(19): siRNA sense strand
aaacagcguacaucuaugg

SEQ ID NO: 1788089 - RNA, 19 nt, Homo sapiens
  misc_RNA (1)...(19): siRNA sense strand
gaugccacugccucauuua

SEQ ID NO: 1788090 - RNA, 19 nt, Homo sapiens
  misc_RNA (1)...(19): siRNA sense strand
gaagacucugggauuaaug

SEQ ID NO: 1788091 - RNA, 19 nt, Homo sapiens
  misc_RNA (1)...(19): siRNA sense strand
cauuuaacaccauugaaga

SEQ ID NO: 1788092 - RNA, 19 nt, Homo sapiens
  misc_RNA (1)...(19): siRNA sense strand
ucaccugcacaucuuguuu

SEQ ID NO: 1788093 - RNA, 19 nt, Homo sapiens
  misc_RNA (1)...(19): siRNA sense strand
ggagucagagcgcgagaag

SEQ ID NO: 1788094 - RNA, 19 nt, Homo sapiens
  misc_RNA (1)...(19): siRNA sense strand
agaaagaagcugcugaaaa

SEQ ID NO: 1788095 - RNA, 19 nt, Homo sapiens
  misc_RNA (1)...(19): siRNA sense strand
uaagucaucaggagauugg

SEQ ID NO: 1788096 - RNA, 19 nt, Homo sapiens
  misc_RNA (1)...(19): siRNA sense strand
gaggaaagggaaggaguca

SEQ ID NO: 1788097 - RNA, 19 nt, Homo sapiens
  misc_RNA (1)...(19): siRNA sense strand
uggaaagcaguacaugauu

SEQ ID NO: 1788098 - RNA, 19 nt, Homo sapiens
  misc_RNA (1)...(19): siRNA sense strand
ucauuuaacaccauugaag

SEQ ID NO: 1788099 - RNA, 19 nt, Homo sapiens
  misc_RNA (1)...(19): siRNA sense strand
aaguucaccugcacaucuu

SEQ ID NO: 1788100 - RNA, 19 nt, Homo sapiens
  misc_RNA (1)...(19): siRNA sense strand
caccaccaauuugccuuga

SEQ ID NO: 1788101 - RNA, 19 nt, Homo sapiens
  misc_RNA (1)...(19): siRNA sense strand
agacuuucaggaagaugua

SEQ ID NO: 1788102 - RNA, 19 nt, Homo sapiens
  misc_RNA (1)...(19): siRNA sense strand
ugugaaugcuguguaugau

SEQ ID NO: 1788103 - RNA, 19 nt, Homo sapiens
  misc_RNA (1)...(19): siRNA sense strand
gccaaaggccaaauuucca

SEQ ID NO: 1788104 - RNA, 19 nt, Homo sapiens
  misc_RNA (1)...(19): siRNA sense strand
aagaugccacugccucauu

SEQ ID NO: 1788105 - RNA, 19 nt, Homo sapiens
  misc_RNA (1)...(19): siRNA sense strand
gagauuggaaagcaguaca

SEQ ID NO: 1788106 - RNA, 19 nt, Homo sapiens
  misc_RNA (1)...(19): siRNA sense strand
ggaaagcaguacaugauuu

SEQ ID NO: 1788107 - RNA, 19 nt, Homo sapiens
  misc_RNA (1)...(19): siRNA sense strand
gaaagaagcugcugaaaac

SEQ ID NO: 1788108 - RNA, 19 nt, Homo sapiens
  misc_RNA (1)...(19): siRNA sense strand
gaagaaagaagcugcugaa

SEQ ID NO: 1788109 - RNA, 19 nt, Homo sapiens
  misc_RNA (1)...(19): siRNA sense strand
ccaauuugccuugauguua

SEQ ID NO: 1788110 - RNA, 19 nt, Homo sapiens
  misc_RNA (1)...(19): siRNA sense strand
gagagaaccaccaccaauu

SEQ ID NO: 1788111 - RNA, 19 nt, Homo sapiens
  misc_RNA (1)...(19): siRNA sense strand
ggaaagggaaggagucaga

SEQ ID NO: 1788112 - RNA, 19 nt, Homo sapiens
  misc_RNA (1)...(19): siRNA sense strand
ggccaaauuuccacuuuca

SEQ ID NO: 1788113 - RNA, 19 nt, Homo sapiens
  misc_RNA (1)...(19): siRNA sense strand
caauuugccuugauguuag

SEQ ID NO: 1788114 - RNA, 19 nt, Homo sapiens
  misc_RNA (1)...(19): siRNA sense strand
gaaguucaccugcacaucu

SEQ ID NO: 1788115 - RNA, 19 nt, Homo sapiens
  misc_RNA (1)...(19): siRNA sense strand
acucugggauuaaugcuaa

SEQ ID NO: 1788116 - RNA, 19 nt, Homo sapiens
  misc_RNA (1)...(19): siRNA sense strand
caucaagaaugugagagaa

SEQ ID NO: 1788117 - RNA, 19 nt, Homo sapiens
  misc_RNA (1)...(19): siRNA sense strand
ugaagacucugggauuaau

SEQ ID NO: 1788118 - RNA, 19 nt, Homo sapiens
  misc_RNA (1)...(19): siRNA sense strand
ccaccaauuugccuugaug

SEQ ID NO: 1788119 - RNA, 19 nt, Homo sapiens
  misc_RNA (1)...(19): siRNA sense strand
gagaaccaccaccaauuug

SEQ ID NO: 1788120 - RNA, 19 nt, Homo sapiens
  misc_RNA (1)...(19): siRNA sense strand
agagaaccaccaccaauuu

SEQ ID NO: 1788121 - RNA, 19 nt, Homo sapiens
  misc_RNA (1)...(19): siRNA sense strand
ggagccaaaggccaaauuu

SEQ ID NO: 1788122 - RNA, 19 nt, Homo sapiens
  misc_RNA (1)...(19): siRNA sense strand
gcuguuagcccgaagaaag

SEQ ID NO: 1788123 - RNA, 19 nt, Homo sapiens
  misc_RNA (1)...(19): siRNA sense strand
gaaagcaguacaugauuuu

SEQ ID NO: 1788124 - RNA, 19 nt, Homo sapiens
  misc_RNA (1)...(19): siRNA sense strand
gggauuaaugcuaaauuug

SEQ ID NO: 1788125 - RNA, 19 nt, Homo sapiens
  misc_RNA (1)...(19): siRNA sense strand
gccacugccucauuuaaca

SEQ ID NO: 1788126 - RNA, 19 nt, Homo sapiens
  misc_RNA (1)...(19): siRNA sense strand
auugaagacucugggauua

SEQ ID NO: 1788127 - RNA, 19 nt, Homo sapiens
  misc_RNA (1)...(19): siRNA sense strand
uaacaccauugaagacucu

SEQ ID NO: 1788128 - RNA, 19 nt, Homo sapiens
  misc_RNA (1)...(19): siRNA sense strand
agaugccacugccucauuu

SEQ ID NO: 1788129 - RNA, 19 nt, Homo sapiens
  misc_RNA (1)...(19): siRNA sense strand
gugaaugcuguguaugaua

SEQ ID NO: 1788130 - RNA, 19 nt, Homo sapiens
  misc_RNA (1)...(19): siRNA sense strand
guuaagucaucaggagauu

SEQ ID NO: 1788131 - RNA, 19 nt, Homo sapiens
  misc_RNA (1)...(19): siRNA sense strand
gaaccuauucuuccuaucc

SEQ ID NO: 1788132 - RNA, 19 nt, Homo sapiens
  misc_RNA (1)...(19): siRNA sense strand
aaggccaaauuuccacuuu

SEQ ID NO: 1788133 - RNA, 19 nt, Homo sapiens
  misc_RNA (1)...(19): siRNA sense strand
gagccaaaggccaaauuuc

SEQ ID NO: 1788134 - RNA, 19 nt, Homo sapiens
  misc_RNA (1)...(19): siRNA sense strand
ccaaaacugugaaagacuu

SEQ ID NO: 1788135 - RNA, 19 nt, Homo sapiens
  misc_RNA (1)...(19): siRNA sense strand
cuaacaacguuugauucuu

SEQ ID NO: 1788136 - RNA, 19 nt, Homo sapiens
  misc_RNA (1)...(19): siRNA sense strand
ugagagaaccaccaccaau

SEQ ID NO: 1788137 - RNA, 19 nt, Homo sapiens
  misc_RNA (1)...(19): siRNA sense strand
cauugaagacucugggauu

SEQ ID NO: 1788138 - RNA, 19 nt, Homo sapiens
  misc_RNA (1)...(19): siRNA sense strand
aaacagcguacaucuaugg

SEQ ID NO: 1788139 - RNA, 19 nt, Homo sapiens
  misc_RNA (1)...(19): siRNA sense strand
gaugccacugccucauuua

SEQ ID NO: 1788140 - RNA, 19 nt, Homo sapiens
  misc_RNA (1)...(19): siRNA sense strand
gaagacucugggauuaaug

SEQ ID NO: 1788141 - RNA, 19 nt, Homo sapiens
  misc_RNA (1)...(19): siRNA sense strand
cauuuaacaccauugaaga

SEQ ID NO: 1788142 - RNA, 19 nt, Homo sapiens
  misc_RNA (1)...(19): siRNA sense strand
ucaccugcacaucuuguuu

SEQ ID NO: 1788143 - RNA, 19 nt, Homo sapiens
  misc_RNA (1)...(19): siRNA sense strand
ggagucagagcgcgagaag

SEQ ID NO: 1788144 - RNA, 19 nt, Homo sapiens
  misc_RNA (1)...(19): siRNA sense strand
agaaagaagcugcugaaaa

SEQ ID NO: 1788145 - RNA, 19 nt, Homo sapiens
  misc_RNA (1)...(19): siRNA sense strand
uaagucaucaggagauugg

SEQ ID NO: 1788146 - RNA, 19 nt, Homo sapiens
  misc_RNA (1)...(19): siRNA sense strand
gaggaaagggaaggaguca

SEQ ID NO: 1788147 - RNA, 19 nt, Homo sapiens
  misc_RNA (1)...(19): siRNA sense strand
uggaaagcaguacaugauu

SEQ ID NO: 1788148 - RNA, 19 nt, Homo sapiens
  misc_RNA (1)...(19): siRNA sense strand
ucauuuaacaccauugaag

SEQ ID NO: 1788149 - RNA, 19 nt, Homo sapiens
  misc_RNA (1)...(19): siRNA sense strand
aaguucaccugcacaucuu

SEQ ID NO: 1788150 - RNA, 19 nt, Homo sapiens
  misc_RNA (1)...(19): siRNA sense strand
caccaccaauuugccuuga

SEQ ID NO: 1788151 - RNA, 19 nt, Homo sapiens
  misc_RNA (1)...(19): siRNA sense strand
agacuuucaggaagaugua

SEQ ID NO: 1788152 - RNA, 19 nt, Homo sapiens
  misc_RNA (1)...(19): siRNA sense strand
ugugaaugcuguguaugau

SEQ ID NO: 1788153 - RNA, 19 nt, Homo sapiens
  misc_RNA (1)...(19): siRNA sense strand
gccaaaggccaaauuucca

SEQ ID NO: 1788154 - RNA, 19 nt, Homo sapiens
  misc_RNA (1)...(19): siRNA sense strand
aagaugccacugccucauu

SEQ ID NO: 1788155 - RNA, 19 nt, Homo sapiens
  misc_RNA (1)...(19): siRNA sense strand
gagauuggaaagcaguaca

SEQ ID NO: 1788156 - RNA, 19 nt, Homo sapiens
  misc_RNA (1)...(19): siRNA sense strand
gaaaugagauuccugaaau

SEQ ID NO: 1788157 - RNA, 19 nt, Homo sapiens
  misc_RNA (1)...(19): siRNA sense strand
uaaccuggcuucacuggaa

SEQ ID NO: 1788158 - RNA, 19 nt, Homo sapiens
  misc_RNA (1)...(19): siRNA sense strand
ggagcccucuuacaucuaa

SEQ ID NO: 1788159 - RNA, 19 nt, Homo sapiens
  misc_RNA (1)...(19): siRNA sense strand
gaacugagagagaaucuuc

SEQ ID NO: 1788160 - RNA, 19 nt, Homo sapiens
  misc_RNA (1)...(19): siRNA sense strand
gcggcucccuccagaaaua

SEQ ID NO: 1788161 - RNA, 19 nt, Homo sapiens
  misc_RNA (1)...(19): siRNA sense strand
gaacuugauuuaggaaaca

SEQ ID NO: 1788162 - RNA, 19 nt, Homo sapiens
  misc_RNA (1)...(19): siRNA sense strand
gaggagaucuaccgcuaug

SEQ ID NO: 1788163 - RNA, 19 nt, Homo sapiens
  misc_RNA (1)...(19): siRNA sense strand
uaaaugacaucucacuaca

SEQ ID NO: 1788164 - RNA, 19 nt, Homo sapiens
  misc_RNA (1)...(19): siRNA sense strand
ggacuuagugauaaugaaa

SEQ ID NO: 1788165 - RNA, 19 nt, Homo sapiens
  misc_RNA (1)...(19): siRNA sense strand
uagaagaacuugauuuagg

SEQ ID NO: 1788166 - RNA, 19 nt, Homo sapiens
  misc_RNA (1)...(19): siRNA sense strand
cuagaugugucucgaaaug

SEQ ID NO: 1788167 - RNA, 19 nt, Homo sapiens
  misc_RNA (1)...(19): siRNA sense strand
agaagaacuugauuuagga

SEQ ID NO: 1788168 - RNA, 19 nt, Homo sapiens
  misc_RNA (1)...(19): siRNA sense strand
agaaauagcaaacuucaug

SEQ ID NO: 1788169 - RNA, 19 nt, Homo sapiens
  misc_RNA (1)...(19): siRNA sense strand
cgaaaugagauuccugaaa

SEQ ID NO: 1788170 - RNA, 19 nt, Homo sapiens
  misc_RNA (1)...(19): siRNA sense strand
gaacuagaugugucucgaa

SEQ ID NO: 1788171 - RNA, 19 nt, Homo sapiens
  misc_RNA (1)...(19): siRNA sense strand
guaaaugacaucucacuac

SEQ ID NO: 1788172 - RNA, 19 nt, Homo sapiens
  misc_RNA (1)...(19): siRNA sense strand
aagcuuggacuuagugaua

SEQ ID NO: 1788173 - RNA, 19 nt, Homo sapiens
  misc_RNA (1)...(19): siRNA sense strand
uuacgaaagcuuggacuua

SEQ ID NO: 1788174 - RNA, 19 nt, Homo sapiens
  misc_RNA (1)...(19): siRNA sense strand
cugacuagguugccagaaa

SEQ ID NO: 1788175 - RNA, 19 nt, Homo sapiens
  misc_RNA (1)...(19): siRNA sense strand
gaagaacuugauuuaggaa

SEQ ID NO: 1788176 - RNA, 19 nt, Homo sapiens
  misc_RNA (1)...(19): siRNA sense strand
aaugacaucucacuacagu

SEQ ID NO: 1788177 - RNA, 19 nt, Homo sapiens
  misc_RNA (1)...(19): siRNA sense strand
ugacuagguugccagaaag

SEQ ID NO: 1788178 - RNA, 19 nt, Homo sapiens
  misc_RNA (1)...(19): siRNA sense strand
uacgaaagcuuggacuuag

SEQ ID NO: 1788179 - RNA, 19 nt, Homo sapiens
  misc_RNA (1)...(19): siRNA sense strand
ccagaaauagcaaacuuca

SEQ ID NO: 1788180 - RNA, 19 nt, Homo sapiens
  misc_RNA (1)...(19): siRNA sense strand
ggaaacccacugacuaggu

SEQ ID NO: 1788181 - RNA, 19 nt, Homo sapiens
  misc_RNA (1)...(19): siRNA sense strand
ugaaauuccagaaagcauu

SEQ ID NO: 1788182 - RNA, 19 nt, Homo sapiens
  misc_RNA (1)...(19): siRNA sense strand
cagcggcucccuccagaaa

SEQ ID NO: 1788183 - RNA, 19 nt, Homo sapiens
  misc_RNA (1)...(19): siRNA sense strand
gcgaagacuagaagaacuu

SEQ ID NO: 1788184 - RNA, 19 nt, Homo sapiens
  misc_RNA (1)...(19): siRNA sense strand
gcggaaacccacugacuag

SEQ ID NO: 1788185 - RNA, 19 nt, Homo sapiens
  misc_RNA (1)...(19): siRNA sense strand
gacuagaagaacuugauuu

SEQ ID NO: 1788186 - RNA, 19 nt, Homo sapiens
  misc_RNA (1)...(19): siRNA sense strand
ugagauuccugaaauucca

SEQ ID NO: 1788187 - RNA, 19 nt, Homo sapiens
  misc_RNA (1)...(19): siRNA sense strand
gaaagcuuggacuuaguga

SEQ ID NO: 1788188 - RNA, 19 nt, Homo sapiens
  misc_RNA (1)...(19): siRNA sense strand
ucacuggaacugagagaga

SEQ ID NO: 1788189 - RNA, 19 nt, Homo sapiens
  misc_RNA (1)...(19): siRNA sense strand
ugacaucucacuacagucu

SEQ ID NO: 1788190 - RNA, 19 nt, Homo sapiens
  misc_RNA (1)...(19): siRNA sense strand
cuccagaaauagcaaacuu

SEQ ID NO: 1788191 - RNA, 19 nt, Homo sapiens
  misc_RNA (1)...(19): siRNA sense strand
aacuagaugugucucgaaa

SEQ ID NO: 1788192 - RNA, 19 nt, Homo sapiens
  misc_RNA (1)...(19): siRNA sense strand
gcgagcugcccgagcaauu

SEQ ID NO: 1788193 - RNA, 19 nt, Homo sapiens
  misc_RNA (1)...(19): siRNA sense strand
cgagcugcccgagcaauuu

SEQ ID NO: 1788194 - RNA, 19 nt, Homo sapiens
  misc_RNA (1)...(19): siRNA sense strand
ucaugcagcugguggaacu

SEQ ID NO: 1788195 - RNA, 19 nt, Homo sapiens
  misc_RNA (1)...(19): siRNA sense strand
cgaaagcuuggacuuagug

SEQ ID NO: 1788196 - RNA, 19 nt, Homo sapiens
  misc_RNA (1)...(19): siRNA sense strand
uuuauaaccuggcuucacu

SEQ ID NO: 1788197 - RNA, 19 nt, Homo sapiens
  misc_RNA (1)...(19): siRNA sense strand
gcuuggacuuagugauaau

SEQ ID NO: 1788198 - RNA, 19 nt, Homo sapiens
  misc_RNA (1)...(19): siRNA sense strand
cagcuagucaaauuacgaa

SEQ ID NO: 1788199 - RNA, 19 nt, Homo sapiens
  misc_RNA (1)...(19): siRNA sense strand
gaagacuagaagaacuuga

SEQ ID NO: 1788200 - RNA, 19 nt, Homo sapiens
  misc_RNA (1)...(19): siRNA sense strand
cacuggaacugagagagaa

SEQ ID NO: 1788201 - RNA, 19 nt, Homo sapiens
  misc_RNA (1)...(19): siRNA sense strand
cuagucaaauuacgaaagc

SEQ ID NO: 1788202 - RNA, 19 nt, Homo sapiens
  misc_RNA (1)...(19): siRNA sense strand
uagguugccagaaagcuuu

SEQ ID NO: 1788203 - RNA, 19 nt, Homo sapiens
  misc_RNA (1)...(19): siRNA sense strand
gcugcgaagacuagaagaa

SEQ ID NO: 1788204 - RNA, 19 nt, Homo sapiens
  misc_RNA (1)...(19): siRNA sense strand
acuacagucucuaccugaa

SEQ ID NO: 1788205 - RNA, 19 nt, Homo sapiens
  misc_RNA (1)...(19): siRNA sense strand
uaucuuccugacucucuua

SEQ ID NO: 1788206 - RNA, 19 nt, Homo sapiens
  misc_RNA (1)...(19): siRNA sense strand
cuacagucucuaccugaaa

SEQ ID NO: 1788207 - RNA, 19 nt, Homo sapiens
  misc_RNA (1)...(19): siRNA sense strand
agaugugucucgaaaugag

SEQ ID NO: 1788208 - RNA, 19 nt, Homo sapiens
  misc_RNA (1)...(19): siRNA sense strand
agaacuugauuuaggaaac

SEQ ID NO: 1788209 - RNA, 19 nt, Homo sapiens
  misc_RNA (1)...(19): siRNA sense strand
caaauuacgaaagcuugga

SEQ ID NO: 1788210 - RNA, 19 nt, Homo sapiens
  misc_RNA (1)...(19): siRNA sense strand
aagcuuuccugaauuacag

SEQ ID NO: 1788211 - RNA, 19 nt, Homo sapiens
  misc_RNA (1)...(19): siRNA sense strand
agacuagaagaacuugauu

SEQ ID NO: 1788212 - RNA, 19 nt, Homo sapiens
  misc_RNA (1)...(19): siRNA sense strand
gcuagucaaauuacgaaag

SEQ ID NO: 1788213 - RNA, 19 nt, Homo sapiens
  misc_RNA (1)...(19): siRNA sense strand
uguaaaugacaucucacua

SEQ ID NO: 1788214 - RNA, 19 nt, Homo sapiens
  misc_RNA (1)...(19): siRNA sense strand
gaaaugagauuccugaaau

SEQ ID NO: 1788215 - RNA, 19 nt, Homo sapiens
  misc_RNA (1)...(19): siRNA sense strand
uaaccuggcuucacuggaa

SEQ ID NO: 1788216 - RNA, 19 nt, Homo sapiens
  misc_RNA (1)...(19): siRNA sense strand
ggagcccucuuacaucuaa

SEQ ID NO: 1788217 - RNA, 19 nt, Homo sapiens
  misc_RNA (1)...(19): siRNA sense strand
gaacugagagagaaucuuc

SEQ ID NO: 1788218 - RNA, 19 nt, Homo sapiens
  misc_RNA (1)...(19): siRNA sense strand
gcggcucccuccagaaaua

SEQ ID NO: 1788219 - RNA, 19 nt, Homo sapiens
  misc_RNA (1)...(19): siRNA sense strand
gaacuugauuuaggaaaca

SEQ ID NO: 1788220 - RNA, 19 nt, Homo sapiens
  misc_RNA (1)...(19): siRNA sense strand
gaggagaucuaccgcuaug

SEQ ID NO: 1788221 - RNA, 19 nt, Homo sapiens
  misc_RNA (1)...(19): siRNA sense strand
uaaaugacaucucacuaca

SEQ ID NO: 1788222 - RNA, 19 nt, Homo sapiens
  misc_RNA (1)...(19): siRNA sense strand
ggacuuagugauaaugaaa

SEQ ID NO: 1788223 - RNA, 19 nt, Homo sapiens
  misc_RNA (1)...(19): siRNA sense strand
uagaagaacuugauuuagg

SEQ ID NO: 1788224 - RNA, 19 nt, Homo sapiens
  misc_RNA (1)...(19): siRNA sense strand
cuagaugugucucgaaaug

SEQ ID NO: 1788225 - RNA, 19 nt, Homo sapiens
  misc_RNA (1)...(19): siRNA sense strand
agaagaacuugauuuagga

SEQ ID NO: 1788226 - RNA, 19 nt, Homo sapiens
  misc_RNA (1)...(19): siRNA sense strand
agaaauagcaaacuucaug

SEQ ID NO: 1788227 - RNA, 19 nt, Homo sapiens
  misc_RNA (1)...(19): siRNA sense strand
cgaaaugagauuccugaaa

SEQ ID NO: 1788228 - RNA, 19 nt, Homo sapiens
  misc_RNA (1)...(19): siRNA sense strand
gaacuagaugugucucgaa

SEQ ID NO: 1788229 - RNA, 19 nt, Homo sapiens
  misc_RNA (1)...(19): siRNA sense strand
guaaaugacaucucacuac

SEQ ID NO: 1788230 - RNA, 19 nt, Homo sapiens
  misc_RNA (1)...(19): siRNA sense strand
aagcuuggacuuagugaua

SEQ ID NO: 1788231 - RNA, 19 nt, Homo sapiens
  misc_RNA (1)...(19): siRNA sense strand
uuacgaaagcuuggacuua

SEQ ID NO: 1788232 - RNA, 19 nt, Homo sapiens
  misc_RNA (1)...(19): siRNA sense strand
cugacuagguugccagaaa

SEQ ID NO: 1788233 - RNA, 19 nt, Homo sapiens
  misc_RNA (1)...(19): siRNA sense strand
gaagaacuugauuuaggaa

SEQ ID NO: 1788234 - RNA, 19 nt, Homo sapiens
  misc_RNA (1)...(19): siRNA sense strand
aaugacaucucacuacagu

SEQ ID NO: 1788235 - RNA, 19 nt, Homo sapiens
  misc_RNA (1)...(19): siRNA sense strand
ugacuagguugccagaaag

SEQ ID NO: 1788236 - RNA, 19 nt, Homo sapiens
  misc_RNA (1)...(19): siRNA sense strand
uacgaaagcuuggacuuag

SEQ ID NO: 1788237 - RNA, 19 nt, Homo sapiens
  misc_RNA (1)...(19): siRNA sense strand
ccagaaauagcaaacuuca

SEQ ID NO: 1788238 - RNA, 19 nt, Homo sapiens
  misc_RNA (1)...(19): siRNA sense strand
ggaaacccacugacuaggu

SEQ ID NO: 1788239 - RNA, 19 nt, Homo sapiens
  misc_RNA (1)...(19): siRNA sense strand
ugaaauuccagaaagcauu

SEQ ID NO: 1788240 - RNA, 19 nt, Homo sapiens
  misc_RNA (1)...(19): siRNA sense strand
cagcggcucccuccagaaa

SEQ ID NO: 1788241 - RNA, 19 nt, Homo sapiens
  misc_RNA (1)...(19): siRNA sense strand
gcgaagacuagaagaacuu

SEQ ID NO: 1788242 - RNA, 19 nt, Homo sapiens
  misc_RNA (1)...(19): siRNA sense strand
gcggaaacccacugacuag

SEQ ID NO: 1788243 - RNA, 19 nt, Homo sapiens
  misc_RNA (1)...(19): siRNA sense strand
gacuagaagaacuugauuu

SEQ ID NO: 1788244 - RNA, 19 nt, Homo sapiens
  misc_RNA (1)...(19): siRNA sense strand
ugagauuccugaaauucca

SEQ ID NO: 1788245 - RNA, 19 nt, Homo sapiens
  misc_RNA (1)...(19): siRNA sense strand
gaaagcuuggacuuaguga

SEQ ID NO: 1788246 - RNA, 19 nt, Homo sapiens
  misc_RNA (1)...(19): siRNA sense strand
ucacuggaacugagagaga

SEQ ID NO: 1788247 - RNA, 19 nt, Homo sapiens
  misc_RNA (1)...(19): siRNA sense strand
ugacaucucacuacagucu

SEQ ID NO: 1788248 - RNA, 19 nt, Homo sapiens
  misc_RNA (1)...(19): siRNA sense strand
cuccagaaauagcaaacuu

SEQ ID NO: 1788249 - RNA, 19 nt, Homo sapiens
  misc_RNA (1)...(19): siRNA sense strand
aacuagaugugucucgaaa

SEQ ID NO: 1788250 - RNA, 19 nt, Homo sapiens
  misc_RNA (1)...(19): siRNA sense strand
gcgagcugcccgagcaauu

SEQ ID NO: 1788251 - RNA, 19 nt, Homo sapiens
  misc_RNA (1)...(19): siRNA sense strand
cgagcugcccgagcaauuu

SEQ ID NO: 1788252 - RNA, 19 nt, Homo sapiens
  misc_RNA (1)...(19): siRNA sense strand
ucaugcagcugguggaacu

SEQ ID NO: 1788253 - RNA, 19 nt, Homo sapiens
  misc_RNA (1)...(19): siRNA sense strand
cgaaagcuuggacuuagug

SEQ ID NO: 1788254 - RNA, 19 nt, Homo sapiens
  misc_RNA (1)...(19): siRNA sense strand
uuuauaaccuggcuucacu

SEQ ID NO: 1788255 - RNA, 19 nt, Homo sapiens
  misc_RNA (1)...(19): siRNA sense strand
gcuuggacuuagugauaau

SEQ ID NO: 1788256 - RNA, 19 nt, Homo sapiens
  misc_RNA (1)...(19): siRNA sense strand
cagcuagucaaauuacgaa

SEQ ID NO: 1788257 - RNA, 19 nt, Homo sapiens
  misc_RNA (1)...(19): siRNA sense strand
gaagacuagaagaacuuga

SEQ ID NO: 1788258 - RNA, 19 nt, Homo sapiens
  misc_RNA (1)...(19): siRNA sense strand
cacuggaacugagagagaa

SEQ ID NO: 1788259 - RNA, 19 nt, Homo sapiens
  misc_RNA (1)...(19): siRNA sense strand
cuagucaaauuacgaaagc

SEQ ID NO: 1788260 - RNA, 19 nt, Homo sapiens
  misc_RNA (1)...(19): siRNA sense strand
uagguugccagaaagcuuu

SEQ ID NO: 1788261 - RNA, 19 nt, Homo sapiens
  misc_RNA (1)...(19): siRNA sense strand
gcugcgaagacuagaagaa

SEQ ID NO: 1788262 - RNA, 19 nt, Homo sapiens
  misc_RNA (1)...(19): siRNA sense strand
acuacagucucuaccugaa

SEQ ID NO: 1788263 - RNA, 19 nt, Homo sapiens
  misc_RNA (1)...(19): siRNA sense strand
uaucuuccugacucucuua

SEQ ID NO: 1788264 - RNA, 19 nt, Homo sapiens
  misc_RNA (1)...(19): siRNA sense strand
cuacagucucuaccugaaa

SEQ ID NO: 1788265 - RNA, 19 nt, Homo sapiens
  misc_RNA (1)...(19): siRNA sense strand
agaugugucucgaaaugag

SEQ ID NO: 1788266 - RNA, 19 nt, Homo sapiens
  misc_RNA (1)...(19): siRNA sense strand
agaacuugauuuaggaaac

SEQ ID NO: 1788267 - RNA, 19 nt, Homo sapiens
  misc_RNA (1)...(19): siRNA sense strand
caaauuacgaaagcuugga

SEQ ID NO: 1788268 - RNA, 19 nt, Homo sapiens
  misc_RNA (1)...(19): siRNA sense strand
aagcuuuccugaauuacag

SEQ ID NO: 1788269 - RNA, 19 nt, Homo sapiens
  misc_RNA (1)...(19): siRNA sense strand
agacuagaagaacuugauu

SEQ ID NO: 1788270 - RNA, 19 nt, Homo sapiens
  misc_RNA (1)...(19): siRNA sense strand
gcuagucaaauuacgaaag

SEQ ID NO: 1788271 - RNA, 19 nt, Homo sapiens
  misc_RNA (1)...(19): siRNA sense strand
uguaaaugacaucucacua

SEQ ID NO: 1788272 - RNA, 19 nt, Homo sapiens
  misc_RNA (1)...(19): siRNA sense strand
gaaauuggcccuccagaaa

SEQ ID NO: 1788273 - RNA, 19 nt, Homo sapiens
  misc_RNA (1)...(19): siRNA sense strand
gaagaagauuaucgaggua

SEQ ID NO: 1788274 - RNA, 19 nt, Homo sapiens
  misc_RNA (1)...(19): siRNA sense strand
caaagcaggugaggugaua

SEQ ID NO: 1788275 - RNA, 19 nt, Homo sapiens
  misc_RNA (1)...(19): siRNA sense strand
cgacagaaagugaggauua

SEQ ID NO: 1788276 - RNA, 19 nt, Homo sapiens
  misc_RNA (1)...(19): siRNA sense strand
gaaggaucauagugucuuu

SEQ ID NO: 1788277 - RNA, 19 nt, Homo sapiens
  misc_RNA (1)...(19): siRNA sense strand
gcggagagcaggcaauuaa

SEQ ID NO: 1788278 - RNA, 19 nt, Homo sapiens
  misc_RNA (1)...(19): siRNA sense strand
gauacuauuucauggagaa

SEQ ID NO: 1788279 - RNA, 19 nt, Homo sapiens
  misc_RNA (1)...(19): siRNA sense strand
gaugagggcgagaaguuua

SEQ ID NO: 1788280 - RNA, 19 nt, Homo sapiens
  misc_RNA (1)...(19): siRNA sense strand
gaucauagugucuuucaga

SEQ ID NO: 1788281 - RNA, 19 nt, Homo sapiens
  misc_RNA (1)...(19): siRNA sense strand
ugaaggagacccaguacua

SEQ ID NO: 1788282 - RNA, 19 nt, Homo sapiens
  misc_RNA (1)...(19): siRNA sense strand
ugagaaaugugaagguguu

SEQ ID NO: 1788283 - RNA, 19 nt, Homo sapiens
  misc_RNA (1)...(19): siRNA sense strand
uaauugugcuugaucagaa

SEQ ID NO: 1788284 - RNA, 19 nt, Homo sapiens
  misc_RNA (1)...(19): siRNA sense strand
gauuacagaugacauggau

SEQ ID NO: 1788285 - RNA, 19 nt, Homo sapiens
  misc_RNA (1)...(19): siRNA sense strand
ggagccuggugaugucaua

SEQ ID NO: 1788286 - RNA, 19 nt, Homo sapiens
  misc_RNA (1)...(19): siRNA sense strand
gagagaagaggcaagaaug

SEQ ID NO: 1788287 - RNA, 19 nt, Homo sapiens
  misc_RNA (1)...(19): siRNA sense strand
gagacgaggccaugacuug

SEQ ID NO: 1788288 - RNA, 19 nt, Homo sapiens
  misc_RNA (1)...(19): siRNA sense strand
gaaggagacccaguacuau

SEQ ID NO: 1788289 - RNA, 19 nt, Homo sapiens
  misc_RNA (1)...(19): siRNA sense strand
gagagcaggcaauuaaaga

SEQ ID NO: 1788290 - RNA, 19 nt, Homo sapiens
  misc_RNA (1)...(19): siRNA sense strand
gaauguuguacaccaguua

SEQ ID NO: 1788291 - RNA, 19 nt, Homo sapiens
  misc_RNA (1)...(19): siRNA sense strand
ggacggauggcuagagaga

SEQ ID NO: 1788292 - RNA, 19 nt, Homo sapiens
  misc_RNA (1)...(19): siRNA sense strand
caggugaggugauaaagca

SEQ ID NO: 1788293 - RNA, 19 nt, Homo sapiens
  misc_RNA (1)...(19): siRNA sense strand
gaaaagggauguuuaugac

SEQ ID NO: 1788294 - RNA, 19 nt, Homo sapiens
  misc_RNA (1)...(19): siRNA sense strand
gcaggcaauuaaagaagga

SEQ ID NO: 1788295 - RNA, 19 nt, Homo sapiens
  misc_RNA (1)...(19): siRNA sense strand
gagaagaggcaagaauguu

SEQ ID NO: 1788296 - RNA, 19 nt, Homo sapiens
  misc_RNA (1)...(19): siRNA sense strand
gaaggaaugcccaucuaca

SEQ ID NO: 1788297 - RNA, 19 nt, Homo sapiens
  misc_RNA (1)...(19): siRNA sense strand
ggauucugaucauacaguu

SEQ ID NO: 1788298 - RNA, 19 nt, Homo sapiens
  misc_RNA (1)...(19): siRNA sense strand
gaagugcuuucagauccaa

SEQ ID NO: 1788299 - RNA, 19 nt, Homo sapiens
  misc_RNA (1)...(19): siRNA sense strand
auaauggagucacgaagaa

SEQ ID NO: 1788300 - RNA, 19 nt, Homo sapiens
  misc_RNA (1)...(19): siRNA sense strand
gaagaggcaagaauguugu

SEQ ID NO: 1788301 - RNA, 19 nt, Homo sapiens
  misc_RNA (1)...(19): siRNA sense strand
ggaaugcccaucuacaaag

SEQ ID NO: 1788302 - RNA, 19 nt, Homo sapiens
  misc_RNA (1)...(19): siRNA sense strand
caaagaaaagggauguuua

SEQ ID NO: 1788303 - RNA, 19 nt, Homo sapiens
  misc_RNA (1)...(19): siRNA sense strand
gaaagaugggcaaaagaua

SEQ ID NO: 1788304 - RNA, 19 nt, Homo sapiens
  misc_RNA (1)...(19): siRNA sense strand
ccaggcauaugaagugcuu

SEQ ID NO: 1788305 - RNA, 19 nt, Homo sapiens
  misc_RNA (1)...(19): siRNA sense strand
ggagagcaggcaauuaaag

SEQ ID NO: 1788306 - RNA, 19 nt, Homo sapiens
  misc_RNA (1)...(19): siRNA sense strand
aaagugaggauuacagaug

SEQ ID NO: 1788307 - RNA, 19 nt, Homo sapiens
  misc_RNA (1)...(19): siRNA sense strand
ggaugagggcgagaaguuu

SEQ ID NO: 1788308 - RNA, 19 nt, Homo sapiens
  misc_RNA (1)...(19): siRNA sense strand
gacagaaagugaggauuac

SEQ ID NO: 1788309 - RNA, 19 nt, Homo sapiens
  misc_RNA (1)...(19): siRNA sense strand
gauuaucgagguacauguu

SEQ ID NO: 1788310 - RNA, 19 nt, Homo sapiens
  misc_RNA (1)...(19): siRNA sense strand
aagugaggauuacagauga

SEQ ID NO: 1788311 - RNA, 19 nt, Homo sapiens
  misc_RNA (1)...(19): siRNA sense strand
gaaagugaggauuacagau

SEQ ID NO: 1788312 - RNA, 19 nt, Homo sapiens
  misc_RNA (1)...(19): siRNA sense strand
ccaaggugauccgugagaa

SEQ ID NO: 1788313 - RNA, 19 nt, Homo sapiens
  misc_RNA (1)...(19): siRNA sense strand
ugagaugcgugcgcgauga

SEQ ID NO: 1788314 - RNA, 19 nt, Homo sapiens
  misc_RNA (1)...(19): siRNA sense strand
gccuggugaugucauaauu

SEQ ID NO: 1788315 - RNA, 19 nt, Homo sapiens
  misc_RNA (1)...(19): siRNA sense strand
ggcaaaagauacuauuuca

SEQ ID NO: 1788316 - RNA, 19 nt, Homo sapiens
  misc_RNA (1)...(19): siRNA sense strand
guggacggauggcuagaga

SEQ ID NO: 1788317 - RNA, 19 nt, Homo sapiens
  misc_RNA (1)...(19): siRNA sense strand
uauaauggagucacgaaga

SEQ ID NO: 1788318 - RNA, 19 nt, Homo sapiens
  misc_RNA (1)...(19): siRNA sense strand
agaagaggcaagaauguug

SEQ ID NO: 1788319 - RNA, 19 nt, Homo sapiens
  misc_RNA (1)...(19): siRNA sense strand
gaggauuacagaugacaug

SEQ ID NO: 1788320 - RNA, 19 nt, Homo sapiens
  misc_RNA (1)...(19): siRNA sense strand
acacuggcuuucucuggaa

SEQ ID NO: 1788321 - RNA, 19 nt, Homo sapiens
  misc_RNA (1)...(19): siRNA sense strand
ucauaauugugcuugauca

SEQ ID NO: 1788322 - RNA, 19 nt, Homo sapiens
  misc_RNA (1)...(19): siRNA sense strand
gaagggaucgguggagaag

SEQ ID NO: 1788323 - RNA, 19 nt, Homo sapiens
  misc_RNA (1)...(19): siRNA sense strand
gagcaggcaauuaaagaag

SEQ ID NO: 1788324 - RNA, 19 nt, Homo sapiens
  misc_RNA (1)...(19): siRNA sense strand
agguggagcugaaggaguu

SEQ ID NO: 1788325 - RNA, 19 nt, Homo sapiens
  misc_RNA (1)...(19): siRNA sense strand
gaaugcccaucuacaaagc

SEQ ID NO: 1788326 - RNA, 19 nt, Homo sapiens
  misc_RNA (1)...(19): siRNA sense strand
gaaaugugaagguguuggu

SEQ ID NO: 1788327 - RNA, 19 nt, Homo sapiens
  misc_RNA (1)...(19): siRNA sense strand
ccauggacaucuuugacau

SEQ ID NO: 1788328 - RNA, 19 nt, Homo sapiens
  misc_RNA (1)...(19): siRNA sense strand
acggauggcuagagagaga

SEQ ID NO: 1788329 - RNA, 19 nt, Homo sapiens
  misc_RNA (1)...(19): siRNA sense strand
uuacagaugacauggauca

SEQ ID NO: 1788330 - RNA, 19 nt, Homo sapiens
  misc_RNA (1)...(19): siRNA sense strand
gcuggagccuggugauguc

SEQ ID NO: 1788331 - RNA, 19 nt, Homo sapiens
  misc_RNA (1)...(19): siRNA sense strand
cuggugaugucauaauugu

SEQ ID NO: 1788332 - RNA, 19 nt, Homo sapiens
  misc_RNA (1)...(19): siRNA sense strand
agaaauuggcccuccagaa

SEQ ID NO: 1788333 - RNA, 19 nt, Homo sapiens
  misc_RNA (1)...(19): siRNA sense strand
cggaugagggcgagaaguu

SEQ ID NO: 1788334 - RNA, 19 nt, Homo sapiens
  misc_RNA (1)...(19): siRNA sense strand
ggaagcuggcgcucaagug

SEQ ID NO: 1788335 - RNA, 19 nt, Homo sapiens
  misc_RNA (1)...(19): siRNA sense strand
agggaucgguggagaagug

SEQ ID NO: 1788336 - RNA, 19 nt, Homo sapiens
  misc_RNA (1)...(19): siRNA sense strand
agaaagugaggauuacaga

SEQ ID NO: 1788337 - RNA, 19 nt, Homo sapiens
  misc_RNA (1)...(19): siRNA sense strand
augaaggaaugcccaucua

SEQ ID NO: 1788338 - RNA, 19 nt, Homo sapiens
  misc_RNA (1)...(19): siRNA sense strand
gagaugcgugcgcgaugaa

SEQ ID NO: 1788339 - RNA, 19 nt, Homo sapiens
  misc_RNA (1)...(19): siRNA sense strand
agaauguuguacaccaguu

SEQ ID NO: 1788340 - RNA, 19 nt, Homo sapiens
  misc_RNA (1)...(19): siRNA sense strand
ggugauccgugagaagaag

SEQ ID NO: 1788341 - RNA, 19 nt, Homo sapiens
  misc_RNA (1)...(19): siRNA sense strand
uuaucgagguacauguuga

SEQ ID NO: 1788342 - RNA, 19 nt, Homo sapiens
  misc_RNA (1)...(19): siRNA sense strand
gugagaagaagauuaucga

SEQ ID NO: 1788343 - RNA, 19 nt, Homo sapiens
  misc_RNA (1)...(19): siRNA sense strand
agaaaagggauguuuauga

SEQ ID NO: 1788344 - RNA, 19 nt, Homo sapiens
  misc_RNA (1)...(19): siRNA sense strand
gaaggaguuuugucccaau

SEQ ID NO: 1788345 - RNA, 19 nt, Homo sapiens
  misc_RNA (1)...(19): siRNA sense strand
aggaaugcccaucuacaaa

SEQ ID NO: 1788346 - RNA, 19 nt, Homo sapiens
  misc_RNA (1)...(19): siRNA sense strand
aaggaaugcccaucuacaa

SEQ ID NO: 1788347 - RNA, 19 nt, Homo sapiens
  misc_RNA (1)...(19): siRNA sense strand
agagagaagaggcaagaau

SEQ ID NO: 1788348 - RNA, 19 nt, Homo sapiens
  misc_RNA (1)...(19): siRNA sense strand
aaaagggauucugaucaua

SEQ ID NO: 1788349 - RNA, 19 nt, Homo sapiens
  misc_RNA (1)...(19): siRNA sense strand
ugucauaauugugcuugau

SEQ ID NO: 1788350 - RNA, 19 nt, Homo sapiens
  misc_RNA (1)...(19): siRNA sense strand
ggacaagaacccggaugag

SEQ ID NO: 1788351 - RNA, 19 nt, Homo sapiens
  misc_RNA (1)...(19): siRNA sense strand
gagacccaguacuaugaca

SEQ ID NO: 1788352 - RNA, 19 nt, Homo sapiens
  misc_RNA (1)...(19): siRNA sense strand
cuacaaagcaccccuggaa

SEQ ID NO: 1788353 - RNA, 19 nt, Homo sapiens
  misc_RNA (1)...(19): siRNA sense strand
cgugcgcgaugaaggaaug

SEQ ID NO: 1788354 - RNA, 19 nt, Homo sapiens
  misc_RNA (1)...(19): siRNA sense strand
agaagugcccgcugugcaa

SEQ ID NO: 1788355 - RNA, 19 nt, Homo sapiens
  misc_RNA (1)...(19): siRNA sense strand
agagaagaggcaagaaugu

SEQ ID NO: 1788356 - RNA, 19 nt, Homo sapiens
  misc_RNA (1)...(19): siRNA sense strand
ggauuacagaugacaugga

SEQ ID NO: 1788357 - RNA, 19 nt, Homo sapiens
  misc_RNA (1)...(19): siRNA sense strand
aggagacccaguacuauga

SEQ ID NO: 1788358 - RNA, 19 nt, Homo sapiens
  misc_RNA (1)...(19): siRNA sense strand
caucuuugacauguucuuu

SEQ ID NO: 1788359 - RNA, 19 nt, Homo sapiens
  misc_RNA (1)...(19): siRNA sense strand
aagcaggugaggugauaaa

SEQ ID NO: 1788360 - RNA, 19 nt, Homo sapiens
  misc_RNA (1)...(19): siRNA sense strand
agaagauuaucgagguaca

SEQ ID NO: 1788361 - RNA, 19 nt, Homo sapiens
  misc_RNA (1)...(19): siRNA sense strand
uauauaauggagucacgaa

SEQ ID NO: 1788362 - RNA, 19 nt, Homo sapiens
  misc_RNA (1)...(19): siRNA sense strand
gaggcaagaauguuguaca

SEQ ID NO: 1788363 - RNA, 19 nt, Homo sapiens
  misc_RNA (1)...(19): siRNA sense strand
agagagagaagaggcaaga

SEQ ID NO: 1788364 - RNA, 19 nt, Homo sapiens
  misc_RNA (1)...(19): siRNA sense strand
ccaaagaaaagggauguuu

SEQ ID NO: 1788365 - RNA, 19 nt, Homo sapiens
  misc_RNA (1)...(19): siRNA sense strand
aagggauucugaucauaca

SEQ ID NO: 1788366 - RNA, 19 nt, Homo sapiens
  misc_RNA (1)...(19): siRNA sense strand
aaagggauucugaucauac

SEQ ID NO: 1788367 - RNA, 19 nt, Homo sapiens
  misc_RNA (1)...(19): siRNA sense strand
cggacaagaacccggauga

SEQ ID NO: 1788368 - RNA, 19 nt, Homo sapiens
  misc_RNA (1)...(19): siRNA sense strand
acuauuucauggagaagga

SEQ ID NO: 1788369 - RNA, 19 nt, Homo sapiens
  misc_RNA (1)...(19): siRNA sense strand
acaaagcaccccuggaaaa

SEQ ID NO: 1788370 - RNA, 19 nt, Homo sapiens
  misc_RNA (1)...(19): siRNA sense strand
agagcaggcaauuaaagaa

SEQ ID NO: 1788371 - RNA, 19 nt, Homo sapiens
  misc_RNA (1)...(19): siRNA sense strand
gacgaggccaugacuugau

SEQ ID NO: 1788372 - RNA, 19 nt, Homo sapiens
  misc_RNA (1)...(19): siRNA sense strand
gauaauggaucaucauguu

SEQ ID NO: 1788373 - RNA, 19 nt, Homo sapiens
  misc_RNA (1)...(19): siRNA sense strand
gauggacgcuacuuuauug

SEQ ID NO: 1788374 - RNA, 19 nt, Homo sapiens
  misc_RNA (1)...(19): siRNA sense strand
gaccagacaucucuugaaa

SEQ ID NO: 1788375 - RNA, 19 nt, Homo sapiens
  misc_RNA (1)...(19): siRNA sense strand
agacaucucuugaaaucua

SEQ ID NO: 1788376 - RNA, 19 nt, Homo sapiens
  misc_RNA (1)...(19): siRNA sense strand
ggagaaauccuguccaaug

SEQ ID NO: 1788377 - RNA, 19 nt, Homo sapiens
  misc_RNA (1)...(19): siRNA sense strand
ccagacaucucuugaaauc

SEQ ID NO: 1788378 - RNA, 19 nt, Homo sapiens
  misc_RNA (1)...(19): siRNA sense strand
ggacuaaugcugaguaugu

SEQ ID NO: 1788379 - RNA, 19 nt, Homo sapiens
  misc_RNA (1)...(19): siRNA sense strand
gagaaauccuguccaaugg

SEQ ID NO: 1788380 - RNA, 19 nt, Homo sapiens
  misc_RNA (1)...(19): siRNA sense strand
gaaggcacuuucauugaug

SEQ ID NO: 1788381 - RNA, 19 nt, Homo sapiens
  misc_RNA (1)...(19): siRNA sense strand
aaagagaugugauaaugga

SEQ ID NO: 1788382 - RNA, 19 nt, Homo sapiens
  misc_RNA (1)...(19): siRNA sense strand
aaaugcagcuucuggauga

SEQ ID NO: 1788383 - RNA, 19 nt, Homo sapiens
  misc_RNA (1)...(19): siRNA sense strand
gaagacuauucccuccaua

SEQ ID NO: 1788384 - RNA, 19 nt, Homo sapiens
  misc_RNA (1)...(19): siRNA sense strand
ucacaggcaucuuucuuug

SEQ ID NO: 1788385 - RNA, 19 nt, Homo sapiens
  misc_RNA (1)...(19): siRNA sense strand
caucaagccucgaagaauc

SEQ ID NO: 1788386 - RNA, 19 nt, Homo sapiens
  misc_RNA (1)...(19): siRNA sense strand
ggauuugucucucuucagu

SEQ ID NO: 1788387 - RNA, 19 nt, Homo sapiens
  misc_RNA (1)...(19): siRNA sense strand
ggacgcuacuuuauugcuu

SEQ ID NO: 1788388 - RNA, 19 nt, Homo sapiens
  misc_RNA (1)...(19): siRNA sense strand
aaacaccgguugcugguau

SEQ ID NO: 1788389 - RNA, 19 nt, Homo sapiens
  misc_RNA (1)...(19): siRNA sense strand
gcagggauacgaaggagaa

SEQ ID NO: 1788390 - RNA, 19 nt, Homo sapiens
  misc_RNA (1)...(19): siRNA sense strand
caucauguuucuaccauca

SEQ ID NO: 1788391 - RNA, 19 nt, Homo sapiens
  misc_RNA (1)...(19): siRNA sense strand
caaguacacuagugaggau

SEQ ID NO: 1788392 - RNA, 19 nt, Homo sapiens
  misc_RNA (1)...(19): siRNA sense strand
cguaaauucucaccugaug

SEQ ID NO: 1788393 - RNA, 19 nt, Homo sapiens
  misc_RNA (1)...(19): siRNA sense strand
gacgcuacuuuauugcuuu

SEQ ID NO: 1788394 - RNA, 19 nt, Homo sapiens
  misc_RNA (1)...(19): siRNA sense strand
gcaccaaguccgaguguuc

SEQ ID NO: 1788395 - RNA, 19 nt, Homo sapiens
  misc_RNA (1)...(19): siRNA sense strand
ccugauggacgcuacuuua

SEQ ID NO: 1788396 - RNA, 19 nt, Homo sapiens
  misc_RNA (1)...(19): siRNA sense strand
gaggacuaaugcugaguau

SEQ ID NO: 1788397 - RNA, 19 nt, Homo sapiens
  misc_RNA (1)...(19): siRNA sense strand
gaacaggaugguagugcaa

SEQ ID NO: 1788398 - RNA, 19 nt, Homo sapiens
  misc_RNA (1)...(19): siRNA sense strand
uguagucucuucacugaug

SEQ ID NO: 1788399 - RNA, 19 nt, Homo sapiens
  misc_RNA (1)...(19): siRNA sense strand
uuucaucaauucccucaaa

SEQ ID NO: 1788400 - RNA, 19 nt, Homo sapiens
  misc_RNA (1)...(19): siRNA sense strand
cagcuucuagcaacaauuu

SEQ ID NO: 1788401 - RNA, 19 nt, Homo sapiens
  misc_RNA (1)...(19): siRNA sense strand
acaauauggugacgacaga

SEQ ID NO: 1788402 - RNA, 19 nt, Homo sapiens
  misc_RNA (1)...(19): siRNA sense strand
gggauccuuucaucaauuc

SEQ ID NO: 1788403 - RNA, 19 nt, Homo sapiens
  misc_RNA (1)...(19): siRNA sense strand
gagaucacccaaucagguu

SEQ ID NO: 1788404 - RNA, 19 nt, Homo sapiens
  misc_RNA (1)...(19): siRNA sense strand
guaguaacacugcgaguca

SEQ ID NO: 1788405 - RNA, 19 nt, Homo sapiens
  misc_RNA (1)...(19): siRNA sense strand
agaggugauugcuguguuu

SEQ ID NO: 1788406 - RNA, 19 nt, Homo sapiens
  misc_RNA (1)...(19): siRNA sense strand
acaggcaucuuucuuugug

SEQ ID NO: 1788407 - RNA, 19 nt, Homo sapiens
  misc_RNA (1)...(19): siRNA sense strand
uaaauucucaccugaugga

SEQ ID NO: 1788408 - RNA, 19 nt, Homo sapiens
  misc_RNA (1)...(19): siRNA sense strand
gacuaaugcugaguauguu

SEQ ID NO: 1788409 - RNA, 19 nt, Homo sapiens
  misc_RNA (1)...(19): siRNA sense strand
auuugucucucuucaguua

SEQ ID NO: 1788410 - RNA, 19 nt, Homo sapiens
  misc_RNA (1)...(19): siRNA sense strand
aggaugaccugcucacugu

SEQ ID NO: 1788411 - RNA, 19 nt, Homo sapiens
  misc_RNA (1)...(19): siRNA sense strand
cugccuaccucccagauga

SEQ ID NO: 1788412 - RNA, 19 nt, Homo sapiens
  misc_RNA (1)...(19): siRNA sense strand
guagugcaauggccaagag

SEQ ID NO: 1788413 - RNA, 19 nt, Homo sapiens
  misc_RNA (1)...(19): siRNA sense strand
ugauugcuguguuugagaa

SEQ ID NO: 1788414 - RNA, 19 nt, Homo sapiens
  misc_RNA (1)...(19): siRNA sense strand
accgguugcugguauauuu

SEQ ID NO: 1788415 - RNA, 19 nt, Homo sapiens
  misc_RNA (1)...(19): siRNA sense strand
cagaggugauugcuguguu

SEQ ID NO: 1788416 - RNA, 19 nt, Homo sapiens
  misc_RNA (1)...(19): siRNA sense strand
acucgggccugcucaaguu

SEQ ID NO: 1788417 - RNA, 19 nt, Homo sapiens
  misc_RNA (1)...(19): siRNA sense strand
caucuuucuuuguggugua

SEQ ID NO: 1788418 - RNA, 19 nt, Homo sapiens
  misc_RNA (1)...(19): siRNA sense strand
uaauggaucaucauguuuc

SEQ ID NO: 1788419 - RNA, 19 nt, Homo sapiens
  misc_RNA (1)...(19): siRNA sense strand
uagugaggauguaguaaca

SEQ ID NO: 1788420 - RNA, 19 nt, Homo sapiens
  misc_RNA (1)...(19): siRNA sense strand
ugauggacgcuacuuuauu

SEQ ID NO: 1788421 - RNA, 19 nt, Homo sapiens
  misc_RNA (1)...(19): siRNA sense strand
gaugacaaguggguaucug

SEQ ID NO: 1788422 - RNA, 19 nt, Homo sapiens
  misc_RNA (1)...(19): siRNA sense strand
ccaucagugcucagucuua

SEQ ID NO: 1788423 - RNA, 19 nt, Homo sapiens
  misc_RNA (1)...(19): siRNA sense strand
gauacacgcacguucaagu

SEQ ID NO: 1788424 - RNA, 19 nt, Homo sapiens
  misc_RNA (1)...(19): siRNA sense strand
gggauacgaaggagaaauc

SEQ ID NO: 1788425 - RNA, 19 nt, Homo sapiens
  misc_RNA (1)...(19): siRNA sense strand
aaagccuccuuguuucuug

SEQ ID NO: 1788426 - RNA, 19 nt, Homo sapiens
  misc_RNA (1)...(19): siRNA sense strand
gcgagucacagauccauca

SEQ ID NO: 1788427 - RNA, 19 nt, Homo sapiens
  misc_RNA (1)...(19): siRNA sense strand
uagggauccuuucaucaau

SEQ ID NO: 1788428 - RNA, 19 nt, Homo sapiens
  misc_RNA (1)...(19): siRNA sense strand
guagucucuucacugauga

SEQ ID NO: 1788429 - RNA, 19 nt, Homo sapiens
  misc_RNA (1)...(19): siRNA sense strand
gacaucucuugaaaucuau

SEQ ID NO: 1788430 - RNA, 19 nt, Homo sapiens
  misc_RNA (1)...(19): siRNA sense strand
uuagggauccuuucaucaa

SEQ ID NO: 1788431 - RNA, 19 nt, Homo sapiens
  misc_RNA (1)...(19): siRNA sense strand
caucagugcucagucuuac

SEQ ID NO: 1788432 - RNA, 19 nt, Homo sapiens
  misc_RNA (1)...(19): siRNA sense strand
ugagguauaucggaacagu

SEQ ID NO: 1788433 - RNA, 19 nt, Homo sapiens
  misc_RNA (1)...(19): siRNA sense strand
guccgaguguuccaucaga

SEQ ID NO: 1788434 - RNA, 19 nt, Homo sapiens
  misc_RNA (1)...(19): siRNA sense strand
augcuacccugcacaguga

SEQ ID NO: 1788435 - RNA, 19 nt, Homo sapiens
  misc_RNA (1)...(19): siRNA sense strand
ggagcucuuugagaacuuc

SEQ ID NO: 1788436 - RNA, 19 nt, Homo sapiens
  misc_RNA (1)...(19): siRNA sense strand
ggugauugcuguguuugag

SEQ ID NO: 1788437 - RNA, 19 nt, Homo sapiens
  misc_RNA (1)...(19): siRNA sense strand
ggcauggccaaucccuuua

SEQ ID NO: 1788438 - RNA, 19 nt, Homo sapiens
  misc_RNA (1)...(19): siRNA sense strand
aaacauccuggccaucuug

SEQ ID NO: 1788439 - RNA, 19 nt, Homo sapiens
  misc_RNA (1)...(19): siRNA sense strand
cucuugaaaucuaugagua

SEQ ID NO: 1788440 - RNA, 19 nt, Homo sapiens
  misc_RNA (1)...(19): siRNA sense strand
ucaguuaugaugacaagug

SEQ ID NO: 1788441 - RNA, 19 nt, Homo sapiens
  misc_RNA (1)...(19): siRNA sense strand
caguuucccugcucagcuu

SEQ ID NO: 1788442 - RNA, 19 nt, Homo sapiens
  misc_RNA (1)...(19): siRNA sense strand
caucacaggcaucuuucuu

SEQ ID NO: 1788443 - RNA, 19 nt, Homo sapiens
  misc_RNA (1)...(19): siRNA sense strand
gacuauucccuccauauca

SEQ ID NO: 1788444 - RNA, 19 nt, Homo sapiens
  misc_RNA (1)...(19): siRNA sense strand
agaagacuauucccuccau

SEQ ID NO: 1788445 - RNA, 19 nt, Homo sapiens
  misc_RNA (1)...(19): siRNA sense strand
aagguggucuugucacaca

SEQ ID NO: 1788446 - RNA, 19 nt, Homo sapiens
  misc_RNA (1)...(19): siRNA sense strand
caaguggguaucugucaug

SEQ ID NO: 1788447 - RNA, 19 nt, Homo sapiens
  misc_RNA (1)...(19): siRNA sense strand
uugaaaagccuccuuguuu

SEQ ID NO: 1788448 - RNA, 19 nt, Homo sapiens
  misc_RNA (1)...(19): siRNA sense strand
agggauccuuucaucaauu

SEQ ID NO: 1788449 - RNA, 19 nt, Homo sapiens
  misc_RNA (1)...(19): siRNA sense strand
aggcauggccaaucccuuu

SEQ ID NO: 1788450 - RNA, 19 nt, Homo sapiens
  misc_RNA (1)...(19): siRNA sense strand
ccuuguuucuugcguaaau

SEQ ID NO: 1788451 - RNA, 19 nt, Homo sapiens
  misc_RNA (1)...(19): siRNA sense strand
uaacacugcgagucacaga

SEQ ID NO: 1788452 - RNA, 19 nt, Homo sapiens
  misc_RNA (1)...(19): siRNA sense strand
gaugaccugcucacugugu

SEQ ID NO: 1788453 - RNA, 19 nt, Homo sapiens
  misc_RNA (1)...(19): siRNA sense strand
acagugcgacgccuuguug

SEQ ID NO: 1788454 - RNA, 19 nt, Homo sapiens
  misc_RNA (1)...(19): siRNA sense strand
gugaggauguaguaacacu

SEQ ID NO: 1788455 - RNA, 19 nt, Homo sapiens
  misc_RNA (1)...(19): siRNA sense strand
gaagaauccaaaaccaaaa

SEQ ID NO: 1788456 - RNA, 19 nt, Homo sapiens
  misc_RNA (1)...(19): siRNA sense strand
agacaggcauggccaaucc

SEQ ID NO: 1788457 - RNA, 19 nt, Homo sapiens
  misc_RNA (1)...(19): siRNA sense strand
cgaagaauccaaaaccaaa

SEQ ID NO: 1788458 - RNA, 19 nt, Homo sapiens
  misc_RNA (1)...(19): siRNA sense strand
uuauaaaugccaaguaugg

SEQ ID NO: 1788459 - RNA, 19 nt, Homo sapiens
  misc_RNA (1)...(19): siRNA sense strand
acuauucccuccauaucau

SEQ ID NO: 1788460 - RNA, 19 nt, Homo sapiens
  misc_RNA (1)...(19): siRNA sense strand
uaucuggauuugucucucu

SEQ ID NO: 1788461 - RNA, 19 nt, Homo sapiens
  misc_RNA (1)...(19): siRNA sense strand
gaucaucauguuucuacca

SEQ ID NO: 1788462 - RNA, 19 nt, Homo sapiens
  misc_RNA (1)...(19): siRNA sense strand
agaggcgcuucuuccagua

SEQ ID NO: 1788463 - RNA, 19 nt, Homo sapiens
  misc_RNA (1)...(19): siRNA sense strand
guauaucggaacagugaau

SEQ ID NO: 1788464 - RNA, 19 nt, Homo sapiens
  misc_RNA (1)...(19): siRNA sense strand
cuuguugccuucaccuuuc

SEQ ID NO: 1788465 - RNA, 19 nt, Homo sapiens
  misc_RNA (1)...(19): siRNA sense strand
gaaaaugcagcuucuggau

SEQ ID NO: 1788466 - RNA, 19 nt, Homo sapiens
  misc_RNA (1)...(19): siRNA sense strand
ggcgcuucuuccaguauuu

SEQ ID NO: 1788467 - RNA, 19 nt, Homo sapiens
  misc_RNA (1)...(19): siRNA sense strand
cacgcacguucaaguguga

SEQ ID NO: 1788468 - RNA, 19 nt, Homo sapiens
  misc_RNA (1)...(19): siRNA sense strand
gagccucacccuccauuuu

SEQ ID NO: 1788469 - RNA, 19 nt, Homo sapiens
  misc_RNA (1)...(19): siRNA sense strand
uuugagccuuucgcuauuu

SEQ ID NO: 1788470 - RNA, 19 nt, Homo sapiens
  misc_RNA (1)...(19): siRNA sense strand
acaggaugguagugcaaug

SEQ ID NO: 1788471 - RNA, 19 nt, Homo sapiens
  misc_RNA (1)...(19): siRNA sense strand
cuuuagggauccuuucauc

SEQ ID NO: 1788472 - RNA, 19 nt, Homo sapiens
  misc_RNA (1)...(19): siRNA sense strand
gaacagcacauggauauuu

SEQ ID NO: 1788473 - RNA, 19 nt, Homo sapiens
  misc_RNA (1)...(19): siRNA sense strand
caacaaugcccucuacuuu

SEQ ID NO: 1788474 - RNA, 19 nt, Homo sapiens
  misc_RNA (1)...(19): siRNA sense strand
ggauugagcuaaaggcauu

SEQ ID NO: 1788475 - RNA, 19 nt, Homo sapiens
  misc_RNA (1)...(19): siRNA sense strand
gaccauggcuacguucuuu

SEQ ID NO: 1788476 - RNA, 19 nt, Homo sapiens
  misc_RNA (1)...(19): siRNA sense strand
cagcugaccucuucuggaa

SEQ ID NO: 1788477 - RNA, 19 nt, Homo sapiens
  misc_RNA (1)...(19): siRNA sense strand
ugaaagcccugcucauugu

SEQ ID NO: 1788478 - RNA, 19 nt, Homo sapiens
  misc_RNA (1)...(19): siRNA sense strand
gaacgagaacuucaggauu

SEQ ID NO: 1788479 - RNA, 19 nt, Homo sapiens
  misc_RNA (1)...(19): siRNA sense strand
caaauacagugaggacauu

SEQ ID NO: 1788480 - RNA, 19 nt, Homo sapiens
  misc_RNA (1)...(19): siRNA sense strand
aaacuguggcuguguaaua

SEQ ID NO: 1788481 - RNA, 19 nt, Homo sapiens
  misc_RNA (1)...(19): siRNA sense strand
caaagggugucaucuacau

SEQ ID NO: 1788482 - RNA, 19 nt, Homo sapiens
  misc_RNA (1)...(19): siRNA sense strand
ucacaaagggugucaucua

SEQ ID NO: 1788483 - RNA, 19 nt, Homo sapiens
  misc_RNA (1)...(19): siRNA sense strand
gagcuaaaggcauuacuga

SEQ ID NO: 1788484 - RNA, 19 nt, Homo sapiens
  misc_RNA (1)...(19): siRNA sense strand
aacgagaacuucaggauug

SEQ ID NO: 1788485 - RNA, 19 nt, Homo sapiens
  misc_RNA (1)...(19): siRNA sense strand
ggugaaagcccugcucauu

SEQ ID NO: 1788486 - RNA, 19 nt, Homo sapiens
  misc_RNA (1)...(19): siRNA sense strand
uuacugagcaugugucaaa

SEQ ID NO: 1788487 - RNA, 19 nt, Homo sapiens
  misc_RNA (1)...(19): siRNA sense strand
gcaacguccuggucuguca

SEQ ID NO: 1788488 - RNA, 19 nt, Homo sapiens
  misc_RNA (1)...(19): siRNA sense strand
gcaguugccgacauaauga

SEQ ID NO: 1788489 - RNA, 19 nt, Homo sapiens
  misc_RNA (1)...(19): siRNA sense strand
ggacuuggccaccuucauc

SEQ ID NO: 1788490 - RNA, 19 nt, Homo sapiens
  misc_RNA (1)...(19): siRNA sense strand
gaacuucaggauugagcua

SEQ ID NO: 1788491 - RNA, 19 nt, Homo sapiens
  misc_RNA (1)...(19): siRNA sense strand
gugaacagcacauggauau

SEQ ID NO: 1788492 - RNA, 19 nt, Homo sapiens
  misc_RNA (1)...(19): siRNA sense strand
aagaaacuguggcugugua

SEQ ID NO: 1788493 - RNA, 19 nt, Homo sapiens
  misc_RNA (1)...(19): siRNA sense strand
gugaaagcccugcucauug

SEQ ID NO: 1788494 - RNA, 19 nt, Homo sapiens
  misc_RNA (1)...(19): siRNA sense strand
ccacagagcaguacuuugc

SEQ ID NO: 1788495 - RNA, 19 nt, Homo sapiens
  misc_RNA (1)...(19): siRNA sense strand
guaauaugauuggcgaugu

SEQ ID NO: 1788496 - RNA, 19 nt, Homo sapiens
  misc_RNA (1)...(19): siRNA sense strand
ugagccagcugaccucuuc

SEQ ID NO: 1788497 - RNA, 19 nt, Homo sapiens
  misc_RNA (1)...(19): siRNA sense strand
agaagaagaccaucaagau

SEQ ID NO: 1788498 - RNA, 19 nt, Homo sapiens
  misc_RNA (1)...(19): siRNA sense strand
cacaaagggugucaucuac

SEQ ID NO: 1788499 - RNA, 19 nt, Homo sapiens
  misc_RNA (1)...(19): siRNA sense strand
ccauugugacgaugaguua

SEQ ID NO: 1788500 - RNA, 19 nt, Homo sapiens
  misc_RNA (1)...(19): siRNA sense strand
gcuuacuccuucaucauug

SEQ ID NO: 1788501 - RNA, 19 nt, Homo sapiens
  misc_RNA (1)...(19): siRNA sense strand
ggucugucaugucaucuuc

SEQ ID NO: 1788502 - RNA, 19 nt, Homo sapiens
  misc_RNA (1)...(19): siRNA sense strand
gaacccauugugacgauga

SEQ ID NO: 1788503 - RNA, 19 nt, Homo sapiens
  misc_RNA (1)...(19): siRNA sense strand
gaccacagagcaguacuuu

SEQ ID NO: 1788504 - RNA, 19 nt, Homo sapiens
  misc_RNA (1)...(19): siRNA sense strand
guccuggucugucauguca

SEQ ID NO: 1788505 - RNA, 19 nt, Homo sapiens
  misc_RNA (1)...(19): siRNA sense strand
gggcuccccuugccaauaa

SEQ ID NO: 1788506 - RNA, 19 nt, Homo sapiens
  misc_RNA (1)...(19): siRNA sense strand
uaauaugauuggcgaugug

SEQ ID NO: 1788507 - RNA, 19 nt, Homo sapiens
  misc_RNA (1)...(19): siRNA sense strand
acaaugcccucuacuuugc

SEQ ID NO: 1788508 - RNA, 19 nt, Homo sapiens
  misc_RNA (1)...(19): siRNA sense strand
gcaccaacaaugcccucua

SEQ ID NO: 1788509 - RNA, 19 nt, Homo sapiens
  misc_RNA (1)...(19): siRNA sense strand
ccaacaaugcccucuacuu

SEQ ID NO: 1788510 - RNA, 19 nt, Homo sapiens
  misc_RNA (1)...(19): siRNA sense strand
aacagcacauggauauuug

SEQ ID NO: 1788511 - RNA, 19 nt, Homo sapiens
  misc_RNA (1)...(19): siRNA sense strand
gcaaggucauccgcaccaa

SEQ ID NO: 1788512 - RNA, 19 nt, Homo sapiens
  misc_RNA (1)...(19): siRNA sense strand
ccucgcacuucuucucuug

SEQ ID NO: 1788513 - RNA, 19 nt, Homo sapiens
  misc_RNA (1)...(19): siRNA sense strand
cuucaucauugucuucuca

SEQ ID NO: 1788514 - RNA, 19 nt, Homo sapiens
  misc_RNA (1)...(19): siRNA sense strand
caccaacaaugcccucuac

SEQ ID NO: 1788515 - RNA, 19 nt, Homo sapiens
  misc_RNA (1)...(19): siRNA sense strand
ucacuuugguucgcuuugu

SEQ ID NO: 1788516 - RNA, 19 nt, Homo sapiens
  misc_RNA (1)...(19): siRNA sense strand
aagaagaagaccaucaaga

SEQ ID NO: 1788517 - RNA, 19 nt, Homo sapiens
  misc_RNA (1)...(19): siRNA sense strand
ucaaauacagugaggacau

SEQ ID NO: 1788518 - RNA, 19 nt, Homo sapiens
  misc_RNA (1)...(19): siRNA sense strand
ggaccauggcuacguucuu

SEQ ID NO: 1788519 - RNA, 19 nt, Homo sapiens
  misc_RNA (1)...(19): siRNA sense strand
ccaccuucauccugcucua

SEQ ID NO: 1788520 - RNA, 19 nt, Homo sapiens
  misc_RNA (1)...(19): siRNA sense strand
ccaccagccucuucaucgu

SEQ ID NO: 1788521 - RNA, 19 nt, Homo sapiens
  misc_RNA (1)...(19): siRNA sense strand
uaaaggcauuacugagcau

SEQ ID NO: 1788522 - RNA, 19 nt, Homo sapiens
  misc_RNA (1)...(19): siRNA sense strand
gcuggugguaguccucuuu

SEQ ID NO: 1788523 - RNA, 19 nt, Homo sapiens
  misc_RNA (1)...(19): siRNA sense strand
aacuguggcuguguaauau

SEQ ID NO: 1788524 - RNA, 19 nt, Homo sapiens
  misc_RNA (1)...(19): siRNA sense strand
aacaaugcccucuacuuug

SEQ ID NO: 1788525 - RNA, 19 nt, Homo sapiens
  misc_RNA (1)...(19): siRNA sense strand
ggcuuacuccuucaucauu

SEQ ID NO: 1788526 - RNA, 19 nt, Homo sapiens
  misc_RNA (1)...(19): siRNA sense strand
guggcuguguaauaugauu

SEQ ID NO: 1788527 - RNA, 19 nt, Homo sapiens
  misc_RNA (1)...(19): siRNA sense strand
cuguggcuguguaauauga

SEQ ID NO: 1788528 - RNA, 19 nt, Homo sapiens
  misc_RNA (1)...(19): siRNA sense strand
ggucauccgcaccaacaau

SEQ ID NO: 1788529 - RNA, 19 nt, Homo sapiens
  misc_RNA (1)...(19): siRNA sense strand
acugcuggcugaacgagaa

SEQ ID NO: 1788530 - RNA, 19 nt, Homo sapiens
  misc_RNA (1)...(19): siRNA sense strand
uggaacaacuacaccuucu

SEQ ID NO: 1788531 - RNA, 19 nt, Homo sapiens
  misc_RNA (1)...(19): siRNA sense strand
gaaagcccugcucauugug

SEQ ID NO: 1788532 - RNA, 19 nt, Homo sapiens
  misc_RNA (1)...(19): siRNA sense strand
ucugucaugucaucuucaa

SEQ ID NO: 1788533 - RNA, 19 nt, Homo sapiens
  misc_RNA (1)...(19): siRNA sense strand
ucgcacuucuucucuugga

SEQ ID NO: 1788534 - RNA, 19 nt, Homo sapiens
  misc_RNA (1)...(19): siRNA sense strand
acgagaacuucaggauuga

SEQ ID NO: 1788535 - RNA, 19 nt, Homo sapiens
  misc_RNA (1)...(19): siRNA sense strand
cccaaugccucgcacuucu

SEQ ID NO: 1788536 - RNA, 19 nt, Homo sapiens
  misc_RNA (1)...(19): siRNA sense strand
guggcuuacuccuucauca

SEQ ID NO: 1788537 - RNA, 19 nt, Homo sapiens
  misc_RNA (1)...(19): siRNA sense strand
gccaccaggucaucaugca

SEQ ID NO: 1788538 - RNA, 19 nt, Homo sapiens
  misc_RNA (1)...(19): siRNA sense strand
caagaaacuguggcugugu

SEQ ID NO: 1788539 - RNA, 19 nt, Homo sapiens
  misc_RNA (1)...(19): siRNA sense strand
ccuggucugucaugucauc

SEQ ID NO: 1788540 - RNA, 19 nt, Homo sapiens
  misc_RNA (1)...(19): siRNA sense strand
aggguggccuggacagaga

SEQ ID NO: 1788541 - RNA, 19 nt, Homo sapiens
  misc_RNA (1)...(19): siRNA sense strand
gaaacuguggcuguguaau

SEQ ID NO: 1788542 - RNA, 19 nt, Homo sapiens
  misc_RNA (1)...(19): siRNA sense strand
ucuggaccauggcuacguu

SEQ ID NO: 1788543 - RNA, 19 nt, Homo sapiens
  misc_RNA (1)...(19): siRNA sense strand
gcaagcaggcgaaucauaa

SEQ ID NO: 1788544 - RNA, 19 nt, Homo sapiens
  misc_RNA (1)...(19): siRNA sense strand
uggcugagauggagaaauu

SEQ ID NO: 1788545 - RNA, 19 nt, Homo sapiens
  misc_RNA (1)...(19): siRNA sense strand
gaagcaagcaggcgaauca

SEQ ID NO: 1788546 - RNA, 19 nt, Homo sapiens
  misc_RNA (1)...(19): siRNA sense strand
ccacugccuuccaaagaaa

SEQ ID NO: 1788547 - RNA, 19 nt, Homo sapiens
  misc_RNA (1)...(19): siRNA sense strand
ccaaagaaacgauugaaca

SEQ ID NO: 1788548 - RNA, 19 nt, Homo sapiens
  misc_RNA (1)...(19): siRNA sense strand
agacagagacgcaagagaa

SEQ ID NO: 1788549 - RNA, 19 nt, Homo sapiens
  misc_RNA (1)...(19): siRNA sense strand
gacagagacgcaagagaaa

SEQ ID NO: 1788550 - RNA, 19 nt, Homo sapiens
  misc_RNA (1)...(19): siRNA sense strand
gagauggagaaauucgaua

SEQ ID NO: 1788551 - RNA, 19 nt, Homo sapiens
  misc_RNA (1)...(19): siRNA sense strand
caaagaaacgauugaacag

SEQ ID NO: 1788552 - RNA, 19 nt, Homo sapiens
  misc_RNA (1)...(19): siRNA sense strand
agucgaaacugaagaagac

SEQ ID NO: 1788553 - RNA, 19 nt, Homo sapiens
  misc_RNA (1)...(19): siRNA sense strand
uggagaaauucgauaaguc

SEQ ID NO: 1788554 - RNA, 19 nt, Homo sapiens
  misc_RNA (1)...(19): siRNA sense strand
aaacugaagaagacagaga

SEQ ID NO: 1788555 - RNA, 19 nt, Homo sapiens
  misc_RNA (1)...(19): siRNA sense strand
agauggagaaauucgauaa

SEQ ID NO: 1788556 - RNA, 19 nt, Homo sapiens
  misc_RNA (1)...(19): siRNA sense strand
uccacugccuuccaaagaa

SEQ ID NO: 1788557 - RNA, 19 nt, Homo sapiens
  misc_RNA (1)...(19): siRNA sense strand
cgaaacugaagaagacaga

SEQ ID NO: 1788558 - RNA, 19 nt, Homo sapiens
  misc_RNA (1)...(19): siRNA sense strand
gauaagucgaaacugaaga

SEQ ID NO: 1788559 - RNA, 19 nt, Homo sapiens
  misc_RNA (1)...(19): siRNA sense strand
gaagacagagacgcaagag

SEQ ID NO: 1788560 - RNA, 19 nt, Homo sapiens
  misc_RNA (1)...(19): siRNA sense strand
cgauugaacaggagaagca

SEQ ID NO: 1788561 - RNA, 19 nt, Homo sapiens
  misc_RNA (1)...(19): siRNA sense strand
gauggagaaauucgauaag

SEQ ID NO: 1788562 - RNA, 19 nt, Homo sapiens
  misc_RNA (1)...(19): siRNA sense strand
gacagagacucaagagaaa

SEQ ID NO: 1788563 - RNA, 19 nt, Homo sapiens
  misc_RNA (1)...(19): siRNA sense strand
uggcugagaucgagaaauu

SEQ ID NO: 1788564 - RNA, 19 nt, Homo sapiens
  misc_RNA (1)...(19): siRNA sense strand
agacagagacucaagagaa

SEQ ID NO: 1788565 - RNA, 19 nt, Homo sapiens
  misc_RNA (1)...(19): siRNA sense strand
ccacugccuuccaaagaaa

SEQ ID NO: 1788566 - RNA, 19 nt, Homo sapiens
  misc_RNA (1)...(19): siRNA sense strand
ccaaagaaacgacugaaca

SEQ ID NO: 1788567 - RNA, 19 nt, Homo sapiens
  misc_RNA (1)...(19): siRNA sense strand
gaagcaagcaggcaaaucg

SEQ ID NO: 1788568 - RNA, 19 nt, Homo sapiens
  misc_RNA (1)...(19): siRNA sense strand
ugaagaagacagagacuca

SEQ ID NO: 1788569 - RNA, 19 nt, Homo sapiens
  misc_RNA (1)...(19): siRNA sense strand
ggagaagcaagcaggcaaa

SEQ ID NO: 1788570 - RNA, 19 nt, Homo sapiens
  misc_RNA (1)...(19): siRNA sense strand
gaagacagagacucaagag

SEQ ID NO: 1788571 - RNA, 19 nt, Homo sapiens
  misc_RNA (1)...(19): siRNA sense strand
gaagaagacagagacucaa

SEQ ID NO: 1788572 - RNA, 19 nt, Homo sapiens
  misc_RNA (1)...(19): siRNA sense strand
cgacugaacaggagaagca

SEQ ID NO: 1788573 - RNA, 19 nt, Homo sapiens
  misc_RNA (1)...(19): siRNA sense strand
caaagaaacgacugaacag

SEQ ID NO: 1788574 - RNA, 19 nt, Homo sapiens
  misc_RNA (1)...(19): siRNA sense strand
agucgaaacugaagaagac

SEQ ID NO: 1788575 - RNA, 19 nt, Homo sapiens
  misc_RNA (1)...(19): siRNA sense strand
aaacugaagaagacagaga

SEQ ID NO: 1788576 - RNA, 19 nt, Homo sapiens
  misc_RNA (1)...(19): siRNA sense strand
uccacugccuuccaaagaa

SEQ ID NO: 1788577 - RNA, 19 nt, Homo sapiens
  misc_RNA (1)...(19): siRNA sense strand
cgaaacugaagaagacaga

SEQ ID NO: 1788578 - RNA, 19 nt, Homo sapiens
  misc_RNA (1)...(19): siRNA sense strand
gauaagucgaaacugaaga

SEQ ID NO: 1788579 - RNA, 19 nt, Homo sapiens
  misc_RNA (1)...(19): siRNA sense strand
gagaagcaagcaggcaaau

SEQ ID NO: 1788580 - RNA, 19 nt, Homo sapiens
  misc_RNA (1)...(19): siRNA sense strand
agacagagaugcaagagaa

SEQ ID NO: 1788581 - RNA, 19 nt, Homo sapiens
  misc_RNA (1)...(19): siRNA sense strand
uggcugagauugagaaauu

SEQ ID NO: 1788582 - RNA, 19 nt, Homo sapiens
  misc_RNA (1)...(19): siRNA sense strand
gcaagcaagcgaaucguaa

SEQ ID NO: 1788583 - RNA, 19 nt, Homo sapiens
  misc_RNA (1)...(19): siRNA sense strand
ccacugccuuccaaagaaa

SEQ ID NO: 1788584 - RNA, 19 nt, Homo sapiens
  misc_RNA (1)...(19): siRNA sense strand
ccaaagaaacgauugaaca

SEQ ID NO: 1788585 - RNA, 19 nt, Homo sapiens
  misc_RNA (1)...(19): siRNA sense strand
gaagaagacagagaugcaa

SEQ ID NO: 1788586 - RNA, 19 nt, Homo sapiens
  misc_RNA (1)...(19): siRNA sense strand
gagauugagaaauucgaua

SEQ ID NO: 1788587 - RNA, 19 nt, Homo sapiens
  misc_RNA (1)...(19): siRNA sense strand
gaacaggagaagcaagcaa

SEQ ID NO: 1788588 - RNA, 19 nt, Homo sapiens
  misc_RNA (1)...(19): siRNA sense strand
gaagcaagcaagcgaaucg

SEQ ID NO: 1788589 - RNA, 19 nt, Homo sapiens
  misc_RNA (1)...(19): siRNA sense strand
caaagaaacgauugaacag

SEQ ID NO: 1788590 - RNA, 19 nt, Homo sapiens
  misc_RNA (1)...(19): siRNA sense strand
cgauauggcugagauugag

SEQ ID NO: 1788591 - RNA, 19 nt, Homo sapiens
  misc_RNA (1)...(19): siRNA sense strand
agucgaaacugaagaagac

SEQ ID NO: 1788592 - RNA, 19 nt, Homo sapiens
  misc_RNA (1)...(19): siRNA sense strand
gagaagcaagcaagcgaau

SEQ ID NO: 1788593 - RNA, 19 nt, Homo sapiens
  misc_RNA (1)...(19): siRNA sense strand
aaacugaagaagacagaga

SEQ ID NO: 1788594 - RNA, 19 nt, Homo sapiens
  misc_RNA (1)...(19): siRNA sense strand
uccacugccuuccaaagaa

SEQ ID NO: 1788595 - RNA, 19 nt, Homo sapiens
  misc_RNA (1)...(19): siRNA sense strand
cgaaacugaagaagacaga

SEQ ID NO: 1788596 - RNA, 19 nt, Homo sapiens
  misc_RNA (1)...(19): siRNA sense strand
gaagacagagaugcaagag

SEQ ID NO: 1788597 - RNA, 19 nt, Homo sapiens
  misc_RNA (1)...(19): siRNA sense strand
ugaagaagacagagaugca

SEQ ID NO: 1788598 - RNA, 19 nt, Homo sapiens
  misc_RNA (1)...(19): siRNA sense strand
gauaagucgaaacugaaga

SEQ ID NO: 1788599 - RNA, 19 nt, Homo sapiens
  misc_RNA (1)...(19): siRNA sense strand
gacagagaugcaagagaaa

SEQ ID NO: 1788600 - RNA, 19 nt, Homo sapiens
  misc_RNA (1)...(19): siRNA sense strand
uugagaaauucgauaaguc

SEQ ID NO: 1788601 - RNA, 19 nt, Homo sapiens
  misc_RNA (1)...(19): siRNA sense strand
ccgauauggcugagauuga

SEQ ID NO: 1788602 - RNA, 19 nt, Homo sapiens
  misc_RNA (1)...(19): siRNA sense strand
cgauugaacaggagaagca

SEQ ID NO: 1788603 - RNA, 19 nt, Homo sapiens
  misc_RNA (1)...(19): siRNA sense strand
gaaggauucuuaucacaua

SEQ ID NO: 1788604 - RNA, 19 nt, Homo sapiens
  misc_RNA (1)...(19): siRNA sense strand
agaagaagcugcagaagaa

SEQ ID NO: 1788605 - RNA, 19 nt, Homo sapiens
  misc_RNA (1)...(19): siRNA sense strand
cagaagaaaugaagaaagu

SEQ ID NO: 1788606 - RNA, 19 nt, Homo sapiens
  misc_RNA (1)...(19): siRNA sense strand
gaagaaaugaagaaaguga

SEQ ID NO: 1788607 - RNA, 19 nt, Homo sapiens
  misc_RNA (1)...(19): siRNA sense strand
aaucuaaguuccaaccaua

SEQ ID NO: 1788608 - RNA, 19 nt, Homo sapiens
  misc_RNA (1)...(19): siRNA sense strand
gagaccaucaaaugaauua

SEQ ID NO: 1788609 - RNA, 19 nt, Homo sapiens
  misc_RNA (1)...(19): siRNA sense strand
cagaauacguuuagcuuca

SEQ ID NO: 1788610 - RNA, 19 nt, Homo sapiens
  misc_RNA (1)...(19): siRNA sense strand
ggaggagaccaucaaauga

SEQ ID NO: 1788611 - RNA, 19 nt, Homo sapiens
  misc_RNA (1)...(19): siRNA sense strand
ugaagaaagugaugaugau

SEQ ID NO: 1788612 - RNA, 19 nt, Homo sapiens
  misc_RNA (1)...(19): siRNA sense strand
gaggagaccaucaaaugaa

SEQ ID NO: 1788613 - RNA, 19 nt, Homo sapiens
  misc_RNA (1)...(19): siRNA sense strand
gaauacguuuagcuucaaa

SEQ ID NO: 1788614 - RNA, 19 nt, Homo sapiens
  misc_RNA (1)...(19): siRNA sense strand
gaaagaaagaagacauugu

SEQ ID NO: 1788615 - RNA, 19 nt, Homo sapiens
  misc_RNA (1)...(19): siRNA sense strand
gaaaugaagaaagugauga

SEQ ID NO: 1788616 - RNA, 19 nt, Homo sapiens
  misc_RNA (1)...(19): siRNA sense strand
gaagaaagugaugaugauu

SEQ ID NO: 1788617 - RNA, 19 nt, Homo sapiens
  misc_RNA (1)...(19): siRNA sense strand
ggaaagaaagaagacauug

SEQ ID NO: 1788618 - RNA, 19 nt, Homo sapiens
  misc_RNA (1)...(19): siRNA sense strand
agacagugaaggauucuua

SEQ ID NO: 1788619 - RNA, 19 nt, Homo sapiens
  misc_RNA (1)...(19): siRNA sense strand
ccucagaagcaccagaaua

SEQ ID NO: 1788620 - RNA, 19 nt, Homo sapiens
  misc_RNA (1)...(19): siRNA sense strand
uagaagaagcugcagaaga

SEQ ID NO: 1788621 - RNA, 19 nt, Homo sapiens
  misc_RNA (1)...(19): siRNA sense strand
cauagaagaagcugcagaa

SEQ ID NO: 1788622 - RNA, 19 nt, Homo sapiens
  misc_RNA (1)...(19): siRNA sense strand
ccaugugccugugaacuug

SEQ ID NO: 1788623 - RNA, 19 nt, Homo sapiens
  misc_RNA (1)...(19): siRNA sense strand
gcagaagaaaugaagaaag

SEQ ID NO: 1788624 - RNA, 19 nt, Homo sapiens
  misc_RNA (1)...(19): siRNA sense strand
gaagaagcugcagaagaaa

SEQ ID NO: 1788625 - RNA, 19 nt, Homo sapiens
  misc_RNA (1)...(19): siRNA sense strand
ggagaccaucaaaugaauu

SEQ ID NO: 1788626 - RNA, 19 nt, Homo sapiens
  misc_RNA (1)...(19): siRNA sense strand
aagaagacauuguuauucc

SEQ ID NO: 1788627 - RNA, 19 nt, Homo sapiens
  misc_RNA (1)...(19): siRNA sense strand
gaagcaccagaauacguuu

SEQ ID NO: 1788628 - RNA, 19 nt, Homo sapiens
  misc_RNA (1)...(19): siRNA sense strand
caaaagacagugaaggauu

SEQ ID NO: 1788629 - RNA, 19 nt, Homo sapiens
  misc_RNA (1)...(19): siRNA sense strand
aggaggagaccaucaaaug

SEQ ID NO: 1788630 - RNA, 19 nt, Homo sapiens
  misc_RNA (1)...(19): siRNA sense strand
agaauacguuuagcuucaa

SEQ ID NO: 1788631 - RNA, 19 nt, Homo sapiens
  misc_RNA (1)...(19): siRNA sense strand
uaaucuaaguuccaaccau

SEQ ID NO: 1788632 - RNA, 19 nt, Homo sapiens
  misc_RNA (1)...(19): siRNA sense strand
cagugaaggauucuuauca

SEQ ID NO: 1788633 - RNA, 19 nt, Homo sapiens
  misc_RNA (1)...(19): siRNA sense strand
gaccucagaagcaccagaa

SEQ ID NO: 1788634 - RNA, 19 nt, Homo sapiens
  misc_RNA (1)...(19): siRNA sense strand
cgcaaaauguggaaagaaa

SEQ ID NO: 1788635 - RNA, 19 nt, Homo sapiens
  misc_RNA (1)...(19): siRNA sense strand
agaagcaccagaauacguu

SEQ ID NO: 1788636 - RNA, 19 nt, Homo sapiens
  misc_RNA (1)...(19): siRNA sense strand
gccaugugccugugaacuu

SEQ ID NO: 1788637 - RNA, 19 nt, Homo sapiens
  misc_RNA (1)...(19): siRNA sense strand
aaaagacagugaaggauuc

SEQ ID NO: 1788638 - RNA, 19 nt, Homo sapiens
  misc_RNA (1)...(19): siRNA sense strand
aggagaccaucaaaugaau

SEQ ID NO: 1788639 - RNA, 19 nt, Homo sapiens
  misc_RNA (1)...(19): siRNA sense strand
gaagcugcagaagaaauga

SEQ ID NO: 1788640 - RNA, 19 nt, Homo sapiens
  misc_RNA (1)...(19): siRNA sense strand
uggaaagaaagaagacauu

SEQ ID NO: 1788641 - RNA, 19 nt, Homo sapiens
  misc_RNA (1)...(19): siRNA sense strand
gacagugaaggauucuuau

SEQ ID NO: 1788642 - RNA, 19 nt, Homo sapiens
  misc_RNA (1)...(19): siRNA sense strand
gaaagugaugaugauuuag

SEQ ID NO: 1788643 - RNA, 19 nt, Homo sapiens
  misc_RNA (1)...(19): siRNA sense strand
ugaaggauucuuaucacau

SEQ ID NO: 1788644 - RNA, 19 nt, Homo sapiens
  misc_RNA (1)...(19): siRNA sense strand
agaaaugaagaaagugaug

SEQ ID NO: 1788645 - RNA, 19 nt, Homo sapiens
  misc_RNA (1)...(19): siRNA sense strand
acauuguuauuccguugaa

SEQ ID NO: 1788646 - RNA, 19 nt, Homo sapiens
  misc_RNA (1)...(19): siRNA sense strand
augaagaaagugaugauga

SEQ ID NO: 1788647 - RNA, 19 nt, Homo sapiens
  misc_RNA (1)...(19): siRNA sense strand
agaagcugcagaagaaaug

SEQ ID NO: 1788648 - RNA, 19 nt, Homo sapiens
  misc_RNA (1)...(19): siRNA sense strand
caaaauguggaaagaaaga

SEQ ID NO: 1788649 - RNA, 19 nt, Homo sapiens
  misc_RNA (1)...(19): siRNA sense strand
gacauuguuauuccguuga

SEQ ID NO: 1788650 - RNA, 19 nt, Homo sapiens
  misc_RNA (1)...(19): siRNA sense strand
cugcagaagaaaugaagaa

SEQ ID NO: 1788651 - RNA, 19 nt, Homo sapiens
  misc_RNA (1)...(19): siRNA sense strand
cagaauacguuuagcuuca

SEQ ID NO: 1788652 - RNA, 19 nt, Homo sapiens
  misc_RNA (1)...(19): siRNA sense strand
gaauacguuuagcuucaaa

SEQ ID NO: 1788653 - RNA, 19 nt, Homo sapiens
  misc_RNA (1)...(19): siRNA sense strand
ccucagaagcaccagaaua

SEQ ID NO: 1788654 - RNA, 19 nt, Homo sapiens
  misc_RNA (1)...(19): siRNA sense strand
gaagcaccagaauacguuu

SEQ ID NO: 1788655 - RNA, 19 nt, Homo sapiens
  misc_RNA (1)...(19): siRNA sense strand
agaauacguuuagcuucaa

SEQ ID NO: 1788656 - RNA, 19 nt, Homo sapiens
  misc_RNA (1)...(19): siRNA sense strand
gaccucagaagcaccagaa

SEQ ID NO: 1788657 - RNA, 19 nt, Homo sapiens
  misc_RNA (1)...(19): siRNA sense strand
agaagcaccagaauacguu

SEQ ID NO: 1788658 - RNA, 19 nt, Homo sapiens
  misc_RNA (1)...(19): siRNA sense strand
gaagauggccugacuguua

SEQ ID NO: 1788659 - RNA, 19 nt, Homo sapiens
  misc_RNA (1)...(19): siRNA sense strand
uaaauuaucugcccucaua

SEQ ID NO: 1788660 - RNA, 19 nt, Homo sapiens
  misc_RNA (1)...(19): siRNA sense strand
ugaagaaacuggagaauuu

SEQ ID NO: 1788661 - RNA, 19 nt, Homo sapiens
  misc_RNA (1)...(19): siRNA sense strand
guacugaccucucuacuuu

SEQ ID NO: 1788662 - RNA, 19 nt, Homo sapiens
  misc_RNA (1)...(19): siRNA sense strand
ggucgaagaucuccuauuu

SEQ ID NO: 1788663 - RNA, 19 nt, Homo sapiens
  misc_RNA (1)...(19): siRNA sense strand
ggacacuccuuccauaaua

SEQ ID NO: 1788664 - RNA, 19 nt, Homo sapiens
  misc_RNA (1)...(19): siRNA sense strand
ggaaagaugugaacgagaa

SEQ ID NO: 1788665 - RNA, 19 nt, Homo sapiens
  misc_RNA (1)...(19): siRNA sense strand
gaagagcucucagaaguuu

SEQ ID NO: 1788666 - RNA, 19 nt, Homo sapiens
  misc_RNA (1)...(19): siRNA sense strand
gaaauucacagcaucaaua

SEQ ID NO: 1788667 - RNA, 19 nt, Homo sapiens
  misc_RNA (1)...(19): siRNA sense strand
gaacaggaauccagacaga

SEQ ID NO: 1788668 - RNA, 19 nt, Homo sapiens
  misc_RNA (1)...(19): siRNA sense strand
uaagugcucugcccaaaua

SEQ ID NO: 1788669 - RNA, 19 nt, Homo sapiens
  misc_RNA (1)...(19): siRNA sense strand
ucaaauagcugccaaccaa

SEQ ID NO: 1788670 - RNA, 19 nt, Homo sapiens
  misc_RNA (1)...(19): siRNA sense strand
gcaugaaucuuucucacua

SEQ ID NO: 1788671 - RNA, 19 nt, Homo sapiens
  misc_RNA (1)...(19): siRNA sense strand
ggaagaauauccucugaau

SEQ ID NO: 1788672 - RNA, 19 nt, Homo sapiens
  misc_RNA (1)...(19): siRNA sense strand
ggaaaugcaugucugaaug

SEQ ID NO: 1788673 - RNA, 19 nt, Homo sapiens
  misc_RNA (1)...(19): siRNA sense strand
gaagaaaucaucuacaaga

SEQ ID NO: 1788674 - RNA, 19 nt, Homo sapiens
  misc_RNA (1)...(19): siRNA sense strand
ggaagcaucucuccauaug

SEQ ID NO: 1788675 - RNA, 19 nt, Homo sapiens
  misc_RNA (1)...(19): siRNA sense strand
ucagaugccuucagcuuua

SEQ ID NO: 1788676 - RNA, 19 nt, Homo sapiens
  misc_RNA (1)...(19): siRNA sense strand
ucacagaguuugagcuuaa

SEQ ID NO: 1788677 - RNA, 19 nt, Homo sapiens
  misc_RNA (1)...(19): siRNA sense strand
ggagagcacuggccuaugu

SEQ ID NO: 1788678 - RNA, 19 nt, Homo sapiens
  misc_RNA (1)...(19): siRNA sense strand
gaaaugaaguucuccacau

SEQ ID NO: 1788679 - RNA, 19 nt, Homo sapiens
  misc_RNA (1)...(19): siRNA sense strand
gaagaagaguuugagauug

SEQ ID NO: 1788680 - RNA, 19 nt, Homo sapiens
  misc_RNA (1)...(19): siRNA sense strand
gauaagcaauucuucuuug

SEQ ID NO: 1788681 - RNA, 19 nt, Homo sapiens
  misc_RNA (1)...(19): siRNA sense strand
gaagaucuccuauuucaug

SEQ ID NO: 1788682 - RNA, 19 nt, Homo sapiens
  misc_RNA (1)...(19): siRNA sense strand
caacgaugaugacguguuu

SEQ ID NO: 1788683 - RNA, 19 nt, Homo sapiens
  misc_RNA (1)...(19): siRNA sense strand
ugaaagauaucuaccagaa

SEQ ID NO: 1788684 - RNA, 19 nt, Homo sapiens
  misc_RNA (1)...(19): siRNA sense strand
ucucagaaguuuccaauuu

SEQ ID NO: 1788685 - RNA, 19 nt, Homo sapiens
  misc_RNA (1)...(19): siRNA sense strand
ggaagcugcugcccaguuu

SEQ ID NO: 1788686 - RNA, 19 nt, Homo sapiens
  misc_RNA (1)...(19): siRNA sense strand
ugaagaagcugcauaccaa

SEQ ID NO: 1788687 - RNA, 19 nt, Homo sapiens
  misc_RNA (1)...(19): siRNA sense strand
aagaagaucuacuggguua

SEQ ID NO: 1788688 - RNA, 19 nt, Homo sapiens
  misc_RNA (1)...(19): siRNA sense strand
cgaaggcgcuugugucuau

SEQ ID NO: 1788689 - RNA, 19 nt, Homo sapiens
  misc_RNA (1)...(19): siRNA sense strand
ggaugaagaucuacacaga

SEQ ID NO: 1788690 - RNA, 19 nt, Homo sapiens
  misc_RNA (1)...(19): siRNA sense strand
gaccauggguucuuucuga

SEQ ID NO: 1788691 - RNA, 19 nt, Homo sapiens
  misc_RNA (1)...(19): siRNA sense strand
ggacuggucuuggaugaaa

SEQ ID NO: 1788692 - RNA, 19 nt, Homo sapiens
  misc_RNA (1)...(19): siRNA sense strand
caaaggugcuaaagucaaa

SEQ ID NO: 1788693 - RNA, 19 nt, Homo sapiens
  misc_RNA (1)...(19): siRNA sense strand
gaauuugacuugcagcuau

SEQ ID NO: 1788694 - RNA, 19 nt, Homo sapiens
  misc_RNA (1)...(19): siRNA sense strand
gcacgucugcuccaauuua

SEQ ID NO: 1788695 - RNA, 19 nt, Homo sapiens
  misc_RNA (1)...(19): siRNA sense strand
ggaagaaguuaccaaggaa

SEQ ID NO: 1788696 - RNA, 19 nt, Homo sapiens
  misc_RNA (1)...(19): siRNA sense strand
ggaagaagaguuugagauu

SEQ ID NO: 1788697 - RNA, 19 nt, Homo sapiens
  misc_RNA (1)...(19): siRNA sense strand
ccaaaugucuguguagaaa

SEQ ID NO: 1788698 - RNA, 19 nt, Homo sapiens
  misc_RNA (1)...(19): siRNA sense strand
gauaaguacuuccaugaug

SEQ ID NO: 1788699 - RNA, 19 nt, Homo sapiens
  misc_RNA (1)...(19): siRNA sense strand
ugacagauauugacucaga

SEQ ID NO: 1788700 - RNA, 19 nt, Homo sapiens
  misc_RNA (1)...(19): siRNA sense strand
caauaaagccacuggauuu

SEQ ID NO: 1788701 - RNA, 19 nt, Homo sapiens
  misc_RNA (1)...(19): siRNA sense strand
ccaagauccuaccaaguua

SEQ ID NO: 1788702 - RNA, 19 nt, Homo sapiens
  misc_RNA (1)...(19): siRNA sense strand
gcacgugccucuauaugug

SEQ ID NO: 1788703 - RNA, 19 nt, Homo sapiens
  misc_RNA (1)...(19): siRNA sense strand
ggagggagcuuugcuuuua

SEQ ID NO: 1788704 - RNA, 19 nt, Homo sapiens
  misc_RNA (1)...(19): siRNA sense strand
gaagaaacuggagaauuua

SEQ ID NO: 1788705 - RNA, 19 nt, Homo sapiens
  misc_RNA (1)...(19): siRNA sense strand
guggauggauuuacucuaa

SEQ ID NO: 1788706 - RNA, 19 nt, Homo sapiens
  misc_RNA (1)...(19): siRNA sense strand
ugaaauaccuggaugucaa

SEQ ID NO: 1788707 - RNA, 19 nt, Homo sapiens
  misc_RNA (1)...(19): siRNA sense strand
ggaagaccaucacagaguu

SEQ ID NO: 1788708 - RNA, 19 nt, Homo sapiens
  misc_RNA (1)...(19): siRNA sense strand
gaucugacuucacgaaaug

SEQ ID NO: 1788709 - RNA, 19 nt, Homo sapiens
  misc_RNA (1)...(19): siRNA sense strand
gaagguaguugcacagagu

SEQ ID NO: 1788710 - RNA, 19 nt, Homo sapiens
  misc_RNA (1)...(19): siRNA sense strand
gaagccaaguggaaagauu

SEQ ID NO: 1788711 - RNA, 19 nt, Homo sapiens
  misc_RNA (1)...(19): siRNA sense strand
agaaauggauuacaaagga

SEQ ID NO: 1788712 - RNA, 19 nt, Homo sapiens
  misc_RNA (1)...(19): siRNA sense strand
gaacaguauugcaccuuga

SEQ ID NO: 1788713 - RNA, 19 nt, Homo sapiens
  misc_RNA (1)...(19): siRNA sense strand
ggacaaggcuggccguuuu

SEQ ID NO: 1788714 - RNA, 19 nt, Homo sapiens
  misc_RNA (1)...(19): siRNA sense strand
gggaauggcaugaaucuuu

SEQ ID NO: 1788715 - RNA, 19 nt, Homo sapiens
  misc_RNA (1)...(19): siRNA sense strand
caaccaaccugaucaccaa

SEQ ID NO: 1788716 - RNA, 19 nt, Homo sapiens
  misc_RNA (1)...(19): siRNA sense strand
gagcaccacucucauuuca

SEQ ID NO: 1788717 - RNA, 19 nt, Homo sapiens
  misc_RNA (1)...(19): siRNA sense strand
ccaguuguguauucacuua

SEQ ID NO: 1788718 - RNA, 19 nt, Homo sapiens
  misc_RNA (1)...(19): siRNA sense strand
ccagaaagauuccugauac

SEQ ID NO: 1788719 - RNA, 19 nt, Homo sapiens
  misc_RNA (1)...(19): siRNA sense strand
gcggagaccugagcuauga

SEQ ID NO: 1788720 - RNA, 19 nt, Homo sapiens
  misc_RNA (1)...(19): siRNA sense strand
guacagaacuuaggaaugc

SEQ ID NO: 1788721 - RNA, 19 nt, Homo sapiens
  misc_RNA (1)...(19): siRNA sense strand
aaauauggcugcauugaga

SEQ ID NO: 1788722 - RNA, 19 nt, Homo sapiens
  misc_RNA (1)...(19): siRNA sense strand
ggaauggcaugaaucuuuc

SEQ ID NO: 1788723 - RNA, 19 nt, Homo sapiens
  misc_RNA (1)...(19): siRNA sense strand
ggaaaguguuguccugaau

SEQ ID NO: 1788724 - RNA, 19 nt, Homo sapiens
  misc_RNA (1)...(19): siRNA sense strand
uagcagaaauggauuacaa

SEQ ID NO: 1788725 - RNA, 19 nt, Homo sapiens
  misc_RNA (1)...(19): siRNA sense strand
gagaagguguuccuaaugg

SEQ ID NO: 1788726 - RNA, 19 nt, Homo sapiens
  misc_RNA (1)...(19): siRNA sense strand
gcacagccauaaucacuag

SEQ ID NO: 1788727 - RNA, 19 nt, Homo sapiens
  misc_RNA (1)...(19): siRNA sense strand
gaaauuccacuucacaguu

SEQ ID NO: 1788728 - RNA, 19 nt, Homo sapiens
  misc_RNA (1)...(19): siRNA sense strand
ccacauaacugcacagacu

SEQ ID NO: 1788729 - RNA, 19 nt, Homo sapiens
  misc_RNA (1)...(19): siRNA sense strand
gagaagauccgugagauga

SEQ ID NO: 1788730 - RNA, 19 nt, Homo sapiens
  misc_RNA (1)...(19): siRNA sense strand
guucaaaggugcuaaaguc

SEQ ID NO: 1788731 - RNA, 19 nt, Homo sapiens
  misc_RNA (1)...(19): siRNA sense strand
gaagaauauccucugaaua

SEQ ID NO: 1788732 - RNA, 19 nt, Homo sapiens
  misc_RNA (1)...(19): siRNA sense strand
gaauuucagcucugcaaua

SEQ ID NO: 1788733 - RNA, 19 nt, Homo sapiens
  misc_RNA (1)...(19): siRNA sense strand
gaaagacaguaaacccaau

SEQ ID NO: 1788734 - RNA, 19 nt, Homo sapiens
  misc_RNA (1)...(19): siRNA sense strand
gaagauccgugagaugaug

SEQ ID NO: 1788735 - RNA, 19 nt, Homo sapiens
  misc_RNA (1)...(19): siRNA sense strand
ggagagaagugggaagaug

SEQ ID NO: 1788736 - RNA, 19 nt, Homo sapiens
  misc_RNA (1)...(19): siRNA sense strand
gccacaagcucuuauaaca

SEQ ID NO: 1788737 - RNA, 19 nt, Homo sapiens
  misc_RNA (1)...(19): siRNA sense strand
gcagacucuucacggauua

SEQ ID NO: 1788738 - RNA, 19 nt, Homo sapiens
  misc_RNA (1)...(19): siRNA sense strand
gaaggcaacagauugauug

SEQ ID NO: 1788739 - RNA, 19 nt, Homo sapiens
  misc_RNA (1)...(19): siRNA sense strand
uaucugcccucauauggua

SEQ ID NO: 1788740 - RNA, 19 nt, Homo sapiens
  misc_RNA (1)...(19): siRNA sense strand
gaucuccuauuucauguug

SEQ ID NO: 1788741 - RNA, 19 nt, Homo sapiens
  misc_RNA (1)...(19): siRNA sense strand
ucgaagaucuccuauuuca

SEQ ID NO: 1788742 - RNA, 19 nt, Homo sapiens
  misc_RNA (1)...(19): siRNA sense strand
ugaaacauguucuggcaaa

SEQ ID NO: 1788743 - RNA, 19 nt, Homo sapiens
  misc_RNA (1)...(19): siRNA sense strand
aaacaagguucugcucuuu

SEQ ID NO: 1788744 - RNA, 19 nt, Homo sapiens
  misc_RNA (1)...(19): siRNA sense strand
ucacaucucucuuaccaau

SEQ ID NO: 1788745 - RNA, 19 nt, Homo sapiens
  misc_RNA (1)...(19): siRNA sense strand
ggaaaaggcuucuacaaca

SEQ ID NO: 1788746 - RNA, 19 nt, Homo sapiens
  misc_RNA (1)...(19): siRNA sense strand
ugacaugacugagcugauu

SEQ ID NO: 1788747 - RNA, 19 nt, Homo sapiens
  misc_RNA (1)...(19): siRNA sense strand
gaaacccuguuccuaugaa

SEQ ID NO: 1788748 - RNA, 19 nt, Homo sapiens
  misc_RNA (1)...(19): siRNA sense strand
gaacgugaauagacacuac

SEQ ID NO: 1788749 - RNA, 19 nt, Homo sapiens
  misc_RNA (1)...(19): siRNA sense strand
cauuagaguuugacaagaa

SEQ ID NO: 1788750 - RNA, 19 nt, Homo sapiens
  misc_RNA (1)...(19): siRNA sense strand
gaagacaucaauaacaaga

SEQ ID NO: 1788751 - RNA, 19 nt, Homo sapiens
  misc_RNA (1)...(19): siRNA sense strand
caaacaagguucugcucuu

SEQ ID NO: 1788752 - RNA, 19 nt, Homo sapiens
  misc_RNA (1)...(19): siRNA sense strand
guccacaccucuaaugaaa

SEQ ID NO: 1788753 - RNA, 19 nt, Homo sapiens
  misc_RNA (1)...(19): siRNA sense strand
ccucugaguugccugauuu

SEQ ID NO: 1788754 - RNA, 19 nt, Homo sapiens
  misc_RNA (1)...(19): siRNA sense strand
agucugguguggauuauua

SEQ ID NO: 1788755 - RNA, 19 nt, Homo sapiens
  misc_RNA (1)...(19): siRNA sense strand
gaagaacuguacggucuau

SEQ ID NO: 1788756 - RNA, 19 nt, Homo sapiens
  misc_RNA (1)...(19): siRNA sense strand
gcccaaauauggcugcauu

SEQ ID NO: 1788757 - RNA, 19 nt, Homo sapiens
  misc_RNA (1)...(19): siRNA sense strand
ccauaugacugcuagagaa

SEQ ID NO: 1788758 - RNA, 19 nt, Homo sapiens
  misc_RNA (1)...(19): siRNA sense strand
ggaaaggacugcagaauau

SEQ ID NO: 1788759 - RNA, 19 nt, Homo sapiens
  misc_RNA (1)...(19): siRNA sense strand
gcuaauggaucaucaguuu

SEQ ID NO: 1788760 - RNA, 19 nt, Homo sapiens
  misc_RNA (1)...(19): siRNA sense strand
cuauuaaccucgccaauua

SEQ ID NO: 1788761 - RNA, 19 nt, Homo sapiens
  misc_RNA (1)...(19): siRNA sense strand
gaagacaaauggcaauaau

SEQ ID NO: 1788762 - RNA, 19 nt, Homo sapiens
  misc_RNA (1)...(19): siRNA sense strand
ucucaacccugcacuauua

SEQ ID NO: 1788763 - RNA, 19 nt, Homo sapiens
  misc_RNA (1)...(19): siRNA sense strand
ccaagcaacuauaacaaua

SEQ ID NO: 1788764 - RNA, 19 nt, Homo sapiens
  misc_RNA (1)...(19): siRNA sense strand
gggcagugcugaaggaaua

SEQ ID NO: 1788765 - RNA, 19 nt, Homo sapiens
  misc_RNA (1)...(19): siRNA sense strand
ggacugaacccaaacauga

SEQ ID NO: 1788766 - RNA, 19 nt, Homo sapiens
  misc_RNA (1)...(19): siRNA sense strand
gaggaggccuugaagagua

SEQ ID NO: 1788767 - RNA, 19 nt, Homo sapiens
  misc_RNA (1)...(19): siRNA sense strand
ucaaauggcucuagcauca

SEQ ID NO: 1788768 - RNA, 19 nt, Homo sapiens
  misc_RNA (1)...(19): siRNA sense strand
ggaaggaaguggaggaaau

SEQ ID NO: 1788769 - RNA, 19 nt, Homo sapiens
  misc_RNA (1)...(19): siRNA sense strand
cgaguucgcuggugaagaa

SEQ ID NO: 1788770 - RNA, 19 nt, Homo sapiens
  misc_RNA (1)...(19): siRNA sense strand
gaacccaacaggcacuuua

SEQ ID NO: 1788771 - RNA, 19 nt, Homo sapiens
  misc_RNA (1)...(19): siRNA sense strand
gaaaugaaccucaguacca

SEQ ID NO: 1788772 - RNA, 19 nt, Homo sapiens
  misc_RNA (1)...(19): siRNA sense strand
caaauggacugccaaacug

SEQ ID NO: 1788773 - RNA, 19 nt, Homo sapiens
  misc_RNA (1)...(19): siRNA sense strand
caacagaacugggcuagca

SEQ ID NO: 1788774 - RNA, 19 nt, Homo sapiens
  misc_RNA (1)...(19): siRNA sense strand
gggcauggcuguugguaug

SEQ ID NO: 1788775 - RNA, 19 nt, Homo sapiens
  misc_RNA (1)...(19): siRNA sense strand
guaaacaugugggauagaa

SEQ ID NO: 1788776 - RNA, 19 nt, Homo sapiens
  misc_RNA (1)...(19): siRNA sense strand
caacaugggccucuuauca

SEQ ID NO: 1788777 - RNA, 19 nt, Homo sapiens
  misc_RNA (1)...(19): siRNA sense strand
gauaagcucuacugcuguu

SEQ ID NO: 1788778 - RNA, 19 nt, Homo sapiens
  misc_RNA (1)...(19): siRNA sense strand
gaauucuucuagacagaua

SEQ ID NO: 1788779 - RNA, 19 nt, Homo sapiens
  misc_RNA (1)...(19): siRNA sense strand
gaucaucaguuucucaagu

SEQ ID NO: 1788780 - RNA, 19 nt, Homo sapiens
  misc_RNA (1)...(19): siRNA sense strand
ggagaaaugccuaauguuc

SEQ ID NO: 1788781 - RNA, 19 nt, Homo sapiens
  misc_RNA (1)...(19): siRNA sense strand
caagaguucugucuaauac

SEQ ID NO: 1788782 - RNA, 19 nt, Homo sapiens
  misc_RNA (1)...(19): siRNA sense strand
ccaauuaauccucaacaua

SEQ ID NO: 1788783 - RNA, 19 nt, Homo sapiens
  misc_RNA (1)...(19): siRNA sense strand
ccagguaaguccuccauug

SEQ ID NO: 1788784 - RNA, 19 nt, Homo sapiens
  misc_RNA (1)...(19): siRNA sense strand
gguaaguccuccauugaug

SEQ ID NO: 1788785 - RNA, 19 nt, Homo sapiens
  misc_RNA (1)...(19): siRNA sense strand
gcacaaccucagaaccuua

SEQ ID NO: 1788786 - RNA, 19 nt, Homo sapiens
  misc_RNA (1)...(19): siRNA sense strand
ggacauaccaagaagacaa

SEQ ID NO: 1788787 - RNA, 19 nt, Homo sapiens
  misc_RNA (1)...(19): siRNA sense strand
gaugggaugcugacaguaa

SEQ ID NO: 1788788 - RNA, 19 nt, Homo sapiens
  misc_RNA (1)...(19): siRNA sense strand
ccaagaguucugucuaaua

SEQ ID NO: 1788789 - RNA, 19 nt, Homo sapiens
  misc_RNA (1)...(19): siRNA sense strand
uauggaaggugcccagaaa

SEQ ID NO: 1788790 - RNA, 19 nt, Homo sapiens
  misc_RNA (1)...(19): siRNA sense strand
ucaaacaacucacagacau

SEQ ID NO: 1788791 - RNA, 19 nt, Homo sapiens
  misc_RNA (1)...(19): siRNA sense strand
ggacagcagugaagcaacu

SEQ ID NO: 1788792 - RNA, 19 nt, Homo sapiens
  misc_RNA (1)...(19): siRNA sense strand
gagaaaugccuaauguuca

SEQ ID NO: 1788793 - RNA, 19 nt, Homo sapiens
  misc_RNA (1)...(19): siRNA sense strand
gcauugggccuccagguaa

SEQ ID NO: 1788794 - RNA, 19 nt, Homo sapiens
  misc_RNA (1)...(19): siRNA sense strand
guacaaauaccucuucagu

SEQ ID NO: 1788795 - RNA, 19 nt, Homo sapiens
  misc_RNA (1)...(19): siRNA sense strand
gaaucugacucaaggcaau

SEQ ID NO: 1788796 - RNA, 19 nt, Homo sapiens
  misc_RNA (1)...(19): siRNA sense strand
ccaacaccuuugcuccuua

SEQ ID NO: 1788797 - RNA, 19 nt, Homo sapiens
  misc_RNA (1)...(19): siRNA sense strand
uaacacugauggaccaaau

SEQ ID NO: 1788798 - RNA, 19 nt, Homo sapiens
  misc_RNA (1)...(19): siRNA sense strand
gaugggagaagucagaauu

SEQ ID NO: 1788799 - RNA, 19 nt, Homo sapiens
  misc_RNA (1)...(19): siRNA sense strand
gaaggccgaaggcgagaua

SEQ ID NO: 1788800 - RNA, 19 nt, Homo sapiens
  misc_RNA (1)...(19): siRNA sense strand
gcauuaagugcuaaacaaa

SEQ ID NO: 1788801 - RNA, 19 nt, Homo sapiens
  misc_RNA (1)...(19): siRNA sense strand
gcagaacccuagcaagcau

SEQ ID NO: 1788802 - RNA, 19 nt, Homo sapiens
  misc_RNA (1)...(19): siRNA sense strand
ucaagugccucaguuucua

SEQ ID NO: 1788803 - RNA, 19 nt, Homo sapiens
  misc_RNA (1)...(19): siRNA sense strand
cuucuacccugguggauaa

SEQ ID NO: 1788804 - RNA, 19 nt, Homo sapiens
  misc_RNA (1)...(19): siRNA sense strand
ggaaugacaccacgagauc

SEQ ID NO: 1788805 - RNA, 19 nt, Homo sapiens
  misc_RNA (1)...(19): siRNA sense strand
ggcaacccuuccaguauuu

SEQ ID NO: 1788806 - RNA, 19 nt, Homo sapiens
  misc_RNA (1)...(19): siRNA sense strand
gaguggagguaaacuguca

SEQ ID NO: 1788807 - RNA, 19 nt, Homo sapiens
  misc_RNA (1)...(19): siRNA sense strand
gcaauaauggcaccaaugg

SEQ ID NO: 1788808 - RNA, 19 nt, Homo sapiens
  misc_RNA (1)...(19): siRNA sense strand
ccaaagcccuucuaaucag

SEQ ID NO: 1788809 - RNA, 19 nt, Homo sapiens
  misc_RNA (1)...(19): siRNA sense strand
ggagaugggagaagucaga

SEQ ID NO: 1788810 - RNA, 19 nt, Homo sapiens
  misc_RNA (1)...(19): siRNA sense strand
gaaaggacugcagaauauu

SEQ ID NO: 1788811 - RNA, 19 nt, Homo sapiens
  misc_RNA (1)...(19): siRNA sense strand
ggagugaccgaccauaaug

SEQ ID NO: 1788812 - RNA, 19 nt, Homo sapiens
  misc_RNA (1)...(19): siRNA sense strand
gaugaaaugaaccucagua

SEQ ID NO: 1788813 - RNA, 19 nt, Homo sapiens
  misc_RNA (1)...(19): siRNA sense strand
guccaaagcccuucuaauc

SEQ ID NO: 1788814 - RNA, 19 nt, Homo sapiens
  misc_RNA (1)...(19): siRNA sense strand
ccacaaacguccacuucuc

SEQ ID NO: 1788815 - RNA, 19 nt, Homo sapiens
  misc_RNA (1)...(19): siRNA sense strand
caaagcccuucuaaucaga

SEQ ID NO: 1788816 - RNA, 19 nt, Homo sapiens
  misc_RNA (1)...(19): siRNA sense strand
gaauauugacccugagaau

SEQ ID NO: 1788817 - RNA, 19 nt, Homo sapiens
  misc_RNA (1)...(19): siRNA sense strand
uggaaaggacugcagaaua

SEQ ID NO: 1788818 - RNA, 19 nt, Homo sapiens
  misc_RNA (1)...(19): siRNA sense strand
ccaacuccauggauaacuu

SEQ ID NO: 1788819 - RNA, 19 nt, Homo sapiens
  misc_RNA (1)...(19): siRNA sense strand
ugacaucaaugggaaagga

SEQ ID NO: 1788820 - RNA, 19 nt, Homo sapiens
  misc_RNA (1)...(19): siRNA sense strand
agaagucucugcacaugug

SEQ ID NO: 1788821 - RNA, 19 nt, Homo sapiens
  misc_RNA (1)...(19): siRNA sense strand
caugagcgcucugcuggaa

SEQ ID NO: 1788822 - RNA, 19 nt, Homo sapiens
  misc_RNA (1)...(19): siRNA sense strand
uaaugcugcuucccaagaa

SEQ ID NO: 1788823 - RNA, 19 nt, Homo sapiens
  misc_RNA (1)...(19): siRNA sense strand
ggagauggacaaagaucaa

SEQ ID NO: 1788824 - RNA, 19 nt, Homo sapiens
  misc_RNA (1)...(19): siRNA sense strand
gcugaaggaauaagcaauu

SEQ ID NO: 1788825 - RNA, 19 nt, Homo sapiens
  misc_RNA (1)...(19): siRNA sense strand
gaaacaacccggucaucca

SEQ ID NO: 1788826 - RNA, 19 nt, Homo sapiens
  misc_RNA (1)...(19): siRNA sense strand
ggcaacagcacaaauacaa

SEQ ID NO: 1788827 - RNA, 19 nt, Homo sapiens
  misc_RNA (1)...(19): siRNA sense strand
aaacacugccugggaauuu

SEQ ID NO: 1788828 - RNA, 19 nt, Homo sapiens
  misc_RNA (1)...(19): siRNA sense strand
ggaaguggaggaaaugcuu

SEQ ID NO: 1788829 - RNA, 19 nt, Homo sapiens
  misc_RNA (1)...(19): siRNA sense strand
gaaggaaguggaggaaaug

SEQ ID NO: 1788830 - RNA, 19 nt, Homo sapiens
  misc_RNA (1)...(19): siRNA sense strand
gcaacagcacaaauacaaa

SEQ ID NO: 1788831 - RNA, 19 nt, Homo sapiens
  misc_RNA (1)...(19): siRNA sense strand
guucuacacugcggacauu

SEQ ID NO: 1788832 - RNA, 19 nt, Homo sapiens
  misc_RNA (1)...(19): siRNA sense strand
gcauaccaacguuuacaaa

SEQ ID NO: 1788833 - RNA, 19 nt, Homo sapiens
  misc_RNA (1)...(19): siRNA sense strand
acaauggcguugguaauau

SEQ ID NO: 1788834 - RNA, 19 nt, Homo sapiens
  misc_RNA (1)...(19): siRNA sense strand
ccacugggccuaccaucaa

SEQ ID NO: 1788835 - RNA, 19 nt, Homo sapiens
  misc_RNA (1)...(19): siRNA sense strand
caaaccagcuucaaaaucu

SEQ ID NO: 1788836 - RNA, 19 nt, Homo sapiens
  misc_RNA (1)...(19): siRNA sense strand
ugccuaauguucacucaaa

SEQ ID NO: 1788837 - RNA, 19 nt, Homo sapiens
  misc_RNA (1)...(19): siRNA sense strand
gcaacuggcugggaagaac

SEQ ID NO: 1788838 - RNA, 19 nt, Homo sapiens
  misc_RNA (1)...(19): siRNA sense strand
gcaagugaaggaaguagug

SEQ ID NO: 1788839 - RNA, 19 nt, Homo sapiens
  misc_RNA (1)...(19): siRNA sense strand
aggcaacccuuccaguauu

SEQ ID NO: 1788840 - RNA, 19 nt, Homo sapiens
  misc_RNA (1)...(19): siRNA sense strand
guaaguccuccauugauga

SEQ ID NO: 1788841 - RNA, 19 nt, Homo sapiens
  misc_RNA (1)...(19): siRNA sense strand
gcuggcauaccaacguuua

SEQ ID NO: 1788842 - RNA, 19 nt, Homo sapiens
  misc_RNA (1)...(19): siRNA sense strand
ggagacagcaacaacaaag

SEQ ID NO: 1788843 - RNA, 19 nt, Homo sapiens
  misc_RNA (1)...(19): siRNA sense strand
acugugaacucagcauuaa

SEQ ID NO: 1788844 - RNA, 19 nt, Homo sapiens
  misc_RNA (1)...(19): siRNA sense strand
gcaauucuggguucaguca

SEQ ID NO: 1788845 - RNA, 19 nt, Homo sapiens
  misc_RNA (1)...(19): siRNA sense strand
acacugauggaccaaauaa

SEQ ID NO: 1788846 - RNA, 19 nt, Homo sapiens
  misc_RNA (1)...(19): siRNA sense strand
aagccucucugucucauga

SEQ ID NO: 1788847 - RNA, 19 nt, Homo sapiens
  misc_RNA (1)...(19): siRNA sense strand
ccaaaucugacagugauaa

SEQ ID NO: 1788848 - RNA, 19 nt, Homo sapiens
  misc_RNA (1)...(19): siRNA sense strand
ucacuggacauaccaagaa

SEQ ID NO: 1788849 - RNA, 19 nt, Homo sapiens
  misc_RNA (1)...(19): siRNA sense strand
caacuucacuggacauacc

SEQ ID NO: 1788850 - RNA, 19 nt, Homo sapiens
  misc_RNA (1)...(19): siRNA sense strand
gaaggaaguagugaugguu

SEQ ID NO: 1788851 - RNA, 19 nt, Homo sapiens
  misc_RNA (1)...(19): siRNA sense strand
caauggcguugguaauauc

SEQ ID NO: 1788852 - RNA, 19 nt, Homo sapiens
  misc_RNA (1)...(19): siRNA sense strand
ccagauugaugguucuaca

SEQ ID NO: 1788853 - RNA, 19 nt, Homo sapiens
  misc_RNA (1)...(19): siRNA sense strand
uaccugaccugcagaccaa

SEQ ID NO: 1788854 - RNA, 19 nt, Homo sapiens
  misc_RNA (1)...(19): siRNA sense strand
caacagcacaaauacaaag

SEQ ID NO: 1788855 - RNA, 19 nt, Homo sapiens
  misc_RNA (1)...(19): siRNA sense strand
uaaagggauuauagaccaa

SEQ ID NO: 1788856 - RNA, 19 nt, Homo sapiens
  misc_RNA (1)...(19): siRNA sense strand
ucgcuggacugaacccaaa

SEQ ID NO: 1788857 - RNA, 19 nt, Homo sapiens
  misc_RNA (1)...(19): siRNA sense strand
gaaggugcccagaaacagu

SEQ ID NO: 1788858 - RNA, 19 nt, Homo sapiens
  misc_RNA (1)...(19): siRNA sense strand
gaagagagcuuauuggaaa

SEQ ID NO: 1788859 - RNA, 19 nt, Homo sapiens
  misc_RNA (1)...(19): siRNA sense strand
gaacacaaauguaccaauu

SEQ ID NO: 1788860 - RNA, 19 nt, Homo sapiens
  misc_RNA (1)...(19): siRNA sense strand
gaacagagcuccugacaac

SEQ ID NO: 1788861 - RNA, 19 nt, Homo sapiens
  misc_RNA (1)...(19): siRNA sense strand
uaaaugagcugauggaaga

SEQ ID NO: 1788862 - RNA, 19 nt, Homo sapiens
  misc_RNA (1)...(19): siRNA sense strand
ggugagagcuggagaauau

SEQ ID NO: 1788863 - RNA, 19 nt, Homo sapiens
  misc_RNA (1)...(19): siRNA sense strand
gaaaucagcuugguaugga

SEQ ID NO: 1788864 - RNA, 19 nt, Homo sapiens
  misc_RNA (1)...(19): siRNA sense strand
ggacagaugugaacaaagg

SEQ ID NO: 1788865 - RNA, 19 nt, Homo sapiens
  misc_RNA (1)...(19): siRNA sense strand
caagaaggauugucagaga

SEQ ID NO: 1788866 - RNA, 19 nt, Homo sapiens
  misc_RNA (1)...(19): siRNA sense strand
gaagauucauccaguguug

SEQ ID NO: 1788867 - RNA, 19 nt, Homo sapiens
  misc_RNA (1)...(19): siRNA sense strand
gaagauaugccaauguuug

SEQ ID NO: 1788868 - RNA, 19 nt, Homo sapiens
  misc_RNA (1)...(19): siRNA sense strand
ucaagaaccucaacaugaa

SEQ ID NO: 1788869 - RNA, 19 nt, Homo sapiens
  misc_RNA (1)...(19): siRNA sense strand
cgaaugaauuucccuguuu

SEQ ID NO: 1788870 - RNA, 19 nt, Homo sapiens
  misc_RNA (1)...(19): siRNA sense strand
gaaugaagaugaagcagau

SEQ ID NO: 1788871 - RNA, 19 nt, Homo sapiens
  misc_RNA (1)...(19): siRNA sense strand
gagaagaacuacagugaca

SEQ ID NO: 1788872 - RNA, 19 nt, Homo sapiens
  misc_RNA (1)...(19): siRNA sense strand
cagaguagcuggcuucgaa

SEQ ID NO: 1788873 - RNA, 19 nt, Homo sapiens
  misc_RNA (1)...(19): siRNA sense strand
gaacaaaggaucaucaaag

SEQ ID NO: 1788874 - RNA, 19 nt, Homo sapiens
  misc_RNA (1)...(19): siRNA sense strand
ugaggagaguggcauauua

SEQ ID NO: 1788875 - RNA, 19 nt, Homo sapiens
  misc_RNA (1)...(19): siRNA sense strand
gaaacuggaugacaugcuu

SEQ ID NO: 1788876 - RNA, 19 nt, Homo sapiens
  misc_RNA (1)...(19): siRNA sense strand
gaagaugauuccucagaug

SEQ ID NO: 1788877 - RNA, 19 nt, Homo sapiens
  misc_RNA (1)...(19): siRNA sense strand
ugaagaagcuagagaggaa

SEQ ID NO: 1788878 - RNA, 19 nt, Homo sapiens
  misc_RNA (1)...(19): siRNA sense strand
caacguagaccuagaauca

SEQ ID NO: 1788879 - RNA, 19 nt, Homo sapiens
  misc_RNA (1)...(19): siRNA sense strand
gcacacaugucagcauuga

SEQ ID NO: 1788880 - RNA, 19 nt, Homo sapiens
  misc_RNA (1)...(19): siRNA sense strand
ccaaacagcugcaggaagu

SEQ ID NO: 1788881 - RNA, 19 nt, Homo sapiens
  misc_RNA (1)...(19): siRNA sense strand
ggaaguaaaugagcugaug

SEQ ID NO: 1788882 - RNA, 19 nt, Homo sapiens
  misc_RNA (1)...(19): siRNA sense strand
ggaacuaucuccucucucu

SEQ ID NO: 1788883 - RNA, 19 nt, Homo sapiens
  misc_RNA (1)...(19): siRNA sense strand
uaagaaggccaaugaaauu

SEQ ID NO: 1788884 - RNA, 19 nt, Homo sapiens
  misc_RNA (1)...(19): siRNA sense strand
gaugaggacuggaagaugu

SEQ ID NO: 1788885 - RNA, 19 nt, Homo sapiens
  misc_RNA (1)...(19): siRNA sense strand
gaaugaauuucccuguuug

SEQ ID NO: 1788886 - RNA, 19 nt, Homo sapiens
  misc_RNA (1)...(19): siRNA sense strand
ggaacaugcuguggaauug

SEQ ID NO: 1788887 - RNA, 19 nt, Homo sapiens
  misc_RNA (1)...(19): siRNA sense strand
gaaggauugucagagaaua

SEQ ID NO: 1788888 - RNA, 19 nt, Homo sapiens
  misc_RNA (1)...(19): siRNA sense strand
gcucuaaacugaaggaagu

SEQ ID NO: 1788889 - RNA, 19 nt, Homo sapiens
  misc_RNA (1)...(19): siRNA sense strand
ugaaggagcuauuugaaca

SEQ ID NO: 1788890 - RNA, 19 nt, Homo sapiens
  misc_RNA (1)...(19): siRNA sense strand
gaacaacaucggacaguga

SEQ ID NO: 1788891 - RNA, 19 nt, Homo sapiens
  misc_RNA (1)...(19): siRNA sense strand
gaaguuacaugcgguagau

SEQ ID NO: 1788892 - RNA, 19 nt, Homo sapiens
  misc_RNA (1)...(19): siRNA sense strand
ucaagaagacugcgaauga

SEQ ID NO: 1788893 - RNA, 19 nt, Homo sapiens
  misc_RNA (1)...(19): siRNA sense strand
ggaagaugauggcccagaa

SEQ ID NO: 1788894 - RNA, 19 nt, Homo sapiens
  misc_RNA (1)...(19): siRNA sense strand
gaagacugcgaaugaauuu

SEQ ID NO: 1788895 - RNA, 19 nt, Homo sapiens
  misc_RNA (1)...(19): siRNA sense strand
ugaggaagaugaaauguca

SEQ ID NO: 1788896 - RNA, 19 nt, Homo sapiens
  misc_RNA (1)...(19): siRNA sense strand
gugaagaagucaaggaaga

SEQ ID NO: 1788897 - RNA, 19 nt, Homo sapiens
  misc_RNA (1)...(19): siRNA sense strand
gggccuagaacccaaauua

SEQ ID NO: 1788898 - RNA, 19 nt, Homo sapiens
  misc_RNA (1)...(19): siRNA sense strand
caagaagacugcgaaugaa

SEQ ID NO: 1788899 - RNA, 19 nt, Homo sapiens
  misc_RNA (1)...(19): siRNA sense strand
uaaaggcaaucaagaggaa

SEQ ID NO: 1788900 - RNA, 19 nt, Homo sapiens
  misc_RNA (1)...(19): siRNA sense strand
agacaucacuccagauaug

SEQ ID NO: 1788901 - RNA, 19 nt, Homo sapiens
  misc_RNA (1)...(19): siRNA sense strand
gaccagagauaguacuuuc

SEQ ID NO: 1788902 - RNA, 19 nt, Homo sapiens
  misc_RNA (1)...(19): siRNA sense strand
gaaauuaagccuccucagu

SEQ ID NO: 1788903 - RNA, 19 nt, Homo sapiens
  misc_RNA (1)...(19): siRNA sense strand
gaagccaccuauagagaga

SEQ ID NO: 1788904 - RNA, 19 nt, Homo sapiens
  misc_RNA (1)...(19): siRNA sense strand
gaacaagacaaugaagaaa

SEQ ID NO: 1788905 - RNA, 19 nt, Homo sapiens
  misc_RNA (1)...(19): siRNA sense strand
caaaggaucaucaaagaau

SEQ ID NO: 1788906 - RNA, 19 nt, Homo sapiens
  misc_RNA (1)...(19): siRNA sense strand
guucagcucuugacccaaa

SEQ ID NO: 1788907 - RNA, 19 nt, Homo sapiens
  misc_RNA (1)...(19): siRNA sense strand
ggaaagugauguugaaagc

SEQ ID NO: 1788908 - RNA, 19 nt, Homo sapiens
  misc_RNA (1)...(19): siRNA sense strand
aaacagaccagagauagua

SEQ ID NO: 1788909 - RNA, 19 nt, Homo sapiens
  misc_RNA (1)...(19): siRNA sense strand
gaagagauccagccacauc

SEQ ID NO: 1788910 - RNA, 19 nt, Homo sapiens
  misc_RNA (1)...(19): siRNA sense strand
uuucauguauccagaguua

SEQ ID NO: 1788911 - RNA, 19 nt, Homo sapiens
  misc_RNA (1)...(19): siRNA sense strand
cagagucccuacagcauaa

SEQ ID NO: 1788912 - RNA, 19 nt, Homo sapiens
  misc_RNA (1)...(19): siRNA sense strand
gcuccaagcuccagacauc

SEQ ID NO: 1788913 - RNA, 19 nt, Homo sapiens
  misc_RNA (1)...(19): siRNA sense strand
gugaucaucuuacccuaaa

SEQ ID NO: 1788914 - RNA, 19 nt, Homo sapiens
  misc_RNA (1)...(19): siRNA sense strand
uggccaaccuguuaaauga

SEQ ID NO: 1788915 - RNA, 19 nt, Homo sapiens
  misc_RNA (1)...(19): siRNA sense strand
ggaagaacaagacaaugaa

SEQ ID NO: 1788916 - RNA, 19 nt, Homo sapiens
  misc_RNA (1)...(19): siRNA sense strand
cggaagauaugccaauguu

SEQ ID NO: 1788917 - RNA, 19 nt, Homo sapiens
  misc_RNA (1)...(19): siRNA sense strand
uuaaagagcugggaaccuu

SEQ ID NO: 1788918 - RNA, 19 nt, Homo sapiens
  misc_RNA (1)...(19): siRNA sense strand
ccaccaggauauuucuuaa

SEQ ID NO: 1788919 - RNA, 19 nt, Homo sapiens
  misc_RNA (1)...(19): siRNA sense strand
caauuaagaaggccaauga

SEQ ID NO: 1788920 - RNA, 19 nt, Homo sapiens
  misc_RNA (1)...(19): siRNA sense strand
ggaggagucagccaacuaa

SEQ ID NO: 1788921 - RNA, 19 nt, Homo sapiens
  misc_RNA (1)...(19): siRNA sense strand
ggcgguggcuguaacauga

SEQ ID NO: 1788922 - RNA, 19 nt, Homo sapiens
  misc_RNA (1)...(19): siRNA sense strand
gcgaaugaauuucccuguu

SEQ ID NO: 1788923 - RNA, 19 nt, Homo sapiens
  misc_RNA (1)...(19): siRNA sense strand
gaaguaaucacaaaugaac

SEQ ID NO: 1788924 - RNA, 19 nt, Homo sapiens
  misc_RNA (1)...(19): siRNA sense strand
gaagaaugggccagaagaa

SEQ ID NO: 1788925 - RNA, 19 nt, Homo sapiens
  misc_RNA (1)...(19): siRNA sense strand
aacaaaggaucaucaaaga

SEQ ID NO: 1788926 - RNA, 19 nt, Homo sapiens
  misc_RNA (1)...(19): siRNA sense strand
ccagacaucacuccagaua

SEQ ID NO: 1788927 - RNA, 19 nt, Homo sapiens
  misc_RNA (1)...(19): siRNA sense strand
ugagaugacugaaacagau

SEQ ID NO: 1788928 - RNA, 19 nt, Homo sapiens
  misc_RNA (1)...(19): siRNA sense strand
gaaggccaaugaaauuaag

SEQ ID NO: 1788929 - RNA, 19 nt, Homo sapiens
  misc_RNA (1)...(19): siRNA sense strand
gaccuagaaucagccguua

SEQ ID NO: 1788930 - RNA, 19 nt, Homo sapiens
  misc_RNA (1)...(19): siRNA sense strand
ggaagaagaggacuuugau

SEQ ID NO: 1788931 - RNA, 19 nt, Homo sapiens
  misc_RNA (1)...(19): siRNA sense strand
gauggaaccugaagaagcu

SEQ ID NO: 1788932 - RNA, 19 nt, Homo sapiens
  misc_RNA (1)...(19): siRNA sense strand
caagauggaaccugaagaa

SEQ ID NO: 1788933 - RNA, 19 nt, Homo sapiens
  misc_RNA (1)...(19): siRNA sense strand
cuagagagguaggaaauau

SEQ ID NO: 1788934 - RNA, 19 nt, Homo sapiens
  misc_RNA (1)...(19): siRNA sense strand
ggaaaccucaaaugaauuc

SEQ ID NO: 1788935 - RNA, 19 nt, Homo sapiens
  misc_RNA (1)...(19): siRNA sense strand
gaagaacuacagugacaga

SEQ ID NO: 1788936 - RNA, 19 nt, Homo sapiens
  misc_RNA (1)...(19): siRNA sense strand
uagaggaaauugucaagau

SEQ ID NO: 1788937 - RNA, 19 nt, Homo sapiens
  misc_RNA (1)...(19): siRNA sense strand
cagcacacaugucagcauu

SEQ ID NO: 1788938 - RNA, 19 nt, Homo sapiens
  misc_RNA (1)...(19): siRNA sense strand
uugaacagcugaagaugaa

SEQ ID NO: 1788939 - RNA, 19 nt, Homo sapiens
  misc_RNA (1)...(19): siRNA sense strand
ggacuugaguucgguguca

SEQ ID NO: 1788940 - RNA, 19 nt, Homo sapiens
  misc_RNA (1)...(19): siRNA sense strand
ccgaucaacucauucagaa

SEQ ID NO: 1788941 - RNA, 19 nt, Homo sapiens
  misc_RNA (1)...(19): siRNA sense strand
gaacagcugaagaugaaga

SEQ ID NO: 1788942 - RNA, 19 nt, Homo sapiens
  misc_RNA (1)...(19): siRNA sense strand
ugaagcagaugaugaugau

SEQ ID NO: 1788943 - RNA, 19 nt, Homo sapiens
  misc_RNA (1)...(19): siRNA sense strand
aauuaagccuccucaguuu

SEQ ID NO: 1788944 - RNA, 19 nt, Homo sapiens
  misc_RNA (1)...(19): siRNA sense strand
ggauauccaccuugaagaa

SEQ ID NO: 1788945 - RNA, 19 nt, Homo sapiens
  misc_RNA (1)...(19): siRNA sense strand
gaggcagucuucugagaug

SEQ ID NO: 1788946 - RNA, 19 nt, Homo sapiens
  misc_RNA (1)...(19): siRNA sense strand
ccggauuccucacccaaua

SEQ ID NO: 1788947 - RNA, 19 nt, Homo sapiens
  misc_RNA (1)...(19): siRNA sense strand
caagcaagguuuucaugua

SEQ ID NO: 1788948 - RNA, 19 nt, Homo sapiens
  misc_RNA (1)...(19): siRNA sense strand
cuaugcagcugauugaaga

SEQ ID NO: 1788949 - RNA, 19 nt, Homo sapiens
  misc_RNA (1)...(19): siRNA sense strand
ggaaguagagaagguuaaa

SEQ ID NO: 1788950 - RNA, 19 nt, Homo sapiens
  misc_RNA (1)...(19): siRNA sense strand
gaacacgugguagcuauga

SEQ ID NO: 1788951 - RNA, 19 nt, Homo sapiens
  misc_RNA (1)...(19): siRNA sense strand
ucuguuaucuucacuguuc

SEQ ID NO: 1788952 - RNA, 19 nt, Homo sapiens
  misc_RNA (1)...(19): siRNA sense strand
aaauuaagccuccucaguu

SEQ ID NO: 1788953 - RNA, 19 nt, Homo sapiens
  misc_RNA (1)...(19): siRNA sense strand
gaggagaguggcauauuau

SEQ ID NO: 1788954 - RNA, 19 nt, Homo sapiens
  misc_RNA (1)...(19): siRNA sense strand
gucaaggccucucccugua

SEQ ID NO: 1788955 - RNA, 19 nt, Homo sapiens
  misc_RNA (1)...(19): siRNA sense strand
gagccucguccuaacuuua

SEQ ID NO: 1788956 - RNA, 19 nt, Homo sapiens
  misc_RNA (1)...(19): siRNA sense strand
acaagacaaugaagaaagu

SEQ ID NO: 1788957 - RNA, 19 nt, Homo sapiens
  misc_RNA (1)...(19): siRNA sense strand
gaacaccggcucccauucu

SEQ ID NO: 1788958 - RNA, 19 nt, Homo sapiens
  misc_RNA (1)...(19): siRNA sense strand
gaggaaagagagcuuauuc

SEQ ID NO: 1788959 - RNA, 19 nt, Homo sapiens
  misc_RNA (1)...(19): siRNA sense strand
caccaaccaugccaucauu

SEQ ID NO: 1788960 - RNA, 19 nt, Homo sapiens
  misc_RNA (1)...(19): siRNA sense strand
gcagaggaaagagagcuua

SEQ ID NO: 1788961 - RNA, 19 nt, Homo sapiens
  misc_RNA (1)...(19): siRNA sense strand
ccgcaccacuucaugaugu

SEQ ID NO: 1788962 - RNA, 19 nt, Homo sapiens
  misc_RNA (1)...(19): siRNA sense strand
gcgagggccuuugcgacuu

SEQ ID NO: 1788963 - RNA, 19 nt, Homo sapiens
  misc_RNA (1)...(19): siRNA sense strand
cgagggccuuugcgacuuc

SEQ ID NO: 1788964 - RNA, 19 nt, Homo sapiens
  misc_RNA (1)...(19): siRNA sense strand
ggacuucuccgccguugcu

SEQ ID NO: 1788965 - RNA, 19 nt, Homo sapiens
  misc_RNA (1)...(19): siRNA sense strand
ccaaccaugccaucauuca

SEQ ID NO: 1788966 - RNA, 19 nt, Homo sapiens
  misc_RNA (1)...(19): siRNA sense strand
caagcaauacgaggacaug

SEQ ID NO: 1788967 - RNA, 19 nt, Homo sapiens
  misc_RNA (1)...(19): siRNA sense strand
agacgcugcucaacuccau

SEQ ID NO: 1788968 - RNA, 19 nt, Homo sapiens
  misc_RNA (1)...(19): siRNA sense strand
gaggaaagagagcuuauuc

SEQ ID NO: 1788969 - RNA, 19 nt, Homo sapiens
  misc_RNA (1)...(19): siRNA sense strand
caccaaccaugccaucauu

SEQ ID NO: 1788970 - RNA, 19 nt, Homo sapiens
  misc_RNA (1)...(19): siRNA sense strand
gcagaggaaagagagcuua

SEQ ID NO: 1788971 - RNA, 19 nt, Homo sapiens
  misc_RNA (1)...(19): siRNA sense strand
ccgcaccacuucaugaugu

SEQ ID NO: 1788972 - RNA, 19 nt, Homo sapiens
  misc_RNA (1)...(19): siRNA sense strand
gcgagggccuuugcgacuu

SEQ ID NO: 1788973 - RNA, 19 nt, Homo sapiens
  misc_RNA (1)...(19): siRNA sense strand
cgagggccuuugcgacuuc

SEQ ID NO: 1788974 - RNA, 19 nt, Homo sapiens
  misc_RNA (1)...(19): siRNA sense strand
ggacuucuccgccguugcu

SEQ ID NO: 1788975 - RNA, 19 nt, Homo sapiens
  misc_RNA (1)...(19): siRNA sense strand
ccaaccaugccaucauuca

SEQ ID NO: 1788976 - RNA, 19 nt, Homo sapiens
  misc_RNA (1)...(19): siRNA sense strand
caagcaauacgaggacaug

SEQ ID NO: 1788977 - RNA, 19 nt, Homo sapiens
  misc_RNA (1)...(19): siRNA sense strand
agacgcugcucaacuccau

SEQ ID NO: 1788978 - RNA, 19 nt, Homo sapiens
  misc_RNA (1)...(19): siRNA sense strand
gaacugcaaugucaaguaa

SEQ ID NO: 1788979 - RNA, 19 nt, Homo sapiens
  misc_RNA (1)...(19): siRNA sense strand
caauagaacugcaauguca

SEQ ID NO: 1788980 - RNA, 19 nt, Homo sapiens
  misc_RNA (1)...(19): siRNA sense strand
caaugcaaauggagaguua

SEQ ID NO: 1788981 - RNA, 19 nt, Homo sapiens
  misc_RNA (1)...(19): siRNA sense strand
agaugcagcuuucuuguua

SEQ ID NO: 1788982 - RNA, 19 nt, Homo sapiens
  misc_RNA (1)...(19): siRNA sense strand
gaaggagauucaacaauuc

SEQ ID NO: 1788983 - RNA, 19 nt, Homo sapiens
  misc_RNA (1)...(19): siRNA sense strand
gaaccagcauucuuggaaa

SEQ ID NO: 1788984 - RNA, 19 nt, Homo sapiens
  misc_RNA (1)...(19): siRNA sense strand
ccacaaacacugcauauug

SEQ ID NO: 1788985 - RNA, 19 nt, Homo sapiens
  misc_RNA (1)...(19): siRNA sense strand
gaauguaucuagggaaaug

SEQ ID NO: 1788986 - RNA, 19 nt, Homo sapiens
  misc_RNA (1)...(19): siRNA sense strand
caauucgugugaucaaaua

SEQ ID NO: 1788987 - RNA, 19 nt, Homo sapiens
  misc_RNA (1)...(19): siRNA sense strand
gcgcuugggcaauaaauua

SEQ ID NO: 1788988 - RNA, 19 nt, Homo sapiens
  misc_RNA (1)...(19): siRNA sense strand
ugacuccucucaccaaauu

SEQ ID NO: 1788989 - RNA, 19 nt, Homo sapiens
  misc_RNA (1)...(19): siRNA sense strand
uauccgagguccuggaaua

SEQ ID NO: 1788990 - RNA, 19 nt, Homo sapiens
  misc_RNA (1)...(19): siRNA sense strand
gaaagggcaaacaacaaua

SEQ ID NO: 1788991 - RNA, 19 nt, Homo sapiens
  misc_RNA (1)...(19): siRNA sense strand
ggucguccauuaagaaguu

SEQ ID NO: 1788992 - RNA, 19 nt, Homo sapiens
  misc_RNA (1)...(19): siRNA sense strand
aacaagaccuagcaacuaa

SEQ ID NO: 1788993 - RNA, 19 nt, Homo sapiens
  misc_RNA (1)...(19): siRNA sense strand
cagcaucaccgucaauuaa

SEQ ID NO: 1788994 - RNA, 19 nt, Homo sapiens
  misc_RNA (1)...(19): siRNA sense strand
caaauauagugcuccugua

SEQ ID NO: 1788995 - RNA, 19 nt, Homo sapiens
  misc_RNA (1)...(19): siRNA sense strand
caacaaacuuggacaucau

SEQ ID NO: 1788996 - RNA, 19 nt, Homo sapiens
  misc_RNA (1)...(19): siRNA sense strand
guuuauaacuguagcauca

SEQ ID NO: 1788997 - RNA, 19 nt, Homo sapiens
  misc_RNA (1)...(19): siRNA sense strand
gaguggcgcuugggcaaua

SEQ ID NO: 1788998 - RNA, 19 nt, Homo sapiens
  misc_RNA (1)...(19): siRNA sense strand
caaaguacagcaacaagaa

SEQ ID NO: 1788999 - RNA, 19 nt, Homo sapiens
  misc_RNA (1)...(19): siRNA sense strand
ggauaaagaaguugcaaug

SEQ ID NO: 1789000 - RNA, 19 nt, Homo sapiens
  misc_RNA (1)...(19): siRNA sense strand
cagagaaggagacacaaua

SEQ ID NO: 1789001 - RNA, 19 nt, Homo sapiens
  misc_RNA (1)...(19): siRNA sense strand
gcaaacaacaauagagaau

SEQ ID NO: 1789002 - RNA, 19 nt, Homo sapiens
  misc_RNA (1)...(19): siRNA sense strand
caacauauaggugucuuaa

SEQ ID NO: 1789003 - RNA, 19 nt, Homo sapiens
  misc_RNA (1)...(19): siRNA sense strand
caaauuuggugaaggagau

SEQ ID NO: 1789004 - RNA, 19 nt, Homo sapiens
  misc_RNA (1)...(19): siRNA sense strand
ugacagagcuaauuaaacc

SEQ ID NO: 1789005 - RNA, 19 nt, Homo sapiens
  misc_RNA (1)...(19): siRNA sense strand
ggugggagcaggagauuaa

SEQ ID NO: 1789006 - RNA, 19 nt, Homo sapiens
  misc_RNA (1)...(19): siRNA sense strand
cguuuagacuguccaauaa

SEQ ID NO: 1789007 - RNA, 19 nt, Homo sapiens
  misc_RNA (1)...(19): siRNA sense strand
gugaauguaucuagggaaa

SEQ ID NO: 1789008 - RNA, 19 nt, Homo sapiens
  misc_RNA (1)...(19): siRNA sense strand
gaagggaggaggaauaucu

SEQ ID NO: 1789009 - RNA, 19 nt, Homo sapiens
  misc_RNA (1)...(19): siRNA sense strand
guccucaucucuaucuuaa

SEQ ID NO: 1789010 - RNA, 19 nt, Homo sapiens
  misc_RNA (1)...(19): siRNA sense strand
gaaggugacauugcuauug

SEQ ID NO: 1789011 - RNA, 19 nt, Homo sapiens
  misc_RNA (1)...(19): siRNA sense strand
acugagagccuauccaaua

SEQ ID NO: 1789012 - RNA, 19 nt, Homo sapiens
  misc_RNA (1)...(19): siRNA sense strand
ggaaaugucaggaauguac

SEQ ID NO: 1789013 - RNA, 19 nt, Homo sapiens
  misc_RNA (1)...(19): siRNA sense strand
ggaggaacuuugaccauac

SEQ ID NO: 1789014 - RNA, 19 nt, Homo sapiens
  misc_RNA (1)...(19): siRNA sense strand
gcaaaguacagcaacaaga

SEQ ID NO: 1789015 - RNA, 19 nt, Homo sapiens
  misc_RNA (1)...(19): siRNA sense strand
ggccuaugcuccagaauuc

SEQ ID NO: 1789016 - RNA, 19 nt, Homo sapiens
  misc_RNA (1)...(19): siRNA sense strand
caauacgggugcugaccua

SEQ ID NO: 1789017 - RNA, 19 nt, Homo sapiens
  misc_RNA (1)...(19): siRNA sense strand
ggaaccagcauucuuggaa

SEQ ID NO: 1789018 - RNA, 19 nt, Homo sapiens
  misc_RNA (1)...(19): siRNA sense strand
ggagaguuaugauggaaca

SEQ ID NO: 1789019 - RNA, 19 nt, Homo sapiens
  misc_RNA (1)...(19): siRNA sense strand
caauggauuuaacgugaaa

SEQ ID NO: 1789020 - RNA, 19 nt, Homo sapiens
  misc_RNA (1)...(19): siRNA sense strand
aaacaagaccuagcaacua

SEQ ID NO: 1789021 - RNA, 19 nt, Homo sapiens
  misc_RNA (1)...(19): siRNA sense strand
ugacauugcuauugaugau

SEQ ID NO: 1789022 - RNA, 19 nt, Homo sapiens
  misc_RNA (1)...(19): siRNA sense strand
gaauuucauuguggauuug

SEQ ID NO: 1789023 - RNA, 19 nt, Homo sapiens
  misc_RNA (1)...(19): siRNA sense strand
caauuugacucucaggaau

SEQ ID NO: 1789024 - RNA, 19 nt, Homo sapiens
  misc_RNA (1)...(19): siRNA sense strand
uggaggaacuuugaccaua

SEQ ID NO: 1789025 - RNA, 19 nt, Homo sapiens
  misc_RNA (1)...(19): siRNA sense strand
gauggaacacugaggauug

SEQ ID NO: 1789026 - RNA, 19 nt, Homo sapiens
  misc_RNA (1)...(19): siRNA sense strand
cagaugaugcugguacuua

SEQ ID NO: 1789027 - RNA, 19 nt, Homo sapiens
  misc_RNA (1)...(19): siRNA sense strand
ggaauaaaggacaaagaug

SEQ ID NO: 1789028 - RNA, 19 nt, Homo sapiens
  misc_RNA (1)...(19): siRNA sense strand
ggagaggccauaacauuag

SEQ ID NO: 1789029 - RNA, 19 nt, Homo sapiens
  misc_RNA (1)...(19): siRNA sense strand
cuaaaccaaucauccuuug

SEQ ID NO: 1789030 - RNA, 19 nt, Homo sapiens
  misc_RNA (1)...(19): siRNA sense strand
ccucaucucuaucuuaagu

SEQ ID NO: 1789031 - RNA, 19 nt, Homo sapiens
  misc_RNA (1)...(19): siRNA sense strand
cgacuucucagcccuguuu

SEQ ID NO: 1789032 - RNA, 19 nt, Homo sapiens
  misc_RNA (1)...(19): siRNA sense strand
uggagaggccauaacauua

SEQ ID NO: 1789033 - RNA, 19 nt, Homo sapiens
  misc_RNA (1)...(19): siRNA sense strand
cuccagaauucuauuauga

SEQ ID NO: 1789034 - RNA, 19 nt, Homo sapiens
  misc_RNA (1)...(19): siRNA sense strand
ccaauaauaaugugggaaa

SEQ ID NO: 1789035 - RNA, 19 nt, Homo sapiens
  misc_RNA (1)...(19): siRNA sense strand
aaggugacauugcuauuga

SEQ ID NO: 1789036 - RNA, 19 nt, Homo sapiens
  misc_RNA (1)...(19): siRNA sense strand
gcuccagaauucuauuaug

SEQ ID NO: 1789037 - RNA, 19 nt, Homo sapiens
  misc_RNA (1)...(19): siRNA sense strand
gaacaacaaacuuggacau

SEQ ID NO: 1789038 - RNA, 19 nt, Homo sapiens
  misc_RNA (1)...(19): siRNA sense strand
ucaaguaacuggcaaaccu

SEQ ID NO: 1789039 - RNA, 19 nt, Homo sapiens
  misc_RNA (1)...(19): siRNA sense strand
gggcaaacaacaauagaga

SEQ ID NO: 1789040 - RNA, 19 nt, Homo sapiens
  misc_RNA (1)...(19): siRNA sense strand
aaauauagugcuccuguaa

SEQ ID NO: 1789041 - RNA, 19 nt, Homo sapiens
  misc_RNA (1)...(19): siRNA sense strand
uaacuugacagagcuaauu

SEQ ID NO: 1789042 - RNA, 19 nt, Homo sapiens
  misc_RNA (1)...(19): siRNA sense strand
ggauuuaacgugaaaccaa

SEQ ID NO: 1789043 - RNA, 19 nt, Homo sapiens
  misc_RNA (1)...(19): siRNA sense strand
ccaauacaauggauuuaac

SEQ ID NO: 1789044 - RNA, 19 nt, Homo sapiens
  misc_RNA (1)...(19): siRNA sense strand
agaaggagacacaauagaa

SEQ ID NO: 1789045 - RNA, 19 nt, Homo sapiens
  misc_RNA (1)...(19): siRNA sense strand
gggaauaaaggacaaagau

SEQ ID NO: 1789046 - RNA, 19 nt, Homo sapiens
  misc_RNA (1)...(19): siRNA sense strand
guacugagagccuauccaa

SEQ ID NO: 1789047 - RNA, 19 nt, Homo sapiens
  misc_RNA (1)...(19): siRNA sense strand
gaugucagaccagccaaua

SEQ ID NO: 1789048 - RNA, 19 nt, Homo sapiens
  misc_RNA (1)...(19): siRNA sense strand
ggaauguacagaugucaga

SEQ ID NO: 1789049 - RNA, 19 nt, Homo sapiens
  misc_RNA (1)...(19): siRNA sense strand
gcaaauggagaguuaugau

SEQ ID NO: 1789050 - RNA, 19 nt, Homo sapiens
  misc_RNA (1)...(19): siRNA sense strand
uggcaaaccuaaaccaauc

SEQ ID NO: 1789051 - RNA, 19 nt, Homo sapiens
  misc_RNA (1)...(19): siRNA sense strand
acaacaaacuuggacauca

SEQ ID NO: 1789052 - RNA, 19 nt, Homo sapiens
  misc_RNA (1)...(19): siRNA sense strand
cguaguggcuccaaagaag

SEQ ID NO: 1789053 - RNA, 19 nt, Homo sapiens
  misc_RNA (1)...(19): siRNA sense strand
gagaaggagacacaauaga

SEQ ID NO: 1789054 - RNA, 19 nt, Homo sapiens
  misc_RNA (1)...(19): siRNA sense strand
uggaucggauuguugcaua

SEQ ID NO: 1789055 - RNA, 19 nt, Homo sapiens
  misc_RNA (1)...(19): siRNA sense strand
gagaugcagcuuucuuguu

SEQ ID NO: 1789056 - RNA, 19 nt, Homo sapiens
  misc_RNA (1)...(19): siRNA sense strand
gaacacugaggauugugaa

SEQ ID NO: 1789057 - RNA, 19 nt, Homo sapiens
  misc_RNA (1)...(19): siRNA sense strand
caccagauccuuaucacaa

SEQ ID NO: 1789058 - RNA, 19 nt, Homo sapiens
  misc_RNA (1)...(19): siRNA sense strand
caacaauucgugugaucaa

SEQ ID NO: 1789059 - RNA, 19 nt, Homo sapiens
  misc_RNA (1)...(19): siRNA sense strand
gagaggccauaacauuagu

SEQ ID NO: 1789060 - RNA, 19 nt, Homo sapiens
  misc_RNA (1)...(19): siRNA sense strand
gaaguugcaaugccugaug

SEQ ID NO: 1789061 - RNA, 19 nt, Homo sapiens
  misc_RNA (1)...(19): siRNA sense strand
caaauggagaguuaugaug

SEQ ID NO: 1789062 - RNA, 19 nt, Homo sapiens
  misc_RNA (1)...(19): siRNA sense strand
uggaauagaaggugacauu

SEQ ID NO: 1789063 - RNA, 19 nt, Homo sapiens
  misc_RNA (1)...(19): siRNA sense strand
ugucaggaauguacagaug

SEQ ID NO: 1789064 - RNA, 19 nt, Homo sapiens
  misc_RNA (1)...(19): siRNA sense strand
ucugaggagcuaacauuua

SEQ ID NO: 1789065 - RNA, 19 nt, Homo sapiens
  misc_RNA (1)...(19): siRNA sense strand
ccgagguccuggaauagaa

SEQ ID NO: 1789066 - RNA, 19 nt, Homo sapiens
  misc_RNA (1)...(19): siRNA sense strand
ugaaagggcaaacaacaau

SEQ ID NO: 1789067 - RNA, 19 nt, Homo sapiens
  misc_RNA (1)...(19): siRNA sense strand
auauagugcuccuguaaau

SEQ ID NO: 1789068 - RNA, 19 nt, Homo sapiens
  misc_RNA (1)...(19): siRNA sense strand
accagaagcuuaugaaguc

SEQ ID NO: 1789069 - RNA, 19 nt, Homo sapiens
  misc_RNA (1)...(19): siRNA sense strand
gcaaggacaggaucgaagu

SEQ ID NO: 1789070 - RNA, 19 nt, Homo sapiens
  misc_RNA (1)...(19): siRNA sense strand
gccaauacaauggauuuaa

SEQ ID NO: 1789071 - RNA, 19 nt, Homo sapiens
  misc_RNA (1)...(19): siRNA sense strand
ggaacacugaggauuguga

SEQ ID NO: 1789072 - RNA, 19 nt, Homo sapiens
  misc_RNA (1)...(19): siRNA sense strand
ggucuagagcggauaaaga

SEQ ID NO: 1789073 - RNA, 19 nt, Homo sapiens
  misc_RNA (1)...(19): siRNA sense strand
cagcacaguuccacccaau

SEQ ID NO: 1789074 - RNA, 19 nt, Homo sapiens
  misc_RNA (1)...(19): siRNA sense strand
cacuaugaguugcagagua

SEQ ID NO: 1789075 - RNA, 19 nt, Homo sapiens
  misc_RNA (1)...(19): siRNA sense strand
ggaauagaaggugacauug

SEQ ID NO: 1789076 - RNA, 19 nt, Homo sapiens
  misc_RNA (1)...(19): siRNA sense strand
gagcaggagauuaaaauaa

SEQ ID NO: 1789077 - RNA, 19 nt, Homo sapiens
  misc_RNA (1)...(19): siRNA sense strand
uacgggugcugaccuauga

SEQ ID NO: 1789078 - RNA, 19 nt, Homo sapiens
  misc_RNA (1)...(19): siRNA sense strand
caagcagacuggagggaaa

SEQ ID NO: 1789079 - RNA, 19 nt, Homo sapiens
  misc_RNA (1)...(19): siRNA sense strand
ccucccagcucucuaaaga

SEQ ID NO: 1789080 - RNA, 19 nt, Homo sapiens
  misc_RNA (1)...(19): siRNA sense strand
gagcagcgagagucauguu

SEQ ID NO: 1789081 - RNA, 19 nt, Homo sapiens
  misc_RNA (1)...(19): siRNA sense strand
gagugcggcugaacagaag

SEQ ID NO: 1789082 - RNA, 19 nt, Homo sapiens
  misc_RNA (1)...(19): siRNA sense strand
gaacacagaguuuucaaag

SEQ ID NO: 1789083 - RNA, 19 nt, Homo sapiens
  misc_RNA (1)...(19): siRNA sense strand
gcagcgagagucauguuuc

SEQ ID NO: 1789084 - RNA, 19 nt, Homo sapiens
  misc_RNA (1)...(19): siRNA sense strand
gacccucccagcucucuaa

SEQ ID NO: 1789085 - RNA, 19 nt, Homo sapiens
  misc_RNA (1)...(19): siRNA sense strand
ggagagccaagccuacagu

SEQ ID NO: 1789086 - RNA, 19 nt, Homo sapiens
  misc_RNA (1)...(19): siRNA sense strand
ccuacagucacccagcuua

SEQ ID NO: 1789087 - RNA, 19 nt, Homo sapiens
  misc_RNA (1)...(19): siRNA sense strand
ggagagugcggcugaacag

SEQ ID NO: 1789088 - RNA, 19 nt, Homo sapiens
  misc_RNA (1)...(19): siRNA sense strand
gcagcgacaucagcuuggu

SEQ ID NO: 1789089 - RNA, 19 nt, Homo sapiens
  misc_RNA (1)...(19): siRNA sense strand
ggucacagccaacauucag

SEQ ID NO: 1789090 - RNA, 19 nt, Homo sapiens
  misc_RNA (1)...(19): siRNA sense strand
agaggucacagccaacauu

SEQ ID NO: 1789091 - RNA, 19 nt, Homo sapiens
  misc_RNA (1)...(19): siRNA sense strand
gaggucacagccaacauuc

SEQ ID NO: 1789092 - RNA, 19 nt, Homo sapiens
  misc_RNA (1)...(19): siRNA sense strand
agagugcggcugaacagaa

SEQ ID NO: 1789093 - RNA, 19 nt, Homo sapiens
  misc_RNA (1)...(19): siRNA sense strand
cagagcagcgagagucaug

SEQ ID NO: 1789094 - RNA, 19 nt, Homo sapiens
  misc_RNA (1)...(19): siRNA sense strand
gagccagccacucagaaca

SEQ ID NO: 1789095 - RNA, 19 nt, Homo sapiens
  misc_RNA (1)...(19): siRNA sense strand
gacuggagggaaagaguga

SEQ ID NO: 1789096 - RNA, 19 nt, Homo sapiens
  misc_RNA (1)...(19): siRNA sense strand
caaggagggcagcgacauc

SEQ ID NO: 1789097 - RNA, 19 nt, Homo sapiens
  misc_RNA (1)...(19): siRNA sense strand
caaguuagaugacgaauau

SEQ ID NO: 1789098 - RNA, 19 nt, Homo sapiens
  misc_RNA (1)...(19): siRNA sense strand
gaauauaucuggccuaaac

SEQ ID NO: 1789099 - RNA, 19 nt, Homo sapiens
  misc_RNA (1)...(19): siRNA sense strand
gaagagaucccuuauguac

SEQ ID NO: 1789100 - RNA, 19 nt, Homo sapiens
  misc_RNA (1)...(19): siRNA sense strand
gccuaaacaugguucuaua

SEQ ID NO: 1789101 - RNA, 19 nt, Homo sapiens
  misc_RNA (1)...(19): siRNA sense strand
gcaacaccauuuggguuaa

SEQ ID NO: 1789102 - RNA, 19 nt, Homo sapiens
  misc_RNA (1)...(19): siRNA sense strand
ggaagagaucccuuaugua

SEQ ID NO: 1789103 - RNA, 19 nt, Homo sapiens
  misc_RNA (1)...(19): siRNA sense strand
caacaccauuuggguuaaa

SEQ ID NO: 1789104 - RNA, 19 nt, Homo sapiens
  misc_RNA (1)...(19): siRNA sense strand
cgauuaggcuuauuuugua

SEQ ID NO: 1789105 - RNA, 19 nt, Homo sapiens
  misc_RNA (1)...(19): siRNA sense strand
acgaauauaucuggccuaa

SEQ ID NO: 1789106 - RNA, 19 nt, Homo sapiens
  misc_RNA (1)...(19): siRNA sense strand
gaaggaaaaugggaagaga

SEQ ID NO: 1789107 - RNA, 19 nt, Homo sapiens
  misc_RNA (1)...(19): siRNA sense strand
agagaucccuuauguacag

SEQ ID NO: 1789108 - RNA, 19 nt, Homo sapiens
  misc_RNA (1)...(19): siRNA sense strand
gcuauuggagcaaauucaa

SEQ ID NO: 1789109 - RNA, 19 nt, Homo sapiens
  misc_RNA (1)...(19): siRNA sense strand
cauaagggauccccaccua

SEQ ID NO: 1789110 - RNA, 19 nt, Homo sapiens
  misc_RNA (1)...(19): siRNA sense strand
ugcaacaccauuuggguua

SEQ ID NO: 1789111 - RNA, 19 nt, Homo sapiens
  misc_RNA (1)...(19): siRNA sense strand
uaaaagagaaggaaaaugg

SEQ ID NO: 1789112 - RNA, 19 nt, Homo sapiens
  misc_RNA (1)...(19): siRNA sense strand
ucccuuauguacaggcuuu

SEQ ID NO: 1789113 - RNA, 19 nt, Homo sapiens
  misc_RNA (1)...(19): siRNA sense strand
ccgcuagggugucuuuuaa

SEQ ID NO: 1789114 - RNA, 19 nt, Homo sapiens
  misc_RNA (1)...(19): siRNA sense strand
acaaguuagaugacgaaua

SEQ ID NO: 1789115 - RNA, 19 nt, Homo sapiens
  misc_RNA (1)...(19): siRNA sense strand
cacguuacuuccaggcauu

SEQ ID NO: 1789116 - RNA, 19 nt, Homo sapiens
  misc_RNA (1)...(19): siRNA sense strand
ggccuaaacaugguucuau

SEQ ID NO: 1789117 - RNA, 19 nt, Homo sapiens
  misc_RNA (1)...(19): siRNA sense strand
ccuaaacaugguucuauau

SEQ ID NO: 1789118 - RNA, 19 nt, Homo sapiens
  misc_RNA (1)...(19): siRNA sense strand
uaucuggccuaaacauggu

SEQ ID NO: 1789119 - RNA, 19 nt, Homo sapiens
  misc_RNA (1)...(19): siRNA sense strand
uuuaagcuauuggagcaaa

SEQ ID NO: 1789120 - RNA, 19 nt, Homo sapiens
  misc_RNA (1)...(19): siRNA sense strand
uuacuuccaggcauuagaa

SEQ ID NO: 1789121 - RNA, 19 nt, Homo sapiens
  misc_RNA (1)...(19): siRNA sense strand
uauacuggaucacguuacu

SEQ ID NO: 1789122 - RNA, 19 nt, Homo sapiens
  misc_RNA (1)...(19): siRNA sense strand
uggguuaaauacaaguuag

SEQ ID NO: 1789123 - RNA, 19 nt, Homo sapiens
  misc_RNA (1)...(19): siRNA sense strand
uagggugucuuuuaagcua

SEQ ID NO: 1789124 - RNA, 19 nt, Homo sapiens
  misc_RNA (1)...(19): siRNA sense strand
guuagaugacgaauauauc

SEQ ID NO: 1789125 - RNA, 19 nt, Homo sapiens
  misc_RNA (1)...(19): siRNA sense strand
uaagcuauuggagcaaauu

SEQ ID NO: 1789126 - RNA, 19 nt, Homo sapiens
  misc_RNA (1)...(19): siRNA sense strand
ggauuacccuuucuucuua

SEQ ID NO: 1789127 - RNA, 19 nt, Homo sapiens
  misc_RNA (1)...(19): siRNA sense strand
gggaaaggauugaacuaua

SEQ ID NO: 1789128 - RNA, 19 nt, Homo sapiens
  misc_RNA (1)...(19): siRNA sense strand
acaagugccuguuggauua

SEQ ID NO: 1789129 - RNA, 19 nt, Homo sapiens
  misc_RNA (1)...(19): siRNA sense strand
ggagacugauauacacuua

SEQ ID NO: 1789130 - RNA, 19 nt, Homo sapiens
  misc_RNA (1)...(19): siRNA sense strand
ggaaagagaaguuagaaug

SEQ ID NO: 1789131 - RNA, 19 nt, Homo sapiens
  misc_RNA (1)...(19): siRNA sense strand
gaaagagaaguuagaauga

SEQ ID NO: 1789132 - RNA, 19 nt, Homo sapiens
  misc_RNA (1)...(19): siRNA sense strand
uaacauccauaucaacgua

SEQ ID NO: 1789133 - RNA, 19 nt, Homo sapiens
  misc_RNA (1)...(19): siRNA sense strand
ggaaaggauugaacuauac

SEQ ID NO: 1789134 - RNA, 19 nt, Homo sapiens
  misc_RNA (1)...(19): siRNA sense strand
guuaagaggucuacaagug

SEQ ID NO: 1789135 - RNA, 19 nt, Homo sapiens
  misc_RNA (1)...(19): siRNA sense strand
gaaguaagaaugaggaaga

SEQ ID NO: 1789136 - RNA, 19 nt, Homo sapiens
  misc_RNA (1)...(19): siRNA sense strand
gcacuugugucauaagauc

SEQ ID NO: 1789137 - RNA, 19 nt, Homo sapiens
  misc_RNA (1)...(19): siRNA sense strand
ccuaauggguuaagagauu

SEQ ID NO: 1789138 - RNA, 19 nt, Homo sapiens
  misc_RNA (1)...(19): siRNA sense strand
gaaguuagaaugagaagau

SEQ ID NO: 1789139 - RNA, 19 nt, Homo sapiens
  misc_RNA (1)...(19): siRNA sense strand
aacacuagcugauuuauug

SEQ ID NO: 1789140 - RNA, 19 nt, Homo sapiens
  misc_RNA (1)...(19): siRNA sense strand
cagcauaacugugaugguu

SEQ ID NO: 1789141 - RNA, 19 nt, Homo sapiens
  misc_RNA (1)...(19): siRNA sense strand
gauacaggaugacacauuc

SEQ ID NO: 1789142 - RNA, 19 nt, Homo sapiens
  misc_RNA (1)...(19): siRNA sense strand
caacugggauuuccuaucg

SEQ ID NO: 1789143 - RNA, 19 nt, Homo sapiens
  misc_RNA (1)...(19): siRNA sense strand
uaccugcacuugugucaua

SEQ ID NO: 1789144 - RNA, 19 nt, Homo sapiens
  misc_RNA (1)...(19): siRNA sense strand
gcaauguaauguaaucaca

SEQ ID NO: 1789145 - RNA, 19 nt, Homo sapiens
  misc_RNA (1)...(19): siRNA sense strand
gaaagaaagguggcuggua

SEQ ID NO: 1789146 - RNA, 19 nt, Homo sapiens
  misc_RNA (1)...(19): siRNA sense strand
gaagauacaggaugacaca

SEQ ID NO: 1789147 - RNA, 19 nt, Homo sapiens
  misc_RNA (1)...(19): siRNA sense strand
gcaugugggccguuuagua

SEQ ID NO: 1789148 - RNA, 19 nt, Homo sapiens
  misc_RNA (1)...(19): siRNA sense strand
guaauguaaucacaagguu

SEQ ID NO: 1789149 - RNA, 19 nt, Homo sapiens
  misc_RNA (1)...(19): siRNA sense strand
guuguucccuaauggguua

SEQ ID NO: 1789150 - RNA, 19 nt, Homo sapiens
  misc_RNA (1)...(19): siRNA sense strand
uaaagcagcuaacauccau

SEQ ID NO: 1789151 - RNA, 19 nt, Homo sapiens
  misc_RNA (1)...(19): siRNA sense strand
gcaagaaaucagucaauuc

SEQ ID NO: 1789152 - RNA, 19 nt, Homo sapiens
  misc_RNA (1)...(19): siRNA sense strand
cagcuaacauccauaucaa

SEQ ID NO: 1789153 - RNA, 19 nt, Homo sapiens
  misc_RNA (1)...(19): siRNA sense strand
caagcaauguaauguaauc

SEQ ID NO: 1789154 - RNA, 19 nt, Homo sapiens
  misc_RNA (1)...(19): siRNA sense strand
gauagaaacauccagugaa

SEQ ID NO: 1789155 - RNA, 19 nt, Homo sapiens
  misc_RNA (1)...(19): siRNA sense strand
gauaucauuucugugcuuu

SEQ ID NO: 1789156 - RNA, 19 nt, Homo sapiens
  misc_RNA (1)...(19): siRNA sense strand
gcagcuaacauccauauca

SEQ ID NO: 1789157 - RNA, 19 nt, Homo sapiens
  misc_RNA (1)...(19): siRNA sense strand
gcugauuuauugacacuug

SEQ ID NO: 1789158 - RNA, 19 nt, Homo sapiens
  misc_RNA (1)...(19): siRNA sense strand
agaaaucagucaauuccaa

SEQ ID NO: 1789159 - RNA, 19 nt, Homo sapiens
  misc_RNA (1)...(19): siRNA sense strand
gcaugacuuugaccugaaa

SEQ ID NO: 1789160 - RNA, 19 nt, Homo sapiens
  misc_RNA (1)...(19): siRNA sense strand
caccaaaguucuauguguu

SEQ ID NO: 1789161 - RNA, 19 nt, Homo sapiens
  misc_RNA (1)...(19): siRNA sense strand
gaacuauaccugcacuugu

SEQ ID NO: 1789162 - RNA, 19 nt, Homo sapiens
  misc_RNA (1)...(19): siRNA sense strand
gcugguagcugggcuguca

SEQ ID NO: 1789163 - RNA, 19 nt, Homo sapiens
  misc_RNA (1)...(19): siRNA sense strand
aaagaaagagcaagaaauc

SEQ ID NO: 1789164 - RNA, 19 nt, Homo sapiens
  misc_RNA (1)...(19): siRNA sense strand
gaaugcaggcaaaugguuu

SEQ ID NO: 1789165 - RNA, 19 nt, Homo sapiens
  misc_RNA (1)...(19): siRNA sense strand
caugauguccuuugagaaa

SEQ ID NO: 1789166 - RNA, 19 nt, Homo sapiens
  misc_RNA (1)...(19): siRNA sense strand
gagauuauaaagcagcuaa

SEQ ID NO: 1789167 - RNA, 19 nt, Homo sapiens
  misc_RNA (1)...(19): siRNA sense strand
agaaugaggaagauagaua

SEQ ID NO: 1789168 - RNA, 19 nt, Homo sapiens
  misc_RNA (1)...(19): siRNA sense strand
cucaagcaauguaauguaa

SEQ ID NO: 1789169 - RNA, 19 nt, Homo sapiens
  misc_RNA (1)...(19): siRNA sense strand
guuaugaucaugugccuuu

SEQ ID NO: 1789170 - RNA, 19 nt, Homo sapiens
  misc_RNA (1)...(19): siRNA sense strand
gauuuauucucccugcauu

SEQ ID NO: 1789171 - RNA, 19 nt, Homo sapiens
  misc_RNA (1)...(19): siRNA sense strand
agaggcagauaaagaaaga

SEQ ID NO: 1789172 - RNA, 19 nt, Homo sapiens
  misc_RNA (1)...(19): siRNA sense strand
gauccugacugccuacucu

SEQ ID NO: 1789173 - RNA, 19 nt, Homo sapiens
  misc_RNA (1)...(19): siRNA sense strand
auagaaacauccagugaau

SEQ ID NO: 1789174 - RNA, 19 nt, Homo sapiens
  misc_RNA (1)...(19): siRNA sense strand
gaaagagcaagaaaucagu

SEQ ID NO: 1789175 - RNA, 19 nt, Homo sapiens
  misc_RNA (1)...(19): siRNA sense strand
caacacuagcugauuuauu

SEQ ID NO: 1789176 - RNA, 19 nt, Homo sapiens
  misc_RNA (1)...(19): siRNA sense strand
gaaugaggaagauagauag

SEQ ID NO: 1789177 - RNA, 19 nt, Homo sapiens
  misc_RNA (1)...(19): siRNA sense strand
guaagaaugaggaagauag

SEQ ID NO: 1789178 - RNA, 19 nt, Homo sapiens
  misc_RNA (1)...(19): siRNA sense strand
cacccucacuucuucauga

SEQ ID NO: 1789179 - RNA, 19 nt, Homo sapiens
  misc_RNA (1)...(19): siRNA sense strand
gcgugauccuugccucuaa

SEQ ID NO: 1789180 - RNA, 19 nt, Homo sapiens
  misc_RNA (1)...(19): siRNA sense strand
gucauaagauccugauucu

SEQ ID NO: 1789181 - RNA, 19 nt, Homo sapiens
  misc_RNA (1)...(19): siRNA sense strand
caacguauacaccgucaau

SEQ ID NO: 1789182 - RNA, 19 nt, Homo sapiens
  misc_RNA (1)...(19): siRNA sense strand
gcagauaaagaaagagcaa

SEQ ID NO: 1789183 - RNA, 19 nt, Homo sapiens
  misc_RNA (1)...(19): siRNA sense strand
aaccagagcucaggccauu

SEQ ID NO: 1789184 - RNA, 19 nt, Homo sapiens
  misc_RNA (1)...(19): siRNA sense strand
gauuuccuaucgacucuga

SEQ ID NO: 1789185 - RNA, 19 nt, Homo sapiens
  misc_RNA (1)...(19): siRNA sense strand
ucauugcuguuguuacuug

SEQ ID NO: 1789186 - RNA, 19 nt, Homo sapiens
  misc_RNA (1)...(19): siRNA sense strand
gcuagugauucuucugugu

SEQ ID NO: 1789187 - RNA, 19 nt, Homo sapiens
  misc_RNA (1)...(19): siRNA sense strand
aagagaaguuagaaugaga

SEQ ID NO: 1789188 - RNA, 19 nt, Homo sapiens
  misc_RNA (1)...(19): siRNA sense strand
gagcaagaaaucagucaau

SEQ ID NO: 1789189 - RNA, 19 nt, Homo sapiens
  misc_RNA (1)...(19): siRNA sense strand
gauaaagaaagagcaagaa

SEQ ID NO: 1789190 - RNA, 19 nt, Homo sapiens
  misc_RNA (1)...(19): siRNA sense strand
agaauaccaugauguccuu

SEQ ID NO: 1789191 - RNA, 19 nt, Homo sapiens
  misc_RNA (1)...(19): siRNA sense strand
gcuccaggauuaacucagu

SEQ ID NO: 1789192 - RNA, 19 nt, Homo sapiens
  misc_RNA (1)...(19): siRNA sense strand
caugugggccguuuaguau

SEQ ID NO: 1789193 - RNA, 19 nt, Homo sapiens
  misc_RNA (1)...(19): siRNA sense strand
ucagucaauuccaacacua

SEQ ID NO: 1789194 - RNA, 19 nt, Homo sapiens
  misc_RNA (1)...(19): siRNA sense strand
uagcugggcugucaaugca

SEQ ID NO: 1789195 - RNA, 19 nt, Homo sapiens
  misc_RNA (1)...(19): siRNA sense strand
acauugggcuccugaguca

SEQ ID NO: 1789196 - RNA, 19 nt, Homo sapiens
  misc_RNA (1)...(19): siRNA sense strand
aagaaguuguucccuaaug

SEQ ID NO: 1789197 - RNA, 19 nt, Homo sapiens
  misc_RNA (1)...(19): siRNA sense strand
agacugauauacacuuaag

SEQ ID NO: 1789198 - RNA, 19 nt, Homo sapiens
  misc_RNA (1)...(19): siRNA sense strand
aaacauccagugaauacuu

SEQ ID NO: 1789199 - RNA, 19 nt, Homo sapiens
  misc_RNA (1)...(19): siRNA sense strand
ccauugaaacccuugcuaa

SEQ ID NO: 1789200 - RNA, 19 nt, Homo sapiens
  misc_RNA (1)...(19): siRNA sense strand
caauaugaaaccucuauca

SEQ ID NO: 1789201 - RNA, 19 nt, Homo sapiens
  misc_RNA (1)...(19): siRNA sense strand
gauuggagacugauauaca

SEQ ID NO: 1789202 - RNA, 19 nt, Homo sapiens
  misc_RNA (1)...(19): siRNA sense strand
aaagagaaguuagaaugag

SEQ ID NO: 1789203 - RNA, 19 nt, Homo sapiens
  misc_RNA (1)...(19): siRNA sense strand
uauugacacuugcagagaa

SEQ ID NO: 1789204 - RNA, 19 nt, Homo sapiens
  misc_RNA (1)...(19): siRNA sense strand
ggaacaggauacugguuuu

SEQ ID NO: 1789205 - RNA, 19 nt, Homo sapiens
  misc_RNA (1)...(19): siRNA sense strand
cuacguggcauguuuggaa

SEQ ID NO: 1789206 - RNA, 19 nt, Homo sapiens
  misc_RNA (1)...(19): siRNA sense strand
aaaguucuauguguucaug

SEQ ID NO: 1789207 - RNA, 19 nt, Homo sapiens
  misc_RNA (1)...(19): siRNA sense strand
uuccaacacuagcugauuu

SEQ ID NO: 1789208 - RNA, 19 nt, Homo sapiens
  misc_RNA (1)...(19): siRNA sense strand
augagaagauacaggauga

SEQ ID NO: 1789209 - RNA, 19 nt, Homo sapiens
  misc_RNA (1)...(19): siRNA sense strand
ccaaaguucuauguguuca

SEQ ID NO: 1789210 - RNA, 19 nt, Homo sapiens
  misc_RNA (1)...(19): siRNA sense strand
caagaaaucagucaauucc

SEQ ID NO: 1789211 - RNA, 19 nt, Homo sapiens
  misc_RNA (1)...(19): siRNA sense strand
gauuacccuuucuucuuau

SEQ ID NO: 1789212 - RNA, 19 nt, Homo sapiens
  misc_RNA (1)...(19): siRNA sense strand
cguuuaguauccauugaaa

SEQ ID NO: 1789213 - RNA, 19 nt, Homo sapiens
  misc_RNA (1)...(19): siRNA sense strand
uaagaaugaggaagauaga

SEQ ID NO: 1789214 - RNA, 19 nt, Homo sapiens
  misc_RNA (1)...(19): siRNA sense strand
cauugaaacccuugcuaaa

SEQ ID NO: 1789215 - RNA, 19 nt, Homo sapiens
  misc_RNA (1)...(19): siRNA sense strand
aacauccagugaauacuuu

SEQ ID NO: 1789216 - RNA, 19 nt, Homo sapiens
  misc_RNA (1)...(19): siRNA sense strand
agaaacauccagugaauac

SEQ ID NO: 1789217 - RNA, 19 nt, Homo sapiens
  misc_RNA (1)...(19): siRNA sense strand
gcauucaggagaaggagaa

SEQ ID NO: 1789218 - RNA, 19 nt, Homo sapiens
  misc_RNA (1)...(19): siRNA sense strand
uggcauguuuggaaagaga

SEQ ID NO: 1789219 - RNA, 19 nt, Homo sapiens
  misc_RNA (1)...(19): siRNA sense strand
acauccauaucaacguaua

SEQ ID NO: 1789220 - RNA, 19 nt, Homo sapiens
  misc_RNA (1)...(19): siRNA sense strand
agcaagaaaucagucaauu

SEQ ID NO: 1789221 - RNA, 19 nt, Homo sapiens
  misc_RNA (1)...(19): siRNA sense strand
gcccaagccaaccaucuuu

SEQ ID NO: 1789222 - RNA, 19 nt, Homo sapiens
  misc_RNA (1)...(19): siRNA sense strand
ccuucuacguggcauguuu

SEQ ID NO: 1789223 - RNA, 19 nt, Homo sapiens
  misc_RNA (1)...(19): siRNA sense strand
uuaacucagugaccacaga

SEQ ID NO: 1789224 - RNA, 19 nt, Homo sapiens
  misc_RNA (1)...(19): siRNA sense strand
gcuccuugcagauaucauu

SEQ ID NO: 1789225 - RNA, 19 nt, Homo sapiens
  misc_RNA (1)...(19): siRNA sense strand
ugaucacccucacuucuuc

SEQ ID NO: 1789226 - RNA, 19 nt, Homo sapiens
  misc_RNA (1)...(19): siRNA sense strand
ccaggaaugucuugaaaua

SEQ ID NO: 1789227 - RNA, 19 nt, Homo sapiens
  misc_RNA (1)...(19): siRNA sense strand
ggaaugucuugaaauauga

SEQ ID NO: 1789228 - RNA, 19 nt, Homo sapiens
  misc_RNA (1)...(19): siRNA sense strand
aaaccgaguugcaacauuu

SEQ ID NO: 1789229 - RNA, 19 nt, Homo sapiens
  misc_RNA (1)...(19): siRNA sense strand
gcagaaccauggcuacaga

SEQ ID NO: 1789230 - RNA, 19 nt, Homo sapiens
  misc_RNA (1)...(19): siRNA sense strand
gaaaccgaguugcaacauu

SEQ ID NO: 1789231 - RNA, 19 nt, Homo sapiens
  misc_RNA (1)...(19): siRNA sense strand
gcaagaccuuccagccuuu

SEQ ID NO: 1789232 - RNA, 19 nt, Homo sapiens
  misc_RNA (1)...(19): siRNA sense strand
gaugacugcuuccaaguug

SEQ ID NO: 1789233 - RNA, 19 nt, Homo sapiens
  misc_RNA (1)...(19): siRNA sense strand
ucaaacgccugcagucuga

SEQ ID NO: 1789234 - RNA, 19 nt, Homo sapiens
  misc_RNA (1)...(19): siRNA sense strand
acaaguggauacaugagua

SEQ ID NO: 1789235 - RNA, 19 nt, Homo sapiens
  misc_RNA (1)...(19): siRNA sense strand
ggccaggaaugucuugaaa

SEQ ID NO: 1789236 - RNA, 19 nt, Homo sapiens
  misc_RNA (1)...(19): siRNA sense strand
gaagaugccuuggaucacu

SEQ ID NO: 1789237 - RNA, 19 nt, Homo sapiens
  misc_RNA (1)...(19): siRNA sense strand
caagguggccuaugacaug

SEQ ID NO: 1789238 - RNA, 19 nt, Homo sapiens
  misc_RNA (1)...(19): siRNA sense strand
gagaacauccgagcucuga

SEQ ID NO: 1789239 - RNA, 19 nt, Homo sapiens
  misc_RNA (1)...(19): siRNA sense strand
aggaaugucuugaaauaug

SEQ ID NO: 1789240 - RNA, 19 nt, Homo sapiens
  misc_RNA (1)...(19): siRNA sense strand
gccaacaaguggauacaug

SEQ ID NO: 1789241 - RNA, 19 nt, Homo sapiens
  misc_RNA (1)...(19): siRNA sense strand
ucacuuggccuuugcuuau

SEQ ID NO: 1789242 - RNA, 19 nt, Homo sapiens
  misc_RNA (1)...(19): siRNA sense strand
cuacauugcucucuaccau

SEQ ID NO: 1789243 - RNA, 19 nt, Homo sapiens
  misc_RNA (1)...(19): siRNA sense strand
acauugcucucuaccauga

SEQ ID NO: 1789244 - RNA, 19 nt, Homo sapiens
  misc_RNA (1)...(19): siRNA sense strand
caagguacuuucuuugcau

SEQ ID NO: 1789245 - RNA, 19 nt, Homo sapiens
  misc_RNA (1)...(19): siRNA sense strand
gaacauccgagcucugaag

SEQ ID NO: 1789246 - RNA, 19 nt, Homo sapiens
  misc_RNA (1)...(19): siRNA sense strand
gggagaagcaguuacaagu

SEQ ID NO: 1789247 - RNA, 19 nt, Homo sapiens
  misc_RNA (1)...(19): siRNA sense strand
ggagaagcaguuacaagug

SEQ ID NO: 1789248 - RNA, 19 nt, Homo sapiens
  misc_RNA (1)...(19): siRNA sense strand
ucuagaagaugccuuggau

SEQ ID NO: 1789249 - RNA, 19 nt, Homo sapiens
  misc_RNA (1)...(19): siRNA sense strand
acgacaagguacuuucuuu

SEQ ID NO: 1789250 - RNA, 19 nt, Homo sapiens
  misc_RNA (1)...(19): siRNA sense strand
ggaugaggcaagucuagaa

SEQ ID NO: 1789251 - RNA, 19 nt, Homo sapiens
  misc_RNA (1)...(19): siRNA sense strand
ccacagccuucaucuaugc

SEQ ID NO: 1789252 - RNA, 19 nt, Homo sapiens
  misc_RNA (1)...(19): siRNA sense strand
gaagucaggaaaccgaguu

SEQ ID NO: 1789253 - RNA, 19 nt, Homo sapiens
  misc_RNA (1)...(19): siRNA sense strand
caaguggaguaccgcauca

SEQ ID NO: 1789254 - RNA, 19 nt, Homo sapiens
  misc_RNA (1)...(19): siRNA sense strand
auaagaggauggccaggaa

SEQ ID NO: 1789255 - RNA, 19 nt, Homo sapiens
  misc_RNA (1)...(19): siRNA sense strand
ccagaucccuagccucuac

SEQ ID NO: 1789256 - RNA, 19 nt, Homo sapiens
  misc_RNA (1)...(19): siRNA sense strand
auaaguggguggccaacaa

SEQ ID NO: 1789257 - RNA, 19 nt, Homo sapiens
  misc_RNA (1)...(19): siRNA sense strand
ggaugacugcuuccaaguu

SEQ ID NO: 1789258 - RNA, 19 nt, Homo sapiens
  misc_RNA (1)...(19): siRNA sense strand
ccaacaaguggauacauga

SEQ ID NO: 1789259 - RNA, 19 nt, Homo sapiens
  misc_RNA (1)...(19): siRNA sense strand
cgaguugcaacauuuauga

SEQ ID NO: 1789260 - RNA, 19 nt, Homo sapiens
  misc_RNA (1)...(19): siRNA sense strand
cagccucucucgggaguuu

SEQ ID NO: 1789261 - RNA, 19 nt, Homo sapiens
  misc_RNA (1)...(19): siRNA sense strand
uagaagaugccuuggauca

SEQ ID NO: 1789262 - RNA, 19 nt, Homo sapiens
  misc_RNA (1)...(19): siRNA sense strand
ugaggcaagucuagaagau

SEQ ID NO: 1789263 - RNA, 19 nt, Homo sapiens
  misc_RNA (1)...(19): siRNA sense strand
gaaggauggcuaugagaag

SEQ ID NO: 1789264 - RNA, 19 nt, Homo sapiens
  misc_RNA (1)...(19): siRNA sense strand
caacaaccccuguggcuaa

SEQ ID NO: 1789265 - RNA, 19 nt, Homo sapiens
  misc_RNA (1)...(19): siRNA sense strand
cgacaagguacuuucuuug

SEQ ID NO: 1789266 - RNA, 19 nt, Homo sapiens
  misc_RNA (1)...(19): siRNA sense strand
ugacucagaggcucagaaa

SEQ ID NO: 1789267 - RNA, 19 nt, Homo sapiens
  misc_RNA (1)...(19): siRNA sense strand
cuccagcccugaagacuga

SEQ ID NO: 1789268 - RNA, 19 nt, Homo sapiens
  misc_RNA (1)...(19): siRNA sense strand
ugcgggaccugacuagauu

SEQ ID NO: 1789269 - RNA, 19 nt, Homo sapiens
  misc_RNA (1)...(19): siRNA sense strand
ccgcauugcugcccucaca

SEQ ID NO: 1789270 - RNA, 19 nt, Homo sapiens
  misc_RNA (1)...(19): siRNA sense strand
gaaauaugaaaggcucuug

SEQ ID NO: 1789271 - RNA, 19 nt, Homo sapiens
  misc_RNA (1)...(19): siRNA sense strand
ugcauuuacucucaucaaa

SEQ ID NO: 1789272 - RNA, 19 nt, Homo sapiens
  misc_RNA (1)...(19): siRNA sense strand
cuaacccucugcuugcauu

SEQ ID NO: 1789273 - RNA, 19 nt, Homo sapiens
  misc_RNA (1)...(19): siRNA sense strand
ugaaggauggcuaugagaa

SEQ ID NO: 1789274 - RNA, 19 nt, Homo sapiens
  misc_RNA (1)...(19): siRNA sense strand
gaucuuacggagaguggaa

SEQ ID NO: 1789275 - RNA, 19 nt, Homo sapiens
  misc_RNA (1)...(19): siRNA sense strand
uaggaaugcagcacuguuu

SEQ ID NO: 1789276 - RNA, 19 nt, Homo sapiens
  misc_RNA (1)...(19): siRNA sense strand
ggacaggagacccagaaag

SEQ ID NO: 1789277 - RNA, 19 nt, Homo sapiens
  misc_RNA (1)...(19): siRNA sense strand
gacaggagacccagaaagg

SEQ ID NO: 1789278 - RNA, 19 nt, Homo sapiens
  misc_RNA (1)...(19): siRNA sense strand
ccuaugagaccaauuccaa

SEQ ID NO: 1789279 - RNA, 19 nt, Homo sapiens
  misc_RNA (1)...(19): siRNA sense strand
gggaguuucuucucuacag

SEQ ID NO: 1789280 - RNA, 19 nt, Homo sapiens
  misc_RNA (1)...(19): siRNA sense strand
augagaagguggagcaaga

SEQ ID NO: 1789281 - RNA, 19 nt, Homo sapiens
  misc_RNA (1)...(19): siRNA sense strand
gccacagccuucaucuaug

SEQ ID NO: 1789282 - RNA, 19 nt, Homo sapiens
  misc_RNA (1)...(19): siRNA sense strand
ggacacuguugacccaaaa

SEQ ID NO: 1789283 - RNA, 19 nt, Homo sapiens
  misc_RNA (1)...(19): siRNA sense strand
aaacggcucuuuucucuca

SEQ ID NO: 1789284 - RNA, 19 nt, Homo sapiens
  misc_RNA (1)...(19): siRNA sense strand
acaagguacuuucuuugca

SEQ ID NO: 1789285 - RNA, 19 nt, Homo sapiens
  misc_RNA (1)...(19): siRNA sense strand
gacagaggaugaggcaagu

SEQ ID NO: 1789286 - RNA, 19 nt, Homo sapiens
  misc_RNA (1)...(19): siRNA sense strand
ccaaacggcucuuuucucu

SEQ ID NO: 1789287 - RNA, 19 nt, Homo sapiens
  misc_RNA (1)...(19): siRNA sense strand
gagccacagccuucaucua

SEQ ID NO: 1789288 - RNA, 19 nt, Homo sapiens
  misc_RNA (1)...(19): siRNA sense strand
ggaguaccgcaucagcaaa

SEQ ID NO: 1789289 - RNA, 19 nt, Homo sapiens
  misc_RNA (1)...(19): siRNA sense strand
uuggcaagguggccuauga

SEQ ID NO: 1789290 - RNA, 19 nt, Homo sapiens
  misc_RNA (1)...(19): siRNA sense strand
guugcaacauuuaugaucu

SEQ ID NO: 1789291 - RNA, 19 nt, Homo sapiens
  misc_RNA (1)...(19): siRNA sense strand
gucagucucuuccgaggau

SEQ ID NO: 1789292 - RNA, 19 nt, Homo sapiens
  misc_RNA (1)...(19): siRNA sense strand
cugcuugcauuuacucuca

SEQ ID NO: 1789293 - RNA, 19 nt, Homo sapiens
  misc_RNA (1)...(19): siRNA sense strand
acaugaguauggacaggaa

SEQ ID NO: 1789294 - RNA, 19 nt, Homo sapiens
  misc_RNA (1)...(19): siRNA sense strand
ucccuagccucuacuguuc

SEQ ID NO: 1789295 - RNA, 19 nt, Homo sapiens
  misc_RNA (1)...(19): siRNA sense strand
ucuacagcccagauaauaa

SEQ ID NO: 1789296 - RNA, 19 nt, Homo sapiens
  misc_RNA (1)...(19): siRNA sense strand
gcaagguggccuaugacau

SEQ ID NO: 1789297 - RNA, 19 nt, Homo sapiens
  misc_RNA (1)...(19): siRNA sense strand
ggauuauuaccaugccauu

SEQ ID NO: 1789298 - RNA, 19 nt, Homo sapiens
  misc_RNA (1)...(19): siRNA sense strand
uagagaacuugcagaacca

SEQ ID NO: 1789299 - RNA, 19 nt, Homo sapiens
  misc_RNA (1)...(19): siRNA sense strand
ccaccuggagcccuacauu

SEQ ID NO: 1789300 - RNA, 19 nt, Homo sapiens
  misc_RNA (1)...(19): siRNA sense strand
cuacagcccagauaauaag

SEQ ID NO: 1789301 - RNA, 19 nt, Homo sapiens
  misc_RNA (1)...(19): siRNA sense strand
gaggaugaggcaagucuag

SEQ ID NO: 1789302 - RNA, 19 nt, Homo sapiens
  misc_RNA (1)...(19): siRNA sense strand
ugccaucacugaccuguac

SEQ ID NO: 1789303 - RNA, 19 nt, Homo sapiens
  misc_RNA (1)...(19): siRNA sense strand
agccacagccuucaucuau

SEQ ID NO: 1789304 - RNA, 19 nt, Homo sapiens
  misc_RNA (1)...(19): siRNA sense strand
ggaggccagugagaacauc

SEQ ID NO: 1789305 - RNA, 19 nt, Homo sapiens
  misc_RNA (1)...(19): siRNA sense strand
ggaaaccgaguugcaacau

SEQ ID NO: 1789306 - RNA, 19 nt, Homo sapiens
  misc_RNA (1)...(19): siRNA sense strand
gacaagguacuuucuuugc

SEQ ID NO: 1789307 - RNA, 19 nt, Homo sapiens
  misc_RNA (1)...(19): siRNA sense strand
cauuuacucucaucaaacg

SEQ ID NO: 1789308 - RNA, 19 nt, Homo sapiens
  misc_RNA (1)...(19): siRNA sense strand
gcccagauaauaagaggau

SEQ ID NO: 1789309 - RNA, 19 nt, Homo sapiens
  misc_RNA (1)...(19): siRNA sense strand
cauccagaggcccaauaua

SEQ ID NO: 1789310 - RNA, 19 nt, Homo sapiens
  misc_RNA (1)...(19): siRNA sense strand
ggacguguacaugcucaau

SEQ ID NO: 1789311 - RNA, 19 nt, Homo sapiens
  misc_RNA (1)...(19): siRNA sense strand
gcauuuacucucaucaaac

SEQ ID NO: 1789312 - RNA, 19 nt, Homo sapiens
  misc_RNA (1)...(19): siRNA sense strand
aauuagagaacuugcagaa

SEQ ID NO: 1789313 - RNA, 19 nt, Homo sapiens
  misc_RNA (1)...(19): siRNA sense strand
guucccagcccacucucua

SEQ ID NO: 1789314 - RNA, 19 nt, Homo sapiens
  misc_RNA (1)...(19): siRNA sense strand
gaugaggcaagucuagaag

SEQ ID NO: 1789315 - RNA, 19 nt, Homo sapiens
  misc_RNA (1)...(19): siRNA sense strand
ucugaaggauggcuaugag

SEQ ID NO: 1789316 - RNA, 19 nt, Homo sapiens
  misc_RNA (1)...(19): siRNA sense strand
ucaggaaaccgaguugcaa

SEQ ID NO: 1789317 - RNA, 19 nt, Homo sapiens
  misc_RNA (1)...(19): siRNA sense strand
ugacuggaggaauguggua

SEQ ID NO: 1789318 - RNA, 19 nt, Homo sapiens
  misc_RNA (1)...(19): siRNA sense strand
guuccuaugagaccaauuc

SEQ ID NO: 1789319 - RNA, 19 nt, Homo sapiens
  misc_RNA (1)...(19): siRNA sense strand
acuuggccuuugcuuauuu

SEQ ID NO: 1789320 - RNA, 19 nt, Homo sapiens
  misc_RNA (1)...(19): siRNA sense strand
cacuuggccuuugcuuauu

SEQ ID NO: 1789321 - RNA, 19 nt, Homo sapiens
  misc_RNA (1)...(19): siRNA sense strand
gaggugucuuucagagagu

SEQ ID NO: 1789322 - RNA, 19 nt, Homo sapiens
  misc_RNA (1)...(19): siRNA sense strand
ccucuacuguuccuaugag

SEQ ID NO: 1789323 - RNA, 19 nt, Homo sapiens
  misc_RNA (1)...(19): siRNA sense strand
caacaaguggauacaugag

SEQ ID NO: 1789324 - RNA, 19 nt, Homo sapiens
  misc_RNA (1)...(19): siRNA sense strand
gcaguuacaaguggaguac

SEQ ID NO: 1789325 - RNA, 19 nt, Homo sapiens
  misc_RNA (1)...(19): siRNA sense strand
gcccuacauugcucucuac

SEQ ID NO: 1789326 - RNA, 19 nt, Homo sapiens
  misc_RNA (1)...(19): siRNA sense strand
gagaaugcauggagauuua

SEQ ID NO: 1789327 - RNA, 19 nt, Homo sapiens
  misc_RNA (1)...(19): siRNA sense strand
ggaaacgugugaaguacua

SEQ ID NO: 1789328 - RNA, 19 nt, Homo sapiens
  misc_RNA (1)...(19): siRNA sense strand
caaccgaccuggacuacuu

SEQ ID NO: 1789329 - RNA, 19 nt, Homo sapiens
  misc_RNA (1)...(19): siRNA sense strand
caaggaaacgugugaagua

SEQ ID NO: 1789330 - RNA, 19 nt, Homo sapiens
  misc_RNA (1)...(19): siRNA sense strand
gcagaaguacccauuauug

SEQ ID NO: 1789331 - RNA, 19 nt, Homo sapiens
  misc_RNA (1)...(19): siRNA sense strand
agaaagagcuacaaucagu

SEQ ID NO: 1789332 - RNA, 19 nt, Homo sapiens
  misc_RNA (1)...(19): siRNA sense strand
agacuucucugacuucuug

SEQ ID NO: 1789333 - RNA, 19 nt, Homo sapiens
  misc_RNA (1)...(19): siRNA sense strand
gaagcagaaguacccauua

SEQ ID NO: 1789334 - RNA, 19 nt, Homo sapiens
  misc_RNA (1)...(19): siRNA sense strand
aaagaaagagcuacaauca

SEQ ID NO: 1789335 - RNA, 19 nt, Homo sapiens
  misc_RNA (1)...(19): siRNA sense strand
agugagagguugauacuga

SEQ ID NO: 1789336 - RNA, 19 nt, Homo sapiens
  misc_RNA (1)...(19): siRNA sense strand
gcaggucagccuacacuuu

SEQ ID NO: 1789337 - RNA, 19 nt, Homo sapiens
  misc_RNA (1)...(19): siRNA sense strand
ucacauugaugguguaugg

SEQ ID NO: 1789338 - RNA, 19 nt, Homo sapiens
  misc_RNA (1)...(19): siRNA sense strand
gaaacuguccucucaaguc

SEQ ID NO: 1789339 - RNA, 19 nt, Homo sapiens
  misc_RNA (1)...(19): siRNA sense strand
aaacuguccucucaaguca

SEQ ID NO: 1789340 - RNA, 19 nt, Homo sapiens
  misc_RNA (1)...(19): siRNA sense strand
acaccaauguaaucuacua

SEQ ID NO: 1789341 - RNA, 19 nt, Homo sapiens
  misc_RNA (1)...(19): siRNA sense strand
ggaagcagaaguacccauu

SEQ ID NO: 1789342 - RNA, 19 nt, Homo sapiens
  misc_RNA (1)...(19): siRNA sense strand
ucacaaagcaguuggcaau

SEQ ID NO: 1789343 - RNA, 19 nt, Homo sapiens
  misc_RNA (1)...(19): siRNA sense strand
gcuaggaucgauuacagua

SEQ ID NO: 1789344 - RNA, 19 nt, Homo sapiens
  misc_RNA (1)...(19): siRNA sense strand
gauccagacaggaguagua

SEQ ID NO: 1789345 - RNA, 19 nt, Homo sapiens
  misc_RNA (1)...(19): siRNA sense strand
gugaacagcucuacaaucc

SEQ ID NO: 1789346 - RNA, 19 nt, Homo sapiens
  misc_RNA (1)...(19): siRNA sense strand
gggauuagaaugugguaaa

SEQ ID NO: 1789347 - RNA, 19 nt, Homo sapiens
  misc_RNA (1)...(19): siRNA sense strand
ggauuagaaugugguaaau

SEQ ID NO: 1789348 - RNA, 19 nt, Homo sapiens
  misc_RNA (1)...(19): siRNA sense strand
aagcagaaguacccauuau

SEQ ID NO: 1789349 - RNA, 19 nt, Homo sapiens
  misc_RNA (1)...(19): siRNA sense strand
ggaccuaacacuauacaca

SEQ ID NO: 1789350 - RNA, 19 nt, Homo sapiens
  misc_RNA (1)...(19): siRNA sense strand
ggauuaaugccacuauuuc

SEQ ID NO: 1789351 - RNA, 19 nt, Homo sapiens
  misc_RNA (1)...(19): siRNA sense strand
cagaaguacccauuauuga

SEQ ID NO: 1789352 - RNA, 19 nt, Homo sapiens
  misc_RNA (1)...(19): siRNA sense strand
caucaaggaagacaagauu

SEQ ID NO: 1789353 - RNA, 19 nt, Homo sapiens
  misc_RNA (1)...(19): siRNA sense strand
guaggugacucaaggaaac

SEQ ID NO: 1789354 - RNA, 19 nt, Homo sapiens
  misc_RNA (1)...(19): siRNA sense strand
gaagagaaugcauggagau

SEQ ID NO: 1789355 - RNA, 19 nt, Homo sapiens
  misc_RNA (1)...(19): siRNA sense strand
ggggaaaaguuaaggaaaa

SEQ ID NO: 1789356 - RNA, 19 nt, Homo sapiens
  misc_RNA (1)...(19): siRNA sense strand
acaaagcaguuggcaauuc

SEQ ID NO: 1789357 - RNA, 19 nt, Homo sapiens
  misc_RNA (1)...(19): siRNA sense strand
cggcagacgucgccuuguu

SEQ ID NO: 1789358 - RNA, 19 nt, Homo sapiens
  misc_RNA (1)...(19): siRNA sense strand
caucccaaguaccaagaua

SEQ ID NO: 1789359 - RNA, 19 nt, Homo sapiens
  misc_RNA (1)...(19): siRNA sense strand
auacagggcugggaagaga

SEQ ID NO: 1789360 - RNA, 19 nt, Homo sapiens
  misc_RNA (1)...(19): siRNA sense strand
ucaaggaagacaagauuug

SEQ ID NO: 1789361 - RNA, 19 nt, Homo sapiens
  misc_RNA (1)...(19): siRNA sense strand
gaaguacuacguguccaaa

SEQ ID NO: 1789362 - RNA, 19 nt, Homo sapiens
  misc_RNA (1)...(19): siRNA sense strand
guucuugcuuacacucuuu

SEQ ID NO: 1789363 - RNA, 19 nt, Homo sapiens
  misc_RNA (1)...(19): siRNA sense strand
acacuuugaccacaacuuu

SEQ ID NO: 1789364 - RNA, 19 nt, Homo sapiens
  misc_RNA (1)...(19): siRNA sense strand
uaaugccacuauuucaaga

SEQ ID NO: 1789365 - RNA, 19 nt, Homo sapiens
  misc_RNA (1)...(19): siRNA sense strand
ucugcuggguucuugcuua

SEQ ID NO: 1789366 - RNA, 19 nt, Homo sapiens
  misc_RNA (1)...(19): siRNA sense strand
gcagacgucgccuuguuga

SEQ ID NO: 1789367 - RNA, 19 nt, Homo sapiens
  misc_RNA (1)...(19): siRNA sense strand
ccaacaaucuagacuucuc

SEQ ID NO: 1789368 - RNA, 19 nt, Homo sapiens
  misc_RNA (1)...(19): siRNA sense strand
caaagcaguuggcaauucc

SEQ ID NO: 1789369 - RNA, 19 nt, Homo sapiens
  misc_RNA (1)...(19): siRNA sense strand
caagauuugugcuggugau

SEQ ID NO: 1789370 - RNA, 19 nt, Homo sapiens
  misc_RNA (1)...(19): siRNA sense strand
agacgucgccuuguugaaa

SEQ ID NO: 1789371 - RNA, 19 nt, Homo sapiens
  misc_RNA (1)...(19): siRNA sense strand
gauuaaugccacuauuuca

SEQ ID NO: 1789372 - RNA, 19 nt, Homo sapiens
  misc_RNA (1)...(19): siRNA sense strand
uguugaaacuguccucuca

SEQ ID NO: 1789373 - RNA, 19 nt, Homo sapiens
  misc_RNA (1)...(19): siRNA sense strand
cuuuggaccuaacacuaua

SEQ ID NO: 1789374 - RNA, 19 nt, Homo sapiens
  misc_RNA (1)...(19): siRNA sense strand
caggucagccuacacuuug

SEQ ID NO: 1789375 - RNA, 19 nt, Homo sapiens
  misc_RNA (1)...(19): siRNA sense strand
ucccaucgguaucuucuug

SEQ ID NO: 1789376 - RNA, 19 nt, Homo sapiens
  misc_RNA (1)...(19): siRNA sense strand
ccaauguaaucuacuacca

SEQ ID NO: 1789377 - RNA, 19 nt, Homo sapiens
  misc_RNA (1)...(19): siRNA sense strand
gauuugugcuggugauacu

SEQ ID NO: 1789378 - RNA, 19 nt, Homo sapiens
  misc_RNA (1)...(19): siRNA sense strand
guaguaagcuggggauuag

SEQ ID NO: 1789379 - RNA, 19 nt, Homo sapiens
  misc_RNA (1)...(19): siRNA sense strand
cgucauccaucccaaguac

SEQ ID NO: 1789380 - RNA, 19 nt, Homo sapiens
  misc_RNA (1)...(19): siRNA sense strand
caagagccaacaaucuaga

SEQ ID NO: 1789381 - RNA, 19 nt, Homo sapiens
  misc_RNA (1)...(19): siRNA sense strand
uggauuaaugccacuauuu

SEQ ID NO: 1789382 - RNA, 19 nt, Homo sapiens
  misc_RNA (1)...(19): siRNA sense strand
guuggcaauuccacccuuu

SEQ ID NO: 1789383 - RNA, 19 nt, Homo sapiens
  misc_RNA (1)...(19): siRNA sense strand
caauguaaucuacuaccaa

SEQ ID NO: 1789384 - RNA, 19 nt, Homo sapiens
  misc_RNA (1)...(19): siRNA sense strand
aaucuagacuucucugacu

SEQ ID NO: 1789385 - RNA, 19 nt, Homo sapiens
  misc_RNA (1)...(19): siRNA sense strand
ccucugucgugucacauug

SEQ ID NO: 1789386 - RNA, 19 nt, Homo sapiens
  misc_RNA (1)...(19): siRNA sense strand
aguaggcacuguagcugaa

SEQ ID NO: 1789387 - RNA, 19 nt, Homo sapiens
  misc_RNA (1)...(19): siRNA sense strand
gaaugugguaaaucucuuc

SEQ ID NO: 1789388 - RNA, 19 nt, Homo sapiens
  misc_RNA (1)...(19): siRNA sense strand
gagccaacaaucuagacuu

SEQ ID NO: 1789389 - RNA, 19 nt, Homo sapiens
  misc_RNA (1)...(19): siRNA sense strand
gggaaaaguuaaggaaaau

SEQ ID NO: 1789390 - RNA, 19 nt, Homo sapiens
  misc_RNA (1)...(19): siRNA sense strand
agagaaugcauggagauuu

SEQ ID NO: 1789391 - RNA, 19 nt, Homo sapiens
  misc_RNA (1)...(19): siRNA sense strand
uucaagagccaacaaucua

SEQ ID NO: 1789392 - RNA, 19 nt, Homo sapiens
  misc_RNA (1)...(19): siRNA sense strand
ccuggagucuacaccaaug

SEQ ID NO: 1789393 - RNA, 19 nt, Homo sapiens
  misc_RNA (1)...(19): siRNA sense strand
gacuucuuguucccuauug

SEQ ID NO: 1789394 - RNA, 19 nt, Homo sapiens
  misc_RNA (1)...(19): siRNA sense strand
cuuguucccuauuguccua

SEQ ID NO: 1789395 - RNA, 19 nt, Homo sapiens
  misc_RNA (1)...(19): siRNA sense strand
gauaguugcaagggugauu

SEQ ID NO: 1789396 - RNA, 19 nt, Homo sapiens
  misc_RNA (1)...(19): siRNA sense strand
uaacacuauacacagagua

SEQ ID NO: 1789397 - RNA, 19 nt, Homo sapiens
  misc_RNA (1)...(19): siRNA sense strand
agccaacaaucuagacuuc

SEQ ID NO: 1789398 - RNA, 19 nt, Homo sapiens
  misc_RNA (1)...(19): siRNA sense strand
gggccucugucgugucaca

SEQ ID NO: 1789399 - RNA, 19 nt, Homo sapiens
  misc_RNA (1)...(19): siRNA sense strand
gauuacaguaggugacuca

SEQ ID NO: 1789400 - RNA, 19 nt, Homo sapiens
  misc_RNA (1)...(19): siRNA sense strand
agaaugugguaaaucucuu

SEQ ID NO: 1789401 - RNA, 19 nt, Homo sapiens
  misc_RNA (1)...(19): siRNA sense strand
aaagagcuacaaucagugu

SEQ ID NO: 1789402 - RNA, 19 nt, Homo sapiens
  misc_RNA (1)...(19): siRNA sense strand
ccaaguaccaagauacaac

SEQ ID NO: 1789403 - RNA, 19 nt, Homo sapiens
  misc_RNA (1)...(19): siRNA sense strand
gacgucgccuuguugaaac

SEQ ID NO: 1789404 - RNA, 19 nt, Homo sapiens
  misc_RNA (1)...(19): siRNA sense strand
gcauacagggcugggaaga

SEQ ID NO: 1789405 - RNA, 19 nt, Homo sapiens
  misc_RNA (1)...(19): siRNA sense strand
gcaauuccacccuuuuguu

SEQ ID NO: 1789406 - RNA, 19 nt, Homo sapiens
  misc_RNA (1)...(19): siRNA sense strand
ucugccauccugccuauuu

SEQ ID NO: 1789407 - RNA, 19 nt, Homo sapiens
  misc_RNA (1)...(19): siRNA sense strand
cguuguagguggccaggau

SEQ ID NO: 1789408 - RNA, 19 nt, Homo sapiens
  misc_RNA (1)...(19): siRNA sense strand
cacuuugaccacaacuuua

SEQ ID NO: 1789409 - RNA, 19 nt, Homo sapiens
  misc_RNA (1)...(19): siRNA sense strand
ugaccacaacuuuaucugu

SEQ ID NO: 1789410 - RNA, 19 nt, Homo sapiens
  misc_RNA (1)...(19): siRNA sense strand
ucuacaaucccaucgguau

SEQ ID NO: 1789411 - RNA, 19 nt, Homo sapiens
  misc_RNA (1)...(19): siRNA sense strand
uggcuaggaucgauuacag

SEQ ID NO: 1789412 - RNA, 19 nt, Homo sapiens
  misc_RNA (1)...(19): siRNA sense strand
aaggaaacgugugaaguac

SEQ ID NO: 1789413 - RNA, 19 nt, Homo sapiens
  misc_RNA (1)...(19): siRNA sense strand
ucaagagccaacaaucuag

SEQ ID NO: 1789414 - RNA, 19 nt, Homo sapiens
  misc_RNA (1)...(19): siRNA sense strand
ggagccagucaucaaggaa

SEQ ID NO: 1789415 - RNA, 19 nt, Homo sapiens
  misc_RNA (1)...(19): siRNA sense strand
ccgccaggcuugugaacag

SEQ ID NO: 1789416 - RNA, 19 nt, Homo sapiens
  misc_RNA (1)...(19): siRNA sense strand
gguucuugcuuacacucuu

SEQ ID NO: 1789417 - RNA, 19 nt, Homo sapiens
  misc_RNA (1)...(19): siRNA sense strand
uauacuguguggcuaggau

SEQ ID NO: 1789418 - RNA, 19 nt, Homo sapiens
  misc_RNA (1)...(19): siRNA sense strand
ggcagacgucgccuuguug

SEQ ID NO: 1789419 - RNA, 19 nt, Homo sapiens
  misc_RNA (1)...(19): siRNA sense strand
guguggcuaggaucgauua

SEQ ID NO: 1789420 - RNA, 19 nt, Homo sapiens
  misc_RNA (1)...(19): siRNA sense strand
cuaacacuauacacagagu

SEQ ID NO: 1789421 - RNA, 19 nt, Homo sapiens
  misc_RNA (1)...(19): siRNA sense strand
cuucugccauccugccuau

SEQ ID NO: 1789422 - RNA, 19 nt, Homo sapiens
  misc_RNA (1)...(19): siRNA sense strand
caacaacuacccugagauu

SEQ ID NO: 1789423 - RNA, 19 nt, Homo sapiens
  misc_RNA (1)...(19): siRNA sense strand
gcagaugcgucaccucaag

SEQ ID NO: 1789424 - RNA, 19 nt, Homo sapiens
  misc_RNA (1)...(19): siRNA sense strand
ccaaagguaucgugaagag

SEQ ID NO: 1789425 - RNA, 19 nt, Homo sapiens
  misc_RNA (1)...(19): siRNA sense strand
uggaacagauucagaagga

SEQ ID NO: 1789426 - RNA, 19 nt, Homo sapiens
  misc_RNA (1)...(19): siRNA sense strand
gccaacaacuacccugaga

SEQ ID NO: 1789427 - RNA, 19 nt, Homo sapiens
  misc_RNA (1)...(19): siRNA sense strand
ucucuucgcugguggcaaa

SEQ ID NO: 1789428 - RNA, 19 nt, Homo sapiens
  misc_RNA (1)...(19): siRNA sense strand
ggagcaggauuaccaaagg

SEQ ID NO: 1789429 - RNA, 19 nt, Homo sapiens
  misc_RNA (1)...(19): siRNA sense strand
ugucugcacuccaauucua

SEQ ID NO: 1789430 - RNA, 19 nt, Homo sapiens
  misc_RNA (1)...(19): siRNA sense strand
gcaacuaucguacccagau

SEQ ID NO: 1789431 - RNA, 19 nt, Homo sapiens
  misc_RNA (1)...(19): siRNA sense strand
gcaugcacguggaagugaa

SEQ ID NO: 1789432 - RNA, 19 nt, Homo sapiens
  misc_RNA (1)...(19): siRNA sense strand
caacuaucguacccagaug

SEQ ID NO: 1789433 - RNA, 19 nt, Homo sapiens
  misc_RNA (1)...(19): siRNA sense strand
gggagcaugccaacaacua

SEQ ID NO: 1789434 - RNA, 19 nt, Homo sapiens
  misc_RNA (1)...(19): siRNA sense strand
gagcaggauuaccaaaggu

SEQ ID NO: 1789435 - RNA, 19 nt, Homo sapiens
  misc_RNA (1)...(19): siRNA sense strand
gaaggagcaggauuaccaa

SEQ ID NO: 1789436 - RNA, 19 nt, Homo sapiens
  misc_RNA (1)...(19): siRNA sense strand
gcaaacugcgugugcaucu

SEQ ID NO: 1789437 - RNA, 19 nt, Homo sapiens
  misc_RNA (1)...(19): siRNA sense strand
caacuacccugagauugcu

SEQ ID NO: 1789438 - RNA, 19 nt, Homo sapiens
  misc_RNA (1)...(19): siRNA sense strand
gaucagguggaacagauuc

SEQ ID NO: 1789439 - RNA, 19 nt, Homo sapiens
  misc_RNA (1)...(19): siRNA sense strand
aaaucugucugcacuccaa

SEQ ID NO: 1789440 - RNA, 19 nt, Homo sapiens
  misc_RNA (1)...(19): siRNA sense strand
agaaggagcaggauuacca

SEQ ID NO: 1789441 - RNA, 19 nt, Homo sapiens
  misc_RNA (1)...(19): siRNA sense strand
gaugugggauaagcagaag

SEQ ID NO: 1789442 - RNA, 19 nt, Homo sapiens
  misc_RNA (1)...(19): siRNA sense strand
uucagaaggagcaggauua

SEQ ID NO: 1789443 - RNA, 19 nt, Homo sapiens
  misc_RNA (1)...(19): siRNA sense strand
cgagaagcgcuguuucauc

SEQ ID NO: 1789444 - RNA, 19 nt, Homo sapiens
  misc_RNA (1)...(19): siRNA sense strand
cuaccaggauggcucucuu

SEQ ID NO: 1789445 - RNA, 19 nt, Homo sapiens
  misc_RNA (1)...(19): siRNA sense strand
gcgugugcaucucgacauc

SEQ ID NO: 1789446 - RNA, 19 nt, Homo sapiens
  misc_RNA (1)...(19): siRNA sense strand
uugaucagguggaacagau

SEQ ID NO: 1789447 - RNA, 19 nt, Homo sapiens
  misc_RNA (1)...(19): siRNA sense strand
gcaucucgacauccagguu

SEQ ID NO: 1789448 - RNA, 19 nt, Homo sapiens
  misc_RNA (1)...(19): siRNA sense strand
agaccgagaagcgcuguuu

SEQ ID NO: 1789449 - RNA, 19 nt, Homo sapiens
  misc_RNA (1)...(19): siRNA sense strand
gaugagaggcggaauauug

SEQ ID NO: 1789450 - RNA, 19 nt, Homo sapiens
  misc_RNA (1)...(19): siRNA sense strand
gcagcaagaucacacacuu

SEQ ID NO: 1789451 - RNA, 19 nt, Homo sapiens
  misc_RNA (1)...(19): siRNA sense strand
gguguuaccugcauucaca

SEQ ID NO: 1789452 - RNA, 19 nt, Homo sapiens
  misc_RNA (1)...(19): siRNA sense strand
ucacacacuuugagagguu

SEQ ID NO: 1789453 - RNA, 19 nt, Homo sapiens
  misc_RNA (1)...(19): siRNA sense strand
gaugaugagaggcggaaua

SEQ ID NO: 1789454 - RNA, 19 nt, Homo sapiens
  misc_RNA (1)...(19): siRNA sense strand
gcagaagacuggaauuccu

SEQ ID NO: 1789455 - RNA, 19 nt, Homo sapiens
  misc_RNA (1)...(19): siRNA sense strand
gauggaacuguacgagaua

SEQ ID NO: 1789456 - RNA, 19 nt, Homo sapiens
  misc_RNA (1)...(19): siRNA sense strand
cauaagagcagugauggaa

SEQ ID NO: 1789457 - RNA, 19 nt, Homo sapiens
  misc_RNA (1)...(19): siRNA sense strand
gacccuccguuccauaaga

SEQ ID NO: 1789458 - RNA, 19 nt, Homo sapiens
  misc_RNA (1)...(19): siRNA sense strand
gccaagacguccgacugua

SEQ ID NO: 1789459 - RNA, 19 nt, Homo sapiens
  misc_RNA (1)...(19): siRNA sense strand
ugauggaacuguacgagau

SEQ ID NO: 1789460 - RNA, 19 nt, Homo sapiens
  misc_RNA (1)...(19): siRNA sense strand
uaccgaagcuggcagucuu

SEQ ID NO: 1789461 - RNA, 19 nt, Homo sapiens
  misc_RNA (1)...(19): siRNA sense strand
gaagcuggcagucuuugau

SEQ ID NO: 1789462 - RNA, 19 nt, Homo sapiens
  misc_RNA (1)...(19): siRNA sense strand
uaagagcagugauggaacu

SEQ ID NO: 1789463 - RNA, 19 nt, Homo sapiens
  misc_RNA (1)...(19): siRNA sense strand
cagaauggaaugaaucuuc

SEQ ID NO: 1789464 - RNA, 19 nt, Homo sapiens
  misc_RNA (1)...(19): siRNA sense strand
gaucuucuuugaugaugag

SEQ ID NO: 1789465 - RNA, 19 nt, Homo sapiens
  misc_RNA (1)...(19): siRNA sense strand
ggagcucuuugaccucuuc

SEQ ID NO: 1789466 - RNA, 19 nt, Homo sapiens
  misc_RNA (1)...(19): siRNA sense strand
gcaagaucacacacuuuga

SEQ ID NO: 1789467 - RNA, 19 nt, Homo sapiens
  misc_RNA (1)...(19): siRNA sense strand
gucaaggguuagagacauu

SEQ ID NO: 1789468 - RNA, 19 nt, Homo sapiens
  misc_RNA (1)...(19): siRNA sense strand
gaauuccuuucucccagau

SEQ ID NO: 1789469 - RNA, 19 nt, Homo sapiens
  misc_RNA (1)...(19): siRNA sense strand
caagaucacacacuuugag

SEQ ID NO: 1789470 - RNA, 19 nt, Homo sapiens
  misc_RNA (1)...(19): siRNA sense strand
gagcccauuugaggccuaa

SEQ ID NO: 1789471 - RNA, 19 nt, Homo sapiens
  misc_RNA (1)...(19): siRNA sense strand
gcuggcagucuuugauuug

SEQ ID NO: 1789472 - RNA, 19 nt, Homo sapiens
  misc_RNA (1)...(19): siRNA sense strand
cagcaagaucacacacuuu

SEQ ID NO: 1789473 - RNA, 19 nt, Homo sapiens
  misc_RNA (1)...(19): siRNA sense strand
aaggacaagugagauagaa

SEQ ID NO: 1789474 - RNA, 19 nt, Homo sapiens
  misc_RNA (1)...(19): siRNA sense strand
caaggacaagugagauaga

SEQ ID NO: 1789475 - RNA, 19 nt, Homo sapiens
  misc_RNA (1)...(19): siRNA sense strand
gaugaucuucuuugaugau

SEQ ID NO: 1789476 - RNA, 19 nt, Homo sapiens
  misc_RNA (1)...(19): siRNA sense strand
guagacccuccguuccaua

SEQ ID NO: 1789477 - RNA, 19 nt, Homo sapiens
  misc_RNA (1)...(19): siRNA sense strand
agaggugccugagguccua

SEQ ID NO: 1789478 - RNA, 19 nt, Homo sapiens
  misc_RNA (1)...(19): siRNA sense strand
gagaggcggaauauuguag

SEQ ID NO: 1789479 - RNA, 19 nt, Homo sapiens
  misc_RNA (1)...(19): siRNA sense strand
aacucuaagucaaggguua

SEQ ID NO: 1789480 - RNA, 19 nt, Homo sapiens
  misc_RNA (1)...(19): siRNA sense strand
cagcagaagacuggaauuc

SEQ ID NO: 1789481 - RNA, 19 nt, Homo sapiens
  misc_RNA (1)...(19): siRNA sense strand
uauuguagacgucagcaaa

SEQ ID NO: 1789482 - RNA, 19 nt, Homo sapiens
  misc_RNA (1)...(19): siRNA sense strand
ggcagucuuugauuuggau

SEQ ID NO: 1789483 - RNA, 19 nt, Homo sapiens
  misc_RNA (1)...(19): siRNA sense strand
agacuggaauuccuuucuc

SEQ ID NO: 1789484 - RNA, 19 nt, Homo sapiens
  misc_RNA (1)...(19): siRNA sense strand
uagacccuccguuccauaa

SEQ ID NO: 1789485 - RNA, 19 nt, Homo sapiens
  misc_RNA (1)...(19): siRNA sense strand
ugagaggcggaauauugua

SEQ ID NO: 1789486 - RNA, 19 nt, Homo sapiens
  misc_RNA (1)...(19): siRNA sense strand
cagaagacuggaauuccuu

SEQ ID NO: 1789487 - RNA, 19 nt, Homo sapiens
  misc_RNA (1)...(19): siRNA sense strand
gaagacuggaauuccuuuc

SEQ ID NO: 1789488 - RNA, 19 nt, Homo sapiens
  misc_RNA (1)...(19): siRNA sense strand
ggccaagacguccgacugu

SEQ ID NO: 1789489 - RNA, 19 nt, Homo sapiens
  misc_RNA (1)...(19): siRNA sense strand
gucagcaaacuggguguua

SEQ ID NO: 1789490 - RNA, 19 nt, Homo sapiens
  misc_RNA (1)...(19): siRNA sense strand
gcagcagaagacuggaauu

SEQ ID NO: 1789491 - RNA, 19 nt, Homo sapiens
  misc_RNA (1)...(19): siRNA sense strand
ccaagacguccgacuguac

SEQ ID NO: 1789492 - RNA, 19 nt, Homo sapiens
  misc_RNA (1)...(19): siRNA sense strand
ucagcaaacuggguguuac

SEQ ID NO: 1789493 - RNA, 19 nt, Homo sapiens
  misc_RNA (1)...(19): siRNA sense strand
uugagagguugcagcagaa

SEQ ID NO: 1789494 - RNA, 19 nt, Homo sapiens
  misc_RNA (1)...(19): siRNA sense strand
uauccaggcagcaagauca

SEQ ID NO: 1789495 - RNA, 19 nt, Homo sapiens
  misc_RNA (1)...(19): siRNA sense strand
ucuucaaacucuaagucaa

SEQ ID NO: 1789496 - RNA, 19 nt, Homo sapiens
  misc_RNA (1)...(19): siRNA sense strand
cagcagagguugaucuuug

SEQ ID NO: 1789497 - RNA, 19 nt, Homo sapiens
  misc_RNA (1)...(19): siRNA sense strand
cagcagagguugaucuuug

SEQ ID NO: 1789498 - RNA, 19 nt, Homo sapiens
  misc_RNA (1)...(19): siRNA sense strand
cagcagagguugaucuuug

SEQ ID NO: 1789499 - RNA, 19 nt, Homo sapiens
  misc_RNA (1)...(19): siRNA sense strand
cagcagagguugaucuuug

SEQ ID NO: 1789500 - RNA, 19 nt, Homo sapiens
  misc_RNA (1)...(19): siRNA sense strand
ugaagacucugacugguaa

SEQ ID NO: 1789501 - RNA, 19 nt, Homo sapiens
  misc_RNA (1)...(19): siRNA sense strand
gaggugggaugcaaaucuu

SEQ ID NO: 1789502 - RNA, 19 nt, Homo sapiens
  misc_RNA (1)...(19): siRNA sense strand
gcaaagauccaagauaagg

SEQ ID NO: 1789503 - RNA, 19 nt, Homo sapiens
  misc_RNA (1)...(19): siRNA sense strand
gcaaagauccaagauaagg

SEQ ID NO: 1789504 - RNA, 19 nt, Homo sapiens
  misc_RNA (1)...(19): siRNA sense strand
ggaugcaaaucuucgugaa

SEQ ID NO: 1789505 - RNA, 19 nt, Homo sapiens
  misc_RNA (1)...(19): siRNA sense strand
gcaaagauccaagauaagg

SEQ ID NO: 1789506 - RNA, 19 nt, Homo sapiens
  misc_RNA (1)...(19): siRNA sense strand
gaacgucaaagcaaagauc

SEQ ID NO: 1789507 - RNA, 19 nt, Homo sapiens
  misc_RNA (1)...(19): siRNA sense strand
ucgagaacgucaaagcaaa

SEQ ID NO: 1789508 - RNA, 19 nt, Homo sapiens
  misc_RNA (1)...(19): siRNA sense strand
gugaagacucugacuggua

SEQ ID NO: 1789509 - RNA, 19 nt, Homo sapiens
  misc_RNA (1)...(19): siRNA sense strand
acuacaacauccagaaaga

SEQ ID NO: 1789510 - RNA, 19 nt, Homo sapiens
  misc_RNA (1)...(19): siRNA sense strand
acuacaacauccagaaaga

SEQ ID NO: 1789511 - RNA, 19 nt, Homo sapiens
  misc_RNA (1)...(19): siRNA sense strand
acuacaacauccagaaaga

SEQ ID NO: 1789512 - RNA, 19 nt, Homo sapiens
  misc_RNA (1)...(19): siRNA sense strand
acuacaacauccagaaaga

SEQ ID NO: 1789513 - RNA, 19 nt, Homo sapiens
  misc_RNA (1)...(19): siRNA sense strand
acuacaacauccagaaaga

SEQ ID NO: 1789514 - RNA, 19 nt, Homo sapiens
  misc_RNA (1)...(19): siRNA sense strand
acuacaacauccagaaaga

SEQ ID NO: 1789515 - RNA, 19 nt, Homo sapiens
  misc_RNA (1)...(19): siRNA sense strand
acuacaacauccagaaaga

SEQ ID NO: 1789516 - RNA, 19 nt, Homo sapiens
  misc_RNA (1)...(19): siRNA sense strand
acuacaacauccagaaaga

SEQ ID NO: 1789517 - RNA, 19 nt, Homo sapiens
  misc_RNA (1)...(19): siRNA sense strand
acuacaacauccagaaaga

SEQ ID NO: 1789518 - RNA, 19 nt, Homo sapiens
  misc_RNA (1)...(19): siRNA sense strand
ucucagaggugggaugcaa

SEQ ID NO: 1789519 - RNA, 19 nt, Homo sapiens
  misc_RNA (1)...(19): siRNA sense strand
ugacuacaacauccagaaa

SEQ ID NO: 1789520 - RNA, 19 nt, Homo sapiens
  misc_RNA (1)...(19): siRNA sense strand
ugacuacaacauccagaaa

SEQ ID NO: 1789521 - RNA, 19 nt, Homo sapiens
  misc_RNA (1)...(19): siRNA sense strand
aaagauccaagauaaggaa

SEQ ID NO: 1789522 - RNA, 19 nt, Homo sapiens
  misc_RNA (1)...(19): siRNA sense strand
ugacuacaacauccagaaa

SEQ ID NO: 1789523 - RNA, 19 nt, Homo sapiens
  misc_RNA (1)...(19): siRNA sense strand
ugacuacaacauccagaaa

SEQ ID NO: 1789524 - RNA, 19 nt, Homo sapiens
  misc_RNA (1)...(19): siRNA sense strand
ugacuacaacauccagaaa

SEQ ID NO: 1789525 - RNA, 19 nt, Homo sapiens
  misc_RNA (1)...(19): siRNA sense strand
ugacuacaacauccagaaa

SEQ ID NO: 1789526 - RNA, 19 nt, Homo sapiens
  misc_RNA (1)...(19): siRNA sense strand
ugacuacaacauccagaaa

SEQ ID NO: 1789527 - RNA, 19 nt, Homo sapiens
  misc_RNA (1)...(19): siRNA sense strand
ugacuacaacauccagaaa

SEQ ID NO: 1789528 - RNA, 19 nt, Homo sapiens
  misc_RNA (1)...(19): siRNA sense strand
aaagauccaagauaaggaa

SEQ ID NO: 1789529 - RNA, 19 nt, Homo sapiens
  misc_RNA (1)...(19): siRNA sense strand
ugacuacaacauccagaaa

SEQ ID NO: 1789530 - RNA, 19 nt, Homo sapiens
  misc_RNA (1)...(19): siRNA sense strand
aaagauccaagauaaggaa

SEQ ID NO: 1789531 - RNA, 19 nt, Homo sapiens
  misc_RNA (1)...(19): siRNA sense strand
caaagauccaagauaagga

SEQ ID NO: 1789532 - RNA, 19 nt, Homo sapiens
  misc_RNA (1)...(19): siRNA sense strand
caaagauccaagauaagga

SEQ ID NO: 1789533 - RNA, 19 nt, Homo sapiens
  misc_RNA (1)...(19): siRNA sense strand
caaagauccaagauaagga

SEQ ID NO: 1789534 - RNA, 19 nt, Homo sapiens
  misc_RNA (1)...(19): siRNA sense strand
gagaacgucaaagcaaaga

SEQ ID NO: 1789535 - RNA, 19 nt, Homo sapiens
  misc_RNA (1)...(19): siRNA sense strand
gagagaagcuuugcaaaua

SEQ ID NO: 1789536 - RNA, 19 nt, Homo sapiens
  misc_RNA (1)...(19): siRNA sense strand
ggacagacaucaaauaguu

SEQ ID NO: 1789537 - RNA, 19 nt, Homo sapiens
  misc_RNA (1)...(19): siRNA sense strand
gagaagcuuugcaaauaua

SEQ ID NO: 1789538 - RNA, 19 nt, Homo sapiens
  misc_RNA (1)...(19): siRNA sense strand
ggagaauguugaagcuuua

SEQ ID NO: 1789539 - RNA, 19 nt, Homo sapiens
  misc_RNA (1)...(19): siRNA sense strand
ugacagagaugaugauuuc

SEQ ID NO: 1789540 - RNA, 19 nt, Homo sapiens
  misc_RNA (1)...(19): siRNA sense strand
aaauauaccuccugagauu

SEQ ID NO: 1789541 - RNA, 19 nt, Homo sapiens
  misc_RNA (1)...(19): siRNA sense strand
gcaaauauaccuccugaga

SEQ ID NO: 1789542 - RNA, 19 nt, Homo sapiens
  misc_RNA (1)...(19): siRNA sense strand
gcugaaagcucccaagagu

SEQ ID NO: 1789543 - RNA, 19 nt, Homo sapiens
  misc_RNA (1)...(19): siRNA sense strand
gauuauugcucauucaguu

SEQ ID NO: 1789544 - RNA, 19 nt, Homo sapiens
  misc_RNA (1)...(19): siRNA sense strand
auacuagaaugccugauua

SEQ ID NO: 1789545 - RNA, 19 nt, Homo sapiens
  misc_RNA (1)...(19): siRNA sense strand
uaacaaaucaggagccuau

SEQ ID NO: 1789546 - RNA, 19 nt, Homo sapiens
  misc_RNA (1)...(19): siRNA sense strand
gauaauggagauugggaua

SEQ ID NO: 1789547 - RNA, 19 nt, Homo sapiens
  misc_RNA (1)...(19): siRNA sense strand
ugaaguggauuguaaagca

SEQ ID NO: 1789548 - RNA, 19 nt, Homo sapiens
  misc_RNA (1)...(19): siRNA sense strand
gaagaauuccauacagaug

SEQ ID NO: 1789549 - RNA, 19 nt, Homo sapiens
  misc_RNA (1)...(19): siRNA sense strand
ugauauguauggacuagaa

SEQ ID NO: 1789550 - RNA, 19 nt, Homo sapiens
  misc_RNA (1)...(19): siRNA sense strand
gagauugggauaucacaaa

SEQ ID NO: 1789551 - RNA, 19 nt, Homo sapiens
  misc_RNA (1)...(19): siRNA sense strand
uggagaauguugaagcuuu

SEQ ID NO: 1789552 - RNA, 19 nt, Homo sapiens
  misc_RNA (1)...(19): siRNA sense strand
ggauaucagugacagagau

SEQ ID NO: 1789553 - RNA, 19 nt, Homo sapiens
  misc_RNA (1)...(19): siRNA sense strand
ggagccugcaucugaauua

SEQ ID NO: 1789554 - RNA, 19 nt, Homo sapiens
  misc_RNA (1)...(19): siRNA sense strand
cuagaaugccugauuauug

SEQ ID NO: 1789555 - RNA, 19 nt, Homo sapiens
  misc_RNA (1)...(19): siRNA sense strand
ccagaacauugacgucuau

SEQ ID NO: 1789556 - RNA, 19 nt, Homo sapiens
  misc_RNA (1)...(19): siRNA sense strand
aaacucaucugauuguucu

SEQ ID NO: 1789557 - RNA, 19 nt, Homo sapiens
  misc_RNA (1)...(19): siRNA sense strand
agagaagcuuugcaaauau

SEQ ID NO: 1789558 - RNA, 19 nt, Homo sapiens
  misc_RNA (1)...(19): siRNA sense strand
ggucagauacucaauaugg

SEQ ID NO: 1789559 - RNA, 19 nt, Homo sapiens
  misc_RNA (1)...(19): siRNA sense strand
cauguagaacugaauguua

SEQ ID NO: 1789560 - RNA, 19 nt, Homo sapiens
  misc_RNA (1)...(19): siRNA sense strand
guacguuacucuucaaggu

SEQ ID NO: 1789561 - RNA, 19 nt, Homo sapiens
  misc_RNA (1)...(19): siRNA sense strand
gaacauugacgucuauacu

SEQ ID NO: 1789562 - RNA, 19 nt, Homo sapiens
  misc_RNA (1)...(19): siRNA sense strand
gaaguggauuguaaagcau

SEQ ID NO: 1789563 - RNA, 19 nt, Homo sapiens
  misc_RNA (1)...(19): siRNA sense strand
ugcaugaaguggauuguaa

SEQ ID NO: 1789564 - RNA, 19 nt, Homo sapiens
  misc_RNA (1)...(19): siRNA sense strand
caagaguuccugacuucua

SEQ ID NO: 1789565 - RNA, 19 nt, Homo sapiens
  misc_RNA (1)...(19): siRNA sense strand
gagaagauuuauugaagcu

SEQ ID NO: 1789566 - RNA, 19 nt, Homo sapiens
  misc_RNA (1)...(19): siRNA sense strand
guucaaagcacacaaagca

SEQ ID NO: 1789567 - RNA, 19 nt, Homo sapiens
  misc_RNA (1)...(19): siRNA sense strand
uagaaugccugauuauugc

SEQ ID NO: 1789568 - RNA, 19 nt, Homo sapiens
  misc_RNA (1)...(19): siRNA sense strand
gcaugaaauuccagaggau

SEQ ID NO: 1789569 - RNA, 19 nt, Homo sapiens
  misc_RNA (1)...(19): siRNA sense strand
gaauguugaagcuuuagaa

SEQ ID NO: 1789570 - RNA, 19 nt, Homo sapiens
  misc_RNA (1)...(19): siRNA sense strand
aaacuaauguuggucagau

SEQ ID NO: 1789571 - RNA, 19 nt, Homo sapiens
  misc_RNA (1)...(19): siRNA sense strand
uauaagccauguagaacug

SEQ ID NO: 1789572 - RNA, 19 nt, Homo sapiens
  misc_RNA (1)...(19): siRNA sense strand
agaggaaauucuuaggaaa

SEQ ID NO: 1789573 - RNA, 19 nt, Homo sapiens
  misc_RNA (1)...(19): siRNA sense strand
guauggacuagaaggauua

SEQ ID NO: 1789574 - RNA, 19 nt, Homo sapiens
  misc_RNA (1)...(19): siRNA sense strand
uggaggaacucuggacauu

SEQ ID NO: 1789575 - RNA, 19 nt, Homo sapiens
  misc_RNA (1)...(19): siRNA sense strand
uagcaagaguuccugacuu

SEQ ID NO: 1789576 - RNA, 19 nt, Homo sapiens
  misc_RNA (1)...(19): siRNA sense strand
uugauucaguccuuaguaa

SEQ ID NO: 1789577 - RNA, 19 nt, Homo sapiens
  misc_RNA (1)...(19): siRNA sense strand
gauuugcucaggcuucuaa

SEQ ID NO: 1789578 - RNA, 19 nt, Homo sapiens
  misc_RNA (1)...(19): siRNA sense strand
aggagaagauuuauugaag

SEQ ID NO: 1789579 - RNA, 19 nt, Homo sapiens
  misc_RNA (1)...(19): siRNA sense strand
uaauggagauugggauauc

SEQ ID NO: 1789580 - RNA, 19 nt, Homo sapiens
  misc_RNA (1)...(19): siRNA sense strand
ugagagaagcuuugcaaau

SEQ ID NO: 1789581 - RNA, 19 nt, Homo sapiens
  misc_RNA (1)...(19): siRNA sense strand
gcaugaaguggauuguaaa

SEQ ID NO: 1789582 - RNA, 19 nt, Homo sapiens
  misc_RNA (1)...(19): siRNA sense strand
agaacugaauguuaugaug

SEQ ID NO: 1789583 - RNA, 19 nt, Homo sapiens
  misc_RNA (1)...(19): siRNA sense strand
aagaguuccugacuucuau

SEQ ID NO: 1789584 - RNA, 19 nt, Homo sapiens
  misc_RNA (1)...(19): siRNA sense strand
agaauuccauacagauguu

SEQ ID NO: 1789585 - RNA, 19 nt, Homo sapiens
  misc_RNA (1)...(19): siRNA sense strand
caaauauaccuccugagau

SEQ ID NO: 1789586 - RNA, 19 nt, Homo sapiens
  misc_RNA (1)...(19): siRNA sense strand
gaaauuccagaggauauca

SEQ ID NO: 1789587 - RNA, 19 nt, Homo sapiens
  misc_RNA (1)...(19): siRNA sense strand
gcugauauguauggacuag

SEQ ID NO: 1789588 - RNA, 19 nt, Homo sapiens
  misc_RNA (1)...(19): siRNA sense strand
ugaaagcucccaagaguac

SEQ ID NO: 1789589 - RNA, 19 nt, Homo sapiens
  misc_RNA (1)...(19): siRNA sense strand
caagguauaagccauguag

SEQ ID NO: 1789590 - RNA, 19 nt, Homo sapiens
  misc_RNA (1)...(19): siRNA sense strand
acauugacgucuauacuag

SEQ ID NO: 1789591 - RNA, 19 nt, Homo sapiens
  misc_RNA (1)...(19): siRNA sense strand
uguauggacuagaaggauu

SEQ ID NO: 1789592 - RNA, 19 nt, Homo sapiens
  misc_RNA (1)...(19): siRNA sense strand
ugugaaaacucaucugauu

SEQ ID NO: 1789593 - RNA, 19 nt, Homo sapiens
  misc_RNA (1)...(19): siRNA sense strand
gccugcaucugaauuagga

SEQ ID NO: 1789594 - RNA, 19 nt, Homo sapiens
  misc_RNA (1)...(19): siRNA sense strand
gauucaguccuuaguaaau

SEQ ID NO: 1789595 - RNA, 19 nt, Homo sapiens
  misc_RNA (1)...(19): siRNA sense strand
gacagacaucaaauaguuu

SEQ ID NO: 1789596 - RNA, 19 nt, Homo sapiens
  misc_RNA (1)...(19): siRNA sense strand
uauguugauucaguccuua

SEQ ID NO: 1789597 - RNA, 19 nt, Homo sapiens
  misc_RNA (1)...(19): siRNA sense strand
ccgcuggaguuugcaguaa

SEQ ID NO: 1789598 - RNA, 19 nt, Homo sapiens
  misc_RNA (1)...(19): siRNA sense strand
ucauucaguuggaguggaa

SEQ ID NO: 1789599 - RNA, 19 nt, Homo sapiens
  misc_RNA (1)...(19): siRNA sense strand
uauacuagaaugccugauu

SEQ ID NO: 1789600 - RNA, 19 nt, Homo sapiens
  misc_RNA (1)...(19): siRNA sense strand
cccagaacauugacgucua

SEQ ID NO: 1789601 - RNA, 19 nt, Homo sapiens
  misc_RNA (1)...(19): siRNA sense strand
auacagauguuaccuucuc

SEQ ID NO: 1789602 - RNA, 19 nt, Homo sapiens
  misc_RNA (1)...(19): siRNA sense strand
cuauugcuguggagaaugu

SEQ ID NO: 1789603 - RNA, 19 nt, Homo sapiens
  misc_RNA (1)...(19): siRNA sense strand
agcaagaguuccugacuuc

SEQ ID NO: 1789604 - RNA, 19 nt, Homo sapiens
  misc_RNA (1)...(19): siRNA sense strand
gaauuccauacagauguua

SEQ ID NO: 1789605 - RNA, 19 nt, Homo sapiens
  misc_RNA (1)...(19): siRNA sense strand
gagccugcaucugaauuag

SEQ ID NO: 1789606 - RNA, 19 nt, Homo sapiens
  misc_RNA (1)...(19): siRNA sense strand
ucagaagcaugaaauucca

SEQ ID NO: 1789607 - RNA, 19 nt, Homo sapiens
  misc_RNA (1)...(19): siRNA sense strand
guaagggguugcaaaggaa

SEQ ID NO: 1789608 - RNA, 19 nt, Homo sapiens
  misc_RNA (1)...(19): siRNA sense strand
guagaacugaauguuauga

SEQ ID NO: 1789609 - RNA, 19 nt, Homo sapiens
  misc_RNA (1)...(19): siRNA sense strand
gggcugaaagcucccaaga

SEQ ID NO: 1789610 - RNA, 19 nt, Homo sapiens
  misc_RNA (1)...(19): siRNA sense strand
ugccagaucuaguuauuuu

SEQ ID NO: 1789611 - RNA, 19 nt, Homo sapiens
  misc_RNA (1)...(19): siRNA sense strand
ugagugccagaucuaguua

SEQ ID NO: 1789612 - RNA, 19 nt, Homo sapiens
  misc_RNA (1)...(19): siRNA sense strand
caugaaauuccagaggaua

SEQ ID NO: 1789613 - RNA, 19 nt, Homo sapiens
  misc_RNA (1)...(19): siRNA sense strand
acaaaucaggagccuauug

SEQ ID NO: 1789614 - RNA, 19 nt, Homo sapiens
  misc_RNA (1)...(19): siRNA sense strand
gaguuccugacuucuauuu

SEQ ID NO: 1789615 - RNA, 19 nt, Homo sapiens
  misc_RNA (1)...(19): siRNA sense strand
caucugaauuaggagaaga

SEQ ID NO: 1789616 - RNA, 19 nt, Homo sapiens
  misc_RNA (1)...(19): siRNA sense strand
aaagcaacuugacaucagu

SEQ ID NO: 1789617 - RNA, 19 nt, Homo sapiens
  misc_RNA (1)...(19): siRNA sense strand
gaggaaauucuuaggaaaa

SEQ ID NO: 1789618 - RNA, 19 nt, Homo sapiens
  misc_RNA (1)...(19): siRNA sense strand
uuggucagauacucaauau

SEQ ID NO: 1789619 - RNA, 19 nt, Homo sapiens
  misc_RNA (1)...(19): siRNA sense strand
guuggucagauacucaaua

SEQ ID NO: 1789620 - RNA, 19 nt, Homo sapiens
  misc_RNA (1)...(19): siRNA sense strand
uaagccauguagaacugaa

SEQ ID NO: 1789621 - RNA, 19 nt, Homo sapiens
  misc_RNA (1)...(19): siRNA sense strand
gaaaacucaucugauuguu

SEQ ID NO: 1789622 - RNA, 19 nt, Homo sapiens
  misc_RNA (1)...(19): siRNA sense strand
ggagauugggauaucacaa

SEQ ID NO: 1789623 - RNA, 19 nt, Homo sapiens
  misc_RNA (1)...(19): siRNA sense strand
caaaucaggagccuauugc

SEQ ID NO: 1789624 - RNA, 19 nt, Homo sapiens
  misc_RNA (1)...(19): siRNA sense strand
ggaggaacucuggacauuc

SEQ ID NO: 1789625 - RNA, 19 nt, Homo sapiens
  misc_RNA (1)...(19): siRNA sense strand
gcuuuagaauuuagaacgu

SEQ ID NO: 1789626 - RNA, 19 nt, Homo sapiens
  misc_RNA (1)...(19): siRNA sense strand
uaaagcauuuugcaagguu

SEQ ID NO: 1789627 - RNA, 19 nt, Homo sapiens
  misc_RNA (1)...(19): siRNA sense strand
aacuaauguuggucagaua

SEQ ID NO: 1789628 - RNA, 19 nt, Homo sapiens
  misc_RNA (1)...(19): siRNA sense strand
agugccagaucuaguuauu

SEQ ID NO: 1789629 - RNA, 19 nt, Homo sapiens
  misc_RNA (1)...(19): siRNA sense strand
gauaucagugacagagaug

SEQ ID NO: 1789630 - RNA, 19 nt, Homo sapiens
  misc_RNA (1)...(19): siRNA sense strand
gguauaagccauguagaac

SEQ ID NO: 1789631 - RNA, 19 nt, Homo sapiens
  misc_RNA (1)...(19): siRNA sense strand
guugauucaguccuuagua

SEQ ID NO: 1789632 - RNA, 19 nt, Homo sapiens
  misc_RNA (1)...(19): siRNA sense strand
aacauugacgucuauacua

SEQ ID NO: 1789633 - RNA, 19 nt, Homo sapiens
  misc_RNA (1)...(19): siRNA sense strand
ucagugacagagaugauga

SEQ ID NO: 1789634 - RNA, 19 nt, Homo sapiens
  misc_RNA (1)...(19): siRNA sense strand
agacaaaacuaauguuggu

SEQ ID NO: 1789635 - RNA, 19 nt, Homo sapiens
  misc_RNA (1)...(19): siRNA sense strand
gcacagaagucauauggaa

SEQ ID NO: 1789636 - RNA, 19 nt, Homo sapiens
  misc_RNA (1)...(19): siRNA sense strand
ggacagaauuucacuccaa

SEQ ID NO: 1789637 - RNA, 19 nt, Homo sapiens
  misc_RNA (1)...(19): siRNA sense strand
gaacuuacaggacagaauu

SEQ ID NO: 1789638 - RNA, 19 nt, Homo sapiens
  misc_RNA (1)...(19): siRNA sense strand
ggacaaacagucaaacuug

SEQ ID NO: 1789639 - RNA, 19 nt, Homo sapiens
  misc_RNA (1)...(19): siRNA sense strand
guagagagccuucaguuga

SEQ ID NO: 1789640 - RNA, 19 nt, Homo sapiens
  misc_RNA (1)...(19): siRNA sense strand
gaucaaacaguacuuauuc

SEQ ID NO: 1789641 - RNA, 19 nt, Homo sapiens
  misc_RNA (1)...(19): siRNA sense strand
gcauggcacucccaagauu

SEQ ID NO: 1789642 - RNA, 19 nt, Homo sapiens
  misc_RNA (1)...(19): siRNA sense strand
ggaaauagugaccaagaaa

SEQ ID NO: 1789643 - RNA, 19 nt, Homo sapiens
  misc_RNA (1)...(19): siRNA sense strand
cucccaagauugauaauua

SEQ ID NO: 1789644 - RNA, 19 nt, Homo sapiens
  misc_RNA (1)...(19): siRNA sense strand
ugucacaacuccauaaaug

SEQ ID NO: 1789645 - RNA, 19 nt, Homo sapiens
  misc_RNA (1)...(19): siRNA sense strand
uguagaagcugaaacuaug

SEQ ID NO: 1789646 - RNA, 19 nt, Homo sapiens
  misc_RNA (1)...(19): siRNA sense strand
uaacuuugguccgaaauga

SEQ ID NO: 1789647 - RNA, 19 nt, Homo sapiens
  misc_RNA (1)...(19): siRNA sense strand
gacagaauuucacuccaaa

SEQ ID NO: 1789648 - RNA, 19 nt, Homo sapiens
  misc_RNA (1)...(19): siRNA sense strand
caaagguggcucuguuuaa

SEQ ID NO: 1789649 - RNA, 19 nt, Homo sapiens
  misc_RNA (1)...(19): siRNA sense strand
cagcuaaacuuggaaggaa

SEQ ID NO: 1789650 - RNA, 19 nt, Homo sapiens
  misc_RNA (1)...(19): siRNA sense strand
gaaauagugaccaagaaau

SEQ ID NO: 1789651 - RNA, 19 nt, Homo sapiens
  misc_RNA (1)...(19): siRNA sense strand
caagaaaugcagcagcuaa

SEQ ID NO: 1789652 - RNA, 19 nt, Homo sapiens
  misc_RNA (1)...(19): siRNA sense strand
cauguugucuguaaagaug

SEQ ID NO: 1789653 - RNA, 19 nt, Homo sapiens
  misc_RNA (1)...(19): siRNA sense strand
guacagguguggagagagu

SEQ ID NO: 1789654 - RNA, 19 nt, Homo sapiens
  misc_RNA (1)...(19): siRNA sense strand
caacagugaugacauuggu

SEQ ID NO: 1789655 - RNA, 19 nt, Homo sapiens
  misc_RNA (1)...(19): siRNA sense strand
ccagauacuugcauguaga

SEQ ID NO: 1789656 - RNA, 19 nt, Homo sapiens
  misc_RNA (1)...(19): siRNA sense strand
aaagucaucuccaaaccuu

SEQ ID NO: 1789657 - RNA, 19 nt, Homo sapiens
  misc_RNA (1)...(19): siRNA sense strand
uaaggcagaguauacauuu

SEQ ID NO: 1789658 - RNA, 19 nt, Homo sapiens
  misc_RNA (1)...(19): siRNA sense strand
gcacaaauucaaccagugu

SEQ ID NO: 1789659 - RNA, 19 nt, Homo sapiens
  misc_RNA (1)...(19): siRNA sense strand
ggaucaaacaguacuuauu

SEQ ID NO: 1789660 - RNA, 19 nt, Homo sapiens
  misc_RNA (1)...(19): siRNA sense strand
gcacucccaagauugauaa

SEQ ID NO: 1789661 - RNA, 19 nt, Homo sapiens
  misc_RNA (1)...(19): siRNA sense strand
aaagguggcucuguuuaau

SEQ ID NO: 1789662 - RNA, 19 nt, Homo sapiens
  misc_RNA (1)...(19): siRNA sense strand
uggcaacagugaugacauu

SEQ ID NO: 1789663 - RNA, 19 nt, Homo sapiens
  misc_RNA (1)...(19): siRNA sense strand
uaagcagaccgcauuauug

SEQ ID NO: 1789664 - RNA, 19 nt, Homo sapiens
  misc_RNA (1)...(19): siRNA sense strand
caaccagugucacaucauc

SEQ ID NO: 1789665 - RNA, 19 nt, Homo sapiens
  misc_RNA (1)...(19): siRNA sense strand
ucucuuggaugaugaugaa

SEQ ID NO: 1789666 - RNA, 19 nt, Homo sapiens
  misc_RNA (1)...(19): siRNA sense strand
gguccgaaaugauggaauc

SEQ ID NO: 1789667 - RNA, 19 nt, Homo sapiens
  misc_RNA (1)...(19): siRNA sense strand
guacuuauucuucaugcaa

SEQ ID NO: 1789668 - RNA, 19 nt, Homo sapiens
  misc_RNA (1)...(19): siRNA sense strand
caaacaguacuuauucuuc

SEQ ID NO: 1789669 - RNA, 19 nt, Homo sapiens
  misc_RNA (1)...(19): siRNA sense strand
acaaagguggcucuguuua

SEQ ID NO: 1789670 - RNA, 19 nt, Homo sapiens
  misc_RNA (1)...(19): siRNA sense strand
ugaaucagaaggagaagaa

SEQ ID NO: 1789671 - RNA, 19 nt, Homo sapiens
  misc_RNA (1)...(19): siRNA sense strand
ccaccagccuuaccuuuac

SEQ ID NO: 1789672 - RNA, 19 nt, Homo sapiens
  misc_RNA (1)...(19): siRNA sense strand
gcagaccgcauuauuggau

SEQ ID NO: 1789673 - RNA, 19 nt, Homo sapiens
  misc_RNA (1)...(19): siRNA sense strand
gaacuauugcacagccaaa

SEQ ID NO: 1789674 - RNA, 19 nt, Homo sapiens
  misc_RNA (1)...(19): siRNA sense strand
ggauaaaagucaucuccaa

SEQ ID NO: 1789675 - RNA, 19 nt, Homo sapiens
  misc_RNA (1)...(19): siRNA sense strand
cgagggaaguuacacaaac

SEQ ID NO: 1789676 - RNA, 19 nt, Homo sapiens
  misc_RNA (1)...(19): siRNA sense strand
uuaggaaaguugauaagca

SEQ ID NO: 1789677 - RNA, 19 nt, Homo sapiens
  misc_RNA (1)...(19): siRNA sense strand
gaaaugcagcagcuaaacu

SEQ ID NO: 1789678 - RNA, 19 nt, Homo sapiens
  misc_RNA (1)...(19): siRNA sense strand
gcgaggggaucaaacagua

SEQ ID NO: 1789679 - RNA, 19 nt, Homo sapiens
  misc_RNA (1)...(19): siRNA sense strand
aaagaagcagucauugaaa

SEQ ID NO: 1789680 - RNA, 19 nt, Homo sapiens
  misc_RNA (1)...(19): siRNA sense strand
cuguaaagauguucuaugg

SEQ ID NO: 1789681 - RNA, 19 nt, Homo sapiens
  misc_RNA (1)...(19): siRNA sense strand
acaaacgccagcacaaauu

SEQ ID NO: 1789682 - RNA, 19 nt, Homo sapiens
  misc_RNA (1)...(19): siRNA sense strand
auacuugcauguagaagga

SEQ ID NO: 1789683 - RNA, 19 nt, Homo sapiens
  misc_RNA (1)...(19): siRNA sense strand
cuacgaucccagacaguua

SEQ ID NO: 1789684 - RNA, 19 nt, Homo sapiens
  misc_RNA (1)...(19): siRNA sense strand
cacuucauguugucuguaa

SEQ ID NO: 1789685 - RNA, 19 nt, Homo sapiens
  misc_RNA (1)...(19): siRNA sense strand
gcauguagaaggagguaau

SEQ ID NO: 1789686 - RNA, 19 nt, Homo sapiens
  misc_RNA (1)...(19): siRNA sense strand
caaacagcgagggaaguua

SEQ ID NO: 1789687 - RNA, 19 nt, Homo sapiens
  misc_RNA (1)...(19): siRNA sense strand
ccuaacgaaucaaacacaa

SEQ ID NO: 1789688 - RNA, 19 nt, Homo sapiens
  misc_RNA (1)...(19): siRNA sense strand
agacaguuaguaccagaua

SEQ ID NO: 1789689 - RNA, 19 nt, Homo sapiens
  misc_RNA (1)...(19): siRNA sense strand
acacaaacgccagcacaaa

SEQ ID NO: 1789690 - RNA, 19 nt, Homo sapiens
  misc_RNA (1)...(19): siRNA sense strand
gggaaugggcccuguccuu

SEQ ID NO: 1789691 - RNA, 19 nt, Homo sapiens
  misc_RNA (1)...(19): siRNA sense strand
gaaccaaauaaagagauga

SEQ ID NO: 1789692 - RNA, 19 nt, Homo sapiens
  misc_RNA (1)...(19): siRNA sense strand
gaaggaaagaacuauugca

SEQ ID NO: 1789693 - RNA, 19 nt, Homo sapiens
  misc_RNA (1)...(19): siRNA sense strand
aggaaauagugaccaagaa

SEQ ID NO: 1789694 - RNA, 19 nt, Homo sapiens
  misc_RNA (1)...(19): siRNA sense strand
gagggaaguuacacaaacg

SEQ ID NO: 1789695 - RNA, 19 nt, Homo sapiens
  misc_RNA (1)...(19): siRNA sense strand
ggauguagaagcugaaacu

SEQ ID NO: 1789696 - RNA, 19 nt, Homo sapiens
  misc_RNA (1)...(19): siRNA sense strand
gaauucacaguccgagaug

SEQ ID NO: 1789697 - RNA, 19 nt, Homo sapiens
  misc_RNA (1)...(19): siRNA sense strand
aaauagugaccaagaaaug

SEQ ID NO: 1789698 - RNA, 19 nt, Homo sapiens
  misc_RNA (1)...(19): siRNA sense strand
gugaugacauugguguguu

SEQ ID NO: 1789699 - RNA, 19 nt, Homo sapiens
  misc_RNA (1)...(19): siRNA sense strand
gcgagggaaguuacacaaa

SEQ ID NO: 1789700 - RNA, 19 nt, Homo sapiens
  misc_RNA (1)...(19): siRNA sense strand
caaacgccagcacaaauuc

SEQ ID NO: 1789701 - RNA, 19 nt, Homo sapiens
  misc_RNA (1)...(19): siRNA sense strand
aaaagaagcagucauugaa

SEQ ID NO: 1789702 - RNA, 19 nt, Homo sapiens
  misc_RNA (1)...(19): siRNA sense strand
uaacgaaucaaacacaaac

SEQ ID NO: 1789703 - RNA, 19 nt, Homo sapiens
  misc_RNA (1)...(19): siRNA sense strand
caaauuuacgagugugguu

SEQ ID NO: 1789704 - RNA, 19 nt, Homo sapiens
  misc_RNA (1)...(19): siRNA sense strand
agaaccaaauaaagagaug

SEQ ID NO: 1789705 - RNA, 19 nt, Homo sapiens
  misc_RNA (1)...(19): siRNA sense strand
agaaggagaagaauucaca

SEQ ID NO: 1789706 - RNA, 19 nt, Homo sapiens
  misc_RNA (1)...(19): siRNA sense strand
caaauggaacgcgaugguu

SEQ ID NO: 1789707 - RNA, 19 nt, Homo sapiens
  misc_RNA (1)...(19): siRNA sense strand
cacaaacgccagcacaaau

SEQ ID NO: 1789708 - RNA, 19 nt, Homo sapiens
  misc_RNA (1)...(19): siRNA sense strand
caguaacuuugguccgaaa

SEQ ID NO: 1789709 - RNA, 19 nt, Homo sapiens
  misc_RNA (1)...(19): siRNA sense strand
gcagcuaaacuuggaagga

SEQ ID NO: 1789710 - RNA, 19 nt, Homo sapiens
  misc_RNA (1)...(19): siRNA sense strand
acagaagucauauggaaau

SEQ ID NO: 1789711 - RNA, 19 nt, Homo sapiens
  misc_RNA (1)...(19): siRNA sense strand
cagaagucauauggaaaug

SEQ ID NO: 1789712 - RNA, 19 nt, Homo sapiens
  misc_RNA (1)...(19): siRNA sense strand
aaaugcagcagcuaaacuu

SEQ ID NO: 1789713 - RNA, 19 nt, Homo sapiens
  misc_RNA (1)...(19): siRNA sense strand
caaacagucaaacuugugu

SEQ ID NO: 1789714 - RNA, 19 nt, Homo sapiens
  misc_RNA (1)...(19): siRNA sense strand
uaccagauacuugcaugua

SEQ ID NO: 1789715 - RNA, 19 nt, Homo sapiens
  misc_RNA (1)...(19): siRNA sense strand
gauaaaagucaucuccaaa

SEQ ID NO: 1789716 - RNA, 19 nt, Homo sapiens
  misc_RNA (1)...(19): siRNA sense strand
uggaaggaaagaacuauug

SEQ ID NO: 1789717 - RNA, 19 nt, Homo sapiens
  misc_RNA (1)...(19): siRNA sense strand
ggaaggaaagaacuauugc

SEQ ID NO: 1789718 - RNA, 19 nt, Homo sapiens
  misc_RNA (1)...(19): siRNA sense strand
uaggaaauagugaccaaga

SEQ ID NO: 1789719 - RNA, 19 nt, Homo sapiens
  misc_RNA (1)...(19): siRNA sense strand
uccaccagccuuaccuuua

SEQ ID NO: 1789720 - RNA, 19 nt, Homo sapiens
  misc_RNA (1)...(19): siRNA sense strand
ugauaagcagaccgcauua

SEQ ID NO: 1789721 - RNA, 19 nt, Homo sapiens
  misc_RNA (1)...(19): siRNA sense strand
aaucagaaggagaagaauu

SEQ ID NO: 1789722 - RNA, 19 nt, Homo sapiens
  misc_RNA (1)...(19): siRNA sense strand
gcacuucauguugucugua

SEQ ID NO: 1789723 - RNA, 19 nt, Homo sapiens
  misc_RNA (1)...(19): siRNA sense strand
uagaagcugaaacuaugua

SEQ ID NO: 1789724 - RNA, 19 nt, Homo sapiens
  misc_RNA (1)...(19): siRNA sense strand
gauguagaagcugaaacua

SEQ ID NO: 1789725 - RNA, 19 nt, Homo sapiens
  misc_RNA (1)...(19): siRNA sense strand
aagaagcagucauugaaaa

SEQ ID NO: 1789726 - RNA, 19 nt, Homo sapiens
  misc_RNA (1)...(19): siRNA sense strand
aagaaaugcagcagcuaaa

SEQ ID NO: 1789727 - RNA, 19 nt, Homo sapiens
  misc_RNA (1)...(19): siRNA sense strand
gcccaccuccuuguguaua

SEQ ID NO: 1789728 - RNA, 19 nt, Homo sapiens
  misc_RNA (1)...(19): siRNA sense strand
acaaacagcgagggaaguu

SEQ ID NO: 1789729 - RNA, 19 nt, Homo sapiens
  misc_RNA (1)...(19): siRNA sense strand
gggaucaaacaguacuuau

SEQ ID NO: 1789730 - RNA, 19 nt, Homo sapiens
  misc_RNA (1)...(19): siRNA sense strand
ccaagauugauaauuagga

SEQ ID NO: 1789731 - RNA, 19 nt, Homo sapiens
  misc_RNA (1)...(19): siRNA sense strand
uggcauggcacucccaaga

SEQ ID NO: 1789732 - RNA, 19 nt, Homo sapiens
  misc_RNA (1)...(19): siRNA sense strand
uugauaagcagaccgcauu

SEQ ID NO: 1789733 - RNA, 19 nt, Homo sapiens
  misc_RNA (1)...(19): siRNA sense strand
ugcagcagcuaaacuugga

SEQ ID NO: 1789734 - RNA, 19 nt, Homo sapiens
  misc_RNA (1)...(19): siRNA sense strand
aagcagaccgcauuauugg

SEQ ID NO: 1789735 - RNA, 19 nt, Homo sapiens
  misc_RNA (1)...(19): siRNA sense strand
gcacagaagucauauggaa

SEQ ID NO: 1789736 - RNA, 19 nt, Homo sapiens
  misc_RNA (1)...(19): siRNA sense strand
gggaagcuaugcgaaauua

SEQ ID NO: 1789737 - RNA, 19 nt, Homo sapiens
  misc_RNA (1)...(19): siRNA sense strand
ggacagaauuucacuccaa

SEQ ID NO: 1789738 - RNA, 19 nt, Homo sapiens
  misc_RNA (1)...(19): siRNA sense strand
gaacuuacaggacagaauu

SEQ ID NO: 1789739 - RNA, 19 nt, Homo sapiens
  misc_RNA (1)...(19): siRNA sense strand
ggacaaacagucaaacuug

SEQ ID NO: 1789740 - RNA, 19 nt, Homo sapiens
  misc_RNA (1)...(19): siRNA sense strand
guagagagccuucaguuga

SEQ ID NO: 1789741 - RNA, 19 nt, Homo sapiens
  misc_RNA (1)...(19): siRNA sense strand
gaucaaacaguacuuauuc

SEQ ID NO: 1789742 - RNA, 19 nt, Homo sapiens
  misc_RNA (1)...(19): siRNA sense strand
gcauggcacucccaagauu

SEQ ID NO: 1789743 - RNA, 19 nt, Homo sapiens
  misc_RNA (1)...(19): siRNA sense strand
gaagcuaugcgaaauuauu

SEQ ID NO: 1789744 - RNA, 19 nt, Homo sapiens
  misc_RNA (1)...(19): siRNA sense strand
ggaaauagugaccaagaaa

SEQ ID NO: 1789745 - RNA, 19 nt, Homo sapiens
  misc_RNA (1)...(19): siRNA sense strand
cucccaagauugauaauua

SEQ ID NO: 1789746 - RNA, 19 nt, Homo sapiens
  misc_RNA (1)...(19): siRNA sense strand
ugucacaacuccauaaaug

SEQ ID NO: 1789747 - RNA, 19 nt, Homo sapiens
  misc_RNA (1)...(19): siRNA sense strand
uguagaagcugaaacuaug

SEQ ID NO: 1789748 - RNA, 19 nt, Homo sapiens
  misc_RNA (1)...(19): siRNA sense strand
uaacuuugguccgaaauga

SEQ ID NO: 1789749 - RNA, 19 nt, Homo sapiens
  misc_RNA (1)...(19): siRNA sense strand
gacagaauuucacuccaaa

SEQ ID NO: 1789750 - RNA, 19 nt, Homo sapiens
  misc_RNA (1)...(19): siRNA sense strand
caaagguggcucuguuuaa

SEQ ID NO: 1789751 - RNA, 19 nt, Homo sapiens
  misc_RNA (1)...(19): siRNA sense strand
cagcuaaacuuggaaggaa

SEQ ID NO: 1789752 - RNA, 19 nt, Homo sapiens
  misc_RNA (1)...(19): siRNA sense strand
gaaauagugaccaagaaau

SEQ ID NO: 1789753 - RNA, 19 nt, Homo sapiens
  misc_RNA (1)...(19): siRNA sense strand
caagaaaugcagcagcuaa

SEQ ID NO: 1789754 - RNA, 19 nt, Homo sapiens
  misc_RNA (1)...(19): siRNA sense strand
cauguugucuguaaagaug

SEQ ID NO: 1789755 - RNA, 19 nt, Homo sapiens
  misc_RNA (1)...(19): siRNA sense strand
guacagguguggagagagu

SEQ ID NO: 1789756 - RNA, 19 nt, Homo sapiens
  misc_RNA (1)...(19): siRNA sense strand
caacagugaugacauuggu

SEQ ID NO: 1789757 - RNA, 19 nt, Homo sapiens
  misc_RNA (1)...(19): siRNA sense strand
ccagauacuugcauguaga

SEQ ID NO: 1789758 - RNA, 19 nt, Homo sapiens
  misc_RNA (1)...(19): siRNA sense strand
aaagucaucuccaaaccuu

SEQ ID NO: 1789759 - RNA, 19 nt, Homo sapiens
  misc_RNA (1)...(19): siRNA sense strand
uaaggcagaguauacauuu

SEQ ID NO: 1789760 - RNA, 19 nt, Homo sapiens
  misc_RNA (1)...(19): siRNA sense strand
gcacaaauucaaccagugu

SEQ ID NO: 1789761 - RNA, 19 nt, Homo sapiens
  misc_RNA (1)...(19): siRNA sense strand
ggaucaaacaguacuuauu

SEQ ID NO: 1789762 - RNA, 19 nt, Homo sapiens
  misc_RNA (1)...(19): siRNA sense strand
ccaccuaaacgacuuacua

SEQ ID NO: 1789763 - RNA, 19 nt, Homo sapiens
  misc_RNA (1)...(19): siRNA sense strand
gcacucccaagauugauaa

SEQ ID NO: 1789764 - RNA, 19 nt, Homo sapiens
  misc_RNA (1)...(19): siRNA sense strand
aaagguggcucuguuuaau

SEQ ID NO: 1789765 - RNA, 19 nt, Homo sapiens
  misc_RNA (1)...(19): siRNA sense strand
uggcaacagugaugacauu

SEQ ID NO: 1789766 - RNA, 19 nt, Homo sapiens
  misc_RNA (1)...(19): siRNA sense strand
uaagcagaccgcauuauug

SEQ ID NO: 1789767 - RNA, 19 nt, Homo sapiens
  misc_RNA (1)...(19): siRNA sense strand
caaccagugucacaucauc

SEQ ID NO: 1789768 - RNA, 19 nt, Homo sapiens
  misc_RNA (1)...(19): siRNA sense strand
ucucuuggaugaugaugaa

SEQ ID NO: 1789769 - RNA, 19 nt, Homo sapiens
  misc_RNA (1)...(19): siRNA sense strand
gguccgaaaugauggaauc

SEQ ID NO: 1789770 - RNA, 19 nt, Homo sapiens
  misc_RNA (1)...(19): siRNA sense strand
guacuuauucuucaugcaa

SEQ ID NO: 1789771 - RNA, 19 nt, Homo sapiens
  misc_RNA (1)...(19): siRNA sense strand
caaacaguacuuauucuuc

SEQ ID NO: 1789772 - RNA, 19 nt, Homo sapiens
  misc_RNA (1)...(19): siRNA sense strand
acaaagguggcucuguuua

SEQ ID NO: 1789773 - RNA, 19 nt, Homo sapiens
  misc_RNA (1)...(19): siRNA sense strand
ugaaucagaaggagaagaa

SEQ ID NO: 1789774 - RNA, 19 nt, Homo sapiens
  misc_RNA (1)...(19): siRNA sense strand
ccaccagccuuaccuuuac

SEQ ID NO: 1789775 - RNA, 19 nt, Homo sapiens
  misc_RNA (1)...(19): siRNA sense strand
gcagaccgcauuauuggau

SEQ ID NO: 1789776 - RNA, 19 nt, Homo sapiens
  misc_RNA (1)...(19): siRNA sense strand
gaacuauugcacagccaaa

SEQ ID NO: 1789777 - RNA, 19 nt, Homo sapiens
  misc_RNA (1)...(19): siRNA sense strand
ggauaaaagucaucuccaa

SEQ ID NO: 1789778 - RNA, 19 nt, Homo sapiens
  misc_RNA (1)...(19): siRNA sense strand
cgagggaaguuacacaaac

SEQ ID NO: 1789779 - RNA, 19 nt, Homo sapiens
  misc_RNA (1)...(19): siRNA sense strand
uuaggaaaguugauaagca

SEQ ID NO: 1789780 - RNA, 19 nt, Homo sapiens
  misc_RNA (1)...(19): siRNA sense strand
gaaaugcagcagcuaaacu

SEQ ID NO: 1789781 - RNA, 19 nt, Homo sapiens
  misc_RNA (1)...(19): siRNA sense strand
gcgaggggaucaaacagua

SEQ ID NO: 1789782 - RNA, 19 nt, Homo sapiens
  misc_RNA (1)...(19): siRNA sense strand
aaagaagcagucauugaaa

SEQ ID NO: 1789783 - RNA, 19 nt, Homo sapiens
  misc_RNA (1)...(19): siRNA sense strand
cuguaaagauguucuaugg

SEQ ID NO: 1789784 - RNA, 19 nt, Homo sapiens
  misc_RNA (1)...(19): siRNA sense strand
acaaacgccagcacaaauu

SEQ ID NO: 1789785 - RNA, 19 nt, Homo sapiens
  misc_RNA (1)...(19): siRNA sense strand
auacuugcauguagaagga

SEQ ID NO: 1789786 - RNA, 19 nt, Homo sapiens
  misc_RNA (1)...(19): siRNA sense strand
cuacgaucccagacaguua

SEQ ID NO: 1789787 - RNA, 19 nt, Homo sapiens
  misc_RNA (1)...(19): siRNA sense strand
cacuucauguugucuguaa

SEQ ID NO: 1789788 - RNA, 19 nt, Homo sapiens
  misc_RNA (1)...(19): siRNA sense strand
uagggaagcuaugcgaaau

SEQ ID NO: 1789789 - RNA, 19 nt, Homo sapiens
  misc_RNA (1)...(19): siRNA sense strand
caaacagcgagggaaguua

SEQ ID NO: 1789790 - RNA, 19 nt, Homo sapiens
  misc_RNA (1)...(19): siRNA sense strand
ccuaacgaaucaaacacaa

SEQ ID NO: 1789791 - RNA, 19 nt, Homo sapiens
  misc_RNA (1)...(19): siRNA sense strand
ugagcggccuccaccuaaa

SEQ ID NO: 1789792 - RNA, 19 nt, Homo sapiens
  misc_RNA (1)...(19): siRNA sense strand
gcauguagaaggagguaau

SEQ ID NO: 1789793 - RNA, 19 nt, Homo sapiens
  misc_RNA (1)...(19): siRNA sense strand
agacaguuaguaccagaua

SEQ ID NO: 1789794 - RNA, 19 nt, Homo sapiens
  misc_RNA (1)...(19): siRNA sense strand
acacaaacgccagcacaaa

SEQ ID NO: 1789795 - RNA, 19 nt, Homo sapiens
  misc_RNA (1)...(19): siRNA sense strand
gggaaugggcccuguccuu

SEQ ID NO: 1789796 - RNA, 19 nt, Homo sapiens
  misc_RNA (1)...(19): siRNA sense strand
gaaccaaauaaagagauga

SEQ ID NO: 1789797 - RNA, 19 nt, Homo sapiens
  misc_RNA (1)...(19): siRNA sense strand
aggaaauagugaccaagaa

SEQ ID NO: 1789798 - RNA, 19 nt, Homo sapiens
  misc_RNA (1)...(19): siRNA sense strand
gagggaaguuacacaaacg

SEQ ID NO: 1789799 - RNA, 19 nt, Homo sapiens
  misc_RNA (1)...(19): siRNA sense strand
ggauguagaagcugaaacu

SEQ ID NO: 1789800 - RNA, 19 nt, Homo sapiens
  misc_RNA (1)...(19): siRNA sense strand
gaauucacaguccgagaug

SEQ ID NO: 1789801 - RNA, 19 nt, Homo sapiens
  misc_RNA (1)...(19): siRNA sense strand
gugaugacauugguguguu

SEQ ID NO: 1789802 - RNA, 19 nt, Homo sapiens
  misc_RNA (1)...(19): siRNA sense strand
gaaggaaagaacuauugca

SEQ ID NO: 1789803 - RNA, 19 nt, Homo sapiens
  misc_RNA (1)...(19): siRNA sense strand
aaauagugaccaagaaaug

SEQ ID NO: 1789804 - RNA, 19 nt, Homo sapiens
  misc_RNA (1)...(19): siRNA sense strand
gcgagggaaguuacacaaa

SEQ ID NO: 1789805 - RNA, 19 nt, Homo sapiens
  misc_RNA (1)...(19): siRNA sense strand
caaacgccagcacaaauuc

SEQ ID NO: 1789806 - RNA, 19 nt, Homo sapiens
  misc_RNA (1)...(19): siRNA sense strand
gugagcggccuccaccuaa

SEQ ID NO: 1789807 - RNA, 19 nt, Homo sapiens
  misc_RNA (1)...(19): siRNA sense strand
uaacgaaucaaacacaaac

SEQ ID NO: 1789808 - RNA, 19 nt, Homo sapiens
  misc_RNA (1)...(19): siRNA sense strand
caaauuuacgagugugguu

SEQ ID NO: 1789809 - RNA, 19 nt, Homo sapiens
  misc_RNA (1)...(19): siRNA sense strand
agaaccaaauaaagagaug

SEQ ID NO: 1789810 - RNA, 19 nt, Homo sapiens
  misc_RNA (1)...(19): siRNA sense strand
agaaggagaagaauucaca

SEQ ID NO: 1789811 - RNA, 19 nt, Homo sapiens
  misc_RNA (1)...(19): siRNA sense strand
aaaagaagcagucauugaa

SEQ ID NO: 1789812 - RNA, 19 nt, Homo sapiens
  misc_RNA (1)...(19): siRNA sense strand
gcagcuaaacuuggaagga

SEQ ID NO: 1789813 - RNA, 19 nt, Homo sapiens
  misc_RNA (1)...(19): siRNA sense strand
caaauggaacgcgaugguu

SEQ ID NO: 1789814 - RNA, 19 nt, Homo sapiens
  misc_RNA (1)...(19): siRNA sense strand
cacaaacgccagcacaaau

SEQ ID NO: 1789815 - RNA, 19 nt, Homo sapiens
  misc_RNA (1)...(19): siRNA sense strand
acagaagucauauggaaau

SEQ ID NO: 1789816 - RNA, 19 nt, Homo sapiens
  misc_RNA (1)...(19): siRNA sense strand
caguaacuuugguccgaaa

SEQ ID NO: 1789817 - RNA, 19 nt, Homo sapiens
  misc_RNA (1)...(19): siRNA sense strand
uggaaggaaagaacuauug

SEQ ID NO: 1789818 - RNA, 19 nt, Homo sapiens
  misc_RNA (1)...(19): siRNA sense strand
cagaagucauauggaaaug

SEQ ID NO: 1789819 - RNA, 19 nt, Homo sapiens
  misc_RNA (1)...(19): siRNA sense strand
caaacagucaaacuugugu

SEQ ID NO: 1789820 - RNA, 19 nt, Homo sapiens
  misc_RNA (1)...(19): siRNA sense strand
uaccagauacuugcaugua

SEQ ID NO: 1789821 - RNA, 19 nt, Homo sapiens
  misc_RNA (1)...(19): siRNA sense strand
gauaaaagucaucuccaaa

SEQ ID NO: 1789822 - RNA, 19 nt, Homo sapiens
  misc_RNA (1)...(19): siRNA sense strand
ggaaggaaagaacuauugc

SEQ ID NO: 1789823 - RNA, 19 nt, Homo sapiens
  misc_RNA (1)...(19): siRNA sense strand
aaaugcagcagcuaaacuu

SEQ ID NO: 1789824 - RNA, 19 nt, Homo sapiens
  misc_RNA (1)...(19): siRNA sense strand
aaucagaaggagaagaauu

SEQ ID NO: 1789825 - RNA, 19 nt, Homo sapiens
  misc_RNA (1)...(19): siRNA sense strand
uccaccagccuuaccuuua

SEQ ID NO: 1789826 - RNA, 19 nt, Homo sapiens
  misc_RNA (1)...(19): siRNA sense strand
ugauaagcagaccgcauua

SEQ ID NO: 1789827 - RNA, 19 nt, Homo sapiens
  misc_RNA (1)...(19): siRNA sense strand
uaggaaauagugaccaaga

SEQ ID NO: 1789828 - RNA, 19 nt, Homo sapiens
  misc_RNA (1)...(19): siRNA sense strand
cuagggaagcuaugcgaaa

SEQ ID NO: 1789829 - RNA, 19 nt, Homo sapiens
  misc_RNA (1)...(19): siRNA sense strand
gcacuucauguugucugua

SEQ ID NO: 1789830 - RNA, 19 nt, Homo sapiens
  misc_RNA (1)...(19): siRNA sense strand
uagaagcugaaacuaugua

SEQ ID NO: 1789831 - RNA, 19 nt, Homo sapiens
  misc_RNA (1)...(19): siRNA sense strand
gauguagaagcugaaacua

SEQ ID NO: 1789832 - RNA, 19 nt, Homo sapiens
  misc_RNA (1)...(19): siRNA sense strand
aagaagcagucauugaaaa

SEQ ID NO: 1789833 - RNA, 19 nt, Homo sapiens
  misc_RNA (1)...(19): siRNA sense strand
aagaaaugcagcagcuaaa

SEQ ID NO: 1789834 - RNA, 19 nt, Homo sapiens
  misc_RNA (1)...(19): siRNA sense strand
acaaacagcgagggaaguu

SEQ ID NO: 1789835 - RNA, 19 nt, Homo sapiens
  misc_RNA (1)...(19): siRNA sense strand
gaaccaagucacacucauc

SEQ ID NO: 1789836 - RNA, 19 nt, Homo sapiens
  misc_RNA (1)...(19): siRNA sense strand
cggcuucacccuaauguuu

SEQ ID NO: 1789837 - RNA, 19 nt, Homo sapiens
  misc_RNA (1)...(19): siRNA sense strand
ggaaccaagucacacucau

SEQ ID NO: 1789838 - RNA, 19 nt, Homo sapiens
  misc_RNA (1)...(19): siRNA sense strand
uguccucggucuccauuug

SEQ ID NO: 1789839 - RNA, 19 nt, Homo sapiens
  misc_RNA (1)...(19): siRNA sense strand
cucaucggcuucacccuaa

SEQ ID NO: 1789840 - RNA, 19 nt, Homo sapiens
  misc_RNA (1)...(19): siRNA sense strand
ucagcggccuucacaucaa

SEQ ID NO: 1789841 - RNA, 19 nt, Homo sapiens
  misc_RNA (1)...(19): siRNA sense strand
caucagcggccuucacauc

SEQ ID NO: 1789842 - RNA, 19 nt, Homo sapiens
  misc_RNA (1)...(19): siRNA sense strand
gaggacaaacacucacagu

SEQ ID NO: 1789843 - RNA, 19 nt, Homo sapiens
  misc_RNA (1)...(19): siRNA sense strand
cgccgguccuucuuugaau

SEQ ID NO: 1789844 - RNA, 19 nt, Homo sapiens
  misc_RNA (1)...(19): siRNA sense strand
gcgaauucacugccuccuu

SEQ ID NO: 1789845 - RNA, 19 nt, Homo sapiens
  misc_RNA (1)...(19): siRNA sense strand
ccucauggugucccaguug

SEQ ID NO: 1789846 - RNA, 19 nt, Homo sapiens
  misc_RNA (1)...(19): siRNA sense strand
gcagauugcucaagaaauu

SEQ ID NO: 1789847 - RNA, 19 nt, Homo sapiens
  misc_RNA (1)...(19): siRNA sense strand
ggaaauccauuacuucaaa

SEQ ID NO: 1789848 - RNA, 19 nt, Homo sapiens
  misc_RNA (1)...(19): siRNA sense strand
gcaauaaucuggcaaaugg

SEQ ID NO: 1789849 - RNA, 19 nt, Homo sapiens
  misc_RNA (1)...(19): siRNA sense strand
ggaaggaaauccauuacuu

SEQ ID NO: 1789850 - RNA, 19 nt, Homo sapiens
  misc_RNA (1)...(19): siRNA sense strand
gcgagacuguggagaaaua

SEQ ID NO: 1789851 - RNA, 19 nt, Homo sapiens
  misc_RNA (1)...(19): siRNA sense strand
acaaggaccucaagucaaa

SEQ ID NO: 1789852 - RNA, 19 nt, Homo sapiens
  misc_RNA (1)...(19): siRNA sense strand
caacuucucugcaaacaca

SEQ ID NO: 1789853 - RNA, 19 nt, Homo sapiens
  misc_RNA (1)...(19): siRNA sense strand
caagcacucugacgucuuu

SEQ ID NO: 1789854 - RNA, 19 nt, Homo sapiens
  misc_RNA (1)...(19): siRNA sense strand
gagcaaaucccacgaguuc

SEQ ID NO: 1789855 - RNA, 19 nt, Homo sapiens
  misc_RNA (1)...(19): siRNA sense strand
gaagccaccucgcuauuca

SEQ ID NO: 1789856 - RNA, 19 nt, Homo sapiens
  misc_RNA (1)...(19): siRNA sense strand
gcagaucccucgcagagau

SEQ ID NO: 1789857 - RNA, 19 nt, Homo sapiens
  misc_RNA (1)...(19): siRNA sense strand
caacaaaugcaccaaagaa

SEQ ID NO: 1789858 - RNA, 19 nt, Homo sapiens
  misc_RNA (1)...(19): siRNA sense strand
aaagaaaucucggacauuc

SEQ ID NO: 1789859 - RNA, 19 nt, Homo sapiens
  misc_RNA (1)...(19): siRNA sense strand
gaggcaaccuuuccaaaca

SEQ ID NO: 1789860 - RNA, 19 nt, Homo sapiens
  misc_RNA (1)...(19): siRNA sense strand
gcacacggcagcagaagaa

SEQ ID NO: 1789861 - RNA, 19 nt, Homo sapiens
  misc_RNA (1)...(19): siRNA sense strand
ggaagaagaacaagcugaa

SEQ ID NO: 1789862 - RNA, 19 nt, Homo sapiens
  misc_RNA (1)...(19): siRNA sense strand
gcagagaucucggcaacuc

SEQ ID NO: 1789863 - RNA, 19 nt, Homo sapiens
  misc_RNA (1)...(19): siRNA sense strand
gaacaagaagagagaccua

SEQ ID NO: 1789864 - RNA, 19 nt, Homo sapiens
  misc_RNA (1)...(19): siRNA sense strand
gaaaagaaaucucggacau

SEQ ID NO: 1789865 - RNA, 19 nt, Homo sapiens
  misc_RNA (1)...(19): siRNA sense strand
ccaggcagauugcucaaga

SEQ ID NO: 1789866 - RNA, 19 nt, Homo sapiens
  misc_RNA (1)...(19): siRNA sense strand
uaaagugccacaacaaaug

SEQ ID NO: 1789867 - RNA, 19 nt, Homo sapiens
  misc_RNA (1)...(19): siRNA sense strand
ucaccaagcucauggacau

SEQ ID NO: 1789868 - RNA, 19 nt, Homo sapiens
  misc_RNA (1)...(19): siRNA sense strand
augaagagguccaugauga

SEQ ID NO: 1789869 - RNA, 19 nt, Homo sapiens
  misc_RNA (1)...(19): siRNA sense strand
ccacaucccugucccuuac

SEQ ID NO: 1789870 - RNA, 19 nt, Homo sapiens
  misc_RNA (1)...(19): siRNA sense strand
gaggagauccagcaagguu

SEQ ID NO: 1789871 - RNA, 19 nt, Homo sapiens
  misc_RNA (1)...(19): siRNA sense strand
ccaagggaauccuacacaa

SEQ ID NO: 1789872 - RNA, 19 nt, Homo sapiens
  misc_RNA (1)...(19): siRNA sense strand
cagaguccguuccguguga

SEQ ID NO: 1789873 - RNA, 19 nt, Homo sapiens
  misc_RNA (1)...(19): siRNA sense strand
gaccucgaauccaaucuug

SEQ ID NO: 1789874 - RNA, 19 nt, Homo sapiens
  misc_RNA (1)...(19): siRNA sense strand
ggagaucggcgagcucauu

SEQ ID NO: 1789875 - RNA, 19 nt, Homo sapiens
  misc_RNA (1)...(19): siRNA sense strand
caaaugggcacaggcauga

SEQ ID NO: 1789876 - RNA, 19 nt, Homo sapiens
  misc_RNA (1)...(19): siRNA sense strand
caacgucggagaaugaaga

SEQ ID NO: 1789877 - RNA, 19 nt, Homo sapiens
  misc_RNA (1)...(19): siRNA sense strand
gaggccaacuucucugcaa

SEQ ID NO: 1789878 - RNA, 19 nt, Homo sapiens
  misc_RNA (1)...(19): siRNA sense strand
gaaugaagagguccaugau

SEQ ID NO: 1789879 - RNA, 19 nt, Homo sapiens
  misc_RNA (1)...(19): siRNA sense strand
guaggcagcugcgagaaca

SEQ ID NO: 1789880 - RNA, 19 nt, Homo sapiens
  misc_RNA (1)...(19): siRNA sense strand
guuaaagugccacaacaaa

SEQ ID NO: 1789881 - RNA, 19 nt, Homo sapiens
  misc_RNA (1)...(19): siRNA sense strand
aaacugcgcauccagaaug

SEQ ID NO: 1789882 - RNA, 19 nt, Homo sapiens
  misc_RNA (1)...(19): siRNA sense strand
gugcgagacuguggagaaa

SEQ ID NO: 1789883 - RNA, 19 nt, Homo sapiens
  misc_RNA (1)...(19): siRNA sense strand
uuuggacucuucagcauuu

SEQ ID NO: 1789884 - RNA, 19 nt, Homo sapiens
  misc_RNA (1)...(19): siRNA sense strand
gggaauggccuuucaagac

SEQ ID NO: 1789885 - RNA, 19 nt, Homo sapiens
  misc_RNA (1)...(19): siRNA sense strand
gagccaacgucggagaaug

SEQ ID NO: 1789886 - RNA, 19 nt, Homo sapiens
  misc_RNA (1)...(19): siRNA sense strand
ucggcgagcucauuggaaa

SEQ ID NO: 1789887 - RNA, 19 nt, Homo sapiens
  misc_RNA (1)...(19): siRNA sense strand
ccacaacaaaugcaccaaa

SEQ ID NO: 1789888 - RNA, 19 nt, Homo sapiens
  misc_RNA (1)...(19): siRNA sense strand
acacaaggaccucaaguca

SEQ ID NO: 1789889 - RNA, 19 nt, Homo sapiens
  misc_RNA (1)...(19): siRNA sense strand
ggaagccaccucgcuauuc

SEQ ID NO: 1789890 - RNA, 19 nt, Homo sapiens
  misc_RNA (1)...(19): siRNA sense strand
ccggugaccucgaauccaa

SEQ ID NO: 1789891 - RNA, 19 nt, Homo sapiens
  misc_RNA (1)...(19): siRNA sense strand
acaaauacaagcagcaguu

SEQ ID NO: 1789892 - RNA, 19 nt, Homo sapiens
  misc_RNA (1)...(19): siRNA sense strand
ccaaccagcagaggcaaua

SEQ ID NO: 1789893 - RNA, 19 nt, Homo sapiens
  misc_RNA (1)...(19): siRNA sense strand
gcaaaucccacgaguucca

SEQ ID NO: 1789894 - RNA, 19 nt, Homo sapiens
  misc_RNA (1)...(19): siRNA sense strand
gaacuccacgccagggaau

SEQ ID NO: 1789895 - RNA, 19 nt, Homo sapiens
  misc_RNA (1)...(19): siRNA sense strand
ggcacaaucugguaugaac

SEQ ID NO: 1789896 - RNA, 19 nt, Homo sapiens
  misc_RNA (1)...(19): siRNA sense strand
gaacgucuucuaugacaac

SEQ ID NO: 1789897 - RNA, 19 nt, Homo sapiens
  misc_RNA (1)...(19): siRNA sense strand
cagcaucccacuacuacaa

SEQ ID NO: 1789898 - RNA, 19 nt, Homo sapiens
  misc_RNA (1)...(19): siRNA sense strand
gaucauccaccgaggagau

SEQ ID NO: 1789899 - RNA, 19 nt, Homo sapiens
  misc_RNA (1)...(19): siRNA sense strand
cacaacaaaugcaccaaag

SEQ ID NO: 1789900 - RNA, 19 nt, Homo sapiens
  misc_RNA (1)...(19): siRNA sense strand
aagaagagcaaacccuuga

SEQ ID NO: 1789901 - RNA, 19 nt, Homo sapiens
  misc_RNA (1)...(19): siRNA sense strand
agaaugaagagguccauga

SEQ ID NO: 1789902 - RNA, 19 nt, Homo sapiens
  misc_RNA (1)...(19): siRNA sense strand
gaaaccgucgccugucuca

SEQ ID NO: 1789903 - RNA, 19 nt, Homo sapiens
  misc_RNA (1)...(19): siRNA sense strand
ggucaucacggacuuugga

SEQ ID NO: 1789904 - RNA, 19 nt, Homo sapiens
  misc_RNA (1)...(19): siRNA sense strand
ggaggcaaccuuuccaaac

SEQ ID NO: 1789905 - RNA, 19 nt, Homo sapiens
  misc_RNA (1)...(19): siRNA sense strand
guaagggacggacgcucua

SEQ ID NO: 1789906 - RNA, 19 nt, Homo sapiens
  misc_RNA (1)...(19): siRNA sense strand
gagaucggcgagcucauug

SEQ ID NO: 1789907 - RNA, 19 nt, Homo sapiens
  misc_RNA (1)...(19): siRNA sense strand
gaagagcaaacccuugaac

SEQ ID NO: 1789908 - RNA, 19 nt, Homo sapiens
  misc_RNA (1)...(19): siRNA sense strand
gcugggccuuugaacaaga

SEQ ID NO: 1789909 - RNA, 19 nt, Homo sapiens
  misc_RNA (1)...(19): siRNA sense strand
ccaacaaaaucaacaagga

SEQ ID NO: 1789910 - RNA, 19 nt, Homo sapiens
  misc_RNA (1)...(19): siRNA sense strand
guccagcacuauugucaca

SEQ ID NO: 1789911 - RNA, 19 nt, Homo sapiens
  misc_RNA (1)...(19): siRNA sense strand
caugagaacguggugcuuu

SEQ ID NO: 1789912 - RNA, 19 nt, Homo sapiens
  misc_RNA (1)...(19): siRNA sense strand
gcaucccacuacuacaaau

SEQ ID NO: 1789913 - RNA, 19 nt, Homo sapiens
  misc_RNA (1)...(19): siRNA sense strand
ggagcaaaucccacgaguu

SEQ ID NO: 1789914 - RNA, 19 nt, Homo sapiens
  misc_RNA (1)...(19): siRNA sense strand
gaagucugcagagcuguga

SEQ ID NO: 1789915 - RNA, 19 nt, Homo sapiens
  misc_RNA (1)...(19): siRNA sense strand
gaaaacugauacacuugau

SEQ ID NO: 1789916 - RNA, 19 nt, Homo sapiens
  misc_RNA (1)...(19): siRNA sense strand
ccgaagagucagaggauga

SEQ ID NO: 1789917 - RNA, 19 nt, Homo sapiens
  misc_RNA (1)...(19): siRNA sense strand
gaccugcacaucagucaga

SEQ ID NO: 1789918 - RNA, 19 nt, Homo sapiens
  misc_RNA (1)...(19): siRNA sense strand
ggagauccagcaagguuag

SEQ ID NO: 1789919 - RNA, 19 nt, Homo sapiens
  misc_RNA (1)...(19): siRNA sense strand
gaucggcgagcucauugga

SEQ ID NO: 1789920 - RNA, 19 nt, Homo sapiens
  misc_RNA (1)...(19): siRNA sense strand
uuaaagugccacaacaaau

SEQ ID NO: 1789921 - RNA, 19 nt, Homo sapiens
  misc_RNA (1)...(19): siRNA sense strand
ucucggacauucuucucuu

SEQ ID NO: 1789922 - RNA, 19 nt, Homo sapiens
  misc_RNA (1)...(19): siRNA sense strand
caucaucaccagccucugu

SEQ ID NO: 1789923 - RNA, 19 nt, Homo sapiens
  misc_RNA (1)...(19): siRNA sense strand
acaagcagcaguucaucuu

SEQ ID NO: 1789924 - RNA, 19 nt, Homo sapiens
  misc_RNA (1)...(19): siRNA sense strand
gaucucggcaacuccauca

SEQ ID NO: 1789925 - RNA, 19 nt, Homo sapiens
  misc_RNA (1)...(19): siRNA sense strand
gaggcaauaaucuggcaaa

SEQ ID NO: 1789926 - RNA, 19 nt, Homo sapiens
  misc_RNA (1)...(19): siRNA sense strand
gaagaagaacaagcugaag

SEQ ID NO: 1789927 - RNA, 19 nt, Homo sapiens
  misc_RNA (1)...(19): siRNA sense strand
caacaaaaccaggcagauu

SEQ ID NO: 1789928 - RNA, 19 nt, Homo sapiens
  misc_RNA (1)...(19): siRNA sense strand
ccaaguacuggaugucuca

SEQ ID NO: 1789929 - RNA, 19 nt, Homo sapiens
  misc_RNA (1)...(19): siRNA sense strand
caagguuaguccggacaga

SEQ ID NO: 1789930 - RNA, 19 nt, Homo sapiens
  misc_RNA (1)...(19): siRNA sense strand
ggcaauaaucuggcaaaug

SEQ ID NO: 1789931 - RNA, 19 nt, Homo sapiens
  misc_RNA (1)...(19): siRNA sense strand
caagggaauccuacacaag

SEQ ID NO: 1789932 - RNA, 19 nt, Homo sapiens
  misc_RNA (1)...(19): siRNA sense strand
ugaugaggccgaagaguca

SEQ ID NO: 1789933 - RNA, 19 nt, Homo sapiens
  misc_RNA (1)...(19): siRNA sense strand
caucccacuacuacaaaua

SEQ ID NO: 1789934 - RNA, 19 nt, Homo sapiens
  misc_RNA (1)...(19): siRNA sense strand
ugacaucaacaacccucua

SEQ ID NO: 1789935 - RNA, 19 nt, Homo sapiens
  misc_RNA (1)...(19): siRNA sense strand
aggcaaccuuuccaaacaa

SEQ ID NO: 1789936 - RNA, 19 nt, Homo sapiens
  misc_RNA (1)...(19): siRNA sense strand
ccugucaucuucugaucau

SEQ ID NO: 1789937 - RNA, 19 nt, Homo sapiens
  misc_RNA (1)...(19): siRNA sense strand
caggcagauugcucaagaa

SEQ ID NO: 1789938 - RNA, 19 nt, Homo sapiens
  misc_RNA (1)...(19): siRNA sense strand
ccaaagccaagaagaagag

SEQ ID NO: 1789939 - RNA, 19 nt, Homo sapiens
  misc_RNA (1)...(19): siRNA sense strand
aaggaaauccauuacuuca

SEQ ID NO: 1789940 - RNA, 19 nt, Homo sapiens
  misc_RNA (1)...(19): siRNA sense strand
caaauacaagcagcaguuc

SEQ ID NO: 1789941 - RNA, 19 nt, Homo sapiens
  misc_RNA (1)...(19): siRNA sense strand
caaguuaaagugccacaac

SEQ ID NO: 1789942 - RNA, 19 nt, Homo sapiens
  misc_RNA (1)...(19): siRNA sense strand
cugcugggccuuugaacaa

SEQ ID NO: 1789943 - RNA, 19 nt, Homo sapiens
  misc_RNA (1)...(19): siRNA sense strand
gcccaaagccaagaagaag

SEQ ID NO: 1789944 - RNA, 19 nt, Homo sapiens
  misc_RNA (1)...(19): siRNA sense strand
ucccuccgcuccuucuuug

SEQ ID NO: 1789945 - RNA, 19 nt, Homo sapiens
  misc_RNA (1)...(19): siRNA sense strand
agaccagcaucuuccuuca

SEQ ID NO: 1789946 - RNA, 19 nt, Homo sapiens
  misc_RNA (1)...(19): siRNA sense strand
gaagaaaccuuacggaugu

SEQ ID NO: 1789947 - RNA, 19 nt, Homo sapiens
  misc_RNA (1)...(19): siRNA sense strand
gaaagcauuuguucagaaa

SEQ ID NO: 1789948 - RNA, 19 nt, Homo sapiens
  misc_RNA (1)...(19): siRNA sense strand
guacagagaugugauguug

SEQ ID NO: 1789949 - RNA, 19 nt, Homo sapiens
  misc_RNA (1)...(19): siRNA sense strand
gagaaacccuauccaugua

SEQ ID NO: 1789950 - RNA, 19 nt, Homo sapiens
  misc_RNA (1)...(19): siRNA sense strand
ggagagaggccauaaauau

SEQ ID NO: 1789951 - RNA, 19 nt, Homo sapiens
  misc_RNA (1)...(19): siRNA sense strand
ggacugcgaucccauaaau

SEQ ID NO: 1789952 - RNA, 19 nt, Homo sapiens
  misc_RNA (1)...(19): siRNA sense strand
ggagagagaccauauaaau

SEQ ID NO: 1789953 - RNA, 19 nt, Homo sapiens
  misc_RNA (1)...(19): siRNA sense strand
ggaaagcauuuguucagaa

SEQ ID NO: 1789954 - RNA, 19 nt, Homo sapiens
  misc_RNA (1)...(19): siRNA sense strand
acaagaaagucacaccuua

SEQ ID NO: 1789955 - RNA, 19 nt, Homo sapiens
  misc_RNA (1)...(19): siRNA sense strand
gaaaccauauggaugcauu

SEQ ID NO: 1789956 - RNA, 19 nt, Homo sapiens
  misc_RNA (1)...(19): siRNA sense strand
gagagaagcccuaucaaug

SEQ ID NO: 1789957 - RNA, 19 nt, Homo sapiens
  misc_RNA (1)...(19): siRNA sense strand
ggagaagccuuaugaaugc

SEQ ID NO: 1789958 - RNA, 19 nt, Homo sapiens
  misc_RNA (1)...(19): siRNA sense strand
ggaacucacuucucauuag

SEQ ID NO: 1789959 - RNA, 19 nt, Homo sapiens
  misc_RNA (1)...(19): siRNA sense strand
ggagauaaauacuauggau

SEQ ID NO: 1789960 - RNA, 19 nt, Homo sapiens
  misc_RNA (1)...(19): siRNA sense strand
gcucacugcuaaucacaua

SEQ ID NO: 1789961 - RNA, 19 nt, Homo sapiens
  misc_RNA (1)...(19): siRNA sense strand
gaagucagaguuaauaaga

SEQ ID NO: 1789962 - RNA, 19 nt, Homo sapiens
  misc_RNA (1)...(19): siRNA sense strand
gagagaagcccuacgaaug

SEQ ID NO: 1789963 - RNA, 19 nt, Homo sapiens
  misc_RNA (1)...(19): siRNA sense strand
gagaagaacuaucgaugca

SEQ ID NO: 1789964 - RNA, 19 nt, Homo sapiens
  misc_RNA (1)...(19): siRNA sense strand
ggaagucacuccucauuuu

SEQ ID NO: 1789965 - RNA, 19 nt, Homo sapiens
  misc_RNA (1)...(19): siRNA sense strand
ucagauaacgcacacaaua

SEQ ID NO: 1789966 - RNA, 19 nt, Homo sapiens
  misc_RNA (1)...(19): siRNA sense strand
cauggaauguggcagauuu

SEQ ID NO: 1789967 - RNA, 19 nt, Homo sapiens
  misc_RNA (1)...(19): siRNA sense strand
gagaaggcacagcugauua

SEQ ID NO: 1789968 - RNA, 19 nt, Homo sapiens
  misc_RNA (1)...(19): siRNA sense strand
gggagaagccuuaugaaug

SEQ ID NO: 1789969 - RNA, 19 nt, Homo sapiens
  misc_RNA (1)...(19): siRNA sense strand
ggagaaacccuaugaaugc

SEQ ID NO: 1789970 - RNA, 19 nt, Homo sapiens
  misc_RNA (1)...(19): siRNA sense strand
gagaugugauguuggagaa

SEQ ID NO: 1789971 - RNA, 19 nt, Homo sapiens
  misc_RNA (1)...(19): siRNA sense strand
acacacaggagucuauuua

SEQ ID NO: 1789972 - RNA, 19 nt, Homo sapiens
  misc_RNA (1)...(19): siRNA sense strand
ggaaaagccuucaguagga

SEQ ID NO: 1789973 - RNA, 19 nt, Homo sapiens
  misc_RNA (1)...(19): siRNA sense strand
gauaaucaagacaaccuua

SEQ ID NO: 1789974 - RNA, 19 nt, Homo sapiens
  misc_RNA (1)...(19): siRNA sense strand
gaagucaagucucauucau

SEQ ID NO: 1789975 - RNA, 19 nt, Homo sapiens
  misc_RNA (1)...(19): siRNA sense strand
ggagagaagcccuaucaau

SEQ ID NO: 1789976 - RNA, 19 nt, Homo sapiens
  misc_RNA (1)...(19): siRNA sense strand
gcucacgguucaucaaaga

SEQ ID NO: 1789977 - RNA, 19 nt, Homo sapiens
  misc_RNA (1)...(19): siRNA sense strand
ccauauggaugcauucaau

SEQ ID NO: 1789978 - RNA, 19 nt, Homo sapiens
  misc_RNA (1)...(19): siRNA sense strand
aaauguggcuccgagauaa

SEQ ID NO: 1789979 - RNA, 19 nt, Homo sapiens
  misc_RNA (1)...(19): siRNA sense strand
gaacucacuucucauuagg

SEQ ID NO: 1789980 - RNA, 19 nt, Homo sapiens
  misc_RNA (1)...(19): siRNA sense strand
acacaggagucuauuuaug

SEQ ID NO: 1789981 - RNA, 19 nt, Homo sapiens
  misc_RNA (1)...(19): siRNA sense strand
gagaagcccuaucaaugca

SEQ ID NO: 1789982 - RNA, 19 nt, Homo sapiens
  misc_RNA (1)...(19): siRNA sense strand
ggauguggcuguggauuuc

SEQ ID NO: 1789983 - RNA, 19 nt, Homo sapiens
  misc_RNA (1)...(19): siRNA sense strand
gagagagaccauauaaaug

SEQ ID NO: 1789984 - RNA, 19 nt, Homo sapiens
  misc_RNA (1)...(19): siRNA sense strand
gggagaaacccuaugaaug

SEQ ID NO: 1789985 - RNA, 19 nt, Homo sapiens
  misc_RNA (1)...(19): siRNA sense strand
ggagagaaaccauauggau

SEQ ID NO: 1789986 - RNA, 19 nt, Homo sapiens
  misc_RNA (1)...(19): siRNA sense strand
gugaggaggccuucuuuaa

SEQ ID NO: 1789987 - RNA, 19 nt, Homo sapiens
  misc_RNA (1)...(19): siRNA sense strand
aaccacagcugauuaaaca

SEQ ID NO: 1789988 - RNA, 19 nt, Homo sapiens
  misc_RNA (1)...(19): siRNA sense strand
gagaaacccuacaguugca

SEQ ID NO: 1789989 - RNA, 19 nt, Homo sapiens
  misc_RNA (1)...(19): siRNA sense strand
gcgaaugucagaaagcuuu

SEQ ID NO: 1789990 - RNA, 19 nt, Homo sapiens
  misc_RNA (1)...(19): siRNA sense strand
gaagucgcagcuuaugaua

SEQ ID NO: 1789991 - RNA, 19 nt, Homo sapiens
  misc_RNA (1)...(19): siRNA sense strand
gaggaauggcagcuacuua

SEQ ID NO: 1789992 - RNA, 19 nt, Homo sapiens
  misc_RNA (1)...(19): siRNA sense strand
acacagggaagaaaccuua

SEQ ID NO: 1789993 - RNA, 19 nt, Homo sapiens
  misc_RNA (1)...(19): siRNA sense strand
aguaggaagucgcagcuua

SEQ ID NO: 1789994 - RNA, 19 nt, Homo sapiens
  misc_RNA (1)...(19): siRNA sense strand
caagacaaccuuaaaagua

SEQ ID NO: 1789995 - RNA, 19 nt, Homo sapiens
  misc_RNA (1)...(19): siRNA sense strand
ggaagucgcagcuuaugau

SEQ ID NO: 1789996 - RNA, 19 nt, Homo sapiens
  misc_RNA (1)...(19): siRNA sense strand
cagaaagugcagcucauua

SEQ ID NO: 1789997 - RNA, 19 nt, Homo sapiens
  misc_RNA (1)...(19): siRNA sense strand
ucacaucagagaacacaua

SEQ ID NO: 1789998 - RNA, 19 nt, Homo sapiens
  misc_RNA (1)...(19): siRNA sense strand
uuggaagucuggcuagaua

SEQ ID NO: 1789999 - RNA, 19 nt, Homo sapiens
  misc_RNA (1)...(19): siRNA sense strand
aacaggaagucgcagcuua

SEQ ID NO: 1790000 - RNA, 19 nt, Homo sapiens
  misc_RNA (1)...(19): siRNA sense strand
caggagagagaccauauaa

SEQ ID NO: 1790001 - RNA, 19 nt, Homo sapiens
  misc_RNA (1)...(19): siRNA sense strand
gggaaagcauuuguucaga

SEQ ID NO: 1790002 - RNA, 19 nt, Homo sapiens
  misc_RNA (1)...(19): siRNA sense strand
uagagaaacccuacaguug

SEQ ID NO: 1790003 - RNA, 19 nt, Homo sapiens
  misc_RNA (1)...(19): siRNA sense strand
agaagaacuuguacagaga

SEQ ID NO: 1790004 - RNA, 19 nt, Homo sapiens
  misc_RNA (1)...(19): siRNA sense strand
ggagaacuauagcaaucug

SEQ ID NO: 1790005 - RNA, 19 nt, Homo sapiens
  misc_RNA (1)...(19): siRNA sense strand
ggaccaccuucaacaggaa

SEQ ID NO: 1790006 - RNA, 19 nt, Homo sapiens
  misc_RNA (1)...(19): siRNA sense strand
acagagaugugauguugga

SEQ ID NO: 1790007 - RNA, 19 nt, Homo sapiens
  misc_RNA (1)...(19): siRNA sense strand
gagagaccauauaaaugug

SEQ ID NO: 1790008 - RNA, 19 nt, Homo sapiens
  misc_RNA (1)...(19): siRNA sense strand
agaaagugcagcucauuaa

SEQ ID NO: 1790009 - RNA, 19 nt, Homo sapiens
  misc_RNA (1)...(19): siRNA sense strand
gagaacccauacuggagaa

SEQ ID NO: 1790010 - RNA, 19 nt, Homo sapiens
  misc_RNA (1)...(19): siRNA sense strand
guaggaagucgcagcuuaa

SEQ ID NO: 1790011 - RNA, 19 nt, Homo sapiens
  misc_RNA (1)...(19): siRNA sense strand
ggagagaagccguauggau

SEQ ID NO: 1790012 - RNA, 19 nt, Homo sapiens
  misc_RNA (1)...(19): siRNA sense strand
gaaggcacagcugauuaua

SEQ ID NO: 1790013 - RNA, 19 nt, Homo sapiens
  misc_RNA (1)...(19): siRNA sense strand
agucaagucucauucauca

SEQ ID NO: 1790014 - RNA, 19 nt, Homo sapiens
  misc_RNA (1)...(19): siRNA sense strand
gaaaaccacagcugauuaa

SEQ ID NO: 1790015 - RNA, 19 nt, Homo sapiens
  misc_RNA (1)...(19): siRNA sense strand
ggagagaagcccuacgaau

SEQ ID NO: 1790016 - RNA, 19 nt, Homo sapiens
  misc_RNA (1)...(19): siRNA sense strand
ggaagucgcagcugauuac

SEQ ID NO: 1790017 - RNA, 19 nt, Homo sapiens
  misc_RNA (1)...(19): siRNA sense strand
agucacagauaucauuuga

SEQ ID NO: 1790018 - RNA, 19 nt, Homo sapiens
  misc_RNA (1)...(19): siRNA sense strand
gaaagucacaccuuaugag

SEQ ID NO: 1790019 - RNA, 19 nt, Homo sapiens
  misc_RNA (1)...(19): siRNA sense strand
agagagaccauauaaaugu

SEQ ID NO: 1790020 - RNA, 19 nt, Homo sapiens
  misc_RNA (1)...(19): siRNA sense strand
gaacacauacaggugagaa

SEQ ID NO: 1790021 - RNA, 19 nt, Homo sapiens
  misc_RNA (1)...(19): siRNA sense strand
gugagaaacccuaugaaug

SEQ ID NO: 1790022 - RNA, 19 nt, Homo sapiens
  misc_RNA (1)...(19): siRNA sense strand
caagaaagucacaccuuau

SEQ ID NO: 1790023 - RNA, 19 nt, Homo sapiens
  misc_RNA (1)...(19): siRNA sense strand
ccauauaaauguggugaau

SEQ ID NO: 1790024 - RNA, 19 nt, Homo sapiens
  misc_RNA (1)...(19): siRNA sense strand
gcacagcugauuauacauc

SEQ ID NO: 1790025 - RNA, 19 nt, Homo sapiens
  misc_RNA (1)...(19): siRNA sense strand
aggcacagcugauuauaca

SEQ ID NO: 1790026 - RNA, 19 nt, Homo sapiens
  misc_RNA (1)...(19): siRNA sense strand
gaacuuguacagagaugug

SEQ ID NO: 1790027 - RNA, 19 nt, Homo sapiens
  misc_RNA (1)...(19): siRNA sense strand
gaagucaagccugauauca

SEQ ID NO: 1790028 - RNA, 19 nt, Homo sapiens
  misc_RNA (1)...(19): siRNA sense strand
ccagaagucaagccugaua

SEQ ID NO: 1790029 - RNA, 19 nt, Homo sapiens
  misc_RNA (1)...(19): siRNA sense strand
ggagagaaacccuauccau

SEQ ID NO: 1790030 - RNA, 19 nt, Homo sapiens
  misc_RNA (1)...(19): siRNA sense strand
gauaucacaucagagaaca

SEQ ID NO: 1790031 - RNA, 19 nt, Homo sapiens
  misc_RNA (1)...(19): siRNA sense strand
uuacggauguggugagugu

SEQ ID NO: 1790032 - RNA, 19 nt, Homo sapiens
  misc_RNA (1)...(19): siRNA sense strand
gaaacccuauccauguagu

SEQ ID NO: 1790033 - RNA, 19 nt, Homo sapiens
  misc_RNA (1)...(19): siRNA sense strand
agagaaacccuauccaugu

SEQ ID NO: 1790034 - RNA, 19 nt, Homo sapiens
  misc_RNA (1)...(19): siRNA sense strand
caucagagaauucauacug

SEQ ID NO: 1790035 - RNA, 19 nt, Homo sapiens
  misc_RNA (1)...(19): siRNA sense strand
gaaagugcagcucauuaag

SEQ ID NO: 1790036 - RNA, 19 nt, Homo sapiens
  misc_RNA (1)...(19): siRNA sense strand
gagaaacccuaugaaugca

SEQ ID NO: 1790037 - RNA, 19 nt, Homo sapiens
  misc_RNA (1)...(19): siRNA sense strand
gagaaacccuaugaaugca

SEQ ID NO: 1790038 - RNA, 19 nt, Homo sapiens
  misc_RNA (1)...(19): siRNA sense strand
ugagaaacccuaugaaugc

SEQ ID NO: 1790039 - RNA, 19 nt, Homo sapiens
  misc_RNA (1)...(19): siRNA sense strand
gaacuauagcaaucugguu

SEQ ID NO: 1790040 - RNA, 19 nt, Homo sapiens
  misc_RNA (1)...(19): siRNA sense strand
agucgcagcugauuacuca

SEQ ID NO: 1790041 - RNA, 19 nt, Homo sapiens
  misc_RNA (1)...(19): siRNA sense strand
gaauggcagcuacuuaauc

SEQ ID NO: 1790042 - RNA, 19 nt, Homo sapiens
  misc_RNA (1)...(19): siRNA sense strand
ggugagaaacccuaugaau

SEQ ID NO: 1790043 - RNA, 19 nt, Homo sapiens
  misc_RNA (1)...(19): siRNA sense strand
ggaagucuggcuagauaau

SEQ ID NO: 1790044 - RNA, 19 nt, Homo sapiens
  misc_RNA (1)...(19): siRNA sense strand
ggaauggcagcuacuuaau

SEQ ID NO: 1790045 - RNA, 19 nt, Homo sapiens
  misc_RNA (1)...(19): siRNA sense strand
gugaaugugggaaaucuuu

SEQ ID NO: 1790046 - RNA, 19 nt, Homo sapiens
  misc_RNA (1)...(19): siRNA sense strand
ggaacgagcagaucaagaa

SEQ ID NO: 1790047 - RNA, 19 nt, Homo sapiens
  misc_RNA (1)...(19): siRNA sense strand
uaccaccgcugccucaaga

SEQ ID NO: 1790048 - RNA, 19 nt, Homo sapiens
  misc_RNA (1)...(19): siRNA sense strand
gccagaaccagauccguaa

SEQ ID NO: 1790049 - RNA, 19 nt, Homo sapiens
  misc_RNA (1)...(19): siRNA sense strand
gcagaucaagaacgggauu

SEQ ID NO: 1790050 - RNA, 19 nt, Homo sapiens
  misc_RNA (1)...(19): siRNA sense strand
uaacugcuaccagaacuuc

SEQ ID NO: 1790051 - RNA, 19 nt, Homo sapiens
  misc_RNA (1)...(19): siRNA sense strand
gaacgagcagaucaagaac

SEQ ID NO: 1790052 - RNA, 19 nt, Homo sapiens
  misc_RNA (1)...(19): siRNA sense strand
agaaccagauccguaacug

SEQ ID NO: 1790053 - RNA, 19 nt, Homo sapiens
  misc_RNA (1)...(19): siRNA sense strand
gcccugcgaguacuauuuc

SEQ ID NO: 1790054 - RNA, 19 nt, Homo sapiens
  misc_RNA (1)...(19): siRNA sense strand
cgaaaguucucaccacuaa

SEQ ID NO: 1790055 - RNA, 19 nt, Homo sapiens
  misc_RNA (1)...(19): siRNA sense strand
gagaagagcggaacaagaa

SEQ ID NO: 1790056 - RNA, 19 nt, Homo sapiens
  misc_RNA (1)...(19): siRNA sense strand
aagaggcgauuuccuauua

SEQ ID NO: 1790057 - RNA, 19 nt, Homo sapiens
  misc_RNA (1)...(19): siRNA sense strand
ccaagcagcuggaggaaga

SEQ ID NO: 1790058 - RNA, 19 nt, Homo sapiens
  misc_RNA (1)...(19): siRNA sense strand
cagaggaagugaaauuuga

SEQ ID NO: 1790059 - RNA, 19 nt, Homo sapiens
  misc_RNA (1)...(19): siRNA sense strand
ggagaaagucagcaacuaa

SEQ ID NO: 1790060 - RNA, 19 nt, Homo sapiens
  misc_RNA (1)...(19): siRNA sense strand
gcagacgacuggaacgauu

SEQ ID NO: 1790061 - RNA, 19 nt, Homo sapiens
  misc_RNA (1)...(19): siRNA sense strand
gcaccgacguggcuuucua

SEQ ID NO: 1790062 - RNA, 19 nt, Homo sapiens
  misc_RNA (1)...(19): siRNA sense strand
gcccagaucugcacauuca

SEQ ID NO: 1790063 - RNA, 19 nt, Homo sapiens
  misc_RNA (1)...(19): siRNA sense strand
gagcgucccugacuacaug

SEQ ID NO: 1790064 - RNA, 19 nt, Homo sapiens
  misc_RNA (1)...(19): siRNA sense strand
gagcugcccuggaaggauu

SEQ ID NO: 1790065 - RNA, 19 nt, Homo sapiens
  misc_RNA (1)...(19): siRNA sense strand
cauggaagcaucagaauuu

SEQ ID NO: 1790066 - RNA, 19 nt, Homo sapiens
  misc_RNA (1)...(19): siRNA sense strand
ggacagagccacagacaag

SEQ ID NO: 1790067 - RNA, 19 nt, Homo sapiens
  misc_RNA (1)...(19): siRNA sense strand
gcacauucauugcaaccuu

SEQ ID NO: 1790068 - RNA, 19 nt, Homo sapiens
  misc_RNA (1)...(19): siRNA sense strand
ccacagaccuuugagaagu

SEQ ID NO: 1790069 - RNA, 19 nt, Homo sapiens
  misc_RNA (1)...(19): siRNA sense strand
uggaagcuguccugaauuu

SEQ ID NO: 1790070 - RNA, 19 nt, Homo sapiens
  misc_RNA (1)...(19): siRNA sense strand
caacaaagcaggcgacuac

SEQ ID NO: 1790071 - RNA, 19 nt, Homo sapiens
  misc_RNA (1)...(19): siRNA sense strand
gaaagucagcaacuaauca

SEQ ID NO: 1790072 - RNA, 19 nt, Homo sapiens
  misc_RNA (1)...(19): siRNA sense strand
gcacaggaaguucucauug

SEQ ID NO: 1790073 - RNA, 19 nt, Homo sapiens
  misc_RNA (1)...(19): siRNA sense strand
uaauguaucuguccagcuu

SEQ ID NO: 1790074 - RNA, 19 nt, Homo sapiens
  misc_RNA (1)...(19): siRNA sense strand
cgauuacugugaacgguua

SEQ ID NO: 1790075 - RNA, 19 nt, Homo sapiens
  misc_RNA (1)...(19): siRNA sense strand
gaugguauauaacccaaug

SEQ ID NO: 1790076 - RNA, 19 nt, Homo sapiens
  misc_RNA (1)...(19): siRNA sense strand
ugaaggauauuacaggaau

SEQ ID NO: 1790077 - RNA, 19 nt, Homo sapiens
  misc_RNA (1)...(19): siRNA sense strand
cagcagacauuacaagaag

SEQ ID NO: 1790078 - RNA, 19 nt, Homo sapiens
  misc_RNA (1)...(19): siRNA sense strand
ggagaugugugugaaguuc

SEQ ID NO: 1790079 - RNA, 19 nt, Homo sapiens
  misc_RNA (1)...(19): siRNA sense strand
gcuuggagcugcccuggaa

SEQ ID NO: 1790080 - RNA, 19 nt, Homo sapiens
  misc_RNA (1)...(19): siRNA sense strand
cacaggaaguucucauuga

SEQ ID NO: 1790081 - RNA, 19 nt, Homo sapiens
  misc_RNA (1)...(19): siRNA sense strand
ccuuagcccugaagacaua

SEQ ID NO: 1790082 - RNA, 19 nt, Homo sapiens
  misc_RNA (1)...(19): siRNA sense strand
gaaggauuguguucagcuu

SEQ ID NO: 1790083 - RNA, 19 nt, Homo sapiens
  misc_RNA (1)...(19): siRNA sense strand
cagcuucugucaucuauca

SEQ ID NO: 1790084 - RNA, 19 nt, Homo sapiens
  misc_RNA (1)...(19): siRNA sense strand
gggccacacugaaggauau

SEQ ID NO: 1790085 - RNA, 19 nt, Homo sapiens
  misc_RNA (1)...(19): siRNA sense strand
ggaaacccuugcccaguuc

SEQ ID NO: 1790086 - RNA, 19 nt, Homo sapiens
  misc_RNA (1)...(19): siRNA sense strand
ccuggaagcuguccugaau

SEQ ID NO: 1790087 - RNA, 19 nt, Homo sapiens
  misc_RNA (1)...(19): siRNA sense strand
gaaguucagcugaugguau

SEQ ID NO: 1790088 - RNA, 19 nt, Homo sapiens
  misc_RNA (1)...(19): siRNA sense strand
gaucggacgugcuaagaac

SEQ ID NO: 1790089 - RNA, 19 nt, Homo sapiens
  misc_RNA (1)...(19): siRNA sense strand
aaguucagcugaugguaua

SEQ ID NO: 1790090 - RNA, 19 nt, Homo sapiens
  misc_RNA (1)...(19): siRNA sense strand
ucaaggagaugugugugaa

SEQ ID NO: 1790091 - RNA, 19 nt, Homo sapiens
  misc_RNA (1)...(19): siRNA sense strand
gaacuauacguccaagugu

SEQ ID NO: 1790092 - RNA, 19 nt, Homo sapiens
  misc_RNA (1)...(19): siRNA sense strand
agaaagauguggcccaaag

SEQ ID NO: 1790093 - RNA, 19 nt, Homo sapiens
  misc_RNA (1)...(19): siRNA sense strand
gagcauggaagcaucagaa

SEQ ID NO: 1790094 - RNA, 19 nt, Homo sapiens
  misc_RNA (1)...(19): siRNA sense strand
gaacugccuuagcccugaa

SEQ ID NO: 1790095 - RNA, 19 nt, Homo sapiens
  misc_RNA (1)...(19): siRNA sense strand
auaaagaggcgauuuccua

SEQ ID NO: 1790096 - RNA, 19 nt, Homo sapiens
  misc_RNA (1)...(19): siRNA sense strand
ggagaagagcggaacaaga

SEQ ID NO: 1790097 - RNA, 19 nt, Homo sapiens
  misc_RNA (1)...(19): siRNA sense strand
ccuauuacagcaaguauaa

SEQ ID NO: 1790098 - RNA, 19 nt, Homo sapiens
  misc_RNA (1)...(19): siRNA sense strand
caaucaacaucaaagugaa

SEQ ID NO: 1790099 - RNA, 19 nt, Homo sapiens
  misc_RNA (1)...(19): siRNA sense strand
acacagacagcagacauua

SEQ ID NO: 1790100 - RNA, 19 nt, Homo sapiens
  misc_RNA (1)...(19): siRNA sense strand
gagaaagucagcaacuaau

SEQ ID NO: 1790101 - RNA, 19 nt, Homo sapiens
  misc_RNA (1)...(19): siRNA sense strand
cccaaagccuagagaacua

SEQ ID NO: 1790102 - RNA, 19 nt, Homo sapiens
  misc_RNA (1)...(19): siRNA sense strand
uaagaaugcgggagugauu

SEQ ID NO: 1790103 - RNA, 19 nt, Homo sapiens
  misc_RNA (1)...(19): siRNA sense strand
aggacucccuggugcauua

SEQ ID NO: 1790104 - RNA, 19 nt, Homo sapiens
  misc_RNA (1)...(19): siRNA sense strand
ucaggcaugugaaacuauu

SEQ ID NO: 1790105 - RNA, 19 nt, Homo sapiens
  misc_RNA (1)...(19): siRNA sense strand
gauaaccugccgggaauaa

SEQ ID NO: 1790106 - RNA, 19 nt, Homo sapiens
  misc_RNA (1)...(19): siRNA sense strand
gcaagucugcguucuucaa

SEQ ID NO: 1790107 - RNA, 19 nt, Homo sapiens
  misc_RNA (1)...(19): siRNA sense strand
ucaaagugaagcuggauuu

SEQ ID NO: 1790108 - RNA, 19 nt, Homo sapiens
  misc_RNA (1)...(19): siRNA sense strand
gcuggaagcuagaggaaac

SEQ ID NO: 1790109 - RNA, 19 nt, Homo sapiens
  misc_RNA (1)...(19): siRNA sense strand
gagaaucgaggacuucauc

SEQ ID NO: 1790110 - RNA, 19 nt, Homo sapiens
  misc_RNA (1)...(19): siRNA sense strand
ggugaugaaauaucuacua

SEQ ID NO: 1790111 - RNA, 19 nt, Homo sapiens
  misc_RNA (1)...(19): siRNA sense strand
guggagggccugcuacaaa

SEQ ID NO: 1790112 - RNA, 19 nt, Homo sapiens
  misc_RNA (1)...(19): siRNA sense strand
guacguguccuugcaauuc

SEQ ID NO: 1790113 - RNA, 19 nt, Homo sapiens
  misc_RNA (1)...(19): siRNA sense strand
gagcugcugcguucuguga

SEQ ID NO: 1790114 - RNA, 19 nt, Homo sapiens
  misc_RNA (1)...(19): siRNA sense strand
uaaagaggcgauuuccuau

SEQ ID NO: 1790115 - RNA, 19 nt, Homo sapiens
  misc_RNA (1)...(19): siRNA sense strand
acaaucaacaucaaaguga

SEQ ID NO: 1790116 - RNA, 19 nt, Homo sapiens
  misc_RNA (1)...(19): siRNA sense strand
gcauggaagcaucagaauu

SEQ ID NO: 1790117 - RNA, 19 nt, Homo sapiens
  misc_RNA (1)...(19): siRNA sense strand
cgucaggcaugugaaacua

SEQ ID NO: 1790118 - RNA, 19 nt, Homo sapiens
  misc_RNA (1)...(19): siRNA sense strand
gaagucgagccgucuguau

SEQ ID NO: 1790119 - RNA, 19 nt, Homo sapiens
  misc_RNA (1)...(19): siRNA sense strand
ccaaugccguuugaacuuc

SEQ ID NO: 1790120 - RNA, 19 nt, Homo sapiens
  misc_RNA (1)...(19): siRNA sense strand
ggacuggccacagaccuuu

SEQ ID NO: 1790121 - RNA, 19 nt, Homo sapiens
  misc_RNA (1)...(19): siRNA sense strand
aggaaacccuugcccaguu

SEQ ID NO: 1790122 - RNA, 19 nt, Homo sapiens
  misc_RNA (1)...(19): siRNA sense strand
gcacacaaccguggagaag

SEQ ID NO: 1790123 - RNA, 19 nt, Homo sapiens
  misc_RNA (1)...(19): siRNA sense strand
acaggaaguucucauugau

SEQ ID NO: 1790124 - RNA, 19 nt, Homo sapiens
  misc_RNA (1)...(19): siRNA sense strand
agaacggcgugcacaacua

SEQ ID NO: 1790125 - RNA, 19 nt, Homo sapiens
  misc_RNA (1)...(19): siRNA sense strand
uggagaaagucagcaacua

SEQ ID NO: 1790126 - RNA, 19 nt, Homo sapiens
  misc_RNA (1)...(19): siRNA sense strand
gugacuguuugcuggauaa

SEQ ID NO: 1790127 - RNA, 19 nt, Homo sapiens
  misc_RNA (1)...(19): siRNA sense strand
ggccacagaccuuugagaa

SEQ ID NO: 1790128 - RNA, 19 nt, Homo sapiens
  misc_RNA (1)...(19): siRNA sense strand
cuauucaaguggacaaguu

SEQ ID NO: 1790129 - RNA, 19 nt, Homo sapiens
  misc_RNA (1)...(19): siRNA sense strand
gaaggauauuacaggaauc

SEQ ID NO: 1790130 - RNA, 19 nt, Homo sapiens
  misc_RNA (1)...(19): siRNA sense strand
uggauaaccugccgggaau

SEQ ID NO: 1790131 - RNA, 19 nt, Homo sapiens
  misc_RNA (1)...(19): siRNA sense strand
ggacacagacagcagacau

SEQ ID NO: 1790132 - RNA, 19 nt, Homo sapiens
  misc_RNA (1)...(19): siRNA sense strand
agaagagaaucgaggacuu

SEQ ID NO: 1790133 - RNA, 19 nt, Homo sapiens
  misc_RNA (1)...(19): siRNA sense strand
cugaagacauaauugacaa

SEQ ID NO: 1790134 - RNA, 19 nt, Homo sapiens
  misc_RNA (1)...(19): siRNA sense strand
ggaaaauauuggaauggaa

SEQ ID NO: 1790135 - RNA, 19 nt, Homo sapiens
  misc_RNA (1)...(19): siRNA sense strand
gaguggaguucgagucucu

SEQ ID NO: 1790136 - RNA, 19 nt, Homo sapiens
  misc_RNA (1)...(19): siRNA sense strand
acacaaccguggagaagag

SEQ ID NO: 1790137 - RNA, 19 nt, Homo sapiens
  misc_RNA (1)...(19): siRNA sense strand
gaggcgauuuccuauuaca

SEQ ID NO: 1790138 - RNA, 19 nt, Homo sapiens
  misc_RNA (1)...(19): siRNA sense strand
guguucagcuucugucauc

SEQ ID NO: 1790139 - RNA, 19 nt, Homo sapiens
  misc_RNA (1)...(19): siRNA sense strand
ggaucucagugaugaugga

SEQ ID NO: 1790140 - RNA, 19 nt, Homo sapiens
  misc_RNA (1)...(19): siRNA sense strand
ggucagaacgugucaacca

SEQ ID NO: 1790141 - RNA, 19 nt, Homo sapiens
  misc_RNA (1)...(19): siRNA sense strand
ggacugggacuucaaaaug

SEQ ID NO: 1790142 - RNA, 19 nt, Homo sapiens
  misc_RNA (1)...(19): siRNA sense strand
aaaugagcgucccugacua

SEQ ID NO: 1790143 - RNA, 19 nt, Homo sapiens
  misc_RNA (1)...(19): siRNA sense strand
gaagacauaauugacaagu

SEQ ID NO: 1790144 - RNA, 19 nt, Homo sapiens
  misc_RNA (1)...(19): siRNA sense strand
gaacggcgugcacaacuac

SEQ ID NO: 1790145 - RNA, 19 nt, Homo sapiens
  misc_RNA (1)...(19): siRNA sense strand
gaacuucuucaggaucuau

SEQ ID NO: 1790146 - RNA, 19 nt, Homo sapiens
  misc_RNA (1)...(19): siRNA sense strand
ugcaggaucucagugauga

SEQ ID NO: 1790147 - RNA, 19 nt, Homo sapiens
  misc_RNA (1)...(19): siRNA sense strand
ccagaucugcacauucauu

SEQ ID NO: 1790148 - RNA, 19 nt, Homo sapiens
  misc_RNA (1)...(19): siRNA sense strand
gucagaacgugucaaccaa

SEQ ID NO: 1790149 - RNA, 19 nt, Homo sapiens
  misc_RNA (1)...(19): siRNA sense strand
cacagaccuuugagaaguu

SEQ ID NO: 1790150 - RNA, 19 nt, Homo sapiens
  misc_RNA (1)...(19): siRNA sense strand
cuauugaaccuuccugcua

SEQ ID NO: 1790151 - RNA, 19 nt, Homo sapiens
  misc_RNA (1)...(19): siRNA sense strand
cuacaaacuccuccuggaa

SEQ ID NO: 1790152 - RNA, 19 nt, Homo sapiens
  misc_RNA (1)...(19): siRNA sense strand
gaaaguucucaccacuaaa

SEQ ID NO: 1790153 - RNA, 19 nt, Homo sapiens
  misc_RNA (1)...(19): siRNA sense strand
gagcagcgaggcacucauc

SEQ ID NO: 1790154 - RNA, 19 nt, Homo sapiens
  misc_RNA (1)...(19): siRNA sense strand
ggaaauggcuguuggacuu

SEQ ID NO: 1790155 - RNA, 19 nt, Homo sapiens
  misc_RNA (1)...(19): siRNA sense strand
uaacaccagcugcauaugu

SEQ ID NO: 1790156 - RNA, 19 nt, Homo sapiens
  misc_RNA (1)...(19): siRNA sense strand
uaggcaaccugaagcaguu

SEQ ID NO: 1790157 - RNA, 19 nt, Homo sapiens
  misc_RNA (1)...(19): siRNA sense strand
gaaauggcuguuggacuug

SEQ ID NO: 1790158 - RNA, 19 nt, Homo sapiens
  misc_RNA (1)...(19): siRNA sense strand
aacaccagcugcauaugug

SEQ ID NO: 1790159 - RNA, 19 nt, Homo sapiens
  misc_RNA (1)...(19): siRNA sense strand
cuuaacaccagcugcauau

SEQ ID NO: 1790160 - RNA, 19 nt, Homo sapiens
  misc_RNA (1)...(19): siRNA sense strand
aagcaguucagaaggaauu

SEQ ID NO: 1790161 - RNA, 19 nt, Homo sapiens
  misc_RNA (1)...(19): siRNA sense strand
gcaggcagcuuuggaauga

SEQ ID NO: 1790162 - RNA, 19 nt, Homo sapiens
  misc_RNA (1)...(19): siRNA sense strand
gaucagaacuacaauuaca

SEQ ID NO: 1790163 - RNA, 19 nt, Homo sapiens
  misc_RNA (1)...(19): siRNA sense strand
ggaaagcacugggacaaau

SEQ ID NO: 1790164 - RNA, 19 nt, Homo sapiens
  misc_RNA (1)...(19): siRNA sense strand
gaaagcacugggacaaaua

SEQ ID NO: 1790165 - RNA, 19 nt, Homo sapiens
  misc_RNA (1)...(19): siRNA sense strand
gcagcuggcucuaaaguca

SEQ ID NO: 1790166 - RNA, 19 nt, Homo sapiens
  misc_RNA (1)...(19): siRNA sense strand
caacugggaugccauaaac

SEQ ID NO: 1790167 - RNA, 19 nt, Homo sapiens
  misc_RNA (1)...(19): siRNA sense strand
gaacacuccuuuccucaac

SEQ ID NO: 1790168 - RNA, 19 nt, Homo sapiens
  misc_RNA (1)...(19): siRNA sense strand
gggaggauuucaaacagaa

SEQ ID NO: 1790169 - RNA, 19 nt, Homo sapiens
  misc_RNA (1)...(19): siRNA sense strand
cggaggaaauggacauaaa

SEQ ID NO: 1790170 - RNA, 19 nt, Homo sapiens
  misc_RNA (1)...(19): siRNA sense strand
ccgaucagaacuacaauua

SEQ ID NO: 1790171 - RNA, 19 nt, Homo sapiens
  misc_RNA (1)...(19): siRNA sense strand
gggaugccauaaacaagaa

SEQ ID NO: 1790172 - RNA, 19 nt, Homo sapiens
  misc_RNA (1)...(19): siRNA sense strand
ucaaacagaacacuccuuu

SEQ ID NO: 1790173 - RNA, 19 nt, Homo sapiens
  misc_RNA (1)...(19): siRNA sense strand
aaacucagcaggcagcuuu

SEQ ID NO: 1790174 - RNA, 19 nt, Homo sapiens
  misc_RNA (1)...(19): siRNA sense strand
gcagagccgaucagaacua

SEQ ID NO: 1790175 - RNA, 19 nt, Homo sapiens
  misc_RNA (1)...(19): siRNA sense strand
caacuggaaagcaauuauu

SEQ ID NO: 1790176 - RNA, 19 nt, Homo sapiens
  misc_RNA (1)...(19): siRNA sense strand
ggcagaagaugucauucga

SEQ ID NO: 1790177 - RNA, 19 nt, Homo sapiens
  misc_RNA (1)...(19): siRNA sense strand
gggaaguacucagucaaga

SEQ ID NO: 1790178 - RNA, 19 nt, Homo sapiens
  misc_RNA (1)...(19): siRNA sense strand
gcaauggugacaacaacaa

SEQ ID NO: 1790179 - RNA, 19 nt, Homo sapiens
  misc_RNA (1)...(19): siRNA sense strand
gcagacaggcagaagaugu

SEQ ID NO: 1790180 - RNA, 19 nt, Homo sapiens
  misc_RNA (1)...(19): siRNA sense strand
cauaaacccgggugugaaa

SEQ ID NO: 1790181 - RNA, 19 nt, Homo sapiens
  misc_RNA (1)...(19): siRNA sense strand
gacauaaacccggguguga

SEQ ID NO: 1790182 - RNA, 19 nt, Homo sapiens
  misc_RNA (1)...(19): siRNA sense strand
gagccgaucagaacuacaa

SEQ ID NO: 1790183 - RNA, 19 nt, Homo sapiens
  misc_RNA (1)...(19): siRNA sense strand
gaaugaagggugcacgaau

SEQ ID NO: 1790184 - RNA, 19 nt, Homo sapiens
  misc_RNA (1)...(19): siRNA sense strand
ccugggauguuuaacuuug

SEQ ID NO: 1790185 - RNA, 19 nt, Homo sapiens
  misc_RNA (1)...(19): siRNA sense strand
uggaggccauggcaucuuu

SEQ ID NO: 1790186 - RNA, 19 nt, Homo sapiens
  misc_RNA (1)...(19): siRNA sense strand
ggugggaaguacucaguca

SEQ ID NO: 1790187 - RNA, 19 nt, Homo sapiens
  misc_RNA (1)...(19): siRNA sense strand
gcacugggacaaauauugg

SEQ ID NO: 1790188 - RNA, 19 nt, Homo sapiens
  misc_RNA (1)...(19): siRNA sense strand
gaggaaagcacugggacaa

SEQ ID NO: 1790189 - RNA, 19 nt, Homo sapiens
  misc_RNA (1)...(19): siRNA sense strand
gcaauggagggccaccaaa

SEQ ID NO: 1790190 - RNA, 19 nt, Homo sapiens
  misc_RNA (1)...(19): siRNA sense strand
caagcuggguuucaucaac

SEQ ID NO: 1790191 - RNA, 19 nt, Homo sapiens
  misc_RNA (1)...(19): siRNA sense strand
gcagaugcuuugggcaaca

SEQ ID NO: 1790192 - RNA, 19 nt, Homo sapiens
  misc_RNA (1)...(19): siRNA sense strand
gcagcaauggugacaacaa

SEQ ID NO: 1790193 - RNA, 19 nt, Homo sapiens
  misc_RNA (1)...(19): siRNA sense strand
aaugaagggugcacgaauc

SEQ ID NO: 1790194 - RNA, 19 nt, Homo sapiens
  misc_RNA (1)...(19): siRNA sense strand
cgucaucacugcagaaacg

SEQ ID NO: 1790195 - RNA, 19 nt, Homo sapiens
  misc_RNA (1)...(19): siRNA sense strand
gagccagcaaccagaauga

SEQ ID NO: 1790196 - RNA, 19 nt, Homo sapiens
  misc_RNA (1)...(19): siRNA sense strand
cagcaauggugacaacaac

SEQ ID NO: 1790197 - RNA, 19 nt, Homo sapiens
  misc_RNA (1)...(19): siRNA sense strand
uuaaauccaagcuggguuu

SEQ ID NO: 1790198 - RNA, 19 nt, Homo sapiens
  misc_RNA (1)...(19): siRNA sense strand
gaaacacugggcacgagau

SEQ ID NO: 1790199 - RNA, 19 nt, Homo sapiens
  misc_RNA (1)...(19): siRNA sense strand
aaacagaacacuccuuucc

SEQ ID NO: 1790200 - RNA, 19 nt, Homo sapiens
  misc_RNA (1)...(19): siRNA sense strand
cccgagcccuccucuacuu

SEQ ID NO: 1790201 - RNA, 19 nt, Homo sapiens
  misc_RNA (1)...(19): siRNA sense strand
ucaacugggaugccauaaa

SEQ ID NO: 1790202 - RNA, 19 nt, Homo sapiens
  misc_RNA (1)...(19): siRNA sense strand
caggcagguuccaggcuuu

SEQ ID NO: 1790203 - RNA, 19 nt, Homo sapiens
  misc_RNA (1)...(19): siRNA sense strand
ggaggaaauggacauaaac

SEQ ID NO: 1790204 - RNA, 19 nt, Homo sapiens
  misc_RNA (1)...(19): siRNA sense strand
uggcuaugguucagugaga

SEQ ID NO: 1790205 - RNA, 19 nt, Homo sapiens
  misc_RNA (1)...(19): siRNA sense strand
gacgucuccugggauguuu

SEQ ID NO: 1790206 - RNA, 19 nt, Homo sapiens
  misc_RNA (1)...(19): siRNA sense strand
cuccugggauguuuaacuu

SEQ ID NO: 1790207 - RNA, 19 nt, Homo sapiens
  misc_RNA (1)...(19): siRNA sense strand
caauggugcuugggaaacu

SEQ ID NO: 1790208 - RNA, 19 nt, Homo sapiens
  misc_RNA (1)...(19): siRNA sense strand
ggugacagcggcagugagu

SEQ ID NO: 1790209 - RNA, 19 nt, Homo sapiens
  misc_RNA (1)...(19): siRNA sense strand
ugggaggauuucaaacaga

SEQ ID NO: 1790210 - RNA, 19 nt, Homo sapiens
  misc_RNA (1)...(19): siRNA sense strand
ggaaguacucagucaagac

SEQ ID NO: 1790211 - RNA, 19 nt, Homo sapiens
  misc_RNA (1)...(19): siRNA sense strand
acaggcagaagaugucauu

SEQ ID NO: 1790212 - RNA, 19 nt, Homo sapiens
  misc_RNA (1)...(19): siRNA sense strand
guuuaacuuugacacuuuc

SEQ ID NO: 1790213 - RNA, 19 nt, Homo sapiens
  misc_RNA (1)...(19): siRNA sense strand
gcggaggaaauggacauaa

SEQ ID NO: 1790214 - RNA, 19 nt, Homo sapiens
  misc_RNA (1)...(19): siRNA sense strand
aaacacugggcacgagauu

SEQ ID NO: 1790215 - RNA, 19 nt, Homo sapiens
  misc_RNA (1)...(19): siRNA sense strand
uggagggccaccaaacuuu

SEQ ID NO: 1790216 - RNA, 19 nt, Homo sapiens
  misc_RNA (1)...(19): siRNA sense strand
gggcagcuggcucuaaagu

SEQ ID NO: 1790217 - RNA, 19 nt, Homo sapiens
  misc_RNA (1)...(19): siRNA sense strand
ccaagggaccagagaagca

SEQ ID NO: 1790218 - RNA, 19 nt, Homo sapiens
  misc_RNA (1)...(19): siRNA sense strand
ggcacgagauuggcagaca

SEQ ID NO: 1790219 - RNA, 19 nt, Homo sapiens
  misc_RNA (1)...(19): siRNA sense strand
aauccaagcuggguuucau

SEQ ID NO: 1790220 - RNA, 19 nt, Homo sapiens
  misc_RNA (1)...(19): siRNA sense strand
aggcagcuuuggaaugaau

SEQ ID NO: 1790221 - RNA, 19 nt, Homo sapiens
  misc_RNA (1)...(19): siRNA sense strand
gcaggcagagccgaucaga

SEQ ID NO: 1790222 - RNA, 19 nt, Homo sapiens
  misc_RNA (1)...(19): siRNA sense strand
uggcagcaguggcaacagu

SEQ ID NO: 1790223 - RNA, 19 nt, Homo sapiens
  misc_RNA (1)...(19): siRNA sense strand
ucagcaggcagcuuuggaa

SEQ ID NO: 1790224 - RNA, 19 nt, Homo sapiens
  misc_RNA (1)...(19): siRNA sense strand
aaagcacugggacaaauau

SEQ ID NO: 1790225 - RNA, 19 nt, Homo sapiens
  misc_RNA (1)...(19): siRNA sense strand
aggcagagccgaucagaac

SEQ ID NO: 1790226 - RNA, 19 nt, Homo sapiens
  misc_RNA (1)...(19): siRNA sense strand
ucaacuggaaagcaauuau

SEQ ID NO: 1790227 - RNA, 19 nt, Homo sapiens
  misc_RNA (1)...(19): siRNA sense strand
caaacagaacacuccuuuc

SEQ ID NO: 1790228 - RNA, 19 nt, Homo sapiens
  misc_RNA (1)...(19): siRNA sense strand
gugaaaagccagggaauga

SEQ ID NO: 1790229 - RNA, 19 nt, Homo sapiens
  misc_RNA (1)...(19): siRNA sense strand
gaggugacagcggcaguga

SEQ ID NO: 1790230 - RNA, 19 nt, Homo sapiens
  misc_RNA (1)...(19): siRNA sense strand
ugagagccagcaaccagaa

SEQ ID NO: 1790231 - RNA, 19 nt, Homo sapiens
  misc_RNA (1)...(19): siRNA sense strand
gaggauuucaaacagaaca

SEQ ID NO: 1790232 - RNA, 19 nt, Homo sapiens
  misc_RNA (1)...(19): siRNA sense strand
cugggauguuuaacuuuga

SEQ ID NO: 1790233 - RNA, 19 nt, Homo sapiens
  misc_RNA (1)...(19): siRNA sense strand
gaaaagccagggaaugaag

SEQ ID NO: 1790234 - RNA, 19 nt, Homo sapiens
  misc_RNA (1)...(19): siRNA sense strand
cgcgggagcuucagcagua

SEQ ID NO: 1790235 - RNA, 19 nt, Homo sapiens
  misc_RNA (1)...(19): siRNA sense strand
gcacuuagacacacacagu

SEQ ID NO: 1790236 - RNA, 19 nt, Homo sapiens
  misc_RNA (1)...(19): siRNA sense strand
gcacgucaaacugcucuuu

SEQ ID NO: 1790237 - RNA, 19 nt, Homo sapiens
  misc_RNA (1)...(19): siRNA sense strand
agaaaagucucuaaguuug

SEQ ID NO: 1790238 - RNA, 19 nt, Homo sapiens
  misc_RNA (1)...(19): siRNA sense strand
gcuggaagcacgucaaacu

SEQ ID NO: 1790239 - RNA, 19 nt, Homo sapiens
  misc_RNA (1)...(19): siRNA sense strand
gaccugacgggcacuuaga

SEQ ID NO: 1790240 - RNA, 19 nt, Homo sapiens
  misc_RNA (1)...(19): siRNA sense strand
ggaccugacgggcacuuag

SEQ ID NO: 1790241 - RNA, 19 nt, Homo sapiens
  misc_RNA (1)...(19): siRNA sense strand
gaaaagucucuaaguuugu

SEQ ID NO: 1790242 - RNA, 19 nt, Homo sapiens
  misc_RNA (1)...(19): siRNA sense strand
ggcaaggacccagcaggaa

SEQ ID NO: 1790243 - RNA, 19 nt, Homo sapiens
  misc_RNA (1)...(19): siRNA sense strand
acaguggccugagcuccaa

SEQ ID NO: 1790244 - RNA, 19 nt, Homo sapiens
  misc_RNA (1)...(19): siRNA sense strand
cgcgggagcuucagcagua

SEQ ID NO: 1790245 - RNA, 19 nt, Homo sapiens
  misc_RNA (1)...(19): siRNA sense strand
gcacuuagacacacacagu

SEQ ID NO: 1790246 - RNA, 19 nt, Homo sapiens
  misc_RNA (1)...(19): siRNA sense strand
gcacgucaaacugcucuuu

SEQ ID NO: 1790247 - RNA, 19 nt, Homo sapiens
  misc_RNA (1)...(19): siRNA sense strand
agaaaagucucuaaguuug

SEQ ID NO: 1790248 - RNA, 19 nt, Homo sapiens
  misc_RNA (1)...(19): siRNA sense strand
gcuggaagcacgucaaacu

SEQ ID NO: 1790249 - RNA, 19 nt, Homo sapiens
  misc_RNA (1)...(19): siRNA sense strand
gaccugacgggcacuuaga

SEQ ID NO: 1790250 - RNA, 19 nt, Homo sapiens
  misc_RNA (1)...(19): siRNA sense strand
ggaccugacgggcacuuag

SEQ ID NO: 1790251 - RNA, 19 nt, Homo sapiens
  misc_RNA (1)...(19): siRNA sense strand
gaaaagucucuaaguuugu

SEQ ID NO: 1790252 - RNA, 19 nt, Homo sapiens
  misc_RNA (1)...(19): siRNA sense strand
ggcaaggacccagcaggaa

SEQ ID NO: 1790253 - RNA, 19 nt, Homo sapiens
  misc_RNA (1)...(19): siRNA sense strand
acaguggccugagcuccaa

SEQ ID NO: 1790254 - RNA, 19 nt, Homo sapiens
  misc_RNA (1)...(19): siRNA sense strand
gaacaaggcucaggaauug

SEQ ID NO: 1790255 - RNA, 19 nt, Homo sapiens
  misc_RNA (1)...(19): siRNA sense strand
ggaauugauuggugucuuu

SEQ ID NO: 1790256 - RNA, 19 nt, Homo sapiens
  misc_RNA (1)...(19): siRNA sense strand
gaaaggagccagggaguaa

SEQ ID NO: 1790257 - RNA, 19 nt, Homo sapiens
  misc_RNA (1)...(19): siRNA sense strand
aaacucaccuacaagauuu

SEQ ID NO: 1790258 - RNA, 19 nt, Homo sapiens
  misc_RNA (1)...(19): siRNA sense strand
acaaaguucuccaggauuu

SEQ ID NO: 1790259 - RNA, 19 nt, Homo sapiens
  misc_RNA (1)...(19): siRNA sense strand
ugaaggaagagaaucauua

SEQ ID NO: 1790260 - RNA, 19 nt, Homo sapiens
  misc_RNA (1)...(19): siRNA sense strand
gugaauccauugaaacuga

SEQ ID NO: 1790261 - RNA, 19 nt, Homo sapiens
  misc_RNA (1)...(19): siRNA sense strand
gaaggaagagaaucauuau

SEQ ID NO: 1790262 - RNA, 19 nt, Homo sapiens
  misc_RNA (1)...(19): siRNA sense strand
caaacucaccuacaagauu

SEQ ID NO: 1790263 - RNA, 19 nt, Homo sapiens
  misc_RNA (1)...(19): siRNA sense strand
ucaaagagacaucccauga

SEQ ID NO: 1790264 - RNA, 19 nt, Homo sapiens
  misc_RNA (1)...(19): siRNA sense strand
gaagaauugagugucauua

SEQ ID NO: 1790265 - RNA, 19 nt, Homo sapiens
  misc_RNA (1)...(19): siRNA sense strand
ccuacaagauuuaucagaa

SEQ ID NO: 1790266 - RNA, 19 nt, Homo sapiens
  misc_RNA (1)...(19): siRNA sense strand
aaagagacaucccaugagu

SEQ ID NO: 1790267 - RNA, 19 nt, Homo sapiens
  misc_RNA (1)...(19): siRNA sense strand
guugugcaauugucuauau

SEQ ID NO: 1790268 - RNA, 19 nt, Homo sapiens
  misc_RNA (1)...(19): siRNA sense strand
agaauugagugucauuaug

SEQ ID NO: 1790269 - RNA, 19 nt, Homo sapiens
  misc_RNA (1)...(19): siRNA sense strand
ggcagugaaugaccugaaa

SEQ ID NO: 1790270 - RNA, 19 nt, Homo sapiens
  misc_RNA (1)...(19): siRNA sense strand
gaaguguucuuuuagaguu

SEQ ID NO: 1790271 - RNA, 19 nt, Homo sapiens
  misc_RNA (1)...(19): siRNA sense strand
aagcacagaccacaaauga

SEQ ID NO: 1790272 - RNA, 19 nt, Homo sapiens
  misc_RNA (1)...(19): siRNA sense strand
ggaagaauugagugucauu

SEQ ID NO: 1790273 - RNA, 19 nt, Homo sapiens
  misc_RNA (1)...(19): siRNA sense strand
gaggucucccuguuucuua

SEQ ID NO: 1790274 - RNA, 19 nt, Homo sapiens
  misc_RNA (1)...(19): siRNA sense strand
gaucccaaauucagagaca

SEQ ID NO: 1790275 - RNA, 19 nt, Homo sapiens
  misc_RNA (1)...(19): siRNA sense strand
gagaaucauuaucuuacuc

SEQ ID NO: 1790276 - RNA, 19 nt, Homo sapiens
  misc_RNA (1)...(19): siRNA sense strand
ggauaagccuagacugaac

SEQ ID NO: 1790277 - RNA, 19 nt, Homo sapiens
  misc_RNA (1)...(19): siRNA sense strand
gaaggagaaauuaaagcuu

SEQ ID NO: 1790278 - RNA, 19 nt, Homo sapiens
  misc_RNA (1)...(19): siRNA sense strand
caagaggaguccggccauu

SEQ ID NO: 1790279 - RNA, 19 nt, Homo sapiens
  misc_RNA (1)...(19): siRNA sense strand
ucaauaauauccccgauga

SEQ ID NO: 1790280 - RNA, 19 nt, Homo sapiens
  misc_RNA (1)...(19): siRNA sense strand
cuacaagauuuaucagaag

SEQ ID NO: 1790281 - RNA, 19 nt, Homo sapiens
  misc_RNA (1)...(19): siRNA sense strand
agaacaaggcucaggaauu

SEQ ID NO: 1790282 - RNA, 19 nt, Homo sapiens
  misc_RNA (1)...(19): siRNA sense strand
uaucagaagccacucaaga

SEQ ID NO: 1790283 - RNA, 19 nt, Homo sapiens
  misc_RNA (1)...(19): siRNA sense strand
cucaagaugugaaggaaga

SEQ ID NO: 1790284 - RNA, 19 nt, Homo sapiens
  misc_RNA (1)...(19): siRNA sense strand
caaaguucuccaggauuua

SEQ ID NO: 1790285 - RNA, 19 nt, Homo sapiens
  misc_RNA (1)...(19): siRNA sense strand
gaagcacagaccacaaaug

SEQ ID NO: 1790286 - RNA, 19 nt, Homo sapiens
  misc_RNA (1)...(19): siRNA sense strand
caagaacaaggcucaggaa

SEQ ID NO: 1790287 - RNA, 19 nt, Homo sapiens
  misc_RNA (1)...(19): siRNA sense strand
caacuaucuugcucucaca

SEQ ID NO: 1790288 - RNA, 19 nt, Homo sapiens
  misc_RNA (1)...(19): siRNA sense strand
cacuaacuguugugcaauu

SEQ ID NO: 1790289 - RNA, 19 nt, Homo sapiens
  misc_RNA (1)...(19): siRNA sense strand
gcaaacucaccuacaagau

SEQ ID NO: 1790290 - RNA, 19 nt, Homo sapiens
  misc_RNA (1)...(19): siRNA sense strand
agaggaguccggccauuaa

SEQ ID NO: 1790291 - RNA, 19 nt, Homo sapiens
  misc_RNA (1)...(19): siRNA sense strand
uaacuguugugcaauuguc

SEQ ID NO: 1790292 - RNA, 19 nt, Homo sapiens
  misc_RNA (1)...(19): siRNA sense strand
agaagccacucaagaugug

SEQ ID NO: 1790293 - RNA, 19 nt, Homo sapiens
  misc_RNA (1)...(19): siRNA sense strand
ucuggugaauccauugaaa

SEQ ID NO: 1790294 - RNA, 19 nt, Homo sapiens
  misc_RNA (1)...(19): siRNA sense strand
gaggaguccggccauuaaa

SEQ ID NO: 1790295 - RNA, 19 nt, Homo sapiens
  misc_RNA (1)...(19): siRNA sense strand
gaucaucuucuggcaguga

SEQ ID NO: 1790296 - RNA, 19 nt, Homo sapiens
  misc_RNA (1)...(19): siRNA sense strand
ggcaaacucaccuacaaga

SEQ ID NO: 1790297 - RNA, 19 nt, Homo sapiens
  misc_RNA (1)...(19): siRNA sense strand
ucaccuacaagauuuauca

SEQ ID NO: 1790298 - RNA, 19 nt, Homo sapiens
  misc_RNA (1)...(19): siRNA sense strand
ucuccaggauuuaggcaaa

SEQ ID NO: 1790299 - RNA, 19 nt, Homo sapiens
  misc_RNA (1)...(19): siRNA sense strand
gcaggaucccaaauucaga

SEQ ID NO: 1790300 - RNA, 19 nt, Homo sapiens
  misc_RNA (1)...(19): siRNA sense strand
gaagccacaggacggauau

SEQ ID NO: 1790301 - RNA, 19 nt, Homo sapiens
  misc_RNA (1)...(19): siRNA sense strand
ggauagcagcaaagaggaa

SEQ ID NO: 1790302 - RNA, 19 nt, Homo sapiens
  misc_RNA (1)...(19): siRNA sense strand
caccuucucagcuggauaa

SEQ ID NO: 1790303 - RNA, 19 nt, Homo sapiens
  misc_RNA (1)...(19): siRNA sense strand
ucagaagccacucaagaug

SEQ ID NO: 1790304 - RNA, 19 nt, Homo sapiens
  misc_RNA (1)...(19): siRNA sense strand
cagaagccacucaagaugu

SEQ ID NO: 1790305 - RNA, 19 nt, Homo sapiens
  misc_RNA (1)...(19): siRNA sense strand
cauccagaaggagaaauua

SEQ ID NO: 1790306 - RNA, 19 nt, Homo sapiens
  misc_RNA (1)...(19): siRNA sense strand
aagaggaguccggccauua

SEQ ID NO: 1790307 - RNA, 19 nt, Homo sapiens
  misc_RNA (1)...(19): siRNA sense strand
caaagagacaucccaugag

SEQ ID NO: 1790308 - RNA, 19 nt, Homo sapiens
  misc_RNA (1)...(19): siRNA sense strand
ccagaaggagaaauuaaag

SEQ ID NO: 1790309 - RNA, 19 nt, Homo sapiens
  misc_RNA (1)...(19): siRNA sense strand
ggaagcacagaccacaaau

SEQ ID NO: 1790310 - RNA, 19 nt, Homo sapiens
  misc_RNA (1)...(19): siRNA sense strand
cuggaagaauugaguguca

SEQ ID NO: 1790311 - RNA, 19 nt, Homo sapiens
  misc_RNA (1)...(19): siRNA sense strand
cuaucuugcucucacagaa

SEQ ID NO: 1790312 - RNA, 19 nt, Homo sapiens
  misc_RNA (1)...(19): siRNA sense strand
uggaagcacagaccacaaa

SEQ ID NO: 1790313 - RNA, 19 nt, Homo sapiens
  misc_RNA (1)...(19): siRNA sense strand
ccacucaagaugugaagga

SEQ ID NO: 1790314 - RNA, 19 nt, Homo sapiens
  misc_RNA (1)...(19): siRNA sense strand
ggaccuccaccugcaagaa

SEQ ID NO: 1790315 - RNA, 19 nt, Homo sapiens
  misc_RNA (1)...(19): siRNA sense strand
gaccacaaaugaccaaaag

SEQ ID NO: 1790316 - RNA, 19 nt, Homo sapiens
  misc_RNA (1)...(19): siRNA sense strand
aggaagagaaucauuaucu

SEQ ID NO: 1790317 - RNA, 19 nt, Homo sapiens
  misc_RNA (1)...(19): siRNA sense strand
gauaagccuagacugaaca

SEQ ID NO: 1790318 - RNA, 19 nt, Homo sapiens
  misc_RNA (1)...(19): siRNA sense strand
uccagaaggagaaauuaaa

SEQ ID NO: 1790319 - RNA, 19 nt, Homo sapiens
  misc_RNA (1)...(19): siRNA sense strand
gagccaauggaauccuauu

SEQ ID NO: 1790320 - RNA, 19 nt, Homo sapiens
  misc_RNA (1)...(19): siRNA sense strand
agaaaggagccagggagua

SEQ ID NO: 1790321 - RNA, 19 nt, Homo sapiens
  misc_RNA (1)...(19): siRNA sense strand
cuggauaagccuagacuga

SEQ ID NO: 1790322 - RNA, 19 nt, Homo sapiens
  misc_RNA (1)...(19): siRNA sense strand
ucccaugagucuguggaua

SEQ ID NO: 1790323 - RNA, 19 nt, Homo sapiens
  misc_RNA (1)...(19): siRNA sense strand
cucacuaacuguugugcaa

SEQ ID NO: 1790324 - RNA, 19 nt, Homo sapiens
  misc_RNA (1)...(19): siRNA sense strand
uggauaagccuagacugaa

SEQ ID NO: 1790325 - RNA, 19 nt, Homo sapiens
  misc_RNA (1)...(19): siRNA sense strand
gugaaggaagagaaucauu

SEQ ID NO: 1790326 - RNA, 19 nt, Homo sapiens
  misc_RNA (1)...(19): siRNA sense strand
ucggcaggaucccaaauuc

SEQ ID NO: 1790327 - RNA, 19 nt, Homo sapiens
  misc_RNA (1)...(19): siRNA sense strand
ugaaagccaaguggagaaa

SEQ ID NO: 1790328 - RNA, 19 nt, Homo sapiens
  misc_RNA (1)...(19): siRNA sense strand
agaagccacaggacggaua

SEQ ID NO: 1790329 - RNA, 19 nt, Homo sapiens
  misc_RNA (1)...(19): siRNA sense strand
uaucuuacuccucgaagug

SEQ ID NO: 1790330 - RNA, 19 nt, Homo sapiens
  misc_RNA (1)...(19): siRNA sense strand
ccauccagaaggagaaauu

SEQ ID NO: 1790331 - RNA, 19 nt, Homo sapiens
  misc_RNA (1)...(19): siRNA sense strand
aaagccaaguggagaaacu

SEQ ID NO: 1790332 - RNA, 19 nt, Homo sapiens
  misc_RNA (1)...(19): siRNA sense strand
ugaauccauugaaacugau

SEQ ID NO: 1790333 - RNA, 19 nt, Homo sapiens
  misc_RNA (1)...(19): siRNA sense strand
gccaauggaauccuauuuu

SEQ ID NO: 1790334 - RNA, 19 nt, Homo sapiens
  misc_RNA (1)...(19): siRNA sense strand
caaauucagagacauucca

SEQ ID NO: 1790335 - RNA, 19 nt, Homo sapiens
  misc_RNA (1)...(19): siRNA sense strand
cgacguuugggaugcauau

SEQ ID NO: 1790336 - RNA, 19 nt, Homo sapiens
  misc_RNA (1)...(19): siRNA sense strand
gggucggccucacuaacug

SEQ ID NO: 1790337 - RNA, 19 nt, Homo sapiens
  misc_RNA (1)...(19): siRNA sense strand
gaauugauuggugucuuuc

SEQ ID NO: 1790338 - RNA, 19 nt, Homo sapiens
  misc_RNA (1)...(19): siRNA sense strand
cacagaagaugguauauua

SEQ ID NO: 1790339 - RNA, 19 nt, Homo sapiens
  misc_RNA (1)...(19): siRNA sense strand
ggaauuugcugaugaagaa

SEQ ID NO: 1790340 - RNA, 19 nt, Homo sapiens
  misc_RNA (1)...(19): siRNA sense strand
cagaauaacuccaagaaau

SEQ ID NO: 1790341 - RNA, 19 nt, Homo sapiens
  misc_RNA (1)...(19): siRNA sense strand
ccaaaccacuuucuccuuu

SEQ ID NO: 1790342 - RNA, 19 nt, Homo sapiens
  misc_RNA (1)...(19): siRNA sense strand
gaaauagagagucacauaa

SEQ ID NO: 1790343 - RNA, 19 nt, Homo sapiens
  misc_RNA (1)...(19): siRNA sense strand
guagauggcugcccuguca

SEQ ID NO: 1790344 - RNA, 19 nt, Homo sapiens
  misc_RNA (1)...(19): siRNA sense strand
gaugguauauuaugggaaa

SEQ ID NO: 1790345 - RNA, 19 nt, Homo sapiens
  misc_RNA (1)...(19): siRNA sense strand
ggaaaggccuucaguuaac

SEQ ID NO: 1790346 - RNA, 19 nt, Homo sapiens
  misc_RNA (1)...(19): siRNA sense strand
guucagcgcuuacaagaga

SEQ ID NO: 1790347 - RNA, 19 nt, Homo sapiens
  misc_RNA (1)...(19): siRNA sense strand
gcucaaaucucaucuuaac

SEQ ID NO: 1790348 - RNA, 19 nt, Homo sapiens
  misc_RNA (1)...(19): siRNA sense strand
gagcaggguuuuacuuuua

SEQ ID NO: 1790349 - RNA, 19 nt, Homo sapiens
  misc_RNA (1)...(19): siRNA sense strand
caaaccacuuucuccuuua

SEQ ID NO: 1790350 - RNA, 19 nt, Homo sapiens
  misc_RNA (1)...(19): siRNA sense strand
ucacaacggauuacaauuu

SEQ ID NO: 1790351 - RNA, 19 nt, Homo sapiens
  misc_RNA (1)...(19): siRNA sense strand
guuggucgaugcagaauuu

SEQ ID NO: 1790352 - RNA, 19 nt, Homo sapiens
  misc_RNA (1)...(19): siRNA sense strand
ugaguucacuggacauaaa

SEQ ID NO: 1790353 - RNA, 19 nt, Homo sapiens
  misc_RNA (1)...(19): siRNA sense strand
ggaggcacauaaagagaaa

SEQ ID NO: 1790354 - RNA, 19 nt, Homo sapiens
  misc_RNA (1)...(19): siRNA sense strand
gaagaguuagucaauguuu

SEQ ID NO: 1790355 - RNA, 19 nt, Homo sapiens
  misc_RNA (1)...(19): siRNA sense strand
gauaccugauuaaccauuu

SEQ ID NO: 1790356 - RNA, 19 nt, Homo sapiens
  misc_RNA (1)...(19): siRNA sense strand
agaaauagagagucacaua

SEQ ID NO: 1790357 - RNA, 19 nt, Homo sapiens
  misc_RNA (1)...(19): siRNA sense strand
ugggaaaccuucuuguaaa

SEQ ID NO: 1790358 - RNA, 19 nt, Homo sapiens
  misc_RNA (1)...(19): siRNA sense strand
gcucugaccacaguaaaua

SEQ ID NO: 1790359 - RNA, 19 nt, Homo sapiens
  misc_RNA (1)...(19): siRNA sense strand
gcagaugcuuuggaauuug

SEQ ID NO: 1790360 - RNA, 19 nt, Homo sapiens
  misc_RNA (1)...(19): siRNA sense strand
ugacauggauggcuuguac

SEQ ID NO: 1790361 - RNA, 19 nt, Homo sapiens
  misc_RNA (1)...(19): siRNA sense strand
aaucucaucuuaaccuuga

SEQ ID NO: 1790362 - RNA, 19 nt, Homo sapiens
  misc_RNA (1)...(19): siRNA sense strand
guagaggcauugacaugga

SEQ ID NO: 1790363 - RNA, 19 nt, Homo sapiens
  misc_RNA (1)...(19): siRNA sense strand
uugcucaaaucucaucuua

SEQ ID NO: 1790364 - RNA, 19 nt, Homo sapiens
  misc_RNA (1)...(19): siRNA sense strand
gcaagaccaagaugagaaa

SEQ ID NO: 1790365 - RNA, 19 nt, Homo sapiens
  misc_RNA (1)...(19): siRNA sense strand
gcagucgcacuccggauua

SEQ ID NO: 1790366 - RNA, 19 nt, Homo sapiens
  misc_RNA (1)...(19): siRNA sense strand
gaccuaaguucugucgaaa

SEQ ID NO: 1790367 - RNA, 19 nt, Homo sapiens
  misc_RNA (1)...(19): siRNA sense strand
gguugcauuucuuugcuua

SEQ ID NO: 1790368 - RNA, 19 nt, Homo sapiens
  misc_RNA (1)...(19): siRNA sense strand
ugauagguguuuauacaga

SEQ ID NO: 1790369 - RNA, 19 nt, Homo sapiens
  misc_RNA (1)...(19): siRNA sense strand
gaauaacuccaagaaauag

SEQ ID NO: 1790370 - RNA, 19 nt, Homo sapiens
  misc_RNA (1)...(19): siRNA sense strand
uggaagaguuagucaaugu

SEQ ID NO: 1790371 - RNA, 19 nt, Homo sapiens
  misc_RNA (1)...(19): siRNA sense strand
uaaacuuccuggagcauca

SEQ ID NO: 1790372 - RNA, 19 nt, Homo sapiens
  misc_RNA (1)...(19): siRNA sense strand
auagauaccugauuaacca

SEQ ID NO: 1790373 - RNA, 19 nt, Homo sapiens
  misc_RNA (1)...(19): siRNA sense strand
agaccuaaguucugucgaa

SEQ ID NO: 1790374 - RNA, 19 nt, Homo sapiens
  misc_RNA (1)...(19): siRNA sense strand
gaaaggccuucaguuaacu

SEQ ID NO: 1790375 - RNA, 19 nt, Homo sapiens
  misc_RNA (1)...(19): siRNA sense strand
uaacugagaguacccuuuc

SEQ ID NO: 1790376 - RNA, 19 nt, Homo sapiens
  misc_RNA (1)...(19): siRNA sense strand
gcuauugccauuccacauu

SEQ ID NO: 1790377 - RNA, 19 nt, Homo sapiens
  misc_RNA (1)...(19): siRNA sense strand
aaauauaugccagaccuua

SEQ ID NO: 1790378 - RNA, 19 nt, Homo sapiens
  misc_RNA (1)...(19): siRNA sense strand
cagaagaugguauauuaug

SEQ ID NO: 1790379 - RNA, 19 nt, Homo sapiens
  misc_RNA (1)...(19): siRNA sense strand
caaaucucaucuuaaccuu

SEQ ID NO: 1790380 - RNA, 19 nt, Homo sapiens
  misc_RNA (1)...(19): siRNA sense strand
gagcuaaggaccgugaauu

SEQ ID NO: 1790381 - RNA, 19 nt, Homo sapiens
  misc_RNA (1)...(19): siRNA sense strand
acugauagguguuuauaca

SEQ ID NO: 1790382 - RNA, 19 nt, Homo sapiens
  misc_RNA (1)...(19): siRNA sense strand
aggaaaggccuucaguuaa

SEQ ID NO: 1790383 - RNA, 19 nt, Homo sapiens
  misc_RNA (1)...(19): siRNA sense strand
ccacagaagaugguauauu

SEQ ID NO: 1790384 - RNA, 19 nt, Homo sapiens
  misc_RNA (1)...(19): siRNA sense strand
agugggaucugucguguga

SEQ ID NO: 1790385 - RNA, 19 nt, Homo sapiens
  misc_RNA (1)...(19): siRNA sense strand
gacaucuucucuguguaua

SEQ ID NO: 1790386 - RNA, 19 nt, Homo sapiens
  misc_RNA (1)...(19): siRNA sense strand
gagaaaccauaccgaagac

SEQ ID NO: 1790387 - RNA, 19 nt, Homo sapiens
  misc_RNA (1)...(19): siRNA sense strand
uaucaggucccuuucaaug

SEQ ID NO: 1790388 - RNA, 19 nt, Homo sapiens
  misc_RNA (1)...(19): siRNA sense strand
uggcugcccugucauucua

SEQ ID NO: 1790389 - RNA, 19 nt, Homo sapiens
  misc_RNA (1)...(19): siRNA sense strand
gggaaaccuucuuguaaaa

SEQ ID NO: 1790390 - RNA, 19 nt, Homo sapiens
  misc_RNA (1)...(19): siRNA sense strand
gcacauaaagagaaaccau

SEQ ID NO: 1790391 - RNA, 19 nt, Homo sapiens
  misc_RNA (1)...(19): siRNA sense strand
cacuggacauaaacugaua

SEQ ID NO: 1790392 - RNA, 19 nt, Homo sapiens
  misc_RNA (1)...(19): siRNA sense strand
ugcagaugcuuuggaauuu

SEQ ID NO: 1790393 - RNA, 19 nt, Homo sapiens
  misc_RNA (1)...(19): siRNA sense strand
ccgaagaccuaaguucugu

SEQ ID NO: 1790394 - RNA, 19 nt, Homo sapiens
  misc_RNA (1)...(19): siRNA sense strand
agagaaaccauaccgaaga

SEQ ID NO: 1790395 - RNA, 19 nt, Homo sapiens
  misc_RNA (1)...(19): siRNA sense strand
cguuggagcuauugccauu

SEQ ID NO: 1790396 - RNA, 19 nt, Homo sapiens
  misc_RNA (1)...(19): siRNA sense strand
uaaggaccgugaauugucu

SEQ ID NO: 1790397 - RNA, 19 nt, Homo sapiens
  misc_RNA (1)...(19): siRNA sense strand
ccuaucaggucccuuucaa

SEQ ID NO: 1790398 - RNA, 19 nt, Homo sapiens
  misc_RNA (1)...(19): siRNA sense strand
aauagagagucacauaaca

SEQ ID NO: 1790399 - RNA, 19 nt, Homo sapiens
  misc_RNA (1)...(19): siRNA sense strand
aaagggaagcccggaauuu

SEQ ID NO: 1790400 - RNA, 19 nt, Homo sapiens
  misc_RNA (1)...(19): siRNA sense strand
ccacuuucuccuuuacaua

SEQ ID NO: 1790401 - RNA, 19 nt, Homo sapiens
  misc_RNA (1)...(19): siRNA sense strand
caauguuuccugugaagaa

SEQ ID NO: 1790402 - RNA, 19 nt, Homo sapiens
  misc_RNA (1)...(19): siRNA sense strand
ggaagaguuagucaauguu

SEQ ID NO: 1790403 - RNA, 19 nt, Homo sapiens
  misc_RNA (1)...(19): siRNA sense strand
uuucagcccuggaagaguu

SEQ ID NO: 1790404 - RNA, 19 nt, Homo sapiens
  misc_RNA (1)...(19): siRNA sense strand
uaaacuucauaaccagcua

SEQ ID NO: 1790405 - RNA, 19 nt, Homo sapiens
  misc_RNA (1)...(19): siRNA sense strand
cacauaaagagaaaccaua

SEQ ID NO: 1790406 - RNA, 19 nt, Homo sapiens
  misc_RNA (1)...(19): siRNA sense strand
uagagagucacauaacaaa

SEQ ID NO: 1790407 - RNA, 19 nt, Homo sapiens
  misc_RNA (1)...(19): siRNA sense strand
uaugggaaaccuucuugua

SEQ ID NO: 1790408 - RNA, 19 nt, Homo sapiens
  misc_RNA (1)...(19): siRNA sense strand
aaacugccacuguaaacuu

SEQ ID NO: 1790409 - RNA, 19 nt, Homo sapiens
  misc_RNA (1)...(19): siRNA sense strand
cuauugccauuccacauug

SEQ ID NO: 1790410 - RNA, 19 nt, Homo sapiens
  misc_RNA (1)...(19): siRNA sense strand
ucaggucccuuucaaugca

SEQ ID NO: 1790411 - RNA, 19 nt, Homo sapiens
  misc_RNA (1)...(19): siRNA sense strand
ugaccacaguaaauauaug

SEQ ID NO: 1790412 - RNA, 19 nt, Homo sapiens
  misc_RNA (1)...(19): siRNA sense strand
agaagaugguauauuaugg

SEQ ID NO: 1790413 - RNA, 19 nt, Homo sapiens
  misc_RNA (1)...(19): siRNA sense strand
uagucaauguuuccuguga

SEQ ID NO: 1790414 - RNA, 19 nt, Homo sapiens
  misc_RNA (1)...(19): siRNA sense strand
gcuaaggaccgugaauugu

SEQ ID NO: 1790415 - RNA, 19 nt, Homo sapiens
  misc_RNA (1)...(19): siRNA sense strand
gaucuguccaucuugaguu

SEQ ID NO: 1790416 - RNA, 19 nt, Homo sapiens
  misc_RNA (1)...(19): siRNA sense strand
caagaaauagagagucaca

SEQ ID NO: 1790417 - RNA, 19 nt, Homo sapiens
  misc_RNA (1)...(19): siRNA sense strand
gugcagguauuugguuuua

SEQ ID NO: 1790418 - RNA, 19 nt, Homo sapiens
  misc_RNA (1)...(19): siRNA sense strand
ccaggauguuggaaaguca

SEQ ID NO: 1790419 - RNA, 19 nt, Homo sapiens
  misc_RNA (1)...(19): siRNA sense strand
ccagauuaaaccugaauau

SEQ ID NO: 1790420 - RNA, 19 nt, Homo sapiens
  misc_RNA (1)...(19): siRNA sense strand
cacaacggauuacaauuuu

SEQ ID NO: 1790421 - RNA, 19 nt, Homo sapiens
  misc_RNA (1)...(19): siRNA sense strand
uccaagaaauagagaguca

SEQ ID NO: 1790422 - RNA, 19 nt, Homo sapiens
  misc_RNA (1)...(19): siRNA sense strand
ucagaauaacuccaagaaa

SEQ ID NO: 1790423 - RNA, 19 nt, Homo sapiens
  misc_RNA (1)...(19): siRNA sense strand
uauacccacucuugcuuga

SEQ ID NO: 1790424 - RNA, 19 nt, Homo sapiens
  misc_RNA (1)...(19): siRNA sense strand
gaauuuaccccuccugguu

SEQ ID NO: 1790425 - RNA, 19 nt, Homo sapiens
  misc_RNA (1)...(19): siRNA sense strand
gaggaggcacauaaagaga

SEQ ID NO: 1790426 - RNA, 19 nt, Homo sapiens
  misc_RNA (1)...(19): siRNA sense strand
gaaaauuggagcaagagaa

SEQ ID NO: 1790427 - RNA, 19 nt, Homo sapiens
  misc_RNA (1)...(19): siRNA sense strand
agaagcggcuguaccacau

SEQ ID NO: 1790428 - RNA, 19 nt, Homo sapiens
  misc_RNA (1)...(19): siRNA sense strand
ggauuacccacucugaugu

SEQ ID NO: 1790429 - RNA, 19 nt, Homo sapiens
  misc_RNA (1)...(19): siRNA sense strand
acucgggacugcugcuaaa

SEQ ID NO: 1790430 - RNA, 19 nt, Homo sapiens
  misc_RNA (1)...(19): siRNA sense strand
uauacagacuuugcauuca

SEQ ID NO: 1790431 - RNA, 19 nt, Homo sapiens
  misc_RNA (1)...(19): siRNA sense strand
ccugaggacuccacagaag

SEQ ID NO: 1790432 - RNA, 19 nt, Homo sapiens
  misc_RNA (1)...(19): siRNA sense strand
acuguaaacuucauaacca

SEQ ID NO: 1790433 - RNA, 19 nt, Homo sapiens
  misc_RNA (1)...(19): siRNA sense strand
agacaucuucucuguguau

SEQ ID NO: 1790434 - RNA, 19 nt, Homo sapiens
  misc_RNA (1)...(19): siRNA sense strand
gaaccugaggaggcacaua

SEQ ID NO: 1790435 - RNA, 19 nt, Homo sapiens
  misc_RNA (1)...(19): siRNA sense strand
aggaugacgucagaggaua

SEQ ID NO: 1790436 - RNA, 19 nt, Homo sapiens
  misc_RNA (1)...(19): siRNA sense strand
ccagccacgugguucaguu

SEQ ID NO: 1790437 - RNA, 19 nt, Homo sapiens
  misc_RNA (1)...(19): siRNA sense strand
gucagaggauacacgaaug

SEQ ID NO: 1790438 - RNA, 19 nt, Homo sapiens
  misc_RNA (1)...(19): siRNA sense strand
ggagguagcugacaaagug

SEQ ID NO: 1790439 - RNA, 19 nt, Homo sapiens
  misc_RNA (1)...(19): siRNA sense strand
gcuauuaacuccaccuaua

SEQ ID NO: 1790440 - RNA, 19 nt, Homo sapiens
  misc_RNA (1)...(19): siRNA sense strand
gaucuaauuugucgucuaa

SEQ ID NO: 1790441 - RNA, 19 nt, Homo sapiens
  misc_RNA (1)...(19): siRNA sense strand
gcacagcgauuucuuucaa

SEQ ID NO: 1790442 - RNA, 19 nt, Homo sapiens
  misc_RNA (1)...(19): siRNA sense strand
gaagacagauaggauugua

SEQ ID NO: 1790443 - RNA, 19 nt, Homo sapiens
  misc_RNA (1)...(19): siRNA sense strand
uaauaaagauggacagcua

SEQ ID NO: 1790444 - RNA, 19 nt, Homo sapiens
  misc_RNA (1)...(19): siRNA sense strand
ccaccaaguugcaauuaua

SEQ ID NO: 1790445 - RNA, 19 nt, Homo sapiens
  misc_RNA (1)...(19): siRNA sense strand
gaacgacauuuacacuuga

SEQ ID NO: 1790446 - RNA, 19 nt, Homo sapiens
  misc_RNA (1)...(19): siRNA sense strand
ucucaaaucuucaaaccua

SEQ ID NO: 1790447 - RNA, 19 nt, Homo sapiens
  misc_RNA (1)...(19): siRNA sense strand
ggaccaacaggaucauuua

SEQ ID NO: 1790448 - RNA, 19 nt, Homo sapiens
  misc_RNA (1)...(19): siRNA sense strand
gaacagaagguuucagcaa

SEQ ID NO: 1790449 - RNA, 19 nt, Homo sapiens
  misc_RNA (1)...(19): siRNA sense strand
uauaagaagugguaugaug

SEQ ID NO: 1790450 - RNA, 19 nt, Homo sapiens
  misc_RNA (1)...(19): siRNA sense strand
gaaaagcuguguuaaacuu

SEQ ID NO: 1790451 - RNA, 19 nt, Homo sapiens
  misc_RNA (1)...(19): siRNA sense strand
caaaggaguuuccaaaauu

SEQ ID NO: 1790452 - RNA, 19 nt, Homo sapiens
  misc_RNA (1)...(19): siRNA sense strand
aaaccuagaacgacauuua

SEQ ID NO: 1790453 - RNA, 19 nt, Homo sapiens
  misc_RNA (1)...(19): siRNA sense strand
gagaauggaguaagugauu

SEQ ID NO: 1790454 - RNA, 19 nt, Homo sapiens
  misc_RNA (1)...(19): siRNA sense strand
ggaauauggaacaaucuua

SEQ ID NO: 1790455 - RNA, 19 nt, Homo sapiens
  misc_RNA (1)...(19): siRNA sense strand
caucaagucagcucuauuu

SEQ ID NO: 1790456 - RNA, 19 nt, Homo sapiens
  misc_RNA (1)...(19): siRNA sense strand
ggauagcugugguugcauu

SEQ ID NO: 1790457 - RNA, 19 nt, Homo sapiens
  misc_RNA (1)...(19): siRNA sense strand
ggagugcagucuuaaaugg

SEQ ID NO: 1790458 - RNA, 19 nt, Homo sapiens
  misc_RNA (1)...(19): siRNA sense strand
caugcaggcuuuaaagauu

SEQ ID NO: 1790459 - RNA, 19 nt, Homo sapiens
  misc_RNA (1)...(19): siRNA sense strand
ccgcauaucuugaucuugu

SEQ ID NO: 1790460 - RNA, 19 nt, Homo sapiens
  misc_RNA (1)...(19): siRNA sense strand
gcuagcauguggcaucuga

SEQ ID NO: 1790461 - RNA, 19 nt, Homo sapiens
  misc_RNA (1)...(19): siRNA sense strand
gcaaaggaguuuccaaaau

SEQ ID NO: 1790462 - RNA, 19 nt, Homo sapiens
  misc_RNA (1)...(19): siRNA sense strand
gaacaaaacagcaagagaa

SEQ ID NO: 1790463 - RNA, 19 nt, Homo sapiens
  misc_RNA (1)...(19): siRNA sense strand
cacagggagugcagucuua

SEQ ID NO: 1790464 - RNA, 19 nt, Homo sapiens
  misc_RNA (1)...(19): siRNA sense strand
ccaacaggaucauuuaaag

SEQ ID NO: 1790465 - RNA, 19 nt, Homo sapiens
  misc_RNA (1)...(19): siRNA sense strand
ggagcaaccuacguagaaa

SEQ ID NO: 1790466 - RNA, 19 nt, Homo sapiens
  misc_RNA (1)...(19): siRNA sense strand
aaacuagguuguuguguca

SEQ ID NO: 1790467 - RNA, 19 nt, Homo sapiens
  misc_RNA (1)...(19): siRNA sense strand
gaagagucauguggaacaa

SEQ ID NO: 1790468 - RNA, 19 nt, Homo sapiens
  misc_RNA (1)...(19): siRNA sense strand
agaacgacauuuacacuug

SEQ ID NO: 1790469 - RNA, 19 nt, Homo sapiens
  misc_RNA (1)...(19): siRNA sense strand
gaauaugagugugucugaa

SEQ ID NO: 1790470 - RNA, 19 nt, Homo sapiens
  misc_RNA (1)...(19): siRNA sense strand
acaaagugcugaaugcaau

SEQ ID NO: 1790471 - RNA, 19 nt, Homo sapiens
  misc_RNA (1)...(19): siRNA sense strand
gaagugugauuucccuuac

SEQ ID NO: 1790472 - RNA, 19 nt, Homo sapiens
  misc_RNA (1)...(19): siRNA sense strand
caagucagcucuauuugcu

SEQ ID NO: 1790473 - RNA, 19 nt, Homo sapiens
  misc_RNA (1)...(19): siRNA sense strand
ggaauaugagugugucuga

SEQ ID NO: 1790474 - RNA, 19 nt, Homo sapiens
  misc_RNA (1)...(19): siRNA sense strand
gugauuaucucaucuacag

SEQ ID NO: 1790475 - RNA, 19 nt, Homo sapiens
  misc_RNA (1)...(19): siRNA sense strand
gcagauagggugcaagaca

SEQ ID NO: 1790476 - RNA, 19 nt, Homo sapiens
  misc_RNA (1)...(19): siRNA sense strand
uagaaagucagcaucauuu

SEQ ID NO: 1790477 - RNA, 19 nt, Homo sapiens
  misc_RNA (1)...(19): siRNA sense strand
gcauguggcaucugaagaa

SEQ ID NO: 1790478 - RNA, 19 nt, Homo sapiens
  misc_RNA (1)...(19): siRNA sense strand
gaugguggccucuuuguuc

SEQ ID NO: 1790479 - RNA, 19 nt, Homo sapiens
  misc_RNA (1)...(19): siRNA sense strand
aaacuugcccugugauuau

SEQ ID NO: 1790480 - RNA, 19 nt, Homo sapiens
  misc_RNA (1)...(19): siRNA sense strand
aaagauggacagcuaauga

SEQ ID NO: 1790481 - RNA, 19 nt, Homo sapiens
  misc_RNA (1)...(19): siRNA sense strand
ggaaggaaaagcuguguua

SEQ ID NO: 1790482 - RNA, 19 nt, Homo sapiens
  misc_RNA (1)...(19): siRNA sense strand
ggacagcuaaugacagaau

SEQ ID NO: 1790483 - RNA, 19 nt, Homo sapiens
  misc_RNA (1)...(19): siRNA sense strand
gcagguaguuuaucaugcu

SEQ ID NO: 1790484 - RNA, 19 nt, Homo sapiens
  misc_RNA (1)...(19): siRNA sense strand
caacaggaucauuuaaaga

SEQ ID NO: 1790485 - RNA, 19 nt, Homo sapiens
  misc_RNA (1)...(19): siRNA sense strand
aacagaagguuucagcaaa

SEQ ID NO: 1790486 - RNA, 19 nt, Homo sapiens
  misc_RNA (1)...(19): siRNA sense strand
cagauagggugcaagacaa

SEQ ID NO: 1790487 - RNA, 19 nt, Homo sapiens
  misc_RNA (1)...(19): siRNA sense strand
ccaaguugcaauuauauga

SEQ ID NO: 1790488 - RNA, 19 nt, Homo sapiens
  misc_RNA (1)...(19): siRNA sense strand
gauuugucuuuacagcuua

SEQ ID NO: 1790489 - RNA, 19 nt, Homo sapiens
  misc_RNA (1)...(19): siRNA sense strand
uauccauccugcagacaua

SEQ ID NO: 1790490 - RNA, 19 nt, Homo sapiens
  misc_RNA (1)...(19): siRNA sense strand
cagcugauaugaaugucuu

SEQ ID NO: 1790491 - RNA, 19 nt, Homo sapiens
  misc_RNA (1)...(19): siRNA sense strand
ucuauuugcuggguucaua

SEQ ID NO: 1790492 - RNA, 19 nt, Homo sapiens
  misc_RNA (1)...(19): siRNA sense strand
gcauaucuugaucuuguua

SEQ ID NO: 1790493 - RNA, 19 nt, Homo sapiens
  misc_RNA (1)...(19): siRNA sense strand
gcaaaauucuuuagugaag

SEQ ID NO: 1790494 - RNA, 19 nt, Homo sapiens
  misc_RNA (1)...(19): siRNA sense strand
ccacaggaaacuuugguaa

SEQ ID NO: 1790495 - RNA, 19 nt, Homo sapiens
  misc_RNA (1)...(19): siRNA sense strand
cagaggagguagcugacaa

SEQ ID NO: 1790496 - RNA, 19 nt, Homo sapiens
  misc_RNA (1)...(19): siRNA sense strand
augcaggcuuuaaagauua

SEQ ID NO: 1790497 - RNA, 19 nt, Homo sapiens
  misc_RNA (1)...(19): siRNA sense strand
cuacagcccauuacucaaa

SEQ ID NO: 1790498 - RNA, 19 nt, Homo sapiens
  misc_RNA (1)...(19): siRNA sense strand
aaauuuaucugugccucua

SEQ ID NO: 1790499 - RNA, 19 nt, Homo sapiens
  misc_RNA (1)...(19): siRNA sense strand
acaggaaacuuugguaaca

SEQ ID NO: 1790500 - RNA, 19 nt, Homo sapiens
  misc_RNA (1)...(19): siRNA sense strand
uacaggauguugguaauga

SEQ ID NO: 1790501 - RNA, 19 nt, Homo sapiens
  misc_RNA (1)...(19): siRNA sense strand
gcgugaggcuuuauuagag

SEQ ID NO: 1790502 - RNA, 19 nt, Homo sapiens
  misc_RNA (1)...(19): siRNA sense strand
cagcaucauuuccagauag

SEQ ID NO: 1790503 - RNA, 19 nt, Homo sapiens
  misc_RNA (1)...(19): siRNA sense strand
uacacuugauggcuaauaa

SEQ ID NO: 1790504 - RNA, 19 nt, Homo sapiens
  misc_RNA (1)...(19): siRNA sense strand
aacaggacauuaugaucua

SEQ ID NO: 1790505 - RNA, 19 nt, Homo sapiens
  misc_RNA (1)...(19): siRNA sense strand
aacaguaggcagaauaaua

SEQ ID NO: 1790506 - RNA, 19 nt, Homo sapiens
  misc_RNA (1)...(19): siRNA sense strand
ggcaguggguguugaguca

SEQ ID NO: 1790507 - RNA, 19 nt, Homo sapiens
  misc_RNA (1)...(19): siRNA sense strand
caaauaauuggcagucaga

SEQ ID NO: 1790508 - RNA, 19 nt, Homo sapiens
  misc_RNA (1)...(19): siRNA sense strand
gaaaugauugaaacugcuu

SEQ ID NO: 1790509 - RNA, 19 nt, Homo sapiens
  misc_RNA (1)...(19): siRNA sense strand
guagaaagagcacagauac

SEQ ID NO: 1790510 - RNA, 19 nt, Homo sapiens
  misc_RNA (1)...(19): siRNA sense strand
gguccaauccaaugcauga

SEQ ID NO: 1790511 - RNA, 19 nt, Homo sapiens
  misc_RNA (1)...(19): siRNA sense strand
ggaaacuuugguaacauuu

SEQ ID NO: 1790512 - RNA, 19 nt, Homo sapiens
  misc_RNA (1)...(19): siRNA sense strand
cagaauaauaggucagaaa

SEQ ID NO: 1790513 - RNA, 19 nt, Homo sapiens
  misc_RNA (1)...(19): siRNA sense strand
cagcaaaauucuuuaguga

SEQ ID NO: 1790514 - RNA, 19 nt, Homo sapiens
  misc_RNA (1)...(19): siRNA sense strand
ucagcaucauuuccagaua

SEQ ID NO: 1790515 - RNA, 19 nt, Homo sapiens
  misc_RNA (1)...(19): siRNA sense strand
cuugauggcuaauaaagau

SEQ ID NO: 1790516 - RNA, 19 nt, Homo sapiens
  misc_RNA (1)...(19): siRNA sense strand
gcagaauaauaggucagaa

SEQ ID NO: 1790517 - RNA, 19 nt, Homo sapiens
  misc_RNA (1)...(19): siRNA sense strand
gcaaaggauagcugugguu

SEQ ID NO: 1790518 - RNA, 19 nt, Homo sapiens
  misc_RNA (1)...(19): siRNA sense strand
gaaugauaagcaaaggaua

SEQ ID NO: 1790519 - RNA, 19 nt, Homo sapiens
  misc_RNA (1)...(19): siRNA sense strand
gauuguaggucagaauucu

SEQ ID NO: 1790520 - RNA, 19 nt, Homo sapiens
  misc_RNA (1)...(19): siRNA sense strand
gacagcuaaugacagaauu

SEQ ID NO: 1790521 - RNA, 19 nt, Homo sapiens
  misc_RNA (1)...(19): siRNA sense strand
agaauggaguaagugauuu

SEQ ID NO: 1790522 - RNA, 19 nt, Homo sapiens
  misc_RNA (1)...(19): siRNA sense strand
gaccaacaggaucauuuaa

SEQ ID NO: 1790523 - RNA, 19 nt, Homo sapiens
  misc_RNA (1)...(19): siRNA sense strand
ggacucggaaacauucauu

SEQ ID NO: 1790524 - RNA, 19 nt, Homo sapiens
  misc_RNA (1)...(19): siRNA sense strand
gaugaugauauccuugaaa

SEQ ID NO: 1790525 - RNA, 19 nt, Homo sapiens
  misc_RNA (1)...(19): siRNA sense strand
aagagaagauggaguacca

SEQ ID NO: 1790526 - RNA, 19 nt, Homo sapiens
  misc_RNA (1)...(19): siRNA sense strand
ggucagaaacuagguuguu

SEQ ID NO: 1790527 - RNA, 19 nt, Homo sapiens
  misc_RNA (1)...(19): siRNA sense strand
cguagaaagagcacagaua

SEQ ID NO: 1790528 - RNA, 19 nt, Homo sapiens
  misc_RNA (1)...(19): siRNA sense strand
uagugaagcuguaauugag

SEQ ID NO: 1790529 - RNA, 19 nt, Homo sapiens
  misc_RNA (1)...(19): siRNA sense strand
gucagaaacuagguuguug

SEQ ID NO: 1790530 - RNA, 19 nt, Homo sapiens
  misc_RNA (1)...(19): siRNA sense strand
caaaagugguugcagauag

SEQ ID NO: 1790531 - RNA, 19 nt, Homo sapiens
  misc_RNA (1)...(19): siRNA sense strand
gauuagaaagucagcauca

SEQ ID NO: 1790532 - RNA, 19 nt, Homo sapiens
  misc_RNA (1)...(19): siRNA sense strand
aaacaggacauuaugaucu

SEQ ID NO: 1790533 - RNA, 19 nt, Homo sapiens
  misc_RNA (1)...(19): siRNA sense strand
aggaaacuuugguaacauu

SEQ ID NO: 1790534 - RNA, 19 nt, Homo sapiens
  misc_RNA (1)...(19): siRNA sense strand
cuauuaacuccaccuauaa

SEQ ID NO: 1790535 - RNA, 19 nt, Homo sapiens
  misc_RNA (1)...(19): siRNA sense strand
ugauaugaaugucuugaag

SEQ ID NO: 1790536 - RNA, 19 nt, Homo sapiens
  misc_RNA (1)...(19): siRNA sense strand
agaaaucaaugagacuuca

SEQ ID NO: 1790537 - RNA, 19 nt, Homo sapiens
  misc_RNA (1)...(19): siRNA sense strand
gacaaaacuugcccuguga

SEQ ID NO: 1790538 - RNA, 19 nt, Homo sapiens
  misc_RNA (1)...(19): siRNA sense strand
aaacagagcuugacaccuu

SEQ ID NO: 1790539 - RNA, 19 nt, Homo sapiens
  misc_RNA (1)...(19): siRNA sense strand
ugaaggagaucaaucagua

SEQ ID NO: 1790540 - RNA, 19 nt, Homo sapiens
  misc_RNA (1)...(19): siRNA sense strand
gagaagcacuugucgaguu

SEQ ID NO: 1790541 - RNA, 19 nt, Homo sapiens
  misc_RNA (1)...(19): siRNA sense strand
ggaggagacuauaaacaug

SEQ ID NO: 1790542 - RNA, 19 nt, Homo sapiens
  misc_RNA (1)...(19): siRNA sense strand
gaauggcuccuuccuguuu

SEQ ID NO: 1790543 - RNA, 19 nt, Homo sapiens
  misc_RNA (1)...(19): siRNA sense strand
agaaucaacucuuggugua

SEQ ID NO: 1790544 - RNA, 19 nt, Homo sapiens
  misc_RNA (1)...(19): siRNA sense strand
gggaggagcuagagaagca

SEQ ID NO: 1790545 - RNA, 19 nt, Homo sapiens
  misc_RNA (1)...(19): siRNA sense strand
guaggacuguuuaucgaaa

SEQ ID NO: 1790546 - RNA, 19 nt, Homo sapiens
  misc_RNA (1)...(19): siRNA sense strand
gacaaccucuggcaguuug

SEQ ID NO: 1790547 - RNA, 19 nt, Homo sapiens
  misc_RNA (1)...(19): siRNA sense strand
gcaacaaucuguccuaccu

SEQ ID NO: 1790548 - RNA, 19 nt, Homo sapiens
  misc_RNA (1)...(19): siRNA sense strand
gaacugcccaacauugaga

SEQ ID NO: 1790549 - RNA, 19 nt, Homo sapiens
  misc_RNA (1)...(19): siRNA sense strand
ggagaucaaucaguacauc

SEQ ID NO: 1790550 - RNA, 19 nt, Homo sapiens
  misc_RNA (1)...(19): siRNA sense strand
gagaagaugauccuagaau

SEQ ID NO: 1790551 - RNA, 19 nt, Homo sapiens
  misc_RNA (1)...(19): siRNA sense strand
ggcagaggauuacaagaug

SEQ ID NO: 1790552 - RNA, 19 nt, Homo sapiens
  misc_RNA (1)...(19): siRNA sense strand
gccgggaccuggagaauca

SEQ ID NO: 1790553 - RNA, 19 nt, Homo sapiens
  misc_RNA (1)...(19): siRNA sense strand
gcagaggauuacaagaugu

SEQ ID NO: 1790554 - RNA, 19 nt, Homo sapiens
  misc_RNA (1)...(19): siRNA sense strand
agaagcacuugucgaguuu

SEQ ID NO: 1790555 - RNA, 19 nt, Homo sapiens
  misc_RNA (1)...(19): siRNA sense strand
gcaacaaccggauugacaa

SEQ ID NO: 1790556 - RNA, 19 nt, Homo sapiens
  misc_RNA (1)...(19): siRNA sense strand
ugaccagaaucaacucuug

SEQ ID NO: 1790557 - RNA, 19 nt, Homo sapiens
  misc_RNA (1)...(19): siRNA sense strand
cgauaaagauacgauuguu

SEQ ID NO: 1790558 - RNA, 19 nt, Homo sapiens
  misc_RNA (1)...(19): siRNA sense strand
gucaucaucugcgugaaua

SEQ ID NO: 1790559 - RNA, 19 nt, Homo sapiens
  misc_RNA (1)...(19): siRNA sense strand
gcuggacaauaacaucauu

SEQ ID NO: 1790560 - RNA, 19 nt, Homo sapiens
  misc_RNA (1)...(19): siRNA sense strand
cgagggugauggacgauga

SEQ ID NO: 1790561 - RNA, 19 nt, Homo sapiens
  misc_RNA (1)...(19): siRNA sense strand
gcgcauugaugaccacaca

SEQ ID NO: 1790562 - RNA, 19 nt, Homo sapiens
  misc_RNA (1)...(19): siRNA sense strand
ggacucagagggcaacaau

SEQ ID NO: 1790563 - RNA, 19 nt, Homo sapiens
  misc_RNA (1)...(19): siRNA sense strand
cagcuggacuuucggaaca

SEQ ID NO: 1790564 - RNA, 19 nt, Homo sapiens
  misc_RNA (1)...(19): siRNA sense strand
ugacaucagugaguuguuc

SEQ ID NO: 1790565 - RNA, 19 nt, Homo sapiens
  misc_RNA (1)...(19): siRNA sense strand
agaagaugauccuagaaug

SEQ ID NO: 1790566 - RNA, 19 nt, Homo sapiens
  misc_RNA (1)...(19): siRNA sense strand
gagcagggcaaacgcaaga

SEQ ID NO: 1790567 - RNA, 19 nt, Homo sapiens
  misc_RNA (1)...(19): siRNA sense strand
caaccggauugacaacaug

SEQ ID NO: 1790568 - RNA, 19 nt, Homo sapiens
  misc_RNA (1)...(19): siRNA sense strand
gcaagcgcgugaaggagau

SEQ ID NO: 1790569 - RNA, 19 nt, Homo sapiens
  misc_RNA (1)...(19): siRNA sense strand
ugacaugguaggacuguuu

SEQ ID NO: 1790570 - RNA, 19 nt, Homo sapiens
  misc_RNA (1)...(19): siRNA sense strand
gcauugaugaccacacaaa

SEQ ID NO: 1790571 - RNA, 19 nt, Homo sapiens
  misc_RNA (1)...(19): siRNA sense strand
ucauguaccuggacuacug

SEQ ID NO: 1790572 - RNA, 19 nt, Homo sapiens
  misc_RNA (1)...(19): siRNA sense strand
uaacaucauugagaagauc

SEQ ID NO: 1790573 - RNA, 19 nt, Homo sapiens
  misc_RNA (1)...(19): siRNA sense strand
gacaugguaggacuguuua

SEQ ID NO: 1790574 - RNA, 19 nt, Homo sapiens
  misc_RNA (1)...(19): siRNA sense strand
gaagaugauccuagaaugc

SEQ ID NO: 1790575 - RNA, 19 nt, Homo sapiens
  misc_RNA (1)...(19): siRNA sense strand
guucaucugugccuaccuu

SEQ ID NO: 1790576 - RNA, 19 nt, Homo sapiens
  misc_RNA (1)...(19): siRNA sense strand
ggaacauccuccgcauaga

SEQ ID NO: 1790577 - RNA, 19 nt, Homo sapiens
  misc_RNA (1)...(19): siRNA sense strand
gaguuuaagugccauucga

SEQ ID NO: 1790578 - RNA, 19 nt, Homo sapiens
  misc_RNA (1)...(19): siRNA sense strand
uagacaggauucacaagga

SEQ ID NO: 1790579 - RNA, 19 nt, Homo sapiens
  misc_RNA (1)...(19): siRNA sense strand
gaacuggacaaccuggaau

SEQ ID NO: 1790580 - RNA, 19 nt, Homo sapiens
  misc_RNA (1)...(19): siRNA sense strand
ggauugacaacaugaugaa

SEQ ID NO: 1790581 - RNA, 19 nt, Homo sapiens
  misc_RNA (1)...(19): siRNA sense strand
aagauacgauuguuaaugc

SEQ ID NO: 1790582 - RNA, 19 nt, Homo sapiens
  misc_RNA (1)...(19): siRNA sense strand
ggaucugucuuucaacaac

SEQ ID NO: 1790583 - RNA, 19 nt, Homo sapiens
  misc_RNA (1)...(19): siRNA sense strand
ggugauggacgaugacaug

SEQ ID NO: 1790584 - RNA, 19 nt, Homo sapiens
  misc_RNA (1)...(19): siRNA sense strand
gaccuacaaggacaaguuu

SEQ ID NO: 1790585 - RNA, 19 nt, Homo sapiens
  misc_RNA (1)...(19): siRNA sense strand
ggcuggaucugucuuucaa

SEQ ID NO: 1790586 - RNA, 19 nt, Homo sapiens
  misc_RNA (1)...(19): siRNA sense strand
uugagaagaugauccuaga

SEQ ID NO: 1790587 - RNA, 19 nt, Homo sapiens
  misc_RNA (1)...(19): siRNA sense strand
gaacauccuccgcauagac

SEQ ID NO: 1790588 - RNA, 19 nt, Homo sapiens
  misc_RNA (1)...(19): siRNA sense strand
gaucugucuuucaacaaca

SEQ ID NO: 1790589 - RNA, 19 nt, Homo sapiens
  misc_RNA (1)...(19): siRNA sense strand
aagcacuugucgaguuuaa

SEQ ID NO: 1790590 - RNA, 19 nt, Homo sapiens
  misc_RNA (1)...(19): siRNA sense strand
gcagggcaaacgcaagauu

SEQ ID NO: 1790591 - RNA, 19 nt, Homo sapiens
  misc_RNA (1)...(19): siRNA sense strand
gaggagacuauaaacaugu

SEQ ID NO: 1790592 - RNA, 19 nt, Homo sapiens
  misc_RNA (1)...(19): siRNA sense strand
caagacugcguuuguggaa

SEQ ID NO: 1790593 - RNA, 19 nt, Homo sapiens
  misc_RNA (1)...(19): siRNA sense strand
agaaugcagugcugacauc

SEQ ID NO: 1790594 - RNA, 19 nt, Homo sapiens
  misc_RNA (1)...(19): siRNA sense strand
uagacaaccucuggcaguu

SEQ ID NO: 1790595 - RNA, 19 nt, Homo sapiens
  misc_RNA (1)...(19): siRNA sense strand
agacugcguuuguggaaca

SEQ ID NO: 1790596 - RNA, 19 nt, Homo sapiens
  misc_RNA (1)...(19): siRNA sense strand
guggcgacauccuagacua

SEQ ID NO: 1790597 - RNA, 19 nt, Homo sapiens
  misc_RNA (1)...(19): siRNA sense strand
agacaggauucacaaggau

SEQ ID NO: 1790598 - RNA, 19 nt, Homo sapiens
  misc_RNA (1)...(19): siRNA sense strand
gguguacacguuuaauaga

SEQ ID NO: 1790599 - RNA, 19 nt, Homo sapiens
  misc_RNA (1)...(19): siRNA sense strand
ucagcacccuggagaagau

SEQ ID NO: 1790600 - RNA, 19 nt, Homo sapiens
  misc_RNA (1)...(19): siRNA sense strand
uggaggaccugagcuuguu

SEQ ID NO: 1790601 - RNA, 19 nt, Homo sapiens
  misc_RNA (1)...(19): siRNA sense strand
acgaggaccugccuaacga

SEQ ID NO: 1790602 - RNA, 19 nt, Homo sapiens
  misc_RNA (1)...(19): siRNA sense strand
ucaugacgcuggagaugca

SEQ ID NO: 1790603 - RNA, 19 nt, Homo sapiens
  misc_RNA (1)...(19): siRNA sense strand
uaauagacaggauucacaa

SEQ ID NO: 1790604 - RNA, 19 nt, Homo sapiens
  misc_RNA (1)...(19): siRNA sense strand
ggcaacaaccggauugaca

SEQ ID NO: 1790605 - RNA, 19 nt, Homo sapiens
  misc_RNA (1)...(19): siRNA sense strand
caucaucugcgugaauauu

SEQ ID NO: 1790606 - RNA, 19 nt, Homo sapiens
  misc_RNA (1)...(19): siRNA sense strand
gugagcuccuugagaccua

SEQ ID NO: 1790607 - RNA, 19 nt, Homo sapiens
  misc_RNA (1)...(19): siRNA sense strand
cuaccuuccugaccucaug

SEQ ID NO: 1790608 - RNA, 19 nt, Homo sapiens
  misc_RNA (1)...(19): siRNA sense strand
gcgugaaggagaucaauca

SEQ ID NO: 1790609 - RNA, 19 nt, Homo sapiens
  misc_RNA (1)...(19): siRNA sense strand
gacauccaccuccugaaga

SEQ ID NO: 1790610 - RNA, 19 nt, Homo sapiens
  misc_RNA (1)...(19): siRNA sense strand
gguaggacuguuuaucgaa

SEQ ID NO: 1790611 - RNA, 19 nt, Homo sapiens
  misc_RNA (1)...(19): siRNA sense strand
gaagcacuugucgaguuua

SEQ ID NO: 1790612 - RNA, 19 nt, Homo sapiens
  misc_RNA (1)...(19): siRNA sense strand
gaagcacaagacugcguuu

SEQ ID NO: 1790613 - RNA, 19 nt, Homo sapiens
  misc_RNA (1)...(19): siRNA sense strand
ggacuacuggcgcauugau

SEQ ID NO: 1790614 - RNA, 19 nt, Homo sapiens
  misc_RNA (1)...(19): siRNA sense strand
cagcuggaggagacuauaa

SEQ ID NO: 1790615 - RNA, 19 nt, Homo sapiens
  misc_RNA (1)...(19): siRNA sense strand
aaucaacucuugguguaca

SEQ ID NO: 1790616 - RNA, 19 nt, Homo sapiens
  misc_RNA (1)...(19): siRNA sense strand
cgacauccaccuccugaag

SEQ ID NO: 1790617 - RNA, 19 nt, Homo sapiens
  misc_RNA (1)...(19): siRNA sense strand
gcccaacauugagaagaug

SEQ ID NO: 1790618 - RNA, 19 nt, Homo sapiens
  misc_RNA (1)...(19): siRNA sense strand
gcagcuggaggagacuaua

SEQ ID NO: 1790619 - RNA, 19 nt, Homo sapiens
  misc_RNA (1)...(19): siRNA sense strand
ucaacaaccggaucuccaa

SEQ ID NO: 1790620 - RNA, 19 nt, Homo sapiens
  misc_RNA (1)...(19): siRNA sense strand
agaaucaccaccacgagaa

SEQ ID NO: 1790621 - RNA, 19 nt, Homo sapiens
  misc_RNA (1)...(19): siRNA sense strand
gcagcuggacaauaacauc

SEQ ID NO: 1790622 - RNA, 19 nt, Homo sapiens
  misc_RNA (1)...(19): siRNA sense strand
gaaggagaucaaucaguac

SEQ ID NO: 1790623 - RNA, 19 nt, Homo sapiens
  misc_RNA (1)...(19): siRNA sense strand
uggaggagacuauaaacau

SEQ ID NO: 1790624 - RNA, 19 nt, Homo sapiens
  misc_RNA (1)...(19): siRNA sense strand
guuguucgaugcgcucaug

SEQ ID NO: 1790625 - RNA, 19 nt, Homo sapiens
  misc_RNA (1)...(19): siRNA sense strand
uggaacugcccaacauuga

SEQ ID NO: 1790626 - RNA, 19 nt, Homo sapiens
  misc_RNA (1)...(19): siRNA sense strand
gcucaugacgcuggagaug

SEQ ID NO: 1790627 - RNA, 19 nt, Homo sapiens
  misc_RNA (1)...(19): siRNA sense strand
acaaccggauugacaacau

SEQ ID NO: 1790628 - RNA, 19 nt, Homo sapiens
  misc_RNA (1)...(19): siRNA sense strand
cgaacuggacaaccuggaa

SEQ ID NO: 1790629 - RNA, 19 nt, Homo sapiens
  misc_RNA (1)...(19): siRNA sense strand
agaccuacaaggacaaguu

SEQ ID NO: 1790630 - RNA, 19 nt, Homo sapiens
  misc_RNA (1)...(19): siRNA sense strand
gagcuagagaagcacaaga

SEQ ID NO: 1790631 - RNA, 19 nt, Homo sapiens
  misc_RNA (1)...(19): siRNA sense strand
cagaggauuacaagauguu

SEQ ID NO: 1790632 - RNA, 19 nt, Homo sapiens
  misc_RNA (1)...(19): siRNA sense strand
aggcagaggauuacaagau

SEQ ID NO: 1790633 - RNA, 19 nt, Homo sapiens
  misc_RNA (1)...(19): siRNA sense strand
gaaccgcaagcgcgugaag

SEQ ID NO: 1790634 - RNA, 19 nt, Homo sapiens
  misc_RNA (1)...(19): siRNA sense strand
ucgucaagcugcagguguu

SEQ ID NO: 1790635 - RNA, 19 nt, Homo sapiens
  misc_RNA (1)...(19): siRNA sense strand
aggagacuauaaacauguu

SEQ ID NO: 1790636 - RNA, 19 nt, Homo sapiens
  misc_RNA (1)...(19): siRNA sense strand
ggaacugcccaacauugag

SEQ ID NO: 1790637 - RNA, 19 nt, Homo sapiens
  misc_RNA (1)...(19): siRNA sense strand
cagggcaaacgcaagauug

SEQ ID NO: 1790638 - RNA, 19 nt, Homo sapiens
  misc_RNA (1)...(19): siRNA sense strand
ggaguuugcuguaccaguu

SEQ ID NO: 1790639 - RNA, 19 nt, Homo sapiens
  misc_RNA (1)...(19): siRNA sense strand
ggaggauccugcugaacua

SEQ ID NO: 1790640 - RNA, 19 nt, Homo sapiens
  misc_RNA (1)...(19): siRNA sense strand
ggaggaggauggcucuuug

SEQ ID NO: 1790641 - RNA, 19 nt, Homo sapiens
  misc_RNA (1)...(19): siRNA sense strand
gaggagagcauguacaaga

SEQ ID NO: 1790642 - RNA, 19 nt, Homo sapiens
  misc_RNA (1)...(19): siRNA sense strand
ggaagacaaucccaaugug

SEQ ID NO: 1790643 - RNA, 19 nt, Homo sapiens
  misc_RNA (1)...(19): siRNA sense strand
gcaccgagaugcagcucaa

SEQ ID NO: 1790644 - RNA, 19 nt, Homo sapiens
  misc_RNA (1)...(19): siRNA sense strand
gcagagacagcuccuuuga

SEQ ID NO: 1790645 - RNA, 19 nt, Homo sapiens
  misc_RNA (1)...(19): siRNA sense strand
cgaaaggaguacucugaga

SEQ ID NO: 1790646 - RNA, 19 nt, Homo sapiens
  misc_RNA (1)...(19): siRNA sense strand
ggacagaucggaacaacca

SEQ ID NO: 1790647 - RNA, 19 nt, Homo sapiens
  misc_RNA (1)...(19): siRNA sense strand
caagcugucugacguguuc

SEQ ID NO: 1790648 - RNA, 19 nt, Homo sapiens
  misc_RNA (1)...(19): siRNA sense strand
gaaaggaguacucugagau

SEQ ID NO: 1790649 - RNA, 19 nt, Homo sapiens
  misc_RNA (1)...(19): siRNA sense strand
gaaauacugcaccgagaug

SEQ ID NO: 1790650 - RNA, 19 nt, Homo sapiens
  misc_RNA (1)...(19): siRNA sense strand
gagagccaguacaagguuu

SEQ ID NO: 1790651 - RNA, 19 nt, Homo sapiens
  misc_RNA (1)...(19): siRNA sense strand
gcuuguacauggagaagga

SEQ ID NO: 1790652 - RNA, 19 nt, Homo sapiens
  misc_RNA (1)...(19): siRNA sense strand
gaacuacgccguguacaac

SEQ ID NO: 1790653 - RNA, 19 nt, Homo sapiens
  misc_RNA (1)...(19): siRNA sense strand
gggagcaccacccagguua

SEQ ID NO: 1790654 - RNA, 19 nt, Homo sapiens
  misc_RNA (1)...(19): siRNA sense strand
agagacagcuccuuugacu

SEQ ID NO: 1790655 - RNA, 19 nt, Homo sapiens
  misc_RNA (1)...(19): siRNA sense strand
ggacauggagaaacaacug

SEQ ID NO: 1790656 - RNA, 19 nt, Homo sapiens
  misc_RNA (1)...(19): siRNA sense strand
ggaaauacugcaccgagau

SEQ ID NO: 1790657 - RNA, 19 nt, Homo sapiens
  misc_RNA (1)...(19): siRNA sense strand
agacagcuccuuugacuca

SEQ ID NO: 1790658 - RNA, 19 nt, Homo sapiens
  misc_RNA (1)...(19): siRNA sense strand
guacaagguuuuccacuuc

SEQ ID NO: 1790659 - RNA, 19 nt, Homo sapiens
  misc_RNA (1)...(19): siRNA sense strand
ggacgaggacauggagaaa

SEQ ID NO: 1790660 - RNA, 19 nt, Homo sapiens
  misc_RNA (1)...(19): siRNA sense strand
ggauggcucuuuggaacug

SEQ ID NO: 1790661 - RNA, 19 nt, Homo sapiens
  misc_RNA (1)...(19): siRNA sense strand
gcaagaagggcccaaagac

SEQ ID NO: 1790662 - RNA, 19 nt, Homo sapiens
  misc_RNA (1)...(19): siRNA sense strand
ggaggauggcucuuuggaa

SEQ ID NO: 1790663 - RNA, 19 nt, Homo sapiens
  misc_RNA (1)...(19): siRNA sense strand
agaaacaacugcuguaccu

SEQ ID NO: 1790664 - RNA, 19 nt, Homo sapiens
  misc_RNA (1)...(19): siRNA sense strand
uggccgagguccuggauga

SEQ ID NO: 1790665 - RNA, 19 nt, Homo sapiens
  misc_RNA (1)...(19): siRNA sense strand
gggaggaggauggcucuuu

SEQ ID NO: 1790666 - RNA, 19 nt, Homo sapiens
  misc_RNA (1)...(19): siRNA sense strand
gaucaucuacuccaagaac

SEQ ID NO: 1790667 - RNA, 19 nt, Homo sapiens
  misc_RNA (1)...(19): siRNA sense strand
ggcaagaagggcccaaaga

SEQ ID NO: 1790668 - RNA, 19 nt, Homo sapiens
  misc_RNA (1)...(19): siRNA sense strand
gcagauuugcggcguguuc

SEQ ID NO: 1790669 - RNA, 19 nt, Homo sapiens
  misc_RNA (1)...(19): siRNA sense strand
acgaggacauggagaaaca

SEQ ID NO: 1790670 - RNA, 19 nt, Homo sapiens
  misc_RNA (1)...(19): siRNA sense strand
cagaaaaggcucuccauga

SEQ ID NO: 1790671 - RNA, 19 nt, Homo sapiens
  misc_RNA (1)...(19): siRNA sense strand
ucgcagggccuccuccaaa

SEQ ID NO: 1790672 - RNA, 19 nt, Homo sapiens
  misc_RNA (1)...(19): siRNA sense strand
gagagagccaguacaaggu

SEQ ID NO: 1790673 - RNA, 19 nt, Homo sapiens
  misc_RNA (1)...(19): siRNA sense strand
ucggaaaccuggccaugca

SEQ ID NO: 1790674 - RNA, 19 nt, Homo sapiens
  misc_RNA (1)...(19): siRNA sense strand
ggaaggccauuuucuuugg

SEQ ID NO: 1790675 - RNA, 19 nt, Homo sapiens
  misc_RNA (1)...(19): siRNA sense strand
agacaugcaugcaguucuc

SEQ ID NO: 1790676 - RNA, 19 nt, Homo sapiens
  misc_RNA (1)...(19): siRNA sense strand
ugaacuacgccguguacaa

SEQ ID NO: 1790677 - RNA, 19 nt, Homo sapiens
  misc_RNA (1)...(19): siRNA sense strand
gccgagagagccaguacaa

SEQ ID NO: 1790678 - RNA, 19 nt, Homo sapiens
  misc_RNA (1)...(19): siRNA sense strand
ggagaaacaacugcuguac

SEQ ID NO: 1790679 - RNA, 19 nt, Homo sapiens
  misc_RNA (1)...(19): siRNA sense strand
gggacgaggacauggagaa

SEQ ID NO: 1790680 - RNA, 19 nt, Homo sapiens
  misc_RNA (1)...(19): siRNA sense strand
ccgaggagagcauguacaa

SEQ ID NO: 1790681 - RNA, 19 nt, Homo sapiens
  misc_RNA (1)...(19): siRNA sense strand
agagcguucuggcguaaug

SEQ ID NO: 1790682 - RNA, 19 nt, Homo sapiens
  misc_RNA (1)...(19): siRNA sense strand
gcggaaggccauuuucuuu

SEQ ID NO: 1790683 - RNA, 19 nt, Homo sapiens
  misc_RNA (1)...(19): siRNA sense strand
ugcagaagcgaaaggagua

SEQ ID NO: 1790684 - RNA, 19 nt, Homo sapiens
  misc_RNA (1)...(19): siRNA sense strand
ccgagaugcagcucaaaga

SEQ ID NO: 1790685 - RNA, 19 nt, Homo sapiens
  misc_RNA (1)...(19): siRNA sense strand
cgccagaggaugaggagaa

SEQ ID NO: 1790686 - RNA, 19 nt, Homo sapiens
  misc_RNA (1)...(19): siRNA sense strand
gccagaggaugaggagaag

SEQ ID NO: 1790687 - RNA, 19 nt, Homo sapiens
  misc_RNA (1)...(19): siRNA sense strand
ccuuccugcugcgcuauua

SEQ ID NO: 1790688 - RNA, 19 nt, Homo sapiens
  misc_RNA (1)...(19): siRNA sense strand
cgaggaguuugcuguacca

SEQ ID NO: 1790689 - RNA, 19 nt, Homo sapiens
  misc_RNA (1)...(19): siRNA sense strand
acggacuacuuccaccuuu

SEQ ID NO: 1790690 - RNA, 19 nt, Homo sapiens
  misc_RNA (1)...(19): siRNA sense strand
gcuggcuccuucugugcuu

SEQ ID NO: 1790691 - RNA, 19 nt, Homo sapiens
  misc_RNA (1)...(19): siRNA sense strand
uggagaaacaacugcugua

SEQ ID NO: 1790692 - RNA, 19 nt, Homo sapiens
  misc_RNA (1)...(19): siRNA sense strand
ucuggugcuuuguggguuu

SEQ ID NO: 1790693 - RNA, 19 nt, Homo sapiens
  misc_RNA (1)...(19): siRNA sense strand
uguccuggauggagagauc

SEQ ID NO: 1790694 - RNA, 19 nt, Homo sapiens
  misc_RNA (1)...(19): siRNA sense strand
aaaggaguacucugagauc

SEQ ID NO: 1790695 - RNA, 19 nt, Homo sapiens
  misc_RNA (1)...(19): siRNA sense strand
ggacaaagaugcagaaugu

SEQ ID NO: 1790696 - RNA, 19 nt, Homo sapiens
  misc_RNA (1)...(19): siRNA sense strand
gggaggagcugcugaaaga

SEQ ID NO: 1790697 - RNA, 19 nt, Homo sapiens
  misc_RNA (1)...(19): siRNA sense strand
ccugaucgcuuaccgagaa

SEQ ID NO: 1790698 - RNA, 19 nt, Homo sapiens
  misc_RNA (1)...(19): siRNA sense strand
gagcaggacucucccaacu

SEQ ID NO: 1790699 - RNA, 19 nt, Homo sapiens
  misc_RNA (1)...(19): siRNA sense strand
ccaugacgaugaccucaaa

SEQ ID NO: 1790700 - RNA, 19 nt, Homo sapiens
  misc_RNA (1)...(19): siRNA sense strand
ucaaagaguucaacacacu

SEQ ID NO: 1790701 - RNA, 19 nt, Homo sapiens
  misc_RNA (1)...(19): siRNA sense strand
acgaugaccucaaagaguu

SEQ ID NO: 1790702 - RNA, 19 nt, Homo sapiens
  misc_RNA (1)...(19): siRNA sense strand
ccucugaccuaccaguuga

SEQ ID NO: 1790703 - RNA, 19 nt, Homo sapiens
  misc_RNA (1)...(19): siRNA sense strand
acucagcgcugccauuuua

SEQ ID NO: 1790704 - RNA, 19 nt, Homo sapiens
  misc_RNA (1)...(19): siRNA sense strand
ccucaugccugcugcugaa

SEQ ID NO: 1790705 - RNA, 19 nt, Homo sapiens
  misc_RNA (1)...(19): siRNA sense strand
gaaagaugacagcucugaa

SEQ ID NO: 1790706 - RNA, 19 nt, Homo sapiens
  misc_RNA (1)...(19): siRNA sense strand
gggccuuccuggacaaaga

SEQ ID NO: 1790707 - RNA, 19 nt, Homo sapiens
  misc_RNA (1)...(19): siRNA sense strand
gaagacgccugggagacau

SEQ ID NO: 1790708 - RNA, 19 nt, Homo sapiens
  misc_RNA (1)...(19): siRNA sense strand
guaccaacaaucaaagcua

SEQ ID NO: 1790709 - RNA, 19 nt, Homo sapiens
  misc_RNA (1)...(19): siRNA sense strand
acuauuuacuaccuccuua

SEQ ID NO: 1790710 - RNA, 19 nt, Homo sapiens
  misc_RNA (1)...(19): siRNA sense strand
aagcaucgcugacccugau

SEQ ID NO: 1790711 - RNA, 19 nt, Homo sapiens
  misc_RNA (1)...(19): siRNA sense strand
gaggagcugcugaaagaug

SEQ ID NO: 1790712 - RNA, 19 nt, Homo sapiens
  misc_RNA (1)...(19): siRNA sense strand
cagcagcggcaacaugaaa

SEQ ID NO: 1790713 - RNA, 19 nt, Homo sapiens
  misc_RNA (1)...(19): siRNA sense strand
gagaagcccacaauuacuc

SEQ ID NO: 1790714 - RNA, 19 nt, Homo sapiens
  misc_RNA (1)...(19): siRNA sense strand
caacuacuacuaugaacuc

SEQ ID NO: 1790715 - RNA, 19 nt, Homo sapiens
  misc_RNA (1)...(19): siRNA sense strand
accgagaagcccacaauua

SEQ ID NO: 1790716 - RNA, 19 nt, Homo sapiens
  misc_RNA (1)...(19): siRNA sense strand
ugaaagaugacagcucuga

SEQ ID NO: 1790717 - RNA, 19 nt, Homo sapiens
  misc_RNA (1)...(19): siRNA sense strand
ugaccgagcagccaccaaa

SEQ ID NO: 1790718 - RNA, 19 nt, Homo sapiens
  misc_RNA (1)...(19): siRNA sense strand
acuaugaacucuggugguu

SEQ ID NO: 1790719 - RNA, 19 nt, Homo sapiens
  misc_RNA (1)...(19): siRNA sense strand
acaaagaugcagaauguag

SEQ ID NO: 1790720 - RNA, 19 nt, Homo sapiens
  misc_RNA (1)...(19): siRNA sense strand
ccgagaagcccacaauuac

SEQ ID NO: 1790721 - RNA, 19 nt, Homo sapiens
  misc_RNA (1)...(19): siRNA sense strand
cugagcugcugcuguguuu

SEQ ID NO: 1790722 - RNA, 19 nt, Homo sapiens
  misc_RNA (1)...(19): siRNA sense strand
gcugcugccuccacagugu

SEQ ID NO: 1790723 - RNA, 19 nt, Homo sapiens
  misc_RNA (1)...(19): siRNA sense strand
auacagugccuuccagcua

SEQ ID NO: 1790724 - RNA, 19 nt, Homo sapiens
  misc_RNA (1)...(19): siRNA sense strand
ccucaaagaguucaacaca

SEQ ID NO: 1790725 - RNA, 19 nt, Homo sapiens
  misc_RNA (1)...(19): siRNA sense strand
gacgaugaccucaaagagu

SEQ ID NO: 1790726 - RNA, 19 nt, Homo sapiens
  misc_RNA (1)...(19): siRNA sense strand
acaggugacucgggcauug

SEQ ID NO: 1790727 - RNA, 19 nt, Homo sapiens
  misc_RNA (1)...(19): siRNA sense strand
cagcagaagcagcacaaga

SEQ ID NO: 1790728 - RNA, 19 nt, Homo sapiens
  misc_RNA (1)...(19): siRNA sense strand
gcacagagcagccccuugu

SEQ ID NO: 1790729 - RNA, 19 nt, Homo sapiens
  misc_RNA (1)...(19): siRNA sense strand
gccaaacuauuuacuaccu

SEQ ID NO: 1790730 - RNA, 19 nt, Homo sapiens
  misc_RNA (1)...(19): siRNA sense strand
aggagcugcugaaagauga

SEQ ID NO: 1790731 - RNA, 19 nt, Homo sapiens
  misc_RNA (1)...(19): siRNA sense strand
guagggaggagcugcugaa

SEQ ID NO: 1790732 - RNA, 19 nt, Homo sapiens
  misc_RNA (1)...(19): siRNA sense strand
uuacucagcgcugccauuu

SEQ ID NO: 1790733 - RNA, 19 nt, Homo sapiens
  misc_RNA (1)...(19): siRNA sense strand
caaucaaagcuacaucugu

SEQ ID NO: 1790734 - RNA, 19 nt, Homo sapiens
  misc_RNA (1)...(19): siRNA sense strand
gugcugcaacuacuacuau

SEQ ID NO: 1790735 - RNA, 19 nt, Homo sapiens
  misc_RNA (1)...(19): siRNA sense strand
gcacccgacagcaaagaga

SEQ ID NO: 1790736 - RNA, 19 nt, Homo sapiens
  misc_RNA (1)...(19): siRNA sense strand
gcggcaacaugaaaucaac

SEQ ID NO: 1790737 - RNA, 19 nt, Homo sapiens
  misc_RNA (1)...(19): siRNA sense strand
guggguaccaacaaucaaa

SEQ ID NO: 1790738 - RNA, 19 nt, Homo sapiens
  misc_RNA (1)...(19): siRNA sense strand
guucaacacacucaucgau

SEQ ID NO: 1790739 - RNA, 19 nt, Homo sapiens
  misc_RNA (1)...(19): siRNA sense strand
gacaaagaugcagaaugua

SEQ ID NO: 1790740 - RNA, 19 nt, Homo sapiens
  misc_RNA (1)...(19): siRNA sense strand
gcugcaacuacuacuauga

SEQ ID NO: 1790741 - RNA, 19 nt, Homo sapiens
  misc_RNA (1)...(19): siRNA sense strand
gcgcugccauuuuauuuca

SEQ ID NO: 1790742 - RNA, 19 nt, Homo sapiens
  misc_RNA (1)...(19): siRNA sense strand
guggugaaccgaccuccaa

SEQ ID NO: 1790743 - RNA, 19 nt, Homo sapiens
  misc_RNA (1)...(19): siRNA sense strand
gagccaagcaccgccuuca

SEQ ID NO: 1790744 - RNA, 19 nt, Homo sapiens
  misc_RNA (1)...(19): siRNA sense strand
cugcaacuacuacuaugaa

SEQ ID NO: 1790745 - RNA, 19 nt, Homo sapiens
  misc_RNA (1)...(19): siRNA sense strand
gcagcggcaacaugaaauc

SEQ ID NO: 1790746 - RNA, 19 nt, Homo sapiens
  misc_RNA (1)...(19): siRNA sense strand
ucucagugcugcaacuacu

SEQ ID NO: 1790747 - RNA, 19 nt, Homo sapiens
  misc_RNA (1)...(19): siRNA sense strand
caacaaucaaagcuacauc

SEQ ID NO: 1790748 - RNA, 19 nt, Homo sapiens
  misc_RNA (1)...(19): siRNA sense strand
gcaacuacuacuaugaacu

SEQ ID NO: 1790749 - RNA, 19 nt, Homo sapiens
  misc_RNA (1)...(19): siRNA sense strand
uugccaaacuauuuacuac

SEQ ID NO: 1790750 - RNA, 19 nt, Homo sapiens
  misc_RNA (1)...(19): siRNA sense strand
aaagaugacagcucugaac

SEQ ID NO: 1790751 - RNA, 19 nt, Homo sapiens
  misc_RNA (1)...(19): siRNA sense strand
caaagcuacaucugugaca

SEQ ID NO: 1790752 - RNA, 19 nt, Homo sapiens
  misc_RNA (1)...(19): siRNA sense strand
uuuacuaccuccuuaugag

SEQ ID NO: 1790753 - RNA, 19 nt, Homo sapiens
  misc_RNA (1)...(19): siRNA sense strand
cccagcagcggcaacauga

SEQ ID NO: 1790754 - RNA, 19 nt, Homo sapiens
  misc_RNA (1)...(19): siRNA sense strand
caaaggaaguucucucauu

SEQ ID NO: 1790755 - RNA, 19 nt, Homo sapiens
  misc_RNA (1)...(19): siRNA sense strand
gauauaaccaguuuccuua

SEQ ID NO: 1790756 - RNA, 19 nt, Homo sapiens
  misc_RNA (1)...(19): siRNA sense strand
ggacugauaccacaacuaa

SEQ ID NO: 1790757 - RNA, 19 nt, Homo sapiens
  misc_RNA (1)...(19): siRNA sense strand
cuagaaaucugucugaaca

SEQ ID NO: 1790758 - RNA, 19 nt, Homo sapiens
  misc_RNA (1)...(19): siRNA sense strand
gcaaugccgucucuaacau

SEQ ID NO: 1790759 - RNA, 19 nt, Homo sapiens
  misc_RNA (1)...(19): siRNA sense strand
aaaggaaguucucucauuc

SEQ ID NO: 1790760 - RNA, 19 nt, Homo sapiens
  misc_RNA (1)...(19): siRNA sense strand
gagagaacccucaggacuu

SEQ ID NO: 1790761 - RNA, 19 nt, Homo sapiens
  misc_RNA (1)...(19): siRNA sense strand
gaaauugaaagagucauug

SEQ ID NO: 1790762 - RNA, 19 nt, Homo sapiens
  misc_RNA (1)...(19): siRNA sense strand
ggauauaaccaguuuccuu

SEQ ID NO: 1790763 - RNA, 19 nt, Homo sapiens
  misc_RNA (1)...(19): siRNA sense strand
gaagaaauugaaagaguca

SEQ ID NO: 1790764 - RNA, 19 nt, Homo sapiens
  misc_RNA (1)...(19): siRNA sense strand
ccaagauuauugaggaguu

SEQ ID NO: 1790765 - RNA, 19 nt, Homo sapiens
  misc_RNA (1)...(19): siRNA sense strand
ccucaggacuucauagaca

SEQ ID NO: 1790766 - RNA, 19 nt, Homo sapiens
  misc_RNA (1)...(19): siRNA sense strand
cauaugcccuuggcuuuau

SEQ ID NO: 1790767 - RNA, 19 nt, Homo sapiens
  misc_RNA (1)...(19): siRNA sense strand
cauaugaccucagagaaca

SEQ ID NO: 1790768 - RNA, 19 nt, Homo sapiens
  misc_RNA (1)...(19): siRNA sense strand
caucaaagaccaucaagag

SEQ ID NO: 1790769 - RNA, 19 nt, Homo sapiens
  misc_RNA (1)...(19): siRNA sense strand
ccagaugcccuacacagaa

SEQ ID NO: 1790770 - RNA, 19 nt, Homo sapiens
  misc_RNA (1)...(19): siRNA sense strand
ggccagcgcuuugauuaca

SEQ ID NO: 1790771 - RNA, 19 nt, Homo sapiens
  misc_RNA (1)...(19): siRNA sense strand
gaaccccgauguacaagaa

SEQ ID NO: 1790772 - RNA, 19 nt, Homo sapiens
  misc_RNA (1)...(19): siRNA sense strand
uaacagcaguuuugaugaa

SEQ ID NO: 1790773 - RNA, 19 nt, Homo sapiens
  misc_RNA (1)...(19): siRNA sense strand
uaccacaacuaacucuuug

SEQ ID NO: 1790774 - RNA, 19 nt, Homo sapiens
  misc_RNA (1)...(19): siRNA sense strand
ucuggugccugcuguauau

SEQ ID NO: 1790775 - RNA, 19 nt, Homo sapiens
  misc_RNA (1)...(19): siRNA sense strand
auucaacucuucgucauuu

SEQ ID NO: 1790776 - RNA, 19 nt, Homo sapiens
  misc_RNA (1)...(19): siRNA sense strand
aagaaaagguucaugaaga

SEQ ID NO: 1790777 - RNA, 19 nt, Homo sapiens
  misc_RNA (1)...(19): siRNA sense strand
ggagacaacaaaggaaguu

SEQ ID NO: 1790778 - RNA, 19 nt, Homo sapiens
  misc_RNA (1)...(19): siRNA sense strand
caucagcaaugccgucucu

SEQ ID NO: 1790779 - RNA, 19 nt, Homo sapiens
  misc_RNA (1)...(19): siRNA sense strand
gcccuuggcuuuauuaccu

SEQ ID NO: 1790780 - RNA, 19 nt, Homo sapiens
  misc_RNA (1)...(19): siRNA sense strand
agaaaagguucaugaagaa

SEQ ID NO: 1790781 - RNA, 19 nt, Homo sapiens
  misc_RNA (1)...(19): siRNA sense strand
gaacccucaggacuucaua

SEQ ID NO: 1790782 - RNA, 19 nt, Homo sapiens
  misc_RNA (1)...(19): siRNA sense strand
agagaacccucaggacuuc

SEQ ID NO: 1790783 - RNA, 19 nt, Homo sapiens
  misc_RNA (1)...(19): siRNA sense strand
uuuauuaccuucccuuugg

SEQ ID NO: 1790784 - RNA, 19 nt, Homo sapiens
  misc_RNA (1)...(19): siRNA sense strand
gaggaguucaaauauguga

SEQ ID NO: 1790785 - RNA, 19 nt, Homo sapiens
  misc_RNA (1)...(19): siRNA sense strand
ucauagacauguaccuucu

SEQ ID NO: 1790786 - RNA, 19 nt, Homo sapiens
  misc_RNA (1)...(19): siRNA sense strand
ucagcaaugccgucucuaa

SEQ ID NO: 1790787 - RNA, 19 nt, Homo sapiens
  misc_RNA (1)...(19): siRNA sense strand
caagauuauugaggaguuc

SEQ ID NO: 1790788 - RNA, 19 nt, Homo sapiens
  misc_RNA (1)...(19): siRNA sense strand
ccgcuugccauuccucaua

SEQ ID NO: 1790789 - RNA, 19 nt, Homo sapiens
  misc_RNA (1)...(19): siRNA sense strand
cagaugcccuacacagaag

SEQ ID NO: 1790790 - RNA, 19 nt, Homo sapiens
  misc_RNA (1)...(19): siRNA sense strand
cacagaagccaccaucaug

SEQ ID NO: 1790791 - RNA, 19 nt, Homo sapiens
  misc_RNA (1)...(19): siRNA sense strand
ugugaaagcagaaaugcaa

SEQ ID NO: 1790792 - RNA, 19 nt, Homo sapiens
  misc_RNA (1)...(19): siRNA sense strand
gaagugcagaggcuaacug

SEQ ID NO: 1790793 - RNA, 19 nt, Homo sapiens
  misc_RNA (1)...(19): siRNA sense strand
cuaauagugaguucaagaa

SEQ ID NO: 1790794 - RNA, 19 nt, Homo sapiens
  misc_RNA (1)...(19): siRNA sense strand
ggcagcaucuucagcuucu

SEQ ID NO: 1790795 - RNA, 19 nt, Homo sapiens
  misc_RNA (1)...(19): siRNA sense strand
cagcaucuucagcuucuuu

SEQ ID NO: 1790796 - RNA, 19 nt, Homo sapiens
  misc_RNA (1)...(19): siRNA sense strand
aggaaguucucucauucaa

SEQ ID NO: 1790797 - RNA, 19 nt, Homo sapiens
  misc_RNA (1)...(19): siRNA sense strand
acauaugcccuuggcuuua

SEQ ID NO: 1790798 - RNA, 19 nt, Homo sapiens
  misc_RNA (1)...(19): siRNA sense strand
ugccgucucuaacaucauu

SEQ ID NO: 1790799 - RNA, 19 nt, Homo sapiens
  misc_RNA (1)...(19): siRNA sense strand
ucacgaggccuagaaaucu

SEQ ID NO: 1790800 - RNA, 19 nt, Homo sapiens
  misc_RNA (1)...(19): siRNA sense strand
gaaaaggauauaaccaguu

SEQ ID NO: 1790801 - RNA, 19 nt, Homo sapiens
  misc_RNA (1)...(19): siRNA sense strand
ccucauaugaccucagaga

SEQ ID NO: 1790802 - RNA, 19 nt, Homo sapiens
  misc_RNA (1)...(19): siRNA sense strand
gcugcuaugcggccucgua

SEQ ID NO: 1790803 - RNA, 19 nt, Homo sapiens
  misc_RNA (1)...(19): siRNA sense strand
uggaccauuuaaggaauua

SEQ ID NO: 1790804 - RNA, 19 nt, Homo sapiens
  misc_RNA (1)...(19): siRNA sense strand
ggacuucauagacauguac

SEQ ID NO: 1790805 - RNA, 19 nt, Homo sapiens
  misc_RNA (1)...(19): siRNA sense strand
gccuagaaaucugucugaa

SEQ ID NO: 1790806 - RNA, 19 nt, Homo sapiens
  misc_RNA (1)...(19): siRNA sense strand
gauugaucccucggucaua

SEQ ID NO: 1790807 - RNA, 19 nt, Homo sapiens
  misc_RNA (1)...(19): siRNA sense strand
ucacagacaaggcccagau

SEQ ID NO: 1790808 - RNA, 19 nt, Homo sapiens
  misc_RNA (1)...(19): siRNA sense strand
caaauaugugaaagcagaa

SEQ ID NO: 1790809 - RNA, 19 nt, Homo sapiens
  misc_RNA (1)...(19): siRNA sense strand
auaccacaacuaacucuuu

SEQ ID NO: 1790810 - RNA, 19 nt, Homo sapiens
  misc_RNA (1)...(19): siRNA sense strand
caucuucagcuucuuuauc

SEQ ID NO: 1790811 - RNA, 19 nt, Homo sapiens
  misc_RNA (1)...(19): siRNA sense strand
ucauucaacucuucgucau

SEQ ID NO: 1790812 - RNA, 19 nt, Homo sapiens
  misc_RNA (1)...(19): siRNA sense strand
acacagaagccaccaucau

SEQ ID NO: 1790813 - RNA, 19 nt, Homo sapiens
  misc_RNA (1)...(19): siRNA sense strand
ggccuagaaaucugucuga

SEQ ID NO: 1790814 - RNA, 19 nt, Homo sapiens
  misc_RNA (1)...(19): siRNA sense strand
gucaaguccuccuggucaa

SEQ ID NO: 1790815 - RNA, 19 nt, Homo sapiens
  misc_RNA (1)...(19): siRNA sense strand
aacauaugcccuuggcuuu

SEQ ID NO: 1790816 - RNA, 19 nt, Homo sapiens
  misc_RNA (1)...(19): siRNA sense strand
gaaaagguucaugaagaaa

SEQ ID NO: 1790817 - RNA, 19 nt, Homo sapiens
  misc_RNA (1)...(19): siRNA sense strand
gugaaagcagaaaugcaaa

SEQ ID NO: 1790818 - RNA, 19 nt, Homo sapiens
  misc_RNA (1)...(19): siRNA sense strand
gguggugccgcuugccauu

SEQ ID NO: 1790819 - RNA, 19 nt, Homo sapiens
  misc_RNA (1)...(19): siRNA sense strand
cacgaggccuagaaaucug

SEQ ID NO: 1790820 - RNA, 19 nt, Homo sapiens
  misc_RNA (1)...(19): siRNA sense strand
caaaggaaguucucucauu

SEQ ID NO: 1790821 - RNA, 19 nt, Homo sapiens
  misc_RNA (1)...(19): siRNA sense strand
gauauaaccaguuuccuua

SEQ ID NO: 1790822 - RNA, 19 nt, Homo sapiens
  misc_RNA (1)...(19): siRNA sense strand
ggacugauaccacaacuaa

SEQ ID NO: 1790823 - RNA, 19 nt, Homo sapiens
  misc_RNA (1)...(19): siRNA sense strand
cuagaaaucugucugaaca

SEQ ID NO: 1790824 - RNA, 19 nt, Homo sapiens
  misc_RNA (1)...(19): siRNA sense strand
gcaaugccgucucuaacau

SEQ ID NO: 1790825 - RNA, 19 nt, Homo sapiens
  misc_RNA (1)...(19): siRNA sense strand
aaaggaaguucucucauuc

SEQ ID NO: 1790826 - RNA, 19 nt, Homo sapiens
  misc_RNA (1)...(19): siRNA sense strand
gagagaacccucaggacuu

SEQ ID NO: 1790827 - RNA, 19 nt, Homo sapiens
  misc_RNA (1)...(19): siRNA sense strand
gaaauugaaagagucauug

SEQ ID NO: 1790828 - RNA, 19 nt, Homo sapiens
  misc_RNA (1)...(19): siRNA sense strand
ggauauaaccaguuuccuu

SEQ ID NO: 1790829 - RNA, 19 nt, Homo sapiens
  misc_RNA (1)...(19): siRNA sense strand
gaagaaauugaaagaguca

SEQ ID NO: 1790830 - RNA, 19 nt, Homo sapiens
  misc_RNA (1)...(19): siRNA sense strand
ccaagauuauugaggaguu

SEQ ID NO: 1790831 - RNA, 19 nt, Homo sapiens
  misc_RNA (1)...(19): siRNA sense strand
ccucaggacuucauagaca

SEQ ID NO: 1790832 - RNA, 19 nt, Homo sapiens
  misc_RNA (1)...(19): siRNA sense strand
cauaugcccuuggcuuuau

SEQ ID NO: 1790833 - RNA, 19 nt, Homo sapiens
  misc_RNA (1)...(19): siRNA sense strand
cauaugaccucagagaaca

SEQ ID NO: 1790834 - RNA, 19 nt, Homo sapiens
  misc_RNA (1)...(19): siRNA sense strand
caucaaagaccaucaagag

SEQ ID NO: 1790835 - RNA, 19 nt, Homo sapiens
  misc_RNA (1)...(19): siRNA sense strand
ccagaugcccuacacagaa

SEQ ID NO: 1790836 - RNA, 19 nt, Homo sapiens
  misc_RNA (1)...(19): siRNA sense strand
ggccagcgcuuugauuaca

SEQ ID NO: 1790837 - RNA, 19 nt, Homo sapiens
  misc_RNA (1)...(19): siRNA sense strand
gaaccccgauguacaagaa

SEQ ID NO: 1790838 - RNA, 19 nt, Homo sapiens
  misc_RNA (1)...(19): siRNA sense strand
uaacagcaguuuugaugaa

SEQ ID NO: 1790839 - RNA, 19 nt, Homo sapiens
  misc_RNA (1)...(19): siRNA sense strand
uaccacaacuaacucuuug

SEQ ID NO: 1790840 - RNA, 19 nt, Homo sapiens
  misc_RNA (1)...(19): siRNA sense strand
ucuggugccugcuguauau

SEQ ID NO: 1790841 - RNA, 19 nt, Homo sapiens
  misc_RNA (1)...(19): siRNA sense strand
auucaacucuucgucauuu

SEQ ID NO: 1790842 - RNA, 19 nt, Homo sapiens
  misc_RNA (1)...(19): siRNA sense strand
aagaaaagguucaugaaga

SEQ ID NO: 1790843 - RNA, 19 nt, Homo sapiens
  misc_RNA (1)...(19): siRNA sense strand
ggagacaacaaaggaaguu

SEQ ID NO: 1790844 - RNA, 19 nt, Homo sapiens
  misc_RNA (1)...(19): siRNA sense strand
caucagcaaugccgucucu

SEQ ID NO: 1790845 - RNA, 19 nt, Homo sapiens
  misc_RNA (1)...(19): siRNA sense strand
gcccuuggcuuuauuaccu

SEQ ID NO: 1790846 - RNA, 19 nt, Homo sapiens
  misc_RNA (1)...(19): siRNA sense strand
agaaaagguucaugaagaa

SEQ ID NO: 1790847 - RNA, 19 nt, Homo sapiens
  misc_RNA (1)...(19): siRNA sense strand
gaacccucaggacuucaua

SEQ ID NO: 1790848 - RNA, 19 nt, Homo sapiens
  misc_RNA (1)...(19): siRNA sense strand
agagaacccucaggacuuc

SEQ ID NO: 1790849 - RNA, 19 nt, Homo sapiens
  misc_RNA (1)...(19): siRNA sense strand
uuuauuaccuucccuuugg

SEQ ID NO: 1790850 - RNA, 19 nt, Homo sapiens
  misc_RNA (1)...(19): siRNA sense strand
gaggaguucaaauauguga

SEQ ID NO: 1790851 - RNA, 19 nt, Homo sapiens
  misc_RNA (1)...(19): siRNA sense strand
ucauagacauguaccuucu

SEQ ID NO: 1790852 - RNA, 19 nt, Homo sapiens
  misc_RNA (1)...(19): siRNA sense strand
ucagcaaugccgucucuaa

SEQ ID NO: 1790853 - RNA, 19 nt, Homo sapiens
  misc_RNA (1)...(19): siRNA sense strand
caagauuauugaggaguuc

SEQ ID NO: 1790854 - RNA, 19 nt, Homo sapiens
  misc_RNA (1)...(19): siRNA sense strand
ccgcuugccauuccucaua

SEQ ID NO: 1790855 - RNA, 19 nt, Homo sapiens
  misc_RNA (1)...(19): siRNA sense strand
cagaugcccuacacagaag

SEQ ID NO: 1790856 - RNA, 19 nt, Homo sapiens
  misc_RNA (1)...(19): siRNA sense strand
cacagaagccaccaucaug

SEQ ID NO: 1790857 - RNA, 19 nt, Homo sapiens
  misc_RNA (1)...(19): siRNA sense strand
ugugaaagcagaaaugcaa

SEQ ID NO: 1790858 - RNA, 19 nt, Homo sapiens
  misc_RNA (1)...(19): siRNA sense strand
gaagugcagaggcuaacug

SEQ ID NO: 1790859 - RNA, 19 nt, Homo sapiens
  misc_RNA (1)...(19): siRNA sense strand
cuaauagugaguucaagaa

SEQ ID NO: 1790860 - RNA, 19 nt, Homo sapiens
  misc_RNA (1)...(19): siRNA sense strand
ggcagcaucuucagcuucu

SEQ ID NO: 1790861 - RNA, 19 nt, Homo sapiens
  misc_RNA (1)...(19): siRNA sense strand
cagcaucuucagcuucuuu

SEQ ID NO: 1790862 - RNA, 19 nt, Homo sapiens
  misc_RNA (1)...(19): siRNA sense strand
aggaaguucucucauucaa

SEQ ID NO: 1790863 - RNA, 19 nt, Homo sapiens
  misc_RNA (1)...(19): siRNA sense strand
acauaugcccuuggcuuua

SEQ ID NO: 1790864 - RNA, 19 nt, Homo sapiens
  misc_RNA (1)...(19): siRNA sense strand
ugccgucucuaacaucauu

SEQ ID NO: 1790865 - RNA, 19 nt, Homo sapiens
  misc_RNA (1)...(19): siRNA sense strand
ucacgaggccuagaaaucu

SEQ ID NO: 1790866 - RNA, 19 nt, Homo sapiens
  misc_RNA (1)...(19): siRNA sense strand
gaaaaggauauaaccaguu

SEQ ID NO: 1790867 - RNA, 19 nt, Homo sapiens
  misc_RNA (1)...(19): siRNA sense strand
ccucauaugaccucagaga

SEQ ID NO: 1790868 - RNA, 19 nt, Homo sapiens
  misc_RNA (1)...(19): siRNA sense strand
gcugcuaugcggccucgua

SEQ ID NO: 1790869 - RNA, 19 nt, Homo sapiens
  misc_RNA (1)...(19): siRNA sense strand
uggaccauuuaaggaauua

SEQ ID NO: 1790870 - RNA, 19 nt, Homo sapiens
  misc_RNA (1)...(19): siRNA sense strand
ggacuucauagacauguac

SEQ ID NO: 1790871 - RNA, 19 nt, Homo sapiens
  misc_RNA (1)...(19): siRNA sense strand
gccuagaaaucugucugaa

SEQ ID NO: 1790872 - RNA, 19 nt, Homo sapiens
  misc_RNA (1)...(19): siRNA sense strand
gauugaucccucggucaua

SEQ ID NO: 1790873 - RNA, 19 nt, Homo sapiens
  misc_RNA (1)...(19): siRNA sense strand
ucacagacaaggcccagau

SEQ ID NO: 1790874 - RNA, 19 nt, Homo sapiens
  misc_RNA (1)...(19): siRNA sense strand
caaauaugugaaagcagaa

SEQ ID NO: 1790875 - RNA, 19 nt, Homo sapiens
  misc_RNA (1)...(19): siRNA sense strand
auaccacaacuaacucuuu

SEQ ID NO: 1790876 - RNA, 19 nt, Homo sapiens
  misc_RNA (1)...(19): siRNA sense strand
caucuucagcuucuuuauc

SEQ ID NO: 1790877 - RNA, 19 nt, Homo sapiens
  misc_RNA (1)...(19): siRNA sense strand
ucauucaacucuucgucau

SEQ ID NO: 1790878 - RNA, 19 nt, Homo sapiens
  misc_RNA (1)...(19): siRNA sense strand
acacagaagccaccaucau

SEQ ID NO: 1790879 - RNA, 19 nt, Homo sapiens
  misc_RNA (1)...(19): siRNA sense strand
ggccuagaaaucugucuga

SEQ ID NO: 1790880 - RNA, 19 nt, Homo sapiens
  misc_RNA (1)...(19): siRNA sense strand
gucaaguccuccuggucaa

SEQ ID NO: 1790881 - RNA, 19 nt, Homo sapiens
  misc_RNA (1)...(19): siRNA sense strand
aacauaugcccuuggcuuu

SEQ ID NO: 1790882 - RNA, 19 nt, Homo sapiens
  misc_RNA (1)...(19): siRNA sense strand
gaaaagguucaugaagaaa

SEQ ID NO: 1790883 - RNA, 19 nt, Homo sapiens
  misc_RNA (1)...(19): siRNA sense strand
gugaaagcagaaaugcaaa

SEQ ID NO: 1790884 - RNA, 19 nt, Homo sapiens
  misc_RNA (1)...(19): siRNA sense strand
gguggugccgcuugccauu

SEQ ID NO: 1790885 - RNA, 19 nt, Homo sapiens
  misc_RNA (1)...(19): siRNA sense strand
cacgaggccuagaaaucug

SEQ ID NO: 1790886 - RNA, 19 nt, Homo sapiens
  misc_RNA (1)...(19): siRNA sense strand
ggaaggcccucgagcagaa

SEQ ID NO: 1790887 - RNA, 19 nt, Homo sapiens
  misc_RNA (1)...(19): siRNA sense strand
gaucagcgaugguguagag

SEQ ID NO: 1790888 - RNA, 19 nt, Homo sapiens
  misc_RNA (1)...(19): siRNA sense strand
caaugacuaugaugaauuc

SEQ ID NO: 1790889 - RNA, 19 nt, Homo sapiens
  misc_RNA (1)...(19): siRNA sense strand
gccaggagcucagggacua

SEQ ID NO: 1790890 - RNA, 19 nt, Homo sapiens
  misc_RNA (1)...(19): siRNA sense strand
uaccagcgcucccaugaug

SEQ ID NO: 1790891 - RNA, 19 nt, Homo sapiens
  misc_RNA (1)...(19): siRNA sense strand
ggacgaguacugucucaug

SEQ ID NO: 1790892 - RNA, 19 nt, Homo sapiens
  misc_RNA (1)...(19): siRNA sense strand
agacaacaguuaugacaca

SEQ ID NO: 1790893 - RNA, 19 nt, Homo sapiens
  misc_RNA (1)...(19): siRNA sense strand
gaugugcucuccguauguu

SEQ ID NO: 1790894 - RNA, 19 nt, Homo sapiens
  misc_RNA (1)...(19): siRNA sense strand
ccacaaugacuaugaugaa

SEQ ID NO: 1790895 - RNA, 19 nt, Homo sapiens
  misc_RNA (1)...(19): siRNA sense strand
gaucguggcaggacaguuc

SEQ ID NO: 1790896 - RNA, 19 nt, Homo sapiens
  misc_RNA (1)...(19): siRNA sense strand
gacgaguacugucucaugu

SEQ ID NO: 1790897 - RNA, 19 nt, Homo sapiens
  misc_RNA (1)...(19): siRNA sense strand
ucaccuggcuuuacuucug

SEQ ID NO: 1790898 - RNA, 19 nt, Homo sapiens
  misc_RNA (1)...(19): siRNA sense strand
guguagaggucuccgaugu

SEQ ID NO: 1790899 - RNA, 19 nt, Homo sapiens
  misc_RNA (1)...(19): siRNA sense strand
gcucccggcuuccaacaga

SEQ ID NO: 1790900 - RNA, 19 nt, Homo sapiens
  misc_RNA (1)...(19): siRNA sense strand
ggaccacccugcagagacu

SEQ ID NO: 1790901 - RNA, 19 nt, Homo sapiens
  misc_RNA (1)...(19): siRNA sense strand
ggccagugguuccugaaga

SEQ ID NO: 1790902 - RNA, 19 nt, Homo sapiens
  misc_RNA (1)...(19): siRNA sense strand
gugaaccucuacacaguca

SEQ ID NO: 1790903 - RNA, 19 nt, Homo sapiens
  misc_RNA (1)...(19): siRNA sense strand
cuacaacccugagcagauc

SEQ ID NO: 1790904 - RNA, 19 nt, Homo sapiens
  misc_RNA (1)...(19): siRNA sense strand
gcuccucaccuucaccuuu

SEQ ID NO: 1790905 - RNA, 19 nt, Homo sapiens
  misc_RNA (1)...(19): siRNA sense strand
ugacuaugaugaauucaac

SEQ ID NO: 1790906 - RNA, 19 nt, Homo sapiens
  misc_RNA (1)...(19): siRNA sense strand
guucagacaacaguuauga

SEQ ID NO: 1790907 - RNA, 19 nt, Homo sapiens
  misc_RNA (1)...(19): siRNA sense strand
cacaaugacuaugaugaau

SEQ ID NO: 1790908 - RNA, 19 nt, Homo sapiens
  misc_RNA (1)...(19): siRNA sense strand
augaugaauucaacuggua

SEQ ID NO: 1790909 - RNA, 19 nt, Homo sapiens
  misc_RNA (1)...(19): siRNA sense strand
gcuaccagcgcucccauga

SEQ ID NO: 1790910 - RNA, 19 nt, Homo sapiens
  misc_RNA (1)...(19): siRNA sense strand
caggugaccauucucugua

SEQ ID NO: 1790911 - RNA, 19 nt, Homo sapiens
  misc_RNA (1)...(19): siRNA sense strand
ucaccaugcucuccuggau

SEQ ID NO: 1790912 - RNA, 19 nt, Homo sapiens
  misc_RNA (1)...(19): siRNA sense strand
ccgaugugcucuccguaug

SEQ ID NO: 1790913 - RNA, 19 nt, Homo sapiens
  misc_RNA (1)...(19): siRNA sense strand
acaccaagacccucauaga

SEQ ID NO: 1790914 - RNA, 19 nt, Homo sapiens
  misc_RNA (1)...(19): siRNA sense strand
gcuacaacccugagcagau

SEQ ID NO: 1790915 - RNA, 19 nt, Homo sapiens
  misc_RNA (1)...(19): siRNA sense strand
gggaggugcugcugaucuc

SEQ ID NO: 1790916 - RNA, 19 nt, Homo sapiens
  misc_RNA (1)...(19): siRNA sense strand
ccacaccaagacccucaua

SEQ ID NO: 1790917 - RNA, 19 nt, Homo sapiens
  misc_RNA (1)...(19): siRNA sense strand
ugaaggagaagcuuauuuu

SEQ ID NO: 1790918 - RNA, 19 nt, Homo sapiens
  misc_RNA (1)...(19): siRNA sense strand
ucccauccgucaccucuga

SEQ ID NO: 1790919 - RNA, 19 nt, Homo sapiens
  misc_RNA (1)...(19): siRNA sense strand
ccacagagaggcccagaac

SEQ ID NO: 1790920 - RNA, 19 nt, Homo sapiens
  misc_RNA (1)...(19): siRNA sense strand
ucagacaacaguuaugaca

SEQ ID NO: 1790921 - RNA, 19 nt, Homo sapiens
  misc_RNA (1)...(19): siRNA sense strand
ccacacugcugcucaaccu

SEQ ID NO: 1790922 - RNA, 19 nt, Homo sapiens
  misc_RNA (1)...(19): siRNA sense strand
gcaucuucgugcuccagaa

SEQ ID NO: 1790923 - RNA, 19 nt, Homo sapiens
  misc_RNA (1)...(19): siRNA sense strand
ggacgucagcaucaugaag

SEQ ID NO: 1790924 - RNA, 19 nt, Homo sapiens
  misc_RNA (1)...(19): siRNA sense strand
caacugguaccucuacaac

SEQ ID NO: 1790925 - RNA, 19 nt, Homo sapiens
  misc_RNA (1)...(19): siRNA sense strand
agagaucagcgauggugua

SEQ ID NO: 1790926 - RNA, 19 nt, Homo sapiens
  misc_RNA (1)...(19): siRNA sense strand
ccuggaaccugagugugaa

SEQ ID NO: 1790927 - RNA, 19 nt, Homo sapiens
  misc_RNA (1)...(19): siRNA sense strand
caacguggaggaggaguuc

SEQ ID NO: 1790928 - RNA, 19 nt, Homo sapiens
  misc_RNA (1)...(19): siRNA sense strand
gcccagaaccaguccaucu

SEQ ID NO: 1790929 - RNA, 19 nt, Homo sapiens
  misc_RNA (1)...(19): siRNA sense strand
caacgcaccguggcucuuc

SEQ ID NO: 1790930 - RNA, 19 nt, Homo sapiens
  misc_RNA (1)...(19): siRNA sense strand
cuccucaccuucaccuuug

SEQ ID NO: 1790931 - RNA, 19 nt, Homo sapiens
  misc_RNA (1)...(19): siRNA sense strand
ccaggugaccauucucugu

SEQ ID NO: 1790932 - RNA, 19 nt, Homo sapiens
  misc_RNA (1)...(19): siRNA sense strand
gacaacaguuaugacacau

SEQ ID NO: 1790933 - RNA, 19 nt, Homo sapiens
  misc_RNA (1)...(19): siRNA sense strand
gagaucagcgaugguguag

SEQ ID NO: 1790934 - RNA, 19 nt, Homo sapiens
  misc_RNA (1)...(19): siRNA sense strand
ucaugaaggagaagcuuau

SEQ ID NO: 1790935 - RNA, 19 nt, Homo sapiens
  misc_RNA (1)...(19): siRNA sense strand
agugguuccugaagacuga

SEQ ID NO: 1790936 - RNA, 19 nt, Homo sapiens
  misc_RNA (1)...(19): siRNA sense strand
gcuccaggcugacauuacc

SEQ ID NO: 1790937 - RNA, 19 nt, Homo sapiens
  misc_RNA (1)...(19): siRNA sense strand
gaaccucuacacagucaac

SEQ ID NO: 1790938 - RNA, 19 nt, Homo sapiens
  misc_RNA (1)...(19): siRNA sense strand
caccaagacccucauagag

SEQ ID NO: 1790939 - RNA, 19 nt, Homo sapiens
  misc_RNA (1)...(19): siRNA sense strand
ucagcaucaugaaggagaa

SEQ ID NO: 1790940 - RNA, 19 nt, Homo sapiens
  misc_RNA (1)...(19): siRNA sense strand
gcacuggcugcacaagauc

SEQ ID NO: 1790941 - RNA, 19 nt, Homo sapiens
  misc_RNA (1)...(19): siRNA sense strand
agacaucaggcuccaagga

SEQ ID NO: 1790942 - RNA, 19 nt, Homo sapiens
  misc_RNA (1)...(19): siRNA sense strand
acagagaggcccagaacca

SEQ ID NO: 1790943 - RNA, 19 nt, Homo sapiens
  misc_RNA (1)...(19): siRNA sense strand
gcaucauggagaagaaaga

SEQ ID NO: 1790944 - RNA, 19 nt, Homo sapiens
  misc_RNA (1)...(19): siRNA sense strand
gcucaccuggcuuuacuuc

SEQ ID NO: 1790945 - RNA, 19 nt, Homo sapiens
  misc_RNA (1)...(19): siRNA sense strand
ugaccauucucuguaccuu

SEQ ID NO: 1790946 - RNA, 19 nt, Homo sapiens
  misc_RNA (1)...(19): siRNA sense strand
gccagugguuccugaagac

SEQ ID NO: 1790947 - RNA, 19 nt, Homo sapiens
  misc_RNA (1)...(19): siRNA sense strand
gggcuccaggcugacauua

SEQ ID NO: 1790948 - RNA, 19 nt, Homo sapiens
  misc_RNA (1)...(19): siRNA sense strand
caaaguaaguggugacaaa

SEQ ID NO: 1790949 - RNA, 19 nt, Homo sapiens
  misc_RNA (1)...(19): siRNA sense strand
ggacaucucuggccacaug

SEQ ID NO: 1790950 - RNA, 19 nt, Homo sapiens
  misc_RNA (1)...(19): siRNA sense strand
gcacugcaguaacuuuaaa

SEQ ID NO: 1790951 - RNA, 19 nt, Homo sapiens
  misc_RNA (1)...(19): siRNA sense strand
ggagaaacaucaauuacag

SEQ ID NO: 1790952 - RNA, 19 nt, Homo sapiens
  misc_RNA (1)...(19): siRNA sense strand
agaagaagcugcuggacaa

SEQ ID NO: 1790953 - RNA, 19 nt, Homo sapiens
  misc_RNA (1)...(19): siRNA sense strand
gcgagauguuccucaauuu

SEQ ID NO: 1790954 - RNA, 19 nt, Homo sapiens
  misc_RNA (1)...(19): siRNA sense strand
ggaucgagguuuccuacaa

SEQ ID NO: 1790955 - RNA, 19 nt, Homo sapiens
  misc_RNA (1)...(19): siRNA sense strand
caaccugggcccuguauaa

SEQ ID NO: 1790956 - RNA, 19 nt, Homo sapiens
  misc_RNA (1)...(19): siRNA sense strand
gaucgagguuuccuacaau

SEQ ID NO: 1790957 - RNA, 19 nt, Homo sapiens
  misc_RNA (1)...(19): siRNA sense strand
gagcacugcaguaacuuua

SEQ ID NO: 1790958 - RNA, 19 nt, Homo sapiens
  misc_RNA (1)...(19): siRNA sense strand
gcacauuccagccuacaaa

SEQ ID NO: 1790959 - RNA, 19 nt, Homo sapiens
  misc_RNA (1)...(19): siRNA sense strand
ugaauggcauggaauccua

SEQ ID NO: 1790960 - RNA, 19 nt, Homo sapiens
  misc_RNA (1)...(19): siRNA sense strand
gaacgcugccuguaacuuc

SEQ ID NO: 1790961 - RNA, 19 nt, Homo sapiens
  misc_RNA (1)...(19): siRNA sense strand
gacaggaacauucaaguga

SEQ ID NO: 1790962 - RNA, 19 nt, Homo sapiens
  misc_RNA (1)...(19): siRNA sense strand
cuagagaacugcagcaucu

SEQ ID NO: 1790963 - RNA, 19 nt, Homo sapiens
  misc_RNA (1)...(19): siRNA sense strand
ugaaggaauucccagagaa

SEQ ID NO: 1790964 - RNA, 19 nt, Homo sapiens
  misc_RNA (1)...(19): siRNA sense strand
ucaagugccacaaauauga

SEQ ID NO: 1790965 - RNA, 19 nt, Homo sapiens
  misc_RNA (1)...(19): siRNA sense strand
uguauaaccucgugucugu

SEQ ID NO: 1790966 - RNA, 19 nt, Homo sapiens
  misc_RNA (1)...(19): siRNA sense strand
gcauugagccuuccaagag

SEQ ID NO: 1790967 - RNA, 19 nt, Homo sapiens
  misc_RNA (1)...(19): siRNA sense strand
gagaagcuguccgccaaga

SEQ ID NO: 1790968 - RNA, 19 nt, Homo sapiens
  misc_RNA (1)...(19): siRNA sense strand
acuaaugacuucccaguuc

SEQ ID NO: 1790969 - RNA, 19 nt, Homo sapiens
  misc_RNA (1)...(19): siRNA sense strand
gaacauggacacgucuaga

SEQ ID NO: 1790970 - RNA, 19 nt, Homo sapiens
  misc_RNA (1)...(19): siRNA sense strand
ugagggacauaauuaagau

SEQ ID NO: 1790971 - RNA, 19 nt, Homo sapiens
  misc_RNA (1)...(19): siRNA sense strand
gagauguuccucaauuuca

SEQ ID NO: 1790972 - RNA, 19 nt, Homo sapiens
  misc_RNA (1)...(19): siRNA sense strand
cuucugagggacauaauua

SEQ ID NO: 1790973 - RNA, 19 nt, Homo sapiens
  misc_RNA (1)...(19): siRNA sense strand
gcccucugcugaucaaaga

SEQ ID NO: 1790974 - RNA, 19 nt, Homo sapiens
  misc_RNA (1)...(19): siRNA sense strand
ugaagaggccgcugcaguu

SEQ ID NO: 1790975 - RNA, 19 nt, Homo sapiens
  misc_RNA (1)...(19): siRNA sense strand
guacugcccucugcugauc

SEQ ID NO: 1790976 - RNA, 19 nt, Homo sapiens
  misc_RNA (1)...(19): siRNA sense strand
ggugaacgcugccuguaac

SEQ ID NO: 1790977 - RNA, 19 nt, Homo sapiens
  misc_RNA (1)...(19): siRNA sense strand
gaauguggcagaagugaag

SEQ ID NO: 1790978 - RNA, 19 nt, Homo sapiens
  misc_RNA (1)...(19): siRNA sense strand
gaaggaauucccagagaag

SEQ ID NO: 1790979 - RNA, 19 nt, Homo sapiens
  misc_RNA (1)...(19): siRNA sense strand
ggagugcccuguggaacau

SEQ ID NO: 1790980 - RNA, 19 nt, Homo sapiens
  misc_RNA (1)...(19): siRNA sense strand
ccaagagccugcagacacu

SEQ ID NO: 1790981 - RNA, 19 nt, Homo sapiens
  misc_RNA (1)...(19): siRNA sense strand
gccgcucucuucuaccuaa

SEQ ID NO: 1790982 - RNA, 19 nt, Homo sapiens
  misc_RNA (1)...(19): siRNA sense strand
caggucauuugaaccaauu

SEQ ID NO: 1790983 - RNA, 19 nt, Homo sapiens
  misc_RNA (1)...(19): siRNA sense strand
cuaaugacuucccaguuca

SEQ ID NO: 1790984 - RNA, 19 nt, Homo sapiens
  misc_RNA (1)...(19): siRNA sense strand
gaagaggccgcugcaguuc

SEQ ID NO: 1790985 - RNA, 19 nt, Homo sapiens
  misc_RNA (1)...(19): siRNA sense strand
ugcgagauguuccucaauu

SEQ ID NO: 1790986 - RNA, 19 nt, Homo sapiens
  misc_RNA (1)...(19): siRNA sense strand
cauuccagccuacaaagua

SEQ ID NO: 1790987 - RNA, 19 nt, Homo sapiens
  misc_RNA (1)...(19): siRNA sense strand
ccuaacaaauuccgaguac

SEQ ID NO: 1790988 - RNA, 19 nt, Homo sapiens
  misc_RNA (1)...(19): siRNA sense strand
ccucaagugccacaaauau

SEQ ID NO: 1790989 - RNA, 19 nt, Homo sapiens
  misc_RNA (1)...(19): siRNA sense strand
uggacugccugaaggaauu

SEQ ID NO: 1790990 - RNA, 19 nt, Homo sapiens
  misc_RNA (1)...(19): siRNA sense strand
caggaacugcauaggaaua

SEQ ID NO: 1790991 - RNA, 19 nt, Homo sapiens
  misc_RNA (1)...(19): siRNA sense strand
uuaaagaggagaacaugga

SEQ ID NO: 1790992 - RNA, 19 nt, Homo sapiens
  misc_RNA (1)...(19): siRNA sense strand
ggaauaugcuaggacuuuu

SEQ ID NO: 1790993 - RNA, 19 nt, Homo sapiens
  misc_RNA (1)...(19): siRNA sense strand
gagcuucuucagccucuuu

SEQ ID NO: 1790994 - RNA, 19 nt, Homo sapiens
  misc_RNA (1)...(19): siRNA sense strand
acauggacacgucuagaua

SEQ ID NO: 1790995 - RNA, 19 nt, Homo sapiens
  misc_RNA (1)...(19): siRNA sense strand
ugauugagcacugcaguaa

SEQ ID NO: 1790996 - RNA, 19 nt, Homo sapiens
  misc_RNA (1)...(19): siRNA sense strand
ggcaggagaccaaggaaau

SEQ ID NO: 1790997 - RNA, 19 nt, Homo sapiens
  misc_RNA (1)...(19): siRNA sense strand
cugaaggaauucccagaga

SEQ ID NO: 1790998 - RNA, 19 nt, Homo sapiens
  misc_RNA (1)...(19): siRNA sense strand
gcuaccugcuggacaagga

SEQ ID NO: 1790999 - RNA, 19 nt, Homo sapiens
  misc_RNA (1)...(19): siRNA sense strand
gcccucaagugccacaaau

SEQ ID NO: 1791000 - RNA, 19 nt, Homo sapiens
  misc_RNA (1)...(19): siRNA sense strand
agagcagcaucauaccuuu

SEQ ID NO: 1791001 - RNA, 19 nt, Homo sapiens
  misc_RNA (1)...(19): siRNA sense strand
gcucucuucuaccuaacaa

SEQ ID NO: 1791002 - RNA, 19 nt, Homo sapiens
  misc_RNA (1)...(19): siRNA sense strand
cagaugaaacuccugacaa

SEQ ID NO: 1791003 - RNA, 19 nt, Homo sapiens
  misc_RNA (1)...(19): siRNA sense strand
gcaggagaccaaggaaaug

SEQ ID NO: 1791004 - RNA, 19 nt, Homo sapiens
  misc_RNA (1)...(19): siRNA sense strand
guggagcuguaccugacua

SEQ ID NO: 1791005 - RNA, 19 nt, Homo sapiens
  misc_RNA (1)...(19): siRNA sense strand
ggaauguggcagaagugaa

SEQ ID NO: 1791006 - RNA, 19 nt, Homo sapiens
  misc_RNA (1)...(19): siRNA sense strand
ugauggcccucuguacuga

SEQ ID NO: 1791007 - RNA, 19 nt, Homo sapiens
  misc_RNA (1)...(19): siRNA sense strand
ggugcugaauggcauggaa

SEQ ID NO: 1791008 - RNA, 19 nt, Homo sapiens
  misc_RNA (1)...(19): siRNA sense strand
aaauaugacaggaacauuc

SEQ ID NO: 1791009 - RNA, 19 nt, Homo sapiens
  misc_RNA (1)...(19): siRNA sense strand
caaauaugacaggaacauu

SEQ ID NO: 1791010 - RNA, 19 nt, Homo sapiens
  misc_RNA (1)...(19): siRNA sense strand
gcucgucaaugaguaugug

SEQ ID NO: 1791011 - RNA, 19 nt, Homo sapiens
  misc_RNA (1)...(19): siRNA sense strand
agaugaaacuccugacaac

SEQ ID NO: 1791012 - RNA, 19 nt, Homo sapiens
  misc_RNA (1)...(19): siRNA sense strand
caggaacauucaagugaca

SEQ ID NO: 1791013 - RNA, 19 nt, Homo sapiens
  misc_RNA (1)...(19): siRNA sense strand
gccacaugauccuagagaa

SEQ ID NO: 1791014 - RNA, 19 nt, Homo sapiens
  misc_RNA (1)...(19): siRNA sense strand
ugacaggaacauucaagug

SEQ ID NO: 1791015 - RNA, 19 nt, Homo sapiens
  misc_RNA (1)...(19): siRNA sense strand
ugaccaugcugaagcugau

SEQ ID NO: 1791016 - RNA, 19 nt, Homo sapiens
  misc_RNA (1)...(19): siRNA sense strand
cgagauguuccucaauuuc

SEQ ID NO: 1791017 - RNA, 19 nt, Homo sapiens
  misc_RNA (1)...(19): siRNA sense strand
ucuucuaccuaacaaauuc

SEQ ID NO: 1791018 - RNA, 19 nt, Homo sapiens
  misc_RNA (1)...(19): siRNA sense strand
gagaacauggacacgucua

SEQ ID NO: 1791019 - RNA, 19 nt, Homo sapiens
  misc_RNA (1)...(19): siRNA sense strand
gagcugggacauaaacucu

SEQ ID NO: 1791020 - RNA, 19 nt, Homo sapiens
  misc_RNA (1)...(19): siRNA sense strand
aggaauaugcuaggacuuu

SEQ ID NO: 1791021 - RNA, 19 nt, Homo sapiens
  misc_RNA (1)...(19): siRNA sense strand
ccugacaacugcgagaugu

SEQ ID NO: 1791022 - RNA, 19 nt, Homo sapiens
  misc_RNA (1)...(19): siRNA sense strand
gcaguuccucgggcucuuu

SEQ ID NO: 1791023 - RNA, 19 nt, Homo sapiens
  misc_RNA (1)...(19): siRNA sense strand
caauuacaggucauuugaa

SEQ ID NO: 1791024 - RNA, 19 nt, Homo sapiens
  misc_RNA (1)...(19): siRNA sense strand
cggagaaacaucaauuaca

SEQ ID NO: 1791025 - RNA, 19 nt, Homo sapiens
  misc_RNA (1)...(19): siRNA sense strand
gagcuguaccugacuaacu

SEQ ID NO: 1791026 - RNA, 19 nt, Homo sapiens
  misc_RNA (1)...(19): siRNA sense strand
cuucggcuguacaaacauu

SEQ ID NO: 1791027 - RNA, 19 nt, Homo sapiens
  misc_RNA (1)...(19): siRNA sense strand
ggcguccucucccacauca

SEQ ID NO: 1791028 - RNA, 19 nt, Homo sapiens
  misc_RNA (1)...(19): siRNA sense strand
agauguuccucaauuucaa

SEQ ID NO: 1791029 - RNA, 19 nt, Homo sapiens
  misc_RNA (1)...(19): siRNA sense strand
ggucaucacggcccucaag

SEQ ID NO: 1791030 - RNA, 19 nt, Homo sapiens
  misc_RNA (1)...(19): siRNA sense strand
auuccagccuacaaaguaa

SEQ ID NO: 1791031 - RNA, 19 nt, Homo sapiens
  misc_RNA (1)...(19): siRNA sense strand
gcaaccugggcccuguaua

SEQ ID NO: 1791032 - RNA, 19 nt, Homo sapiens
  misc_RNA (1)...(19): siRNA sense strand
gggaauguggcagaaguga

SEQ ID NO: 1791033 - RNA, 19 nt, Homo sapiens
  misc_RNA (1)...(19): siRNA sense strand
ucaacggcaugaagcucuu

SEQ ID NO: 1791034 - RNA, 19 nt, Homo sapiens
  misc_RNA (1)...(19): siRNA sense strand
gagcaccggccugagauca

SEQ ID NO: 1791035 - RNA, 19 nt, Homo sapiens
  misc_RNA (1)...(19): siRNA sense strand
gagcagcaucauaccuuuc

SEQ ID NO: 1791036 - RNA, 19 nt, Homo sapiens
  misc_RNA (1)...(19): siRNA sense strand
gugauugagcacugcagua

SEQ ID NO: 1791037 - RNA, 19 nt, Homo sapiens
  misc_RNA (1)...(19): siRNA sense strand
aauuacaggucauuugaac

SEQ ID NO: 1791038 - RNA, 19 nt, Homo sapiens
  misc_RNA (1)...(19): siRNA sense strand
ugacaacugcgagauguuc

SEQ ID NO: 1791039 - RNA, 19 nt, Homo sapiens
  misc_RNA (1)...(19): siRNA sense strand
gccugacgcucugcaacuu

SEQ ID NO: 1791040 - RNA, 19 nt, Homo sapiens
  misc_RNA (1)...(19): siRNA sense strand
aauaugacaggaacauuca

SEQ ID NO: 1791041 - RNA, 19 nt, Homo sapiens
  misc_RNA (1)...(19): siRNA sense strand
cugagggacauaauuaaga

SEQ ID NO: 1791042 - RNA, 19 nt, Homo sapiens
  misc_RNA (1)...(19): siRNA sense strand
ugggcuaccugcuggacaa

SEQ ID NO: 1791043 - RNA, 19 nt, Homo sapiens
  misc_RNA (1)...(19): siRNA sense strand
acaggucauuugaaccaau

SEQ ID NO: 1791044 - RNA, 19 nt, Homo sapiens
  misc_RNA (1)...(19): siRNA sense strand
gcugauggcccucuguacu

SEQ ID NO: 1791045 - RNA, 19 nt, Homo sapiens
  misc_RNA (1)...(19): siRNA sense strand
gguagacaacgaccacaag

SEQ ID NO: 1791046 - RNA, 19 nt, Homo sapiens
  misc_RNA (1)...(19): siRNA sense strand
caucaauuacaggucauuu

SEQ ID NO: 1791047 - RNA, 19 nt, Homo sapiens
  misc_RNA (1)...(19): siRNA sense strand
agaagcugcuggacaagac

SEQ ID NO: 1791048 - RNA, 19 nt, Homo sapiens
  misc_RNA (1)...(19): siRNA sense strand
gaacuggauuugcuguuua

SEQ ID NO: 1791049 - RNA, 19 nt, Homo sapiens
  misc_RNA (1)...(19): siRNA sense strand
ucugugagcucuuuccuua

SEQ ID NO: 1791050 - RNA, 19 nt, Homo sapiens
  misc_RNA (1)...(19): siRNA sense strand
gaggcuagcuuggcugaua

SEQ ID NO: 1791051 - RNA, 19 nt, Homo sapiens
  misc_RNA (1)...(19): siRNA sense strand
gaucaaagcaauuggagaa

SEQ ID NO: 1791052 - RNA, 19 nt, Homo sapiens
  misc_RNA (1)...(19): siRNA sense strand
gaagugcuguucccucaau

SEQ ID NO: 1791053 - RNA, 19 nt, Homo sapiens
  misc_RNA (1)...(19): siRNA sense strand
cuaagcacaugucauauug

SEQ ID NO: 1791054 - RNA, 19 nt, Homo sapiens
  misc_RNA (1)...(19): siRNA sense strand
ggagagaucaaagcaauug

SEQ ID NO: 1791055 - RNA, 19 nt, Homo sapiens
  misc_RNA (1)...(19): siRNA sense strand
agaaaucugugagcucuuu

SEQ ID NO: 1791056 - RNA, 19 nt, Homo sapiens
  misc_RNA (1)...(19): siRNA sense strand
gcuaagcacaugucauauu

SEQ ID NO: 1791057 - RNA, 19 nt, Homo sapiens
  misc_RNA (1)...(19): siRNA sense strand
gcaccuucaugcuggcuaa

SEQ ID NO: 1791058 - RNA, 19 nt, Homo sapiens
  misc_RNA (1)...(19): siRNA sense strand
guggagagaucaaagcaau

SEQ ID NO: 1791059 - RNA, 19 nt, Homo sapiens
  misc_RNA (1)...(19): siRNA sense strand
gcaacaggcuaagcacaug

SEQ ID NO: 1791060 - RNA, 19 nt, Homo sapiens
  misc_RNA (1)...(19): siRNA sense strand
gagcgcugcuaucugauga

SEQ ID NO: 1791061 - RNA, 19 nt, Homo sapiens
  misc_RNA (1)...(19): siRNA sense strand
caaagcaauuggagaacug

SEQ ID NO: 1791062 - RNA, 19 nt, Homo sapiens
  misc_RNA (1)...(19): siRNA sense strand
agugagcgcugcuaucuga

SEQ ID NO: 1791063 - RNA, 19 nt, Homo sapiens
  misc_RNA (1)...(19): siRNA sense strand
aagcacaugucauauugaa

SEQ ID NO: 1791064 - RNA, 19 nt, Homo sapiens
  misc_RNA (1)...(19): siRNA sense strand
gauagguuccagccuuaua

SEQ ID NO: 1791065 - RNA, 19 nt, Homo sapiens
  misc_RNA (1)...(19): siRNA sense strand
aggcuaagcacaugucaua

SEQ ID NO: 1791066 - RNA, 19 nt, Homo sapiens
  misc_RNA (1)...(19): siRNA sense strand
agaacuggauuugcuguuu

SEQ ID NO: 1791067 - RNA, 19 nt, Homo sapiens
  misc_RNA (1)...(19): siRNA sense strand
gcaauuggagaacuggauu

SEQ ID NO: 1791068 - RNA, 19 nt, Homo sapiens
  misc_RNA (1)...(19): siRNA sense strand
uagcuuggcugauaacaac

SEQ ID NO: 1791069 - RNA, 19 nt, Homo sapiens
  misc_RNA (1)...(19): siRNA sense strand
cugauagguuccagccuua

SEQ ID NO: 1791070 - RNA, 19 nt, Homo sapiens
  misc_RNA (1)...(19): siRNA sense strand
ugugagcucuuuccuuaug

SEQ ID NO: 1791071 - RNA, 19 nt, Homo sapiens
  misc_RNA (1)...(19): siRNA sense strand
gugaugaccugcauaucca

SEQ ID NO: 1791072 - RNA, 19 nt, Homo sapiens
  misc_RNA (1)...(19): siRNA sense strand
ucucuuggcccucuuggua

SEQ ID NO: 1791073 - RNA, 19 nt, Homo sapiens
  misc_RNA (1)...(19): siRNA sense strand
gcugaaggacacagugaaa

SEQ ID NO: 1791074 - RNA, 19 nt, Homo sapiens
  misc_RNA (1)...(19): siRNA sense strand
gcuguucccucaaucugau

SEQ ID NO: 1791075 - RNA, 19 nt, Homo sapiens
  misc_RNA (1)...(19): siRNA sense strand
ggagagaguggagagauca

SEQ ID NO: 1791076 - RNA, 19 nt, Homo sapiens
  misc_RNA (1)...(19): siRNA sense strand
uggauuugcuguuuauguc

SEQ ID NO: 1791077 - RNA, 19 nt, Homo sapiens
  misc_RNA (1)...(19): siRNA sense strand
aggcuagcuuggcugauaa

SEQ ID NO: 1791078 - RNA, 19 nt, Homo sapiens
  misc_RNA (1)...(19): siRNA sense strand
ucaaagcaauuggagaacu

SEQ ID NO: 1791079 - RNA, 19 nt, Homo sapiens
  misc_RNA (1)...(19): siRNA sense strand
ccagcugccuccuucucuu

SEQ ID NO: 1791080 - RNA, 19 nt, Homo sapiens
  misc_RNA (1)...(19): siRNA sense strand
uaacaacacagacguucgu

SEQ ID NO: 1791081 - RNA, 19 nt, Homo sapiens
  misc_RNA (1)...(19): siRNA sense strand
caauuggagaacuggauuu

SEQ ID NO: 1791082 - RNA, 19 nt, Homo sapiens
  misc_RNA (1)...(19): siRNA sense strand
cugcauauccagaggaaug

SEQ ID NO: 1791083 - RNA, 19 nt, Homo sapiens
  misc_RNA (1)...(19): siRNA sense strand
gcgcugcuaucugaugaag

SEQ ID NO: 1791084 - RNA, 19 nt, Homo sapiens
  misc_RNA (1)...(19): siRNA sense strand
ccacggagucaguaugagu

SEQ ID NO: 1791085 - RNA, 19 nt, Homo sapiens
  misc_RNA (1)...(19): siRNA sense strand
gagaacuggauuugcuguu

SEQ ID NO: 1791086 - RNA, 19 nt, Homo sapiens
  misc_RNA (1)...(19): siRNA sense strand
ggugaugaccugcauaucc

SEQ ID NO: 1791087 - RNA, 19 nt, Homo sapiens
  misc_RNA (1)...(19): siRNA sense strand
gagaguggagagaucaaag

SEQ ID NO: 1791088 - RNA, 19 nt, Homo sapiens
  misc_RNA (1)...(19): siRNA sense strand
caacaggcuaagcacaugu

SEQ ID NO: 1791089 - RNA, 19 nt, Homo sapiens
  misc_RNA (1)...(19): siRNA sense strand
ugagugagcgcugcuaucu

SEQ ID NO: 1791090 - RNA, 19 nt, Homo sapiens
  misc_RNA (1)...(19): siRNA sense strand
uggagagaguggagagauc

SEQ ID NO: 1791091 - RNA, 19 nt, Homo sapiens
  misc_RNA (1)...(19): siRNA sense strand
aagaagaccuuaccauuaa

SEQ ID NO: 1791092 - RNA, 19 nt, Homo sapiens
  misc_RNA (1)...(19): siRNA sense strand
aaagaagaccuuaccauua

SEQ ID NO: 1791093 - RNA, 19 nt, Homo sapiens
  misc_RNA (1)...(19): siRNA sense strand
gaaauagacaccauaaugu

SEQ ID NO: 1791094 - RNA, 19 nt, Homo sapiens
  misc_RNA (1)...(19): siRNA sense strand
caucaaaguucgaaauaga

SEQ ID NO: 1791095 - RNA, 19 nt, Homo sapiens
  misc_RNA (1)...(19): siRNA sense strand
cgacaagaauugccuguga

SEQ ID NO: 1791096 - RNA, 19 nt, Homo sapiens
  misc_RNA (1)...(19): siRNA sense strand
gguuacggcuugccaauuu

SEQ ID NO: 1791097 - RNA, 19 nt, Homo sapiens
  misc_RNA (1)...(19): siRNA sense strand
aaagaugccuguacaguug

SEQ ID NO: 1791098 - RNA, 19 nt, Homo sapiens
  misc_RNA (1)...(19): siRNA sense strand
gaccgccucuuuaguuaua

SEQ ID NO: 1791099 - RNA, 19 nt, Homo sapiens
  misc_RNA (1)...(19): siRNA sense strand
caacgccugugauggauaa

SEQ ID NO: 1791100 - RNA, 19 nt, Homo sapiens
  misc_RNA (1)...(19): siRNA sense strand
guucaaggaugcucuguga

SEQ ID NO: 1791101 - RNA, 19 nt, Homo sapiens
  misc_RNA (1)...(19): siRNA sense strand
cgaaauagacaccauaaug

SEQ ID NO: 1791102 - RNA, 19 nt, Homo sapiens
  misc_RNA (1)...(19): siRNA sense strand
gcauugauccuaacuguga

SEQ ID NO: 1791103 - RNA, 19 nt, Homo sapiens
  misc_RNA (1)...(19): siRNA sense strand
caaagaaccuggcaaaaga

SEQ ID NO: 1791104 - RNA, 19 nt, Homo sapiens
  misc_RNA (1)...(19): siRNA sense strand
gaaccagcacauucuuaua

SEQ ID NO: 1791105 - RNA, 19 nt, Homo sapiens
  misc_RNA (1)...(19): siRNA sense strand
cacaaggaaucauagagua

SEQ ID NO: 1791106 - RNA, 19 nt, Homo sapiens
  misc_RNA (1)...(19): siRNA sense strand
uaacaagucagccuucaaa

SEQ ID NO: 1791107 - RNA, 19 nt, Homo sapiens
  misc_RNA (1)...(19): siRNA sense strand
guauaaagaugccuguaca

SEQ ID NO: 1791108 - RNA, 19 nt, Homo sapiens
  misc_RNA (1)...(19): siRNA sense strand
gaaaaugcaugugaaagaa

SEQ ID NO: 1791109 - RNA, 19 nt, Homo sapiens
  misc_RNA (1)...(19): siRNA sense strand
gaaaaucagccuucccuua

SEQ ID NO: 1791110 - RNA, 19 nt, Homo sapiens
  misc_RNA (1)...(19): siRNA sense strand
ccagcacauucuuauauuu

SEQ ID NO: 1791111 - RNA, 19 nt, Homo sapiens
  misc_RNA (1)...(19): siRNA sense strand
caagaugccuuugaguguu

SEQ ID NO: 1791112 - RNA, 19 nt, Homo sapiens
  misc_RNA (1)...(19): siRNA sense strand
uacagagccugauggauuu

SEQ ID NO: 1791113 - RNA, 19 nt, Homo sapiens
  misc_RNA (1)...(19): siRNA sense strand
gccaauuucucgucuguau

SEQ ID NO: 1791114 - RNA, 19 nt, Homo sapiens
  misc_RNA (1)...(19): siRNA sense strand
uuacacaagugaauggaaa

SEQ ID NO: 1791115 - RNA, 19 nt, Homo sapiens
  misc_RNA (1)...(19): siRNA sense strand
guuaaaagcugguauauac

SEQ ID NO: 1791116 - RNA, 19 nt, Homo sapiens
  misc_RNA (1)...(19): siRNA sense strand
cauaugcucuuugaacuau

SEQ ID NO: 1791117 - RNA, 19 nt, Homo sapiens
  misc_RNA (1)...(19): siRNA sense strand
uagauacacucaucaaagu

SEQ ID NO: 1791118 - RNA, 19 nt, Homo sapiens
  misc_RNA (1)...(19): siRNA sense strand
auacagagccugauggauu

SEQ ID NO: 1791119 - RNA, 19 nt, Homo sapiens
  misc_RNA (1)...(19): siRNA sense strand
cuucaaacauuaucagaug

SEQ ID NO: 1791120 - RNA, 19 nt, Homo sapiens
  misc_RNA (1)...(19): siRNA sense strand
agucagccuucaaacauua

SEQ ID NO: 1791121 - RNA, 19 nt, Homo sapiens
  misc_RNA (1)...(19): siRNA sense strand
cccgagagguggagcauuu

SEQ ID NO: 1791122 - RNA, 19 nt, Homo sapiens
  misc_RNA (1)...(19): siRNA sense strand
caaggaaucauagaguaua

SEQ ID NO: 1791123 - RNA, 19 nt, Homo sapiens
  misc_RNA (1)...(19): siRNA sense strand
gcacaaggaaucauagagu

SEQ ID NO: 1791124 - RNA, 19 nt, Homo sapiens
  misc_RNA (1)...(19): siRNA sense strand
ugaagcagcuacuggacuu

SEQ ID NO: 1791125 - RNA, 19 nt, Homo sapiens
  misc_RNA (1)...(19): siRNA sense strand
uaaagaugccuguacaguu

SEQ ID NO: 1791126 - RNA, 19 nt, Homo sapiens
  misc_RNA (1)...(19): siRNA sense strand
gaauuaaagcuuacacaag

SEQ ID NO: 1791127 - RNA, 19 nt, Homo sapiens
  misc_RNA (1)...(19): siRNA sense strand
gagcauuucucgcgcuaca

SEQ ID NO: 1791128 - RNA, 19 nt, Homo sapiens
  misc_RNA (1)...(19): siRNA sense strand
gcuaucaucuacuuaaagg

SEQ ID NO: 1791129 - RNA, 19 nt, Homo sapiens
  misc_RNA (1)...(19): siRNA sense strand
caaggaugcucugugauca

SEQ ID NO: 1791130 - RNA, 19 nt, Homo sapiens
  misc_RNA (1)...(19): siRNA sense strand
caagucagccuucaaacau

SEQ ID NO: 1791131 - RNA, 19 nt, Homo sapiens
  misc_RNA (1)...(19): siRNA sense strand
gaugcucugugaucaguau

SEQ ID NO: 1791132 - RNA, 19 nt, Homo sapiens
  misc_RNA (1)...(19): siRNA sense strand
ucuccagaauuaaagcuua

SEQ ID NO: 1791133 - RNA, 19 nt, Homo sapiens
  misc_RNA (1)...(19): siRNA sense strand
ccaacauucugaaggaaau

SEQ ID NO: 1791134 - RNA, 19 nt, Homo sapiens
  misc_RNA (1)...(19): siRNA sense strand
cugaaucucuacucuuuau

SEQ ID NO: 1791135 - RNA, 19 nt, Homo sapiens
  misc_RNA (1)...(19): siRNA sense strand
guagauacacucaucaaag

SEQ ID NO: 1791136 - RNA, 19 nt, Homo sapiens
  misc_RNA (1)...(19): siRNA sense strand
ggacuuugguucagaaaau

SEQ ID NO: 1791137 - RNA, 19 nt, Homo sapiens
  misc_RNA (1)...(19): siRNA sense strand
gaaucucuacucuuuauca

SEQ ID NO: 1791138 - RNA, 19 nt, Homo sapiens
  misc_RNA (1)...(19): siRNA sense strand
ggaaacccaagccacauug

SEQ ID NO: 1791139 - RNA, 19 nt, Homo sapiens
  misc_RNA (1)...(19): siRNA sense strand
caaaagaaguggccaugug

SEQ ID NO: 1791140 - RNA, 19 nt, Homo sapiens
  misc_RNA (1)...(19): siRNA sense strand
ugauggauuugguggaauu

SEQ ID NO: 1791141 - RNA, 19 nt, Homo sapiens
  misc_RNA (1)...(19): siRNA sense strand
cuucucaccuccaucauau

SEQ ID NO: 1791142 - RNA, 19 nt, Homo sapiens
  misc_RNA (1)...(19): siRNA sense strand
gcucugugaucaguauuau

SEQ ID NO: 1791143 - RNA, 19 nt, Homo sapiens
  misc_RNA (1)...(19): siRNA sense strand
cuacucggaugcugaugaa

SEQ ID NO: 1791144 - RNA, 19 nt, Homo sapiens
  misc_RNA (1)...(19): siRNA sense strand
uacaugaaccguauuucua

SEQ ID NO: 1791145 - RNA, 19 nt, Homo sapiens
  misc_RNA (1)...(19): siRNA sense strand
caaguacuuucaaggagau

SEQ ID NO: 1791146 - RNA, 19 nt, Homo sapiens
  misc_RNA (1)...(19): siRNA sense strand
aaauaccucuucagugcaa

SEQ ID NO: 1791147 - RNA, 19 nt, Homo sapiens
  misc_RNA (1)...(19): siRNA sense strand
gcugaugacugguguaucc

SEQ ID NO: 1791148 - RNA, 19 nt, Homo sapiens
  misc_RNA (1)...(19): siRNA sense strand
ccaagaugccuuugagugu

SEQ ID NO: 1791149 - RNA, 19 nt, Homo sapiens
  misc_RNA (1)...(19): siRNA sense strand
gguccaagaugccuuugag

SEQ ID NO: 1791150 - RNA, 19 nt, Homo sapiens
  misc_RNA (1)...(19): siRNA sense strand
cagaugaccagaaagcauu

SEQ ID NO: 1791151 - RNA, 19 nt, Homo sapiens
  misc_RNA (1)...(19): siRNA sense strand
cagaaagcauuaucagacu

SEQ ID NO: 1791152 - RNA, 19 nt, Homo sapiens
  misc_RNA (1)...(19): siRNA sense strand
aagcauugauccuaacugu

SEQ ID NO: 1791153 - RNA, 19 nt, Homo sapiens
  misc_RNA (1)...(19): siRNA sense strand
gauacacucaucaaaguuc

SEQ ID NO: 1791154 - RNA, 19 nt, Homo sapiens
  misc_RNA (1)...(19): siRNA sense strand
aagcccagaugaccagaaa

SEQ ID NO: 1791155 - RNA, 19 nt, Homo sapiens
  misc_RNA (1)...(19): siRNA sense strand
ggaaucauagaguauaaag

SEQ ID NO: 1791156 - RNA, 19 nt, Homo sapiens
  misc_RNA (1)...(19): siRNA sense strand
caauauuucuuggaucgau

SEQ ID NO: 1791157 - RNA, 19 nt, Homo sapiens
  misc_RNA (1)...(19): siRNA sense strand
gaugagcucugaggcugau

SEQ ID NO: 1791158 - RNA, 19 nt, Homo sapiens
  misc_RNA (1)...(19): siRNA sense strand
uugaccgccucuuuaguua

SEQ ID NO: 1791159 - RNA, 19 nt, Homo sapiens
  misc_RNA (1)...(19): siRNA sense strand
cauuaagauuucagacaga

SEQ ID NO: 1791160 - RNA, 19 nt, Homo sapiens
  misc_RNA (1)...(19): siRNA sense strand
gguguuccccugagaauua

SEQ ID NO: 1791161 - RNA, 19 nt, Homo sapiens
  misc_RNA (1)...(19): siRNA sense strand
uaacugugaugugguagca

SEQ ID NO: 1791162 - RNA, 19 nt, Homo sapiens
  misc_RNA (1)...(19): siRNA sense strand
gauauggaacagaugcuau

SEQ ID NO: 1791163 - RNA, 19 nt, Homo sapiens
  misc_RNA (1)...(19): siRNA sense strand
ggauauggaacagaugcua

SEQ ID NO: 1791164 - RNA, 19 nt, Homo sapiens
  misc_RNA (1)...(19): siRNA sense strand
gaucugaaucucuacucuu

SEQ ID NO: 1791165 - RNA, 19 nt, Homo sapiens
  misc_RNA (1)...(19): siRNA sense strand
ccugauggauuugguggaa

SEQ ID NO: 1791166 - RNA, 19 nt, Homo sapiens
  misc_RNA (1)...(19): siRNA sense strand
caucauaugcucuuugaac

SEQ ID NO: 1791167 - RNA, 19 nt, Homo sapiens
  misc_RNA (1)...(19): siRNA sense strand
uccaucauaugcucuuuga

SEQ ID NO: 1791168 - RNA, 19 nt, Homo sapiens
  misc_RNA (1)...(19): siRNA sense strand
uuggaagcauugauccuaa

SEQ ID NO: 1791169 - RNA, 19 nt, Homo sapiens
  misc_RNA (1)...(19): siRNA sense strand
agaaagcauuaucagacuu

SEQ ID NO: 1791170 - RNA, 19 nt, Homo sapiens
  misc_RNA (1)...(19): siRNA sense strand
uauccucccgacccaauua

SEQ ID NO: 1791171 - RNA, 19 nt, Homo sapiens
  misc_RNA (1)...(19): siRNA sense strand
ccgacccaauuaguaaaua

SEQ ID NO: 1791172 - RNA, 19 nt, Homo sapiens
  misc_RNA (1)...(19): siRNA sense strand
caccaacgccugugaugga

SEQ ID NO: 1791173 - RNA, 19 nt, Homo sapiens
  misc_RNA (1)...(19): siRNA sense strand
ucaaggaugcucugugauc

SEQ ID NO: 1791174 - RNA, 19 nt, Homo sapiens
  misc_RNA (1)...(19): siRNA sense strand
ugaaccagcacauucuuau

SEQ ID NO: 1791175 - RNA, 19 nt, Homo sapiens
  misc_RNA (1)...(19): siRNA sense strand
guucgaaauagacaccaua

SEQ ID NO: 1791176 - RNA, 19 nt, Homo sapiens
  misc_RNA (1)...(19): siRNA sense strand
ccaagcagggaaccaaaga

SEQ ID NO: 1791177 - RNA, 19 nt, Homo sapiens
  misc_RNA (1)...(19): siRNA sense strand
agacagaggaggugguguu

SEQ ID NO: 1791178 - RNA, 19 nt, Homo sapiens
  misc_RNA (1)...(19): siRNA sense strand
aaccagcacauucuuauau

SEQ ID NO: 1791179 - RNA, 19 nt, Homo sapiens
  misc_RNA (1)...(19): siRNA sense strand
ucgccaacauucugaagga

SEQ ID NO: 1791180 - RNA, 19 nt, Homo sapiens
  misc_RNA (1)...(19): siRNA sense strand
gacccagucaccaaucaaa

SEQ ID NO: 1791181 - RNA, 19 nt, Homo sapiens
  misc_RNA (1)...(19): siRNA sense strand
cgccugugauggauaauuc

SEQ ID NO: 1791182 - RNA, 19 nt, Homo sapiens
  misc_RNA (1)...(19): siRNA sense strand
uuacaccaauagagguuau

SEQ ID NO: 1791183 - RNA, 19 nt, Homo sapiens
  misc_RNA (1)...(19): siRNA sense strand
gauauccucccgacccaau

SEQ ID NO: 1791184 - RNA, 19 nt, Homo sapiens
  misc_RNA (1)...(19): siRNA sense strand
aaaagaagaccuuaccauu

SEQ ID NO: 1791185 - RNA, 19 nt, Homo sapiens
  misc_RNA (1)...(19): siRNA sense strand
ucauaugcucuuugaacua

SEQ ID NO: 1791186 - RNA, 19 nt, Homo sapiens
  misc_RNA (1)...(19): siRNA sense strand
caucguguauguuccuucu

SEQ ID NO: 1791187 - RNA, 19 nt, Homo sapiens
  misc_RNA (1)...(19): siRNA sense strand
accagcacauucuuauauu

SEQ ID NO: 1791188 - RNA, 19 nt, Homo sapiens
  misc_RNA (1)...(19): siRNA sense strand
cgacccaauuaguaaauac

SEQ ID NO: 1791189 - RNA, 19 nt, Homo sapiens
  misc_RNA (1)...(19): siRNA sense strand
aucugaaucucuacucuuu

SEQ ID NO: 1791190 - RNA, 19 nt, Homo sapiens
  misc_RNA (1)...(19): siRNA sense strand
auuauugaccgccucuuua

SEQ ID NO: 1791191 - RNA, 19 nt, Homo sapiens
  misc_RNA (1)...(19): siRNA sense strand
cauaaagacugcccaauaa

SEQ ID NO: 1791192 - RNA, 19 nt, Homo sapiens
  misc_RNA (1)...(19): siRNA sense strand
gaaagaaucacaaggauau

SEQ ID NO: 1791193 - RNA, 19 nt, Homo sapiens
  misc_RNA (1)...(19): siRNA sense strand
cggaauaucucgaugcaua

SEQ ID NO: 1791194 - RNA, 19 nt, Homo sapiens
  misc_RNA (1)...(19): siRNA sense strand
gcacaaacaugaaaugacu

SEQ ID NO: 1791195 - RNA, 19 nt, Homo sapiens
  misc_RNA (1)...(19): siRNA sense strand
uaacagccaugcagaaaga

SEQ ID NO: 1791196 - RNA, 19 nt, Homo sapiens
  misc_RNA (1)...(19): siRNA sense strand
gacaauauguuaucagauc

SEQ ID NO: 1791197 - RNA, 19 nt, Homo sapiens
  misc_RNA (1)...(19): siRNA sense strand
caacaagucauccagcaua

SEQ ID NO: 1791198 - RNA, 19 nt, Homo sapiens
  misc_RNA (1)...(19): siRNA sense strand
caagucauccagcauaaua

SEQ ID NO: 1791199 - RNA, 19 nt, Homo sapiens
  misc_RNA (1)...(19): siRNA sense strand
ccaacgagauuccugaaga

SEQ ID NO: 1791200 - RNA, 19 nt, Homo sapiens
  misc_RNA (1)...(19): siRNA sense strand
gcagaaagaaucacaagga

SEQ ID NO: 1791201 - RNA, 19 nt, Homo sapiens
  misc_RNA (1)...(19): siRNA sense strand
caacgagauuccugaagaa

SEQ ID NO: 1791202 - RNA, 19 nt, Homo sapiens
  misc_RNA (1)...(19): siRNA sense strand
acaugcagcuucagaauga

SEQ ID NO: 1791203 - RNA, 19 nt, Homo sapiens
  misc_RNA (1)...(19): siRNA sense strand
ucagugaacuccagcauca

SEQ ID NO: 1791204 - RNA, 19 nt, Homo sapiens
  misc_RNA (1)...(19): siRNA sense strand
agaaugaagugucuauguu

SEQ ID NO: 1791205 - RNA, 19 nt, Homo sapiens
  misc_RNA (1)...(19): siRNA sense strand
gcacagguuucaccagcaa

SEQ ID NO: 1791206 - RNA, 19 nt, Homo sapiens
  misc_RNA (1)...(19): siRNA sense strand
gaucgaagguccaaaucuc

SEQ ID NO: 1791207 - RNA, 19 nt, Homo sapiens
  misc_RNA (1)...(19): siRNA sense strand
gaacucacccagacaaaca

SEQ ID NO: 1791208 - RNA, 19 nt, Homo sapiens
  misc_RNA (1)...(19): siRNA sense strand
gagagcagcaagcggaaua

SEQ ID NO: 1791209 - RNA, 19 nt, Homo sapiens
  misc_RNA (1)...(19): siRNA sense strand
gaaugaagugucuauguug

SEQ ID NO: 1791210 - RNA, 19 nt, Homo sapiens
  misc_RNA (1)...(19): siRNA sense strand
cagacaauauguuaucaga

SEQ ID NO: 1791211 - RNA, 19 nt, Homo sapiens
  misc_RNA (1)...(19): siRNA sense strand
acauaaagacugcccaaua

SEQ ID NO: 1791212 - RNA, 19 nt, Homo sapiens
  misc_RNA (1)...(19): siRNA sense strand
agacaaacaugcagcuuca

SEQ ID NO: 1791213 - RNA, 19 nt, Homo sapiens
  misc_RNA (1)...(19): siRNA sense strand
gaagaacucacccagacaa

SEQ ID NO: 1791214 - RNA, 19 nt, Homo sapiens
  misc_RNA (1)...(19): siRNA sense strand
ucacaaggauaucuaaguc

SEQ ID NO: 1791215 - RNA, 19 nt, Homo sapiens
  misc_RNA (1)...(19): siRNA sense strand
cauaauaccaucacuacuu

SEQ ID NO: 1791216 - RNA, 19 nt, Homo sapiens
  misc_RNA (1)...(19): siRNA sense strand
ugaagugucuauguugaaa

SEQ ID NO: 1791217 - RNA, 19 nt, Homo sapiens
  misc_RNA (1)...(19): siRNA sense strand
ggaauaucucgaugcauaa

SEQ ID NO: 1791218 - RNA, 19 nt, Homo sapiens
  misc_RNA (1)...(19): siRNA sense strand
gcucaccacucacagaaca

SEQ ID NO: 1791219 - RNA, 19 nt, Homo sapiens
  misc_RNA (1)...(19): siRNA sense strand
cagaaagaaucacaaggau

SEQ ID NO: 1791220 - RNA, 19 nt, Homo sapiens
  misc_RNA (1)...(19): siRNA sense strand
caccagaccucgccacauc

SEQ ID NO: 1791221 - RNA, 19 nt, Homo sapiens
  misc_RNA (1)...(19): siRNA sense strand
ucacagaacagaccugaau

SEQ ID NO: 1791222 - RNA, 19 nt, Homo sapiens
  misc_RNA (1)...(19): siRNA sense strand
cgagauuccugaagaacug

SEQ ID NO: 1791223 - RNA, 19 nt, Homo sapiens
  misc_RNA (1)...(19): siRNA sense strand
gcccggaacucaccagcuu

SEQ ID NO: 1791224 - RNA, 19 nt, Homo sapiens
  misc_RNA (1)...(19): siRNA sense strand
gaaucacaaggauaucuaa

SEQ ID NO: 1791225 - RNA, 19 nt, Homo sapiens
  misc_RNA (1)...(19): siRNA sense strand
ggacacaugauggagauga

SEQ ID NO: 1791226 - RNA, 19 nt, Homo sapiens
  misc_RNA (1)...(19): siRNA sense strand
aaagaaagcagaagaacuc

SEQ ID NO: 1791227 - RNA, 19 nt, Homo sapiens
  misc_RNA (1)...(19): siRNA sense strand
gcagccaacccagacaaua

SEQ ID NO: 1791228 - RNA, 19 nt, Homo sapiens
  misc_RNA (1)...(19): siRNA sense strand
acaccaacguugugauuca

SEQ ID NO: 1791229 - RNA, 19 nt, Homo sapiens
  misc_RNA (1)...(19): siRNA sense strand
ucagccagcucaccacuca

SEQ ID NO: 1791230 - RNA, 19 nt, Homo sapiens
  misc_RNA (1)...(19): siRNA sense strand
uaucuucucugcuacaucu

SEQ ID NO: 1791231 - RNA, 19 nt, Homo sapiens
  misc_RNA (1)...(19): siRNA sense strand
guugaaggcugcauugacu

SEQ ID NO: 1791232 - RNA, 19 nt, Homo sapiens
  misc_RNA (1)...(19): siRNA sense strand
agaaagaaucacaaggaua

SEQ ID NO: 1791233 - RNA, 19 nt, Homo sapiens
  misc_RNA (1)...(19): siRNA sense strand
aaugaagugucuauguuga

SEQ ID NO: 1791234 - RNA, 19 nt, Homo sapiens
  misc_RNA (1)...(19): siRNA sense strand
ccacaucaccacucccauu

SEQ ID NO: 1791235 - RNA, 19 nt, Homo sapiens
  misc_RNA (1)...(19): siRNA sense strand
uaaagacugcccaauaaca

SEQ ID NO: 1791236 - RNA, 19 nt, Homo sapiens
  misc_RNA (1)...(19): siRNA sense strand
gacagacaauauguuauca

SEQ ID NO: 1791237 - RNA, 19 nt, Homo sapiens
  misc_RNA (1)...(19): siRNA sense strand
auaauaccaucacuacuuc

SEQ ID NO: 1791238 - RNA, 19 nt, Homo sapiens
  misc_RNA (1)...(19): siRNA sense strand
ccaauggagcgacaaaugu

SEQ ID NO: 1791239 - RNA, 19 nt, Homo sapiens
  misc_RNA (1)...(19): siRNA sense strand
caauaacagccaugcagaa

SEQ ID NO: 1791240 - RNA, 19 nt, Homo sapiens
  misc_RNA (1)...(19): siRNA sense strand
aacaagucauccagcauaa

SEQ ID NO: 1791241 - RNA, 19 nt, Homo sapiens
  misc_RNA (1)...(19): siRNA sense strand
ucaggaaggcucaggaaga

SEQ ID NO: 1791242 - RNA, 19 nt, Homo sapiens
  misc_RNA (1)...(19): siRNA sense strand
caaacaugcagcuucagaa

SEQ ID NO: 1791243 - RNA, 19 nt, Homo sapiens
  misc_RNA (1)...(19): siRNA sense strand
uggcccagcugaaacaguu

SEQ ID NO: 1791244 - RNA, 19 nt, Homo sapiens
  misc_RNA (1)...(19): siRNA sense strand
ugacaccaacguugugauu

SEQ ID NO: 1791245 - RNA, 19 nt, Homo sapiens
  misc_RNA (1)...(19): siRNA sense strand
cagcauaauaccaucacua

SEQ ID NO: 1791246 - RNA, 19 nt, Homo sapiens
  misc_RNA (1)...(19): siRNA sense strand
ggauaucuaaguccagaga

SEQ ID NO: 1791247 - RNA, 19 nt, Homo sapiens
  misc_RNA (1)...(19): siRNA sense strand
ugggugaugucauuggaaa

SEQ ID NO: 1791248 - RNA, 19 nt, Homo sapiens
  misc_RNA (1)...(19): siRNA sense strand
gcagaaccauccacaucac

SEQ ID NO: 1791249 - RNA, 19 nt, Homo sapiens
  misc_RNA (1)...(19): siRNA sense strand
gccaauggagcgacaaaug

SEQ ID NO: 1791250 - RNA, 19 nt, Homo sapiens
  misc_RNA (1)...(19): siRNA sense strand
cagaaugaagugucuaugu

SEQ ID NO: 1791251 - RNA, 19 nt, Homo sapiens
  misc_RNA (1)...(19): siRNA sense strand
cagcagaaccauccacauc

SEQ ID NO: 1791252 - RNA, 19 nt, Homo sapiens
  misc_RNA (1)...(19): siRNA sense strand
caggaaggcucaggaagag

SEQ ID NO: 1791253 - RNA, 19 nt, Homo sapiens
  misc_RNA (1)...(19): siRNA sense strand
ccagcucugucaucacuca

SEQ ID NO: 1791254 - RNA, 19 nt, Homo sapiens
  misc_RNA (1)...(19): siRNA sense strand
agacagacaauauguuauc

SEQ ID NO: 1791255 - RNA, 19 nt, Homo sapiens
  misc_RNA (1)...(19): siRNA sense strand
aaacaugcagcuucagaau

SEQ ID NO: 1791256 - RNA, 19 nt, Homo sapiens
  misc_RNA (1)...(19): siRNA sense strand
ggaaaagaaagcagaagaa

SEQ ID NO: 1791257 - RNA, 19 nt, Homo sapiens
  misc_RNA (1)...(19): siRNA sense strand
ccacccugcugccauguca

SEQ ID NO: 1791258 - RNA, 19 nt, Homo sapiens
  misc_RNA (1)...(19): siRNA sense strand
gaauaucucgaugcauaau

SEQ ID NO: 1791259 - RNA, 19 nt, Homo sapiens
  misc_RNA (1)...(19): siRNA sense strand
uaucuaaguccagagagua

SEQ ID NO: 1791260 - RNA, 19 nt, Homo sapiens
  misc_RNA (1)...(19): siRNA sense strand
ccacucccauucccaccuu

SEQ ID NO: 1791261 - RNA, 19 nt, Homo sapiens
  misc_RNA (1)...(19): siRNA sense strand
cauaggcacaaacaugaaa

SEQ ID NO: 1791262 - RNA, 19 nt, Homo sapiens
  misc_RNA (1)...(19): siRNA sense strand
gcagcaagcggaauaucuc

SEQ ID NO: 1791263 - RNA, 19 nt, Homo sapiens
  misc_RNA (1)...(19): siRNA sense strand
gcaagcggaauaucucgau

SEQ ID NO: 1791264 - RNA, 19 nt, Homo sapiens
  misc_RNA (1)...(19): siRNA sense strand
gcacaccggcaaccaagca

SEQ ID NO: 1791265 - RNA, 19 nt, Homo sapiens
  misc_RNA (1)...(19): siRNA sense strand
ggaacucaccagcuuagca

SEQ ID NO: 1791266 - RNA, 19 nt, Homo sapiens
  misc_RNA (1)...(19): siRNA sense strand
gucccaggcucucuaucuu

SEQ ID NO: 1791267 - RNA, 19 nt, Homo sapiens
  misc_RNA (1)...(19): siRNA sense strand
aauaacagccaugcagaaa

SEQ ID NO: 1791268 - RNA, 19 nt, Homo sapiens
  misc_RNA (1)...(19): siRNA sense strand
gagguugaaggcugcauug

SEQ ID NO: 1791269 - RNA, 19 nt, Homo sapiens
  misc_RNA (1)...(19): siRNA sense strand
gacacaugauggagaugau

SEQ ID NO: 1791270 - RNA, 19 nt, Homo sapiens
  misc_RNA (1)...(19): siRNA sense strand
guccagcucugucaucacu

SEQ ID NO: 1791271 - RNA, 19 nt, Homo sapiens
  misc_RNA (1)...(19): siRNA sense strand
ugagguggcccagcugaaa

SEQ ID NO: 1791272 - RNA, 19 nt, Homo sapiens
  misc_RNA (1)...(19): siRNA sense strand
gaucuuccgccgucuugau

SEQ ID NO: 1791273 - RNA, 19 nt, Homo sapiens
  misc_RNA (1)...(19): siRNA sense strand
ugucaaaugggaacaugaa

SEQ ID NO: 1791274 - RNA, 19 nt, Homo sapiens
  misc_RNA (1)...(19): siRNA sense strand
agaaucacaaggauaucua

SEQ ID NO: 1791275 - RNA, 19 nt, Homo sapiens
  misc_RNA (1)...(19): siRNA sense strand
cagcucaccacucacagaa

SEQ ID NO: 1791276 - RNA, 19 nt, Homo sapiens
  misc_RNA (1)...(19): siRNA sense strand
ucaaaugggaacaugaaca

SEQ ID NO: 1791277 - RNA, 19 nt, Homo sapiens
  misc_RNA (1)...(19): siRNA sense strand
acaaacaugcagcuucaga

SEQ ID NO: 1791278 - RNA, 19 nt, Homo sapiens
  misc_RNA (1)...(19): siRNA sense strand
gaaggucugggugauguca

SEQ ID NO: 1791279 - RNA, 19 nt, Homo sapiens
  misc_RNA (1)...(19): siRNA sense strand
gcagacagaagaggaaggu

SEQ ID NO: 1791280 - RNA, 19 nt, Homo sapiens
  misc_RNA (1)...(19): siRNA sense strand
gcaacaagucauccagcau

SEQ ID NO: 1791281 - RNA, 19 nt, Homo sapiens
  misc_RNA (1)...(19): siRNA sense strand
caggagaggccgucugucu

SEQ ID NO: 1791282 - RNA, 19 nt, Homo sapiens
  misc_RNA (1)...(19): siRNA sense strand
caaaugggaacaugaacac

SEQ ID NO: 1791283 - RNA, 19 nt, Homo sapiens
  misc_RNA (1)...(19): siRNA sense strand
aggaaggucugggugaugu

SEQ ID NO: 1791284 - RNA, 19 nt, Homo sapiens
  misc_RNA (1)...(19): siRNA sense strand
ucccagcgcuucccaacag

SEQ ID NO: 1791285 - RNA, 19 nt, Homo sapiens
  misc_RNA (1)...(19): siRNA sense strand
caaccaugacaccaacguu

SEQ ID NO: 1791286 - RNA, 19 nt, Homo sapiens
  misc_RNA (1)...(19): siRNA sense strand
gaggaaggucugggugaug

SEQ ID NO: 1791287 - RNA, 19 nt, Homo sapiens
  misc_RNA (1)...(19): siRNA sense strand
ugggacacaugauggagau

SEQ ID NO: 1791288 - RNA, 19 nt, Homo sapiens
  misc_RNA (1)...(19): siRNA sense strand
ggucagcgaggugguagga

SEQ ID NO: 1791289 - RNA, 19 nt, Homo sapiens
  misc_RNA (1)...(19): siRNA sense strand
guucaggaaggcucaggaa

SEQ ID NO: 1791290 - RNA, 19 nt, Homo sapiens
  misc_RNA (1)...(19): siRNA sense strand
cagccaacccagacaauac

SEQ ID NO: 1791291 - RNA, 19 nt, Homo sapiens
  misc_RNA (1)...(19): siRNA sense strand
cauaaagacugcccaauaa

SEQ ID NO: 1791292 - RNA, 19 nt, Homo sapiens
  misc_RNA (1)...(19): siRNA sense strand
gaaagaaucacaaggauau

SEQ ID NO: 1791293 - RNA, 19 nt, Homo sapiens
  misc_RNA (1)...(19): siRNA sense strand
cggaauaucucgaugcaua

SEQ ID NO: 1791294 - RNA, 19 nt, Homo sapiens
  misc_RNA (1)...(19): siRNA sense strand
gcacaaacaugaaaugacu

SEQ ID NO: 1791295 - RNA, 19 nt, Homo sapiens
  misc_RNA (1)...(19): siRNA sense strand
uaacagccaugcagaaaga

SEQ ID NO: 1791296 - RNA, 19 nt, Homo sapiens
  misc_RNA (1)...(19): siRNA sense strand
gacaauauguuaucagauc

SEQ ID NO: 1791297 - RNA, 19 nt, Homo sapiens
  misc_RNA (1)...(19): siRNA sense strand
caacaagucauccagcaua

SEQ ID NO: 1791298 - RNA, 19 nt, Homo sapiens
  misc_RNA (1)...(19): siRNA sense strand
caagucauccagcauaaua

SEQ ID NO: 1791299 - RNA, 19 nt, Homo sapiens
  misc_RNA (1)...(19): siRNA sense strand
ccaacgagauuccugaaga

SEQ ID NO: 1791300 - RNA, 19 nt, Homo sapiens
  misc_RNA (1)...(19): siRNA sense strand
gcagaaagaaucacaagga

SEQ ID NO: 1791301 - RNA, 19 nt, Homo sapiens
  misc_RNA (1)...(19): siRNA sense strand
caacgagauuccugaagaa

SEQ ID NO: 1791302 - RNA, 19 nt, Homo sapiens
  misc_RNA (1)...(19): siRNA sense strand
acaugcagcuucagaauga

SEQ ID NO: 1791303 - RNA, 19 nt, Homo sapiens
  misc_RNA (1)...(19): siRNA sense strand
ucagugaacuccagcauca

SEQ ID NO: 1791304 - RNA, 19 nt, Homo sapiens
  misc_RNA (1)...(19): siRNA sense strand
agaaugaagugucuauguu

SEQ ID NO: 1791305 - RNA, 19 nt, Homo sapiens
  misc_RNA (1)...(19): siRNA sense strand
gcacagguuucaccagcaa

SEQ ID NO: 1791306 - RNA, 19 nt, Homo sapiens
  misc_RNA (1)...(19): siRNA sense strand
gaucgaagguccaaaucuc

SEQ ID NO: 1791307 - RNA, 19 nt, Homo sapiens
  misc_RNA (1)...(19): siRNA sense strand
gaacucacccagacaaaca

SEQ ID NO: 1791308 - RNA, 19 nt, Homo sapiens
  misc_RNA (1)...(19): siRNA sense strand
gagagcagcaagcggaaua

SEQ ID NO: 1791309 - RNA, 19 nt, Homo sapiens
  misc_RNA (1)...(19): siRNA sense strand
gaaugaagugucuauguug

SEQ ID NO: 1791310 - RNA, 19 nt, Homo sapiens
  misc_RNA (1)...(19): siRNA sense strand
cagacaauauguuaucaga

SEQ ID NO: 1791311 - RNA, 19 nt, Homo sapiens
  misc_RNA (1)...(19): siRNA sense strand
acauaaagacugcccaaua

SEQ ID NO: 1791312 - RNA, 19 nt, Homo sapiens
  misc_RNA (1)...(19): siRNA sense strand
agacaaacaugcagcuuca

SEQ ID NO: 1791313 - RNA, 19 nt, Homo sapiens
  misc_RNA (1)...(19): siRNA sense strand
gaagaacucacccagacaa

SEQ ID NO: 1791314 - RNA, 19 nt, Homo sapiens
  misc_RNA (1)...(19): siRNA sense strand
ucacaaggauaucuaaguc

SEQ ID NO: 1791315 - RNA, 19 nt, Homo sapiens
  misc_RNA (1)...(19): siRNA sense strand
cauaauaccaucacuacuu

SEQ ID NO: 1791316 - RNA, 19 nt, Homo sapiens
  misc_RNA (1)...(19): siRNA sense strand
uaugaggaauccaagauga

SEQ ID NO: 1791317 - RNA, 19 nt, Homo sapiens
  misc_RNA (1)...(19): siRNA sense strand
ugaagugucuauguugaaa

SEQ ID NO: 1791318 - RNA, 19 nt, Homo sapiens
  misc_RNA (1)...(19): siRNA sense strand
ggaauaucucgaugcauaa

SEQ ID NO: 1791319 - RNA, 19 nt, Homo sapiens
  misc_RNA (1)...(19): siRNA sense strand
gcucaccacucacagaaca

SEQ ID NO: 1791320 - RNA, 19 nt, Homo sapiens
  misc_RNA (1)...(19): siRNA sense strand
cagaaagaaucacaaggau

SEQ ID NO: 1791321 - RNA, 19 nt, Homo sapiens
  misc_RNA (1)...(19): siRNA sense strand
caccagaccucgccacauc

SEQ ID NO: 1791322 - RNA, 19 nt, Homo sapiens
  misc_RNA (1)...(19): siRNA sense strand
ucacagaacagaccugaau

SEQ ID NO: 1791323 - RNA, 19 nt, Homo sapiens
  misc_RNA (1)...(19): siRNA sense strand
cgagauuccugaagaacug

SEQ ID NO: 1791324 - RNA, 19 nt, Homo sapiens
  misc_RNA (1)...(19): siRNA sense strand
gcccggaacucaccagcuu

SEQ ID NO: 1791325 - RNA, 19 nt, Homo sapiens
  misc_RNA (1)...(19): siRNA sense strand
gaaucacaaggauaucuaa

SEQ ID NO: 1791326 - RNA, 19 nt, Homo sapiens
  misc_RNA (1)...(19): siRNA sense strand
ggacacaugauggagauga

SEQ ID NO: 1791327 - RNA, 19 nt, Homo sapiens
  misc_RNA (1)...(19): siRNA sense strand
aaagaaagcagaagaacuc

SEQ ID NO: 1791328 - RNA, 19 nt, Homo sapiens
  misc_RNA (1)...(19): siRNA sense strand
gcagccaacccagacaaua

SEQ ID NO: 1791329 - RNA, 19 nt, Homo sapiens
  misc_RNA (1)...(19): siRNA sense strand
acaccaacguugugauuca

SEQ ID NO: 1791330 - RNA, 19 nt, Homo sapiens
  misc_RNA (1)...(19): siRNA sense strand
ucagccagcucaccacuca

SEQ ID NO: 1791331 - RNA, 19 nt, Homo sapiens
  misc_RNA (1)...(19): siRNA sense strand
uaucuucucugcuacaucu

SEQ ID NO: 1791332 - RNA, 19 nt, Homo sapiens
  misc_RNA (1)...(19): siRNA sense strand
guugaaggcugcauugacu

SEQ ID NO: 1791333 - RNA, 19 nt, Homo sapiens
  misc_RNA (1)...(19): siRNA sense strand
agaaagaaucacaaggaua

SEQ ID NO: 1791334 - RNA, 19 nt, Homo sapiens
  misc_RNA (1)...(19): siRNA sense strand
aaugaagugucuauguuga

SEQ ID NO: 1791335 - RNA, 19 nt, Homo sapiens
  misc_RNA (1)...(19): siRNA sense strand
ccacaucaccacucccauu

SEQ ID NO: 1791336 - RNA, 19 nt, Homo sapiens
  misc_RNA (1)...(19): siRNA sense strand
uaaagacugcccaauaaca

SEQ ID NO: 1791337 - RNA, 19 nt, Homo sapiens
  misc_RNA (1)...(19): siRNA sense strand
gacagacaauauguuauca

SEQ ID NO: 1791338 - RNA, 19 nt, Homo sapiens
  misc_RNA (1)...(19): siRNA sense strand
auaauaccaucacuacuuc

SEQ ID NO: 1791339 - RNA, 19 nt, Homo sapiens
  misc_RNA (1)...(19): siRNA sense strand
ccaauggagcgacaaaugu

SEQ ID NO: 1791340 - RNA, 19 nt, Homo sapiens
  misc_RNA (1)...(19): siRNA sense strand
ucaggaaggcucaggaaga

SEQ ID NO: 1791341 - RNA, 19 nt, Homo sapiens
  misc_RNA (1)...(19): siRNA sense strand
aacaagucauccagcauaa

SEQ ID NO: 1791342 - RNA, 19 nt, Homo sapiens
  misc_RNA (1)...(19): siRNA sense strand
caauaacagccaugcagaa

SEQ ID NO: 1791343 - RNA, 19 nt, Homo sapiens
  misc_RNA (1)...(19): siRNA sense strand
caaacaugcagcuucagaa

SEQ ID NO: 1791344 - RNA, 19 nt, Homo sapiens
  misc_RNA (1)...(19): siRNA sense strand
uggcccagcugaaacaguu

SEQ ID NO: 1791345 - RNA, 19 nt, Homo sapiens
  misc_RNA (1)...(19): siRNA sense strand
ugacaccaacguugugauu

SEQ ID NO: 1791346 - RNA, 19 nt, Homo sapiens
  misc_RNA (1)...(19): siRNA sense strand
cagcauaauaccaucacua

SEQ ID NO: 1791347 - RNA, 19 nt, Homo sapiens
  misc_RNA (1)...(19): siRNA sense strand
ggauaucuaaguccagaga

SEQ ID NO: 1791348 - RNA, 19 nt, Homo sapiens
  misc_RNA (1)...(19): siRNA sense strand
ugggugaugucauuggaaa

SEQ ID NO: 1791349 - RNA, 19 nt, Homo sapiens
  misc_RNA (1)...(19): siRNA sense strand
gcagaaccauccacaucac

SEQ ID NO: 1791350 - RNA, 19 nt, Homo sapiens
  misc_RNA (1)...(19): siRNA sense strand
gccaauggagcgacaaaug

SEQ ID NO: 1791351 - RNA, 19 nt, Homo sapiens
  misc_RNA (1)...(19): siRNA sense strand
cagaaugaagugucuaugu

SEQ ID NO: 1791352 - RNA, 19 nt, Homo sapiens
  misc_RNA (1)...(19): siRNA sense strand
caggaaggcucaggaagag

SEQ ID NO: 1791353 - RNA, 19 nt, Homo sapiens
  misc_RNA (1)...(19): siRNA sense strand
cagcagaaccauccacauc

SEQ ID NO: 1791354 - RNA, 19 nt, Homo sapiens
  misc_RNA (1)...(19): siRNA sense strand
agacagacaauauguuauc

SEQ ID NO: 1791355 - RNA, 19 nt, Homo sapiens
  misc_RNA (1)...(19): siRNA sense strand
gaggaauccaagaugaauu

SEQ ID NO: 1791356 - RNA, 19 nt, Homo sapiens
  misc_RNA (1)...(19): siRNA sense strand
aaacaugcagcuucagaau

SEQ ID NO: 1791357 - RNA, 19 nt, Homo sapiens
  misc_RNA (1)...(19): siRNA sense strand
ggaaaagaaagcagaagaa

SEQ ID NO: 1791358 - RNA, 19 nt, Homo sapiens
  misc_RNA (1)...(19): siRNA sense strand
ccacccugcugccauguca

SEQ ID NO: 1791359 - RNA, 19 nt, Homo sapiens
  misc_RNA (1)...(19): siRNA sense strand
ccagcucugucaucacuca

SEQ ID NO: 1791360 - RNA, 19 nt, Homo sapiens
  misc_RNA (1)...(19): siRNA sense strand
ccacucccauucccaccuu

SEQ ID NO: 1791361 - RNA, 19 nt, Homo sapiens
  misc_RNA (1)...(19): siRNA sense strand
aggaauccaagaugaauuu

SEQ ID NO: 1791362 - RNA, 19 nt, Homo sapiens
  misc_RNA (1)...(19): siRNA sense strand
gaauaucucgaugcauaau

SEQ ID NO: 1791363 - RNA, 19 nt, Homo sapiens
  misc_RNA (1)...(19): siRNA sense strand
uaucuaaguccagagagua

SEQ ID NO: 1791364 - RNA, 19 nt, Homo sapiens
  misc_RNA (1)...(19): siRNA sense strand
ggaacucaccagcuuagca

SEQ ID NO: 1791365 - RNA, 19 nt, Homo sapiens
  misc_RNA (1)...(19): siRNA sense strand
gcagcaagcggaauaucuc

SEQ ID NO: 1791366 - RNA, 19 nt, Homo sapiens
  misc_RNA (1)...(19): siRNA sense strand
cauaggcacaaacaugaaa

SEQ ID NO: 1791367 - RNA, 19 nt, Homo sapiens
  misc_RNA (1)...(19): siRNA sense strand
gcaagcggaauaucucgau

SEQ ID NO: 1791368 - RNA, 19 nt, Homo sapiens
  misc_RNA (1)...(19): siRNA sense strand
gcacaccggcaaccaagca

SEQ ID NO: 1791369 - RNA, 19 nt, Homo sapiens
  misc_RNA (1)...(19): siRNA sense strand
gucccaggcucucuaucuu

SEQ ID NO: 1791370 - RNA, 19 nt, Homo sapiens
  misc_RNA (1)...(19): siRNA sense strand
aauaacagccaugcagaaa

SEQ ID NO: 1791371 - RNA, 19 nt, Homo sapiens
  misc_RNA (1)...(19): siRNA sense strand
gagguugaaggcugcauug

SEQ ID NO: 1791372 - RNA, 19 nt, Homo sapiens
  misc_RNA (1)...(19): siRNA sense strand
gacacaugauggagaugau

SEQ ID NO: 1791373 - RNA, 19 nt, Homo sapiens
  misc_RNA (1)...(19): siRNA sense strand
guccagcucugucaucacu

SEQ ID NO: 1791374 - RNA, 19 nt, Homo sapiens
  misc_RNA (1)...(19): siRNA sense strand
ugagguggcccagcugaaa

SEQ ID NO: 1791375 - RNA, 19 nt, Homo sapiens
  misc_RNA (1)...(19): siRNA sense strand
gaucuuccgccgucuugau

SEQ ID NO: 1791376 - RNA, 19 nt, Homo sapiens
  misc_RNA (1)...(19): siRNA sense strand
ugucaaaugggaacaugaa

SEQ ID NO: 1791377 - RNA, 19 nt, Homo sapiens
  misc_RNA (1)...(19): siRNA sense strand
agaaucacaaggauaucua

SEQ ID NO: 1791378 - RNA, 19 nt, Homo sapiens
  misc_RNA (1)...(19): siRNA sense strand
cagcucaccacucacagaa

SEQ ID NO: 1791379 - RNA, 19 nt, Homo sapiens
  misc_RNA (1)...(19): siRNA sense strand
ucaaaugggaacaugaaca

SEQ ID NO: 1791380 - RNA, 19 nt, Homo sapiens
  misc_RNA (1)...(19): siRNA sense strand
acaaacaugcagcuucaga

SEQ ID NO: 1791381 - RNA, 19 nt, Homo sapiens
  misc_RNA (1)...(19): siRNA sense strand
gaaggucugggugauguca

SEQ ID NO: 1791382 - RNA, 19 nt, Homo sapiens
  misc_RNA (1)...(19): siRNA sense strand
gcagacagaagaggaaggu

SEQ ID NO: 1791383 - RNA, 19 nt, Homo sapiens
  misc_RNA (1)...(19): siRNA sense strand
gcaacaagucauccagcau

SEQ ID NO: 1791384 - RNA, 19 nt, Homo sapiens
  misc_RNA (1)...(19): siRNA sense strand
caggagaggccgucugucu

SEQ ID NO: 1791385 - RNA, 19 nt, Homo sapiens
  misc_RNA (1)...(19): siRNA sense strand
caaaugggaacaugaacac

SEQ ID NO: 1791386 - RNA, 19 nt, Homo sapiens
  misc_RNA (1)...(19): siRNA sense strand
aggaaggucugggugaugu

SEQ ID NO: 1791387 - RNA, 19 nt, Homo sapiens
  misc_RNA (1)...(19): siRNA sense strand
ucccagcgcuucccaacag

SEQ ID NO: 1791388 - RNA, 19 nt, Homo sapiens
  misc_RNA (1)...(19): siRNA sense strand
caaccaugacaccaacguu

SEQ ID NO: 1791389 - RNA, 19 nt, Homo sapiens
  misc_RNA (1)...(19): siRNA sense strand
ggaauccaagaugaauuug

SEQ ID NO: 1791390 - RNA, 19 nt, Homo sapiens
  misc_RNA (1)...(19): siRNA sense strand
gaggaaggucugggugaug

SEQ ID NO: 1791391 - RNA, 19 nt, Homo sapiens
  misc_RNA (1)...(19): siRNA sense strand
caaggaagauguauuugua

SEQ ID NO: 1791392 - RNA, 19 nt, Homo sapiens
  misc_RNA (1)...(19): siRNA sense strand
gaacggauaugguuucauc

SEQ ID NO: 1791393 - RNA, 19 nt, Homo sapiens
  misc_RNA (1)...(19): siRNA sense strand
cagcagaccguaaccauua

SEQ ID NO: 1791394 - RNA, 19 nt, Homo sapiens
  misc_RNA (1)...(19): siRNA sense strand
gagagacuguggaguuuga

SEQ ID NO: 1791395 - RNA, 19 nt, Homo sapiens
  misc_RNA (1)...(19): siRNA sense strand
gaacaagguagaccaguga

SEQ ID NO: 1791396 - RNA, 19 nt, Homo sapiens
  misc_RNA (1)...(19): siRNA sense strand
ggacggcaaugaagaagau

SEQ ID NO: 1791397 - RNA, 19 nt, Homo sapiens
  misc_RNA (1)...(19): siRNA sense strand
ggaguuugauguuguugaa

SEQ ID NO: 1791398 - RNA, 19 nt, Homo sapiens
  misc_RNA (1)...(19): siRNA sense strand
ggaaugacaccaaggaaga

SEQ ID NO: 1791399 - RNA, 19 nt, Homo sapiens
  misc_RNA (1)...(19): siRNA sense strand
ggauaugguuucaucaaca

SEQ ID NO: 1791400 - RNA, 19 nt, Homo sapiens
  misc_RNA (1)...(19): siRNA sense strand
gcaaugaagaagauaaaga

SEQ ID NO: 1791401 - RNA, 19 nt, Homo sapiens
  misc_RNA (1)...(19): siRNA sense strand
caaccagggugcaggagaa

SEQ ID NO: 1791402 - RNA, 19 nt, Homo sapiens
  misc_RNA (1)...(19): siRNA sense strand
guaaggaacggauaugguu

SEQ ID NO: 1791403 - RNA, 19 nt, Homo sapiens
  misc_RNA (1)...(19): siRNA sense strand
caccaaggaagauguauuu

SEQ ID NO: 1791404 - RNA, 19 nt, Homo sapiens
  misc_RNA (1)...(19): siRNA sense strand
gcggaggcagcaaauguua

SEQ ID NO: 1791405 - RNA, 19 nt, Homo sapiens
  misc_RNA (1)...(19): siRNA sense strand
guucaaggcaguaaauaug

SEQ ID NO: 1791406 - RNA, 19 nt, Homo sapiens
  misc_RNA (1)...(19): siRNA sense strand
agacugccauaaagaagaa

SEQ ID NO: 1791407 - RNA, 19 nt, Homo sapiens
  misc_RNA (1)...(19): siRNA sense strand
cgacgcagacgcccagaaa

SEQ ID NO: 1791408 - RNA, 19 nt, Homo sapiens
  misc_RNA (1)...(19): siRNA sense strand
guucccaccuuacuacaug

SEQ ID NO: 1791409 - RNA, 19 nt, Homo sapiens
  misc_RNA (1)...(19): siRNA sense strand
gcagcagaccguaaccauu

SEQ ID NO: 1791410 - RNA, 19 nt, Homo sapiens
  misc_RNA (1)...(19): siRNA sense strand
gagaggacggcaaugaaga

SEQ ID NO: 1791411 - RNA, 19 nt, Homo sapiens
  misc_RNA (1)...(19): siRNA sense strand
gcagaccguaaccauuaua

SEQ ID NO: 1791412 - RNA, 19 nt, Homo sapiens
  misc_RNA (1)...(19): siRNA sense strand
gauaugguuucaucaacag

SEQ ID NO: 1791413 - RNA, 19 nt, Homo sapiens
  misc_RNA (1)...(19): siRNA sense strand
ccagugaggcagaauaugu

SEQ ID NO: 1791414 - RNA, 19 nt, Homo sapiens
  misc_RNA (1)...(19): siRNA sense strand
cagcaaaauuaccagaaua

SEQ ID NO: 1791415 - RNA, 19 nt, Homo sapiens
  misc_RNA (1)...(19): siRNA sense strand
uggagagacuguggaguuu

SEQ ID NO: 1791416 - RNA, 19 nt, Homo sapiens
  misc_RNA (1)...(19): siRNA sense strand
ccaaggaagauguauuugu

SEQ ID NO: 1791417 - RNA, 19 nt, Homo sapiens
  misc_RNA (1)...(19): siRNA sense strand
acaccagacugccauaaag

SEQ ID NO: 1791418 - RNA, 19 nt, Homo sapiens
  misc_RNA (1)...(19): siRNA sense strand
gauggagggugcugacaac

SEQ ID NO: 1791419 - RNA, 19 nt, Homo sapiens
  misc_RNA (1)...(19): siRNA sense strand
ccacgcaauuaccagcaaa

SEQ ID NO: 1791420 - RNA, 19 nt, Homo sapiens
  misc_RNA (1)...(19): siRNA sense strand
gaccagugaggcagaauau

SEQ ID NO: 1791421 - RNA, 19 nt, Homo sapiens
  misc_RNA (1)...(19): siRNA sense strand
ggaggcagcaaauguuaca

SEQ ID NO: 1791422 - RNA, 19 nt, Homo sapiens
  misc_RNA (1)...(19): siRNA sense strand
gggcgucgaccacaguauu

SEQ ID NO: 1791423 - RNA, 19 nt, Homo sapiens
  misc_RNA (1)...(19): siRNA sense strand
uaaggaacggauaugguuu

SEQ ID NO: 1791424 - RNA, 19 nt, Homo sapiens
  misc_RNA (1)...(19): siRNA sense strand
ggauauagaccacgauucc

SEQ ID NO: 1791425 - RNA, 19 nt, Homo sapiens
  misc_RNA (1)...(19): siRNA sense strand
guagaccagugaggcagaa

SEQ ID NO: 1791426 - RNA, 19 nt, Homo sapiens
  misc_RNA (1)...(19): siRNA sense strand
ugacaccaaggaagaugua

SEQ ID NO: 1791427 - RNA, 19 nt, Homo sapiens
  misc_RNA (1)...(19): siRNA sense strand
cuagagaggacggcaauga

SEQ ID NO: 1791428 - RNA, 19 nt, Homo sapiens
  misc_RNA (1)...(19): siRNA sense strand
cagugaggcagaauaugua

SEQ ID NO: 1791429 - RNA, 19 nt, Homo sapiens
  misc_RNA (1)...(19): siRNA sense strand
agaaggucaucgcaacgaa

SEQ ID NO: 1791430 - RNA, 19 nt, Homo sapiens
  misc_RNA (1)...(19): siRNA sense strand
uguaggagauggagagacu

SEQ ID NO: 1791431 - RNA, 19 nt, Homo sapiens
  misc_RNA (1)...(19): siRNA sense strand
guacaccagacugccauaa

SEQ ID NO: 1791432 - RNA, 19 nt, Homo sapiens
  misc_RNA (1)...(19): siRNA sense strand
gaacgagggaucggagagu

SEQ ID NO: 1791433 - RNA, 19 nt, Homo sapiens
  misc_RNA (1)...(19): siRNA sense strand
ucaaggcaguaaauaugca

SEQ ID NO: 1791434 - RNA, 19 nt, Homo sapiens
  misc_RNA (1)...(19): siRNA sense strand
gugcggaggcagcaaaugu

SEQ ID NO: 1791435 - RNA, 19 nt, Homo sapiens
  misc_RNA (1)...(19): siRNA sense strand
caagauggcaaagagacaa

SEQ ID NO: 1791436 - RNA, 19 nt, Homo sapiens
  misc_RNA (1)...(19): siRNA sense strand
ccacaagauggcaaagaga

SEQ ID NO: 1791437 - RNA, 19 nt, Homo sapiens
  misc_RNA (1)...(19): siRNA sense strand
uagagaggacggcaaugaa

SEQ ID NO: 1791438 - RNA, 19 nt, Homo sapiens
  misc_RNA (1)...(19): siRNA sense strand
gaccguaaccauuauagac

SEQ ID NO: 1791439 - RNA, 19 nt, Homo sapiens
  misc_RNA (1)...(19): siRNA sense strand
caauguaaggaacggauau

SEQ ID NO: 1791440 - RNA, 19 nt, Homo sapiens
  misc_RNA (1)...(19): siRNA sense strand
gaaugacaccaaggaagau

SEQ ID NO: 1791441 - RNA, 19 nt, Homo sapiens
  misc_RNA (1)...(19): siRNA sense strand
ggagagacuguggaguuug

SEQ ID NO: 1791442 - RNA, 19 nt, Homo sapiens
  misc_RNA (1)...(19): siRNA sense strand
ucaauguaaggaacggaua

SEQ ID NO: 1791443 - RNA, 19 nt, Homo sapiens
  misc_RNA (1)...(19): siRNA sense strand
cggcaaugaagaagauaaa

SEQ ID NO: 1791444 - RNA, 19 nt, Homo sapiens
  misc_RNA (1)...(19): siRNA sense strand
ugauguuguugaaggagaa

SEQ ID NO: 1791445 - RNA, 19 nt, Homo sapiens
  misc_RNA (1)...(19): siRNA sense strand
uaaaccacaagauggcaaa

SEQ ID NO: 1791446 - RNA, 19 nt, Homo sapiens
  misc_RNA (1)...(19): siRNA sense strand
ggucaucgcaacgaagguu

SEQ ID NO: 1791447 - RNA, 19 nt, Homo sapiens
  misc_RNA (1)...(19): siRNA sense strand
ccaguucaaggcaguaaau

SEQ ID NO: 1791448 - RNA, 19 nt, Homo sapiens
  misc_RNA (1)...(19): siRNA sense strand
caccagacugccauaaaga

SEQ ID NO: 1791449 - RNA, 19 nt, Homo sapiens
  misc_RNA (1)...(19): siRNA sense strand
acaguaaaaugguucaaug

SEQ ID NO: 1791450 - RNA, 19 nt, Homo sapiens
  misc_RNA (1)...(19): siRNA sense strand
cagacugccauaaagaaga

SEQ ID NO: 1791451 - RNA, 19 nt, Homo sapiens
  misc_RNA (1)...(19): siRNA sense strand
gaaaaucaaggagaugaga

SEQ ID NO: 1791452 - RNA, 19 nt, Homo sapiens
  misc_RNA (1)...(19): siRNA sense strand
ccagggugcaggagaacaa

SEQ ID NO: 1791453 - RNA, 19 nt, Homo sapiens
  misc_RNA (1)...(19): siRNA sense strand
agaaaacccuaaaccacaa

SEQ ID NO: 1791454 - RNA, 19 nt, Homo sapiens
  misc_RNA (1)...(19): siRNA sense strand
agaggacggcaaugaagaa

SEQ ID NO: 1791455 - RNA, 19 nt, Homo sapiens
  misc_RNA (1)...(19): siRNA sense strand
agaccagugaggcagaaua

SEQ ID NO: 1791456 - RNA, 19 nt, Homo sapiens
  misc_RNA (1)...(19): siRNA sense strand
agaauaaccccaggaagua

SEQ ID NO: 1791457 - RNA, 19 nt, Homo sapiens
  misc_RNA (1)...(19): siRNA sense strand
cggauaugguuucaucaac

SEQ ID NO: 1791458 - RNA, 19 nt, Homo sapiens
  misc_RNA (1)...(19): siRNA sense strand
caaaauuaccagaauagug

SEQ ID NO: 1791459 - RNA, 19 nt, Homo sapiens
  misc_RNA (1)...(19): siRNA sense strand
ccagcaaaauuaccagaau

SEQ ID NO: 1791460 - RNA, 19 nt, Homo sapiens
  misc_RNA (1)...(19): siRNA sense strand
gcacaggacuucuaugaga

SEQ ID NO: 1791461 - RNA, 19 nt, Homo sapiens
  misc_RNA (1)...(19): siRNA sense strand
ggaaagagguggacaugug

SEQ ID NO: 1791462 - RNA, 19 nt, Homo sapiens
  misc_RNA (1)...(19): siRNA sense strand
gcacuggcgucaucaugua

SEQ ID NO: 1791463 - RNA, 19 nt, Homo sapiens
  misc_RNA (1)...(19): siRNA sense strand
gaccaacacuuucuucuuc

SEQ ID NO: 1791464 - RNA, 19 nt, Homo sapiens
  misc_RNA (1)...(19): siRNA sense strand
gaaggaaaccagaaagauc

SEQ ID NO: 1791465 - RNA, 19 nt, Homo sapiens
  misc_RNA (1)...(19): siRNA sense strand
gcucacagacuuuggcuuu

SEQ ID NO: 1791466 - RNA, 19 nt, Homo sapiens
  misc_RNA (1)...(19): siRNA sense strand
gaggggagcucuuugacua

SEQ ID NO: 1791467 - RNA, 19 nt, Homo sapiens
  misc_RNA (1)...(19): siRNA sense strand
gagaaggaaaccagaaaga

SEQ ID NO: 1791468 - RNA, 19 nt, Homo sapiens
  misc_RNA (1)...(19): siRNA sense strand
cuuaugagaccaacacuuu

SEQ ID NO: 1791469 - RNA, 19 nt, Homo sapiens
  misc_RNA (1)...(19): siRNA sense strand
gagaagccacgcugaagga

SEQ ID NO: 1791470 - RNA, 19 nt, Homo sapiens
  misc_RNA (1)...(19): siRNA sense strand
ucucuuggaugacaacaug

SEQ ID NO: 1791471 - RNA, 19 nt, Homo sapiens
  misc_RNA (1)...(19): siRNA sense strand
acaucaagcucacagacuu

SEQ ID NO: 1791472 - RNA, 19 nt, Homo sapiens
  misc_RNA (1)...(19): siRNA sense strand
agaauuaugagcccaaaga

SEQ ID NO: 1791473 - RNA, 19 nt, Homo sapiens
  misc_RNA (1)...(19): siRNA sense strand
guggagcacuggcgucauc

SEQ ID NO: 1791474 - RNA, 19 nt, Homo sapiens
  misc_RNA (1)...(19): siRNA sense strand
gaucaugagcggcaacuac

SEQ ID NO: 1791475 - RNA, 19 nt, Homo sapiens
  misc_RNA (1)...(19): siRNA sense strand
gagcucugcuggaggugau

SEQ ID NO: 1791476 - RNA, 19 nt, Homo sapiens
  misc_RNA (1)...(19): siRNA sense strand
ccaacacuuucuucuucuu

SEQ ID NO: 1791477 - RNA, 19 nt, Homo sapiens
  misc_RNA (1)...(19): siRNA sense strand
cgccuacgcuuuccgaauc

SEQ ID NO: 1791478 - RNA, 19 nt, Homo sapiens
  misc_RNA (1)...(19): siRNA sense strand
caacacuuucuucuucuug

SEQ ID NO: 1791479 - RNA, 19 nt, Homo sapiens
  misc_RNA (1)...(19): siRNA sense strand
gcacugccggacucucauu

SEQ ID NO: 1791480 - RNA, 19 nt, Homo sapiens
  misc_RNA (1)...(19): siRNA sense strand
caucgacgccuacgcuuuc

SEQ ID NO: 1791481 - RNA, 19 nt, Homo sapiens
  misc_RNA (1)...(19): siRNA sense strand
gugagaaggaaaccagaaa

SEQ ID NO: 1791482 - RNA, 19 nt, Homo sapiens
  misc_RNA (1)...(19): siRNA sense strand
caucaagcucacagacuuu

SEQ ID NO: 1791483 - RNA, 19 nt, Homo sapiens
  misc_RNA (1)...(19): siRNA sense strand
aaggaaaccagaaagauca

SEQ ID NO: 1791484 - RNA, 19 nt, Homo sapiens
  misc_RNA (1)...(19): siRNA sense strand
ugaccgugcuggcuucagu

SEQ ID NO: 1791485 - RNA, 19 nt, Homo sapiens
  misc_RNA (1)...(19): siRNA sense strand
gagcacuggcgucaucaug

SEQ ID NO: 1791486 - RNA, 19 nt, Homo sapiens
  misc_RNA (1)...(19): siRNA sense strand
cugcacaggacuucuauga

SEQ ID NO: 1791487 - RNA, 19 nt, Homo sapiens
  misc_RNA (1)...(19): siRNA sense strand
ugagaauuaugagcccaaa

SEQ ID NO: 1791488 - RNA, 19 nt, Homo sapiens
  misc_RNA (1)...(19): siRNA sense strand
gcaccuugcacaaacucaa

SEQ ID NO: 1791489 - RNA, 19 nt, Homo sapiens
  misc_RNA (1)...(19): siRNA sense strand
uguuugaccugaugaagag

SEQ ID NO: 1791490 - RNA, 19 nt, Homo sapiens
  misc_RNA (1)...(19): siRNA sense strand
cuucagugcggaucuacua

SEQ ID NO: 1791491 - RNA, 19 nt, Homo sapiens
  misc_RNA (1)...(19): siRNA sense strand
gaauuaugagcccaaagag

SEQ ID NO: 1791492 - RNA, 19 nt, Homo sapiens
  misc_RNA (1)...(19): siRNA sense strand
ggccgaggaggacuacuga

SEQ ID NO: 1791493 - RNA, 19 nt, Homo sapiens
  misc_RNA (1)...(19): siRNA sense strand
cugaaggacacuuaugaga

SEQ ID NO: 1791494 - RNA, 19 nt, Homo sapiens
  misc_RNA (1)...(19): siRNA sense strand
agaaggaaaccagaaagau

SEQ ID NO: 1791495 - RNA, 19 nt, Homo sapiens
  misc_RNA (1)...(19): siRNA sense strand
agaccaacacuuucuucuu

SEQ ID NO: 1791496 - RNA, 19 nt, Homo sapiens
  misc_RNA (1)...(19): siRNA sense strand
gcgagaagccacgcugaag

SEQ ID NO: 1791497 - RNA, 19 nt, Homo sapiens
  misc_RNA (1)...(19): siRNA sense strand
auuaugagcccaaagagau

SEQ ID NO: 1791498 - RNA, 19 nt, Homo sapiens
  misc_RNA (1)...(19): siRNA sense strand
ccaacaucauacagcugaa

SEQ ID NO: 1791499 - RNA, 19 nt, Homo sapiens
  misc_RNA (1)...(19): siRNA sense strand
guguuugaccugaugaaga

SEQ ID NO: 1791500 - RNA, 19 nt, Homo sapiens
  misc_RNA (1)...(19): siRNA sense strand
ggaaaccagaaagaucaug

SEQ ID NO: 1791501 - RNA, 19 nt, Homo sapiens
  misc_RNA (1)...(19): siRNA sense strand
ggaggaggcuuucgagcua

SEQ ID NO: 1791502 - RNA, 19 nt, Homo sapiens
  misc_RNA (1)...(19): siRNA sense strand
auucaugacuccuguauua

SEQ ID NO: 1791503 - RNA, 19 nt, Homo sapiens
  misc_RNA (1)...(19): siRNA sense strand
ucaaaggacuguucugaug

SEQ ID NO: 1791504 - RNA, 19 nt, Homo sapiens
  misc_RNA (1)...(19): siRNA sense strand
cguccgaagugauuaaaua

SEQ ID NO: 1791505 - RNA, 19 nt, Homo sapiens
  misc_RNA (1)...(19): siRNA sense strand
ccgaagugauuaaauauga

SEQ ID NO: 1791506 - RNA, 19 nt, Homo sapiens
  misc_RNA (1)...(19): siRNA sense strand
gagcuacccuuggaugauu

SEQ ID NO: 1791507 - RNA, 19 nt, Homo sapiens
  misc_RNA (1)...(19): siRNA sense strand
guucaugagugcuauaaga

SEQ ID NO: 1791508 - RNA, 19 nt, Homo sapiens
  misc_RNA (1)...(19): siRNA sense strand
ggacauaugggaaggaguu

SEQ ID NO: 1791509 - RNA, 19 nt, Homo sapiens
  misc_RNA (1)...(19): siRNA sense strand
ugaacgaaaugucccuuaa

SEQ ID NO: 1791510 - RNA, 19 nt, Homo sapiens
  misc_RNA (1)...(19): siRNA sense strand
gcaacaggaacauccaaua

SEQ ID NO: 1791511 - RNA, 19 nt, Homo sapiens
  misc_RNA (1)...(19): siRNA sense strand
gaaucuaccucugaguuau

SEQ ID NO: 1791512 - RNA, 19 nt, Homo sapiens
  misc_RNA (1)...(19): siRNA sense strand
ucaacuauaucacaucaug

SEQ ID NO: 1791513 - RNA, 19 nt, Homo sapiens
  misc_RNA (1)...(19): siRNA sense strand
gugcagaauucauuaaaca

SEQ ID NO: 1791514 - RNA, 19 nt, Homo sapiens
  misc_RNA (1)...(19): siRNA sense strand
gaaugggucugugauguca

SEQ ID NO: 1791515 - RNA, 19 nt, Homo sapiens
  misc_RNA (1)...(19): siRNA sense strand
caucauggcugagcauugu

SEQ ID NO: 1791516 - RNA, 19 nt, Homo sapiens
  misc_RNA (1)...(19): siRNA sense strand
caacagauaggugauaguu

SEQ ID NO: 1791517 - RNA, 19 nt, Homo sapiens
  misc_RNA (1)...(19): siRNA sense strand
ggaugauugugaagugauu

SEQ ID NO: 1791518 - RNA, 19 nt, Homo sapiens
  misc_RNA (1)...(19): siRNA sense strand
gggagaccuuuaacucuga

SEQ ID NO: 1791519 - RNA, 19 nt, Homo sapiens
  misc_RNA (1)...(19): siRNA sense strand
ggaccaugggacacuauua

SEQ ID NO: 1791520 - RNA, 19 nt, Homo sapiens
  misc_RNA (1)...(19): siRNA sense strand
acaggaacauccaauacuu

SEQ ID NO: 1791521 - RNA, 19 nt, Homo sapiens
  misc_RNA (1)...(19): siRNA sense strand
ugaaucuaccucugaguua

SEQ ID NO: 1791522 - RNA, 19 nt, Homo sapiens
  misc_RNA (1)...(19): siRNA sense strand
ugacuccuguauuaaagaa

SEQ ID NO: 1791523 - RNA, 19 nt, Homo sapiens
  misc_RNA (1)...(19): siRNA sense strand
ggugauaguugggaaugga

SEQ ID NO: 1791524 - RNA, 19 nt, Homo sapiens
  misc_RNA (1)...(19): siRNA sense strand
gaaugucaacuauaucaca

SEQ ID NO: 1791525 - RNA, 19 nt, Homo sapiens
  misc_RNA (1)...(19): siRNA sense strand
caucaaaggacuguucuga

SEQ ID NO: 1791526 - RNA, 19 nt, Homo sapiens
  misc_RNA (1)...(19): siRNA sense strand
gaauucaugacuccuguau

SEQ ID NO: 1791527 - RNA, 19 nt, Homo sapiens
  misc_RNA (1)...(19): siRNA sense strand
caacaggaacauccaauac

SEQ ID NO: 1791528 - RNA, 19 nt, Homo sapiens
  misc_RNA (1)...(19): siRNA sense strand
gggcugaaucuaccucuga

SEQ ID NO: 1791529 - RNA, 19 nt, Homo sapiens
  misc_RNA (1)...(19): siRNA sense strand
gaugggagaccuuuaacuc

SEQ ID NO: 1791530 - RNA, 19 nt, Homo sapiens
  misc_RNA (1)...(19): siRNA sense strand
ggagaccuuuaacucugaa

SEQ ID NO: 1791531 - RNA, 19 nt, Homo sapiens
  misc_RNA (1)...(19): siRNA sense strand
gcagcagcguccgaaguga

SEQ ID NO: 1791532 - RNA, 19 nt, Homo sapiens
  misc_RNA (1)...(19): siRNA sense strand
caaagcaacgucucaggau

SEQ ID NO: 1791533 - RNA, 19 nt, Homo sapiens
  misc_RNA (1)...(19): siRNA sense strand
cauuaaacauucacaacag

SEQ ID NO: 1791534 - RNA, 19 nt, Homo sapiens
  misc_RNA (1)...(19): siRNA sense strand
ucaugacuccuguauuaaa

SEQ ID NO: 1791535 - RNA, 19 nt, Homo sapiens
  misc_RNA (1)...(19): siRNA sense strand
uuagaugggagaccuuuaa

SEQ ID NO: 1791536 - RNA, 19 nt, Homo sapiens
  misc_RNA (1)...(19): siRNA sense strand
ccaacguuauugugcagaa

SEQ ID NO: 1791537 - RNA, 19 nt, Homo sapiens
  misc_RNA (1)...(19): siRNA sense strand
caugacuccuguauuaaag

SEQ ID NO: 1791538 - RNA, 19 nt, Homo sapiens
  misc_RNA (1)...(19): siRNA sense strand
ugucaacuauaucacauca

SEQ ID NO: 1791539 - RNA, 19 nt, Homo sapiens
  misc_RNA (1)...(19): siRNA sense strand
aagaaugggucugugaugu

SEQ ID NO: 1791540 - RNA, 19 nt, Homo sapiens
  misc_RNA (1)...(19): siRNA sense strand
gugccuguacuuuacuuua

SEQ ID NO: 1791541 - RNA, 19 nt, Homo sapiens
  misc_RNA (1)...(19): siRNA sense strand
gggacacuauuacgcaaca

SEQ ID NO: 1791542 - RNA, 19 nt, Homo sapiens
  misc_RNA (1)...(19): siRNA sense strand
guacuucaucccugcaaga

SEQ ID NO: 1791543 - RNA, 19 nt, Homo sapiens
  misc_RNA (1)...(19): siRNA sense strand
gauugugaagugauugaaa

SEQ ID NO: 1791544 - RNA, 19 nt, Homo sapiens
  misc_RNA (1)...(19): siRNA sense strand
caacguuauugugcagaau

SEQ ID NO: 1791545 - RNA, 19 nt, Homo sapiens
  misc_RNA (1)...(19): siRNA sense strand
gaccaucaaaggacuguuc

SEQ ID NO: 1791546 - RNA, 19 nt, Homo sapiens
  misc_RNA (1)...(19): siRNA sense strand
uaagaaugggucugugaug

SEQ ID NO: 1791547 - RNA, 19 nt, Homo sapiens
  misc_RNA (1)...(19): siRNA sense strand
aagcaacgucucaggauga

SEQ ID NO: 1791548 - RNA, 19 nt, Homo sapiens
  misc_RNA (1)...(19): siRNA sense strand
ggaguucaugagugcuaua

SEQ ID NO: 1791549 - RNA, 19 nt, Homo sapiens
  misc_RNA (1)...(19): siRNA sense strand
cacaacagauaggugauag

SEQ ID NO: 1791550 - RNA, 19 nt, Homo sapiens
  misc_RNA (1)...(19): siRNA sense strand
ccugcaagacgaaugaauu

SEQ ID NO: 1791551 - RNA, 19 nt, Homo sapiens
  misc_RNA (1)...(19): siRNA sense strand
gaccaugggacacuauuac

SEQ ID NO: 1791552 - RNA, 19 nt, Homo sapiens
  misc_RNA (1)...(19): siRNA sense strand
cgaagugauuaaauaugag

SEQ ID NO: 1791553 - RNA, 19 nt, Homo sapiens
  misc_RNA (1)...(19): siRNA sense strand
aaacauuccaacguuauug

SEQ ID NO: 1791554 - RNA, 19 nt, Homo sapiens
  misc_RNA (1)...(19): siRNA sense strand
caggaacauccaauacuug

SEQ ID NO: 1791555 - RNA, 19 nt, Homo sapiens
  misc_RNA (1)...(19): siRNA sense strand
gaguucaugagugcuauaa

SEQ ID NO: 1791556 - RNA, 19 nt, Homo sapiens
  misc_RNA (1)...(19): siRNA sense strand
aaacauucacaacagauag

SEQ ID NO: 1791557 - RNA, 19 nt, Homo sapiens
  misc_RNA (1)...(19): siRNA sense strand
guccgaagugauuaaauau

SEQ ID NO: 1791558 - RNA, 19 nt, Homo sapiens
  misc_RNA (1)...(19): siRNA sense strand
gcagcguccgaagugauua

SEQ ID NO: 1791559 - RNA, 19 nt, Homo sapiens
  misc_RNA (1)...(19): siRNA sense strand
cagggaccaugggacacua

SEQ ID NO: 1791560 - RNA, 19 nt, Homo sapiens
  misc_RNA (1)...(19): siRNA sense strand
ugccuguacuuuacuuuag

SEQ ID NO: 1791561 - RNA, 19 nt, Homo sapiens
  misc_RNA (1)...(19): siRNA sense strand
acccuuggaugauugugaa

SEQ ID NO: 1791562 - RNA, 19 nt, Homo sapiens
  misc_RNA (1)...(19): siRNA sense strand
gaaggacauaugggaagga

SEQ ID NO: 1791563 - RNA, 19 nt, Homo sapiens
  misc_RNA (1)...(19): siRNA sense strand
uaacucugaaggacauaug

SEQ ID NO: 1791564 - RNA, 19 nt, Homo sapiens
  misc_RNA (1)...(19): siRNA sense strand
cagcguccgaagugauuaa

SEQ ID NO: 1791565 - RNA, 19 nt, Homo sapiens
  misc_RNA (1)...(19): siRNA sense strand
cgucucaggaugaacgaaa

SEQ ID NO: 1791566 - RNA, 19 nt, Homo sapiens
  misc_RNA (1)...(19): siRNA sense strand
gagaagaagcugcgcauaa

SEQ ID NO: 1791567 - RNA, 19 nt, Homo sapiens
  misc_RNA (1)...(19): siRNA sense strand
ggaggauccuuucuucaaa

SEQ ID NO: 1791568 - RNA, 19 nt, Homo sapiens
  misc_RNA (1)...(19): siRNA sense strand
agaagaagcugcgcauaaa

SEQ ID NO: 1791569 - RNA, 19 nt, Homo sapiens
  misc_RNA (1)...(19): siRNA sense strand
agacuucccucgaggauuu

SEQ ID NO: 1791570 - RNA, 19 nt, Homo sapiens
  misc_RNA (1)...(19): siRNA sense strand
gaaagugacccagaauuug

SEQ ID NO: 1791571 - RNA, 19 nt, Homo sapiens
  misc_RNA (1)...(19): siRNA sense strand
uaaccagccuuucaucuuc

SEQ ID NO: 1791572 - RNA, 19 nt, Homo sapiens
  misc_RNA (1)...(19): siRNA sense strand
ugaaagugacccagaauuu

SEQ ID NO: 1791573 - RNA, 19 nt, Homo sapiens
  misc_RNA (1)...(19): siRNA sense strand
ucaccgggcucucuacuau

SEQ ID NO: 1791574 - RNA, 19 nt, Homo sapiens
  misc_RNA (1)...(19): siRNA sense strand
ccucgaggauuucuacuug

SEQ ID NO: 1791575 - RNA, 19 nt, Homo sapiens
  misc_RNA (1)...(19): siRNA sense strand
ccgcuggacuaucaccuua

SEQ ID NO: 1791576 - RNA, 19 nt, Homo sapiens
  misc_RNA (1)...(19): siRNA sense strand
ucaccagacuuuagcaaga

SEQ ID NO: 1791577 - RNA, 19 nt, Homo sapiens
  misc_RNA (1)...(19): siRNA sense strand
gcgaacagaauccaucauu

SEQ ID NO: 1791578 - RNA, 19 nt, Homo sapiens
  misc_RNA (1)...(19): siRNA sense strand
agaugaagcugcaauccuu

SEQ ID NO: 1791579 - RNA, 19 nt, Homo sapiens
  misc_RNA (1)...(19): siRNA sense strand
ccaagucccugcaggagau

SEQ ID NO: 1791580 - RNA, 19 nt, Homo sapiens
  misc_RNA (1)...(19): siRNA sense strand
agacauccaugguaccuau

SEQ ID NO: 1791581 - RNA, 19 nt, Homo sapiens
  misc_RNA (1)...(19): siRNA sense strand
ugacauagaccgagaacug

SEQ ID NO: 1791582 - RNA, 19 nt, Homo sapiens
  misc_RNA (1)...(19): siRNA sense strand
gaagcugcaauccuuguuu

SEQ ID NO: 1791583 - RNA, 19 nt, Homo sapiens
  misc_RNA (1)...(19): siRNA sense strand
ggcaguggguaacaaaguu

SEQ ID NO: 1791584 - RNA, 19 nt, Homo sapiens
  misc_RNA (1)...(19): siRNA sense strand
aaagugacccagaauuuga

SEQ ID NO: 1791585 - RNA, 19 nt, Homo sapiens
  misc_RNA (1)...(19): siRNA sense strand
gcuauggcuuggauucaga

SEQ ID NO: 1791586 - RNA, 19 nt, Homo sapiens
  misc_RNA (1)...(19): siRNA sense strand
ugcaagagaucaacaacug

SEQ ID NO: 1791587 - RNA, 19 nt, Homo sapiens
  misc_RNA (1)...(19): siRNA sense strand
gagcggagcagcgaacaga

SEQ ID NO: 1791588 - RNA, 19 nt, Homo sapiens
  misc_RNA (1)...(19): siRNA sense strand
gcaguggguaacaaaguuu

SEQ ID NO: 1791589 - RNA, 19 nt, Homo sapiens
  misc_RNA (1)...(19): siRNA sense strand
gaaauucccgaugagauca

SEQ ID NO: 1791590 - RNA, 19 nt, Homo sapiens
  misc_RNA (1)...(19): siRNA sense strand
gaucagcauucuccuucuc

SEQ ID NO: 1791591 - RNA, 19 nt, Homo sapiens
  misc_RNA (1)...(19): siRNA sense strand
gggcuggcuuugaguggaa

SEQ ID NO: 1791592 - RNA, 19 nt, Homo sapiens
  misc_RNA (1)...(19): siRNA sense strand
aaguuugacuccagaaaga

SEQ ID NO: 1791593 - RNA, 19 nt, Homo sapiens
  misc_RNA (1)...(19): siRNA sense strand
gugcuacuccucugcauug

SEQ ID NO: 1791594 - RNA, 19 nt, Homo sapiens
  misc_RNA (1)...(19): siRNA sense strand
gcuccugucuccucucagu

SEQ ID NO: 1791595 - RNA, 19 nt, Homo sapiens
  misc_RNA (1)...(19): siRNA sense strand
gaucagcagcccagacauc

SEQ ID NO: 1791596 - RNA, 19 nt, Homo sapiens
  misc_RNA (1)...(19): siRNA sense strand
gacauagaccgagaacuga

SEQ ID NO: 1791597 - RNA, 19 nt, Homo sapiens
  misc_RNA (1)...(19): siRNA sense strand
aagcugcaauccuuguuug

SEQ ID NO: 1791598 - RNA, 19 nt, Homo sapiens
  misc_RNA (1)...(19): siRNA sense strand
gaacaccgggcuggcuuug

SEQ ID NO: 1791599 - RNA, 19 nt, Homo sapiens
  misc_RNA (1)...(19): siRNA sense strand
gaauuugaccuugauagag

SEQ ID NO: 1791600 - RNA, 19 nt, Homo sapiens
  misc_RNA (1)...(19): siRNA sense strand
gagccucaccuccgaguuc

SEQ ID NO: 1791601 - RNA, 19 nt, Homo sapiens
  misc_RNA (1)...(19): siRNA sense strand
ucagaucucagcugcaaga

SEQ ID NO: 1791602 - RNA, 19 nt, Homo sapiens
  misc_RNA (1)...(19): siRNA sense strand
ggaacaccgggcuggcuuu

SEQ ID NO: 1791603 - RNA, 19 nt, Homo sapiens
  misc_RNA (1)...(19): siRNA sense strand
guacugagggacacagaca

SEQ ID NO: 1791604 - RNA, 19 nt, Homo sapiens
  misc_RNA (1)...(19): siRNA sense strand
ucucuacuaugacuugauc

SEQ ID NO: 1791605 - RNA, 19 nt, Homo sapiens
  misc_RNA (1)...(19): siRNA sense strand
caccagacuuuagcaagau

SEQ ID NO: 1791606 - RNA, 19 nt, Homo sapiens
  misc_RNA (1)...(19): siRNA sense strand
agaauuugaccuugauaga

SEQ ID NO: 1791607 - RNA, 19 nt, Homo sapiens
  misc_RNA (1)...(19): siRNA sense strand
ccgaugagaucagcauucu

SEQ ID NO: 1791608 - RNA, 19 nt, Homo sapiens
  misc_RNA (1)...(19): siRNA sense strand
gaagaagcugcgcauaaaa

SEQ ID NO: 1791609 - RNA, 19 nt, Homo sapiens
  misc_RNA (1)...(19): siRNA sense strand
accgggcucucuacuauga

SEQ ID NO: 1791610 - RNA, 19 nt, Homo sapiens
  misc_RNA (1)...(19): siRNA sense strand
ucgaggauuucuacuugga

SEQ ID NO: 1791611 - RNA, 19 nt, Homo sapiens
  misc_RNA (1)...(19): siRNA sense strand
ccucccggaucgucuuuga

SEQ ID NO: 1791612 - RNA, 19 nt, Homo sapiens
  misc_RNA (1)...(19): siRNA sense strand
ccuuucaucuucguacuga

SEQ ID NO: 1791613 - RNA, 19 nt, Homo sapiens
  misc_RNA (1)...(19): siRNA sense strand
acccagaauuugaccuuga

SEQ ID NO: 1791614 - RNA, 19 nt, Homo sapiens
  misc_RNA (1)...(19): siRNA sense strand
ccagaagaaccucaagagu

SEQ ID NO: 1791615 - RNA, 19 nt, Homo sapiens
  misc_RNA (1)...(19): siRNA sense strand
uuaaccagccuuucaucuu

SEQ ID NO: 1791616 - RNA, 19 nt, Homo sapiens
  misc_RNA (1)...(19): siRNA sense strand
gcuggacuaucaccuuaac

SEQ ID NO: 1791617 - RNA, 19 nt, Homo sapiens
  misc_RNA (1)...(19): siRNA sense strand
acaccgggcuggcuuugag

SEQ ID NO: 1791618 - RNA, 19 nt, Homo sapiens
  misc_RNA (1)...(19): siRNA sense strand
ggauuucuacuuggaugaa

SEQ ID NO: 1791619 - RNA, 19 nt, Homo sapiens
  misc_RNA (1)...(19): siRNA sense strand
caccuuaaccagccuuuca

SEQ ID NO: 1791620 - RNA, 19 nt, Homo sapiens
  misc_RNA (1)...(19): siRNA sense strand
auucagaucucagcugcaa

SEQ ID NO: 1791621 - RNA, 19 nt, Homo sapiens
  misc_RNA (1)...(19): siRNA sense strand
gugcuccugucuccucuca

SEQ ID NO: 1791622 - RNA, 19 nt, Homo sapiens
  misc_RNA (1)...(19): siRNA sense strand
gggcaguggguaacaaagu

SEQ ID NO: 1791623 - RNA, 19 nt, Homo sapiens
  misc_RNA (1)...(19): siRNA sense strand
gcggagcagcgaacagaau

SEQ ID NO: 1791624 - RNA, 19 nt, Homo sapiens
  misc_RNA (1)...(19): siRNA sense strand
gcgcauaaaauccagcuuu

SEQ ID NO: 1791625 - RNA, 19 nt, Homo sapiens
  misc_RNA (1)...(19): siRNA sense strand
gcucucuacuaugacuuga

SEQ ID NO: 1791626 - RNA, 19 nt, Homo sapiens
  misc_RNA (1)...(19): siRNA sense strand
ucuccaacuucggcuauga

SEQ ID NO: 1791627 - RNA, 19 nt, Homo sapiens
  misc_RNA (1)...(19): siRNA sense strand
cccagaauuugaccuugau

SEQ ID NO: 1791628 - RNA, 19 nt, Homo sapiens
  misc_RNA (1)...(19): siRNA sense strand
gaaggcgaagucaccaagu

SEQ ID NO: 1791629 - RNA, 19 nt, Homo sapiens
  misc_RNA (1)...(19): siRNA sense strand
ccagaauuugaccuugaua

SEQ ID NO: 1791630 - RNA, 19 nt, Homo sapiens
  misc_RNA (1)...(19): siRNA sense strand
gaggaagaguuuaacauug

SEQ ID NO: 1791631 - RNA, 19 nt, Homo sapiens
  misc_RNA (1)...(19): siRNA sense strand
gcaggaagccaaugagaaa

SEQ ID NO: 1791632 - RNA, 19 nt, Homo sapiens
  misc_RNA (1)...(19): siRNA sense strand
gacugaagauuauggagua

SEQ ID NO: 1791633 - RNA, 19 nt, Homo sapiens
  misc_RNA (1)...(19): siRNA sense strand
aggaagaguuuaacauuga

SEQ ID NO: 1791634 - RNA, 19 nt, Homo sapiens
  misc_RNA (1)...(19): siRNA sense strand
gguggaggcugcuguacaa

SEQ ID NO: 1791635 - RNA, 19 nt, Homo sapiens
  misc_RNA (1)...(19): siRNA sense strand
gaaaggacgccucgugcaa

SEQ ID NO: 1791636 - RNA, 19 nt, Homo sapiens
  misc_RNA (1)...(19): siRNA sense strand
gcuggaaccugugaugauu

SEQ ID NO: 1791637 - RNA, 19 nt, Homo sapiens
  misc_RNA (1)...(19): siRNA sense strand
gaaagcagaggaaaucgau

SEQ ID NO: 1791638 - RNA, 19 nt, Homo sapiens
  misc_RNA (1)...(19): siRNA sense strand
ucucagauuugcucaguga

SEQ ID NO: 1791639 - RNA, 19 nt, Homo sapiens
  misc_RNA (1)...(19): siRNA sense strand
ccgaguacaugacaauuuc

SEQ ID NO: 1791640 - RNA, 19 nt, Homo sapiens
  misc_RNA (1)...(19): siRNA sense strand
ugaggaagaguuuaacauu

SEQ ID NO: 1791641 - RNA, 19 nt, Homo sapiens
  misc_RNA (1)...(19): siRNA sense strand
ugagugaugucgaugugaa

SEQ ID NO: 1791642 - RNA, 19 nt, Homo sapiens
  misc_RNA (1)...(19): siRNA sense strand
gugcaaacccaacgacuga

SEQ ID NO: 1791643 - RNA, 19 nt, Homo sapiens
  misc_RNA (1)...(19): siRNA sense strand
agauagagcagcagaagaa

SEQ ID NO: 1791644 - RNA, 19 nt, Homo sapiens
  misc_RNA (1)...(19): siRNA sense strand
aggcauaccuggcugugaa

SEQ ID NO: 1791645 - RNA, 19 nt, Homo sapiens
  misc_RNA (1)...(19): siRNA sense strand
gugcuaacaccaacagaaa

SEQ ID NO: 1791646 - RNA, 19 nt, Homo sapiens
  misc_RNA (1)...(19): siRNA sense strand
cccaacgacugaagauuau

SEQ ID NO: 1791647 - RNA, 19 nt, Homo sapiens
  misc_RNA (1)...(19): siRNA sense strand
gcaaaagaugccagaaaua

SEQ ID NO: 1791648 - RNA, 19 nt, Homo sapiens
  misc_RNA (1)...(19): siRNA sense strand
ggaagaguuuaacauugag

SEQ ID NO: 1791649 - RNA, 19 nt, Homo sapiens
  misc_RNA (1)...(19): siRNA sense strand
acccaacgacugaagauua

SEQ ID NO: 1791650 - RNA, 19 nt, Homo sapiens
  misc_RNA (1)...(19): siRNA sense strand
gagcaggaagccaaugaga

SEQ ID NO: 1791651 - RNA, 19 nt, Homo sapiens
  misc_RNA (1)...(19): siRNA sense strand
ugagaaagcagaggaaauc

SEQ ID NO: 1791652 - RNA, 19 nt, Homo sapiens
  misc_RNA (1)...(19): siRNA sense strand
gaaauacgaauggccuugu

SEQ ID NO: 1791653 - RNA, 19 nt, Homo sapiens
  misc_RNA (1)...(19): siRNA sense strand
gcaaucagagaauaaaggu

SEQ ID NO: 1791654 - RNA, 19 nt, Homo sapiens
  misc_RNA (1)...(19): siRNA sense strand
ggaagccaaugagaaagca

SEQ ID NO: 1791655 - RNA, 19 nt, Homo sapiens
  misc_RNA (1)...(19): siRNA sense strand
gcagauagagcagcagaag

SEQ ID NO: 1791656 - RNA, 19 nt, Homo sapiens
  misc_RNA (1)...(19): siRNA sense strand
aaauacgaauggccuuguu

SEQ ID NO: 1791657 - RNA, 19 nt, Homo sapiens
  misc_RNA (1)...(19): siRNA sense strand
gcagauuaagcacaugaug

SEQ ID NO: 1791658 - RNA, 19 nt, Homo sapiens
  misc_RNA (1)...(19): siRNA sense strand
ggagguccagauugauaaa

SEQ ID NO: 1791659 - RNA, 19 nt, Homo sapiens
  misc_RNA (1)...(19): siRNA sense strand
gaaccugugaugauuguac

SEQ ID NO: 1791660 - RNA, 19 nt, Homo sapiens
  misc_RNA (1)...(19): siRNA sense strand
aaagaugccagaaauacga

SEQ ID NO: 1791661 - RNA, 19 nt, Homo sapiens
  misc_RNA (1)...(19): siRNA sense strand
caguggcaaucagagaaua

SEQ ID NO: 1791662 - RNA, 19 nt, Homo sapiens
  misc_RNA (1)...(19): siRNA sense strand
gcuaacaccaacagaaagu

SEQ ID NO: 1791663 - RNA, 19 nt, Homo sapiens
  misc_RNA (1)...(19): siRNA sense strand
acaugacaauuucccagaa

SEQ ID NO: 1791664 - RNA, 19 nt, Homo sapiens
  misc_RNA (1)...(19): siRNA sense strand
uaacaccaacagaaaguuc

SEQ ID NO: 1791665 - RNA, 19 nt, Homo sapiens
  misc_RNA (1)...(19): siRNA sense strand
gguuucaaauaccuuggaa

SEQ ID NO: 1791666 - RNA, 19 nt, Homo sapiens
  misc_RNA (1)...(19): siRNA sense strand
gaagaguuuaacauugaga

SEQ ID NO: 1791667 - RNA, 19 nt, Homo sapiens
  misc_RNA (1)...(19): siRNA sense strand
gaaagccgacuggaucucu

SEQ ID NO: 1791668 - RNA, 19 nt, Homo sapiens
  misc_RNA (1)...(19): siRNA sense strand
gauagagcagcagaagaaa

SEQ ID NO: 1791669 - RNA, 19 nt, Homo sapiens
  misc_RNA (1)...(19): siRNA sense strand
caaggcugaggaagaguuu

SEQ ID NO: 1791670 - RNA, 19 nt, Homo sapiens
  misc_RNA (1)...(19): siRNA sense strand
aaaggacgccucgugcaaa

SEQ ID NO: 1791671 - RNA, 19 nt, Homo sapiens
  misc_RNA (1)...(19): siRNA sense strand
uggaaccugugaugauugu

SEQ ID NO: 1791672 - RNA, 19 nt, Homo sapiens
  misc_RNA (1)...(19): siRNA sense strand
gcaaacccaacgacugaag

SEQ ID NO: 1791673 - RNA, 19 nt, Homo sapiens
  misc_RNA (1)...(19): siRNA sense strand
gguccagauugauaaagag

SEQ ID NO: 1791674 - RNA, 19 nt, Homo sapiens
  misc_RNA (1)...(19): siRNA sense strand
caaacccaacgacugaaga

SEQ ID NO: 1791675 - RNA, 19 nt, Homo sapiens
  misc_RNA (1)...(19): siRNA sense strand
ggucuacaguggcaaucag

SEQ ID NO: 1791676 - RNA, 19 nt, Homo sapiens
  misc_RNA (1)...(19): siRNA sense strand
caacgacugaagauuaugg

SEQ ID NO: 1791677 - RNA, 19 nt, Homo sapiens
  misc_RNA (1)...(19): siRNA sense strand
ccugagugaugucgaugug

SEQ ID NO: 1791678 - RNA, 19 nt, Homo sapiens
  misc_RNA (1)...(19): siRNA sense strand
ccaaggcugaggaagaguu

SEQ ID NO: 1791679 - RNA, 19 nt, Homo sapiens
  misc_RNA (1)...(19): siRNA sense strand
gauuauggaguauuaugag

SEQ ID NO: 1791680 - RNA, 19 nt, Homo sapiens
  misc_RNA (1)...(19): siRNA sense strand
guccugagagcccgaaaug

SEQ ID NO: 1791681 - RNA, 19 nt, Homo sapiens
  misc_RNA (1)...(19): siRNA sense strand
auccugauguccaccauga

SEQ ID NO: 1791682 - RNA, 19 nt, Homo sapiens
  misc_RNA (1)...(19): siRNA sense strand
caaugagaaagcagaggaa

SEQ ID NO: 1791683 - RNA, 19 nt, Homo sapiens
  misc_RNA (1)...(19): siRNA sense strand
cuacaguggcaaucagaga

SEQ ID NO: 1791684 - RNA, 19 nt, Homo sapiens
  misc_RNA (1)...(19): siRNA sense strand
aaaagcagauuaagcacau

SEQ ID NO: 1791685 - RNA, 19 nt, Homo sapiens
  misc_RNA (1)...(19): siRNA sense strand
aggcugaggaagaguuuaa

SEQ ID NO: 1791686 - RNA, 19 nt, Homo sapiens
  misc_RNA (1)...(19): siRNA sense strand
gagugaugucgaugugaaa

SEQ ID NO: 1791687 - RNA, 19 nt, Homo sapiens
  misc_RNA (1)...(19): siRNA sense strand
cgacugcuggaaccuguga

SEQ ID NO: 1791688 - RNA, 19 nt, Homo sapiens
  misc_RNA (1)...(19): siRNA sense strand
caaaagaugccagaaauac

SEQ ID NO: 1791689 - RNA, 19 nt, Homo sapiens
  misc_RNA (1)...(19): siRNA sense strand
gaguuuaacauugagaaag

SEQ ID NO: 1791690 - RNA, 19 nt, Homo sapiens
  misc_RNA (1)...(19): siRNA sense strand
ggaggucuacaguggcaau

SEQ ID NO: 1791691 - RNA, 19 nt, Homo sapiens
  misc_RNA (1)...(19): siRNA sense strand
cccgaguacaugacaauuu

SEQ ID NO: 1791692 - RNA, 19 nt, Homo sapiens
  misc_RNA (1)...(19): siRNA sense strand
gaacagcugucagauauga

SEQ ID NO: 1791693 - RNA, 19 nt, Homo sapiens
  misc_RNA (1)...(19): siRNA sense strand
gcaagaagcugaccaagag

SEQ ID NO: 1791694 - RNA, 19 nt, Homo sapiens
  misc_RNA (1)...(19): siRNA sense strand
gcaggaaaguuugaaguaa

SEQ ID NO: 1791695 - RNA, 19 nt, Homo sapiens
  misc_RNA (1)...(19): siRNA sense strand
gcagccaucucccauauga

SEQ ID NO: 1791696 - RNA, 19 nt, Homo sapiens
  misc_RNA (1)...(19): siRNA sense strand
caagaugacuacaggauau

SEQ ID NO: 1791697 - RNA, 19 nt, Homo sapiens
  misc_RNA (1)...(19): siRNA sense strand
gauuucagcuucacuauca

SEQ ID NO: 1791698 - RNA, 19 nt, Homo sapiens
  misc_RNA (1)...(19): siRNA sense strand
gcacuaagaccaccuucua

SEQ ID NO: 1791699 - RNA, 19 nt, Homo sapiens
  misc_RNA (1)...(19): siRNA sense strand
uaaagucgcugagcaaaga

SEQ ID NO: 1791700 - RNA, 19 nt, Homo sapiens
  misc_RNA (1)...(19): siRNA sense strand
caacaaguuugaaggacua

SEQ ID NO: 1791701 - RNA, 19 nt, Homo sapiens
  misc_RNA (1)...(19): siRNA sense strand
ucagaaacgucaucuuuga

SEQ ID NO: 1791702 - RNA, 19 nt, Homo sapiens
  misc_RNA (1)...(19): siRNA sense strand
ugaagaagaucuacgaugu

SEQ ID NO: 1791703 - RNA, 19 nt, Homo sapiens
  misc_RNA (1)...(19): siRNA sense strand
gaaccaugaugacagagaa

SEQ ID NO: 1791704 - RNA, 19 nt, Homo sapiens
  misc_RNA (1)...(19): siRNA sense strand
cguccgaacuggccaaaua

SEQ ID NO: 1791705 - RNA, 19 nt, Homo sapiens
  misc_RNA (1)...(19): siRNA sense strand
ggacaucuaugaccacuac

SEQ ID NO: 1791706 - RNA, 19 nt, Homo sapiens
  misc_RNA (1)...(19): siRNA sense strand
ggcagaaacuagaagcaua

SEQ ID NO: 1791707 - RNA, 19 nt, Homo sapiens
  misc_RNA (1)...(19): siRNA sense strand
gaggagagccuucggaaug

SEQ ID NO: 1791708 - RNA, 19 nt, Homo sapiens
  misc_RNA (1)...(19): siRNA sense strand
gaaauucacagcugaggaa

SEQ ID NO: 1791709 - RNA, 19 nt, Homo sapiens
  misc_RNA (1)...(19): siRNA sense strand
caggaaaguuugaaguaaa

SEQ ID NO: 1791710 - RNA, 19 nt, Homo sapiens
  misc_RNA (1)...(19): siRNA sense strand
ugaaguaaaugccaaguuc

SEQ ID NO: 1791711 - RNA, 19 nt, Homo sapiens
  misc_RNA (1)...(19): siRNA sense strand
gcuguuggccgauaucaua

SEQ ID NO: 1791712 - RNA, 19 nt, Homo sapiens
  misc_RNA (1)...(19): siRNA sense strand
caaagucaaugucaaccuu

SEQ ID NO: 1791713 - RNA, 19 nt, Homo sapiens
  misc_RNA (1)...(19): siRNA sense strand
caacaaggccaaagucaau

SEQ ID NO: 1791714 - RNA, 19 nt, Homo sapiens
  misc_RNA (1)...(19): siRNA sense strand
gcagucagccucaucaaug

SEQ ID NO: 1791715 - RNA, 19 nt, Homo sapiens
  misc_RNA (1)...(19): siRNA sense strand
caaggucacugcugccuau

SEQ ID NO: 1791716 - RNA, 19 nt, Homo sapiens
  misc_RNA (1)...(19): siRNA sense strand
ccacggacaucuaugacaa

SEQ ID NO: 1791717 - RNA, 19 nt, Homo sapiens
  misc_RNA (1)...(19): siRNA sense strand
gagcagaggcggcagaaug

SEQ ID NO: 1791718 - RNA, 19 nt, Homo sapiens
  misc_RNA (1)...(19): siRNA sense strand
caccaucccugaccuuauu

SEQ ID NO: 1791719 - RNA, 19 nt, Homo sapiens
  misc_RNA (1)...(19): siRNA sense strand
ggaaacacaccucaaguuc

SEQ ID NO: 1791720 - RNA, 19 nt, Homo sapiens
  misc_RNA (1)...(19): siRNA sense strand
gaaacuagaagcauaccaa

SEQ ID NO: 1791721 - RNA, 19 nt, Homo sapiens
  misc_RNA (1)...(19): siRNA sense strand
caaugaggcucuggacaaa

SEQ ID NO: 1791722 - RNA, 19 nt, Homo sapiens
  misc_RNA (1)...(19): siRNA sense strand
ggguguggcugucaugaaa

SEQ ID NO: 1791723 - RNA, 19 nt, Homo sapiens
  misc_RNA (1)...(19): siRNA sense strand
aggaacagcugucagauau

SEQ ID NO: 1791724 - RNA, 19 nt, Homo sapiens
  misc_RNA (1)...(19): siRNA sense strand
uaauacagcucagagaaug

SEQ ID NO: 1791725 - RNA, 19 nt, Homo sapiens
  misc_RNA (1)...(19): siRNA sense strand
gcgcagccaucucccauau

SEQ ID NO: 1791726 - RNA, 19 nt, Homo sapiens
  misc_RNA (1)...(19): siRNA sense strand
gagcaggaccucaacauca

SEQ ID NO: 1791727 - RNA, 19 nt, Homo sapiens
  misc_RNA (1)...(19): siRNA sense strand
gaaccuacgccgacuugaa

SEQ ID NO: 1791728 - RNA, 19 nt, Homo sapiens
  misc_RNA (1)...(19): siRNA sense strand
gcaagaagcagcccacaag

SEQ ID NO: 1791729 - RNA, 19 nt, Homo sapiens
  misc_RNA (1)...(19): siRNA sense strand
cagcugugguccugauuaa

SEQ ID NO: 1791730 - RNA, 19 nt, Homo sapiens
  misc_RNA (1)...(19): siRNA sense strand
gaaacacaccucaaguuca

SEQ ID NO: 1791731 - RNA, 19 nt, Homo sapiens
  misc_RNA (1)...(19): siRNA sense strand
gaagagguaguuaggaaga

SEQ ID NO: 1791732 - RNA, 19 nt, Homo sapiens
  misc_RNA (1)...(19): siRNA sense strand
ggaaagcccaagaugacua

SEQ ID NO: 1791733 - RNA, 19 nt, Homo sapiens
  misc_RNA (1)...(19): siRNA sense strand
gcaacuggcuuacauuucc

SEQ ID NO: 1791734 - RNA, 19 nt, Homo sapiens
  misc_RNA (1)...(19): siRNA sense strand
gaagcugcaggccacauua

SEQ ID NO: 1791735 - RNA, 19 nt, Homo sapiens
  misc_RNA (1)...(19): siRNA sense strand
gagccaaccaggacacuaa

SEQ ID NO: 1791736 - RNA, 19 nt, Homo sapiens
  misc_RNA (1)...(19): siRNA sense strand
gagaaagccaggacaucua

SEQ ID NO: 1791737 - RNA, 19 nt, Homo sapiens
  misc_RNA (1)...(19): siRNA sense strand
cacaaagggugaucaggaa

SEQ ID NO: 1791738 - RNA, 19 nt, Homo sapiens
  misc_RNA (1)...(19): siRNA sense strand
ucgaugcccugcugaaauu

SEQ ID NO: 1791739 - RNA, 19 nt, Homo sapiens
  misc_RNA (1)...(19): siRNA sense strand
uggagugguugcaguauuu

SEQ ID NO: 1791740 - RNA, 19 nt, Homo sapiens
  misc_RNA (1)...(19): siRNA sense strand
caacauggcguccgaacug

SEQ ID NO: 1791741 - RNA, 19 nt, Homo sapiens
  misc_RNA (1)...(19): siRNA sense strand
gagauucugggcaagguua

SEQ ID NO: 1791742 - RNA, 19 nt, Homo sapiens
  misc_RNA (1)...(19): siRNA sense strand
aaaccuggaugccauaauc

SEQ ID NO: 1791743 - RNA, 19 nt, Homo sapiens
  misc_RNA (1)...(19): siRNA sense strand
gcacagacccaggaagaga

SEQ ID NO: 1791744 - RNA, 19 nt, Homo sapiens
  misc_RNA (1)...(19): siRNA sense strand
gcaaggcagcccagacuga

SEQ ID NO: 1791745 - RNA, 19 nt, Homo sapiens
  misc_RNA (1)...(19): siRNA sense strand
ucaggaaguucauccauag

SEQ ID NO: 1791746 - RNA, 19 nt, Homo sapiens
  misc_RNA (1)...(19): siRNA sense strand
gaaugacuaucuggaggaa

SEQ ID NO: 1791747 - RNA, 19 nt, Homo sapiens
  misc_RNA (1)...(19): siRNA sense strand
ucgggaaccuccuguacua

SEQ ID NO: 1791748 - RNA, 19 nt, Homo sapiens
  misc_RNA (1)...(19): siRNA sense strand
ggaugaggcugcaguccau

SEQ ID NO: 1791749 - RNA, 19 nt, Homo sapiens
  misc_RNA (1)...(19): siRNA sense strand
gagcugugcuguggcuuga

SEQ ID NO: 1791750 - RNA, 19 nt, Homo sapiens
  misc_RNA (1)...(19): siRNA sense strand
gaaauccagggcaauauca

SEQ ID NO: 1791751 - RNA, 19 nt, Homo sapiens
  misc_RNA (1)...(19): siRNA sense strand
agauuuaccuggagugguu

SEQ ID NO: 1791752 - RNA, 19 nt, Homo sapiens
  misc_RNA (1)...(19): siRNA sense strand
ggacgaguacucagacaug

SEQ ID NO: 1791753 - RNA, 19 nt, Homo sapiens
  misc_RNA (1)...(19): siRNA sense strand
aaacacaccucaaguucag

SEQ ID NO: 1791754 - RNA, 19 nt, Homo sapiens
  misc_RNA (1)...(19): siRNA sense strand
uggccaagcugaucuuuca

SEQ ID NO: 1791755 - RNA, 19 nt, Homo sapiens
  misc_RNA (1)...(19): siRNA sense strand
gcugaaauccagggcaaua

SEQ ID NO: 1791756 - RNA, 19 nt, Homo sapiens
  misc_RNA (1)...(19): siRNA sense strand
aggaggaaaucaagucaaa

SEQ ID NO: 1791757 - RNA, 19 nt, Homo sapiens
  misc_RNA (1)...(19): siRNA sense strand
ccaagaugacuacaggaua

SEQ ID NO: 1791758 - RNA, 19 nt, Homo sapiens
  misc_RNA (1)...(19): siRNA sense strand
gagaaaaugcccagcguua

SEQ ID NO: 1791759 - RNA, 19 nt, Homo sapiens
  misc_RNA (1)...(19): siRNA sense strand
caggaaccaugaugacaga

SEQ ID NO: 1791760 - RNA, 19 nt, Homo sapiens
  misc_RNA (1)...(19): siRNA sense strand
cgacgacaccgcucacuga

SEQ ID NO: 1791761 - RNA, 19 nt, Homo sapiens
  misc_RNA (1)...(19): siRNA sense strand
cgccaugacugauaaguuc

SEQ ID NO: 1791762 - RNA, 19 nt, Homo sapiens
  misc_RNA (1)...(19): siRNA sense strand
gcaaagagaaacggcagaa

SEQ ID NO: 1791763 - RNA, 19 nt, Homo sapiens
  misc_RNA (1)...(19): siRNA sense strand
gagcauucccacuuucuga

SEQ ID NO: 1791764 - RNA, 19 nt, Homo sapiens
  misc_RNA (1)...(19): siRNA sense strand
gaagaagaucuacgaugug

SEQ ID NO: 1791765 - RNA, 19 nt, Homo sapiens
  misc_RNA (1)...(19): siRNA sense strand
gacaaaggcagcccugaga

SEQ ID NO: 1791766 - RNA, 19 nt, Homo sapiens
  misc_RNA (1)...(19): siRNA sense strand
ggcaggaaaguuugaagua

SEQ ID NO: 1791767 - RNA, 19 nt, Homo sapiens
  misc_RNA (1)...(19): siRNA sense strand
ggagcagggugacuacuac

SEQ ID NO: 1791768 - RNA, 19 nt, Homo sapiens
  misc_RNA (1)...(19): siRNA sense strand
gagaaacggcagaaacuag

SEQ ID NO: 1791769 - RNA, 19 nt, Homo sapiens
  misc_RNA (1)...(19): siRNA sense strand
caucauggacaucaagauu

SEQ ID NO: 1791770 - RNA, 19 nt, Homo sapiens
  misc_RNA (1)...(19): siRNA sense strand
aggaagagguaguuaggaa

SEQ ID NO: 1791771 - RNA, 19 nt, Homo sapiens
  misc_RNA (1)...(19): siRNA sense strand
caacgucggcuuuguuauc

SEQ ID NO: 1791772 - RNA, 19 nt, Homo sapiens
  misc_RNA (1)...(19): siRNA sense strand
gccaacgucggcuuuguua

SEQ ID NO: 1791773 - RNA, 19 nt, Homo sapiens
  misc_RNA (1)...(19): siRNA sense strand
agaagaauguuaacuccau

SEQ ID NO: 1791774 - RNA, 19 nt, Homo sapiens
  misc_RNA (1)...(19): siRNA sense strand
cuucagaaacgucaucuuu

SEQ ID NO: 1791775 - RNA, 19 nt, Homo sapiens
  misc_RNA (1)...(19): siRNA sense strand
ggacaagcagaaggguuua

SEQ ID NO: 1791776 - RNA, 19 nt, Homo sapiens
  misc_RNA (1)...(19): siRNA sense strand
gaucuauacgggaaaguga

SEQ ID NO: 1791777 - RNA, 19 nt, Homo sapiens
  misc_RNA (1)...(19): siRNA sense strand
gguggaaauugaagaucuu

SEQ ID NO: 1791778 - RNA, 19 nt, Homo sapiens
  misc_RNA (1)...(19): siRNA sense strand
ccaggaaagcccaagauga

SEQ ID NO: 1791779 - RNA, 19 nt, Homo sapiens
  misc_RNA (1)...(19): siRNA sense strand
ggaaagacagagcccugaa

SEQ ID NO: 1791780 - RNA, 19 nt, Homo sapiens
  misc_RNA (1)...(19): siRNA sense strand
gagaugaggcaggaaaguu

SEQ ID NO: 1791781 - RNA, 19 nt, Homo sapiens
  misc_RNA (1)...(19): siRNA sense strand
cuaagaccaccuucuauga

SEQ ID NO: 1791782 - RNA, 19 nt, Homo sapiens
  misc_RNA (1)...(19): siRNA sense strand
uggacgagcuggccaagga

SEQ ID NO: 1791783 - RNA, 19 nt, Homo sapiens
  misc_RNA (1)...(19): siRNA sense strand
ccaaacccaugguguacau

SEQ ID NO: 1791784 - RNA, 19 nt, Homo sapiens
  misc_RNA (1)...(19): siRNA sense strand
gaauguugccuaucaguac

SEQ ID NO: 1791785 - RNA, 19 nt, Homo sapiens
  misc_RNA (1)...(19): siRNA sense strand
auaggcagcggaagauuua

SEQ ID NO: 1791786 - RNA, 19 nt, Homo sapiens
  misc_RNA (1)...(19): siRNA sense strand
ucaaugaggcucuggacaa

SEQ ID NO: 1791787 - RNA, 19 nt, Homo sapiens
  misc_RNA (1)...(19): siRNA sense strand
gaagcuccaggaagaggua

SEQ ID NO: 1791788 - RNA, 19 nt, Homo sapiens
  misc_RNA (1)...(19): siRNA sense strand
ccucaucuguggaccaaau

SEQ ID NO: 1791789 - RNA, 19 nt, Homo sapiens
  misc_RNA (1)...(19): siRNA sense strand
cagcugaggagauggauga

SEQ ID NO: 1791790 - RNA, 19 nt, Homo sapiens
  misc_RNA (1)...(19): siRNA sense strand
gaaacggcagaaacuagaa

SEQ ID NO: 1791791 - RNA, 19 nt, Homo sapiens
  misc_RNA (1)...(19): siRNA sense strand
aagcagccuucucuucauu

SEQ ID NO: 1791792 - RNA, 19 nt, Homo sapiens
  misc_RNA (1)...(19): siRNA sense strand
gcaagcaggcgaaucguaa

SEQ ID NO: 1791793 - RNA, 19 nt, Homo sapiens
  misc_RNA (1)...(19): siRNA sense strand
uggcugagaucgagaaauu

SEQ ID NO: 1791794 - RNA, 19 nt, Homo sapiens
  misc_RNA (1)...(19): siRNA sense strand
ccacugccuuccaaagaaa

SEQ ID NO: 1791795 - RNA, 19 nt, Homo sapiens
  misc_RNA (1)...(19): siRNA sense strand
ccaaagaaacgauugaaca

SEQ ID NO: 1791796 - RNA, 19 nt, Homo sapiens
  misc_RNA (1)...(19): siRNA sense strand
agacagagacgcaagagaa

SEQ ID NO: 1791797 - RNA, 19 nt, Homo sapiens
  misc_RNA (1)...(19): siRNA sense strand
gaagcaagcaggcgaaucg

SEQ ID NO: 1791798 - RNA, 19 nt, Homo sapiens
  misc_RNA (1)...(19): siRNA sense strand
gacagagacgcaagagaaa

SEQ ID NO: 1791799 - RNA, 19 nt, Homo sapiens
  misc_RNA (1)...(19): siRNA sense strand
ucgauaagccgaaacugaa

SEQ ID NO: 1791800 - RNA, 19 nt, Homo sapiens
  misc_RNA (1)...(19): siRNA sense strand
caaagaaacgauugaacag

SEQ ID NO: 1791801 - RNA, 19 nt, Homo sapiens
  misc_RNA (1)...(19): siRNA sense strand
gauaagccgaaacugaaga

SEQ ID NO: 1791802 - RNA, 19 nt, Homo sapiens
  misc_RNA (1)...(19): siRNA sense strand
aaacugaagaagacagaga

SEQ ID NO: 1791803 - RNA, 19 nt, Homo sapiens
  misc_RNA (1)...(19): siRNA sense strand
uccacugccuuccaaagaa

SEQ ID NO: 1791804 - RNA, 19 nt, Homo sapiens
  misc_RNA (1)...(19): siRNA sense strand
cgaaacugaagaagacaga

SEQ ID NO: 1791805 - RNA, 19 nt, Homo sapiens
  misc_RNA (1)...(19): siRNA sense strand
gaagacagagacgcaagag

SEQ ID NO: 1791806 - RNA, 19 nt, Homo sapiens
  misc_RNA (1)...(19): siRNA sense strand
cgauugaacaggagaagca

SEQ ID NO: 1791807 - RNA, 19 nt, Homo sapiens
  misc_RNA (1)...(19): siRNA sense strand
gcaugaagaccaccgguua

SEQ ID NO: 1791808 - RNA, 19 nt, Homo sapiens
  misc_RNA (1)...(19): siRNA sense strand
caucaccucuuaaggcauu

SEQ ID NO: 1791809 - RNA, 19 nt, Homo sapiens
  misc_RNA (1)...(19): siRNA sense strand
aggcagucaucaccucuua

SEQ ID NO: 1791810 - RNA, 19 nt, Homo sapiens
  misc_RNA (1)...(19): siRNA sense strand
caggagccaugcaaagugu

SEQ ID NO: 1791811 - RNA, 19 nt, Homo sapiens
  misc_RNA (1)...(19): siRNA sense strand
acccagaccugcugaagga

SEQ ID NO: 1791812 - RNA, 19 nt, Homo sapiens
  misc_RNA (1)...(19): siRNA sense strand
ucagccaccugcaguuuca

SEQ ID NO: 1791813 - RNA, 19 nt, Homo sapiens
  misc_RNA (1)...(19): siRNA sense strand
gcagucaucaccucuuaag

SEQ ID NO: 1791814 - RNA, 19 nt, Homo sapiens
  misc_RNA (1)...(19): siRNA sense strand
ccaggagccaugcaaagug

SEQ ID NO: 1791815 - RNA, 19 nt, Homo sapiens
  misc_RNA (1)...(19): siRNA sense strand
ggagccaugcaaaguguca

SEQ ID NO: 1791816 - RNA, 19 nt, Homo sapiens
  misc_RNA (1)...(19): siRNA sense strand
gaugagggcuuuccacuug

SEQ ID NO: 1791817 - RNA, 19 nt, Homo sapiens
  misc_RNA (1)...(19): siRNA sense strand
ggacaaggaugagggcuuu

SEQ ID NO: 1791818 - RNA, 19 nt, Homo sapiens
  misc_RNA (1)...(19): siRNA sense strand
ggaggaauguggauaacaa

SEQ ID NO: 1791819 - RNA, 19 nt, Homo sapiens
  misc_RNA (1)...(19): siRNA sense strand
ggaggaggaauguggauaa

SEQ ID NO: 1791820 - RNA, 19 nt, Homo sapiens
  misc_RNA (1)...(19): siRNA sense strand
ggaugagggcuuuccacuu

SEQ ID NO: 1791821 - RNA, 19 nt, Homo sapiens
  misc_RNA (1)...(19): siRNA sense strand
gaagaacauggaggaggaa

SEQ ID NO: 1791822 - RNA, 19 nt, Homo sapiens
  misc_RNA (1)...(19): siRNA sense strand
gaggaggaauguggauaac

SEQ ID NO: 1791823 - RNA, 19 nt, Homo sapiens
  misc_RNA (1)...(19): siRNA sense strand
gccuguguguuccaagcua

SEQ ID NO: 1791824 - RNA, 19 nt, Homo sapiens
  misc_RNA (1)...(19): siRNA sense strand
caagaagacucauguggua

SEQ ID NO: 1791825 - RNA, 19 nt, Homo sapiens
  misc_RNA (1)...(19): siRNA sense strand
ggaggcagcuaucaaauau

SEQ ID NO: 1791826 - RNA, 19 nt, Homo sapiens
  misc_RNA (1)...(19): siRNA sense strand
ucaaaugacuuaaccaaga

SEQ ID NO: 1791827 - RNA, 19 nt, Homo sapiens
  misc_RNA (1)...(19): siRNA sense strand
caacccaugucuaucguua

SEQ ID NO: 1791828 - RNA, 19 nt, Homo sapiens
  misc_RNA (1)...(19): siRNA sense strand
caaaugacuuaaccaagaa

SEQ ID NO: 1791829 - RNA, 19 nt, Homo sapiens
  misc_RNA (1)...(19): siRNA sense strand
ccagggaccuauucuguca

SEQ ID NO: 1791830 - RNA, 19 nt, Homo sapiens
  misc_RNA (1)...(19): siRNA sense strand
gcaguugauucuggacaaa

SEQ ID NO: 1791831 - RNA, 19 nt, Homo sapiens
  misc_RNA (1)...(19): siRNA sense strand
cauagggaauggucagaga

SEQ ID NO: 1791832 - RNA, 19 nt, Homo sapiens
  misc_RNA (1)...(19): siRNA sense strand
agucgaagcugcacaugug

SEQ ID NO: 1791833 - RNA, 19 nt, Homo sapiens
  misc_RNA (1)...(19): siRNA sense strand
aggcagcuaucaaauauca

SEQ ID NO: 1791834 - RNA, 19 nt, Homo sapiens
  misc_RNA (1)...(19): siRNA sense strand
gcagcuaucaaauaucaga

SEQ ID NO: 1791835 - RNA, 19 nt, Homo sapiens
  misc_RNA (1)...(19): siRNA sense strand
gcucaaaugacuuaaccaa

SEQ ID NO: 1791836 - RNA, 19 nt, Homo sapiens
  misc_RNA (1)...(19): siRNA sense strand
caagucagugugggaaaua

SEQ ID NO: 1791837 - RNA, 19 nt, Homo sapiens
  misc_RNA (1)...(19): siRNA sense strand
uaaccaagaagacucaugu

SEQ ID NO: 1791838 - RNA, 19 nt, Homo sapiens
  misc_RNA (1)...(19): siRNA sense strand
gucagugugggaaauauua

SEQ ID NO: 1791839 - RNA, 19 nt, Homo sapiens
  misc_RNA (1)...(19): siRNA sense strand
ggaccuauucugucacugu

SEQ ID NO: 1791840 - RNA, 19 nt, Homo sapiens
  misc_RNA (1)...(19): siRNA sense strand
uggaggcagcuaucaaaua

SEQ ID NO: 1791841 - RNA, 19 nt, Homo sapiens
  misc_RNA (1)...(19): siRNA sense strand
ccuuagugcuuccuucaga

SEQ ID NO: 1791842 - RNA, 19 nt, Homo sapiens
  misc_RNA (1)...(19): siRNA sense strand
gaagacucaugugguagca

SEQ ID NO: 1791843 - RNA, 19 nt, Homo sapiens
  misc_RNA (1)...(19): siRNA sense strand
ucaagucagugugggaaau

SEQ ID NO: 1791844 - RNA, 19 nt, Homo sapiens
  misc_RNA (1)...(19): siRNA sense strand
ucacugugggcucaaauga

SEQ ID NO: 1791845 - RNA, 19 nt, Homo sapiens
  misc_RNA (1)...(19): siRNA sense strand
aaggcuggcucuagaagug

SEQ ID NO: 1791846 - RNA, 19 nt, Homo sapiens
  misc_RNA (1)...(19): siRNA sense strand
ucuaaggaccucuacauag

SEQ ID NO: 1791847 - RNA, 19 nt, Homo sapiens
  misc_RNA (1)...(19): siRNA sense strand
cuacauagaaguauaucca

SEQ ID NO: 1791848 - RNA, 19 nt, Homo sapiens
  misc_RNA (1)...(19): siRNA sense strand
gcaaggcuggcucuagaag

SEQ ID NO: 1791849 - RNA, 19 nt, Homo sapiens
  misc_RNA (1)...(19): siRNA sense strand
gggcucaaaugacuuaacc

SEQ ID NO: 1791850 - RNA, 19 nt, Homo sapiens
  misc_RNA (1)...(19): siRNA sense strand
gggcaacccaugucuaucg

SEQ ID NO: 1791851 - RNA, 19 nt, Homo sapiens
  misc_RNA (1)...(19): siRNA sense strand
ccuggaggcagcuaucaaa

SEQ ID NO: 1791852 - RNA, 19 nt, Homo sapiens
  misc_RNA (1)...(19): siRNA sense strand
ugucuaucguuaucacaga

SEQ ID NO: 1791853 - RNA, 19 nt, Homo sapiens
  misc_RNA (1)...(19): siRNA sense strand
guauauccagggaccuauu

SEQ ID NO: 1791854 - RNA, 19 nt, Homo sapiens
  misc_RNA (1)...(19): siRNA sense strand
uagggaauggucagagaaa

SEQ ID NO: 1791855 - RNA, 19 nt, Homo sapiens
  misc_RNA (1)...(19): siRNA sense strand
gggagagagagaagagaga

SEQ ID NO: 1791856 - RNA, 19 nt, Homo sapiens
  misc_RNA (1)...(19): siRNA sense strand
ugugggcucaaaugacuua

SEQ ID NO: 1791857 - RNA, 19 nt, Homo sapiens
  misc_RNA (1)...(19): siRNA sense strand
cuuagugcuuccuucagaa

SEQ ID NO: 1791858 - RNA, 19 nt, Homo sapiens
  misc_RNA (1)...(19): siRNA sense strand
ggaauggucagagaaaaga

SEQ ID NO: 1791859 - RNA, 19 nt, Homo sapiens
  misc_RNA (1)...(19): siRNA sense strand
caagaagacucauguggua

SEQ ID NO: 1791860 - RNA, 19 nt, Homo sapiens
  misc_RNA (1)...(19): siRNA sense strand
ggaggcagcuaucaaauau

SEQ ID NO: 1791861 - RNA, 19 nt, Homo sapiens
  misc_RNA (1)...(19): siRNA sense strand
ucaaaugacuuaaccaaga

SEQ ID NO: 1791862 - RNA, 19 nt, Homo sapiens
  misc_RNA (1)...(19): siRNA sense strand
caacccaugucuaucguua

SEQ ID NO: 1791863 - RNA, 19 nt, Homo sapiens
  misc_RNA (1)...(19): siRNA sense strand
caaaugacuuaaccaagaa

SEQ ID NO: 1791864 - RNA, 19 nt, Homo sapiens
  misc_RNA (1)...(19): siRNA sense strand
ccagggaccuauucuguca

SEQ ID NO: 1791865 - RNA, 19 nt, Homo sapiens
  misc_RNA (1)...(19): siRNA sense strand
gcaguugauucuggacaaa

SEQ ID NO: 1791866 - RNA, 19 nt, Homo sapiens
  misc_RNA (1)...(19): siRNA sense strand
cauagggaauggucagaga

SEQ ID NO: 1791867 - RNA, 19 nt, Homo sapiens
  misc_RNA (1)...(19): siRNA sense strand
agucgaagcugcacaugug

SEQ ID NO: 1791868 - RNA, 19 nt, Homo sapiens
  misc_RNA (1)...(19): siRNA sense strand
aggcagcuaucaaauauca

SEQ ID NO: 1791869 - RNA, 19 nt, Homo sapiens
  misc_RNA (1)...(19): siRNA sense strand
gcagcuaucaaauaucaga

SEQ ID NO: 1791870 - RNA, 19 nt, Homo sapiens
  misc_RNA (1)...(19): siRNA sense strand
gcucaaaugacuuaaccaa

SEQ ID NO: 1791871 - RNA, 19 nt, Homo sapiens
  misc_RNA (1)...(19): siRNA sense strand
caagucagugugggaaaua

SEQ ID NO: 1791872 - RNA, 19 nt, Homo sapiens
  misc_RNA (1)...(19): siRNA sense strand
uaaccaagaagacucaugu

SEQ ID NO: 1791873 - RNA, 19 nt, Homo sapiens
  misc_RNA (1)...(19): siRNA sense strand
gucagugugggaaauauua

SEQ ID NO: 1791874 - RNA, 19 nt, Homo sapiens
  misc_RNA (1)...(19): siRNA sense strand
ggaccuauucugucacugu

SEQ ID NO: 1791875 - RNA, 19 nt, Homo sapiens
  misc_RNA (1)...(19): siRNA sense strand
uggaggcagcuaucaaaua

SEQ ID NO: 1791876 - RNA, 19 nt, Homo sapiens
  misc_RNA (1)...(19): siRNA sense strand
ccuuagugcuuccuucaga

SEQ ID NO: 1791877 - RNA, 19 nt, Homo sapiens
  misc_RNA (1)...(19): siRNA sense strand
gaagacucaugugguagca

SEQ ID NO: 1791878 - RNA, 19 nt, Homo sapiens
  misc_RNA (1)...(19): siRNA sense strand
ucaagucagugugggaaau

SEQ ID NO: 1791879 - RNA, 19 nt, Homo sapiens
  misc_RNA (1)...(19): siRNA sense strand
ucacugugggcucaaauga

SEQ ID NO: 1791880 - RNA, 19 nt, Homo sapiens
  misc_RNA (1)...(19): siRNA sense strand
aaggcuggcucuagaagug

SEQ ID NO: 1791881 - RNA, 19 nt, Homo sapiens
  misc_RNA (1)...(19): siRNA sense strand
ucuaaggaccucuacauag

SEQ ID NO: 1791882 - RNA, 19 nt, Homo sapiens
  misc_RNA (1)...(19): siRNA sense strand
cuacauagaaguauaucca

SEQ ID NO: 1791883 - RNA, 19 nt, Homo sapiens
  misc_RNA (1)...(19): siRNA sense strand
gcaaggcuggcucuagaag

SEQ ID NO: 1791884 - RNA, 19 nt, Homo sapiens
  misc_RNA (1)...(19): siRNA sense strand
gggcucaaaugacuuaacc

SEQ ID NO: 1791885 - RNA, 19 nt, Homo sapiens
  misc_RNA (1)...(19): siRNA sense strand
gggcaacccaugucuaucg

SEQ ID NO: 1791886 - RNA, 19 nt, Homo sapiens
  misc_RNA (1)...(19): siRNA sense strand
ccuggaggcagcuaucaaa

SEQ ID NO: 1791887 - RNA, 19 nt, Homo sapiens
  misc_RNA (1)...(19): siRNA sense strand
ugucuaucguuaucacaga

SEQ ID NO: 1791888 - RNA, 19 nt, Homo sapiens
  misc_RNA (1)...(19): siRNA sense strand
guauauccagggaccuauu

SEQ ID NO: 1791889 - RNA, 19 nt, Homo sapiens
  misc_RNA (1)...(19): siRNA sense strand
uagggaauggucagagaaa

SEQ ID NO: 1791890 - RNA, 19 nt, Homo sapiens
  misc_RNA (1)...(19): siRNA sense strand
gggagagagagaagagaga

SEQ ID NO: 1791891 - RNA, 19 nt, Homo sapiens
  misc_RNA (1)...(19): siRNA sense strand
ugugggcucaaaugacuua

SEQ ID NO: 1791892 - RNA, 19 nt, Homo sapiens
  misc_RNA (1)...(19): siRNA sense strand
cuuagugcuuccuucagaa

SEQ ID NO: 1791893 - RNA, 19 nt, Homo sapiens
  misc_RNA (1)...(19): siRNA sense strand
ggaauggucagagaaaaga

SEQ ID NO: 1791894 - RNA, 19 nt, Homo sapiens
  misc_RNA (1)...(19): siRNA sense strand
gaaaagauauccugaguuu

SEQ ID NO: 1791895 - RNA, 19 nt, Homo sapiens
  misc_RNA (1)...(19): siRNA sense strand
cagcauauauuucggguuu

SEQ ID NO: 1791896 - RNA, 19 nt, Homo sapiens
  misc_RNA (1)...(19): siRNA sense strand
caaauaacuucuuccaugu

SEQ ID NO: 1791897 - RNA, 19 nt, Homo sapiens
  misc_RNA (1)...(19): siRNA sense strand
gggagacgcugcagcauau

SEQ ID NO: 1791898 - RNA, 19 nt, Homo sapiens
  misc_RNA (1)...(19): siRNA sense strand
gaacugaagaagcaaguga

SEQ ID NO: 1791899 - RNA, 19 nt, Homo sapiens
  misc_RNA (1)...(19): siRNA sense strand
ccagggacgugaaggaauu

SEQ ID NO: 1791900 - RNA, 19 nt, Homo sapiens
  misc_RNA (1)...(19): siRNA sense strand
ggcuuuaccucccgguuua

SEQ ID NO: 1791901 - RNA, 19 nt, Homo sapiens
  misc_RNA (1)...(19): siRNA sense strand
gcauauauuucggguuuau

SEQ ID NO: 1791902 - RNA, 19 nt, Homo sapiens
  misc_RNA (1)...(19): siRNA sense strand
acagugcaguggcuccuua

SEQ ID NO: 1791903 - RNA, 19 nt, Homo sapiens
  misc_RNA (1)...(19): siRNA sense strand
gggaacgccucaaauaacu

SEQ ID NO: 1791904 - RNA, 19 nt, Homo sapiens
  misc_RNA (1)...(19): siRNA sense strand
ggaagucggaacugaagaa

SEQ ID NO: 1791905 - RNA, 19 nt, Homo sapiens
  misc_RNA (1)...(19): siRNA sense strand
cuucuuccauguagcauuu

SEQ ID NO: 1791906 - RNA, 19 nt, Homo sapiens
  misc_RNA (1)...(19): siRNA sense strand
gaacgccucaaauaacuuc

SEQ ID NO: 1791907 - RNA, 19 nt, Homo sapiens
  misc_RNA (1)...(19): siRNA sense strand
gcccaaugcugacgagaca

SEQ ID NO: 1791908 - RNA, 19 nt, Homo sapiens
  misc_RNA (1)...(19): siRNA sense strand
cauguagcauuucaaggaa

SEQ ID NO: 1791909 - RNA, 19 nt, Homo sapiens
  misc_RNA (1)...(19): siRNA sense strand
ccugggaacgccucaaaua

SEQ ID NO: 1791910 - RNA, 19 nt, Homo sapiens
  misc_RNA (1)...(19): siRNA sense strand
gcgcugaagucccgcaaag

SEQ ID NO: 1791911 - RNA, 19 nt, Homo sapiens
  misc_RNA (1)...(19): siRNA sense strand
ccauguagcauuucaagga

SEQ ID NO: 1791912 - RNA, 19 nt, Homo sapiens
  misc_RNA (1)...(19): siRNA sense strand
ggguaaacuuggccauuca

SEQ ID NO: 1791913 - RNA, 19 nt, Homo sapiens
  misc_RNA (1)...(19): siRNA sense strand
gaggcaaacuuccuaucag

SEQ ID NO: 1791914 - RNA, 19 nt, Homo sapiens
  misc_RNA (1)...(19): siRNA sense strand
ggaauucgccaaaaugcua

SEQ ID NO: 1791915 - RNA, 19 nt, Homo sapiens
  misc_RNA (1)...(19): siRNA sense strand
agucggaacugaagaagca

SEQ ID NO: 1791916 - RNA, 19 nt, Homo sapiens
  misc_RNA (1)...(19): siRNA sense strand
aauaacuucuuccauguag

SEQ ID NO: 1791917 - RNA, 19 nt, Homo sapiens
  misc_RNA (1)...(19): siRNA sense strand
ugcaguggcuccuuaaugg

SEQ ID NO: 1791918 - RNA, 19 nt, Homo sapiens
  misc_RNA (1)...(19): siRNA sense strand
ucucaggauucuacccaaa

SEQ ID NO: 1791919 - RNA, 19 nt, Homo sapiens
  misc_RNA (1)...(19): siRNA sense strand
gggcuuuaccucccgguuu

SEQ ID NO: 1791920 - RNA, 19 nt, Homo sapiens
  misc_RNA (1)...(19): siRNA sense strand
aaagauauccugaguuucc

SEQ ID NO: 1791921 - RNA, 19 nt, Homo sapiens
  misc_RNA (1)...(19): siRNA sense strand
gaaggaauucgccaaaaug

SEQ ID NO: 1791922 - RNA, 19 nt, Homo sapiens
  misc_RNA (1)...(19): siRNA sense strand
gagacgcugcagcauauau

SEQ ID NO: 1791923 - RNA, 19 nt, Homo sapiens
  misc_RNA (1)...(19): siRNA sense strand
gugcaguggcuccuuaaug

SEQ ID NO: 1791924 - RNA, 19 nt, Homo sapiens
  misc_RNA (1)...(19): siRNA sense strand
cugggaacgccucaaauaa

SEQ ID NO: 1791925 - RNA, 19 nt, Homo sapiens
  misc_RNA (1)...(19): siRNA sense strand
uuaagaggcaaacuuccua

SEQ ID NO: 1791926 - RNA, 19 nt, Homo sapiens
  misc_RNA (1)...(19): siRNA sense strand
gaucucguccuucgccaau

SEQ ID NO: 1791927 - RNA, 19 nt, Homo sapiens
  misc_RNA (1)...(19): siRNA sense strand
uggguaaacuuggccauuc

SEQ ID NO: 1791928 - RNA, 19 nt, Homo sapiens
  misc_RNA (1)...(19): siRNA sense strand
ugaaggaauucgccaaaau

SEQ ID NO: 1791929 - RNA, 19 nt, Homo sapiens
  misc_RNA (1)...(19): siRNA sense strand
gacgcugcagcauauauuu

SEQ ID NO: 1791930 - RNA, 19 nt, Homo sapiens
  misc_RNA (1)...(19): siRNA sense strand
uaacuucuuccauguagca

SEQ ID NO: 1791931 - RNA, 19 nt, Homo sapiens
  misc_RNA (1)...(19): siRNA sense strand
gugaagcacagcagucuag

SEQ ID NO: 1791932 - RNA, 19 nt, Homo sapiens
  misc_RNA (1)...(19): siRNA sense strand
ugggagacgcugcagcaua

SEQ ID NO: 1791933 - RNA, 19 nt, Homo sapiens
  misc_RNA (1)...(19): siRNA sense strand
gacaaguggacgagggaaa

SEQ ID NO: 1791934 - RNA, 19 nt, Homo sapiens
  misc_RNA (1)...(19): siRNA sense strand
ggaacgccucaaauaacuu

SEQ ID NO: 1791935 - RNA, 19 nt, Homo sapiens
  misc_RNA (1)...(19): siRNA sense strand
ccaaugcugacgagacaug

SEQ ID NO: 1791936 - RNA, 19 nt, Homo sapiens
  misc_RNA (1)...(19): siRNA sense strand
ggagacgcugcagcauaua

SEQ ID NO: 1791937 - RNA, 19 nt, Homo sapiens
  misc_RNA (1)...(19): siRNA sense strand
agaggcaaacuuccuauca

SEQ ID NO: 1791938 - RNA, 19 nt, Homo sapiens
  misc_RNA (1)...(19): siRNA sense strand
caaagccuguaugggugaa

SEQ ID NO: 1791939 - RNA, 19 nt, Homo sapiens
  misc_RNA (1)...(19): siRNA sense strand
augcuacgcuuauccuauc

SEQ ID NO: 1791940 - RNA, 19 nt, Homo sapiens
  misc_RNA (1)...(19): siRNA sense strand
gggacauccugcccaaugc

SEQ ID NO: 1791941 - RNA, 19 nt, Homo sapiens
  misc_RNA (1)...(19): siRNA sense strand
ccauucaagugcucaacca

SEQ ID NO: 1791942 - RNA, 19 nt, Homo sapiens
  misc_RNA (1)...(19): siRNA sense strand
ucucguccuucgccaauag

SEQ ID NO: 1791943 - RNA, 19 nt, Homo sapiens
  misc_RNA (1)...(19): siRNA sense strand
uaagaggcaaacuuccuau

SEQ ID NO: 1791944 - RNA, 19 nt, Homo sapiens
  misc_RNA (1)...(19): siRNA sense strand
uggcaguccuggcgugcuu

SEQ ID NO: 1791945 - RNA, 19 nt, Homo sapiens
  misc_RNA (1)...(19): siRNA sense strand
gacaccguccgcucucuga

SEQ ID NO: 1791946 - RNA, 19 nt, Homo sapiens
  misc_RNA (1)...(19): siRNA sense strand
cgccucaaauaacuucuuc

SEQ ID NO: 1791947 - RNA, 19 nt, Homo sapiens
  misc_RNA (1)...(19): siRNA sense strand
agacgcugcagcauauauu

SEQ ID NO: 1791948 - RNA, 19 nt, Homo sapiens
  misc_RNA (1)...(19): siRNA sense strand
gguaaacuuggccauucaa

SEQ ID NO: 1791949 - RNA, 19 nt, Homo sapiens
  misc_RNA (1)...(19): siRNA sense strand
cagggaagucggaacugaa

SEQ ID NO: 1791950 - RNA, 19 nt, Homo sapiens
  misc_RNA (1)...(19): siRNA sense strand
cgugaaggaauucgccaaa

SEQ ID NO: 1791951 - RNA, 19 nt, Homo sapiens
  misc_RNA (1)...(19): siRNA sense strand
gggaaacacuggagucuaa

SEQ ID NO: 1791952 - RNA, 19 nt, Homo sapiens
  misc_RNA (1)...(19): siRNA sense strand
ggaaggcagucccuauuag

SEQ ID NO: 1791953 - RNA, 19 nt, Homo sapiens
  misc_RNA (1)...(19): siRNA sense strand
gagcugcuguccauguuga

SEQ ID NO: 1791954 - RNA, 19 nt, Homo sapiens
  misc_RNA (1)...(19): siRNA sense strand
cugcugagcucaucaacuu

SEQ ID NO: 1791955 - RNA, 19 nt, Homo sapiens
  misc_RNA (1)...(19): siRNA sense strand
ggagaaugaugagaucuag

SEQ ID NO: 1791956 - RNA, 19 nt, Homo sapiens
  misc_RNA (1)...(19): siRNA sense strand
ggcagucccuauuagcuaa

SEQ ID NO: 1791957 - RNA, 19 nt, Homo sapiens
  misc_RNA (1)...(19): siRNA sense strand
ggcagaggcugauggagau

SEQ ID NO: 1791958 - RNA, 19 nt, Homo sapiens
  misc_RNA (1)...(19): siRNA sense strand
cugcagagcuaccuaaagg

SEQ ID NO: 1791959 - RNA, 19 nt, Homo sapiens
  misc_RNA (1)...(19): siRNA sense strand
gaaacacuggagucuaaga

SEQ ID NO: 1791960 - RNA, 19 nt, Homo sapiens
  misc_RNA (1)...(19): siRNA sense strand
uggaaggcagucccuauua

SEQ ID NO: 1791961 - RNA, 19 nt, Homo sapiens
  misc_RNA (1)...(19): siRNA sense strand
ggcagaggcuaaaggagau

SEQ ID NO: 1791962 - RNA, 19 nt, Homo sapiens
  misc_RNA (1)...(19): siRNA sense strand
ggacuaggaaggacagaag

SEQ ID NO: 1791963 - RNA, 19 nt, Homo sapiens
  misc_RNA (1)...(19): siRNA sense strand
acacuggagucuaagaaca

SEQ ID NO: 1791964 - RNA, 19 nt, Homo sapiens
  misc_RNA (1)...(19): siRNA sense strand
gagaggaggccaaggaacu

SEQ ID NO: 1791965 - RNA, 19 nt, Homo sapiens
  misc_RNA (1)...(19): siRNA sense strand
acucugaagugcagcauca

SEQ ID NO: 1791966 - RNA, 19 nt, Homo sapiens
  misc_RNA (1)...(19): siRNA sense strand
ccaacccggugauauugau

SEQ ID NO: 1791967 - RNA, 19 nt, Homo sapiens
  misc_RNA (1)...(19): siRNA sense strand
cccaaaggauggagucaca

SEQ ID NO: 1791968 - RNA, 19 nt, Homo sapiens
  misc_RNA (1)...(19): siRNA sense strand
guucuccucuaccucuuug

SEQ ID NO: 1791969 - RNA, 19 nt, Homo sapiens
  misc_RNA (1)...(19): siRNA sense strand
gcagaggccagggagaaug

SEQ ID NO: 1791970 - RNA, 19 nt, Homo sapiens
  misc_RNA (1)...(19): siRNA sense strand
aaacacuggagucuaagaa

SEQ ID NO: 1791971 - RNA, 19 nt, Homo sapiens
  misc_RNA (1)...(19): siRNA sense strand
cuaaagggacuaggaagga

SEQ ID NO: 1791972 - RNA, 19 nt, Homo sapiens
  misc_RNA (1)...(19): siRNA sense strand
ccaacucuccuaccaccaa

SEQ ID NO: 1791973 - RNA, 19 nt, Homo sapiens
  misc_RNA (1)...(19): siRNA sense strand
ugauauugauaguggacaa

SEQ ID NO: 1791974 - RNA, 19 nt, Homo sapiens
  misc_RNA (1)...(19): siRNA sense strand
ucuuugcccuccaugacua

SEQ ID NO: 1791975 - RNA, 19 nt, Homo sapiens
  misc_RNA (1)...(19): siRNA sense strand
gaacacccaaaaugacuuu

SEQ ID NO: 1791976 - RNA, 19 nt, Homo sapiens
  misc_RNA (1)...(19): siRNA sense strand
ccagaagggagucuuugga

SEQ ID NO: 1791977 - RNA, 19 nt, Homo sapiens
  misc_RNA (1)...(19): siRNA sense strand
gcuaaaagcccauuaagac

SEQ ID NO: 1791978 - RNA, 19 nt, Homo sapiens
  misc_RNA (1)...(19): siRNA sense strand
ccaugacuaugaccagagu

SEQ ID NO: 1791979 - RNA, 19 nt, Homo sapiens
  misc_RNA (1)...(19): siRNA sense strand
caacccggugauauugaua

SEQ ID NO: 1791980 - RNA, 19 nt, Homo sapiens
  misc_RNA (1)...(19): siRNA sense strand
caaaggauggagucacaag

SEQ ID NO: 1791981 - RNA, 19 nt, Homo sapiens
  misc_RNA (1)...(19): siRNA sense strand
gauauugauaguggacaaa

SEQ ID NO: 1791982 - RNA, 19 nt, Homo sapiens
  misc_RNA (1)...(19): siRNA sense strand
ggugcacauuguucaagug

SEQ ID NO: 1791983 - RNA, 19 nt, Homo sapiens
  misc_RNA (1)...(19): siRNA sense strand
cuaagaacacccaaaauga

SEQ ID NO: 1791984 - RNA, 19 nt, Homo sapiens
  misc_RNA (1)...(19): siRNA sense strand
cagaagggagucuuuggau

SEQ ID NO: 1791985 - RNA, 19 nt, Homo sapiens
  misc_RNA (1)...(19): siRNA sense strand
gcugccaacucuccuacca

SEQ ID NO: 1791986 - RNA, 19 nt, Homo sapiens
  misc_RNA (1)...(19): siRNA sense strand
acuuugaggugcacauugu

SEQ ID NO: 1791987 - RNA, 19 nt, Homo sapiens
  misc_RNA (1)...(19): siRNA sense strand
ccaggcagaggcuaaagga

SEQ ID NO: 1791988 - RNA, 19 nt, Homo sapiens
  misc_RNA (1)...(19): siRNA sense strand
gaaggcagucccuauuagc

SEQ ID NO: 1791989 - RNA, 19 nt, Homo sapiens
  misc_RNA (1)...(19): siRNA sense strand
agaagcaaagggccaggua

SEQ ID NO: 1791990 - RNA, 19 nt, Homo sapiens
  misc_RNA (1)...(19): siRNA sense strand
aagcaaagggccagguaga

SEQ ID NO: 1791991 - RNA, 19 nt, Homo sapiens
  misc_RNA (1)...(19): siRNA sense strand
gacgaugacaguguuaauc

SEQ ID NO: 1791992 - RNA, 19 nt, Homo sapiens
  misc_RNA (1)...(19): siRNA sense strand
uggagaaugaugagaucua

SEQ ID NO: 1791993 - RNA, 19 nt, Homo sapiens
  misc_RNA (1)...(19): siRNA sense strand
uuguucaaguggagaauga

SEQ ID NO: 1791994 - RNA, 19 nt, Homo sapiens
  misc_RNA (1)...(19): siRNA sense strand
ucggacuucugcagagcua

SEQ ID NO: 1791995 - RNA, 19 nt, Homo sapiens
  misc_RNA (1)...(19): siRNA sense strand
agaggcugauggagauguu

SEQ ID NO: 1791996 - RNA, 19 nt, Homo sapiens
  misc_RNA (1)...(19): siRNA sense strand
uaaaagcccauuaagacaa

SEQ ID NO: 1791997 - RNA, 19 nt, Homo sapiens
  misc_RNA (1)...(19): siRNA sense strand
gaauggggaugggcucaug

SEQ ID NO: 1791998 - RNA, 19 nt, Homo sapiens
  misc_RNA (1)...(19): siRNA sense strand
caucaacuucccgggagua

SEQ ID NO: 1791999 - RNA, 19 nt, Homo sapiens
  misc_RNA (1)...(19): siRNA sense strand
gcacacaccucacccaaca

SEQ ID NO: 1792000 - RNA, 19 nt, Homo sapiens
  misc_RNA (1)...(19): siRNA sense strand
aggcaucucugaagaaaua

SEQ ID NO: 1792001 - RNA, 19 nt, Homo sapiens
  misc_RNA (1)...(19): siRNA sense strand
gggaggaccuucaaccaaa

SEQ ID NO: 1792002 - RNA, 19 nt, Homo sapiens
  misc_RNA (1)...(19): siRNA sense strand
gagaaacccuaugaaugua

SEQ ID NO: 1792003 - RNA, 19 nt, Homo sapiens
  misc_RNA (1)...(19): siRNA sense strand
gaaacuagacccaaaguca

SEQ ID NO: 1792004 - RNA, 19 nt, Homo sapiens
  misc_RNA (1)...(19): siRNA sense strand
cggaacagcucggcacuua

SEQ ID NO: 1792005 - RNA, 19 nt, Homo sapiens
  misc_RNA (1)...(19): siRNA sense strand
gggaaagccuucagucaga

SEQ ID NO: 1792006 - RNA, 19 nt, Homo sapiens
  misc_RNA (1)...(19): siRNA sense strand
ggagaaacccuaucagugu

SEQ ID NO: 1792007 - RNA, 19 nt, Homo sapiens
  misc_RNA (1)...(19): siRNA sense strand
ggagaaacccuauaaaugc

SEQ ID NO: 1792008 - RNA, 19 nt, Homo sapiens
  misc_RNA (1)...(19): siRNA sense strand
gagagaaacccuaugaaug

SEQ ID NO: 1792009 - RNA, 19 nt, Homo sapiens
  misc_RNA (1)...(19): siRNA sense strand
gcucagcacuuaucgaaca

SEQ ID NO: 1792010 - RNA, 19 nt, Homo sapiens
  misc_RNA (1)...(19): siRNA sense strand
gggagaaacccuauaaaug

SEQ ID NO: 1792011 - RNA, 19 nt, Homo sapiens
  misc_RNA (1)...(19): siRNA sense strand
caaggcaucucugaagaaa

SEQ ID NO: 1792012 - RNA, 19 nt, Homo sapiens
  misc_RNA (1)...(19): siRNA sense strand
agucacagcucagcacuua

SEQ ID NO: 1792013 - RNA, 19 nt, Homo sapiens
  misc_RNA (1)...(19): siRNA sense strand
ggaauggaguugugagagu

SEQ ID NO: 1792014 - RNA, 19 nt, Homo sapiens
  misc_RNA (1)...(19): siRNA sense strand
ggagagaaacccuaugaau

SEQ ID NO: 1792015 - RNA, 19 nt, Homo sapiens
  misc_RNA (1)...(19): siRNA sense strand
gggagaagcccuaugaaug

SEQ ID NO: 1792016 - RNA, 19 nt, Homo sapiens
  misc_RNA (1)...(19): siRNA sense strand
gagaaacccuauaaaugca

SEQ ID NO: 1792017 - RNA, 19 nt, Homo sapiens
  misc_RNA (1)...(19): siRNA sense strand
gcucggcacuuaccaaaca

SEQ ID NO: 1792018 - RNA, 19 nt, Homo sapiens
  misc_RNA (1)...(19): siRNA sense strand
gggaaauccuucaguuuua

SEQ ID NO: 1792019 - RNA, 19 nt, Homo sapiens
  misc_RNA (1)...(19): siRNA sense strand
gggagaagcccuacgaaug

SEQ ID NO: 1792020 - RNA, 19 nt, Homo sapiens
  misc_RNA (1)...(19): siRNA sense strand
ggagaagccagaccuaaau

SEQ ID NO: 1792021 - RNA, 19 nt, Homo sapiens
  misc_RNA (1)...(19): siRNA sense strand
acccacagcuccucccuua

SEQ ID NO: 1792022 - RNA, 19 nt, Homo sapiens
  misc_RNA (1)...(19): siRNA sense strand
agagaaacccuaugaaugu

SEQ ID NO: 1792023 - RNA, 19 nt, Homo sapiens
  misc_RNA (1)...(19): siRNA sense strand
gaagccagaccuaaauguu

SEQ ID NO: 1792024 - RNA, 19 nt, Homo sapiens
  misc_RNA (1)...(19): siRNA sense strand
gaccaaacaccagcgaaua

SEQ ID NO: 1792025 - RNA, 19 nt, Homo sapiens
  misc_RNA (1)...(19): siRNA sense strand
gugagaagcccuaugaaug

SEQ ID NO: 1792026 - RNA, 19 nt, Homo sapiens
  misc_RNA (1)...(19): siRNA sense strand
gggagaagccagaccuaaa

SEQ ID NO: 1792027 - RNA, 19 nt, Homo sapiens
  misc_RNA (1)...(19): siRNA sense strand
gcaaggcaucucugaagaa

SEQ ID NO: 1792028 - RNA, 19 nt, Homo sapiens
  misc_RNA (1)...(19): siRNA sense strand
ggagaagcccuaugaaugc

SEQ ID NO: 1792029 - RNA, 19 nt, Homo sapiens
  misc_RNA (1)...(19): siRNA sense strand
gcucauccuugaccaaaca

SEQ ID NO: 1792030 - RNA, 19 nt, Homo sapiens
  misc_RNA (1)...(19): siRNA sense strand
ggaggaccuucaaccaaau

SEQ ID NO: 1792031 - RNA, 19 nt, Homo sapiens
  misc_RNA (1)...(19): siRNA sense strand
ggagagaagcccuauggau

SEQ ID NO: 1792032 - RNA, 19 nt, Homo sapiens
  misc_RNA (1)...(19): siRNA sense strand
ccagcuugcuccacucauu

SEQ ID NO: 1792033 - RNA, 19 nt, Homo sapiens
  misc_RNA (1)...(19): siRNA sense strand
ggagagaagcccuaugagu

SEQ ID NO: 1792034 - RNA, 19 nt, Homo sapiens
  misc_RNA (1)...(19): siRNA sense strand
gaaugucacgaaugcuuaa

SEQ ID NO: 1792035 - RNA, 19 nt, Homo sapiens
  misc_RNA (1)...(19): siRNA sense strand
caggagagaagcccuauga

SEQ ID NO: 1792036 - RNA, 19 nt, Homo sapiens
  misc_RNA (1)...(19): siRNA sense strand
ccacagacccggagcaagu

SEQ ID NO: 1792037 - RNA, 19 nt, Homo sapiens
  misc_RNA (1)...(19): siRNA sense strand
ggagaagcccuacgaaugc

SEQ ID NO: 1792038 - RNA, 19 nt, Homo sapiens
  misc_RNA (1)...(19): siRNA sense strand
caaccaaugacuccugaaa

SEQ ID NO: 1792039 - RNA, 19 nt, Homo sapiens
  misc_RNA (1)...(19): siRNA sense strand
agccagagcucccuucuca

SEQ ID NO: 1792040 - RNA, 19 nt, Homo sapiens
  misc_RNA (1)...(19): siRNA sense strand
gaaauauccaacaguguca

SEQ ID NO: 1792041 - RNA, 19 nt, Homo sapiens
  misc_RNA (1)...(19): siRNA sense strand
ggagagaagccauaugcau

SEQ ID NO: 1792042 - RNA, 19 nt, Homo sapiens
  misc_RNA (1)...(19): siRNA sense strand
caacagugucaucuuggua

SEQ ID NO: 1792043 - RNA, 19 nt, Homo sapiens
  misc_RNA (1)...(19): siRNA sense strand
accaaugacuccugaaaga

SEQ ID NO: 1792044 - RNA, 19 nt, Homo sapiens
  misc_RNA (1)...(19): siRNA sense strand
gaagcccuaugaaugcaau

SEQ ID NO: 1792045 - RNA, 19 nt, Homo sapiens
  misc_RNA (1)...(19): siRNA sense strand
gaaaaccuguguaaaagag

SEQ ID NO: 1792046 - RNA, 19 nt, Homo sapiens
  misc_RNA (1)...(19): siRNA sense strand
cggagcaagugacguuuga

SEQ ID NO: 1792047 - RNA, 19 nt, Homo sapiens
  misc_RNA (1)...(19): siRNA sense strand
uaaagcaaggcaucucuga

SEQ ID NO: 1792048 - RNA, 19 nt, Homo sapiens
  misc_RNA (1)...(19): siRNA sense strand
gaacaccagaggauucaca

SEQ ID NO: 1792049 - RNA, 19 nt, Homo sapiens
  misc_RNA (1)...(19): siRNA sense strand
gaaacccuaugaauguaac

SEQ ID NO: 1792050 - RNA, 19 nt, Homo sapiens
  misc_RNA (1)...(19): siRNA sense strand
caggagagaaacccuauga

SEQ ID NO: 1792051 - RNA, 19 nt, Homo sapiens
  misc_RNA (1)...(19): siRNA sense strand
gauccacacaggagagaaa

SEQ ID NO: 1792052 - RNA, 19 nt, Homo sapiens
  misc_RNA (1)...(19): siRNA sense strand
gagaagcccuaugaaugca

SEQ ID NO: 1792053 - RNA, 19 nt, Homo sapiens
  misc_RNA (1)...(19): siRNA sense strand
agccacagcucauccuuga

SEQ ID NO: 1792054 - RNA, 19 nt, Homo sapiens
  misc_RNA (1)...(19): siRNA sense strand
gagaagcccuaugaaugca

SEQ ID NO: 1792055 - RNA, 19 nt, Homo sapiens
  misc_RNA (1)...(19): siRNA sense strand
caggugagaagcccuauga

SEQ ID NO: 1792056 - RNA, 19 nt, Homo sapiens
  misc_RNA (1)...(19): siRNA sense strand
agagaacucacacuggaua

SEQ ID NO: 1792057 - RNA, 19 nt, Homo sapiens
  misc_RNA (1)...(19): siRNA sense strand
gcuccucccuuaccaagca

SEQ ID NO: 1792058 - RNA, 19 nt, Homo sapiens
  misc_RNA (1)...(19): siRNA sense strand
gagcucccuucucaucgaa

SEQ ID NO: 1792059 - RNA, 19 nt, Homo sapiens
  misc_RNA (1)...(19): siRNA sense strand
ggcaaggcauucagucaca

SEQ ID NO: 1792060 - RNA, 19 nt, Homo sapiens
  misc_RNA (1)...(19): siRNA sense strand
ggugagaagcccuaugaau

SEQ ID NO: 1792061 - RNA, 19 nt, Homo sapiens
  misc_RNA (1)...(19): siRNA sense strand
cagcucagcacuuaucgaa

SEQ ID NO: 1792062 - RNA, 19 nt, Homo sapiens
  misc_RNA (1)...(19): siRNA sense strand
gcaaugagugugggaaauc

SEQ ID NO: 1792063 - RNA, 19 nt, Homo sapiens
  misc_RNA (1)...(19): siRNA sense strand
gagcaucggaggauucaca

SEQ ID NO: 1792064 - RNA, 19 nt, Homo sapiens
  misc_RNA (1)...(19): siRNA sense strand
gagaagccagaccuaaaug

SEQ ID NO: 1792065 - RNA, 19 nt, Homo sapiens
  misc_RNA (1)...(19): siRNA sense strand
ggaaaagcccuaugagugu

SEQ ID NO: 1792066 - RNA, 19 nt, Homo sapiens
  misc_RNA (1)...(19): siRNA sense strand
gagaagcccuacgaaugca

SEQ ID NO: 1792067 - RNA, 19 nt, Homo sapiens
  misc_RNA (1)...(19): siRNA sense strand
gagaagcccuauggaugca

SEQ ID NO: 1792068 - RNA, 19 nt, Homo sapiens
  misc_RNA (1)...(19): siRNA sense strand
gaaaagccuucacccagau

SEQ ID NO: 1792069 - RNA, 19 nt, Homo sapiens
  misc_RNA (1)...(19): siRNA sense strand
aaacaccagagaauccaua

SEQ ID NO: 1792070 - RNA, 19 nt, Homo sapiens
  misc_RNA (1)...(19): siRNA sense strand
gggauggucugugguacug

SEQ ID NO: 1792071 - RNA, 19 nt, Homo sapiens
  misc_RNA (1)...(19): siRNA sense strand
aaacuagacccaaagucaa

SEQ ID NO: 1792072 - RNA, 19 nt, Homo sapiens
  misc_RNA (1)...(19): siRNA sense strand
ccuguaccgugauguaaug

SEQ ID NO: 1792073 - RNA, 19 nt, Homo sapiens
  misc_RNA (1)...(19): siRNA sense strand
agccacagcuccucacuca

SEQ ID NO: 1792074 - RNA, 19 nt, Homo sapiens
  misc_RNA (1)...(19): siRNA sense strand
ugugggaaauccuucaguu

SEQ ID NO: 1792075 - RNA, 19 nt, Homo sapiens
  misc_RNA (1)...(19): siRNA sense strand
gaacccugaucucccacau

SEQ ID NO: 1792076 - RNA, 19 nt, Homo sapiens
  misc_RNA (1)...(19): siRNA sense strand
ccagagcucccuucucauc

SEQ ID NO: 1792077 - RNA, 19 nt, Homo sapiens
  misc_RNA (1)...(19): siRNA sense strand
gagaacucacacuggauaa

SEQ ID NO: 1792078 - RNA, 19 nt, Homo sapiens
  misc_RNA (1)...(19): siRNA sense strand
gcagagcacccaccucacu

SEQ ID NO: 1792079 - RNA, 19 nt, Homo sapiens
  misc_RNA (1)...(19): siRNA sense strand
ggaauggguuuggggaaaa

SEQ ID NO: 1792080 - RNA, 19 nt, Homo sapiens
  misc_RNA (1)...(19): siRNA sense strand
acacaggagagaagccaua

SEQ ID NO: 1792081 - RNA, 19 nt, Homo sapiens
  misc_RNA (1)...(19): siRNA sense strand
ggacacacacaggagagaa

SEQ ID NO: 1792082 - RNA, 19 nt, Homo sapiens
  misc_RNA (1)...(19): siRNA sense strand
gaacucacacaggcgagaa

SEQ ID NO: 1792083 - RNA, 19 nt, Homo sapiens
  misc_RNA (1)...(19): siRNA sense strand
aagccagaccuaaauguuu

SEQ ID NO: 1792084 - RNA, 19 nt, Homo sapiens
  misc_RNA (1)...(19): siRNA sense strand
caaugacuccugaaagaca

SEQ ID NO: 1792085 - RNA, 19 nt, Homo sapiens
  misc_RNA (1)...(19): siRNA sense strand
cagaaaaccuguguaaaag

SEQ ID NO: 1792086 - RNA, 19 nt, Homo sapiens
  misc_RNA (1)...(19): siRNA sense strand
ucacagcucagcacuuauc

SEQ ID NO: 1792087 - RNA, 19 nt, Homo sapiens
  misc_RNA (1)...(19): siRNA sense strand
gugggaaauccuucaguuu

SEQ ID NO: 1792088 - RNA, 19 nt, Homo sapiens
  misc_RNA (1)...(19): siRNA sense strand
gaacagcucggcacuuacc

SEQ ID NO: 1792089 - RNA, 19 nt, Homo sapiens
  misc_RNA (1)...(19): siRNA sense strand
gagcaguggcagaggaaug

SEQ ID NO: 1792090 - RNA, 19 nt, Homo sapiens
  misc_RNA (1)...(19): siRNA sense strand
ugagaagcccuaugaaugc

SEQ ID NO: 1792091 - RNA, 19 nt, Homo sapiens
  misc_RNA (1)...(19): siRNA sense strand
uuaaaaggcuuccggaaca

SEQ ID NO: 1792092 - RNA, 19 nt, Homo sapiens
  misc_RNA (1)...(19): siRNA sense strand
cuaugaauguaaccagugu

SEQ ID NO: 1792093 - RNA, 19 nt, Homo sapiens
  misc_RNA (1)...(19): siRNA sense strand
gagaagccauaugcaugca

SEQ ID NO: 1792094 - RNA, 19 nt, Homo sapiens
  misc_RNA (1)...(19): siRNA sense strand
uacccagacuuggaaacua

SEQ ID NO: 1792095 - RNA, 19 nt, Homo sapiens
  misc_RNA (1)...(19): siRNA sense strand
gacccuguaccgugaugua

SEQ ID NO: 1792096 - RNA, 19 nt, Homo sapiens
  misc_RNA (1)...(19): siRNA sense strand
ggaaauccuucaguuuuag

SEQ ID NO: 1792097 - RNA, 19 nt, Homo sapiens
  misc_RNA (1)...(19): siRNA sense strand
ccuaugagugucacgauug

SEQ ID NO: 1792098 - RNA, 19 nt, Homo sapiens
  misc_RNA (1)...(19): siRNA sense strand
caggagagaagcccuaugg

SEQ ID NO: 1792099 - RNA, 19 nt, Homo sapiens
  misc_RNA (1)...(19): siRNA sense strand
gaaauuugcuuaucgguau

SEQ ID NO: 1792100 - RNA, 19 nt, Homo sapiens
  misc_RNA (1)...(19): siRNA sense strand
ggacagaggucagaucaag

SEQ ID NO: 1792101 - RNA, 19 nt, Homo sapiens
  misc_RNA (1)...(19): siRNA sense strand
uuaaagagaugaacagugu

SEQ ID NO: 1792102 - RNA, 19 nt, Homo sapiens
  misc_RNA (1)...(19): siRNA sense strand
caaaguacaucugcuguug

SEQ ID NO: 1792103 - RNA, 19 nt, Homo sapiens
  misc_RNA (1)...(19): siRNA sense strand
uaacagccaugcaacagaa

SEQ ID NO: 1792104 - RNA, 19 nt, Homo sapiens
  misc_RNA (1)...(19): siRNA sense strand
agaguucaguuucagauua

SEQ ID NO: 1792105 - RNA, 19 nt, Homo sapiens
  misc_RNA (1)...(19): siRNA sense strand
gaguucaguuucagauuaa

SEQ ID NO: 1792106 - RNA, 19 nt, Homo sapiens
  misc_RNA (1)...(19): siRNA sense strand
gaagugauagccaagauga

SEQ ID NO: 1792107 - RNA, 19 nt, Homo sapiens
  misc_RNA (1)...(19): siRNA sense strand
gaaggagaguguucagcaa

SEQ ID NO: 1792108 - RNA, 19 nt, Homo sapiens
  misc_RNA (1)...(19): siRNA sense strand
gguacuaauuugucucuga

SEQ ID NO: 1792109 - RNA, 19 nt, Homo sapiens
  misc_RNA (1)...(19): siRNA sense strand
caaagaagaaggagagugu

SEQ ID NO: 1792110 - RNA, 19 nt, Homo sapiens
  misc_RNA (1)...(19): siRNA sense strand
cuagagauccuuaaagaga

SEQ ID NO: 1792111 - RNA, 19 nt, Homo sapiens
  misc_RNA (1)...(19): siRNA sense strand
uagccaagaugaaguugaa

SEQ ID NO: 1792112 - RNA, 19 nt, Homo sapiens
  misc_RNA (1)...(19): siRNA sense strand
guacuaauuugucucugau

SEQ ID NO: 1792113 - RNA, 19 nt, Homo sapiens
  misc_RNA (1)...(19): siRNA sense strand
aaccugaaaugccaaauau

SEQ ID NO: 1792114 - RNA, 19 nt, Homo sapiens
  misc_RNA (1)...(19): siRNA sense strand
gaagauuugcgcucucgaa

SEQ ID NO: 1792115 - RNA, 19 nt, Homo sapiens
  misc_RNA (1)...(19): siRNA sense strand
guuaagaacaauccaaaga

SEQ ID NO: 1792116 - RNA, 19 nt, Homo sapiens
  misc_RNA (1)...(19): siRNA sense strand
agacuuugguuaagaacaa

SEQ ID NO: 1792117 - RNA, 19 nt, Homo sapiens
  misc_RNA (1)...(19): siRNA sense strand
gaagcacugcagaagauuu

SEQ ID NO: 1792118 - RNA, 19 nt, Homo sapiens
  misc_RNA (1)...(19): siRNA sense strand
ugacccugcugcccucaua

SEQ ID NO: 1792119 - RNA, 19 nt, Homo sapiens
  misc_RNA (1)...(19): siRNA sense strand
ugaacuugcugcucucaga

SEQ ID NO: 1792120 - RNA, 19 nt, Homo sapiens
  misc_RNA (1)...(19): siRNA sense strand
gcagacagauuuccuuacc

SEQ ID NO: 1792121 - RNA, 19 nt, Homo sapiens
  misc_RNA (1)...(19): siRNA sense strand
ggucagagcaagaugugaa

SEQ ID NO: 1792122 - RNA, 19 nt, Homo sapiens
  misc_RNA (1)...(19): siRNA sense strand
aagaagagccucagcugaa

SEQ ID NO: 1792123 - RNA, 19 nt, Homo sapiens
  misc_RNA (1)...(19): siRNA sense strand
aaagagaugaacaguguaa

SEQ ID NO: 1792124 - RNA, 19 nt, Homo sapiens
  misc_RNA (1)...(19): siRNA sense strand
cuguugaucugauuaaaga

SEQ ID NO: 1792125 - RNA, 19 nt, Homo sapiens
  misc_RNA (1)...(19): siRNA sense strand
gagcucagauugccaaaau

SEQ ID NO: 1792126 - RNA, 19 nt, Homo sapiens
  misc_RNA (1)...(19): siRNA sense strand
aaaccugaaaugccaaaua

SEQ ID NO: 1792127 - RNA, 19 nt, Homo sapiens
  misc_RNA (1)...(19): siRNA sense strand
uaaagaacgaagagagaaa

SEQ ID NO: 1792128 - RNA, 19 nt, Homo sapiens
  misc_RNA (1)...(19): siRNA sense strand
gaagaggucagagcaagau

SEQ ID NO: 1792129 - RNA, 19 nt, Homo sapiens
  misc_RNA (1)...(19): siRNA sense strand
ucagagagaguguuguuug

SEQ ID NO: 1792130 - RNA, 19 nt, Homo sapiens
  misc_RNA (1)...(19): siRNA sense strand
ugaaaugccaaauaugcua

SEQ ID NO: 1792131 - RNA, 19 nt, Homo sapiens
  misc_RNA (1)...(19): siRNA sense strand
aaauguaucagacuccuaa

SEQ ID NO: 1792132 - RNA, 19 nt, Homo sapiens
  misc_RNA (1)...(19): siRNA sense strand
ugcuagagauccuuaaaga

SEQ ID NO: 1792133 - RNA, 19 nt, Homo sapiens
  misc_RNA (1)...(19): siRNA sense strand
cagcaagacuaaggacaga

SEQ ID NO: 1792134 - RNA, 19 nt, Homo sapiens
  misc_RNA (1)...(19): siRNA sense strand
gcuuaucgguaucgaagug

SEQ ID NO: 1792135 - RNA, 19 nt, Homo sapiens
  misc_RNA (1)...(19): siRNA sense strand
guccaagaguucaguuuca

SEQ ID NO: 1792136 - RNA, 19 nt, Homo sapiens
  misc_RNA (1)...(19): siRNA sense strand
gaggaagcacugcagaaga

SEQ ID NO: 1792137 - RNA, 19 nt, Homo sapiens
  misc_RNA (1)...(19): siRNA sense strand
guacaucugcuguugaucu

SEQ ID NO: 1792138 - RNA, 19 nt, Homo sapiens
  misc_RNA (1)...(19): siRNA sense strand
aggaagcacugcagaagau

SEQ ID NO: 1792139 - RNA, 19 nt, Homo sapiens
  misc_RNA (1)...(19): siRNA sense strand
gaagagccucagcugaaga

SEQ ID NO: 1792140 - RNA, 19 nt, Homo sapiens
  misc_RNA (1)...(19): siRNA sense strand
gaugaacaguguaaaacuu

SEQ ID NO: 1792141 - RNA, 19 nt, Homo sapiens
  misc_RNA (1)...(19): siRNA sense strand
aagcagacagauuuccuua

SEQ ID NO: 1792142 - RNA, 19 nt, Homo sapiens
  misc_RNA (1)...(19): siRNA sense strand
uagagauccuuaaagagau

SEQ ID NO: 1792143 - RNA, 19 nt, Homo sapiens
  misc_RNA (1)...(19): siRNA sense strand
cagauuaacagccaugcaa

SEQ ID NO: 1792144 - RNA, 19 nt, Homo sapiens
  misc_RNA (1)...(19): siRNA sense strand
cagagagaguguuguuugg

SEQ ID NO: 1792145 - RNA, 19 nt, Homo sapiens
  misc_RNA (1)...(19): siRNA sense strand
gauucaguguccaagaguu

SEQ ID NO: 1792146 - RNA, 19 nt, Homo sapiens
  misc_RNA (1)...(19): siRNA sense strand
aggaugcaguggcgucuuu

SEQ ID NO: 1792147 - RNA, 19 nt, Homo sapiens
  misc_RNA (1)...(19): siRNA sense strand
caaauaugcuagagauccu

SEQ ID NO: 1792148 - RNA, 19 nt, Homo sapiens
  misc_RNA (1)...(19): siRNA sense strand
ugccaaauaugcuagagau

SEQ ID NO: 1792149 - RNA, 19 nt, Homo sapiens
  misc_RNA (1)...(19): siRNA sense strand
ccaaagaaaccugaaaugc

SEQ ID NO: 1792150 - RNA, 19 nt, Homo sapiens
  misc_RNA (1)...(19): siRNA sense strand
ggaugaccuucuuuucuuu

SEQ ID NO: 1792151 - RNA, 19 nt, Homo sapiens
  misc_RNA (1)...(19): siRNA sense strand
cgaaguaucguaaggaaaa

SEQ ID NO: 1792152 - RNA, 19 nt, Homo sapiens
  misc_RNA (1)...(19): siRNA sense strand
caucugcuguugaucugau

SEQ ID NO: 1792153 - RNA, 19 nt, Homo sapiens
  misc_RNA (1)...(19): siRNA sense strand
caagaguucaguuucagau

SEQ ID NO: 1792154 - RNA, 19 nt, Homo sapiens
  misc_RNA (1)...(19): siRNA sense strand
ccaaaguacaucugcuguu

SEQ ID NO: 1792155 - RNA, 19 nt, Homo sapiens
  misc_RNA (1)...(19): siRNA sense strand
acuaauuugucucugauuc

SEQ ID NO: 1792156 - RNA, 19 nt, Homo sapiens
  misc_RNA (1)...(19): siRNA sense strand
agagauccuuaaagagaug

SEQ ID NO: 1792157 - RNA, 19 nt, Homo sapiens
  misc_RNA (1)...(19): siRNA sense strand
cagauuuccuuaccagacu

SEQ ID NO: 1792158 - RNA, 19 nt, Homo sapiens
  misc_RNA (1)...(19): siRNA sense strand
aaguacaucugcuguugau

SEQ ID NO: 1792159 - RNA, 19 nt, Homo sapiens
  misc_RNA (1)...(19): siRNA sense strand
ggucuaggaagccauaugg

SEQ ID NO: 1792160 - RNA, 19 nt, Homo sapiens
  misc_RNA (1)...(19): siRNA sense strand
gaagaaggagaguguucag

SEQ ID NO: 1792161 - RNA, 19 nt, Homo sapiens
  misc_RNA (1)...(19): siRNA sense strand
ccucagagagaguguuguu

SEQ ID NO: 1792162 - RNA, 19 nt, Homo sapiens
  misc_RNA (1)...(19): siRNA sense strand
aaagagccaaugcuggaaa

SEQ ID NO: 1792163 - RNA, 19 nt, Homo sapiens
  misc_RNA (1)...(19): siRNA sense strand
ggaagcacugcagaagauu

SEQ ID NO: 1792164 - RNA, 19 nt, Homo sapiens
  misc_RNA (1)...(19): siRNA sense strand
agaagagccucagcugaag

SEQ ID NO: 1792165 - RNA, 19 nt, Homo sapiens
  misc_RNA (1)...(19): siRNA sense strand
gauuaacagccaugcaaca

SEQ ID NO: 1792166 - RNA, 19 nt, Homo sapiens
  misc_RNA (1)...(19): siRNA sense strand
aggagaguguucagcaaga

SEQ ID NO: 1792167 - RNA, 19 nt, Homo sapiens
  misc_RNA (1)...(19): siRNA sense strand
uuaaagaacgaagagagaa

SEQ ID NO: 1792168 - RNA, 19 nt, Homo sapiens
  misc_RNA (1)...(19): siRNA sense strand
gcaugcaaucgguacuuug

SEQ ID NO: 1792169 - RNA, 19 nt, Homo sapiens
  misc_RNA (1)...(19): siRNA sense strand
ucgaagugauagccaagau

SEQ ID NO: 1792170 - RNA, 19 nt, Homo sapiens
  misc_RNA (1)...(19): siRNA sense strand
gaggucagagcaagaugug

SEQ ID NO: 1792171 - RNA, 19 nt, Homo sapiens
  misc_RNA (1)...(19): siRNA sense strand
ucuaggaagccauaugguu

SEQ ID NO: 1792172 - RNA, 19 nt, Homo sapiens
  misc_RNA (1)...(19): siRNA sense strand
caagcagacagauuuccuu

SEQ ID NO: 1792173 - RNA, 19 nt, Homo sapiens
  misc_RNA (1)...(19): siRNA sense strand
ggagaguguucagcaagac

SEQ ID NO: 1792174 - RNA, 19 nt, Homo sapiens
  misc_RNA (1)...(19): siRNA sense strand
gaacgaagagagaaaagag

SEQ ID NO: 1792175 - RNA, 19 nt, Homo sapiens
  misc_RNA (1)...(19): siRNA sense strand
uaaagagaugaacagugua

SEQ ID NO: 1792176 - RNA, 19 nt, Homo sapiens
  misc_RNA (1)...(19): siRNA sense strand
gauggguagccaaagaaga

SEQ ID NO: 1792177 - RNA, 19 nt, Homo sapiens
  misc_RNA (1)...(19): siRNA sense strand
ugauagccaagaugaaguu

SEQ ID NO: 1792178 - RNA, 19 nt, Homo sapiens
  misc_RNA (1)...(19): siRNA sense strand
aauaugcuagagauccuua

SEQ ID NO: 1792179 - RNA, 19 nt, Homo sapiens
  misc_RNA (1)...(19): siRNA sense strand
gcacuggggcuccaccaaa

SEQ ID NO: 1792180 - RNA, 19 nt, Homo sapiens
  misc_RNA (1)...(19): siRNA sense strand
cacugcaggugacuuagau

SEQ ID NO: 1792181 - RNA, 19 nt, Homo sapiens
  misc_RNA (1)...(19): siRNA sense strand
ccaagaguucaguuucaga

SEQ ID NO: 1792182 - RNA, 19 nt, Homo sapiens
  misc_RNA (1)...(19): siRNA sense strand
ccugaaaugccaaauaugc

SEQ ID NO: 1792183 - RNA, 19 nt, Homo sapiens
  misc_RNA (1)...(19): siRNA sense strand
aaaguacaucugcuguuga

SEQ ID NO: 1792184 - RNA, 19 nt, Homo sapiens
  misc_RNA (1)...(19): siRNA sense strand
gaguguucagcaagacuaa

SEQ ID NO: 1792185 - RNA, 19 nt, Homo sapiens
  misc_RNA (1)...(19): siRNA sense strand
ugaagaggucagagcaaga

SEQ ID NO: 1792186 - RNA, 19 nt, Homo sapiens
  misc_RNA (1)...(19): siRNA sense strand
guaaaacuucggucaguga

SEQ ID NO: 1792187 - RNA, 19 nt, Homo sapiens
  misc_RNA (1)...(19): siRNA sense strand
gcucagauugccaaaauug

SEQ ID NO: 1792188 - RNA, 19 nt, Homo sapiens
  misc_RNA (1)...(19): siRNA sense strand
cucgaaguaucguaaggaa

SEQ ID NO: 1792189 - RNA, 19 nt, Homo sapiens
  misc_RNA (1)...(19): siRNA sense strand
cuaauuugucucugauuca

SEQ ID NO: 1792190 - RNA, 19 nt, Homo sapiens
  misc_RNA (1)...(19): siRNA sense strand
ggccaccccuucaggauga

SEQ ID NO: 1792191 - RNA, 19 nt, Homo sapiens
  misc_RNA (1)...(19): siRNA sense strand
aagcacugcagaagauuug

SEQ ID NO: 1792192 - RNA, 19 nt, Homo sapiens
  misc_RNA (1)...(19): siRNA sense strand
gaucugauuaaagaacgaa

SEQ ID NO: 1792193 - RNA, 19 nt, Homo sapiens
  misc_RNA (1)...(19): siRNA sense strand
gaagauaguuugcuuaagg

SEQ ID NO: 1792194 - RNA, 19 nt, Homo sapiens
  misc_RNA (1)...(19): siRNA sense strand
guacuugucuucuaucuuc

SEQ ID NO: 1792195 - RNA, 19 nt, Homo sapiens
  misc_RNA (1)...(19): siRNA sense strand
gagaguaucugguauuuac

SEQ ID NO: 1792196 - RNA, 19 nt, Homo sapiens
  misc_RNA (1)...(19): siRNA sense strand
guaugucacuuacucauuu

SEQ ID NO: 1792197 - RNA, 19 nt, Homo sapiens
  misc_RNA (1)...(19): siRNA sense strand
gaagucauguagacaggua

SEQ ID NO: 1792198 - RNA, 19 nt, Homo sapiens
  misc_RNA (1)...(19): siRNA sense strand
ggaccaagauguagacaag

SEQ ID NO: 1792199 - RNA, 19 nt, Homo sapiens
  misc_RNA (1)...(19): siRNA sense strand
uaccauagaugucacguuu

SEQ ID NO: 1792200 - RNA, 19 nt, Homo sapiens
  misc_RNA (1)...(19): siRNA sense strand
uaacuguacuugucuucua

SEQ ID NO: 1792201 - RNA, 19 nt, Homo sapiens
  misc_RNA (1)...(19): siRNA sense strand
aaacaggaauggauagaug

SEQ ID NO: 1792202 - RNA, 19 nt, Homo sapiens
  misc_RNA (1)...(19): siRNA sense strand
gaagagaucauaccaucau

SEQ ID NO: 1792203 - RNA, 19 nt, Homo sapiens
  misc_RNA (1)...(19): siRNA sense strand
gaucauaccaucaucuuca

SEQ ID NO: 1792204 - RNA, 19 nt, Homo sapiens
  misc_RNA (1)...(19): siRNA sense strand
gauggaacccugaugacua

SEQ ID NO: 1792205 - RNA, 19 nt, Homo sapiens
  misc_RNA (1)...(19): siRNA sense strand
ggacuccaccggcaaacua

SEQ ID NO: 1792206 - RNA, 19 nt, Homo sapiens
  misc_RNA (1)...(19): siRNA sense strand
cgucuucgcuaucaacauu

SEQ ID NO: 1792207 - RNA, 19 nt, Homo sapiens
  misc_RNA (1)...(19): siRNA sense strand
aagcugcgcucgauucuau

SEQ ID NO: 1792208 - RNA, 19 nt, Homo sapiens
  misc_RNA (1)...(19): siRNA sense strand
caacagggagcaaaggaaa

SEQ ID NO: 1792209 - RNA, 19 nt, Homo sapiens
  misc_RNA (1)...(19): siRNA sense strand
ugaugacuaugguggaaua

SEQ ID NO: 1792210 - RNA, 19 nt, Homo sapiens
  misc_RNA (1)...(19): siRNA sense strand
ggauguuucuguggacuuu

SEQ ID NO: 1792211 - RNA, 19 nt, Homo sapiens
  misc_RNA (1)...(19): siRNA sense strand
ggaccaaaaucuucuagaa

SEQ ID NO: 1792212 - RNA, 19 nt, Homo sapiens
  misc_RNA (1)...(19): siRNA sense strand
agucauaccucuaauugga

SEQ ID NO: 1792213 - RNA, 19 nt, Homo sapiens
  misc_RNA (1)...(19): siRNA sense strand
ggauuuauuucaagacuac

SEQ ID NO: 1792214 - RNA, 19 nt, Homo sapiens
  misc_RNA (1)...(19): siRNA sense strand
uaucugaaccuucuucuau

SEQ ID NO: 1792215 - RNA, 19 nt, Homo sapiens
  misc_RNA (1)...(19): siRNA sense strand
cuucaguacuugugucuuu

SEQ ID NO: 1792216 - RNA, 19 nt, Homo sapiens
  misc_RNA (1)...(19): siRNA sense strand
gacagguacuucacucaga

SEQ ID NO: 1792217 - RNA, 19 nt, Homo sapiens
  misc_RNA (1)...(19): siRNA sense strand
guacuucacucagaaagag

SEQ ID NO: 1792218 - RNA, 19 nt, Homo sapiens
  misc_RNA (1)...(19): siRNA sense strand
ucuauucgcuacauuacaa

SEQ ID NO: 1792219 - RNA, 19 nt, Homo sapiens
  misc_RNA (1)...(19): siRNA sense strand
uaagauggaacccugauga

SEQ ID NO: 1792220 - RNA, 19 nt, Homo sapiens
  misc_RNA (1)...(19): siRNA sense strand
aaacugcuuugcaugagaa

SEQ ID NO: 1792221 - RNA, 19 nt, Homo sapiens
  misc_RNA (1)...(19): siRNA sense strand
cgaaaacagucaucaggua

SEQ ID NO: 1792222 - RNA, 19 nt, Homo sapiens
  misc_RNA (1)...(19): siRNA sense strand
gauucuauucgcuacauua

SEQ ID NO: 1792223 - RNA, 19 nt, Homo sapiens
  misc_RNA (1)...(19): siRNA sense strand
gaaccuucuucuauugcaa

SEQ ID NO: 1792224 - RNA, 19 nt, Homo sapiens
  misc_RNA (1)...(19): siRNA sense strand
uggaacaccugaaugacaa

SEQ ID NO: 1792225 - RNA, 19 nt, Homo sapiens
  misc_RNA (1)...(19): siRNA sense strand
caacauucaucaucguucu

SEQ ID NO: 1792226 - RNA, 19 nt, Homo sapiens
  misc_RNA (1)...(19): siRNA sense strand
aaagucauaccucuaauug

SEQ ID NO: 1792227 - RNA, 19 nt, Homo sapiens
  misc_RNA (1)...(19): siRNA sense strand
ggagaguaucugguauuua

SEQ ID NO: 1792228 - RNA, 19 nt, Homo sapiens
  misc_RNA (1)...(19): siRNA sense strand
ggacuugcaauaucucaau

SEQ ID NO: 1792229 - RNA, 19 nt, Homo sapiens
  misc_RNA (1)...(19): siRNA sense strand
gaaauucauagcccagguu

SEQ ID NO: 1792230 - RNA, 19 nt, Homo sapiens
  misc_RNA (1)...(19): siRNA sense strand
cauuugaccuucagaacug

SEQ ID NO: 1792231 - RNA, 19 nt, Homo sapiens
  misc_RNA (1)...(19): siRNA sense strand
ucucugcacuucaguacuu

SEQ ID NO: 1792232 - RNA, 19 nt, Homo sapiens
  misc_RNA (1)...(19): siRNA sense strand
gaagauuggaaauucauag

SEQ ID NO: 1792233 - RNA, 19 nt, Homo sapiens
  misc_RNA (1)...(19): siRNA sense strand
caucaucguucuuccucaa

SEQ ID NO: 1792234 - RNA, 19 nt, Homo sapiens
  misc_RNA (1)...(19): siRNA sense strand
gaaagaggaaacugagagu

SEQ ID NO: 1792235 - RNA, 19 nt, Homo sapiens
  misc_RNA (1)...(19): siRNA sense strand
guugaaacaggaauggaua

SEQ ID NO: 1792236 - RNA, 19 nt, Homo sapiens
  misc_RNA (1)...(19): siRNA sense strand
guaaccgucuucgcuauca

SEQ ID NO: 1792237 - RNA, 19 nt, Homo sapiens
  misc_RNA (1)...(19): siRNA sense strand
uggagaguaucugguauuu

SEQ ID NO: 1792238 - RNA, 19 nt, Homo sapiens
  misc_RNA (1)...(19): siRNA sense strand
gguauccguaugucacuua

SEQ ID NO: 1792239 - RNA, 19 nt, Homo sapiens
  misc_RNA (1)...(19): siRNA sense strand
aggaauggauagauguaaa

SEQ ID NO: 1792240 - RNA, 19 nt, Homo sapiens
  misc_RNA (1)...(19): siRNA sense strand
ucugaaccuucuucuauug

SEQ ID NO: 1792241 - RNA, 19 nt, Homo sapiens
  misc_RNA (1)...(19): siRNA sense strand
gaagggaccaguacgaaaa

SEQ ID NO: 1792242 - RNA, 19 nt, Homo sapiens
  misc_RNA (1)...(19): siRNA sense strand
gcaacagggagcaaaggaa

SEQ ID NO: 1792243 - RNA, 19 nt, Homo sapiens
  misc_RNA (1)...(19): siRNA sense strand
gugagguuguugaagauug

SEQ ID NO: 1792244 - RNA, 19 nt, Homo sapiens
  misc_RNA (1)...(19): siRNA sense strand
acagguacuucacucagaa

SEQ ID NO: 1792245 - RNA, 19 nt, Homo sapiens
  misc_RNA (1)...(19): siRNA sense strand
ucuucuaucuuccuucaaa

SEQ ID NO: 1792246 - RNA, 19 nt, Homo sapiens
  misc_RNA (1)...(19): siRNA sense strand
gaacccugaugacuauggu

SEQ ID NO: 1792247 - RNA, 19 nt, Homo sapiens
  misc_RNA (1)...(19): siRNA sense strand
ggacuuuucuuuucguuuc

SEQ ID NO: 1792248 - RNA, 19 nt, Homo sapiens
  misc_RNA (1)...(19): siRNA sense strand
auaaugccauggcgccuuu

SEQ ID NO: 1792249 - RNA, 19 nt, Homo sapiens
  misc_RNA (1)...(19): siRNA sense strand
gauaguuugcuuaaggauu

SEQ ID NO: 1792250 - RNA, 19 nt, Homo sapiens
  misc_RNA (1)...(19): siRNA sense strand
ggagaaugggagauuguga

SEQ ID NO: 1792251 - RNA, 19 nt, Homo sapiens
  misc_RNA (1)...(19): siRNA sense strand
caaaaguuccuguaccaua

SEQ ID NO: 1792252 - RNA, 19 nt, Homo sapiens
  misc_RNA (1)...(19): siRNA sense strand
aaacagucaucagguacaa

SEQ ID NO: 1792253 - RNA, 19 nt, Homo sapiens
  misc_RNA (1)...(19): siRNA sense strand
acaaacgucugguugaaac

SEQ ID NO: 1792254 - RNA, 19 nt, Homo sapiens
  misc_RNA (1)...(19): siRNA sense strand
gacuugcaauaucucaauu

SEQ ID NO: 1792255 - RNA, 19 nt, Homo sapiens
  misc_RNA (1)...(19): siRNA sense strand
gauguagacaagagagauu

SEQ ID NO: 1792256 - RNA, 19 nt, Homo sapiens
  misc_RNA (1)...(19): siRNA sense strand
ccaugaaauuugguucuug

SEQ ID NO: 1792257 - RNA, 19 nt, Homo sapiens
  misc_RNA (1)...(19): siRNA sense strand
ugacuaugguggaauaaaa

SEQ ID NO: 1792258 - RNA, 19 nt, Homo sapiens
  misc_RNA (1)...(19): siRNA sense strand
gaaacaggaauggauagau

SEQ ID NO: 1792259 - RNA, 19 nt, Homo sapiens
  misc_RNA (1)...(19): siRNA sense strand
gggcaaauauauuaauacc

SEQ ID NO: 1792260 - RNA, 19 nt, Homo sapiens
  misc_RNA (1)...(19): siRNA sense strand
caugaagauaguuugcuua

SEQ ID NO: 1792261 - RNA, 19 nt, Homo sapiens
  misc_RNA (1)...(19): siRNA sense strand
acaugaagauaguuugcuu

SEQ ID NO: 1792262 - RNA, 19 nt, Homo sapiens
  misc_RNA (1)...(19): siRNA sense strand
gaggaaacugagaguggua

SEQ ID NO: 1792263 - RNA, 19 nt, Homo sapiens
  misc_RNA (1)...(19): siRNA sense strand
acaccugaaugacaaaaua

SEQ ID NO: 1792264 - RNA, 19 nt, Homo sapiens
  misc_RNA (1)...(19): siRNA sense strand
gcuaucaacauucaucauc

SEQ ID NO: 1792265 - RNA, 19 nt, Homo sapiens
  misc_RNA (1)...(19): siRNA sense strand
aaauuugguucuuggacuu

SEQ ID NO: 1792266 - RNA, 19 nt, Homo sapiens
  misc_RNA (1)...(19): siRNA sense strand
ucuagaggaccaagaugua

SEQ ID NO: 1792267 - RNA, 19 nt, Homo sapiens
  misc_RNA (1)...(19): siRNA sense strand
aagauaguuugcuuaagga

SEQ ID NO: 1792268 - RNA, 19 nt, Homo sapiens
  misc_RNA (1)...(19): siRNA sense strand
uaucucaauugguggaugu

SEQ ID NO: 1792269 - RNA, 19 nt, Homo sapiens
  misc_RNA (1)...(19): siRNA sense strand
uguugaagauuggaaauuc

SEQ ID NO: 1792270 - RNA, 19 nt, Homo sapiens
  misc_RNA (1)...(19): siRNA sense strand
uccgugagguuguugaaga

SEQ ID NO: 1792271 - RNA, 19 nt, Homo sapiens
  misc_RNA (1)...(19): siRNA sense strand
ucaaaagucauaccucuaa

SEQ ID NO: 1792272 - RNA, 19 nt, Homo sapiens
  misc_RNA (1)...(19): siRNA sense strand
aggauuaucugaaccuucu

SEQ ID NO: 1792273 - RNA, 19 nt, Homo sapiens
  misc_RNA (1)...(19): siRNA sense strand
ugaagggaccaguacgaaa

SEQ ID NO: 1792274 - RNA, 19 nt, Homo sapiens
  misc_RNA (1)...(19): siRNA sense strand
ugacaacaaacgucugguu

SEQ ID NO: 1792275 - RNA, 19 nt, Homo sapiens
  misc_RNA (1)...(19): siRNA sense strand
auggaacccugaugacuau

SEQ ID NO: 1792276 - RNA, 19 nt, Homo sapiens
  misc_RNA (1)...(19): siRNA sense strand
uaaugcagauggacguuuu

SEQ ID NO: 1792277 - RNA, 19 nt, Homo sapiens
  misc_RNA (1)...(19): siRNA sense strand
ucaagcgccugccucucuu

SEQ ID NO: 1792278 - RNA, 19 nt, Homo sapiens
  misc_RNA (1)...(19): siRNA sense strand
ugucuucuaucuuccuuca

SEQ ID NO: 1792279 - RNA, 19 nt, Homo sapiens
  misc_RNA (1)...(19): siRNA sense strand
cguucuuccucaacacaua

SEQ ID NO: 1792280 - RNA, 19 nt, Homo sapiens
  misc_RNA (1)...(19): siRNA sense strand
uaauggagaaugggagauu

SEQ ID NO: 1792281 - RNA, 19 nt, Homo sapiens
  misc_RNA (1)...(19): siRNA sense strand
gaagcugcgcucgauucua

SEQ ID NO: 1792282 - RNA, 19 nt, Homo sapiens
  misc_RNA (1)...(19): siRNA sense strand
ucacacgcuucccaaacug

SEQ ID NO: 1792283 - RNA, 19 nt, Homo sapiens
  misc_RNA (1)...(19): siRNA sense strand
gggagcaaaggaaacagaa

SEQ ID NO: 1792284 - RNA, 19 nt, Homo sapiens
  misc_RNA (1)...(19): siRNA sense strand
guucauauuggaaaugcaa

SEQ ID NO: 1792285 - RNA, 19 nt, Homo sapiens
  misc_RNA (1)...(19): siRNA sense strand
gaccaaaaucuucuagaaa

SEQ ID NO: 1792286 - RNA, 19 nt, Homo sapiens
  misc_RNA (1)...(19): siRNA sense strand
gaaacugagagugguagug

SEQ ID NO: 1792287 - RNA, 19 nt, Homo sapiens
  misc_RNA (1)...(19): siRNA sense strand
aauuuggacuugcaauauc

SEQ ID NO: 1792288 - RNA, 19 nt, Homo sapiens
  misc_RNA (1)...(19): siRNA sense strand
uaugucacuuacucauuug

SEQ ID NO: 1792289 - RNA, 19 nt, Homo sapiens
  misc_RNA (1)...(19): siRNA sense strand
guggaacaccugaaugaca

SEQ ID NO: 1792290 - RNA, 19 nt, Homo sapiens
  misc_RNA (1)...(19): siRNA sense strand
uggaaaugcaaauaaguga

SEQ ID NO: 1792291 - RNA, 19 nt, Homo sapiens
  misc_RNA (1)...(19): siRNA sense strand
ggaauggauagauguaaaa

SEQ ID NO: 1792292 - RNA, 19 nt, Homo sapiens
  misc_RNA (1)...(19): siRNA sense strand
ucaauuguuggaucucuug

SEQ ID NO: 1792293 - RNA, 19 nt, Homo sapiens
  misc_RNA (1)...(19): siRNA sense strand
gauaaaugcuggaagauua

SEQ ID NO: 1792294 - RNA, 19 nt, Homo sapiens
  misc_RNA (1)...(19): siRNA sense strand
caagaucugucaagaguaa

SEQ ID NO: 1792295 - RNA, 19 nt, Homo sapiens
  misc_RNA (1)...(19): siRNA sense strand
gagccugcauuuacaagua

SEQ ID NO: 1792296 - RNA, 19 nt, Homo sapiens
  misc_RNA (1)...(19): siRNA sense strand
gauaucugccucaaacuua

SEQ ID NO: 1792297 - RNA, 19 nt, Homo sapiens
  misc_RNA (1)...(19): siRNA sense strand
ggaggaaauucgugauguu

SEQ ID NO: 1792298 - RNA, 19 nt, Homo sapiens
  misc_RNA (1)...(19): siRNA sense strand
ucugggagauguaugcuua

SEQ ID NO: 1792299 - RNA, 19 nt, Homo sapiens
  misc_RNA (1)...(19): siRNA sense strand
ugacaacauugcaaucauu

SEQ ID NO: 1792300 - RNA, 19 nt, Homo sapiens
  misc_RNA (1)...(19): siRNA sense strand
ggagauguaugcuuacucu

SEQ ID NO: 1792301 - RNA, 19 nt, Homo sapiens
  misc_RNA (1)...(19): siRNA sense strand
ggaaauucgugauguuagu

SEQ ID NO: 1792302 - RNA, 19 nt, Homo sapiens
  misc_RNA (1)...(19): siRNA sense strand
ggucagaacucagauacug

SEQ ID NO: 1792303 - RNA, 19 nt, Homo sapiens
  misc_RNA (1)...(19): siRNA sense strand
gaggaaauucgugauguua

SEQ ID NO: 1792304 - RNA, 19 nt, Homo sapiens
  misc_RNA (1)...(19): siRNA sense strand
gaaauucgugauguuagua

SEQ ID NO: 1792305 - RNA, 19 nt, Homo sapiens
  misc_RNA (1)...(19): siRNA sense strand
gauguaugcuuacucucuu

SEQ ID NO: 1792306 - RNA, 19 nt, Homo sapiens
  misc_RNA (1)...(19): siRNA sense strand
cugcagcaauuauucauga

SEQ ID NO: 1792307 - RNA, 19 nt, Homo sapiens
  misc_RNA (1)...(19): siRNA sense strand
cugcuuaccuggacuuguu

SEQ ID NO: 1792308 - RNA, 19 nt, Homo sapiens
  misc_RNA (1)...(19): siRNA sense strand
caucuuggcaggacuuauu

SEQ ID NO: 1792309 - RNA, 19 nt, Homo sapiens
  misc_RNA (1)...(19): siRNA sense strand
gcuggaagauuagacacuu

SEQ ID NO: 1792310 - RNA, 19 nt, Homo sapiens
  misc_RNA (1)...(19): siRNA sense strand
aaaagggaaugacugcuua

SEQ ID NO: 1792311 - RNA, 19 nt, Homo sapiens
  misc_RNA (1)...(19): siRNA sense strand
gguggagccugcauuuaca

SEQ ID NO: 1792312 - RNA, 19 nt, Homo sapiens
  misc_RNA (1)...(19): siRNA sense strand
caacuuugcaauaacagaa

SEQ ID NO: 1792313 - RNA, 19 nt, Homo sapiens
  misc_RNA (1)...(19): siRNA sense strand
cagcaauuauucaugacuu

SEQ ID NO: 1792314 - RNA, 19 nt, Homo sapiens
  misc_RNA (1)...(19): siRNA sense strand
aaccuuggcaucuuuauuu

SEQ ID NO: 1792315 - RNA, 19 nt, Homo sapiens
  misc_RNA (1)...(19): siRNA sense strand
agaccaagaucugucaaga

SEQ ID NO: 1792316 - RNA, 19 nt, Homo sapiens
  misc_RNA (1)...(19): siRNA sense strand
gaugacaacauugcaauca

SEQ ID NO: 1792317 - RNA, 19 nt, Homo sapiens
  misc_RNA (1)...(19): siRNA sense strand
gccucaaacuuaugugguu

SEQ ID NO: 1792318 - RNA, 19 nt, Homo sapiens
  misc_RNA (1)...(19): siRNA sense strand
uaguaaccuuggcaucuuu

SEQ ID NO: 1792319 - RNA, 19 nt, Homo sapiens
  misc_RNA (1)...(19): siRNA sense strand
uagugacccugcagcaauu

SEQ ID NO: 1792320 - RNA, 19 nt, Homo sapiens
  misc_RNA (1)...(19): siRNA sense strand
gcaauuauucaugacuuug

SEQ ID NO: 1792321 - RNA, 19 nt, Homo sapiens
  misc_RNA (1)...(19): siRNA sense strand
accaagaucugucaagagu

SEQ ID NO: 1792322 - RNA, 19 nt, Homo sapiens
  misc_RNA (1)...(19): siRNA sense strand
cugaggauccugcaaauuc

SEQ ID NO: 1792323 - RNA, 19 nt, Homo sapiens
  misc_RNA (1)...(19): siRNA sense strand
uaccaacuuugcaauaaca

SEQ ID NO: 1792324 - RNA, 19 nt, Homo sapiens
  misc_RNA (1)...(19): siRNA sense strand
uuaguaaccuuggcaucuu

SEQ ID NO: 1792325 - RNA, 19 nt, Homo sapiens
  misc_RNA (1)...(19): siRNA sense strand
ucucuuaggccuuucauuc

SEQ ID NO: 1792326 - RNA, 19 nt, Homo sapiens
  misc_RNA (1)...(19): siRNA sense strand
auugauaaaugcuggaaga

SEQ ID NO: 1792327 - RNA, 19 nt, Homo sapiens
  misc_RNA (1)...(19): siRNA sense strand
gaaaagggaaugacugcuu

SEQ ID NO: 1792328 - RNA, 19 nt, Homo sapiens
  misc_RNA (1)...(19): siRNA sense strand
ugaggaggcugacauucgu

SEQ ID NO: 1792329 - RNA, 19 nt, Homo sapiens
  misc_RNA (1)...(19): siRNA sense strand
ucgugaggaugacaacauu

SEQ ID NO: 1792330 - RNA, 19 nt, Homo sapiens
  misc_RNA (1)...(19): siRNA sense strand
ugauaaaugcuggaagauu

SEQ ID NO: 1792331 - RNA, 19 nt, Homo sapiens
  misc_RNA (1)...(19): siRNA sense strand
aaacgugccauugauaaau

SEQ ID NO: 1792332 - RNA, 19 nt, Homo sapiens
  misc_RNA (1)...(19): siRNA sense strand
gaggaugacaacauugcaa

SEQ ID NO: 1792333 - RNA, 19 nt, Homo sapiens
  misc_RNA (1)...(19): siRNA sense strand
gauagugacccugcagcaa

SEQ ID NO: 1792334 - RNA, 19 nt, Homo sapiens
  misc_RNA (1)...(19): siRNA sense strand
ccuaguugcuguggaggaa

SEQ ID NO: 1792335 - RNA, 19 nt, Homo sapiens
  misc_RNA (1)...(19): siRNA sense strand
ggcaaggagcuccgaguug

SEQ ID NO: 1792336 - RNA, 19 nt, Homo sapiens
  misc_RNA (1)...(19): siRNA sense strand
uaaccuuggcaucuuuauu

SEQ ID NO: 1792337 - RNA, 19 nt, Homo sapiens
  misc_RNA (1)...(19): siRNA sense strand
accuuggcaucuuuauuua

SEQ ID NO: 1792338 - RNA, 19 nt, Homo sapiens
  misc_RNA (1)...(19): siRNA sense strand
cauuuaccguggagagaug

SEQ ID NO: 1792339 - RNA, 19 nt, Homo sapiens
  misc_RNA (1)...(19): siRNA sense strand
gaaaaucgccuucaauacc

SEQ ID NO: 1792340 - RNA, 19 nt, Homo sapiens
  misc_RNA (1)...(19): siRNA sense strand
uggaggaaauucgugaugu

SEQ ID NO: 1792341 - RNA, 19 nt, Homo sapiens
  misc_RNA (1)...(19): siRNA sense strand
guugguggagccugcauuu

SEQ ID NO: 1792342 - RNA, 19 nt, Homo sapiens
  misc_RNA (1)...(19): siRNA sense strand
cgaguugccacccaggaaa

SEQ ID NO: 1792343 - RNA, 19 nt, Homo sapiens
  misc_RNA (1)...(19): siRNA sense strand
ugcccaagagcaccauuua

SEQ ID NO: 1792344 - RNA, 19 nt, Homo sapiens
  misc_RNA (1)...(19): siRNA sense strand
gcauuuacaaguacuucau

SEQ ID NO: 1792345 - RNA, 19 nt, Homo sapiens
  misc_RNA (1)...(19): siRNA sense strand
gagaccucuugcuggguuu

SEQ ID NO: 1792346 - RNA, 19 nt, Homo sapiens
  misc_RNA (1)...(19): siRNA sense strand
cuuacucucuuaggccuuu

SEQ ID NO: 1792347 - RNA, 19 nt, Homo sapiens
  misc_RNA (1)...(19): siRNA sense strand
uggcaucuuuauuuaccaa

SEQ ID NO: 1792348 - RNA, 19 nt, Homo sapiens
  misc_RNA (1)...(19): siRNA sense strand
cuauuguuaugccuccaaa

SEQ ID NO: 1792349 - RNA, 19 nt, Homo sapiens
  misc_RNA (1)...(19): siRNA sense strand
ccaagaucugucaagagua

SEQ ID NO: 1792350 - RNA, 19 nt, Homo sapiens
  misc_RNA (1)...(19): siRNA sense strand
gguucgagaagaccuaguu

SEQ ID NO: 1792351 - RNA, 19 nt, Homo sapiens
  misc_RNA (1)...(19): siRNA sense strand
ccuaacuuccugccuguga

SEQ ID NO: 1792352 - RNA, 19 nt, Homo sapiens
  misc_RNA (1)...(19): siRNA sense strand
gaccaagaucugucaagag

SEQ ID NO: 1792353 - RNA, 19 nt, Homo sapiens
  misc_RNA (1)...(19): siRNA sense strand
gcaucuuuauuuaccaacu

SEQ ID NO: 1792354 - RNA, 19 nt, Homo sapiens
  misc_RNA (1)...(19): siRNA sense strand
uggaggagagccuaacuuc

SEQ ID NO: 1792355 - RNA, 19 nt, Homo sapiens
  misc_RNA (1)...(19): siRNA sense strand
uuaccaacuuugcaauaac

SEQ ID NO: 1792356 - RNA, 19 nt, Homo sapiens
  misc_RNA (1)...(19): siRNA sense strand
ucuuaggccuuucauucau

SEQ ID NO: 1792357 - RNA, 19 nt, Homo sapiens
  misc_RNA (1)...(19): siRNA sense strand
uaguugcuguggaggaaau

SEQ ID NO: 1792358 - RNA, 19 nt, Homo sapiens
  misc_RNA (1)...(19): siRNA sense strand
auaucugccucaaacuuau

SEQ ID NO: 1792359 - RNA, 19 nt, Homo sapiens
  misc_RNA (1)...(19): siRNA sense strand
uaucugaugccccucaaua

SEQ ID NO: 1792360 - RNA, 19 nt, Homo sapiens
  misc_RNA (1)...(19): siRNA sense strand
gacccugcagcaauuauuc

SEQ ID NO: 1792361 - RNA, 19 nt, Homo sapiens
  misc_RNA (1)...(19): siRNA sense strand
ggaugacaacauugcaauc

SEQ ID NO: 1792362 - RNA, 19 nt, Homo sapiens
  misc_RNA (1)...(19): siRNA sense strand
ugacugaggaggcugacau

SEQ ID NO: 1792363 - RNA, 19 nt, Homo sapiens
  misc_RNA (1)...(19): siRNA sense strand
aaacaaagcucgacaugga

SEQ ID NO: 1792364 - RNA, 19 nt, Homo sapiens
  misc_RNA (1)...(19): siRNA sense strand
gaaaagcacuugaaacaaa

SEQ ID NO: 1792365 - RNA, 19 nt, Homo sapiens
  misc_RNA (1)...(19): siRNA sense strand
acacaaagguuagagguua

SEQ ID NO: 1792366 - RNA, 19 nt, Homo sapiens
  misc_RNA (1)...(19): siRNA sense strand
ccagaaagcugcgauaaug

SEQ ID NO: 1792367 - RNA, 19 nt, Homo sapiens
  misc_RNA (1)...(19): siRNA sense strand
caugccaucuuuacaauua

SEQ ID NO: 1792368 - RNA, 19 nt, Homo sapiens
  misc_RNA (1)...(19): siRNA sense strand
uaucguaacucuaaacuga

SEQ ID NO: 1792369 - RNA, 19 nt, Homo sapiens
  misc_RNA (1)...(19): siRNA sense strand
caacuaauaugaacgaaca

SEQ ID NO: 1792370 - RNA, 19 nt, Homo sapiens
  misc_RNA (1)...(19): siRNA sense strand
ggaaagaccaagaaguuaa

SEQ ID NO: 1792371 - RNA, 19 nt, Homo sapiens
  misc_RNA (1)...(19): siRNA sense strand
gaaauaacaugaggaagca

SEQ ID NO: 1792372 - RNA, 19 nt, Homo sapiens
  misc_RNA (1)...(19): siRNA sense strand
ugaagaaggagaagaaaua

SEQ ID NO: 1792373 - RNA, 19 nt, Homo sapiens
  misc_RNA (1)...(19): siRNA sense strand
gcagagaacuugaggaaaa

SEQ ID NO: 1792374 - RNA, 19 nt, Homo sapiens
  misc_RNA (1)...(19): siRNA sense strand
gaacuaucacuguacauaa

SEQ ID NO: 1792375 - RNA, 19 nt, Homo sapiens
  misc_RNA (1)...(19): siRNA sense strand
gcucacauauuuggucaua

SEQ ID NO: 1792376 - RNA, 19 nt, Homo sapiens
  misc_RNA (1)...(19): siRNA sense strand
ugaagaaucuaacauggaa

SEQ ID NO: 1792377 - RNA, 19 nt, Homo sapiens
  misc_RNA (1)...(19): siRNA sense strand
gcugauggcugcaaaguca

SEQ ID NO: 1792378 - RNA, 19 nt, Homo sapiens
  misc_RNA (1)...(19): siRNA sense strand
gagaacauucggcaacuua

SEQ ID NO: 1792379 - RNA, 19 nt, Homo sapiens
  misc_RNA (1)...(19): siRNA sense strand
ggagggugauacaagauuu

SEQ ID NO: 1792380 - RNA, 19 nt, Homo sapiens
  misc_RNA (1)...(19): siRNA sense strand
gaaagaccaagaaguuaaa

SEQ ID NO: 1792381 - RNA, 19 nt, Homo sapiens
  misc_RNA (1)...(19): siRNA sense strand
aaacaaggcuagagcugaa

SEQ ID NO: 1792382 - RNA, 19 nt, Homo sapiens
  misc_RNA (1)...(19): siRNA sense strand
gaccugaugugggaguuua

SEQ ID NO: 1792383 - RNA, 19 nt, Homo sapiens
  misc_RNA (1)...(19): siRNA sense strand
cgacuucagaugcuuauua

SEQ ID NO: 1792384 - RNA, 19 nt, Homo sapiens
  misc_RNA (1)...(19): siRNA sense strand
ggccaaagcugaggaacaa

SEQ ID NO: 1792385 - RNA, 19 nt, Homo sapiens
  misc_RNA (1)...(19): siRNA sense strand
ggaacuaucacuguacaua

SEQ ID NO: 1792386 - RNA, 19 nt, Homo sapiens
  misc_RNA (1)...(19): siRNA sense strand
ggaccuuucucacguguau

SEQ ID NO: 1792387 - RNA, 19 nt, Homo sapiens
  misc_RNA (1)...(19): siRNA sense strand
caauucauuugcucacaua

SEQ ID NO: 1792388 - RNA, 19 nt, Homo sapiens
  misc_RNA (1)...(19): siRNA sense strand
caagaccuauuauugauuc

SEQ ID NO: 1792389 - RNA, 19 nt, Homo sapiens
  misc_RNA (1)...(19): siRNA sense strand
caaugaaccuccaaagaca

SEQ ID NO: 1792390 - RNA, 19 nt, Homo sapiens
  misc_RNA (1)...(19): siRNA sense strand
ggaagaugaugaugaagag

SEQ ID NO: 1792391 - RNA, 19 nt, Homo sapiens
  misc_RNA (1)...(19): siRNA sense strand
gaacaucagagggaaauug

SEQ ID NO: 1792392 - RNA, 19 nt, Homo sapiens
  misc_RNA (1)...(19): siRNA sense strand
ccaagaaguuaaagaaagu

SEQ ID NO: 1792393 - RNA, 19 nt, Homo sapiens
  misc_RNA (1)...(19): siRNA sense strand
gaaccuccaaagacauuua

SEQ ID NO: 1792394 - RNA, 19 nt, Homo sapiens
  misc_RNA (1)...(19): siRNA sense strand
cagacaagaugauugaaau

SEQ ID NO: 1792395 - RNA, 19 nt, Homo sapiens
  misc_RNA (1)...(19): siRNA sense strand
uggagaagauggagagaaa

SEQ ID NO: 1792396 - RNA, 19 nt, Homo sapiens
  misc_RNA (1)...(19): siRNA sense strand
agaggaagaugaugaugaa

SEQ ID NO: 1792397 - RNA, 19 nt, Homo sapiens
  misc_RNA (1)...(19): siRNA sense strand
gaaacuaucaguacauuac

SEQ ID NO: 1792398 - RNA, 19 nt, Homo sapiens
  misc_RNA (1)...(19): siRNA sense strand
gccagcagauuacaauuau

SEQ ID NO: 1792399 - RNA, 19 nt, Homo sapiens
  misc_RNA (1)...(19): siRNA sense strand
caugaugugugcaaauauu

SEQ ID NO: 1792400 - RNA, 19 nt, Homo sapiens
  misc_RNA (1)...(19): siRNA sense strand
uuuaucagcuuauguggua

SEQ ID NO: 1792401 - RNA, 19 nt, Homo sapiens
  misc_RNA (1)...(19): siRNA sense strand
gaaaucaaugugcuacaaa

SEQ ID NO: 1792402 - RNA, 19 nt, Homo sapiens
  misc_RNA (1)...(19): siRNA sense strand
ggaagguguucgagcuauu

SEQ ID NO: 1792403 - RNA, 19 nt, Homo sapiens
  misc_RNA (1)...(19): siRNA sense strand
gaaugaagacauaggagaa

SEQ ID NO: 1792404 - RNA, 19 nt, Homo sapiens
  misc_RNA (1)...(19): siRNA sense strand
caagaugauugaaaugcaa

SEQ ID NO: 1792405 - RNA, 19 nt, Homo sapiens
  misc_RNA (1)...(19): siRNA sense strand
gaagggaucaaacaggaaa

SEQ ID NO: 1792406 - RNA, 19 nt, Homo sapiens
  misc_RNA (1)...(19): siRNA sense strand
gguuagagguuauagaaag

SEQ ID NO: 1792407 - RNA, 19 nt, Homo sapiens
  misc_RNA (1)...(19): siRNA sense strand
uaaacugacucgucuucuu

SEQ ID NO: 1792408 - RNA, 19 nt, Homo sapiens
  misc_RNA (1)...(19): siRNA sense strand
gaaagaccacgaacuucaa

SEQ ID NO: 1792409 - RNA, 19 nt, Homo sapiens
  misc_RNA (1)...(19): siRNA sense strand
gcgauaaugugaagguugu

SEQ ID NO: 1792410 - RNA, 19 nt, Homo sapiens
  misc_RNA (1)...(19): siRNA sense strand
gggaaagaccaagaaguua

SEQ ID NO: 1792411 - RNA, 19 nt, Homo sapiens
  misc_RNA (1)...(19): siRNA sense strand
gaaaagaagguaauuguug

SEQ ID NO: 1792412 - RNA, 19 nt, Homo sapiens
  misc_RNA (1)...(19): siRNA sense strand
ggccagcagauuacaauua

SEQ ID NO: 1792413 - RNA, 19 nt, Homo sapiens
  misc_RNA (1)...(19): siRNA sense strand
ugaagaaguucgugaccuu

SEQ ID NO: 1792414 - RNA, 19 nt, Homo sapiens
  misc_RNA (1)...(19): siRNA sense strand
cgacauggaagaagaagaa

SEQ ID NO: 1792415 - RNA, 19 nt, Homo sapiens
  misc_RNA (1)...(19): siRNA sense strand
gaagaaggagaagaaauau

SEQ ID NO: 1792416 - RNA, 19 nt, Homo sapiens
  misc_RNA (1)...(19): siRNA sense strand
gcaaggaucagacacaaag

SEQ ID NO: 1792417 - RNA, 19 nt, Homo sapiens
  misc_RNA (1)...(19): siRNA sense strand
gaaagaaauagaagaacug

SEQ ID NO: 1792418 - RNA, 19 nt, Homo sapiens
  misc_RNA (1)...(19): siRNA sense strand
ccagaaagaaauagaagaa

SEQ ID NO: 1792419 - RNA, 19 nt, Homo sapiens
  misc_RNA (1)...(19): siRNA sense strand
gacuucagaugcuuauuau

SEQ ID NO: 1792420 - RNA, 19 nt, Homo sapiens
  misc_RNA (1)...(19): siRNA sense strand
uggcugaucuccaacaaga

SEQ ID NO: 1792421 - RNA, 19 nt, Homo sapiens
  misc_RNA (1)...(19): siRNA sense strand
ggcuagagcugaauuagag

SEQ ID NO: 1792422 - RNA, 19 nt, Homo sapiens
  misc_RNA (1)...(19): siRNA sense strand
ugauugaaaugcaagcaaa

SEQ ID NO: 1792423 - RNA, 19 nt, Homo sapiens
  misc_RNA (1)...(19): siRNA sense strand
gaaagcugcgauaauguga

SEQ ID NO: 1792424 - RNA, 19 nt, Homo sapiens
  misc_RNA (1)...(19): siRNA sense strand
ggaagaagaagaaagaaac

SEQ ID NO: 1792425 - RNA, 19 nt, Homo sapiens
  misc_RNA (1)...(19): siRNA sense strand
cagcagauuacaauuauga

SEQ ID NO: 1792426 - RNA, 19 nt, Homo sapiens
  misc_RNA (1)...(19): siRNA sense strand
gcaaagccugaaacuguaa

SEQ ID NO: 1792427 - RNA, 19 nt, Homo sapiens
  misc_RNA (1)...(19): siRNA sense strand
ggucagaggaagaugauga

SEQ ID NO: 1792428 - RNA, 19 nt, Homo sapiens
  misc_RNA (1)...(19): siRNA sense strand
gcaagaccuauuauugauu

SEQ ID NO: 1792429 - RNA, 19 nt, Homo sapiens
  misc_RNA (1)...(19): siRNA sense strand
ucacguguaucuugccuau

SEQ ID NO: 1792430 - RNA, 19 nt, Homo sapiens
  misc_RNA (1)...(19): siRNA sense strand
aaagaaaguuuggacuaug

SEQ ID NO: 1792431 - RNA, 19 nt, Homo sapiens
  misc_RNA (1)...(19): siRNA sense strand
caacuucgcagagaacuug

SEQ ID NO: 1792432 - RNA, 19 nt, Homo sapiens
  misc_RNA (1)...(19): siRNA sense strand
aaaauuaucugcccuggaa

SEQ ID NO: 1792433 - RNA, 19 nt, Homo sapiens
  misc_RNA (1)...(19): siRNA sense strand
gaagaagaagaaagaaaca

SEQ ID NO: 1792434 - RNA, 19 nt, Homo sapiens
  misc_RNA (1)...(19): siRNA sense strand
aaagaagcuugaagaagga

SEQ ID NO: 1792435 - RNA, 19 nt, Homo sapiens
  misc_RNA (1)...(19): siRNA sense strand
ugugggaguuuauaucaaa

SEQ ID NO: 1792436 - RNA, 19 nt, Homo sapiens
  misc_RNA (1)...(19): siRNA sense strand
gagaguaaacaacuugaug

SEQ ID NO: 1792437 - RNA, 19 nt, Homo sapiens
  misc_RNA (1)...(19): siRNA sense strand
cuucagaugcuuauuauug

SEQ ID NO: 1792438 - RNA, 19 nt, Homo sapiens
  misc_RNA (1)...(19): siRNA sense strand
gaccaagaaguuaaagaaa

SEQ ID NO: 1792439 - RNA, 19 nt, Homo sapiens
  misc_RNA (1)...(19): siRNA sense strand
gcacagggaaagaccaaga

SEQ ID NO: 1792440 - RNA, 19 nt, Homo sapiens
  misc_RNA (1)...(19): siRNA sense strand
agaaggagaagaaauauca

SEQ ID NO: 1792441 - RNA, 19 nt, Homo sapiens
  misc_RNA (1)...(19): siRNA sense strand
guuagagguuauagaaaga

SEQ ID NO: 1792442 - RNA, 19 nt, Homo sapiens
  misc_RNA (1)...(19): siRNA sense strand
gaagaaguucgugaccuuu

SEQ ID NO: 1792443 - RNA, 19 nt, Homo sapiens
  misc_RNA (1)...(19): siRNA sense strand
ugcaaagccugaaacugua

SEQ ID NO: 1792444 - RNA, 19 nt, Homo sapiens
  misc_RNA (1)...(19): siRNA sense strand
cuagaaagaccacgaacuu

SEQ ID NO: 1792445 - RNA, 19 nt, Homo sapiens
  misc_RNA (1)...(19): siRNA sense strand
ggagaacauucggcaacuu

SEQ ID NO: 1792446 - RNA, 19 nt, Homo sapiens
  misc_RNA (1)...(19): siRNA sense strand
gaaaagagcagagcaacuu

SEQ ID NO: 1792447 - RNA, 19 nt, Homo sapiens
  misc_RNA (1)...(19): siRNA sense strand
gguaaauaaugcugaugau

SEQ ID NO: 1792448 - RNA, 19 nt, Homo sapiens
  misc_RNA (1)...(19): siRNA sense strand
ggaucagacacaaagguua

SEQ ID NO: 1792449 - RNA, 19 nt, Homo sapiens
  misc_RNA (1)...(19): siRNA sense strand
gggcaaggaucagacacaa

SEQ ID NO: 1792450 - RNA, 19 nt, Homo sapiens
  misc_RNA (1)...(19): siRNA sense strand
agaaaucaaugugcuacaa

SEQ ID NO: 1792451 - RNA, 19 nt, Homo sapiens
  misc_RNA (1)...(19): siRNA sense strand
gcuaaaauguguugcuuau

SEQ ID NO: 1792452 - RNA, 19 nt, Homo sapiens
  misc_RNA (1)...(19): siRNA sense strand
gaugugggaguuuauauca

SEQ ID NO: 1792453 - RNA, 19 nt, Homo sapiens
  misc_RNA (1)...(19): siRNA sense strand
agacugauucuuccaauga

SEQ ID NO: 1792454 - RNA, 19 nt, Homo sapiens
  misc_RNA (1)...(19): siRNA sense strand
uaacauggaacuggaagaa

SEQ ID NO: 1792455 - RNA, 19 nt, Homo sapiens
  misc_RNA (1)...(19): siRNA sense strand
gagaaaagcacuugaaaca

SEQ ID NO: 1792456 - RNA, 19 nt, Homo sapiens
  misc_RNA (1)...(19): siRNA sense strand
gaccuauuauugauucugu

SEQ ID NO: 1792457 - RNA, 19 nt, Homo sapiens
  misc_RNA (1)...(19): siRNA sense strand
uguaauuucugccuugguu

SEQ ID NO: 1792458 - RNA, 19 nt, Homo sapiens
  misc_RNA (1)...(19): siRNA sense strand
gaaagcaaggccaaagaca

SEQ ID NO: 1792459 - RNA, 19 nt, Homo sapiens
  misc_RNA (1)...(19): siRNA sense strand
gccaaucgugcuaagaaua

SEQ ID NO: 1792460 - RNA, 19 nt, Homo sapiens
  misc_RNA (1)...(19): siRNA sense strand
gagagaaaucaaugugcua

SEQ ID NO: 1792461 - RNA, 19 nt, Homo sapiens
  misc_RNA (1)...(19): siRNA sense strand
cugcaaagccugaaacugu

SEQ ID NO: 1792462 - RNA, 19 nt, Homo sapiens
  misc_RNA (1)...(19): siRNA sense strand
gaaguuaaagaaaguuugg

SEQ ID NO: 1792463 - RNA, 19 nt, Homo sapiens
  misc_RNA (1)...(19): siRNA sense strand
gaagggagcugugaaagug

SEQ ID NO: 1792464 - RNA, 19 nt, Homo sapiens
  misc_RNA (1)...(19): siRNA sense strand
gaagacacccuuuguggaa

SEQ ID NO: 1792465 - RNA, 19 nt, Homo sapiens
  misc_RNA (1)...(19): siRNA sense strand
aaauuuggcuccacuaaga

SEQ ID NO: 1792466 - RNA, 19 nt, Homo sapiens
  misc_RNA (1)...(19): siRNA sense strand
ccaaggaguucguguacaa

SEQ ID NO: 1792467 - RNA, 19 nt, Homo sapiens
  misc_RNA (1)...(19): siRNA sense strand
ugacauggcccagguauuu

SEQ ID NO: 1792468 - RNA, 19 nt, Homo sapiens
  misc_RNA (1)...(19): siRNA sense strand
ggagcugagugucuggauu

SEQ ID NO: 1792469 - RNA, 19 nt, Homo sapiens
  misc_RNA (1)...(19): siRNA sense strand
gagcugagugucuggauug

SEQ ID NO: 1792470 - RNA, 19 nt, Homo sapiens
  misc_RNA (1)...(19): siRNA sense strand
gcuacaaccugaacaccau

SEQ ID NO: 1792471 - RNA, 19 nt, Homo sapiens
  misc_RNA (1)...(19): siRNA sense strand
gagguguccuaccagauug

SEQ ID NO: 1792472 - RNA, 19 nt, Homo sapiens
  misc_RNA (1)...(19): siRNA sense strand
ggagaagacacccuuugug

SEQ ID NO: 1792473 - RNA, 19 nt, Homo sapiens
  misc_RNA (1)...(19): siRNA sense strand
cacccagccucuucuuuga

SEQ ID NO: 1792474 - RNA, 19 nt, Homo sapiens
  misc_RNA (1)...(19): siRNA sense strand
ugagguguccuaccagauu

SEQ ID NO: 1792475 - RNA, 19 nt, Homo sapiens
  misc_RNA (1)...(19): siRNA sense strand
caucaucuccuacuuguac

SEQ ID NO: 1792476 - RNA, 19 nt, Homo sapiens
  misc_RNA (1)...(19): siRNA sense strand
gagccucucucugucuaug

SEQ ID NO: 1792477 - RNA, 19 nt, Homo sapiens
  misc_RNA (1)...(19): siRNA sense strand
ugagaagggagcugugaaa

SEQ ID NO: 1792478 - RNA, 19 nt, Homo sapiens
  misc_RNA (1)...(19): siRNA sense strand
ucacccagccucuucuuug

SEQ ID NO: 1792479 - RNA, 19 nt, Homo sapiens
  misc_RNA (1)...(19): siRNA sense strand
gcagcuagagaucaaagug

SEQ ID NO: 1792480 - RNA, 19 nt, Homo sapiens
  misc_RNA (1)...(19): siRNA sense strand
ucccagcucucacccaaug

SEQ ID NO: 1792481 - RNA, 19 nt, Homo sapiens
  misc_RNA (1)...(19): siRNA sense strand
gaaagugcuguaccuggau

SEQ ID NO: 1792482 - RNA, 19 nt, Homo sapiens
  misc_RNA (1)...(19): siRNA sense strand
uggaaggccucagcuacaa

SEQ ID NO: 1792483 - RNA, 19 nt, Homo sapiens
  misc_RNA (1)...(19): siRNA sense strand
cuccuucgcugccaccaaa

SEQ ID NO: 1792484 - RNA, 19 nt, Homo sapiens
  misc_RNA (1)...(19): siRNA sense strand
gaucaaaguggcccugaac

SEQ ID NO: 1792485 - RNA, 19 nt, Homo sapiens
  misc_RNA (1)...(19): siRNA sense strand
cugagugucuggauugauc

SEQ ID NO: 1792486 - RNA, 19 nt, Homo sapiens
  misc_RNA (1)...(19): siRNA sense strand
aauaugaaggccacuggua

SEQ ID NO: 1792487 - RNA, 19 nt, Homo sapiens
  misc_RNA (1)...(19): siRNA sense strand
gcucagcccaucaccuuca

SEQ ID NO: 1792488 - RNA, 19 nt, Homo sapiens
  misc_RNA (1)...(19): siRNA sense strand
caaauuuggcuccacuaag

SEQ ID NO: 1792489 - RNA, 19 nt, Homo sapiens
  misc_RNA (1)...(19): siRNA sense strand
acccagcccuaccuucauu

SEQ ID NO: 1792490 - RNA, 19 nt, Homo sapiens
  misc_RNA (1)...(19): siRNA sense strand
ucacccagcccuaccuuca

SEQ ID NO: 1792491 - RNA, 19 nt, Homo sapiens
  misc_RNA (1)...(19): siRNA sense strand
cccagccucuucuuugaug

SEQ ID NO: 1792492 - RNA, 19 nt, Homo sapiens
  misc_RNA (1)...(19): siRNA sense strand
gagaucaagagcagcuuca

SEQ ID NO: 1792493 - RNA, 19 nt, Homo sapiens
  misc_RNA (1)...(19): siRNA sense strand
gaggagcuagagcggcuuu

SEQ ID NO: 1792494 - RNA, 19 nt, Homo sapiens
  misc_RNA (1)...(19): siRNA sense strand
gcuccacuaagaugaagaa

SEQ ID NO: 1792495 - RNA, 19 nt, Homo sapiens
  misc_RNA (1)...(19): siRNA sense strand
ggugagaagggagcuguga

SEQ ID NO: 1792496 - RNA, 19 nt, Homo sapiens
  misc_RNA (1)...(19): siRNA sense strand
gagcugugaaagugcugua

SEQ ID NO: 1792497 - RNA, 19 nt, Homo sapiens
  misc_RNA (1)...(19): siRNA sense strand
gagaagggagcugugaaag

SEQ ID NO: 1792498 - RNA, 19 nt, Homo sapiens
  misc_RNA (1)...(19): siRNA sense strand
gaucaagagcagcuucaac

SEQ ID NO: 1792499 - RNA, 19 nt, Homo sapiens
  misc_RNA (1)...(19): siRNA sense strand
ccgcucagcccaucaccuu

SEQ ID NO: 1792500 - RNA, 19 nt, Homo sapiens
  misc_RNA (1)...(19): siRNA sense strand
gacauggcccagguauuug

SEQ ID NO: 1792501 - RNA, 19 nt, Homo sapiens
  misc_RNA (1)...(19): siRNA sense strand
guggaaggccucagcuaca

SEQ ID NO: 1792502 - RNA, 19 nt, Homo sapiens
  misc_RNA (1)...(19): siRNA sense strand
ccuuugagguguccuacca

SEQ ID NO: 1792503 - RNA, 19 nt, Homo sapiens
  misc_RNA (1)...(19): siRNA sense strand
ccacugguacccugagaag

SEQ ID NO: 1792504 - RNA, 19 nt, Homo sapiens
  misc_RNA (1)...(19): siRNA sense strand
agaagggagcugugaaagu

SEQ ID NO: 1792505 - RNA, 19 nt, Homo sapiens
  misc_RNA (1)...(19): siRNA sense strand
ugaacaccaugcaguaucc

SEQ ID NO: 1792506 - RNA, 19 nt, Homo sapiens
  misc_RNA (1)...(19): siRNA sense strand
ggccacugguacccugaga

SEQ ID NO: 1792507 - RNA, 19 nt, Homo sapiens
  misc_RNA (1)...(19): siRNA sense strand
agaagaacauggagaauua

SEQ ID NO: 1792508 - RNA, 19 nt, Homo sapiens
  misc_RNA (1)...(19): siRNA sense strand
gaaguuguguguagaaauu

SEQ ID NO: 1792509 - RNA, 19 nt, Homo sapiens
  misc_RNA (1)...(19): siRNA sense strand
ggacagaaguuguguguag

SEQ ID NO: 1792510 - RNA, 19 nt, Homo sapiens
  misc_RNA (1)...(19): siRNA sense strand
gcagcaagauggccaguaa

SEQ ID NO: 1792511 - RNA, 19 nt, Homo sapiens
  misc_RNA (1)...(19): siRNA sense strand
gaauuaggauuucaaagug

SEQ ID NO: 1792512 - RNA, 19 nt, Homo sapiens
  misc_RNA (1)...(19): siRNA sense strand
guacagggcugaaaacaua

SEQ ID NO: 1792513 - RNA, 19 nt, Homo sapiens
  misc_RNA (1)...(19): siRNA sense strand
gaaaugaacccuucuuaca

SEQ ID NO: 1792514 - RNA, 19 nt, Homo sapiens
  misc_RNA (1)...(19): siRNA sense strand
ugacagaucugccugaaau

SEQ ID NO: 1792515 - RNA, 19 nt, Homo sapiens
  misc_RNA (1)...(19): siRNA sense strand
ggaauucucucacgaccaa

SEQ ID NO: 1792516 - RNA, 19 nt, Homo sapiens
  misc_RNA (1)...(19): siRNA sense strand
ggacaacaauuaacaaugc

SEQ ID NO: 1792517 - RNA, 19 nt, Homo sapiens
  misc_RNA (1)...(19): siRNA sense strand
gaacagcaauugagacaac

SEQ ID NO: 1792518 - RNA, 19 nt, Homo sapiens
  misc_RNA (1)...(19): siRNA sense strand
gcaagaggcuagagcugaa

SEQ ID NO: 1792519 - RNA, 19 nt, Homo sapiens
  misc_RNA (1)...(19): siRNA sense strand
gcaggaacaucauggauca

SEQ ID NO: 1792520 - RNA, 19 nt, Homo sapiens
  misc_RNA (1)...(19): siRNA sense strand
ccaagaacaucaagaacaa

SEQ ID NO: 1792521 - RNA, 19 nt, Homo sapiens
  misc_RNA (1)...(19): siRNA sense strand
ugucauuucugcuucauua

SEQ ID NO: 1792522 - RNA, 19 nt, Homo sapiens
  misc_RNA (1)...(19): siRNA sense strand
caucagagcccaagagauu

SEQ ID NO: 1792523 - RNA, 19 nt, Homo sapiens
  misc_RNA (1)...(19): siRNA sense strand
gaacccuucuuacaucauu

SEQ ID NO: 1792524 - RNA, 19 nt, Homo sapiens
  misc_RNA (1)...(19): siRNA sense strand
gagaagaacaagaucauga

SEQ ID NO: 1792525 - RNA, 19 nt, Homo sapiens
  misc_RNA (1)...(19): siRNA sense strand
gugaagagguaauaacgaa

SEQ ID NO: 1792526 - RNA, 19 nt, Homo sapiens
  misc_RNA (1)...(19): siRNA sense strand
gcucaugcccuucaacuuu

SEQ ID NO: 1792527 - RNA, 19 nt, Homo sapiens
  misc_RNA (1)...(19): siRNA sense strand
gaggacgggugaagaggua

SEQ ID NO: 1792528 - RNA, 19 nt, Homo sapiens
  misc_RNA (1)...(19): siRNA sense strand
ggcuagagcugaaagagaa

SEQ ID NO: 1792529 - RNA, 19 nt, Homo sapiens
  misc_RNA (1)...(19): siRNA sense strand
ggacaaagcagcacguauc

SEQ ID NO: 1792530 - RNA, 19 nt, Homo sapiens
  misc_RNA (1)...(19): siRNA sense strand
ggaucaagcuugggucuga

SEQ ID NO: 1792531 - RNA, 19 nt, Homo sapiens
  misc_RNA (1)...(19): siRNA sense strand
caagagacauccugacagu

SEQ ID NO: 1792532 - RNA, 19 nt, Homo sapiens
  misc_RNA (1)...(19): siRNA sense strand
ggaccagcaugaugaguau

SEQ ID NO: 1792533 - RNA, 19 nt, Homo sapiens
  misc_RNA (1)...(19): siRNA sense strand
gaaauggaacagcaauuga

SEQ ID NO: 1792534 - RNA, 19 nt, Homo sapiens
  misc_RNA (1)...(19): siRNA sense strand
ccacuggauuccuuuguuu

SEQ ID NO: 1792535 - RNA, 19 nt, Homo sapiens
  misc_RNA (1)...(19): siRNA sense strand
ggaaauggaacagcaauug

SEQ ID NO: 1792536 - RNA, 19 nt, Homo sapiens
  misc_RNA (1)...(19): siRNA sense strand
gcacguaucaccucauuca

SEQ ID NO: 1792537 - RNA, 19 nt, Homo sapiens
  misc_RNA (1)...(19): siRNA sense strand
cccaagagauuauuugaga

SEQ ID NO: 1792538 - RNA, 19 nt, Homo sapiens
  misc_RNA (1)...(19): siRNA sense strand
cagaagauguuggaacuga

SEQ ID NO: 1792539 - RNA, 19 nt, Homo sapiens
  misc_RNA (1)...(19): siRNA sense strand
ccaagaaacucaagaagcu

SEQ ID NO: 1792540 - RNA, 19 nt, Homo sapiens
  misc_RNA (1)...(19): siRNA sense strand
gagaagaacauggagaauu

SEQ ID NO: 1792541 - RNA, 19 nt, Homo sapiens
  misc_RNA (1)...(19): siRNA sense strand
ccaagaaugucaaggagau

SEQ ID NO: 1792542 - RNA, 19 nt, Homo sapiens
  misc_RNA (1)...(19): siRNA sense strand
ggaccaaauucucgugugu

SEQ ID NO: 1792543 - RNA, 19 nt, Homo sapiens
  misc_RNA (1)...(19): siRNA sense strand
acacaucgccuuugcauug

SEQ ID NO: 1792544 - RNA, 19 nt, Homo sapiens
  misc_RNA (1)...(19): siRNA sense strand
agaauuaccugcaggaaca

SEQ ID NO: 1792545 - RNA, 19 nt, Homo sapiens
  misc_RNA (1)...(19): siRNA sense strand
gauggaggccuuucuguug

SEQ ID NO: 1792546 - RNA, 19 nt, Homo sapiens
  misc_RNA (1)...(19): siRNA sense strand
uuaauaaccucaccaacau

SEQ ID NO: 1792547 - RNA, 19 nt, Homo sapiens
  misc_RNA (1)...(19): siRNA sense strand
caaaaucaaccucucauua

SEQ ID NO: 1792548 - RNA, 19 nt, Homo sapiens
  misc_RNA (1)...(19): siRNA sense strand
caaagugcccuaauagugu

SEQ ID NO: 1792549 - RNA, 19 nt, Homo sapiens
  misc_RNA (1)...(19): siRNA sense strand
gagacaacuugaacaguca

SEQ ID NO: 1792550 - RNA, 19 nt, Homo sapiens
  misc_RNA (1)...(19): siRNA sense strand
gacaauaaaggaugaguau

SEQ ID NO: 1792551 - RNA, 19 nt, Homo sapiens
  misc_RNA (1)...(19): siRNA sense strand
ggugaaaccaugagacuga

SEQ ID NO: 1792552 - RNA, 19 nt, Homo sapiens
  misc_RNA (1)...(19): siRNA sense strand
gauccuuuauucacuaguu

SEQ ID NO: 1792553 - RNA, 19 nt, Homo sapiens
  misc_RNA (1)...(19): siRNA sense strand
gaauugcaucuuuaaggua

SEQ ID NO: 1792554 - RNA, 19 nt, Homo sapiens
  misc_RNA (1)...(19): siRNA sense strand
gcuauggucuuuauuuagg

SEQ ID NO: 1792555 - RNA, 19 nt, Homo sapiens
  misc_RNA (1)...(19): siRNA sense strand
gagccaagaacaucaagaa

SEQ ID NO: 1792556 - RNA, 19 nt, Homo sapiens
  misc_RNA (1)...(19): siRNA sense strand
caacaguggcggaccauga

SEQ ID NO: 1792557 - RNA, 19 nt, Homo sapiens
  misc_RNA (1)...(19): siRNA sense strand
gaugggaacuguggaccaa

SEQ ID NO: 1792558 - RNA, 19 nt, Homo sapiens
  misc_RNA (1)...(19): siRNA sense strand
cguaucaccucauucauca

SEQ ID NO: 1792559 - RNA, 19 nt, Homo sapiens
  misc_RNA (1)...(19): siRNA sense strand
gcacgguguuugccuaugg

SEQ ID NO: 1792560 - RNA, 19 nt, Homo sapiens
  misc_RNA (1)...(19): siRNA sense strand
cagcacguaucaccucauu

SEQ ID NO: 1792561 - RNA, 19 nt, Homo sapiens
  misc_RNA (1)...(19): siRNA sense strand
gaacucacggcuucccaaa

SEQ ID NO: 1792562 - RNA, 19 nt, Homo sapiens
  misc_RNA (1)...(19): siRNA sense strand
ggagauugccgagcagaaa

SEQ ID NO: 1792563 - RNA, 19 nt, Homo sapiens
  misc_RNA (1)...(19): siRNA sense strand
gcaauugagacaacuugaa

SEQ ID NO: 1792564 - RNA, 19 nt, Homo sapiens
  misc_RNA (1)...(19): siRNA sense strand
ucaaagugcccuaauagug

SEQ ID NO: 1792565 - RNA, 19 nt, Homo sapiens
  misc_RNA (1)...(19): siRNA sense strand
caaggcaacuccccauuuu

SEQ ID NO: 1792566 - RNA, 19 nt, Homo sapiens
  misc_RNA (1)...(19): siRNA sense strand
uggagaggcucaugcgauu

SEQ ID NO: 1792567 - RNA, 19 nt, Homo sapiens
  misc_RNA (1)...(19): siRNA sense strand
ugaauugcaucuuuaaggu

SEQ ID NO: 1792568 - RNA, 19 nt, Homo sapiens
  misc_RNA (1)...(19): siRNA sense strand
gcagcacccacaugaauga

SEQ ID NO: 1792569 - RNA, 19 nt, Homo sapiens
  misc_RNA (1)...(19): siRNA sense strand
auacgggacauauguaaua

SEQ ID NO: 1792570 - RNA, 19 nt, Homo sapiens
  misc_RNA (1)...(19): siRNA sense strand
ucuugucacucuacacaua

SEQ ID NO: 1792571 - RNA, 19 nt, Homo sapiens
  misc_RNA (1)...(19): siRNA sense strand
aagcuugggucugauuuaa

SEQ ID NO: 1792572 - RNA, 19 nt, Homo sapiens
  misc_RNA (1)...(19): siRNA sense strand
gaagagguaauaacgaaag

SEQ ID NO: 1792573 - RNA, 19 nt, Homo sapiens
  misc_RNA (1)...(19): siRNA sense strand
gagcagacccgcgaacuca

SEQ ID NO: 1792574 - RNA, 19 nt, Homo sapiens
  misc_RNA (1)...(19): siRNA sense strand
caacaggagcacccacauu

SEQ ID NO: 1792575 - RNA, 19 nt, Homo sapiens
  misc_RNA (1)...(19): siRNA sense strand
ggaaaugaacccuucuuac

SEQ ID NO: 1792576 - RNA, 19 nt, Homo sapiens
  misc_RNA (1)...(19): siRNA sense strand
aaaucaaccucucauuauc

SEQ ID NO: 1792577 - RNA, 19 nt, Homo sapiens
  misc_RNA (1)...(19): siRNA sense strand
caaaaugucucuagguauc

SEQ ID NO: 1792578 - RNA, 19 nt, Homo sapiens
  misc_RNA (1)...(19): siRNA sense strand
gggaacagcaggccacaga

SEQ ID NO: 1792579 - RNA, 19 nt, Homo sapiens
  misc_RNA (1)...(19): siRNA sense strand
cauaauguuucuggaguug

SEQ ID NO: 1792580 - RNA, 19 nt, Homo sapiens
  misc_RNA (1)...(19): siRNA sense strand
cgaccuagcgagcaggaua

SEQ ID NO: 1792581 - RNA, 19 nt, Homo sapiens
  misc_RNA (1)...(19): siRNA sense strand
gacagaaguuguguguaga

SEQ ID NO: 1792582 - RNA, 19 nt, Homo sapiens
  misc_RNA (1)...(19): siRNA sense strand
gggcagcacccacaugaau

SEQ ID NO: 1792583 - RNA, 19 nt, Homo sapiens
  misc_RNA (1)...(19): siRNA sense strand
ggauggaggccuuucuguu

SEQ ID NO: 1792584 - RNA, 19 nt, Homo sapiens
  misc_RNA (1)...(19): siRNA sense strand
ggacacaucgccuuugcau

SEQ ID NO: 1792585 - RNA, 19 nt, Homo sapiens
  misc_RNA (1)...(19): siRNA sense strand
aaugaacccuucuuacauc

SEQ ID NO: 1792586 - RNA, 19 nt, Homo sapiens
  misc_RNA (1)...(19): siRNA sense strand
gaaccugcaggaaauggaa

SEQ ID NO: 1792587 - RNA, 19 nt, Homo sapiens
  misc_RNA (1)...(19): siRNA sense strand
gagacauccugacaguguu

SEQ ID NO: 1792588 - RNA, 19 nt, Homo sapiens
  misc_RNA (1)...(19): siRNA sense strand
ugaagaagcggccaacauc

SEQ ID NO: 1792589 - RNA, 19 nt, Homo sapiens
  misc_RNA (1)...(19): siRNA sense strand
caagcuugggucugauuua

SEQ ID NO: 1792590 - RNA, 19 nt, Homo sapiens
  misc_RNA (1)...(19): siRNA sense strand
uaugaagagugcugucguu

SEQ ID NO: 1792591 - RNA, 19 nt, Homo sapiens
  misc_RNA (1)...(19): siRNA sense strand
ucaaggacauuaauaaccu

SEQ ID NO: 1792592 - RNA, 19 nt, Homo sapiens
  misc_RNA (1)...(19): siRNA sense strand
gaccaugagugacaaccau

SEQ ID NO: 1792593 - RNA, 19 nt, Homo sapiens
  misc_RNA (1)...(19): siRNA sense strand
gaaggucagagcagcaaga

SEQ ID NO: 1792594 - RNA, 19 nt, Homo sapiens
  misc_RNA (1)...(19): siRNA sense strand
gcacaauauacccaaauca

SEQ ID NO: 1792595 - RNA, 19 nt, Homo sapiens
  misc_RNA (1)...(19): siRNA sense strand
ccucuuccuuuaucucauu

SEQ ID NO: 1792596 - RNA, 19 nt, Homo sapiens
  misc_RNA (1)...(19): siRNA sense strand
cagaaguuguguguagaaa

SEQ ID NO: 1792597 - RNA, 19 nt, Homo sapiens
  misc_RNA (1)...(19): siRNA sense strand
gccauuugcuccuguccuu

SEQ ID NO: 1792598 - RNA, 19 nt, Homo sapiens
  misc_RNA (1)...(19): siRNA sense strand
gacaagagacauccugaca

SEQ ID NO: 1792599 - RNA, 19 nt, Homo sapiens
  misc_RNA (1)...(19): siRNA sense strand
caugccaucuucaucauca

SEQ ID NO: 1792600 - RNA, 19 nt, Homo sapiens
  misc_RNA (1)...(19): siRNA sense strand
ggagauugagcaugugaug

SEQ ID NO: 1792601 - RNA, 19 nt, Homo sapiens
  misc_RNA (1)...(19): siRNA sense strand
caauuaccaucgccuugga

SEQ ID NO: 1792602 - RNA, 19 nt, Homo sapiens
  misc_RNA (1)...(19): siRNA sense strand
ucaccucauucaucacuug

SEQ ID NO: 1792603 - RNA, 19 nt, Homo sapiens
  misc_RNA (1)...(19): siRNA sense strand
gagcagccucucccacuga

SEQ ID NO: 1792604 - RNA, 19 nt, Homo sapiens
  misc_RNA (1)...(19): siRNA sense strand
ucgcuaaacgaagauauua

SEQ ID NO: 1792605 - RNA, 19 nt, Homo sapiens
  misc_RNA (1)...(19): siRNA sense strand
gucaguagcagccagauga

SEQ ID NO: 1792606 - RNA, 19 nt, Homo sapiens
  misc_RNA (1)...(19): siRNA sense strand
caauaaaggaugaguaucg

SEQ ID NO: 1792607 - RNA, 19 nt, Homo sapiens
  misc_RNA (1)...(19): siRNA sense strand
ggagaggaguugucaauaa

SEQ ID NO: 1792608 - RNA, 19 nt, Homo sapiens
  misc_RNA (1)...(19): siRNA sense strand
uggagaagcugcccaguua

SEQ ID NO: 1792609 - RNA, 19 nt, Homo sapiens
  misc_RNA (1)...(19): siRNA sense strand
gaaacgcuaucuucacuga

SEQ ID NO: 1792610 - RNA, 19 nt, Homo sapiens
  misc_RNA (1)...(19): siRNA sense strand
caaaggaugugguuucuca

SEQ ID NO: 1792611 - RNA, 19 nt, Homo sapiens
  misc_RNA (1)...(19): siRNA sense strand
acaaauccaucuugaauga

SEQ ID NO: 1792612 - RNA, 19 nt, Homo sapiens
  misc_RNA (1)...(19): siRNA sense strand
ccaaggaggcccugaauuu

SEQ ID NO: 1792613 - RNA, 19 nt, Homo sapiens
  misc_RNA (1)...(19): siRNA sense strand
ucaagaaccuggagaagga

SEQ ID NO: 1792614 - RNA, 19 nt, Homo sapiens
  misc_RNA (1)...(19): siRNA sense strand
guacaucacuuccaaaauu

SEQ ID NO: 1792615 - RNA, 19 nt, Homo sapiens
  misc_RNA (1)...(19): siRNA sense strand
caacaaaucgcucucauuc

SEQ ID NO: 1792616 - RNA, 19 nt, Homo sapiens
  misc_RNA (1)...(19): siRNA sense strand
gcacaucaaugccaucaag

SEQ ID NO: 1792617 - RNA, 19 nt, Homo sapiens
  misc_RNA (1)...(19): siRNA sense strand
ggaaguacacccucauuga

SEQ ID NO: 1792618 - RNA, 19 nt, Homo sapiens
  misc_RNA (1)...(19): siRNA sense strand
ugacuuugcucaugaaaug

SEQ ID NO: 1792619 - RNA, 19 nt, Homo sapiens
  misc_RNA (1)...(19): siRNA sense strand
gaaaacaaauccaucuuga

SEQ ID NO: 1792620 - RNA, 19 nt, Homo sapiens
  misc_RNA (1)...(19): siRNA sense strand
ggacuugguuuaugagaca

SEQ ID NO: 1792621 - RNA, 19 nt, Homo sapiens
  misc_RNA (1)...(19): siRNA sense strand
cagacagacuggucguuua

SEQ ID NO: 1792622 - RNA, 19 nt, Homo sapiens
  misc_RNA (1)...(19): siRNA sense strand
guagugagaucaaccgaau

SEQ ID NO: 1792623 - RNA, 19 nt, Homo sapiens
  misc_RNA (1)...(19): siRNA sense strand
gcaccuuugugaccuauga

SEQ ID NO: 1792624 - RNA, 19 nt, Homo sapiens
  misc_RNA (1)...(19): siRNA sense strand
gaaggaagccaccuacauc

SEQ ID NO: 1792625 - RNA, 19 nt, Homo sapiens
  misc_RNA (1)...(19): siRNA sense strand
caaggagucuucauuaagg

SEQ ID NO: 1792626 - RNA, 19 nt, Homo sapiens
  misc_RNA (1)...(19): siRNA sense strand
ggugagaccaacaggauua

SEQ ID NO: 1792627 - RNA, 19 nt, Homo sapiens
  misc_RNA (1)...(19): siRNA sense strand
ggcaagacauacaccauga

SEQ ID NO: 1792628 - RNA, 19 nt, Homo sapiens
  misc_RNA (1)...(19): siRNA sense strand
ccaagaagacauucaaaga

SEQ ID NO: 1792629 - RNA, 19 nt, Homo sapiens
  misc_RNA (1)...(19): siRNA sense strand
ccaccuacaucaacaaauc

SEQ ID NO: 1792630 - RNA, 19 nt, Homo sapiens
  misc_RNA (1)...(19): siRNA sense strand
gagaggaguugucaauaac

SEQ ID NO: 1792631 - RNA, 19 nt, Homo sapiens
  misc_RNA (1)...(19): siRNA sense strand
ggaagaaagccaaguccaa

SEQ ID NO: 1792632 - RNA, 19 nt, Homo sapiens
  misc_RNA (1)...(19): siRNA sense strand
ggagaaggaacuagcacua

SEQ ID NO: 1792633 - RNA, 19 nt, Homo sapiens
  misc_RNA (1)...(19): siRNA sense strand
gacgggagcuggcaagaca

SEQ ID NO: 1792634 - RNA, 19 nt, Homo sapiens
  misc_RNA (1)...(19): siRNA sense strand
uaaguuggauggaguucuu

SEQ ID NO: 1792635 - RNA, 19 nt, Homo sapiens
  misc_RNA (1)...(19): siRNA sense strand
ccucaaggagucuucauua

SEQ ID NO: 1792636 - RNA, 19 nt, Homo sapiens
  misc_RNA (1)...(19): siRNA sense strand
gaagccaccuacaucaaca

SEQ ID NO: 1792637 - RNA, 19 nt, Homo sapiens
  misc_RNA (1)...(19): siRNA sense strand
uaccaaaccugggaagaaa

SEQ ID NO: 1792638 - RNA, 19 nt, Homo sapiens
  misc_RNA (1)...(19): siRNA sense strand
ccacugagccugccaucaa

SEQ ID NO: 1792639 - RNA, 19 nt, Homo sapiens
  misc_RNA (1)...(19): siRNA sense strand
ggauggaguucuucacgau

SEQ ID NO: 1792640 - RNA, 19 nt, Homo sapiens
  misc_RNA (1)...(19): siRNA sense strand
uugaggaguuuaagaauga

SEQ ID NO: 1792641 - RNA, 19 nt, Homo sapiens
  misc_RNA (1)...(19): siRNA sense strand
ucaaggagguguucaacca

SEQ ID NO: 1792642 - RNA, 19 nt, Homo sapiens
  misc_RNA (1)...(19): siRNA sense strand
ggaacuagcacuacucaag

SEQ ID NO: 1792643 - RNA, 19 nt, Homo sapiens
  misc_RNA (1)...(19): siRNA sense strand
caacugagaauuacaagca

SEQ ID NO: 1792644 - RNA, 19 nt, Homo sapiens
  misc_RNA (1)...(19): siRNA sense strand
ggauguugauggccaccua

SEQ ID NO: 1792645 - RNA, 19 nt, Homo sapiens
  misc_RNA (1)...(19): siRNA sense strand
caaacccaccgaugacuuu

SEQ ID NO: 1792646 - RNA, 19 nt, Homo sapiens
  misc_RNA (1)...(19): siRNA sense strand
gagaagcugcccaguuaga

SEQ ID NO: 1792647 - RNA, 19 nt, Homo sapiens
  misc_RNA (1)...(19): siRNA sense strand
aaaguaugaugcugagaga

SEQ ID NO: 1792648 - RNA, 19 nt, Homo sapiens
  misc_RNA (1)...(19): siRNA sense strand
aaacaucuauggagaagcu

SEQ ID NO: 1792649 - RNA, 19 nt, Homo sapiens
  misc_RNA (1)...(19): siRNA sense strand
gacaaaagaagcauugaua

SEQ ID NO: 1792650 - RNA, 19 nt, Homo sapiens
  misc_RNA (1)...(19): siRNA sense strand
auuaagggcuugucaguuc

SEQ ID NO: 1792651 - RNA, 19 nt, Homo sapiens
  misc_RNA (1)...(19): siRNA sense strand
ugacaggaaugacuuugca

SEQ ID NO: 1792652 - RNA, 19 nt, Homo sapiens
  misc_RNA (1)...(19): siRNA sense strand
gaagaacgccccacacaug

SEQ ID NO: 1792653 - RNA, 19 nt, Homo sapiens
  misc_RNA (1)...(19): siRNA sense strand
cucaaggagucuucauuaa

SEQ ID NO: 1792654 - RNA, 19 nt, Homo sapiens
  misc_RNA (1)...(19): siRNA sense strand
cccaggacuugguuuauga

SEQ ID NO: 1792655 - RNA, 19 nt, Homo sapiens
  misc_RNA (1)...(19): siRNA sense strand
ccacacagcacaucaaugc

SEQ ID NO: 1792656 - RNA, 19 nt, Homo sapiens
  misc_RNA (1)...(19): siRNA sense strand
caagaagacauucaaagag

SEQ ID NO: 1792657 - RNA, 19 nt, Homo sapiens
  misc_RNA (1)...(19): siRNA sense strand
gacgagaucgacauaauca

SEQ ID NO: 1792658 - RNA, 19 nt, Homo sapiens
  misc_RNA (1)...(19): siRNA sense strand
gauuauagccucccacacu

SEQ ID NO: 1792659 - RNA, 19 nt, Homo sapiens
  misc_RNA (1)...(19): siRNA sense strand
ugagacaguugcaaaggau

SEQ ID NO: 1792660 - RNA, 19 nt, Homo sapiens
  misc_RNA (1)...(19): siRNA sense strand
ggacgagaucgacauaauc

SEQ ID NO: 1792661 - RNA, 19 nt, Homo sapiens
  misc_RNA (1)...(19): siRNA sense strand
agacagacuggucguuuaa

SEQ ID NO: 1792662 - RNA, 19 nt, Homo sapiens
  misc_RNA (1)...(19): siRNA sense strand
caaccgaauuuucaaagaa

SEQ ID NO: 1792663 - RNA, 19 nt, Homo sapiens
  misc_RNA (1)...(19): siRNA sense strand
gagccugccaucaaugaaa

SEQ ID NO: 1792664 - RNA, 19 nt, Homo sapiens
  misc_RNA (1)...(19): siRNA sense strand
acaaaucgcucucauuccu

SEQ ID NO: 1792665 - RNA, 19 nt, Homo sapiens
  misc_RNA (1)...(19): siRNA sense strand
aaugagagccuguuugauc

SEQ ID NO: 1792666 - RNA, 19 nt, Homo sapiens
  misc_RNA (1)...(19): siRNA sense strand
auaaucagccuuagacaga

SEQ ID NO: 1792667 - RNA, 19 nt, Homo sapiens
  misc_RNA (1)...(19): siRNA sense strand
gagaccaacaggauuauag

SEQ ID NO: 1792668 - RNA, 19 nt, Homo sapiens
  misc_RNA (1)...(19): siRNA sense strand
ucaauaaccaacagacaga

SEQ ID NO: 1792669 - RNA, 19 nt, Homo sapiens
  misc_RNA (1)...(19): siRNA sense strand
caaggaggcccugaauuuc

SEQ ID NO: 1792670 - RNA, 19 nt, Homo sapiens
  misc_RNA (1)...(19): siRNA sense strand
agauugaugugaccaagga

SEQ ID NO: 1792671 - RNA, 19 nt, Homo sapiens
  misc_RNA (1)...(19): siRNA sense strand
gaaguacacccucauugac

SEQ ID NO: 1792672 - RNA, 19 nt, Homo sapiens
  misc_RNA (1)...(19): siRNA sense strand
cgacauaaucagccuuaga

SEQ ID NO: 1792673 - RNA, 19 nt, Homo sapiens
  misc_RNA (1)...(19): siRNA sense strand
guaugaugcugagagaaug

SEQ ID NO: 1792674 - RNA, 19 nt, Homo sapiens
  misc_RNA (1)...(19): siRNA sense strand
ccacacaugccaucacugu

SEQ ID NO: 1792675 - RNA, 19 nt, Homo sapiens
  misc_RNA (1)...(19): siRNA sense strand
caagacauacaccaugaug

SEQ ID NO: 1792676 - RNA, 19 nt, Homo sapiens
  misc_RNA (1)...(19): siRNA sense strand
uggacgagaucgacauaau

SEQ ID NO: 1792677 - RNA, 19 nt, Homo sapiens
  misc_RNA (1)...(19): siRNA sense strand
gacaaacaucuauggagaa

SEQ ID NO: 1792678 - RNA, 19 nt, Homo sapiens
  misc_RNA (1)...(19): siRNA sense strand
caguucaccucacaaguca

SEQ ID NO: 1792679 - RNA, 19 nt, Homo sapiens
  misc_RNA (1)...(19): siRNA sense strand
auaaugagagccuguuuga

SEQ ID NO: 1792680 - RNA, 19 nt, Homo sapiens
  misc_RNA (1)...(19): siRNA sense strand
ccaaguccaagaagacauu

SEQ ID NO: 1792681 - RNA, 19 nt, Homo sapiens
  misc_RNA (1)...(19): siRNA sense strand
aaagccaaguccaagaaga

SEQ ID NO: 1792682 - RNA, 19 nt, Homo sapiens
  misc_RNA (1)...(19): siRNA sense strand
gaaccuggagaaggaacua

SEQ ID NO: 1792683 - RNA, 19 nt, Homo sapiens
  misc_RNA (1)...(19): siRNA sense strand
cugagagaauggucaagaa

SEQ ID NO: 1792684 - RNA, 19 nt, Homo sapiens
  misc_RNA (1)...(19): siRNA sense strand
agacuggucguuuaaguug

SEQ ID NO: 1792685 - RNA, 19 nt, Homo sapiens
  misc_RNA (1)...(19): siRNA sense strand
cagauacggagaugacaaa

SEQ ID NO: 1792686 - RNA, 19 nt, Homo sapiens
  misc_RNA (1)...(19): siRNA sense strand
gaggaguugucaauaacca

SEQ ID NO: 1792687 - RNA, 19 nt, Homo sapiens
  misc_RNA (1)...(19): siRNA sense strand
gggcaacugagaauuacaa

SEQ ID NO: 1792688 - RNA, 19 nt, Homo sapiens
  misc_RNA (1)...(19): siRNA sense strand
gaucagauacggagaugac

SEQ ID NO: 1792689 - RNA, 19 nt, Homo sapiens
  misc_RNA (1)...(19): siRNA sense strand
ccaaugaccaucguggaaa

SEQ ID NO: 1792690 - RNA, 19 nt, Homo sapiens
  misc_RNA (1)...(19): siRNA sense strand
ucaaggagucuucauuaag

SEQ ID NO: 1792691 - RNA, 19 nt, Homo sapiens
  misc_RNA (1)...(19): siRNA sense strand
ugaagcuagucaccacuga

SEQ ID NO: 1792692 - RNA, 19 nt, Homo sapiens
  misc_RNA (1)...(19): siRNA sense strand
ggcccucgauggcuauaau

SEQ ID NO: 1792693 - RNA, 19 nt, Homo sapiens
  misc_RNA (1)...(19): siRNA sense strand
gcccugaauuuccagaagu

SEQ ID NO: 1792694 - RNA, 19 nt, Homo sapiens
  misc_RNA (1)...(19): siRNA sense strand
auacggagaugacaaaaga

SEQ ID NO: 1792695 - RNA, 19 nt, Homo sapiens
  misc_RNA (1)...(19): siRNA sense strand
gggugagccugaaggacaa

SEQ ID NO: 1792696 - RNA, 19 nt, Homo sapiens
  misc_RNA (1)...(19): siRNA sense strand
acaaacaucuauggagaag

SEQ ID NO: 1792697 - RNA, 19 nt, Homo sapiens
  misc_RNA (1)...(19): siRNA sense strand
ucacugugcguguuuccua

SEQ ID NO: 1792698 - RNA, 19 nt, Homo sapiens
  misc_RNA (1)...(19): siRNA sense strand
ggaagccaccuacaucaac

SEQ ID NO: 1792699 - RNA, 19 nt, Homo sapiens
  misc_RNA (1)...(19): siRNA sense strand
agugagaucaaccgaauuu

SEQ ID NO: 1792700 - RNA, 19 nt, Homo sapiens
  misc_RNA (1)...(19): siRNA sense strand
ugagcaagguagugagauc

SEQ ID NO: 1792701 - RNA, 19 nt, Homo sapiens
  misc_RNA (1)...(19): siRNA sense strand
agaaagccaaguccaagaa

SEQ ID NO: 1792702 - RNA, 19 nt, Homo sapiens
  misc_RNA (1)...(19): siRNA sense strand
ccagauugcugagaucaac

SEQ ID NO: 1792703 - RNA, 19 nt, Homo sapiens
  misc_RNA (1)...(19): siRNA sense strand
ggagcuggcuauccaugac

SEQ ID NO: 1792704 - RNA, 19 nt, Homo sapiens
  misc_RNA (1)...(19): siRNA sense strand
ucaacaaaucgcucucauu

SEQ ID NO: 1792705 - RNA, 19 nt, Homo sapiens
  misc_RNA (1)...(19): siRNA sense strand
gaaagccaaguccaagaag

SEQ ID NO: 1792706 - RNA, 19 nt, Homo sapiens
  misc_RNA (1)...(19): siRNA sense strand
agaaugagcaagguaguga

SEQ ID NO: 1792707 - RNA, 19 nt, Homo sapiens
  misc_RNA (1)...(19): siRNA sense strand
ggagaggaguugucaauaa

SEQ ID NO: 1792708 - RNA, 19 nt, Homo sapiens
  misc_RNA (1)...(19): siRNA sense strand
uggagaagcugcccaguua

SEQ ID NO: 1792709 - RNA, 19 nt, Homo sapiens
  misc_RNA (1)...(19): siRNA sense strand
gaaacgcuaucuucacuga

SEQ ID NO: 1792710 - RNA, 19 nt, Homo sapiens
  misc_RNA (1)...(19): siRNA sense strand
caaaggaugugguuucuca

SEQ ID NO: 1792711 - RNA, 19 nt, Homo sapiens
  misc_RNA (1)...(19): siRNA sense strand
acaaauccaucuugaauga

SEQ ID NO: 1792712 - RNA, 19 nt, Homo sapiens
  misc_RNA (1)...(19): siRNA sense strand
ccaaggaggcccugaauuu

SEQ ID NO: 1792713 - RNA, 19 nt, Homo sapiens
  misc_RNA (1)...(19): siRNA sense strand
ucaagaaccuggagaagga

SEQ ID NO: 1792714 - RNA, 19 nt, Homo sapiens
  misc_RNA (1)...(19): siRNA sense strand
guacaucacuuccaaaauu

SEQ ID NO: 1792715 - RNA, 19 nt, Homo sapiens
  misc_RNA (1)...(19): siRNA sense strand
caacaaaucgcucucauuc

SEQ ID NO: 1792716 - RNA, 19 nt, Homo sapiens
  misc_RNA (1)...(19): siRNA sense strand
gcacaucaaugccaucaag

SEQ ID NO: 1792717 - RNA, 19 nt, Homo sapiens
  misc_RNA (1)...(19): siRNA sense strand
ggaaguacacccucauuga

SEQ ID NO: 1792718 - RNA, 19 nt, Homo sapiens
  misc_RNA (1)...(19): siRNA sense strand
ugacuuugcucaugaaaug

SEQ ID NO: 1792719 - RNA, 19 nt, Homo sapiens
  misc_RNA (1)...(19): siRNA sense strand
gaaaacaaauccaucuuga

SEQ ID NO: 1792720 - RNA, 19 nt, Homo sapiens
  misc_RNA (1)...(19): siRNA sense strand
ggacuugguuuaugagaca

SEQ ID NO: 1792721 - RNA, 19 nt, Homo sapiens
  misc_RNA (1)...(19): siRNA sense strand
cagacagacuggucguuua

SEQ ID NO: 1792722 - RNA, 19 nt, Homo sapiens
  misc_RNA (1)...(19): siRNA sense strand
guagugagaucaaccgaau

SEQ ID NO: 1792723 - RNA, 19 nt, Homo sapiens
  misc_RNA (1)...(19): siRNA sense strand
gcaccuuugugaccuauga

SEQ ID NO: 1792724 - RNA, 19 nt, Homo sapiens
  misc_RNA (1)...(19): siRNA sense strand
gaaggaagccaccuacauc

SEQ ID NO: 1792725 - RNA, 19 nt, Homo sapiens
  misc_RNA (1)...(19): siRNA sense strand
caaggagucuucauuaagg

SEQ ID NO: 1792726 - RNA, 19 nt, Homo sapiens
  misc_RNA (1)...(19): siRNA sense strand
ggugagaccaacaggauua

SEQ ID NO: 1792727 - RNA, 19 nt, Homo sapiens
  misc_RNA (1)...(19): siRNA sense strand
ggcaagacauacaccauga

SEQ ID NO: 1792728 - RNA, 19 nt, Homo sapiens
  misc_RNA (1)...(19): siRNA sense strand
ccaagaagacauucaaaga

SEQ ID NO: 1792729 - RNA, 19 nt, Homo sapiens
  misc_RNA (1)...(19): siRNA sense strand
ccaccuacaucaacaaauc

SEQ ID NO: 1792730 - RNA, 19 nt, Homo sapiens
  misc_RNA (1)...(19): siRNA sense strand
gagaggaguugucaauaac

SEQ ID NO: 1792731 - RNA, 19 nt, Homo sapiens
  misc_RNA (1)...(19): siRNA sense strand
ggaagaaagccaaguccaa

SEQ ID NO: 1792732 - RNA, 19 nt, Homo sapiens
  misc_RNA (1)...(19): siRNA sense strand
ggagaaggaacuagcacua

SEQ ID NO: 1792733 - RNA, 19 nt, Homo sapiens
  misc_RNA (1)...(19): siRNA sense strand
gacgggagcuggcaagaca

SEQ ID NO: 1792734 - RNA, 19 nt, Homo sapiens
  misc_RNA (1)...(19): siRNA sense strand
uaaguuggauggaguucuu

SEQ ID NO: 1792735 - RNA, 19 nt, Homo sapiens
  misc_RNA (1)...(19): siRNA sense strand
ccucaaggagucuucauua

SEQ ID NO: 1792736 - RNA, 19 nt, Homo sapiens
  misc_RNA (1)...(19): siRNA sense strand
gaagccaccuacaucaaca

SEQ ID NO: 1792737 - RNA, 19 nt, Homo sapiens
  misc_RNA (1)...(19): siRNA sense strand
uaccaaaccugggaagaaa

SEQ ID NO: 1792738 - RNA, 19 nt, Homo sapiens
  misc_RNA (1)...(19): siRNA sense strand
ccacugagccugccaucaa

SEQ ID NO: 1792739 - RNA, 19 nt, Homo sapiens
  misc_RNA (1)...(19): siRNA sense strand
ggauggaguucuucacgau

SEQ ID NO: 1792740 - RNA, 19 nt, Homo sapiens
  misc_RNA (1)...(19): siRNA sense strand
uugaggaguuuaagaauga

SEQ ID NO: 1792741 - RNA, 19 nt, Homo sapiens
  misc_RNA (1)...(19): siRNA sense strand
ucaaggagguguucaacca

SEQ ID NO: 1792742 - RNA, 19 nt, Homo sapiens
  misc_RNA (1)...(19): siRNA sense strand
ggaacuagcacuacucaag

SEQ ID NO: 1792743 - RNA, 19 nt, Homo sapiens
  misc_RNA (1)...(19): siRNA sense strand
caacugagaauuacaagca

SEQ ID NO: 1792744 - RNA, 19 nt, Homo sapiens
  misc_RNA (1)...(19): siRNA sense strand
ggauguugauggccaccua

SEQ ID NO: 1792745 - RNA, 19 nt, Homo sapiens
  misc_RNA (1)...(19): siRNA sense strand
caaacccaccgaugacuuu

SEQ ID NO: 1792746 - RNA, 19 nt, Homo sapiens
  misc_RNA (1)...(19): siRNA sense strand
gagaagcugcccaguuaga

SEQ ID NO: 1792747 - RNA, 19 nt, Homo sapiens
  misc_RNA (1)...(19): siRNA sense strand
aaaguaugaugcugagaga

SEQ ID NO: 1792748 - RNA, 19 nt, Homo sapiens
  misc_RNA (1)...(19): siRNA sense strand
aaacaucuauggagaagcu

SEQ ID NO: 1792749 - RNA, 19 nt, Homo sapiens
  misc_RNA (1)...(19): siRNA sense strand
gacaaaagaagcauugaua

SEQ ID NO: 1792750 - RNA, 19 nt, Homo sapiens
  misc_RNA (1)...(19): siRNA sense strand
auuaagggcuugucaguuc

SEQ ID NO: 1792751 - RNA, 19 nt, Homo sapiens
  misc_RNA (1)...(19): siRNA sense strand
ugacaggaaugacuuugca

SEQ ID NO: 1792752 - RNA, 19 nt, Homo sapiens
  misc_RNA (1)...(19): siRNA sense strand
gaagaacgccccacacaug

SEQ ID NO: 1792753 - RNA, 19 nt, Homo sapiens
  misc_RNA (1)...(19): siRNA sense strand
cucaaggagucuucauuaa

SEQ ID NO: 1792754 - RNA, 19 nt, Homo sapiens
  misc_RNA (1)...(19): siRNA sense strand
cccaggacuugguuuauga

SEQ ID NO: 1792755 - RNA, 19 nt, Homo sapiens
  misc_RNA (1)...(19): siRNA sense strand
ccacacagcacaucaaugc

SEQ ID NO: 1792756 - RNA, 19 nt, Homo sapiens
  misc_RNA (1)...(19): siRNA sense strand
caagaagacauucaaagag

SEQ ID NO: 1792757 - RNA, 19 nt, Homo sapiens
  misc_RNA (1)...(19): siRNA sense strand
gacgagaucgacauaauca

SEQ ID NO: 1792758 - RNA, 19 nt, Homo sapiens
  misc_RNA (1)...(19): siRNA sense strand
gauuauagccucccacacu

SEQ ID NO: 1792759 - RNA, 19 nt, Homo sapiens
  misc_RNA (1)...(19): siRNA sense strand
ugagacaguugcaaaggau

SEQ ID NO: 1792760 - RNA, 19 nt, Homo sapiens
  misc_RNA (1)...(19): siRNA sense strand
ggacgagaucgacauaauc

SEQ ID NO: 1792761 - RNA, 19 nt, Homo sapiens
  misc_RNA (1)...(19): siRNA sense strand
agacagacuggucguuuaa

SEQ ID NO: 1792762 - RNA, 19 nt, Homo sapiens
  misc_RNA (1)...(19): siRNA sense strand
caaccgaauuuucaaagaa

SEQ ID NO: 1792763 - RNA, 19 nt, Homo sapiens
  misc_RNA (1)...(19): siRNA sense strand
gagccugccaucaaugaaa

SEQ ID NO: 1792764 - RNA, 19 nt, Homo sapiens
  misc_RNA (1)...(19): siRNA sense strand
acaaaucgcucucauuccu

SEQ ID NO: 1792765 - RNA, 19 nt, Homo sapiens
  misc_RNA (1)...(19): siRNA sense strand
aaugagagccuguuugauc

SEQ ID NO: 1792766 - RNA, 19 nt, Homo sapiens
  misc_RNA (1)...(19): siRNA sense strand
auaaucagccuuagacaga

SEQ ID NO: 1792767 - RNA, 19 nt, Homo sapiens
  misc_RNA (1)...(19): siRNA sense strand
gagaccaacaggauuauag

SEQ ID NO: 1792768 - RNA, 19 nt, Homo sapiens
  misc_RNA (1)...(19): siRNA sense strand
ucaauaaccaacagacaga

SEQ ID NO: 1792769 - RNA, 19 nt, Homo sapiens
  misc_RNA (1)...(19): siRNA sense strand
caaggaggcccugaauuuc

SEQ ID NO: 1792770 - RNA, 19 nt, Homo sapiens
  misc_RNA (1)...(19): siRNA sense strand
agauugaugugaccaagga

SEQ ID NO: 1792771 - RNA, 19 nt, Homo sapiens
  misc_RNA (1)...(19): siRNA sense strand
gaaguacacccucauugac

SEQ ID NO: 1792772 - RNA, 19 nt, Homo sapiens
  misc_RNA (1)...(19): siRNA sense strand
cgacauaaucagccuuaga

SEQ ID NO: 1792773 - RNA, 19 nt, Homo sapiens
  misc_RNA (1)...(19): siRNA sense strand
guaugaugcugagagaaug

SEQ ID NO: 1792774 - RNA, 19 nt, Homo sapiens
  misc_RNA (1)...(19): siRNA sense strand
ccacacaugccaucacugu

SEQ ID NO: 1792775 - RNA, 19 nt, Homo sapiens
  misc_RNA (1)...(19): siRNA sense strand
caagacauacaccaugaug

SEQ ID NO: 1792776 - RNA, 19 nt, Homo sapiens
  misc_RNA (1)...(19): siRNA sense strand
uggacgagaucgacauaau

SEQ ID NO: 1792777 - RNA, 19 nt, Homo sapiens
  misc_RNA (1)...(19): siRNA sense strand
gacaaacaucuauggagaa

SEQ ID NO: 1792778 - RNA, 19 nt, Homo sapiens
  misc_RNA (1)...(19): siRNA sense strand
caguucaccucacaaguca

SEQ ID NO: 1792779 - RNA, 19 nt, Homo sapiens
  misc_RNA (1)...(19): siRNA sense strand
auaaugagagccuguuuga

SEQ ID NO: 1792780 - RNA, 19 nt, Homo sapiens
  misc_RNA (1)...(19): siRNA sense strand
ccaaguccaagaagacauu

SEQ ID NO: 1792781 - RNA, 19 nt, Homo sapiens
  misc_RNA (1)...(19): siRNA sense strand
aaagccaaguccaagaaga

SEQ ID NO: 1792782 - RNA, 19 nt, Homo sapiens
  misc_RNA (1)...(19): siRNA sense strand
gaaccuggagaaggaacua

SEQ ID NO: 1792783 - RNA, 19 nt, Homo sapiens
  misc_RNA (1)...(19): siRNA sense strand
cugagagaauggucaagaa

SEQ ID NO: 1792784 - RNA, 19 nt, Homo sapiens
  misc_RNA (1)...(19): siRNA sense strand
agacuggucguuuaaguug

SEQ ID NO: 1792785 - RNA, 19 nt, Homo sapiens
  misc_RNA (1)...(19): siRNA sense strand
cagauacggagaugacaaa

SEQ ID NO: 1792786 - RNA, 19 nt, Homo sapiens
  misc_RNA (1)...(19): siRNA sense strand
gaggaguugucaauaacca

SEQ ID NO: 1792787 - RNA, 19 nt, Homo sapiens
  misc_RNA (1)...(19): siRNA sense strand
gggcaacugagaauuacaa

SEQ ID NO: 1792788 - RNA, 19 nt, Homo sapiens
  misc_RNA (1)...(19): siRNA sense strand
gaucagauacggagaugac

SEQ ID NO: 1792789 - RNA, 19 nt, Homo sapiens
  misc_RNA (1)...(19): siRNA sense strand
ccaaugaccaucguggaaa

SEQ ID NO: 1792790 - RNA, 19 nt, Homo sapiens
  misc_RNA (1)...(19): siRNA sense strand
ucaaggagucuucauuaag

SEQ ID NO: 1792791 - RNA, 19 nt, Homo sapiens
  misc_RNA (1)...(19): siRNA sense strand
ugaagcuagucaccacuga

SEQ ID NO: 1792792 - RNA, 19 nt, Homo sapiens
  misc_RNA (1)...(19): siRNA sense strand
ggcccucgauggcuauaau

SEQ ID NO: 1792793 - RNA, 19 nt, Homo sapiens
  misc_RNA (1)...(19): siRNA sense strand
gcccugaauuuccagaagu

SEQ ID NO: 1792794 - RNA, 19 nt, Homo sapiens
  misc_RNA (1)...(19): siRNA sense strand
auacggagaugacaaaaga

SEQ ID NO: 1792795 - RNA, 19 nt, Homo sapiens
  misc_RNA (1)...(19): siRNA sense strand
gggugagccugaaggacaa

SEQ ID NO: 1792796 - RNA, 19 nt, Homo sapiens
  misc_RNA (1)...(19): siRNA sense strand
acaaacaucuauggagaag

SEQ ID NO: 1792797 - RNA, 19 nt, Homo sapiens
  misc_RNA (1)...(19): siRNA sense strand
ucacugugcguguuuccua

SEQ ID NO: 1792798 - RNA, 19 nt, Homo sapiens
  misc_RNA (1)...(19): siRNA sense strand
ggaagccaccuacaucaac

SEQ ID NO: 1792799 - RNA, 19 nt, Homo sapiens
  misc_RNA (1)...(19): siRNA sense strand
agugagaucaaccgaauuu

SEQ ID NO: 1792800 - RNA, 19 nt, Homo sapiens
  misc_RNA (1)...(19): siRNA sense strand
ugagcaagguagugagauc

SEQ ID NO: 1792801 - RNA, 19 nt, Homo sapiens
  misc_RNA (1)...(19): siRNA sense strand
agaaagccaaguccaagaa

SEQ ID NO: 1792802 - RNA, 19 nt, Homo sapiens
  misc_RNA (1)...(19): siRNA sense strand
ccagauugcugagaucaac

SEQ ID NO: 1792803 - RNA, 19 nt, Homo sapiens
  misc_RNA (1)...(19): siRNA sense strand
ggagcuggcuauccaugac

SEQ ID NO: 1792804 - RNA, 19 nt, Homo sapiens
  misc_RNA (1)...(19): siRNA sense strand
ucaacaaaucgcucucauu

SEQ ID NO: 1792805 - RNA, 19 nt, Homo sapiens
  misc_RNA (1)...(19): siRNA sense strand
gaaagccaaguccaagaag

SEQ ID NO: 1792806 - RNA, 19 nt, Homo sapiens
  misc_RNA (1)...(19): siRNA sense strand
agaaugagcaagguaguga

SEQ ID NO: 1792807 - RNA, 19 nt, Homo sapiens
  misc_RNA (1)...(19): siRNA sense strand
ggagaggaguugucaauaa

SEQ ID NO: 1792808 - RNA, 19 nt, Homo sapiens
  misc_RNA (1)...(19): siRNA sense strand
uggagaagcugcccaguua

SEQ ID NO: 1792809 - RNA, 19 nt, Homo sapiens
  misc_RNA (1)...(19): siRNA sense strand
gaaacgcuaucuucacuga

SEQ ID NO: 1792810 - RNA, 19 nt, Homo sapiens
  misc_RNA (1)...(19): siRNA sense strand
caaaggaugugguuucuca

SEQ ID NO: 1792811 - RNA, 19 nt, Homo sapiens
  misc_RNA (1)...(19): siRNA sense strand
acaaauccaucuugaauga

SEQ ID NO: 1792812 - RNA, 19 nt, Homo sapiens
  misc_RNA (1)...(19): siRNA sense strand
ccaaggaggcccugaauuu

SEQ ID NO: 1792813 - RNA, 19 nt, Homo sapiens
  misc_RNA (1)...(19): siRNA sense strand
ucaagaaccuggagaagga

SEQ ID NO: 1792814 - RNA, 19 nt, Homo sapiens
  misc_RNA (1)...(19): siRNA sense strand
guacaucacuuccaaaauu

SEQ ID NO: 1792815 - RNA, 19 nt, Homo sapiens
  misc_RNA (1)...(19): siRNA sense strand
caacaaaucgcucucauuc

SEQ ID NO: 1792816 - RNA, 19 nt, Homo sapiens
  misc_RNA (1)...(19): siRNA sense strand
gcacaucaaugccaucaag

SEQ ID NO: 1792817 - RNA, 19 nt, Homo sapiens
  misc_RNA (1)...(19): siRNA sense strand
ggaaguacacccucauuga

SEQ ID NO: 1792818 - RNA, 19 nt, Homo sapiens
  misc_RNA (1)...(19): siRNA sense strand
ugacuuugcucaugaaaug

SEQ ID NO: 1792819 - RNA, 19 nt, Homo sapiens
  misc_RNA (1)...(19): siRNA sense strand
gaaaacaaauccaucuuga

SEQ ID NO: 1792820 - RNA, 19 nt, Homo sapiens
  misc_RNA (1)...(19): siRNA sense strand
ggacuugguuuaugagaca

SEQ ID NO: 1792821 - RNA, 19 nt, Homo sapiens
  misc_RNA (1)...(19): siRNA sense strand
cagacagacuggucguuua

SEQ ID NO: 1792822 - RNA, 19 nt, Homo sapiens
  misc_RNA (1)...(19): siRNA sense strand
guagugagaucaaccgaau

SEQ ID NO: 1792823 - RNA, 19 nt, Homo sapiens
  misc_RNA (1)...(19): siRNA sense strand
gcaccuuugugaccuauga

SEQ ID NO: 1792824 - RNA, 19 nt, Homo sapiens
  misc_RNA (1)...(19): siRNA sense strand
gaaggaagccaccuacauc

SEQ ID NO: 1792825 - RNA, 19 nt, Homo sapiens
  misc_RNA (1)...(19): siRNA sense strand
caaggagucuucauuaagg

SEQ ID NO: 1792826 - RNA, 19 nt, Homo sapiens
  misc_RNA (1)...(19): siRNA sense strand
ggugagaccaacaggauua

SEQ ID NO: 1792827 - RNA, 19 nt, Homo sapiens
  misc_RNA (1)...(19): siRNA sense strand
ggcaagacauacaccauga

SEQ ID NO: 1792828 - RNA, 19 nt, Homo sapiens
  misc_RNA (1)...(19): siRNA sense strand
ccaagaagacauucaaaga

SEQ ID NO: 1792829 - RNA, 19 nt, Homo sapiens
  misc_RNA (1)...(19): siRNA sense strand
ccaccuacaucaacaaauc

SEQ ID NO: 1792830 - RNA, 19 nt, Homo sapiens
  misc_RNA (1)...(19): siRNA sense strand
gagaggaguugucaauaac

SEQ ID NO: 1792831 - RNA, 19 nt, Homo sapiens
  misc_RNA (1)...(19): siRNA sense strand
ggaagaaagccaaguccaa

SEQ ID NO: 1792832 - RNA, 19 nt, Homo sapiens
  misc_RNA (1)...(19): siRNA sense strand
ggagaaggaacuagcacua

SEQ ID NO: 1792833 - RNA, 19 nt, Homo sapiens
  misc_RNA (1)...(19): siRNA sense strand
gacgggagcuggcaagaca

SEQ ID NO: 1792834 - RNA, 19 nt, Homo sapiens
  misc_RNA (1)...(19): siRNA sense strand
uaaguuggauggaguucuu

SEQ ID NO: 1792835 - RNA, 19 nt, Homo sapiens
  misc_RNA (1)...(19): siRNA sense strand
ccucaaggagucuucauua

SEQ ID NO: 1792836 - RNA, 19 nt, Homo sapiens
  misc_RNA (1)...(19): siRNA sense strand
gaagccaccuacaucaaca

SEQ ID NO: 1792837 - RNA, 19 nt, Homo sapiens
  misc_RNA (1)...(19): siRNA sense strand
uaccaaaccugggaagaaa

SEQ ID NO: 1792838 - RNA, 19 nt, Homo sapiens
  misc_RNA (1)...(19): siRNA sense strand
ccacugagccugccaucaa

SEQ ID NO: 1792839 - RNA, 19 nt, Homo sapiens
  misc_RNA (1)...(19): siRNA sense strand
ggauggaguucuucacgau

SEQ ID NO: 1792840 - RNA, 19 nt, Homo sapiens
  misc_RNA (1)...(19): siRNA sense strand
uugaggaguuuaagaauga

SEQ ID NO: 1792841 - RNA, 19 nt, Homo sapiens
  misc_RNA (1)...(19): siRNA sense strand
ucaaggagguguucaacca

SEQ ID NO: 1792842 - RNA, 19 nt, Homo sapiens
  misc_RNA (1)...(19): siRNA sense strand
ggaacuagcacuacucaag

SEQ ID NO: 1792843 - RNA, 19 nt, Homo sapiens
  misc_RNA (1)...(19): siRNA sense strand
caacugagaauuacaagca

SEQ ID NO: 1792844 - RNA, 19 nt, Homo sapiens
  misc_RNA (1)...(19): siRNA sense strand
ggauguugauggccaccua

SEQ ID NO: 1792845 - RNA, 19 nt, Homo sapiens
  misc_RNA (1)...(19): siRNA sense strand
caaacccaccgaugacuuu

SEQ ID NO: 1792846 - RNA, 19 nt, Homo sapiens
  misc_RNA (1)...(19): siRNA sense strand
gagaagcugcccaguuaga

SEQ ID NO: 1792847 - RNA, 19 nt, Homo sapiens
  misc_RNA (1)...(19): siRNA sense strand
aaaguaugaugcugagaga

SEQ ID NO: 1792848 - RNA, 19 nt, Homo sapiens
  misc_RNA (1)...(19): siRNA sense strand
aaacaucuauggagaagcu

SEQ ID NO: 1792849 - RNA, 19 nt, Homo sapiens
  misc_RNA (1)...(19): siRNA sense strand
gacaaaagaagcauugaua

SEQ ID NO: 1792850 - RNA, 19 nt, Homo sapiens
  misc_RNA (1)...(19): siRNA sense strand
auuaagggcuugucaguuc

SEQ ID NO: 1792851 - RNA, 19 nt, Homo sapiens
  misc_RNA (1)...(19): siRNA sense strand
ugacaggaaugacuuugca

SEQ ID NO: 1792852 - RNA, 19 nt, Homo sapiens
  misc_RNA (1)...(19): siRNA sense strand
gaagaacgccccacacaug

SEQ ID NO: 1792853 - RNA, 19 nt, Homo sapiens
  misc_RNA (1)...(19): siRNA sense strand
cucaaggagucuucauuaa

SEQ ID NO: 1792854 - RNA, 19 nt, Homo sapiens
  misc_RNA (1)...(19): siRNA sense strand
cccaggacuugguuuauga

SEQ ID NO: 1792855 - RNA, 19 nt, Homo sapiens
  misc_RNA (1)...(19): siRNA sense strand
ccacacagcacaucaaugc

SEQ ID NO: 1792856 - RNA, 19 nt, Homo sapiens
  misc_RNA (1)...(19): siRNA sense strand
caagaagacauucaaagag

SEQ ID NO: 1792857 - RNA, 19 nt, Homo sapiens
  misc_RNA (1)...(19): siRNA sense strand
gacgagaucgacauaauca

SEQ ID NO: 1792858 - RNA, 19 nt, Homo sapiens
  misc_RNA (1)...(19): siRNA sense strand
gauuauagccucccacacu

SEQ ID NO: 1792859 - RNA, 19 nt, Homo sapiens
  misc_RNA (1)...(19): siRNA sense strand
ugagacaguugcaaaggau

SEQ ID NO: 1792860 - RNA, 19 nt, Homo sapiens
  misc_RNA (1)...(19): siRNA sense strand
ggacgagaucgacauaauc

SEQ ID NO: 1792861 - RNA, 19 nt, Homo sapiens
  misc_RNA (1)...(19): siRNA sense strand
agacagacuggucguuuaa

SEQ ID NO: 1792862 - RNA, 19 nt, Homo sapiens
  misc_RNA (1)...(19): siRNA sense strand
caaccgaauuuucaaagaa

SEQ ID NO: 1792863 - RNA, 19 nt, Homo sapiens
  misc_RNA (1)...(19): siRNA sense strand
gagccugccaucaaugaaa

SEQ ID NO: 1792864 - RNA, 19 nt, Homo sapiens
  misc_RNA (1)...(19): siRNA sense strand
acaaaucgcucucauuccu

SEQ ID NO: 1792865 - RNA, 19 nt, Homo sapiens
  misc_RNA (1)...(19): siRNA sense strand
aaugagagccuguuugauc

SEQ ID NO: 1792866 - RNA, 19 nt, Homo sapiens
  misc_RNA (1)...(19): siRNA sense strand
auaaucagccuuagacaga

SEQ ID NO: 1792867 - RNA, 19 nt, Homo sapiens
  misc_RNA (1)...(19): siRNA sense strand
gagaccaacaggauuauag

SEQ ID NO: 1792868 - RNA, 19 nt, Homo sapiens
  misc_RNA (1)...(19): siRNA sense strand
ucaauaaccaacagacaga

SEQ ID NO: 1792869 - RNA, 19 nt, Homo sapiens
  misc_RNA (1)...(19): siRNA sense strand
caaggaggcccugaauuuc

SEQ ID NO: 1792870 - RNA, 19 nt, Homo sapiens
  misc_RNA (1)...(19): siRNA sense strand
agauugaugugaccaagga

SEQ ID NO: 1792871 - RNA, 19 nt, Homo sapiens
  misc_RNA (1)...(19): siRNA sense strand
gaaguacacccucauugac

SEQ ID NO: 1792872 - RNA, 19 nt, Homo sapiens
  misc_RNA (1)...(19): siRNA sense strand
cgacauaaucagccuuaga

SEQ ID NO: 1792873 - RNA, 19 nt, Homo sapiens
  misc_RNA (1)...(19): siRNA sense strand
guaugaugcugagagaaug

SEQ ID NO: 1792874 - RNA, 19 nt, Homo sapiens
  misc_RNA (1)...(19): siRNA sense strand
ccacacaugccaucacugu

SEQ ID NO: 1792875 - RNA, 19 nt, Homo sapiens
  misc_RNA (1)...(19): siRNA sense strand
caagacauacaccaugaug

SEQ ID NO: 1792876 - RNA, 19 nt, Homo sapiens
  misc_RNA (1)...(19): siRNA sense strand
uggacgagaucgacauaau

SEQ ID NO: 1792877 - RNA, 19 nt, Homo sapiens
  misc_RNA (1)...(19): siRNA sense strand
gacaaacaucuauggagaa

SEQ ID NO: 1792878 - RNA, 19 nt, Homo sapiens
  misc_RNA (1)...(19): siRNA sense strand
caguucaccucacaaguca

SEQ ID NO: 1792879 - RNA, 19 nt, Homo sapiens
  misc_RNA (1)...(19): siRNA sense strand
auaaugagagccuguuuga

SEQ ID NO: 1792880 - RNA, 19 nt, Homo sapiens
  misc_RNA (1)...(19): siRNA sense strand
ccaaguccaagaagacauu

SEQ ID NO: 1792881 - RNA, 19 nt, Homo sapiens
  misc_RNA (1)...(19): siRNA sense strand
aaagccaaguccaagaaga

SEQ ID NO: 1792882 - RNA, 19 nt, Homo sapiens
  misc_RNA (1)...(19): siRNA sense strand
gaaccuggagaaggaacua

SEQ ID NO: 1792883 - RNA, 19 nt, Homo sapiens
  misc_RNA (1)...(19): siRNA sense strand
cugagagaauggucaagaa

SEQ ID NO: 1792884 - RNA, 19 nt, Homo sapiens
  misc_RNA (1)...(19): siRNA sense strand
agacuggucguuuaaguug

SEQ ID NO: 1792885 - RNA, 19 nt, Homo sapiens
  misc_RNA (1)...(19): siRNA sense strand
cagauacggagaugacaaa

SEQ ID NO: 1792886 - RNA, 19 nt, Homo sapiens
  misc_RNA (1)...(19): siRNA sense strand
gaggaguugucaauaacca

SEQ ID NO: 1792887 - RNA, 19 nt, Homo sapiens
  misc_RNA (1)...(19): siRNA sense strand
gggcaacugagaauuacaa

SEQ ID NO: 1792888 - RNA, 19 nt, Homo sapiens
  misc_RNA (1)...(19): siRNA sense strand
gaucagauacggagaugac

SEQ ID NO: 1792889 - RNA, 19 nt, Homo sapiens
  misc_RNA (1)...(19): siRNA sense strand
ccaaugaccaucguggaaa

SEQ ID NO: 1792890 - RNA, 19 nt, Homo sapiens
  misc_RNA (1)...(19): siRNA sense strand
ucaaggagucuucauuaag

SEQ ID NO: 1792891 - RNA, 19 nt, Homo sapiens
  misc_RNA (1)...(19): siRNA sense strand
ugaagcuagucaccacuga

SEQ ID NO: 1792892 - RNA, 19 nt, Homo sapiens
  misc_RNA (1)...(19): siRNA sense strand
ggcccucgauggcuauaau

SEQ ID NO: 1792893 - RNA, 19 nt, Homo sapiens
  misc_RNA (1)...(19): siRNA sense strand
gcccugaauuuccagaagu

SEQ ID NO: 1792894 - RNA, 19 nt, Homo sapiens
  misc_RNA (1)...(19): siRNA sense strand
auacggagaugacaaaaga

SEQ ID NO: 1792895 - RNA, 19 nt, Homo sapiens
  misc_RNA (1)...(19): siRNA sense strand
gggugagccugaaggacaa

SEQ ID NO: 1792896 - RNA, 19 nt, Homo sapiens
  misc_RNA (1)...(19): siRNA sense strand
acaaacaucuauggagaag

SEQ ID NO: 1792897 - RNA, 19 nt, Homo sapiens
  misc_RNA (1)...(19): siRNA sense strand
ucacugugcguguuuccua

SEQ ID NO: 1792898 - RNA, 19 nt, Homo sapiens
  misc_RNA (1)...(19): siRNA sense strand
ggaagccaccuacaucaac

SEQ ID NO: 1792899 - RNA, 19 nt, Homo sapiens
  misc_RNA (1)...(19): siRNA sense strand
agugagaucaaccgaauuu

SEQ ID NO: 1792900 - RNA, 19 nt, Homo sapiens
  misc_RNA (1)...(19): siRNA sense strand
ugagcaagguagugagauc

SEQ ID NO: 1792901 - RNA, 19 nt, Homo sapiens
  misc_RNA (1)...(19): siRNA sense strand
agaaagccaaguccaagaa

SEQ ID NO: 1792902 - RNA, 19 nt, Homo sapiens
  misc_RNA (1)...(19): siRNA sense strand
ccagauugcugagaucaac

SEQ ID NO: 1792903 - RNA, 19 nt, Homo sapiens
  misc_RNA (1)...(19): siRNA sense strand
ggagcuggcuauccaugac

SEQ ID NO: 1792904 - RNA, 19 nt, Homo sapiens
  misc_RNA (1)...(19): siRNA sense strand
ucaacaaaucgcucucauu

SEQ ID NO: 1792905 - RNA, 19 nt, Homo sapiens
  misc_RNA (1)...(19): siRNA sense strand
gaaagccaaguccaagaag

SEQ ID NO: 1792906 - RNA, 19 nt, Homo sapiens
  misc_RNA (1)...(19): siRNA sense strand
agaaugagcaagguaguga

SEQ ID NO: 1792907 - RNA, 19 nt, Homo sapiens
  misc_RNA (1)...(19): siRNA sense strand
ucacggagccugaagauga

SEQ ID NO: 1792908 - RNA, 19 nt, Homo sapiens
  misc_RNA (1)...(19): siRNA sense strand
gcccuaaccacacuauuua

SEQ ID NO: 1792909 - RNA, 19 nt, Homo sapiens
  misc_RNA (1)...(19): siRNA sense strand
gcuuuaagaucacgcagaa

SEQ ID NO: 1792910 - RNA, 19 nt, Homo sapiens
  misc_RNA (1)...(19): siRNA sense strand
gaacaacgccaugaagauc

SEQ ID NO: 1792911 - RNA, 19 nt, Homo sapiens
  misc_RNA (1)...(19): siRNA sense strand
ucaaugagaagaucaagaa

SEQ ID NO: 1792912 - RNA, 19 nt, Homo sapiens
  misc_RNA (1)...(19): siRNA sense strand
cugcagggcuuuaagauca

SEQ ID NO: 1792913 - RNA, 19 nt, Homo sapiens
  misc_RNA (1)...(19): siRNA sense strand
gaucaagaaggaugagcua

SEQ ID NO: 1792914 - RNA, 19 nt, Homo sapiens
  misc_RNA (1)...(19): siRNA sense strand
gccaagaccgacucagaua

SEQ ID NO: 1792915 - RNA, 19 nt, Homo sapiens
  misc_RNA (1)...(19): siRNA sense strand
caagaaggaugagcuaaaa

SEQ ID NO: 1792916 - RNA, 19 nt, Homo sapiens
  misc_RNA (1)...(19): siRNA sense strand
gagaagaggaagcccaaga

SEQ ID NO: 1792917 - RNA, 19 nt, Homo sapiens
  misc_RNA (1)...(19): siRNA sense strand
ucaagaaggaugagcuaaa

SEQ ID NO: 1792918 - RNA, 19 nt, Homo sapiens
  misc_RNA (1)...(19): siRNA sense strand
ggaguuugacaaugaggua

SEQ ID NO: 1792919 - RNA, 19 nt, Homo sapiens
  misc_RNA (1)...(19): siRNA sense strand
ccuaaccacacuauuuaua

SEQ ID NO: 1792920 - RNA, 19 nt, Homo sapiens
  misc_RNA (1)...(19): siRNA sense strand
ugacaaaccuaugcguauc

SEQ ID NO: 1792921 - RNA, 19 nt, Homo sapiens
  misc_RNA (1)...(19): siRNA sense strand
gaccgacucagauaucauu

SEQ ID NO: 1792922 - RNA, 19 nt, Homo sapiens
  misc_RNA (1)...(19): siRNA sense strand
gagaauccaccgaaucaca

SEQ ID NO: 1792923 - RNA, 19 nt, Homo sapiens
  misc_RNA (1)...(19): siRNA sense strand
caaggagguccgucuggua

SEQ ID NO: 1792924 - RNA, 19 nt, Homo sapiens
  misc_RNA (1)...(19): siRNA sense strand
augagaagaucaagaagga

SEQ ID NO: 1792925 - RNA, 19 nt, Homo sapiens
  misc_RNA (1)...(19): siRNA sense strand
ccaugaagaucuccuuugc

SEQ ID NO: 1792926 - RNA, 19 nt, Homo sapiens
  misc_RNA (1)...(19): siRNA sense strand
ucguggaguuugacaauga

SEQ ID NO: 1792927 - RNA, 19 nt, Homo sapiens
  misc_RNA (1)...(19): siRNA sense strand
ucaguucccuggcuucaag

SEQ ID NO: 1792928 - RNA, 19 nt, Homo sapiens
  misc_RNA (1)...(19): siRNA sense strand
cagaacaacgccaugaaga

SEQ ID NO: 1792929 - RNA, 19 nt, Homo sapiens
  misc_RNA (1)...(19): siRNA sense strand
gcagaacaacgccaugaag

SEQ ID NO: 1792930 - RNA, 19 nt, Homo sapiens
  misc_RNA (1)...(19): siRNA sense strand
gcaagcgggagaagaggaa

SEQ ID NO: 1792931 - RNA, 19 nt, Homo sapiens
  misc_RNA (1)...(19): siRNA sense strand
caagaccgacucagauauc

SEQ ID NO: 1792932 - RNA, 19 nt, Homo sapiens
  misc_RNA (1)...(19): siRNA sense strand
cagauaucauugccaagau

SEQ ID NO: 1792933 - RNA, 19 nt, Homo sapiens
  misc_RNA (1)...(19): siRNA sense strand
ucagauaucauugccaaga

SEQ ID NO: 1792934 - RNA, 19 nt, Homo sapiens
  misc_RNA (1)...(19): siRNA sense strand
gaucuccuuugccaagaag

SEQ ID NO: 1792935 - RNA, 19 nt, Homo sapiens
  misc_RNA (1)...(19): siRNA sense strand
ccaagaccgacucagauau

SEQ ID NO: 1792936 - RNA, 19 nt, Homo sapiens
  misc_RNA (1)...(19): siRNA sense strand
caccgaaucacaucuuguu

SEQ ID NO: 1792937 - RNA, 19 nt, Homo sapiens
  misc_RNA (1)...(19): siRNA sense strand
agauaucauugccaagaug

SEQ ID NO: 1792938 - RNA, 19 nt, Homo sapiens
  misc_RNA (1)...(19): siRNA sense strand
gccaucuucucccaguuug

SEQ ID NO: 1792939 - RNA, 19 nt, Homo sapiens
  misc_RNA (1)...(19): siRNA sense strand
cgcccuaaccacacuauuu

SEQ ID NO: 1792940 - RNA, 19 nt, Homo sapiens
  misc_RNA (1)...(19): siRNA sense strand
ccaggccuuugucaucuuc

SEQ ID NO: 1792941 - RNA, 19 nt, Homo sapiens
  misc_RNA (1)...(19): siRNA sense strand
cgaaucacaucuuguuccu

SEQ ID NO: 1792942 - RNA, 19 nt, Homo sapiens
  misc_RNA (1)...(19): siRNA sense strand
ccacacuauuuauaucaac

SEQ ID NO: 1792943 - RNA, 19 nt, Homo sapiens
  misc_RNA (1)...(19): siRNA sense strand
gccaugaagaucuccuuug

SEQ ID NO: 1792944 - RNA, 19 nt, Homo sapiens
  misc_RNA (1)...(19): siRNA sense strand
cugagaauccaccgaauca

SEQ ID NO: 1792945 - RNA, 19 nt, Homo sapiens
  misc_RNA (1)...(19): siRNA sense strand
gcuuaugccaggacagaug

SEQ ID NO: 1792946 - RNA, 19 nt, Homo sapiens
  misc_RNA (1)...(19): siRNA sense strand
agaacaacgccaugaagau

SEQ ID NO: 1792947 - RNA, 19 nt, Homo sapiens
  misc_RNA (1)...(19): siRNA sense strand
ggcaugacaucgccuucgu

SEQ ID NO: 1792948 - RNA, 19 nt, Homo sapiens
  misc_RNA (1)...(19): siRNA sense strand
gccaggccuuugucaucuu

SEQ ID NO: 1792949 - RNA, 19 nt, Homo sapiens
  misc_RNA (1)...(19): siRNA sense strand
ggguuucccuuucuaugac

SEQ ID NO: 1792950 - RNA, 19 nt, Homo sapiens
  misc_RNA (1)...(19): siRNA sense strand
ggagaccaacgagcucaug

SEQ ID NO: 1792951 - RNA, 19 nt, Homo sapiens
  misc_RNA (1)...(19): siRNA sense strand
uauaucaacaaccucaaug

SEQ ID NO: 1792952 - RNA, 19 nt, Homo sapiens
  misc_RNA (1)...(19): siRNA sense strand
cagcuuaugccaggacaga

SEQ ID NO: 1792953 - RNA, 19 nt, Homo sapiens
  misc_RNA (1)...(19): siRNA sense strand
cugcccagccucuuucuga

SEQ ID NO: 1792954 - RNA, 19 nt, Homo sapiens
  misc_RNA (1)...(19): siRNA sense strand
gggaacagcucaucaauua

SEQ ID NO: 1792955 - RNA, 19 nt, Homo sapiens
  misc_RNA (1)...(19): siRNA sense strand
uaacaucccugacaucuau

SEQ ID NO: 1792956 - RNA, 19 nt, Homo sapiens
  misc_RNA (1)...(19): siRNA sense strand
uugcguaccucaugaaaua

SEQ ID NO: 1792957 - RNA, 19 nt, Homo sapiens
  misc_RNA (1)...(19): siRNA sense strand
caaauaaccagaagcuugu

SEQ ID NO: 1792958 - RNA, 19 nt, Homo sapiens
  misc_RNA (1)...(19): siRNA sense strand
cuacagcuucucccaaaua

SEQ ID NO: 1792959 - RNA, 19 nt, Homo sapiens
  misc_RNA (1)...(19): siRNA sense strand
ggaaguggucaacguauuc

SEQ ID NO: 1792960 - RNA, 19 nt, Homo sapiens
  misc_RNA (1)...(19): siRNA sense strand
gaacagcucaucaauuacg

SEQ ID NO: 1792961 - RNA, 19 nt, Homo sapiens
  misc_RNA (1)...(19): siRNA sense strand
gaagcuuguuucucagcaa

SEQ ID NO: 1792962 - RNA, 19 nt, Homo sapiens
  misc_RNA (1)...(19): siRNA sense strand
ucaacucgccgguagguaa

SEQ ID NO: 1792963 - RNA, 19 nt, Homo sapiens
  misc_RNA (1)...(19): siRNA sense strand
cagcagcccuccaucuaca

SEQ ID NO: 1792964 - RNA, 19 nt, Homo sapiens
  misc_RNA (1)...(19): siRNA sense strand
uacagcuucucccaaauaa

SEQ ID NO: 1792965 - RNA, 19 nt, Homo sapiens
  misc_RNA (1)...(19): siRNA sense strand
gcucgugacucgcgucucu

SEQ ID NO: 1792966 - RNA, 19 nt, Homo sapiens
  misc_RNA (1)...(19): siRNA sense strand
cgagggcauucaguacaua

SEQ ID NO: 1792967 - RNA, 19 nt, Homo sapiens
  misc_RNA (1)...(19): siRNA sense strand
uacauaaaggugccuguua

SEQ ID NO: 1792968 - RNA, 19 nt, Homo sapiens
  misc_RNA (1)...(19): siRNA sense strand
ugaaauaccacuccauguc

SEQ ID NO: 1792969 - RNA, 19 nt, Homo sapiens
  misc_RNA (1)...(19): siRNA sense strand
uggaaguggucaacguauu

SEQ ID NO: 1792970 - RNA, 19 nt, Homo sapiens
  misc_RNA (1)...(19): siRNA sense strand
acauaaaggugccuguuac

SEQ ID NO: 1792971 - RNA, 19 nt, Homo sapiens
  misc_RNA (1)...(19): siRNA sense strand
guagguaacaucccugaca

SEQ ID NO: 1792972 - RNA, 19 nt, Homo sapiens
  misc_RNA (1)...(19): siRNA sense strand
gguggaaguggucaacgua

SEQ ID NO: 1792973 - RNA, 19 nt, Homo sapiens
  misc_RNA (1)...(19): siRNA sense strand
guaacaucccugacaucua

SEQ ID NO: 1792974 - RNA, 19 nt, Homo sapiens
  misc_RNA (1)...(19): siRNA sense strand
ucccugacaucuaugagaa

SEQ ID NO: 1792975 - RNA, 19 nt, Homo sapiens
  misc_RNA (1)...(19): siRNA sense strand
guacauaaaggugccuguu

SEQ ID NO: 1792976 - RNA, 19 nt, Homo sapiens
  misc_RNA (1)...(19): siRNA sense strand
gagggcauucaguacauaa

SEQ ID NO: 1792977 - RNA, 19 nt, Homo sapiens
  misc_RNA (1)...(19): siRNA sense strand
uagguaacaucccugacau

SEQ ID NO: 1792978 - RNA, 19 nt, Homo sapiens
  misc_RNA (1)...(19): siRNA sense strand
gguaacaucccugacaucu

SEQ ID NO: 1792979 - RNA, 19 nt, Homo sapiens
  misc_RNA (1)...(19): siRNA sense strand
ggcauucaguacauaaagg

SEQ ID NO: 1792980 - RNA, 19 nt, Homo sapiens
  misc_RNA (1)...(19): siRNA sense strand
uaugagaaggaccuacgua

SEQ ID NO: 1792981 - RNA, 19 nt, Homo sapiens
  misc_RNA (1)...(19): siRNA sense strand
gaucaacucgccgguaggu

SEQ ID NO: 1792982 - RNA, 19 nt, Homo sapiens
  misc_RNA (1)...(19): siRNA sense strand
caacgacaaacuccuucug

SEQ ID NO: 1792983 - RNA, 19 nt, Homo sapiens
  misc_RNA (1)...(19): siRNA sense strand
caacaccgugcgcaugauc

SEQ ID NO: 1792984 - RNA, 19 nt, Homo sapiens
  misc_RNA (1)...(19): siRNA sense strand
gggcauucaguacauaaag

SEQ ID NO: 1792985 - RNA, 19 nt, Homo sapiens
  misc_RNA (1)...(19): siRNA sense strand
ugggaacagcucaucaauu

SEQ ID NO: 1792986 - RNA, 19 nt, Homo sapiens
  misc_RNA (1)...(19): siRNA sense strand
gcauucaguacauaaaggu

SEQ ID NO: 1792987 - RNA, 19 nt, Homo sapiens
  misc_RNA (1)...(19): siRNA sense strand
aagcuuguuucucagcaau

SEQ ID NO: 1792988 - RNA, 19 nt, Homo sapiens
  misc_RNA (1)...(19): siRNA sense strand
aacaacaccgugcgcauga

SEQ ID NO: 1792989 - RNA, 19 nt, Homo sapiens
  misc_RNA (1)...(19): siRNA sense strand
ucgagggcauucaguacau

SEQ ID NO: 1792990 - RNA, 19 nt, Homo sapiens
  misc_RNA (1)...(19): siRNA sense strand
gaaguggucaacguauucu

SEQ ID NO: 1792991 - RNA, 19 nt, Homo sapiens
  misc_RNA (1)...(19): siRNA sense strand
ggagaggaguugucaauaa

SEQ ID NO: 1792992 - RNA, 19 nt, Homo sapiens
  misc_RNA (1)...(19): siRNA sense strand
uggagaagcugcccaguua

SEQ ID NO: 1792993 - RNA, 19 nt, Homo sapiens
  misc_RNA (1)...(19): siRNA sense strand
gaaacgcuaucuucacuga

SEQ ID NO: 1792994 - RNA, 19 nt, Homo sapiens
  misc_RNA (1)...(19): siRNA sense strand
caaaggaugugguuucuca

SEQ ID NO: 1792995 - RNA, 19 nt, Homo sapiens
  misc_RNA (1)...(19): siRNA sense strand
acaaauccaucuugaauga

SEQ ID NO: 1792996 - RNA, 19 nt, Homo sapiens
  misc_RNA (1)...(19): siRNA sense strand
ccaaggaggcccugaauuu

SEQ ID NO: 1792997 - RNA, 19 nt, Homo sapiens
  misc_RNA (1)...(19): siRNA sense strand
ucaagaaccuggagaagga

SEQ ID NO: 1792998 - RNA, 19 nt, Homo sapiens
  misc_RNA (1)...(19): siRNA sense strand
guacaucacuuccaaaauu

SEQ ID NO: 1792999 - RNA, 19 nt, Homo sapiens
  misc_RNA (1)...(19): siRNA sense strand
caacaaaucgcucucauuc

SEQ ID NO: 1793000 - RNA, 19 nt, Homo sapiens
  misc_RNA (1)...(19): siRNA sense strand
gcacaucaaugccaucaag

SEQ ID NO: 1793001 - RNA, 19 nt, Homo sapiens
  misc_RNA (1)...(19): siRNA sense strand
ggaaguacacccucauuga

SEQ ID NO: 1793002 - RNA, 19 nt, Homo sapiens
  misc_RNA (1)...(19): siRNA sense strand
ugacuuugcucaugaaaug

SEQ ID NO: 1793003 - RNA, 19 nt, Homo sapiens
  misc_RNA (1)...(19): siRNA sense strand
gaaaacaaauccaucuuga

SEQ ID NO: 1793004 - RNA, 19 nt, Homo sapiens
  misc_RNA (1)...(19): siRNA sense strand
ggacuugguuuaugagaca

SEQ ID NO: 1793005 - RNA, 19 nt, Homo sapiens
  misc_RNA (1)...(19): siRNA sense strand
cagacagacuggucguuua

SEQ ID NO: 1793006 - RNA, 19 nt, Homo sapiens
  misc_RNA (1)...(19): siRNA sense strand
guagugagaucaaccgaau

SEQ ID NO: 1793007 - RNA, 19 nt, Homo sapiens
  misc_RNA (1)...(19): siRNA sense strand
gcaccuuugugaccuauga

SEQ ID NO: 1793008 - RNA, 19 nt, Homo sapiens
  misc_RNA (1)...(19): siRNA sense strand
gaaggaagccaccuacauc

SEQ ID NO: 1793009 - RNA, 19 nt, Homo sapiens
  misc_RNA (1)...(19): siRNA sense strand
caaggagucuucauuaagg

SEQ ID NO: 1793010 - RNA, 19 nt, Homo sapiens
  misc_RNA (1)...(19): siRNA sense strand
ggugagaccaacaggauua

SEQ ID NO: 1793011 - RNA, 19 nt, Homo sapiens
  misc_RNA (1)...(19): siRNA sense strand
ggcaagacauacaccauga

SEQ ID NO: 1793012 - RNA, 19 nt, Homo sapiens
  misc_RNA (1)...(19): siRNA sense strand
ccaagaagacauucaaaga

SEQ ID NO: 1793013 - RNA, 19 nt, Homo sapiens
  misc_RNA (1)...(19): siRNA sense strand
ccaccuacaucaacaaauc

SEQ ID NO: 1793014 - RNA, 19 nt, Homo sapiens
  misc_RNA (1)...(19): siRNA sense strand
gagaggaguugucaauaac

SEQ ID NO: 1793015 - RNA, 19 nt, Homo sapiens
  misc_RNA (1)...(19): siRNA sense strand
ggaagaaagccaaguccaa

SEQ ID NO: 1793016 - RNA, 19 nt, Homo sapiens
  misc_RNA (1)...(19): siRNA sense strand
ggagaaggaacuagcacua

SEQ ID NO: 1793017 - RNA, 19 nt, Homo sapiens
  misc_RNA (1)...(19): siRNA sense strand
gacgggagcuggcaagaca

SEQ ID NO: 1793018 - RNA, 19 nt, Homo sapiens
  misc_RNA (1)...(19): siRNA sense strand
uaaguuggauggaguucuu

SEQ ID NO: 1793019 - RNA, 19 nt, Homo sapiens
  misc_RNA (1)...(19): siRNA sense strand
ccucaaggagucuucauua

SEQ ID NO: 1793020 - RNA, 19 nt, Homo sapiens
  misc_RNA (1)...(19): siRNA sense strand
gaagccaccuacaucaaca

SEQ ID NO: 1793021 - RNA, 19 nt, Homo sapiens
  misc_RNA (1)...(19): siRNA sense strand
uaccaaaccugggaagaaa

SEQ ID NO: 1793022 - RNA, 19 nt, Homo sapiens
  misc_RNA (1)...(19): siRNA sense strand
ccacugagccugccaucaa

SEQ ID NO: 1793023 - RNA, 19 nt, Homo sapiens
  misc_RNA (1)...(19): siRNA sense strand
ggauggaguucuucacgau

SEQ ID NO: 1793024 - RNA, 19 nt, Homo sapiens
  misc_RNA (1)...(19): siRNA sense strand
uugaggaguuuaagaauga

SEQ ID NO: 1793025 - RNA, 19 nt, Homo sapiens
  misc_RNA (1)...(19): siRNA sense strand
ucaaggagguguucaacca

SEQ ID NO: 1793026 - RNA, 19 nt, Homo sapiens
  misc_RNA (1)...(19): siRNA sense strand
ggaacuagcacuacucaag

SEQ ID NO: 1793027 - RNA, 19 nt, Homo sapiens
  misc_RNA (1)...(19): siRNA sense strand
caacugagaauuacaagca

SEQ ID NO: 1793028 - RNA, 19 nt, Homo sapiens
  misc_RNA (1)...(19): siRNA sense strand
ggauguugauggccaccua

SEQ ID NO: 1793029 - RNA, 19 nt, Homo sapiens
  misc_RNA (1)...(19): siRNA sense strand
caaacccaccgaugacuuu

SEQ ID NO: 1793030 - RNA, 19 nt, Homo sapiens
  misc_RNA (1)...(19): siRNA sense strand
gagaagcugcccaguuaga

SEQ ID NO: 1793031 - RNA, 19 nt, Homo sapiens
  misc_RNA (1)...(19): siRNA sense strand
aaaguaugaugcugagaga

SEQ ID NO: 1793032 - RNA, 19 nt, Homo sapiens
  misc_RNA (1)...(19): siRNA sense strand
aaacaucuauggagaagcu

SEQ ID NO: 1793033 - RNA, 19 nt, Homo sapiens
  misc_RNA (1)...(19): siRNA sense strand
gacaaaagaagcauugaua

SEQ ID NO: 1793034 - RNA, 19 nt, Homo sapiens
  misc_RNA (1)...(19): siRNA sense strand
auuaagggcuugucaguuc

SEQ ID NO: 1793035 - RNA, 19 nt, Homo sapiens
  misc_RNA (1)...(19): siRNA sense strand
ugacaggaaugacuuugca

SEQ ID NO: 1793036 - RNA, 19 nt, Homo sapiens
  misc_RNA (1)...(19): siRNA sense strand
gaagaacgccccacacaug

SEQ ID NO: 1793037 - RNA, 19 nt, Homo sapiens
  misc_RNA (1)...(19): siRNA sense strand
cucaaggagucuucauuaa

SEQ ID NO: 1793038 - RNA, 19 nt, Homo sapiens
  misc_RNA (1)...(19): siRNA sense strand
cccaggacuugguuuauga

SEQ ID NO: 1793039 - RNA, 19 nt, Homo sapiens
  misc_RNA (1)...(19): siRNA sense strand
ccacacagcacaucaaugc

SEQ ID NO: 1793040 - RNA, 19 nt, Homo sapiens
  misc_RNA (1)...(19): siRNA sense strand
caagaagacauucaaagag

SEQ ID NO: 1793041 - RNA, 19 nt, Homo sapiens
  misc_RNA (1)...(19): siRNA sense strand
gacgagaucgacauaauca

SEQ ID NO: 1793042 - RNA, 19 nt, Homo sapiens
  misc_RNA (1)...(19): siRNA sense strand
gauuauagccucccacacu

SEQ ID NO: 1793043 - RNA, 19 nt, Homo sapiens
  misc_RNA (1)...(19): siRNA sense strand
ugagacaguugcaaaggau

SEQ ID NO: 1793044 - RNA, 19 nt, Homo sapiens
  misc_RNA (1)...(19): siRNA sense strand
ggacgagaucgacauaauc

SEQ ID NO: 1793045 - RNA, 19 nt, Homo sapiens
  misc_RNA (1)...(19): siRNA sense strand
agacagacuggucguuuaa

SEQ ID NO: 1793046 - RNA, 19 nt, Homo sapiens
  misc_RNA (1)...(19): siRNA sense strand
caaccgaauuuucaaagaa

SEQ ID NO: 1793047 - RNA, 19 nt, Homo sapiens
  misc_RNA (1)...(19): siRNA sense strand
gagccugccaucaaugaaa

SEQ ID NO: 1793048 - RNA, 19 nt, Homo sapiens
  misc_RNA (1)...(19): siRNA sense strand
acaaaucgcucucauuccu

SEQ ID NO: 1793049 - RNA, 19 nt, Homo sapiens
  misc_RNA (1)...(19): siRNA sense strand
aaugagagccuguuugauc

SEQ ID NO: 1793050 - RNA, 19 nt, Homo sapiens
  misc_RNA (1)...(19): siRNA sense strand
auaaucagccuuagacaga

SEQ ID NO: 1793051 - RNA, 19 nt, Homo sapiens
  misc_RNA (1)...(19): siRNA sense strand
gagaccaacaggauuauag

SEQ ID NO: 1793052 - RNA, 19 nt, Homo sapiens
  misc_RNA (1)...(19): siRNA sense strand
ucaauaaccaacagacaga

SEQ ID NO: 1793053 - RNA, 19 nt, Homo sapiens
  misc_RNA (1)...(19): siRNA sense strand
caaggaggcccugaauuuc

SEQ ID NO: 1793054 - RNA, 19 nt, Homo sapiens
  misc_RNA (1)...(19): siRNA sense strand
agauugaugugaccaagga

SEQ ID NO: 1793055 - RNA, 19 nt, Homo sapiens
  misc_RNA (1)...(19): siRNA sense strand
gaaguacacccucauugac

SEQ ID NO: 1793056 - RNA, 19 nt, Homo sapiens
  misc_RNA (1)...(19): siRNA sense strand
cgacauaaucagccuuaga

SEQ ID NO: 1793057 - RNA, 19 nt, Homo sapiens
  misc_RNA (1)...(19): siRNA sense strand
guaugaugcugagagaaug

SEQ ID NO: 1793058 - RNA, 19 nt, Homo sapiens
  misc_RNA (1)...(19): siRNA sense strand
ccacacaugccaucacugu

SEQ ID NO: 1793059 - RNA, 19 nt, Homo sapiens
  misc_RNA (1)...(19): siRNA sense strand
caagacauacaccaugaug

SEQ ID NO: 1793060 - RNA, 19 nt, Homo sapiens
  misc_RNA (1)...(19): siRNA sense strand
uggacgagaucgacauaau

SEQ ID NO: 1793061 - RNA, 19 nt, Homo sapiens
  misc_RNA (1)...(19): siRNA sense strand
gacaaacaucuauggagaa

SEQ ID NO: 1793062 - RNA, 19 nt, Homo sapiens
  misc_RNA (1)...(19): siRNA sense strand
caguucaccucacaaguca

SEQ ID NO: 1793063 - RNA, 19 nt, Homo sapiens
  misc_RNA (1)...(19): siRNA sense strand
auaaugagagccuguuuga

SEQ ID NO: 1793064 - RNA, 19 nt, Homo sapiens
  misc_RNA (1)...(19): siRNA sense strand
ccaaguccaagaagacauu

SEQ ID NO: 1793065 - RNA, 19 nt, Homo sapiens
  misc_RNA (1)...(19): siRNA sense strand
aaagccaaguccaagaaga

SEQ ID NO: 1793066 - RNA, 19 nt, Homo sapiens
  misc_RNA (1)...(19): siRNA sense strand
gaaccuggagaaggaacua

SEQ ID NO: 1793067 - RNA, 19 nt, Homo sapiens
  misc_RNA (1)...(19): siRNA sense strand
cugagagaauggucaagaa

SEQ ID NO: 1793068 - RNA, 19 nt, Homo sapiens
  misc_RNA (1)...(19): siRNA sense strand
agacuggucguuuaaguug

SEQ ID NO: 1793069 - RNA, 19 nt, Homo sapiens
  misc_RNA (1)...(19): siRNA sense strand
cagauacggagaugacaaa

SEQ ID NO: 1793070 - RNA, 19 nt, Homo sapiens
  misc_RNA (1)...(19): siRNA sense strand
gaggaguugucaauaacca

SEQ ID NO: 1793071 - RNA, 19 nt, Homo sapiens
  misc_RNA (1)...(19): siRNA sense strand
gggcaacugagaauuacaa

SEQ ID NO: 1793072 - RNA, 19 nt, Homo sapiens
  misc_RNA (1)...(19): siRNA sense strand
gaucagauacggagaugac

SEQ ID NO: 1793073 - RNA, 19 nt, Homo sapiens
  misc_RNA (1)...(19): siRNA sense strand
ccaaugaccaucguggaaa

SEQ ID NO: 1793074 - RNA, 19 nt, Homo sapiens
  misc_RNA (1)...(19): siRNA sense strand
ucaaggagucuucauuaag

SEQ ID NO: 1793075 - RNA, 19 nt, Homo sapiens
  misc_RNA (1)...(19): siRNA sense strand
ugaagcuagucaccacuga

SEQ ID NO: 1793076 - RNA, 19 nt, Homo sapiens
  misc_RNA (1)...(19): siRNA sense strand
ggcccucgauggcuauaau

SEQ ID NO: 1793077 - RNA, 19 nt, Homo sapiens
  misc_RNA (1)...(19): siRNA sense strand
gcccugaauuuccagaagu

SEQ ID NO: 1793078 - RNA, 19 nt, Homo sapiens
  misc_RNA (1)...(19): siRNA sense strand
auacggagaugacaaaaga

SEQ ID NO: 1793079 - RNA, 19 nt, Homo sapiens
  misc_RNA (1)...(19): siRNA sense strand
gggugagccugaaggacaa

SEQ ID NO: 1793080 - RNA, 19 nt, Homo sapiens
  misc_RNA (1)...(19): siRNA sense strand
acaaacaucuauggagaag

SEQ ID NO: 1793081 - RNA, 19 nt, Homo sapiens
  misc_RNA (1)...(19): siRNA sense strand
ucacugugcguguuuccua

SEQ ID NO: 1793082 - RNA, 19 nt, Homo sapiens
  misc_RNA (1)...(19): siRNA sense strand
ggaagccaccuacaucaac

SEQ ID NO: 1793083 - RNA, 19 nt, Homo sapiens
  misc_RNA (1)...(19): siRNA sense strand
agugagaucaaccgaauuu

SEQ ID NO: 1793084 - RNA, 19 nt, Homo sapiens
  misc_RNA (1)...(19): siRNA sense strand
ugagcaagguagugagauc

SEQ ID NO: 1793085 - RNA, 19 nt, Homo sapiens
  misc_RNA (1)...(19): siRNA sense strand
agaaagccaaguccaagaa

SEQ ID NO: 1793086 - RNA, 19 nt, Homo sapiens
  misc_RNA (1)...(19): siRNA sense strand
ccagauugcugagaucaac

SEQ ID NO: 1793087 - RNA, 19 nt, Homo sapiens
  misc_RNA (1)...(19): siRNA sense strand
ggagcuggcuauccaugac

SEQ ID NO: 1793088 - RNA, 19 nt, Homo sapiens
  misc_RNA (1)...(19): siRNA sense strand
ucaacaaaucgcucucauu

SEQ ID NO: 1793089 - RNA, 19 nt, Homo sapiens
  misc_RNA (1)...(19): siRNA sense strand
gaaagccaaguccaagaag

SEQ ID NO: 1793090 - RNA, 19 nt, Homo sapiens
  misc_RNA (1)...(19): siRNA sense strand
agaaugagcaagguaguga

SEQ ID NO: 1793091 - RNA, 19 nt, Homo sapiens
  misc_RNA (1)...(19): siRNA sense strand
ggagaggaguugucaauaa

SEQ ID NO: 1793092 - RNA, 19 nt, Homo sapiens
  misc_RNA (1)...(19): siRNA sense strand
uggagaagcugcccaguua

SEQ ID NO: 1793093 - RNA, 19 nt, Homo sapiens
  misc_RNA (1)...(19): siRNA sense strand
gaaacgcuaucuucacuga

SEQ ID NO: 1793094 - RNA, 19 nt, Homo sapiens
  misc_RNA (1)...(19): siRNA sense strand
caaaggaugugguuucuca

SEQ ID NO: 1793095 - RNA, 19 nt, Homo sapiens
  misc_RNA (1)...(19): siRNA sense strand
acaaauccaucuugaauga

SEQ ID NO: 1793096 - RNA, 19 nt, Homo sapiens
  misc_RNA (1)...(19): siRNA sense strand
ccaaggaggcccugaauuu

SEQ ID NO: 1793097 - RNA, 19 nt, Homo sapiens
  misc_RNA (1)...(19): siRNA sense strand
ucaagaaccuggagaagga

SEQ ID NO: 1793098 - RNA, 19 nt, Homo sapiens
  misc_RNA (1)...(19): siRNA sense strand
guacaucacuuccaaaauu

SEQ ID NO: 1793099 - RNA, 19 nt, Homo sapiens
  misc_RNA (1)...(19): siRNA sense strand
caacaaaucgcucucauuc

SEQ ID NO: 1793100 - RNA, 19 nt, Homo sapiens
  misc_RNA (1)...(19): siRNA sense strand
gcacaucaaugccaucaag

SEQ ID NO: 1793101 - RNA, 19 nt, Homo sapiens
  misc_RNA (1)...(19): siRNA sense strand
ggaaguacacccucauuga

SEQ ID NO: 1793102 - RNA, 19 nt, Homo sapiens
  misc_RNA (1)...(19): siRNA sense strand
ugacuuugcucaugaaaug

SEQ ID NO: 1793103 - RNA, 19 nt, Homo sapiens
  misc_RNA (1)...(19): siRNA sense strand
gaaaacaaauccaucuuga

SEQ ID NO: 1793104 - RNA, 19 nt, Homo sapiens
  misc_RNA (1)...(19): siRNA sense strand
ggacuugguuuaugagaca

SEQ ID NO: 1793105 - RNA, 19 nt, Homo sapiens
  misc_RNA (1)...(19): siRNA sense strand
cagacagacuggucguuua

SEQ ID NO: 1793106 - RNA, 19 nt, Homo sapiens
  misc_RNA (1)...(19): siRNA sense strand
guagugagaucaaccgaau

SEQ ID NO: 1793107 - RNA, 19 nt, Homo sapiens
  misc_RNA (1)...(19): siRNA sense strand
gcaccuuugugaccuauga

SEQ ID NO: 1793108 - RNA, 19 nt, Homo sapiens
  misc_RNA (1)...(19): siRNA sense strand
gaaggaagccaccuacauc

SEQ ID NO: 1793109 - RNA, 19 nt, Homo sapiens
  misc_RNA (1)...(19): siRNA sense strand
caaggagucuucauuaagg

SEQ ID NO: 1793110 - RNA, 19 nt, Homo sapiens
  misc_RNA (1)...(19): siRNA sense strand
ggugagaccaacaggauua

SEQ ID NO: 1793111 - RNA, 19 nt, Homo sapiens
  misc_RNA (1)...(19): siRNA sense strand
ggcaagacauacaccauga

SEQ ID NO: 1793112 - RNA, 19 nt, Homo sapiens
  misc_RNA (1)...(19): siRNA sense strand
ccaagaagacauucaaaga

SEQ ID NO: 1793113 - RNA, 19 nt, Homo sapiens
  misc_RNA (1)...(19): siRNA sense strand
ccaccuacaucaacaaauc

SEQ ID NO: 1793114 - RNA, 19 nt, Homo sapiens
  misc_RNA (1)...(19): siRNA sense strand
gagaggaguugucaauaac

SEQ ID NO: 1793115 - RNA, 19 nt, Homo sapiens
  misc_RNA (1)...(19): siRNA sense strand
ggaagaaagccaaguccaa

SEQ ID NO: 1793116 - RNA, 19 nt, Homo sapiens
  misc_RNA (1)...(19): siRNA sense strand
ggagaaggaacuagcacua

SEQ ID NO: 1793117 - RNA, 19 nt, Homo sapiens
  misc_RNA (1)...(19): siRNA sense strand
gacgggagcuggcaagaca

SEQ ID NO: 1793118 - RNA, 19 nt, Homo sapiens
  misc_RNA (1)...(19): siRNA sense strand
uaaguuggauggaguucuu

SEQ ID NO: 1793119 - RNA, 19 nt, Homo sapiens
  misc_RNA (1)...(19): siRNA sense strand
ccucaaggagucuucauua

SEQ ID NO: 1793120 - RNA, 19 nt, Homo sapiens
  misc_RNA (1)...(19): siRNA sense strand
gaagccaccuacaucaaca

SEQ ID NO: 1793121 - RNA, 19 nt, Homo sapiens
  misc_RNA (1)...(19): siRNA sense strand
uaccaaaccugggaagaaa

SEQ ID NO: 1793122 - RNA, 19 nt, Homo sapiens
  misc_RNA (1)...(19): siRNA sense strand
ccacugagccugccaucaa

SEQ ID NO: 1793123 - RNA, 19 nt, Homo sapiens
  misc_RNA (1)...(19): siRNA sense strand
ggauggaguucuucacgau

SEQ ID NO: 1793124 - RNA, 19 nt, Homo sapiens
  misc_RNA (1)...(19): siRNA sense strand
uugaggaguuuaagaauga

SEQ ID NO: 1793125 - RNA, 19 nt, Homo sapiens
  misc_RNA (1)...(19): siRNA sense strand
ucaaggagguguucaacca

SEQ ID NO: 1793126 - RNA, 19 nt, Homo sapiens
  misc_RNA (1)...(19): siRNA sense strand
ggaacuagcacuacucaag

SEQ ID NO: 1793127 - RNA, 19 nt, Homo sapiens
  misc_RNA (1)...(19): siRNA sense strand
caacugagaauuacaagca

SEQ ID NO: 1793128 - RNA, 19 nt, Homo sapiens
  misc_RNA (1)...(19): siRNA sense strand
ggauguugauggccaccua

SEQ ID NO: 1793129 - RNA, 19 nt, Homo sapiens
  misc_RNA (1)...(19): siRNA sense strand
caaacccaccgaugacuuu

SEQ ID NO: 1793130 - RNA, 19 nt, Homo sapiens
  misc_RNA (1)...(19): siRNA sense strand
gagaagcugcccaguuaga

SEQ ID NO: 1793131 - RNA, 19 nt, Homo sapiens
  misc_RNA (1)...(19): siRNA sense strand
aaaguaugaugcugagaga

SEQ ID NO: 1793132 - RNA, 19 nt, Homo sapiens
  misc_RNA (1)...(19): siRNA sense strand
aaacaucuauggagaagcu

SEQ ID NO: 1793133 - RNA, 19 nt, Homo sapiens
  misc_RNA (1)...(19): siRNA sense strand
gacaaaagaagcauugaua

SEQ ID NO: 1793134 - RNA, 19 nt, Homo sapiens
  misc_RNA (1)...(19): siRNA sense strand
auuaagggcuugucaguuc

SEQ ID NO: 1793135 - RNA, 19 nt, Homo sapiens
  misc_RNA (1)...(19): siRNA sense strand
ugacaggaaugacuuugca

SEQ ID NO: 1793136 - RNA, 19 nt, Homo sapiens
  misc_RNA (1)...(19): siRNA sense strand
gaagaacgccccacacaug

SEQ ID NO: 1793137 - RNA, 19 nt, Homo sapiens
  misc_RNA (1)...(19): siRNA sense strand
cucaaggagucuucauuaa

SEQ ID NO: 1793138 - RNA, 19 nt, Homo sapiens
  misc_RNA (1)...(19): siRNA sense strand
cccaggacuugguuuauga

SEQ ID NO: 1793139 - RNA, 19 nt, Homo sapiens
  misc_RNA (1)...(19): siRNA sense strand
ccacacagcacaucaaugc

SEQ ID NO: 1793140 - RNA, 19 nt, Homo sapiens
  misc_RNA (1)...(19): siRNA sense strand
caagaagacauucaaagag

SEQ ID NO: 1793141 - RNA, 19 nt, Homo sapiens
  misc_RNA (1)...(19): siRNA sense strand
gacgagaucgacauaauca

SEQ ID NO: 1793142 - RNA, 19 nt, Homo sapiens
  misc_RNA (1)...(19): siRNA sense strand
gauuauagccucccacacu

SEQ ID NO: 1793143 - RNA, 19 nt, Homo sapiens
  misc_RNA (1)...(19): siRNA sense strand
ugagacaguugcaaaggau

SEQ ID NO: 1793144 - RNA, 19 nt, Homo sapiens
  misc_RNA (1)...(19): siRNA sense strand
ggacgagaucgacauaauc

SEQ ID NO: 1793145 - RNA, 19 nt, Homo sapiens
  misc_RNA (1)...(19): siRNA sense strand
agacagacuggucguuuaa

SEQ ID NO: 1793146 - RNA, 19 nt, Homo sapiens
  misc_RNA (1)...(19): siRNA sense strand
caaccgaauuuucaaagaa

SEQ ID NO: 1793147 - RNA, 19 nt, Homo sapiens
  misc_RNA (1)...(19): siRNA sense strand
gagccugccaucaaugaaa

SEQ ID NO: 1793148 - RNA, 19 nt, Homo sapiens
  misc_RNA (1)...(19): siRNA sense strand
acaaaucgcucucauuccu

SEQ ID NO: 1793149 - RNA, 19 nt, Homo sapiens
  misc_RNA (1)...(19): siRNA sense strand
aaugagagccuguuugauc

SEQ ID NO: 1793150 - RNA, 19 nt, Homo sapiens
  misc_RNA (1)...(19): siRNA sense strand
auaaucagccuuagacaga

SEQ ID NO: 1793151 - RNA, 19 nt, Homo sapiens
  misc_RNA (1)...(19): siRNA sense strand
gagaccaacaggauuauag

SEQ ID NO: 1793152 - RNA, 19 nt, Homo sapiens
  misc_RNA (1)...(19): siRNA sense strand
ucaauaaccaacagacaga

SEQ ID NO: 1793153 - RNA, 19 nt, Homo sapiens
  misc_RNA (1)...(19): siRNA sense strand
caaggaggcccugaauuuc

SEQ ID NO: 1793154 - RNA, 19 nt, Homo sapiens
  misc_RNA (1)...(19): siRNA sense strand
agauugaugugaccaagga

SEQ ID NO: 1793155 - RNA, 19 nt, Homo sapiens
  misc_RNA (1)...(19): siRNA sense strand
gaaguacacccucauugac

SEQ ID NO: 1793156 - RNA, 19 nt, Homo sapiens
  misc_RNA (1)...(19): siRNA sense strand
cgacauaaucagccuuaga

SEQ ID NO: 1793157 - RNA, 19 nt, Homo sapiens
  misc_RNA (1)...(19): siRNA sense strand
guaugaugcugagagaaug

SEQ ID NO: 1793158 - RNA, 19 nt, Homo sapiens
  misc_RNA (1)...(19): siRNA sense strand
ccacacaugccaucacugu

SEQ ID NO: 1793159 - RNA, 19 nt, Homo sapiens
  misc_RNA (1)...(19): siRNA sense strand
caagacauacaccaugaug

SEQ ID NO: 1793160 - RNA, 19 nt, Homo sapiens
  misc_RNA (1)...(19): siRNA sense strand
uggacgagaucgacauaau

SEQ ID NO: 1793161 - RNA, 19 nt, Homo sapiens
  misc_RNA (1)...(19): siRNA sense strand
gacaaacaucuauggagaa

SEQ ID NO: 1793162 - RNA, 19 nt, Homo sapiens
  misc_RNA (1)...(19): siRNA sense strand
caguucaccucacaaguca

SEQ ID NO: 1793163 - RNA, 19 nt, Homo sapiens
  misc_RNA (1)...(19): siRNA sense strand
auaaugagagccuguuuga

SEQ ID NO: 1793164 - RNA, 19 nt, Homo sapiens
  misc_RNA (1)...(19): siRNA sense strand
ccaaguccaagaagacauu

SEQ ID NO: 1793165 - RNA, 19 nt, Homo sapiens
  misc_RNA (1)...(19): siRNA sense strand
aaagccaaguccaagaaga

SEQ ID NO: 1793166 - RNA, 19 nt, Homo sapiens
  misc_RNA (1)...(19): siRNA sense strand
gaaccuggagaaggaacua

SEQ ID NO: 1793167 - RNA, 19 nt, Homo sapiens
  misc_RNA (1)...(19): siRNA sense strand
cugagagaauggucaagaa

SEQ ID NO: 1793168 - RNA, 19 nt, Homo sapiens
  misc_RNA (1)...(19): siRNA sense strand
agacuggucguuuaaguug

SEQ ID NO: 1793169 - RNA, 19 nt, Homo sapiens
  misc_RNA (1)...(19): siRNA sense strand
cagauacggagaugacaaa

SEQ ID NO: 1793170 - RNA, 19 nt, Homo sapiens
  misc_RNA (1)...(19): siRNA sense strand
gaggaguugucaauaacca

SEQ ID NO: 1793171 - RNA, 19 nt, Homo sapiens
  misc_RNA (1)...(19): siRNA sense strand
gggcaacugagaauuacaa

SEQ ID NO: 1793172 - RNA, 19 nt, Homo sapiens
  misc_RNA (1)...(19): siRNA sense strand
gaucagauacggagaugac

SEQ ID NO: 1793173 - RNA, 19 nt, Homo sapiens
  misc_RNA (1)...(19): siRNA sense strand
ccaaugaccaucguggaaa

SEQ ID NO: 1793174 - RNA, 19 nt, Homo sapiens
  misc_RNA (1)...(19): siRNA sense strand
ucaaggagucuucauuaag

SEQ ID NO: 1793175 - RNA, 19 nt, Homo sapiens
  misc_RNA (1)...(19): siRNA sense strand
ugaagcuagucaccacuga

SEQ ID NO: 1793176 - RNA, 19 nt, Homo sapiens
  misc_RNA (1)...(19): siRNA sense strand
ggcccucgauggcuauaau

SEQ ID NO: 1793177 - RNA, 19 nt, Homo sapiens
  misc_RNA (1)...(19): siRNA sense strand
gcccugaauuuccagaagu

SEQ ID NO: 1793178 - RNA, 19 nt, Homo sapiens
  misc_RNA (1)...(19): siRNA sense strand
auacggagaugacaaaaga

SEQ ID NO: 1793179 - RNA, 19 nt, Homo sapiens
  misc_RNA (1)...(19): siRNA sense strand
gggugagccugaaggacaa

SEQ ID NO: 1793180 - RNA, 19 nt, Homo sapiens
  misc_RNA (1)...(19): siRNA sense strand
acaaacaucuauggagaag

SEQ ID NO: 1793181 - RNA, 19 nt, Homo sapiens
  misc_RNA (1)...(19): siRNA sense strand
ucacugugcguguuuccua

SEQ ID NO: 1793182 - RNA, 19 nt, Homo sapiens
  misc_RNA (1)...(19): siRNA sense strand
ggaagccaccuacaucaac

SEQ ID NO: 1793183 - RNA, 19 nt, Homo sapiens
  misc_RNA (1)...(19): siRNA sense strand
agugagaucaaccgaauuu

SEQ ID NO: 1793184 - RNA, 19 nt, Homo sapiens
  misc_RNA (1)...(19): siRNA sense strand
ugagcaagguagugagauc

SEQ ID NO: 1793185 - RNA, 19 nt, Homo sapiens
  misc_RNA (1)...(19): siRNA sense strand
agaaagccaaguccaagaa

SEQ ID NO: 1793186 - RNA, 19 nt, Homo sapiens
  misc_RNA (1)...(19): siRNA sense strand
ccagauugcugagaucaac

SEQ ID NO: 1793187 - RNA, 19 nt, Homo sapiens
  misc_RNA (1)...(19): siRNA sense strand
ggagcuggcuauccaugac

SEQ ID NO: 1793188 - RNA, 19 nt, Homo sapiens
  misc_RNA (1)...(19): siRNA sense strand
ucaacaaaucgcucucauu

SEQ ID NO: 1793189 - RNA, 19 nt, Homo sapiens
  misc_RNA (1)...(19): siRNA sense strand
gaaagccaaguccaagaag

SEQ ID NO: 1793190 - RNA, 19 nt, Homo sapiens
  misc_RNA (1)...(19): siRNA sense strand
agaaugagcaagguaguga

SEQ ID NO: 1793191 - RNA, 19 nt, Homo sapiens
  misc_RNA (1)...(19): siRNA sense strand
ggagaggaguugucaauaa

SEQ ID NO: 1793192 - RNA, 19 nt, Homo sapiens
  misc_RNA (1)...(19): siRNA sense strand
uggagaagcugcccaguua

SEQ ID NO: 1793193 - RNA, 19 nt, Homo sapiens
  misc_RNA (1)...(19): siRNA sense strand
gaaacgcuaucuucacuga

SEQ ID NO: 1793194 - RNA, 19 nt, Homo sapiens
  misc_RNA (1)...(19): siRNA sense strand
caaaggaugugguuucuca

SEQ ID NO: 1793195 - RNA, 19 nt, Homo sapiens
  misc_RNA (1)...(19): siRNA sense strand
acaaauccaucuugaauga

SEQ ID NO: 1793196 - RNA, 19 nt, Homo sapiens
  misc_RNA (1)...(19): siRNA sense strand
ccaaggaggcccugaauuu

SEQ ID NO: 1793197 - RNA, 19 nt, Homo sapiens
  misc_RNA (1)...(19): siRNA sense strand
ucaagaaccuggagaagga

SEQ ID NO: 1793198 - RNA, 19 nt, Homo sapiens
  misc_RNA (1)...(19): siRNA sense strand
guacaucacuuccaaaauu

SEQ ID NO: 1793199 - RNA, 19 nt, Homo sapiens
  misc_RNA (1)...(19): siRNA sense strand
caacaaaucgcucucauuc

SEQ ID NO: 1793200 - RNA, 19 nt, Homo sapiens
  misc_RNA (1)...(19): siRNA sense strand
gcacaucaaugccaucaag

SEQ ID NO: 1793201 - RNA, 19 nt, Homo sapiens
  misc_RNA (1)...(19): siRNA sense strand
ggaaguacacccucauuga

SEQ ID NO: 1793202 - RNA, 19 nt, Homo sapiens
  misc_RNA (1)...(19): siRNA sense strand
ugacuuugcucaugaaaug

SEQ ID NO: 1793203 - RNA, 19 nt, Homo sapiens
  misc_RNA (1)...(19): siRNA sense strand
gaaaacaaauccaucuuga

SEQ ID NO: 1793204 - RNA, 19 nt, Homo sapiens
  misc_RNA (1)...(19): siRNA sense strand
ggacuugguuuaugagaca

SEQ ID NO: 1793205 - RNA, 19 nt, Homo sapiens
  misc_RNA (1)...(19): siRNA sense strand
cagacagacuggucguuua

SEQ ID NO: 1793206 - RNA, 19 nt, Homo sapiens
  misc_RNA (1)...(19): siRNA sense strand
guagugagaucaaccgaau

SEQ ID NO: 1793207 - RNA, 19 nt, Homo sapiens
  misc_RNA (1)...(19): siRNA sense strand
gcaccuuugugaccuauga

SEQ ID NO: 1793208 - RNA, 19 nt, Homo sapiens
  misc_RNA (1)...(19): siRNA sense strand
gaaggaagccaccuacauc

SEQ ID NO: 1793209 - RNA, 19 nt, Homo sapiens
  misc_RNA (1)...(19): siRNA sense strand
caaggagucuucauuaagg

SEQ ID NO: 1793210 - RNA, 19 nt, Homo sapiens
  misc_RNA (1)...(19): siRNA sense strand
ggugagaccaacaggauua

SEQ ID NO: 1793211 - RNA, 19 nt, Homo sapiens
  misc_RNA (1)...(19): siRNA sense strand
ggcaagacauacaccauga

SEQ ID NO: 1793212 - RNA, 19 nt, Homo sapiens
  misc_RNA (1)...(19): siRNA sense strand
ccaagaagacauucaaaga

SEQ ID NO: 1793213 - RNA, 19 nt, Homo sapiens
  misc_RNA (1)...(19): siRNA sense strand
ccaccuacaucaacaaauc

SEQ ID NO: 1793214 - RNA, 19 nt, Homo sapiens
  misc_RNA (1)...(19): siRNA sense strand
gagaggaguugucaauaac

SEQ ID NO: 1793215 - RNA, 19 nt, Homo sapiens
  misc_RNA (1)...(19): siRNA sense strand
ggaagaaagccaaguccaa

SEQ ID NO: 1793216 - RNA, 19 nt, Homo sapiens
  misc_RNA (1)...(19): siRNA sense strand
ggagaaggaacuagcacua

SEQ ID NO: 1793217 - RNA, 19 nt, Homo sapiens
  misc_RNA (1)...(19): siRNA sense strand
gacgggagcuggcaagaca

SEQ ID NO: 1793218 - RNA, 19 nt, Homo sapiens
  misc_RNA (1)...(19): siRNA sense strand
uaaguuggauggaguucuu

SEQ ID NO: 1793219 - RNA, 19 nt, Homo sapiens
  misc_RNA (1)...(19): siRNA sense strand
ccucaaggagucuucauua

SEQ ID NO: 1793220 - RNA, 19 nt, Homo sapiens
  misc_RNA (1)...(19): siRNA sense strand
gaagccaccuacaucaaca

SEQ ID NO: 1793221 - RNA, 19 nt, Homo sapiens
  misc_RNA (1)...(19): siRNA sense strand
uaccaaaccugggaagaaa

SEQ ID NO: 1793222 - RNA, 19 nt, Homo sapiens
  misc_RNA (1)...(19): siRNA sense strand
ccacugagccugccaucaa

SEQ ID NO: 1793223 - RNA, 19 nt, Homo sapiens
  misc_RNA (1)...(19): siRNA sense strand
ggauggaguucuucacgau

SEQ ID NO: 1793224 - RNA, 19 nt, Homo sapiens
  misc_RNA (1)...(19): siRNA sense strand
uugaggaguuuaagaauga

SEQ ID NO: 1793225 - RNA, 19 nt, Homo sapiens
  misc_RNA (1)...(19): siRNA sense strand
ucaaggagguguucaacca

SEQ ID NO: 1793226 - RNA, 19 nt, Homo sapiens
  misc_RNA (1)...(19): siRNA sense strand
ggaacuagcacuacucaag

SEQ ID NO: 1793227 - RNA, 19 nt, Homo sapiens
  misc_RNA (1)...(19): siRNA sense strand
caacugagaauuacaagca

SEQ ID NO: 1793228 - RNA, 19 nt, Homo sapiens
  misc_RNA (1)...(19): siRNA sense strand
ggauguugauggccaccua

SEQ ID NO: 1793229 - RNA, 19 nt, Homo sapiens
  misc_RNA (1)...(19): siRNA sense strand
caaacccaccgaugacuuu

SEQ ID NO: 1793230 - RNA, 19 nt, Homo sapiens
  misc_RNA (1)...(19): siRNA sense strand
gagaagcugcccaguuaga

SEQ ID NO: 1793231 - RNA, 19 nt, Homo sapiens
  misc_RNA (1)...(19): siRNA sense strand
aaaguaugaugcugagaga

SEQ ID NO: 1793232 - RNA, 19 nt, Homo sapiens
  misc_RNA (1)...(19): siRNA sense strand
aaacaucuauggagaagcu

SEQ ID NO: 1793233 - RNA, 19 nt, Homo sapiens
  misc_RNA (1)...(19): siRNA sense strand
gacaaaagaagcauugaua

SEQ ID NO: 1793234 - RNA, 19 nt, Homo sapiens
  misc_RNA (1)...(19): siRNA sense strand
auuaagggcuugucaguuc

SEQ ID NO: 1793235 - RNA, 19 nt, Homo sapiens
  misc_RNA (1)...(19): siRNA sense strand
ugacaggaaugacuuugca

SEQ ID NO: 1793236 - RNA, 19 nt, Homo sapiens
  misc_RNA (1)...(19): siRNA sense strand
gaagaacgccccacacaug

SEQ ID NO: 1793237 - RNA, 19 nt, Homo sapiens
  misc_RNA (1)...(19): siRNA sense strand
cucaaggagucuucauuaa

SEQ ID NO: 1793238 - RNA, 19 nt, Homo sapiens
  misc_RNA (1)...(19): siRNA sense strand
cccaggacuugguuuauga

SEQ ID NO: 1793239 - RNA, 19 nt, Homo sapiens
  misc_RNA (1)...(19): siRNA sense strand
ccacacagcacaucaaugc

SEQ ID NO: 1793240 - RNA, 19 nt, Homo sapiens
  misc_RNA (1)...(19): siRNA sense strand
caagaagacauucaaagag

SEQ ID NO: 1793241 - RNA, 19 nt, Homo sapiens
  misc_RNA (1)...(19): siRNA sense strand
gacgagaucgacauaauca

SEQ ID NO: 1793242 - RNA, 19 nt, Homo sapiens
  misc_RNA (1)...(19): siRNA sense strand
gauuauagccucccacacu

SEQ ID NO: 1793243 - RNA, 19 nt, Homo sapiens
  misc_RNA (1)...(19): siRNA sense strand
ugagacaguugcaaaggau

SEQ ID NO: 1793244 - RNA, 19 nt, Homo sapiens
  misc_RNA (1)...(19): siRNA sense strand
ggacgagaucgacauaauc

SEQ ID NO: 1793245 - RNA, 19 nt, Homo sapiens
  misc_RNA (1)...(19): siRNA sense strand
agacagacuggucguuuaa

SEQ ID NO: 1793246 - RNA, 19 nt, Homo sapiens
  misc_RNA (1)...(19): siRNA sense strand
caaccgaauuuucaaagaa

SEQ ID NO: 1793247 - RNA, 19 nt, Homo sapiens
  misc_RNA (1)...(19): siRNA sense strand
gagccugccaucaaugaaa

SEQ ID NO: 1793248 - RNA, 19 nt, Homo sapiens
  misc_RNA (1)...(19): siRNA sense strand
acaaaucgcucucauuccu

SEQ ID NO: 1793249 - RNA, 19 nt, Homo sapiens
  misc_RNA (1)...(19): siRNA sense strand
aaugagagccuguuugauc

SEQ ID NO: 1793250 - RNA, 19 nt, Homo sapiens
  misc_RNA (1)...(19): siRNA sense strand
auaaucagccuuagacaga

SEQ ID NO: 1793251 - RNA, 19 nt, Homo sapiens
  misc_RNA (1)...(19): siRNA sense strand
gagaccaacaggauuauag

SEQ ID NO: 1793252 - RNA, 19 nt, Homo sapiens
  misc_RNA (1)...(19): siRNA sense strand
ucaauaaccaacagacaga

SEQ ID NO: 1793253 - RNA, 19 nt, Homo sapiens
  misc_RNA (1)...(19): siRNA sense strand
caaggaggcccugaauuuc

SEQ ID NO: 1793254 - RNA, 19 nt, Homo sapiens
  misc_RNA (1)...(19): siRNA sense strand
agauugaugugaccaagga

SEQ ID NO: 1793255 - RNA, 19 nt, Homo sapiens
  misc_RNA (1)...(19): siRNA sense strand
gaaguacacccucauugac

SEQ ID NO: 1793256 - RNA, 19 nt, Homo sapiens
  misc_RNA (1)...(19): siRNA sense strand
cgacauaaucagccuuaga

SEQ ID NO: 1793257 - RNA, 19 nt, Homo sapiens
  misc_RNA (1)...(19): siRNA sense strand
guaugaugcugagagaaug

SEQ ID NO: 1793258 - RNA, 19 nt, Homo sapiens
  misc_RNA (1)...(19): siRNA sense strand
ccacacaugccaucacugu

SEQ ID NO: 1793259 - RNA, 19 nt, Homo sapiens
  misc_RNA (1)...(19): siRNA sense strand
caagacauacaccaugaug

SEQ ID NO: 1793260 - RNA, 19 nt, Homo sapiens
  misc_RNA (1)...(19): siRNA sense strand
uggacgagaucgacauaau

SEQ ID NO: 1793261 - RNA, 19 nt, Homo sapiens
  misc_RNA (1)...(19): siRNA sense strand
gacaaacaucuauggagaa

SEQ ID NO: 1793262 - RNA, 19 nt, Homo sapiens
  misc_RNA (1)...(19): siRNA sense strand
caguucaccucacaaguca

SEQ ID NO: 1793263 - RNA, 19 nt, Homo sapiens
  misc_RNA (1)...(19): siRNA sense strand
auaaugagagccuguuuga

SEQ ID NO: 1793264 - RNA, 19 nt, Homo sapiens
  misc_RNA (1)...(19): siRNA sense strand
ccaaguccaagaagacauu

SEQ ID NO: 1793265 - RNA, 19 nt, Homo sapiens
  misc_RNA (1)...(19): siRNA sense strand
aaagccaaguccaagaaga

SEQ ID NO: 1793266 - RNA, 19 nt, Homo sapiens
  misc_RNA (1)...(19): siRNA sense strand
gaaccuggagaaggaacua

SEQ ID NO: 1793267 - RNA, 19 nt, Homo sapiens
  misc_RNA (1)...(19): siRNA sense strand
cugagagaauggucaagaa

SEQ ID NO: 1793268 - RNA, 19 nt, Homo sapiens
  misc_RNA (1)...(19): siRNA sense strand
agacuggucguuuaaguug

SEQ ID NO: 1793269 - RNA, 19 nt, Homo sapiens
  misc_RNA (1)...(19): siRNA sense strand
cagauacggagaugacaaa

SEQ ID NO: 1793270 - RNA, 19 nt, Homo sapiens
  misc_RNA (1)...(19): siRNA sense strand
gaggaguugucaauaacca

SEQ ID NO: 1793271 - RNA, 19 nt, Homo sapiens
  misc_RNA (1)...(19): siRNA sense strand
gggcaacugagaauuacaa

SEQ ID NO: 1793272 - RNA, 19 nt, Homo sapiens
  misc_RNA (1)...(19): siRNA sense strand
gaucagauacggagaugac

SEQ ID NO: 1793273 - RNA, 19 nt, Homo sapiens
  misc_RNA (1)...(19): siRNA sense strand
ccaaugaccaucguggaaa

SEQ ID NO: 1793274 - RNA, 19 nt, Homo sapiens
  misc_RNA (1)...(19): siRNA sense strand
ucaaggagucuucauuaag

SEQ ID NO: 1793275 - RNA, 19 nt, Homo sapiens
  misc_RNA (1)...(19): siRNA sense strand
ugaagcuagucaccacuga

SEQ ID NO: 1793276 - RNA, 19 nt, Homo sapiens
  misc_RNA (1)...(19): siRNA sense strand
ggcccucgauggcuauaau

SEQ ID NO: 1793277 - RNA, 19 nt, Homo sapiens
  misc_RNA (1)...(19): siRNA sense strand
gcccugaauuuccagaagu

SEQ ID NO: 1793278 - RNA, 19 nt, Homo sapiens
  misc_RNA (1)...(19): siRNA sense strand
auacggagaugacaaaaga

SEQ ID NO: 1793279 - RNA, 19 nt, Homo sapiens
  misc_RNA (1)...(19): siRNA sense strand
gggugagccugaaggacaa

SEQ ID NO: 1793280 - RNA, 19 nt, Homo sapiens
  misc_RNA (1)...(19): siRNA sense strand
acaaacaucuauggagaag

SEQ ID NO: 1793281 - RNA, 19 nt, Homo sapiens
  misc_RNA (1)...(19): siRNA sense strand
ucacugugcguguuuccua

SEQ ID NO: 1793282 - RNA, 19 nt, Homo sapiens
  misc_RNA (1)...(19): siRNA sense strand
ggaagccaccuacaucaac

SEQ ID NO: 1793283 - RNA, 19 nt, Homo sapiens
  misc_RNA (1)...(19): siRNA sense strand
agugagaucaaccgaauuu

SEQ ID NO: 1793284 - RNA, 19 nt, Homo sapiens
  misc_RNA (1)...(19): siRNA sense strand
ugagcaagguagugagauc

SEQ ID NO: 1793285 - RNA, 19 nt, Homo sapiens
  misc_RNA (1)...(19): siRNA sense strand
agaaagccaaguccaagaa

SEQ ID NO: 1793286 - RNA, 19 nt, Homo sapiens
  misc_RNA (1)...(19): siRNA sense strand
ccagauugcugagaucaac

SEQ ID NO: 1793287 - RNA, 19 nt, Homo sapiens
  misc_RNA (1)...(19): siRNA sense strand
ggagcuggcuauccaugac

SEQ ID NO: 1793288 - RNA, 19 nt, Homo sapiens
  misc_RNA (1)...(19): siRNA sense strand
ucaacaaaucgcucucauu

SEQ ID NO: 1793289 - RNA, 19 nt, Homo sapiens
  misc_RNA (1)...(19): siRNA sense strand
gaaagccaaguccaagaag

SEQ ID NO: 1793290 - RNA, 19 nt, Homo sapiens
  misc_RNA (1)...(19): siRNA sense strand
agaaugagcaagguaguga

SEQ ID NO: 1793291 - RNA, 19 nt, Homo sapiens
  misc_RNA (1)...(19): siRNA sense strand
gaacugaucuaugcacaaa

SEQ ID NO: 1793292 - RNA, 19 nt, Homo sapiens
  misc_RNA (1)...(19): siRNA sense strand
gaacuucagcuucaucaua

SEQ ID NO: 1793293 - RNA, 19 nt, Homo sapiens
  misc_RNA (1)...(19): siRNA sense strand
ggagagagguggagcaaca

SEQ ID NO: 1793294 - RNA, 19 nt, Homo sapiens
  misc_RNA (1)...(19): siRNA sense strand
ccucacagaugaugacuuu

SEQ ID NO: 1793295 - RNA, 19 nt, Homo sapiens
  misc_RNA (1)...(19): siRNA sense strand
gaaccagcguccucuccua

SEQ ID NO: 1793296 - RNA, 19 nt, Homo sapiens
  misc_RNA (1)...(19): siRNA sense strand
ugauaaggcugcuccauga

SEQ ID NO: 1793297 - RNA, 19 nt, Homo sapiens
  misc_RNA (1)...(19): siRNA sense strand
gcacugagauaagggagaa

SEQ ID NO: 1793298 - RNA, 19 nt, Homo sapiens
  misc_RNA (1)...(19): siRNA sense strand
gcaaacagacccaucguau

SEQ ID NO: 1793299 - RNA, 19 nt, Homo sapiens
  misc_RNA (1)...(19): siRNA sense strand
guuaaucgcaucccuuaua

SEQ ID NO: 1793300 - RNA, 19 nt, Homo sapiens
  misc_RNA (1)...(19): siRNA sense strand
ucauuggcauucuuuguua

SEQ ID NO: 1793301 - RNA, 19 nt, Homo sapiens
  misc_RNA (1)...(19): siRNA sense strand
cggaacaacuucauuaauc

SEQ ID NO: 1793302 - RNA, 19 nt, Homo sapiens
  misc_RNA (1)...(19): siRNA sense strand
gaauuaaagccaucaggaa

SEQ ID NO: 1793303 - RNA, 19 nt, Homo sapiens
  misc_RNA (1)...(19): siRNA sense strand
ggacuucacugucacucau

SEQ ID NO: 1793304 - RNA, 19 nt, Homo sapiens
  misc_RNA (1)...(19): siRNA sense strand
gaacaugauggcagucuug

SEQ ID NO: 1793305 - RNA, 19 nt, Homo sapiens
  misc_RNA (1)...(19): siRNA sense strand
uuuauuaccuggcugagua

SEQ ID NO: 1793306 - RNA, 19 nt, Homo sapiens
  misc_RNA (1)...(19): siRNA sense strand
ucauacagguugagaaugu

SEQ ID NO: 1793307 - RNA, 19 nt, Homo sapiens
  misc_RNA (1)...(19): siRNA sense strand
ugaucaagcugcaggauau

SEQ ID NO: 1793308 - RNA, 19 nt, Homo sapiens
  misc_RNA (1)...(19): siRNA sense strand
caaggaccauggaagagaa

SEQ ID NO: 1793309 - RNA, 19 nt, Homo sapiens
  misc_RNA (1)...(19): siRNA sense strand
uagaagaucaguucaagaa

SEQ ID NO: 1793310 - RNA, 19 nt, Homo sapiens
  misc_RNA (1)...(19): siRNA sense strand
caucauaaucccucaguuu

SEQ ID NO: 1793311 - RNA, 19 nt, Homo sapiens
  misc_RNA (1)...(19): siRNA sense strand
gauaaaauguuccugauag

SEQ ID NO: 1793312 - RNA, 19 nt, Homo sapiens
  misc_RNA (1)...(19): siRNA sense strand
caacaugguuuugucaaua

SEQ ID NO: 1793313 - RNA, 19 nt, Homo sapiens
  misc_RNA (1)...(19): siRNA sense strand
ggaugcaacugaucacaag

SEQ ID NO: 1793314 - RNA, 19 nt, Homo sapiens
  misc_RNA (1)...(19): siRNA sense strand
ggugaagaguguugggaaa

SEQ ID NO: 1793315 - RNA, 19 nt, Homo sapiens
  misc_RNA (1)...(19): siRNA sense strand
gaucauuggaggcaaguuu

SEQ ID NO: 1793316 - RNA, 19 nt, Homo sapiens
  misc_RNA (1)...(19): siRNA sense strand
ggaaaauaguugacaaaga

SEQ ID NO: 1793317 - RNA, 19 nt, Homo sapiens
  misc_RNA (1)...(19): siRNA sense strand
uuaaugagggcaaagauaa

SEQ ID NO: 1793318 - RNA, 19 nt, Homo sapiens
  misc_RNA (1)...(19): siRNA sense strand
gggacacagugauguacua

SEQ ID NO: 1793319 - RNA, 19 nt, Homo sapiens
  misc_RNA (1)...(19): siRNA sense strand
ccagcguccucuccuauuu

SEQ ID NO: 1793320 - RNA, 19 nt, Homo sapiens
  misc_RNA (1)...(19): siRNA sense strand
uaucggagauccaagaaca

SEQ ID NO: 1793321 - RNA, 19 nt, Homo sapiens
  misc_RNA (1)...(19): siRNA sense strand
ugagauggcuuuugaaguu

SEQ ID NO: 1793322 - RNA, 19 nt, Homo sapiens
  misc_RNA (1)...(19): siRNA sense strand
gagggaaggaagauuauga

SEQ ID NO: 1793323 - RNA, 19 nt, Homo sapiens
  misc_RNA (1)...(19): siRNA sense strand
acagagggaaggaagauua

SEQ ID NO: 1793324 - RNA, 19 nt, Homo sapiens
  misc_RNA (1)...(19): siRNA sense strand
caggagaauuccaaguuga

SEQ ID NO: 1793325 - RNA, 19 nt, Homo sapiens
  misc_RNA (1)...(19): siRNA sense strand
ucaggagaauuccaaguug

SEQ ID NO: 1793326 - RNA, 19 nt, Homo sapiens
  misc_RNA (1)...(19): siRNA sense strand
ccaccugcuucuucaguuu

SEQ ID NO: 1793327 - RNA, 19 nt, Homo sapiens
  misc_RNA (1)...(19): siRNA sense strand
cuaaucaucaccuaucuuu

SEQ ID NO: 1793328 - RNA, 19 nt, Homo sapiens
  misc_RNA (1)...(19): siRNA sense strand
ggaacaacuucauuaaucc

SEQ ID NO: 1793329 - RNA, 19 nt, Homo sapiens
  misc_RNA (1)...(19): siRNA sense strand
agaagacgcugaagaucau

SEQ ID NO: 1793330 - RNA, 19 nt, Homo sapiens
  misc_RNA (1)...(19): siRNA sense strand
ucaccaagcugaucuuuug

SEQ ID NO: 1793331 - RNA, 19 nt, Homo sapiens
  misc_RNA (1)...(19): siRNA sense strand
gcagcuggccuacaucuuc

SEQ ID NO: 1793332 - RNA, 19 nt, Homo sapiens
  misc_RNA (1)...(19): siRNA sense strand
acacagugauguacuaugg

SEQ ID NO: 1793333 - RNA, 19 nt, Homo sapiens
  misc_RNA (1)...(19): siRNA sense strand
aacuucagcuucaucauaa

SEQ ID NO: 1793334 - RNA, 19 nt, Homo sapiens
  misc_RNA (1)...(19): siRNA sense strand
ccucuccuauuucaacuuu

SEQ ID NO: 1793335 - RNA, 19 nt, Homo sapiens
  misc_RNA (1)...(19): siRNA sense strand
gggaaggaagauuaugaua

SEQ ID NO: 1793336 - RNA, 19 nt, Homo sapiens
  misc_RNA (1)...(19): siRNA sense strand
ccaaguauuuccggaacaa

SEQ ID NO: 1793337 - RNA, 19 nt, Homo sapiens
  misc_RNA (1)...(19): siRNA sense strand
gggcaaagauaaaauguuc

SEQ ID NO: 1793338 - RNA, 19 nt, Homo sapiens
  misc_RNA (1)...(19): siRNA sense strand
gaugaccacgugaaugaaa

SEQ ID NO: 1793339 - RNA, 19 nt, Homo sapiens
  misc_RNA (1)...(19): siRNA sense strand
uaucggaaccucauuggaa

SEQ ID NO: 1793340 - RNA, 19 nt, Homo sapiens
  misc_RNA (1)...(19): siRNA sense strand
caaaaggaaugaccaaaag

SEQ ID NO: 1793341 - RNA, 19 nt, Homo sapiens
  misc_RNA (1)...(19): siRNA sense strand
gaucaguucaagaagguaa

SEQ ID NO: 1793342 - RNA, 19 nt, Homo sapiens
  misc_RNA (1)...(19): siRNA sense strand
ggaacaugauggcagucuu

SEQ ID NO: 1793343 - RNA, 19 nt, Homo sapiens
  misc_RNA (1)...(19): siRNA sense strand
cagaagacgcugaagauca

SEQ ID NO: 1793344 - RNA, 19 nt, Homo sapiens
  misc_RNA (1)...(19): siRNA sense strand
gcaaaaggaaugaccaaaa

SEQ ID NO: 1793345 - RNA, 19 nt, Homo sapiens
  misc_RNA (1)...(19): siRNA sense strand
gagaaucauugggaugcaa

SEQ ID NO: 1793346 - RNA, 19 nt, Homo sapiens
  misc_RNA (1)...(19): siRNA sense strand
ccgcuucucugccuacaug

SEQ ID NO: 1793347 - RNA, 19 nt, Homo sapiens
  misc_RNA (1)...(19): siRNA sense strand
guucaaggacagaaguuaa

SEQ ID NO: 1793348 - RNA, 19 nt, Homo sapiens
  misc_RNA (1)...(19): siRNA sense strand
ggcauucuuuguuacuauu

SEQ ID NO: 1793349 - RNA, 19 nt, Homo sapiens
  misc_RNA (1)...(19): siRNA sense strand
ccgaugaccacgugaauga

SEQ ID NO: 1793350 - RNA, 19 nt, Homo sapiens
  misc_RNA (1)...(19): siRNA sense strand
uaagggagaaccugucaga

SEQ ID NO: 1793351 - RNA, 19 nt, Homo sapiens
  misc_RNA (1)...(19): siRNA sense strand
gauaagggagaaccuguca

SEQ ID NO: 1793352 - RNA, 19 nt, Homo sapiens
  misc_RNA (1)...(19): siRNA sense strand
caauugcuguauucagugu

SEQ ID NO: 1793353 - RNA, 19 nt, Homo sapiens
  misc_RNA (1)...(19): siRNA sense strand
cugcugcccuuuauccaaa

SEQ ID NO: 1793354 - RNA, 19 nt, Homo sapiens
  misc_RNA (1)...(19): siRNA sense strand
ggauuggcaucuucuucug

SEQ ID NO: 1793355 - RNA, 19 nt, Homo sapiens
  misc_RNA (1)...(19): siRNA sense strand
uguguucucuuuagucaau

SEQ ID NO: 1793356 - RNA, 19 nt, Homo sapiens
  misc_RNA (1)...(19): siRNA sense strand
caucauacagguugagaau

SEQ ID NO: 1793357 - RNA, 19 nt, Homo sapiens
  misc_RNA (1)...(19): siRNA sense strand
cauagacacuccugguucu

SEQ ID NO: 1793358 - RNA, 19 nt, Homo sapiens
  misc_RNA (1)...(19): siRNA sense strand
cagcucacuuguucuggaa

SEQ ID NO: 1793359 - RNA, 19 nt, Homo sapiens
  misc_RNA (1)...(19): siRNA sense strand
gaucgacacccuaaguaca

SEQ ID NO: 1793360 - RNA, 19 nt, Homo sapiens
  misc_RNA (1)...(19): siRNA sense strand
gcacgaagucuacguucuc

SEQ ID NO: 1793361 - RNA, 19 nt, Homo sapiens
  misc_RNA (1)...(19): siRNA sense strand
ggcagaagacgcugaagau

SEQ ID NO: 1793362 - RNA, 19 nt, Homo sapiens
  misc_RNA (1)...(19): siRNA sense strand
guuacugccuuucguugug

SEQ ID NO: 1793363 - RNA, 19 nt, Homo sapiens
  misc_RNA (1)...(19): siRNA sense strand
cagcuggccuacaucuuca

SEQ ID NO: 1793364 - RNA, 19 nt, Homo sapiens
  misc_RNA (1)...(19): siRNA sense strand
ggaaugaccaaaaggguaa

SEQ ID NO: 1793365 - RNA, 19 nt, Homo sapiens
  misc_RNA (1)...(19): siRNA sense strand
cccuuuauccaaaugauua

SEQ ID NO: 1793366 - RNA, 19 nt, Homo sapiens
  misc_RNA (1)...(19): siRNA sense strand
guuguguccugcauuaauc

SEQ ID NO: 1793367 - RNA, 19 nt, Homo sapiens
  misc_RNA (1)...(19): siRNA sense strand
ucaagcaucaacaugguuu

SEQ ID NO: 1793368 - RNA, 19 nt, Homo sapiens
  misc_RNA (1)...(19): siRNA sense strand
ucauuaauccccacauuua

SEQ ID NO: 1793369 - RNA, 19 nt, Homo sapiens
  misc_RNA (1)...(19): siRNA sense strand
ggacacagugauguacuau

SEQ ID NO: 1793370 - RNA, 19 nt, Homo sapiens
  misc_RNA (1)...(19): siRNA sense strand
uaaugagggcaaagauaaa

SEQ ID NO: 1793371 - RNA, 19 nt, Homo sapiens
  misc_RNA (1)...(19): siRNA sense strand
caaacucugguguggauug

SEQ ID NO: 1793372 - RNA, 19 nt, Homo sapiens
  misc_RNA (1)...(19): siRNA sense strand
aaguuaaucgcaucccuua

SEQ ID NO: 1793373 - RNA, 19 nt, Homo sapiens
  misc_RNA (1)...(19): siRNA sense strand
caucauguucuacuccaaa

SEQ ID NO: 1793374 - RNA, 19 nt, Homo sapiens
  misc_RNA (1)...(19): siRNA sense strand
gguguggauuggcaucuuc

SEQ ID NO: 1793375 - RNA, 19 nt, Homo sapiens
  misc_RNA (1)...(19): siRNA sense strand
ggacaucuaccggcuccuu

SEQ ID NO: 1793376 - RNA, 19 nt, Homo sapiens
  misc_RNA (1)...(19): siRNA sense strand
uagaguuccugaagacaca

SEQ ID NO: 1793377 - RNA, 19 nt, Homo sapiens
  misc_RNA (1)...(19): siRNA sense strand
ucacugggguggguuauuu

SEQ ID NO: 1793378 - RNA, 19 nt, Homo sapiens
  misc_RNA (1)...(19): siRNA sense strand
ccaaggaccauggaagaga

SEQ ID NO: 1793379 - RNA, 19 nt, Homo sapiens
  misc_RNA (1)...(19): siRNA sense strand
agacacuccugguucuuca

SEQ ID NO: 1793380 - RNA, 19 nt, Homo sapiens
  misc_RNA (1)...(19): siRNA sense strand
ucuagaagaucaguucaag

SEQ ID NO: 1793381 - RNA, 19 nt, Homo sapiens
  misc_RNA (1)...(19): siRNA sense strand
ucacagaugaugacuuucu

SEQ ID NO: 1793382 - RNA, 19 nt, Homo sapiens
  misc_RNA (1)...(19): siRNA sense strand
gucaggagaauuccaaguu

SEQ ID NO: 1793383 - RNA, 19 nt, Homo sapiens
  misc_RNA (1)...(19): siRNA sense strand
gccuacaucuucacaaucg

SEQ ID NO: 1793384 - RNA, 19 nt, Homo sapiens
  misc_RNA (1)...(19): siRNA sense strand
aucauaaucccucaguuua

SEQ ID NO: 1793385 - RNA, 19 nt, Homo sapiens
  misc_RNA (1)...(19): siRNA sense strand
aaacagacccaucguaucc

SEQ ID NO: 1793386 - RNA, 19 nt, Homo sapiens
  misc_RNA (1)...(19): siRNA sense strand
caaacagacccaucguauc

SEQ ID NO: 1793387 - RNA, 19 nt, Homo sapiens
  misc_RNA (1)...(19): siRNA sense strand
ucagcauggccaaguauuu

SEQ ID NO: 1793388 - RNA, 19 nt, Homo sapiens
  misc_RNA (1)...(19): siRNA sense strand
aaucaucaccuaucuuuac

SEQ ID NO: 1793389 - RNA, 19 nt, Homo sapiens
  misc_RNA (1)...(19): siRNA sense strand
cacagaugaugacuuucuu

SEQ ID NO: 1793390 - RNA, 19 nt, Homo sapiens
  misc_RNA (1)...(19): siRNA sense strand
cuucaggaguuugacauug

SEQ ID NO: 1793391 - RNA, 19 nt, Homo sapiens
  misc_RNA (1)...(19): siRNA sense strand
caacgggucuaaagcaguu

SEQ ID NO: 1793392 - RNA, 19 nt, Homo sapiens
  misc_RNA (1)...(19): siRNA sense strand
uaaagcaguugcaagaaca

SEQ ID NO: 1793393 - RNA, 19 nt, Homo sapiens
  misc_RNA (1)...(19): siRNA sense strand
gagcaggacugggucaaca

SEQ ID NO: 1793394 - RNA, 19 nt, Homo sapiens
  misc_RNA (1)...(19): siRNA sense strand
cauggcagcccugaucuua

SEQ ID NO: 1793395 - RNA, 19 nt, Homo sapiens
  misc_RNA (1)...(19): siRNA sense strand
gaucuuaguagcagacaau

SEQ ID NO: 1793396 - RNA, 19 nt, Homo sapiens
  misc_RNA (1)...(19): siRNA sense strand
ggaaauugcaaccauccuu

SEQ ID NO: 1793397 - RNA, 19 nt, Homo sapiens
  misc_RNA (1)...(19): siRNA sense strand
agagcaaguuuaagaagga

SEQ ID NO: 1793398 - RNA, 19 nt, Homo sapiens
  misc_RNA (1)...(19): siRNA sense strand
gaagcccucuccagaacca

SEQ ID NO: 1793399 - RNA, 19 nt, Homo sapiens
  misc_RNA (1)...(19): siRNA sense strand
cuaaagcaguugcaagaac

SEQ ID NO: 1793400 - RNA, 19 nt, Homo sapiens
  misc_RNA (1)...(19): siRNA sense strand
gccaugaucugggacuuca

SEQ ID NO: 1793401 - RNA, 19 nt, Homo sapiens
  misc_RNA (1)...(19): siRNA sense strand
uggcagcccugaucuuagu

SEQ ID NO: 1793402 - RNA, 19 nt, Homo sapiens
  misc_RNA (1)...(19): siRNA sense strand
gcaagaacagcaaggaaaa

SEQ ID NO: 1793403 - RNA, 19 nt, Homo sapiens
  misc_RNA (1)...(19): siRNA sense strand
cuggagaugugaaagugaa

SEQ ID NO: 1793404 - RNA, 19 nt, Homo sapiens
  misc_RNA (1)...(19): siRNA sense strand
gaacagcaaggaaaaggaa

SEQ ID NO: 1793405 - RNA, 19 nt, Homo sapiens
  misc_RNA (1)...(19): siRNA sense strand
ccagggagcaggcaacaca

SEQ ID NO: 1793406 - RNA, 19 nt, Homo sapiens
  misc_RNA (1)...(19): siRNA sense strand
caggcagguuguuggguuu

SEQ ID NO: 1793407 - RNA, 19 nt, Homo sapiens
  misc_RNA (1)...(19): siRNA sense strand
cagguucacuccacuacca

SEQ ID NO: 1793408 - RNA, 19 nt, Homo sapiens
  misc_RNA (1)...(19): siRNA sense strand
ccagacaaagcaucaaaca

SEQ ID NO: 1793409 - RNA, 19 nt, Homo sapiens
  misc_RNA (1)...(19): siRNA sense strand
cccacugccucaccucauu

SEQ ID NO: 1793410 - RNA, 19 nt, Homo sapiens
  misc_RNA (1)...(19): siRNA sense strand
gucuaaagcaguugcaaga

SEQ ID NO: 1793411 - RNA, 19 nt, Homo sapiens
  misc_RNA (1)...(19): siRNA sense strand
ugcaagaacagcaaggaaa

SEQ ID NO: 1793412 - RNA, 19 nt, Homo sapiens
  misc_RNA (1)...(19): siRNA sense strand
caggaggaauagcaacagu

SEQ ID NO: 1793413 - RNA, 19 nt, Homo sapiens
  misc_RNA (1)...(19): siRNA sense strand
ugacuccuacauccucuuu

SEQ ID NO: 1793414 - RNA, 19 nt, Homo sapiens
  misc_RNA (1)...(19): siRNA sense strand
gcagucgugcuaccugugu

SEQ ID NO: 1793415 - RNA, 19 nt, Homo sapiens
  misc_RNA (1)...(19): siRNA sense strand
aaggaagcccucuccagaa

SEQ ID NO: 1793416 - RNA, 19 nt, Homo sapiens
  misc_RNA (1)...(19): siRNA sense strand
ggcuggaggacacccauuu

SEQ ID NO: 1793417 - RNA, 19 nt, Homo sapiens
  misc_RNA (1)...(19): siRNA sense strand
cgagagcaaguuuaagaag

SEQ ID NO: 1793418 - RNA, 19 nt, Homo sapiens
  misc_RNA (1)...(19): siRNA sense strand
cuaguggagaggucuauug

SEQ ID NO: 1793419 - RNA, 19 nt, Homo sapiens
  misc_RNA (1)...(19): siRNA sense strand
gcagguuguuggguuucga

SEQ ID NO: 1793420 - RNA, 19 nt, Homo sapiens
  misc_RNA (1)...(19): siRNA sense strand
uccacuaccaggaggaaua

SEQ ID NO: 1793421 - RNA, 19 nt, Homo sapiens
  misc_RNA (1)...(19): siRNA sense strand
gcagucaugccucaaaaga

SEQ ID NO: 1793422 - RNA, 19 nt, Homo sapiens
  misc_RNA (1)...(19): siRNA sense strand
aggaagcccucuccagaac

SEQ ID NO: 1793423 - RNA, 19 nt, Homo sapiens
  misc_RNA (1)...(19): siRNA sense strand
gcggcugcgucaacuacga

SEQ ID NO: 1793424 - RNA, 19 nt, Homo sapiens
  misc_RNA (1)...(19): siRNA sense strand
gcaagaggcuccuggauua

SEQ ID NO: 1793425 - RNA, 19 nt, Homo sapiens
  misc_RNA (1)...(19): siRNA sense strand
gaaggccucuggagucaaa

SEQ ID NO: 1793426 - RNA, 19 nt, Homo sapiens
  misc_RNA (1)...(19): siRNA sense strand
gaagucagccuuugaggaa

SEQ ID NO: 1793427 - RNA, 19 nt, Homo sapiens
  misc_RNA (1)...(19): siRNA sense strand
gggaagaaguccaagaaga

SEQ ID NO: 1793428 - RNA, 19 nt, Homo sapiens
  misc_RNA (1)...(19): siRNA sense strand
ggaagaaguccaagaagaa

SEQ ID NO: 1793429 - RNA, 19 nt, Homo sapiens
  misc_RNA (1)...(19): siRNA sense strand
aggaagaccugacugaauu

SEQ ID NO: 1793430 - RNA, 19 nt, Homo sapiens
  misc_RNA (1)...(19): siRNA sense strand
gcaaaugcgaaguguguaa

SEQ ID NO: 1793431 - RNA, 19 nt, Homo sapiens
  misc_RNA (1)...(19): siRNA sense strand
cgaaguguguaaauauguu

SEQ ID NO: 1793432 - RNA, 19 nt, Homo sapiens
  misc_RNA (1)...(19): siRNA sense strand
cgaagucacugagaccauu

SEQ ID NO: 1793433 - RNA, 19 nt, Homo sapiens
  misc_RNA (1)...(19): siRNA sense strand
gagggaagaaguccaagaa

SEQ ID NO: 1793434 - RNA, 19 nt, Homo sapiens
  misc_RNA (1)...(19): siRNA sense strand
gaggaagaccugacugaau

SEQ ID NO: 1793435 - RNA, 19 nt, Homo sapiens
  misc_RNA (1)...(19): siRNA sense strand
gugaugugcugguggaaga

SEQ ID NO: 1793436 - RNA, 19 nt, Homo sapiens
  misc_RNA (1)...(19): siRNA sense strand
ggagucaaauacaccaagu

SEQ ID NO: 1793437 - RNA, 19 nt, Homo sapiens
  misc_RNA (1)...(19): siRNA sense strand
gacauuacacaaccuggua

SEQ ID NO: 1793438 - RNA, 19 nt, Homo sapiens
  misc_RNA (1)...(19): siRNA sense strand
cagagaccuuugagacauu

SEQ ID NO: 1793439 - RNA, 19 nt, Homo sapiens
  misc_RNA (1)...(19): siRNA sense strand
ucacugagaccauuugcaa

SEQ ID NO: 1793440 - RNA, 19 nt, Homo sapiens
  misc_RNA (1)...(19): siRNA sense strand
ggacuugcgguuaaucgaa

SEQ ID NO: 1793441 - RNA, 19 nt, Homo sapiens
  misc_RNA (1)...(19): siRNA sense strand
ccuaugagcuguggaacga

SEQ ID NO: 1793442 - RNA, 19 nt, Homo sapiens
  misc_RNA (1)...(19): siRNA sense strand
ggagaggaccggcagcaau

SEQ ID NO: 1793443 - RNA, 19 nt, Homo sapiens
  misc_RNA (1)...(19): siRNA sense strand
gagcagugguccggcaaga

SEQ ID NO: 1793444 - RNA, 19 nt, Homo sapiens
  misc_RNA (1)...(19): siRNA sense strand
aaugcgaaguguguaaaua

SEQ ID NO: 1793445 - RNA, 19 nt, Homo sapiens
  misc_RNA (1)...(19): siRNA sense strand
cagcaaaugcgaagugugu

SEQ ID NO: 1793446 - RNA, 19 nt, Homo sapiens
  misc_RNA (1)...(19): siRNA sense strand
ucagagaccuuugagacau

SEQ ID NO: 1793447 - RNA, 19 nt, Homo sapiens
  misc_RNA (1)...(19): siRNA sense strand
gaagucacugagaccauuu

SEQ ID NO: 1793448 - RNA, 19 nt, Homo sapiens
  misc_RNA (1)...(19): siRNA sense strand
uggcugaccucaagaagca

SEQ ID NO: 1793449 - RNA, 19 nt, Homo sapiens
  misc_RNA (1)...(19): siRNA sense strand
agagaccuuugagacauua

SEQ ID NO: 1793450 - RNA, 19 nt, Homo sapiens
  misc_RNA (1)...(19): siRNA sense strand
gaagaaguccaagaagaag

SEQ ID NO: 1793451 - RNA, 19 nt, Homo sapiens
  misc_RNA (1)...(19): siRNA sense strand
ggaggaagaccugacugaa

SEQ ID NO: 1793452 - RNA, 19 nt, Homo sapiens
  misc_RNA (1)...(19): siRNA sense strand
gagaggaccggcagcaauc

SEQ ID NO: 1793453 - RNA, 19 nt, Homo sapiens
  misc_RNA (1)...(19): siRNA sense strand
ggaaccaccaggaggaaga

SEQ ID NO: 1793454 - RNA, 19 nt, Homo sapiens
  misc_RNA (1)...(19): siRNA sense strand
gccaagggcaugucagaga

SEQ ID NO: 1793455 - RNA, 19 nt, Homo sapiens
  misc_RNA (1)...(19): siRNA sense strand
caaaugcgaaguguguaaa

SEQ ID NO: 1793456 - RNA, 19 nt, Homo sapiens
  misc_RNA (1)...(19): siRNA sense strand
ucaagaagcagugugaugu

SEQ ID NO: 1793457 - RNA, 19 nt, Homo sapiens
  misc_RNA (1)...(19): siRNA sense strand
uacacaaccugguacacaa

SEQ ID NO: 1793458 - RNA, 19 nt, Homo sapiens
  misc_RNA (1)...(19): siRNA sense strand
gaaguguguaaauauguug

SEQ ID NO: 1793459 - RNA, 19 nt, Homo sapiens
  misc_RNA (1)...(19): siRNA sense strand
gcagugguccggcaagaag

SEQ ID NO: 1793460 - RNA, 19 nt, Homo sapiens
  misc_RNA (1)...(19): siRNA sense strand
gggcaugucagagaccuuu

SEQ ID NO: 1793461 - RNA, 19 nt, Homo sapiens
  misc_RNA (1)...(19): siRNA sense strand
ggagggaagaaguccaaga

SEQ ID NO: 1793462 - RNA, 19 nt, Homo sapiens
  misc_RNA (1)...(19): siRNA sense strand
gaccggcagcaaucgauuu

SEQ ID NO: 1793463 - RNA, 19 nt, Homo sapiens
  misc_RNA (1)...(19): siRNA sense strand
gcaugucagagaccuuuga

SEQ ID NO: 1793464 - RNA, 19 nt, Homo sapiens
  misc_RNA (1)...(19): siRNA sense strand
gcgaaguguguaaauaugu

SEQ ID NO: 1793465 - RNA, 19 nt, Homo sapiens
  misc_RNA (1)...(19): siRNA sense strand
ggaagaccugacugaauuc

SEQ ID NO: 1793466 - RNA, 19 nt, Homo sapiens
  misc_RNA (1)...(19): siRNA sense strand
aagaggcuccuggauuaua

SEQ ID NO: 1793467 - RNA, 19 nt, Homo sapiens
  misc_RNA (1)...(19): siRNA sense strand
caagaagcagugugaugug

SEQ ID NO: 1793468 - RNA, 19 nt, Homo sapiens
  misc_RNA (1)...(19): siRNA sense strand
auuauagccugcacaagga

SEQ ID NO: 1793469 - RNA, 19 nt, Homo sapiens
  misc_RNA (1)...(19): siRNA sense strand
ggaccggcagcaaucgauu

SEQ ID NO: 1793470 - RNA, 19 nt, Homo sapiens
  misc_RNA (1)...(19): siRNA sense strand
agaggcuccuggauuauag

SEQ ID NO: 1793471 - RNA, 19 nt, Homo sapiens
  misc_RNA (1)...(19): siRNA sense strand
aguagcagcagcaaacaaa

SEQ ID NO: 1793472 - RNA, 19 nt, Homo sapiens
  misc_RNA (1)...(19): siRNA sense strand
ugcaagaggcuccuggauu

SEQ ID NO: 1793473 - RNA, 19 nt, Homo sapiens
  misc_RNA (1)...(19): siRNA sense strand
ugcgaaguguguaaauaug

SEQ ID NO: 1793474 - RNA, 19 nt, Homo sapiens
  misc_RNA (1)...(19): siRNA sense strand
acacaaccugguacacaaa

SEQ ID NO: 1793475 - RNA, 19 nt, Homo sapiens
  misc_RNA (1)...(19): siRNA sense strand
caagaggcuccuggauuau

SEQ ID NO: 1793476 - RNA, 19 nt, Homo sapiens
  misc_RNA (1)...(19): siRNA sense strand
gcaagaccaaggaggugau

SEQ ID NO: 1793477 - RNA, 19 nt, Homo sapiens
  misc_RNA (1)...(19): siRNA sense strand
gcagcaaacaaaggaagga

SEQ ID NO: 1793478 - RNA, 19 nt, Homo sapiens
  misc_RNA (1)...(19): siRNA sense strand
acugagaccauuugcaaga

SEQ ID NO: 1793479 - RNA, 19 nt, Homo sapiens
  misc_RNA (1)...(19): siRNA sense strand
gaguagcagcagcaaacaa

SEQ ID NO: 1793480 - RNA, 19 nt, Homo sapiens
  misc_RNA (1)...(19): siRNA sense strand
gcgccaaccacgugcugaa

SEQ ID NO: 1793481 - RNA, 19 nt, Homo sapiens
  misc_RNA (1)...(19): siRNA sense strand
gcaguagcuuugagauuua

SEQ ID NO: 1793482 - RNA, 19 nt, Homo sapiens
  misc_RNA (1)...(19): siRNA sense strand
guucgucgcucuccucuuu

SEQ ID NO: 1793483 - RNA, 19 nt, Homo sapiens
  misc_RNA (1)...(19): siRNA sense strand
ggaucaagcuguuucugaa

SEQ ID NO: 1793484 - RNA, 19 nt, Homo sapiens
  misc_RNA (1)...(19): siRNA sense strand
ggacugcaguuuguacuug

SEQ ID NO: 1793485 - RNA, 19 nt, Homo sapiens
  misc_RNA (1)...(19): siRNA sense strand
ggccaaagcugaggagguu

SEQ ID NO: 1793486 - RNA, 19 nt, Homo sapiens
  misc_RNA (1)...(19): siRNA sense strand
gagugaaacugaccuaugg

SEQ ID NO: 1793487 - RNA, 19 nt, Homo sapiens
  misc_RNA (1)...(19): siRNA sense strand
ggacuuggacugcaguuug

SEQ ID NO: 1793488 - RNA, 19 nt, Homo sapiens
  misc_RNA (1)...(19): siRNA sense strand
gagcgucaauccagaguuc

SEQ ID NO: 1793489 - RNA, 19 nt, Homo sapiens
  misc_RNA (1)...(19): siRNA sense strand
gaugccaccucguugauug

SEQ ID NO: 1793490 - RNA, 19 nt, Homo sapiens
  misc_RNA (1)...(19): siRNA sense strand
gaccgaggcuccauuacug

SEQ ID NO: 1793491 - RNA, 19 nt, Homo sapiens
  misc_RNA (1)...(19): siRNA sense strand
gugcuggacuuuaucaaug

SEQ ID NO: 1793492 - RNA, 19 nt, Homo sapiens
  misc_RNA (1)...(19): siRNA sense strand
gaaacugaccuauggagau

SEQ ID NO: 1793493 - RNA, 19 nt, Homo sapiens
  misc_RNA (1)...(19): siRNA sense strand
gaguguggcuggaaacauc

SEQ ID NO: 1793494 - RNA, 19 nt, Homo sapiens
  misc_RNA (1)...(19): siRNA sense strand
aucaagaccucuccaagua

SEQ ID NO: 1793495 - RNA, 19 nt, Homo sapiens
  misc_RNA (1)...(19): siRNA sense strand
gaacgaguuuguggccuau

SEQ ID NO: 1793496 - RNA, 19 nt, Homo sapiens
  misc_RNA (1)...(19): siRNA sense strand
ccaagggucuggagaacau

SEQ ID NO: 1793497 - RNA, 19 nt, Homo sapiens
  misc_RNA (1)...(19): siRNA sense strand
aagcugaggagguuucuua

SEQ ID NO: 1793498 - RNA, 19 nt, Homo sapiens
  misc_RNA (1)...(19): siRNA sense strand
aaacugaccuauggagaug

SEQ ID NO: 1793499 - RNA, 19 nt, Homo sapiens
  misc_RNA (1)...(19): siRNA sense strand
gaggaaggagugaaacuga

SEQ ID NO: 1793500 - RNA, 19 nt, Homo sapiens
  misc_RNA (1)...(19): siRNA sense strand
gaagauugccuggcugaug

SEQ ID NO: 1793501 - RNA, 19 nt, Homo sapiens
  misc_RNA (1)...(19): siRNA sense strand
gaacagaaccaggauucau

SEQ ID NO: 1793502 - RNA, 19 nt, Homo sapiens
  misc_RNA (1)...(19): siRNA sense strand
agcaguagcuuugagauuu

SEQ ID NO: 1793503 - RNA, 19 nt, Homo sapiens
  misc_RNA (1)...(19): siRNA sense strand
caagaccucuccaaguaca

SEQ ID NO: 1793504 - RNA, 19 nt, Homo sapiens
  misc_RNA (1)...(19): siRNA sense strand
gcuggaaacaucuuuguga

SEQ ID NO: 1793505 - RNA, 19 nt, Homo sapiens
  misc_RNA (1)...(19): siRNA sense strand
ggagugaaacugaccuaug

SEQ ID NO: 1793506 - RNA, 19 nt, Homo sapiens
  misc_RNA (1)...(19): siRNA sense strand
gagcgacuucucccagaua

SEQ ID NO: 1793507 - RNA, 19 nt, Homo sapiens
  misc_RNA (1)...(19): siRNA sense strand
ccagaccgaggcuccauua

SEQ ID NO: 1793508 - RNA, 19 nt, Homo sapiens
  misc_RNA (1)...(19): siRNA sense strand
cugcugcucugguuuaaga

SEQ ID NO: 1793509 - RNA, 19 nt, Homo sapiens
  misc_RNA (1)...(19): siRNA sense strand
ggacuccucgucaucagaa

SEQ ID NO: 1793510 - RNA, 19 nt, Homo sapiens
  misc_RNA (1)...(19): siRNA sense strand
gggcugaaguugacugcau

SEQ ID NO: 1793511 - RNA, 19 nt, Homo sapiens
  misc_RNA (1)...(19): siRNA sense strand
gggaucaagcuguuucuga

SEQ ID NO: 1793512 - RNA, 19 nt, Homo sapiens
  misc_RNA (1)...(19): siRNA sense strand
gauugcagccucugugaug

SEQ ID NO: 1793513 - RNA, 19 nt, Homo sapiens
  misc_RNA (1)...(19): siRNA sense strand
cagaggcccuggacaacug

SEQ ID NO: 1793514 - RNA, 19 nt, Homo sapiens
  misc_RNA (1)...(19): siRNA sense strand
gaaguccucacgacguuug

SEQ ID NO: 1793515 - RNA, 19 nt, Homo sapiens
  misc_RNA (1)...(19): siRNA sense strand
uggcugugcuggacuuuau

SEQ ID NO: 1793516 - RNA, 19 nt, Homo sapiens
  misc_RNA (1)...(19): siRNA sense strand
gggagcacaugcagcuguu

SEQ ID NO: 1793517 - RNA, 19 nt, Homo sapiens
  misc_RNA (1)...(19): siRNA sense strand
gacuuggacugcaguuugu

SEQ ID NO: 1793518 - RNA, 19 nt, Homo sapiens
  misc_RNA (1)...(19): siRNA sense strand
gucuagcucuugcugcuuu

SEQ ID NO: 1793519 - RNA, 19 nt, Homo sapiens
  misc_RNA (1)...(19): siRNA sense strand
gaaguccacguugucauga

SEQ ID NO: 1793520 - RNA, 19 nt, Homo sapiens
  misc_RNA (1)...(19): siRNA sense strand
cagcucaucugcuccuaca

SEQ ID NO: 1793521 - RNA, 19 nt, Homo sapiens
  misc_RNA (1)...(19): siRNA sense strand
uggccugccuccuggauuu

SEQ ID NO: 1793522 - RNA, 19 nt, Homo sapiens
  misc_RNA (1)...(19): siRNA sense strand
gaagguggucgccaacauc

SEQ ID NO: 1793523 - RNA, 19 nt, Homo sapiens
  misc_RNA (1)...(19): siRNA sense strand
gagggaggaaggagugaaa

SEQ ID NO: 1793524 - RNA, 19 nt, Homo sapiens
  misc_RNA (1)...(19): siRNA sense strand
gcaugucccucuugaacac

SEQ ID NO: 1793525 - RNA, 19 nt, Homo sapiens
  misc_RNA (1)...(19): siRNA sense strand
ggagguuacgccaccauug

SEQ ID NO: 1793526 - RNA, 19 nt, Homo sapiens
  misc_RNA (1)...(19): siRNA sense strand
cagaacagaaccaggauuc

SEQ ID NO: 1793527 - RNA, 19 nt, Homo sapiens
  misc_RNA (1)...(19): siRNA sense strand
ugucauauccguucucuac

SEQ ID NO: 1793528 - RNA, 19 nt, Homo sapiens
  misc_RNA (1)...(19): siRNA sense strand
uggcagggauccucuacau

SEQ ID NO: 1793529 - RNA, 19 nt, Homo sapiens
  misc_RNA (1)...(19): siRNA sense strand
gaaggccagcucccuagga

SEQ ID NO: 1793530 - RNA, 19 nt, Homo sapiens
  misc_RNA (1)...(19): siRNA sense strand
gccuguagccuucuugaug

SEQ ID NO: 1793531 - RNA, 19 nt, Homo sapiens
  misc_RNA (1)...(19): siRNA sense strand
ugggugauccugaagauug

SEQ ID NO: 1793532 - RNA, 19 nt, Homo sapiens
  misc_RNA (1)...(19): siRNA sense strand
cagcaguagcuuugagauu

SEQ ID NO: 1793533 - RNA, 19 nt, Homo sapiens
  misc_RNA (1)...(19): siRNA sense strand
uaucaagaccucuccaagu

SEQ ID NO: 1793534 - RNA, 19 nt, Homo sapiens
  misc_RNA (1)...(19): siRNA sense strand
gcucaucugcuccuacauc

SEQ ID NO: 1793535 - RNA, 19 nt, Homo sapiens
  misc_RNA (1)...(19): siRNA sense strand
ugaagguggucgccaacau

SEQ ID NO: 1793536 - RNA, 19 nt, Homo sapiens
  misc_RNA (1)...(19): siRNA sense strand
gacaugacacucucugaag

SEQ ID NO: 1793537 - RNA, 19 nt, Homo sapiens
  misc_RNA (1)...(19): siRNA sense strand
gcuggucaaggaugucuuu

SEQ ID NO: 1793538 - RNA, 19 nt, Homo sapiens
  misc_RNA (1)...(19): siRNA sense strand
gacugcaugucccucuuga

SEQ ID NO: 1793539 - RNA, 19 nt, Homo sapiens
  misc_RNA (1)...(19): siRNA sense strand
cgacuucucccagauagug

SEQ ID NO: 1793540 - RNA, 19 nt, Homo sapiens
  misc_RNA (1)...(19): siRNA sense strand
cugaaguccucacgacguu

SEQ ID NO: 1793541 - RNA, 19 nt, Homo sapiens
  misc_RNA (1)...(19): siRNA sense strand
ucucugaaguccacguugu

SEQ ID NO: 1793542 - RNA, 19 nt, Homo sapiens
  misc_RNA (1)...(19): siRNA sense strand
agacaugacacucucugaa

SEQ ID NO: 1793543 - RNA, 19 nt, Homo sapiens
  misc_RNA (1)...(19): siRNA sense strand
gagcacaugcagcuguuuc

SEQ ID NO: 1793544 - RNA, 19 nt, Homo sapiens
  misc_RNA (1)...(19): siRNA sense strand
gcaguggaucuccgucaga

SEQ ID NO: 1793545 - RNA, 19 nt, Homo sapiens
  misc_RNA (1)...(19): siRNA sense strand
ggaggaaggagugaaacug

SEQ ID NO: 1793546 - RNA, 19 nt, Homo sapiens
  misc_RNA (1)...(19): siRNA sense strand
ugaaguccacguugucaug

SEQ ID NO: 1793547 - RNA, 19 nt, Homo sapiens
  misc_RNA (1)...(19): siRNA sense strand
gcucugcacugggcucucu

SEQ ID NO: 1793548 - RNA, 19 nt, Homo sapiens
  misc_RNA (1)...(19): siRNA sense strand
gcaacaggaagcaguggau

SEQ ID NO: 1793549 - RNA, 19 nt, Homo sapiens
  misc_RNA (1)...(19): siRNA sense strand
cuauggagaugcucagaac

SEQ ID NO: 1793550 - RNA, 19 nt, Homo sapiens
  misc_RNA (1)...(19): siRNA sense strand
gugccuacaucuccuuugg

SEQ ID NO: 1793551 - RNA, 19 nt, Homo sapiens
  misc_RNA (1)...(19): siRNA sense strand
acaugacacucucugaagu

SEQ ID NO: 1793552 - RNA, 19 nt, Homo sapiens
  misc_RNA (1)...(19): siRNA sense strand
cugaggagguuucuuaagc

SEQ ID NO: 1793553 - RNA, 19 nt, Homo sapiens
  misc_RNA (1)...(19): siRNA sense strand
cuacuuggcagacaugaca

SEQ ID NO: 1793554 - RNA, 19 nt, Homo sapiens
  misc_RNA (1)...(19): siRNA sense strand
cugagcaacugguguccuu

SEQ ID NO: 1793555 - RNA, 19 nt, Homo sapiens
  misc_RNA (1)...(19): siRNA sense strand
ggaucgaugccaccucguu

SEQ ID NO: 1793556 - RNA, 19 nt, Homo sapiens
  misc_RNA (1)...(19): siRNA sense strand
aacagaaccaggauucauu

SEQ ID NO: 1793557 - RNA, 19 nt, Homo sapiens
  misc_RNA (1)...(19): siRNA sense strand
ucauauccguucucuacca

SEQ ID NO: 1793558 - RNA, 19 nt, Homo sapiens
  misc_RNA (1)...(19): siRNA sense strand
acagaaccaggauucauug

SEQ ID NO: 1793559 - RNA, 19 nt, Homo sapiens
  misc_RNA (1)...(19): siRNA sense strand
ccaaagcugaggagguuuc

SEQ ID NO: 1793560 - RNA, 19 nt, Homo sapiens
  misc_RNA (1)...(19): siRNA sense strand
ucaagcuguuucugaacga

SEQ ID NO: 1793561 - RNA, 19 nt, Homo sapiens
  misc_RNA (1)...(19): siRNA sense strand
cagcagcaguagcuuugag

SEQ ID NO: 1793562 - RNA, 19 nt, Homo sapiens
  misc_RNA (1)...(19): siRNA sense strand
ugucuuugccuuucagguu

SEQ ID NO: 1793563 - RNA, 19 nt, Homo sapiens
  misc_RNA (1)...(19): siRNA sense strand
gaggaguccaaguuuagga

SEQ ID NO: 1793564 - RNA, 19 nt, Homo sapiens
  misc_RNA (1)...(19): siRNA sense strand
gcacaugcagcuguuucga

SEQ ID NO: 1793565 - RNA, 19 nt, Homo sapiens
  misc_RNA (1)...(19): siRNA sense strand
caggauucauugcguucga

SEQ ID NO: 1793566 - RNA, 19 nt, Homo sapiens
  misc_RNA (1)...(19): siRNA sense strand
ccucagcagcaguagcuuu

SEQ ID NO: 1793567 - RNA, 19 nt, Homo sapiens
  misc_RNA (1)...(19): siRNA sense strand
ugggagacaugguggacau

SEQ ID NO: 1793568 - RNA, 19 nt, Homo sapiens
  misc_RNA (1)...(19): siRNA sense strand
gagguuacgccaccauugc

SEQ ID NO: 1793569 - RNA, 19 nt, Homo sapiens
  misc_RNA (1)...(19): siRNA sense strand
ugcagugggugauccugaa

SEQ ID NO: 1793570 - RNA, 19 nt, Homo sapiens
  misc_RNA (1)...(19): siRNA sense strand
ggaugucuuugccuuucag

SEQ ID NO: 1793571 - RNA, 19 nt, Homo sapiens
  misc_RNA (1)...(19): siRNA sense strand
cgccugcugcucugguuua

SEQ ID NO: 1793572 - RNA, 19 nt, Homo sapiens
  misc_RNA (1)...(19): siRNA sense strand
gagaugcucagaaccucau

SEQ ID NO: 1793573 - RNA, 19 nt, Homo sapiens
  misc_RNA (1)...(19): siRNA sense strand
ggccaagggucuggagaac

SEQ ID NO: 1793574 - RNA, 19 nt, Homo sapiens
  misc_RNA (1)...(19): siRNA sense strand
gcucaugccuuauuuggua

SEQ ID NO: 1793575 - RNA, 19 nt, Homo sapiens
  misc_RNA (1)...(19): siRNA sense strand
gaacaguccucuucauugu

SEQ ID NO: 1793576 - RNA, 19 nt, Homo sapiens
  misc_RNA (1)...(19): siRNA sense strand
gcacucagcguauuuggua

SEQ ID NO: 1793577 - RNA, 19 nt, Homo sapiens
  misc_RNA (1)...(19): siRNA sense strand
gaauugaacucagaucaga

SEQ ID NO: 1793578 - RNA, 19 nt, Homo sapiens
  misc_RNA (1)...(19): siRNA sense strand
gaacugauaauccugcuuu

SEQ ID NO: 1793579 - RNA, 19 nt, Homo sapiens
  misc_RNA (1)...(19): siRNA sense strand
ggagggaccuucacaugga

SEQ ID NO: 1793580 - RNA, 19 nt, Homo sapiens
  misc_RNA (1)...(19): siRNA sense strand
gaagaugguggaacugaua

SEQ ID NO: 1793581 - RNA, 19 nt, Homo sapiens
  misc_RNA (1)...(19): siRNA sense strand
aaucaaaccuuacuucaga

SEQ ID NO: 1793582 - RNA, 19 nt, Homo sapiens
  misc_RNA (1)...(19): siRNA sense strand
cagaccagcucaugccuua

SEQ ID NO: 1793583 - RNA, 19 nt, Homo sapiens
  misc_RNA (1)...(19): siRNA sense strand
gcagagauauauuucuugu

SEQ ID NO: 1793584 - RNA, 19 nt, Homo sapiens
  misc_RNA (1)...(19): siRNA sense strand
ucaaauauauccuccacuu

SEQ ID NO: 1793585 - RNA, 19 nt, Homo sapiens
  misc_RNA (1)...(19): siRNA sense strand
ggaauuggagcucaaauau

SEQ ID NO: 1793586 - RNA, 19 nt, Homo sapiens
  misc_RNA (1)...(19): siRNA sense strand
ucaaaggacuccacugaug

SEQ ID NO: 1793587 - RNA, 19 nt, Homo sapiens
  misc_RNA (1)...(19): siRNA sense strand
acaguguccuccaguauua

SEQ ID NO: 1793588 - RNA, 19 nt, Homo sapiens
  misc_RNA (1)...(19): siRNA sense strand
gaauuggagcucaaauaua

SEQ ID NO: 1793589 - RNA, 19 nt, Homo sapiens
  misc_RNA (1)...(19): siRNA sense strand
caaugggacucguuuguga

SEQ ID NO: 1793590 - RNA, 19 nt, Homo sapiens
  misc_RNA (1)...(19): siRNA sense strand
ggaacaguccucuucauug

SEQ ID NO: 1793591 - RNA, 19 nt, Homo sapiens
  misc_RNA (1)...(19): siRNA sense strand
ggauaacugguauucuuua

SEQ ID NO: 1793592 - RNA, 19 nt, Homo sapiens
  misc_RNA (1)...(19): siRNA sense strand
gugcagagauauauuucuu

SEQ ID NO: 1793593 - RNA, 19 nt, Homo sapiens
  misc_RNA (1)...(19): siRNA sense strand
gguggaagauuaaauuucu

SEQ ID NO: 1793594 - RNA, 19 nt, Homo sapiens
  misc_RNA (1)...(19): siRNA sense strand
gguggaaucagcacuauuu

SEQ ID NO: 1793595 - RNA, 19 nt, Homo sapiens
  misc_RNA (1)...(19): siRNA sense strand
ucagaucgcucucagaaag

SEQ ID NO: 1793596 - RNA, 19 nt, Homo sapiens
  misc_RNA (1)...(19): siRNA sense strand
ccagauauauacuaaccaa

SEQ ID NO: 1793597 - RNA, 19 nt, Homo sapiens
  misc_RNA (1)...(19): siRNA sense strand
uguggaagaucuaaucaaa

SEQ ID NO: 1793598 - RNA, 19 nt, Homo sapiens
  misc_RNA (1)...(19): siRNA sense strand
gaaugagugugguguaugg

SEQ ID NO: 1793599 - RNA, 19 nt, Homo sapiens
  misc_RNA (1)...(19): siRNA sense strand
agacacaccuucuggacaa

SEQ ID NO: 1793600 - RNA, 19 nt, Homo sapiens
  misc_RNA (1)...(19): siRNA sense strand
gaucaugguggcuggauuu

SEQ ID NO: 1793601 - RNA, 19 nt, Homo sapiens
  misc_RNA (1)...(19): siRNA sense strand
gaacuuagaccccagauau

SEQ ID NO: 1793602 - RNA, 19 nt, Homo sapiens
  misc_RNA (1)...(19): siRNA sense strand
gcaagauuauccaggacuu

SEQ ID NO: 1793603 - RNA, 19 nt, Homo sapiens
  misc_RNA (1)...(19): siRNA sense strand
gaugguggaagauuaaauu

SEQ ID NO: 1793604 - RNA, 19 nt, Homo sapiens
  misc_RNA (1)...(19): siRNA sense strand
ggaaucagcacuauuuuaa

SEQ ID NO: 1793605 - RNA, 19 nt, Homo sapiens
  misc_RNA (1)...(19): siRNA sense strand
cuaugaugguggaagauua

SEQ ID NO: 1793606 - RNA, 19 nt, Homo sapiens
  misc_RNA (1)...(19): siRNA sense strand
gagagaacauugccauugc

SEQ ID NO: 1793607 - RNA, 19 nt, Homo sapiens
  misc_RNA (1)...(19): siRNA sense strand
cuacgaguauuuagaacuu

SEQ ID NO: 1793608 - RNA, 19 nt, Homo sapiens
  misc_RNA (1)...(19): siRNA sense strand
uaucauaucuguacuucag

SEQ ID NO: 1793609 - RNA, 19 nt, Homo sapiens
  misc_RNA (1)...(19): siRNA sense strand
gcaccuacaaugagacaaa

SEQ ID NO: 1793610 - RNA, 19 nt, Homo sapiens
  misc_RNA (1)...(19): siRNA sense strand
gaagaucuaaucaaaccuu

SEQ ID NO: 1793611 - RNA, 19 nt, Homo sapiens
  misc_RNA (1)...(19): siRNA sense strand
caaauguguucgucucugu

SEQ ID NO: 1793612 - RNA, 19 nt, Homo sapiens
  misc_RNA (1)...(19): siRNA sense strand
caacucaauuggagcacuu

SEQ ID NO: 1793613 - RNA, 19 nt, Homo sapiens
  misc_RNA (1)...(19): siRNA sense strand
ggaagaugguggaacugau

SEQ ID NO: 1793614 - RNA, 19 nt, Homo sapiens
  misc_RNA (1)...(19): siRNA sense strand
gaagaaaacagaacuuaga

SEQ ID NO: 1793615 - RNA, 19 nt, Homo sapiens
  misc_RNA (1)...(19): siRNA sense strand
uggacauucugcaagauua

SEQ ID NO: 1793616 - RNA, 19 nt, Homo sapiens
  misc_RNA (1)...(19): siRNA sense strand
cagcguauuugguaugguu

SEQ ID NO: 1793617 - RNA, 19 nt, Homo sapiens
  misc_RNA (1)...(19): siRNA sense strand
caucuacggugucaaccaa

SEQ ID NO: 1793618 - RNA, 19 nt, Homo sapiens
  misc_RNA (1)...(19): siRNA sense strand
guucaaaggacuccacuga

SEQ ID NO: 1793619 - RNA, 19 nt, Homo sapiens
  misc_RNA (1)...(19): siRNA sense strand
aaucccaggugcagagaua

SEQ ID NO: 1793620 - RNA, 19 nt, Homo sapiens
  misc_RNA (1)...(19): siRNA sense strand
cacaccuucuggacaauua

SEQ ID NO: 1793621 - RNA, 19 nt, Homo sapiens
  misc_RNA (1)...(19): siRNA sense strand
guaacagcaccuacaauga

SEQ ID NO: 1793622 - RNA, 19 nt, Homo sapiens
  misc_RNA (1)...(19): siRNA sense strand
gcacaguguccuccaguau

SEQ ID NO: 1793623 - RNA, 19 nt, Homo sapiens
  misc_RNA (1)...(19): siRNA sense strand
gaccagcucaugccuuauu

SEQ ID NO: 1793624 - RNA, 19 nt, Homo sapiens
  misc_RNA (1)...(19): siRNA sense strand
aaaggucucugucuuggau

SEQ ID NO: 1793625 - RNA, 19 nt, Homo sapiens
  misc_RNA (1)...(19): siRNA sense strand
gcaccuacgaguauuuaga

SEQ ID NO: 1793626 - RNA, 19 nt, Homo sapiens
  misc_RNA (1)...(19): siRNA sense strand
ccagguaccaugacuguga

SEQ ID NO: 1793627 - RNA, 19 nt, Homo sapiens
  misc_RNA (1)...(19): siRNA sense strand
ggauuugccauuucucuau

SEQ ID NO: 1793628 - RNA, 19 nt, Homo sapiens
  misc_RNA (1)...(19): siRNA sense strand
gauuacaaccacagaaaug

SEQ ID NO: 1793629 - RNA, 19 nt, Homo sapiens
  misc_RNA (1)...(19): siRNA sense strand
ggggauacuugucaguuua

SEQ ID NO: 1793630 - RNA, 19 nt, Homo sapiens
  misc_RNA (1)...(19): siRNA sense strand
acaauucuguauacuggaa

SEQ ID NO: 1793631 - RNA, 19 nt, Homo sapiens
  misc_RNA (1)...(19): siRNA sense strand
uaacagcaccuacaaugag

SEQ ID NO: 1793632 - RNA, 19 nt, Homo sapiens
  misc_RNA (1)...(19): siRNA sense strand
gauuugccauuucucuaug

SEQ ID NO: 1793633 - RNA, 19 nt, Homo sapiens
  misc_RNA (1)...(19): siRNA sense strand
cacacuggguggucuuaaa

SEQ ID NO: 1793634 - RNA, 19 nt, Homo sapiens
  misc_RNA (1)...(19): siRNA sense strand
ucaauuggagcacuuguug

SEQ ID NO: 1793635 - RNA, 19 nt, Homo sapiens
  misc_RNA (1)...(19): siRNA sense strand
gcgcuggcgucacuuaugg

SEQ ID NO: 1793636 - RNA, 19 nt, Homo sapiens
  misc_RNA (1)...(19): siRNA sense strand
ggagcccuguguauuggaa

SEQ ID NO: 1793637 - RNA, 19 nt, Homo sapiens
  misc_RNA (1)...(19): siRNA sense strand
caagguggaaucagcacua

SEQ ID NO: 1793638 - RNA, 19 nt, Homo sapiens
  misc_RNA (1)...(19): siRNA sense strand
caugguggcuggauuugca

SEQ ID NO: 1793639 - RNA, 19 nt, Homo sapiens
  misc_RNA (1)...(19): siRNA sense strand
ccucaccgcuagcuucaug

SEQ ID NO: 1793640 - RNA, 19 nt, Homo sapiens
  misc_RNA (1)...(19): siRNA sense strand
ccucacaugcucaguguuu

SEQ ID NO: 1793641 - RNA, 19 nt, Homo sapiens
  misc_RNA (1)...(19): siRNA sense strand
acaguccucuucauuguuc

SEQ ID NO: 1793642 - RNA, 19 nt, Homo sapiens
  misc_RNA (1)...(19): siRNA sense strand
ggacauucugcaagauuau

SEQ ID NO: 1793643 - RNA, 19 nt, Homo sapiens
  misc_RNA (1)...(19): siRNA sense strand
caaacaauucuguauacug

SEQ ID NO: 1793644 - RNA, 19 nt, Homo sapiens
  misc_RNA (1)...(19): siRNA sense strand
ccuacaaugagacaaauuu

SEQ ID NO: 1793645 - RNA, 19 nt, Homo sapiens
  misc_RNA (1)...(19): siRNA sense strand
ugagagaacauugccauug

SEQ ID NO: 1793646 - RNA, 19 nt, Homo sapiens
  misc_RNA (1)...(19): siRNA sense strand
uuaugggccuguucgcuuu

SEQ ID NO: 1793647 - RNA, 19 nt, Homo sapiens
  misc_RNA (1)...(19): siRNA sense strand
guauggagcccuguguauu

SEQ ID NO: 1793648 - RNA, 19 nt, Homo sapiens
  misc_RNA (1)...(19): siRNA sense strand
ggaucaugguggcuggauu

SEQ ID NO: 1793649 - RNA, 19 nt, Homo sapiens
  misc_RNA (1)...(19): siRNA sense strand
gcaaugggacucguuugug

SEQ ID NO: 1793650 - RNA, 19 nt, Homo sapiens
  misc_RNA (1)...(19): siRNA sense strand
cagcaccuacgaguauuua

SEQ ID NO: 1793651 - RNA, 19 nt, Homo sapiens
  misc_RNA (1)...(19): siRNA sense strand
uggaauuggagcucaaaua

SEQ ID NO: 1793652 - RNA, 19 nt, Homo sapiens
  misc_RNA (1)...(19): siRNA sense strand
gcaaaacugucucucuaca

SEQ ID NO: 1793653 - RNA, 19 nt, Homo sapiens
  misc_RNA (1)...(19): siRNA sense strand
ucacauggaccagcaucua

SEQ ID NO: 1793654 - RNA, 19 nt, Homo sapiens
  misc_RNA (1)...(19): siRNA sense strand
acauugaauugaacucaga

SEQ ID NO: 1793655 - RNA, 19 nt, Homo sapiens
  misc_RNA (1)...(19): siRNA sense strand
auggauaacugguauucuu

SEQ ID NO: 1793656 - RNA, 19 nt, Homo sapiens
  misc_RNA (1)...(19): siRNA sense strand
uauggagcccuguguauug

SEQ ID NO: 1793657 - RNA, 19 nt, Homo sapiens
  misc_RNA (1)...(19): siRNA sense strand
caggugcagagauauauuu

SEQ ID NO: 1793658 - RNA, 19 nt, Homo sapiens
  misc_RNA (1)...(19): siRNA sense strand
uaugaugguggaagauuaa

SEQ ID NO: 1793659 - RNA, 19 nt, Homo sapiens
  misc_RNA (1)...(19): siRNA sense strand
caaccacauugaauugaac

SEQ ID NO: 1793660 - RNA, 19 nt, Homo sapiens
  misc_RNA (1)...(19): siRNA sense strand
gaucuaaucaaaccuuacu

SEQ ID NO: 1793661 - RNA, 19 nt, Homo sapiens
  misc_RNA (1)...(19): siRNA sense strand
ggaacuuugguaacauuau

SEQ ID NO: 1793662 - RNA, 19 nt, Homo sapiens
  misc_RNA (1)...(19): siRNA sense strand
ucagcacuguuggaacuuu

SEQ ID NO: 1793663 - RNA, 19 nt, Homo sapiens
  misc_RNA (1)...(19): siRNA sense strand
ccuguucgcuuugggcauu

SEQ ID NO: 1793664 - RNA, 19 nt, Homo sapiens
  misc_RNA (1)...(19): siRNA sense strand
ggaaugagugugguguaug

SEQ ID NO: 1793665 - RNA, 19 nt, Homo sapiens
  misc_RNA (1)...(19): siRNA sense strand
gaaaggucucugucuugga

SEQ ID NO: 1793666 - RNA, 19 nt, Homo sapiens
  misc_RNA (1)...(19): siRNA sense strand
aauccuaacccuuugcaaa

SEQ ID NO: 1793667 - RNA, 19 nt, Homo sapiens
  misc_RNA (1)...(19): siRNA sense strand
cagcacuguuggaacuuug

SEQ ID NO: 1793668 - RNA, 19 nt, Homo sapiens
  misc_RNA (1)...(19): siRNA sense strand
gcuuacagugggacauuaa

SEQ ID NO: 1793669 - RNA, 19 nt, Homo sapiens
  misc_RNA (1)...(19): siRNA sense strand
uaccagcaccuacgaguau

SEQ ID NO: 1793670 - RNA, 19 nt, Homo sapiens
  misc_RNA (1)...(19): siRNA sense strand
caccuacgaguauuuagaa

SEQ ID NO: 1793671 - RNA, 19 nt, Homo sapiens
  misc_RNA (1)...(19): siRNA sense strand
cuucagaucgcucucagaa

SEQ ID NO: 1793672 - RNA, 19 nt, Homo sapiens
  misc_RNA (1)...(19): siRNA sense strand
gaccccagauauauacuaa

SEQ ID NO: 1793673 - RNA, 19 nt, Homo sapiens
  misc_RNA (1)...(19): siRNA sense strand
caaauauauccuccacuuc

SEQ ID NO: 1793674 - RNA, 19 nt, Homo sapiens
  misc_RNA (1)...(19): siRNA sense strand
gaaacgauagcaucucuga

SEQ ID NO: 1793675 - RNA, 19 nt, Homo sapiens
  misc_RNA (1)...(19): siRNA sense strand
ggacugugcucacuuccau

SEQ ID NO: 1793676 - RNA, 19 nt, Homo sapiens
  misc_RNA (1)...(19): siRNA sense strand
aagcugagguggaggguuu

SEQ ID NO: 1793677 - RNA, 19 nt, Homo sapiens
  misc_RNA (1)...(19): siRNA sense strand
ccagggaggagcagaauuu

SEQ ID NO: 1793678 - RNA, 19 nt, Homo sapiens
  misc_RNA (1)...(19): siRNA sense strand
ggcagcagcuuggaagaaa

SEQ ID NO: 1793679 - RNA, 19 nt, Homo sapiens
  misc_RNA (1)...(19): siRNA sense strand
gaacagauuuuagcaacuu

SEQ ID NO: 1793680 - RNA, 19 nt, Homo sapiens
  misc_RNA (1)...(19): siRNA sense strand
gggccgaggcugagaagua

SEQ ID NO: 1793681 - RNA, 19 nt, Homo sapiens
  misc_RNA (1)...(19): siRNA sense strand
ggaagaaacgauagcaucu

SEQ ID NO: 1793682 - RNA, 19 nt, Homo sapiens
  misc_RNA (1)...(19): siRNA sense strand
uggcuacucucaacaacaa

SEQ ID NO: 1793683 - RNA, 19 nt, Homo sapiens
  misc_RNA (1)...(19): siRNA sense strand
gauagcaucucugaaagcu

SEQ ID NO: 1793684 - RNA, 19 nt, Homo sapiens
  misc_RNA (1)...(19): siRNA sense strand
cgaggacugugcucacuuc

SEQ ID NO: 1793685 - RNA, 19 nt, Homo sapiens
  misc_RNA (1)...(19): siRNA sense strand
caaacacuguggcggagau

SEQ ID NO: 1793686 - RNA, 19 nt, Homo sapiens
  misc_RNA (1)...(19): siRNA sense strand
cagcuuggaagaaacgaua

SEQ ID NO: 1793687 - RNA, 19 nt, Homo sapiens
  misc_RNA (1)...(19): siRNA sense strand
caacuucaccucaaacacu

SEQ ID NO: 1793688 - RNA, 19 nt, Homo sapiens
  misc_RNA (1)...(19): siRNA sense strand
ugcaagaccugaagaaacu

SEQ ID NO: 1793689 - RNA, 19 nt, Homo sapiens
  misc_RNA (1)...(19): siRNA sense strand
aacgauagcaucucugaaa

SEQ ID NO: 1793690 - RNA, 19 nt, Homo sapiens
  misc_RNA (1)...(19): siRNA sense strand
ccagguggcuacucucaac

SEQ ID NO: 1793691 - RNA, 19 nt, Homo sapiens
  misc_RNA (1)...(19): siRNA sense strand
caucaucugugugguugga

SEQ ID NO: 1793692 - RNA, 19 nt, Homo sapiens
  misc_RNA (1)...(19): siRNA sense strand
aagaaacgauagcaucucu

SEQ ID NO: 1793693 - RNA, 19 nt, Homo sapiens
  misc_RNA (1)...(19): siRNA sense strand
uuagcaacuucaccucaaa

SEQ ID NO: 1793694 - RNA, 19 nt, Homo sapiens
  misc_RNA (1)...(19): siRNA sense strand
ggucaucaucugugugguu

SEQ ID NO: 1793695 - RNA, 19 nt, Homo sapiens
  misc_RNA (1)...(19): siRNA sense strand
gaaguggguggauggaaca

SEQ ID NO: 1793696 - RNA, 19 nt, Homo sapiens
  misc_RNA (1)...(19): siRNA sense strand
gcagaauuuuguccagaaa

SEQ ID NO: 1793697 - RNA, 19 nt, Homo sapiens
  misc_RNA (1)...(19): siRNA sense strand
gcggagauccaggcacuga

SEQ ID NO: 1793698 - RNA, 19 nt, Homo sapiens
  misc_RNA (1)...(19): siRNA sense strand
ggccgaggcugagaaguac

SEQ ID NO: 1793699 - RNA, 19 nt, Homo sapiens
  misc_RNA (1)...(19): siRNA sense strand
gggcagcagcuuggaagaa

SEQ ID NO: 1793700 - RNA, 19 nt, Homo sapiens
  misc_RNA (1)...(19): siRNA sense strand
ccagacggcagguggaaug

SEQ ID NO: 1793701 - RNA, 19 nt, Homo sapiens
  misc_RNA (1)...(19): siRNA sense strand
gaagaaacgauagcaucuc

SEQ ID NO: 1793702 - RNA, 19 nt, Homo sapiens
  misc_RNA (1)...(19): siRNA sense strand
ggugcaagaccugaagaaa

SEQ ID NO: 1793703 - RNA, 19 nt, Homo sapiens
  misc_RNA (1)...(19): siRNA sense strand
caagaccugaagaaacuga

SEQ ID NO: 1793704 - RNA, 19 nt, Homo sapiens
  misc_RNA (1)...(19): siRNA sense strand
gugcaagaccugaagaaac

SEQ ID NO: 1793705 - RNA, 19 nt, Homo sapiens
  misc_RNA (1)...(19): siRNA sense strand
gcgaccggcuuccagaacu

SEQ ID NO: 1793706 - RNA, 19 nt, Homo sapiens
  misc_RNA (1)...(19): siRNA sense strand
gaaguacugccagcugaag

SEQ ID NO: 1793707 - RNA, 19 nt, Homo sapiens
  misc_RNA (1)...(19): siRNA sense strand
uuuagcaacuucaccucaa

SEQ ID NO: 1793708 - RNA, 19 nt, Homo sapiens
  misc_RNA (1)...(19): siRNA sense strand
ucaucugugugguuggauu

SEQ ID NO: 1793709 - RNA, 19 nt, Homo sapiens
  misc_RNA (1)...(19): siRNA sense strand
gcagcagcuuggaagaaac

SEQ ID NO: 1793710 - RNA, 19 nt, Homo sapiens
  misc_RNA (1)...(19): siRNA sense strand
gggaggagcagaauuuugu

SEQ ID NO: 1793711 - RNA, 19 nt, Homo sapiens
  misc_RNA (1)...(19): siRNA sense strand
cgaccggcuuccagaacug

SEQ ID NO: 1793712 - RNA, 19 nt, Homo sapiens
  misc_RNA (1)...(19): siRNA sense strand
gaaacgauagcaucucuga

SEQ ID NO: 1793713 - RNA, 19 nt, Homo sapiens
  misc_RNA (1)...(19): siRNA sense strand
ggacugugcucacuuccau

SEQ ID NO: 1793714 - RNA, 19 nt, Homo sapiens
  misc_RNA (1)...(19): siRNA sense strand
aagcugagguggaggguuu

SEQ ID NO: 1793715 - RNA, 19 nt, Homo sapiens
  misc_RNA (1)...(19): siRNA sense strand
ccagggaggagcagaauuu

SEQ ID NO: 1793716 - RNA, 19 nt, Homo sapiens
  misc_RNA (1)...(19): siRNA sense strand
ggcagcagcuuggaagaaa

SEQ ID NO: 1793717 - RNA, 19 nt, Homo sapiens
  misc_RNA (1)...(19): siRNA sense strand
gaacagauuuuagcaacuu

SEQ ID NO: 1793718 - RNA, 19 nt, Homo sapiens
  misc_RNA (1)...(19): siRNA sense strand
gggccgaggcugagaagua

SEQ ID NO: 1793719 - RNA, 19 nt, Homo sapiens
  misc_RNA (1)...(19): siRNA sense strand
ggaagaaacgauagcaucu

SEQ ID NO: 1793720 - RNA, 19 nt, Homo sapiens
  misc_RNA (1)...(19): siRNA sense strand
uggcuacucucaacaacaa

SEQ ID NO: 1793721 - RNA, 19 nt, Homo sapiens
  misc_RNA (1)...(19): siRNA sense strand
gauagcaucucugaaagcu

SEQ ID NO: 1793722 - RNA, 19 nt, Homo sapiens
  misc_RNA (1)...(19): siRNA sense strand
cgaggacugugcucacuuc

SEQ ID NO: 1793723 - RNA, 19 nt, Homo sapiens
  misc_RNA (1)...(19): siRNA sense strand
caaacacuguggcggagau

SEQ ID NO: 1793724 - RNA, 19 nt, Homo sapiens
  misc_RNA (1)...(19): siRNA sense strand
cagcuuggaagaaacgaua

SEQ ID NO: 1793725 - RNA, 19 nt, Homo sapiens
  misc_RNA (1)...(19): siRNA sense strand
caacuucaccucaaacacu

SEQ ID NO: 1793726 - RNA, 19 nt, Homo sapiens
  misc_RNA (1)...(19): siRNA sense strand
ugcaagaccugaagaaacu

SEQ ID NO: 1793727 - RNA, 19 nt, Homo sapiens
  misc_RNA (1)...(19): siRNA sense strand
aacgauagcaucucugaaa

SEQ ID NO: 1793728 - RNA, 19 nt, Homo sapiens
  misc_RNA (1)...(19): siRNA sense strand
ccagguggcuacucucaac

SEQ ID NO: 1793729 - RNA, 19 nt, Homo sapiens
  misc_RNA (1)...(19): siRNA sense strand
caucaucugugugguugga

SEQ ID NO: 1793730 - RNA, 19 nt, Homo sapiens
  misc_RNA (1)...(19): siRNA sense strand
aagaaacgauagcaucucu

SEQ ID NO: 1793731 - RNA, 19 nt, Homo sapiens
  misc_RNA (1)...(19): siRNA sense strand
uuagcaacuucaccucaaa

SEQ ID NO: 1793732 - RNA, 19 nt, Homo sapiens
  misc_RNA (1)...(19): siRNA sense strand
ggucaucaucugugugguu

SEQ ID NO: 1793733 - RNA, 19 nt, Homo sapiens
  misc_RNA (1)...(19): siRNA sense strand
gaaguggguggauggaaca

SEQ ID NO: 1793734 - RNA, 19 nt, Homo sapiens
  misc_RNA (1)...(19): siRNA sense strand
gcagaauuuuguccagaaa

SEQ ID NO: 1793735 - RNA, 19 nt, Homo sapiens
  misc_RNA (1)...(19): siRNA sense strand
gcggagauccaggcacuga

SEQ ID NO: 1793736 - RNA, 19 nt, Homo sapiens
  misc_RNA (1)...(19): siRNA sense strand
ggccgaggcugagaaguac

SEQ ID NO: 1793737 - RNA, 19 nt, Homo sapiens
  misc_RNA (1)...(19): siRNA sense strand
gggcagcagcuuggaagaa

SEQ ID NO: 1793738 - RNA, 19 nt, Homo sapiens
  misc_RNA (1)...(19): siRNA sense strand
ccagacggcagguggaaug

SEQ ID NO: 1793739 - RNA, 19 nt, Homo sapiens
  misc_RNA (1)...(19): siRNA sense strand
gaagaaacgauagcaucuc

SEQ ID NO: 1793740 - RNA, 19 nt, Homo sapiens
  misc_RNA (1)...(19): siRNA sense strand
ggugcaagaccugaagaaa

SEQ ID NO: 1793741 - RNA, 19 nt, Homo sapiens
  misc_RNA (1)...(19): siRNA sense strand
caagaccugaagaaacuga

SEQ ID NO: 1793742 - RNA, 19 nt, Homo sapiens
  misc_RNA (1)...(19): siRNA sense strand
gugcaagaccugaagaaac

SEQ ID NO: 1793743 - RNA, 19 nt, Homo sapiens
  misc_RNA (1)...(19): siRNA sense strand
gcgaccggcuuccagaacu

SEQ ID NO: 1793744 - RNA, 19 nt, Homo sapiens
  misc_RNA (1)...(19): siRNA sense strand
gaaguacugccagcugaag

SEQ ID NO: 1793745 - RNA, 19 nt, Homo sapiens
  misc_RNA (1)...(19): siRNA sense strand
uuuagcaacuucaccucaa

SEQ ID NO: 1793746 - RNA, 19 nt, Homo sapiens
  misc_RNA (1)...(19): siRNA sense strand
ucaucugugugguuggauu

SEQ ID NO: 1793747 - RNA, 19 nt, Homo sapiens
  misc_RNA (1)...(19): siRNA sense strand
gcagcagcuuggaagaaac

SEQ ID NO: 1793748 - RNA, 19 nt, Homo sapiens
  misc_RNA (1)...(19): siRNA sense strand
gggaggagcagaauuuugu

SEQ ID NO: 1793749 - RNA, 19 nt, Homo sapiens
  misc_RNA (1)...(19): siRNA sense strand
cgaccggcuuccagaacug

SEQ ID NO: 1793750 - RNA, 19 nt, Homo sapiens
  misc_RNA (1)...(19): siRNA sense strand
ggucauagcugcucucauc

SEQ ID NO: 1793751 - RNA, 19 nt, Homo sapiens
  misc_RNA (1)...(19): siRNA sense strand
ccaugacgcugcagacuaa

SEQ ID NO: 1793752 - RNA, 19 nt, Homo sapiens
  misc_RNA (1)...(19): siRNA sense strand
ucugagaaaugguuugaaa

SEQ ID NO: 1793753 - RNA, 19 nt, Homo sapiens
  misc_RNA (1)...(19): siRNA sense strand
gagaaaugguuugaaaucu

SEQ ID NO: 1793754 - RNA, 19 nt, Homo sapiens
  misc_RNA (1)...(19): siRNA sense strand
cggaagccaugccuggaua

SEQ ID NO: 1793755 - RNA, 19 nt, Homo sapiens
  misc_RNA (1)...(19): siRNA sense strand
gccagaaccucacggacuu

SEQ ID NO: 1793756 - RNA, 19 nt, Homo sapiens
  misc_RNA (1)...(19): siRNA sense strand
caucagaucaucaccauca

SEQ ID NO: 1793757 - RNA, 19 nt, Homo sapiens
  misc_RNA (1)...(19): siRNA sense strand
ccacagagacugaguucau

SEQ ID NO: 1793758 - RNA, 19 nt, Homo sapiens
  misc_RNA (1)...(19): siRNA sense strand
gaaaccgacccuccucuuc

SEQ ID NO: 1793759 - RNA, 19 nt, Homo sapiens
  misc_RNA (1)...(19): siRNA sense strand
gcucucaucacaacucuug

SEQ ID NO: 1793760 - RNA, 19 nt, Homo sapiens
  misc_RNA (1)...(19): siRNA sense strand
cuacaaacacggaagacaa

SEQ ID NO: 1793761 - RNA, 19 nt, Homo sapiens
  misc_RNA (1)...(19): siRNA sense strand
ggauacugauagccauguu

SEQ ID NO: 1793762 - RNA, 19 nt, Homo sapiens
  misc_RNA (1)...(19): siRNA sense strand
ugagaaaugguuugaaauc

SEQ ID NO: 1793763 - RNA, 19 nt, Homo sapiens
  misc_RNA (1)...(19): siRNA sense strand
agccaugccuggauacuga

SEQ ID NO: 1793764 - RNA, 19 nt, Homo sapiens
  misc_RNA (1)...(19): siRNA sense strand
agaaaugguuugaaaucuc

SEQ ID NO: 1793765 - RNA, 19 nt, Homo sapiens
  misc_RNA (1)...(19): siRNA sense strand
ggaaaccgacccuccucuu

SEQ ID NO: 1793766 - RNA, 19 nt, Homo sapiens
  misc_RNA (1)...(19): siRNA sense strand
cauagcugcucucaucaca

SEQ ID NO: 1793767 - RNA, 19 nt, Homo sapiens
  misc_RNA (1)...(19): siRNA sense strand
ggacauauucacggccuau

SEQ ID NO: 1793768 - RNA, 19 nt, Homo sapiens
  misc_RNA (1)...(19): siRNA sense strand
gggaguacaaauccacauu

SEQ ID NO: 1793769 - RNA, 19 nt, Homo sapiens
  misc_RNA (1)...(19): siRNA sense strand
gauacugauagccauguuu

SEQ ID NO: 1793770 - RNA, 19 nt, Homo sapiens
  misc_RNA (1)...(19): siRNA sense strand
uagcugcucucaucacaac

SEQ ID NO: 1793771 - RNA, 19 nt, Homo sapiens
  misc_RNA (1)...(19): siRNA sense strand
aaacacggaagacaacugu

SEQ ID NO: 1793772 - RNA, 19 nt, Homo sapiens
  misc_RNA (1)...(19): siRNA sense strand
acgagacccugcaguguuc

SEQ ID NO: 1793773 - RNA, 19 nt, Homo sapiens
  misc_RNA (1)...(19): siRNA sense strand
uaacgagacccugcagugu

SEQ ID NO: 1793774 - RNA, 19 nt, Homo sapiens
  misc_RNA (1)...(19): siRNA sense strand
acauauucacggccuauaa

SEQ ID NO: 1793775 - RNA, 19 nt, Homo sapiens
  misc_RNA (1)...(19): siRNA sense strand
cacagagacugaguucauc

SEQ ID NO: 1793776 - RNA, 19 nt, Homo sapiens
  misc_RNA (1)...(19): siRNA sense strand
gggacggucucagcagcuu

SEQ ID NO: 1793777 - RNA, 19 nt, Homo sapiens
  misc_RNA (1)...(19): siRNA sense strand
caccgucucccucaucaug

SEQ ID NO: 1793778 - RNA, 19 nt, Homo sapiens
  misc_RNA (1)...(19): siRNA sense strand
cgacccuccucuucugauc

SEQ ID NO: 1793779 - RNA, 19 nt, Homo sapiens
  misc_RNA (1)...(19): siRNA sense strand
caacagcuuuuaggacuca

SEQ ID NO: 1793780 - RNA, 19 nt, Homo sapiens
  misc_RNA (1)...(19): siRNA sense strand
cuucgugucugagaaaugg

SEQ ID NO: 1793781 - RNA, 19 nt, Homo sapiens
  misc_RNA (1)...(19): siRNA sense strand
aaaccgacccuccucuucu

SEQ ID NO: 1793782 - RNA, 19 nt, Homo sapiens
  misc_RNA (1)...(19): siRNA sense strand
gacauauucacggccuaua

SEQ ID NO: 1793783 - RNA, 19 nt, Homo sapiens
  misc_RNA (1)...(19): siRNA sense strand
cagcagccuggacauauuc

SEQ ID NO: 1793784 - RNA, 19 nt, Homo sapiens
  misc_RNA (1)...(19): siRNA sense strand
cuucugaucggcaucuuau

SEQ ID NO: 1793785 - RNA, 19 nt, Homo sapiens
  misc_RNA (1)...(19): siRNA sense strand
ggccuucgugucugagaaa

SEQ ID NO: 1793786 - RNA, 19 nt, Homo sapiens
  misc_RNA (1)...(19): siRNA sense strand
ucugaucggcaucuuauuc

SEQ ID NO: 1793787 - RNA, 19 nt, Homo sapiens
  misc_RNA (1)...(19): siRNA sense strand
gaaagagggucugaaguuu

SEQ ID NO: 1793788 - RNA, 19 nt, Homo sapiens
  misc_RNA (1)...(19): siRNA sense strand
ggaaagagggucugaaguu

SEQ ID NO: 1793789 - RNA, 19 nt, Homo sapiens
  misc_RNA (1)...(19): siRNA sense strand
caaggugucugaugaugaa

SEQ ID NO: 1793790 - RNA, 19 nt, Homo sapiens
  misc_RNA (1)...(19): siRNA sense strand
gcagccagccgguggauua

SEQ ID NO: 1793791 - RNA, 19 nt, Homo sapiens
  misc_RNA (1)...(19): siRNA sense strand
ggacuuggccuucguggau

SEQ ID NO: 1793792 - RNA, 19 nt, Homo sapiens
  misc_RNA (1)...(19): siRNA sense strand
aagagggucugaaguuuga

SEQ ID NO: 1793793 - RNA, 19 nt, Homo sapiens
  misc_RNA (1)...(19): siRNA sense strand
ggucugaaguuugagaaug

SEQ ID NO: 1793794 - RNA, 19 nt, Homo sapiens
  misc_RNA (1)...(19): siRNA sense strand
gccgguggauuacuucauu

SEQ ID NO: 1793795 - RNA, 19 nt, Homo sapiens
  misc_RNA (1)...(19): siRNA sense strand
gcauucaucugcguauugu

SEQ ID NO: 1793796 - RNA, 19 nt, Homo sapiens
  misc_RNA (1)...(19): siRNA sense strand
ccacacaccacuaccugua

SEQ ID NO: 1793797 - RNA, 19 nt, Homo sapiens
  misc_RNA (1)...(19): siRNA sense strand
ggugucugaugaugaauau

SEQ ID NO: 1793798 - RNA, 19 nt, Homo sapiens
  misc_RNA (1)...(19): siRNA sense strand
guggauuacuucauucuca

SEQ ID NO: 1793799 - RNA, 19 nt, Homo sapiens
  misc_RNA (1)...(19): siRNA sense strand
caccaucacucguuucuac

SEQ ID NO: 1793800 - RNA, 19 nt, Homo sapiens
  misc_RNA (1)...(19): siRNA sense strand
ugagggcgcucucugaucu

SEQ ID NO: 1793801 - RNA, 19 nt, Homo sapiens
  misc_RNA (1)...(19): siRNA sense strand
gcggaacccaggcguuuaa

SEQ ID NO: 1793802 - RNA, 19 nt, Homo sapiens
  misc_RNA (1)...(19): siRNA sense strand
cgacugcaguaccucaaug

SEQ ID NO: 1793803 - RNA, 19 nt, Homo sapiens
  misc_RNA (1)...(19): siRNA sense strand
ggacaugcucuaccucaag

SEQ ID NO: 1793804 - RNA, 19 nt, Homo sapiens
  misc_RNA (1)...(19): siRNA sense strand
ucagcaccaucacucguuu

SEQ ID NO: 1793805 - RNA, 19 nt, Homo sapiens
  misc_RNA (1)...(19): siRNA sense strand
cccgagaaguggauguauu

SEQ ID NO: 1793806 - RNA, 19 nt, Homo sapiens
  misc_RNA (1)...(19): siRNA sense strand
cugcagcucaucaagguua

SEQ ID NO: 1793807 - RNA, 19 nt, Homo sapiens
  misc_RNA (1)...(19): siRNA sense strand
gccagccgguggauuacuu

SEQ ID NO: 1793808 - RNA, 19 nt, Homo sapiens
  misc_RNA (1)...(19): siRNA sense strand
aaagagggucugaaguuug

SEQ ID NO: 1793809 - RNA, 19 nt, Homo sapiens
  misc_RNA (1)...(19): siRNA sense strand
ugcagaaggugaacaacga

SEQ ID NO: 1793810 - RNA, 19 nt, Homo sapiens
  misc_RNA (1)...(19): siRNA sense strand
gcccagaaccugccacagu

SEQ ID NO: 1793811 - RNA, 19 nt, Homo sapiens
  misc_RNA (1)...(19): siRNA sense strand
uguucaaggugucugauga

SEQ ID NO: 1793812 - RNA, 19 nt, Homo sapiens
  misc_RNA (1)...(19): siRNA sense strand
ucaaggugucugaugauga

SEQ ID NO: 1793813 - RNA, 19 nt, Homo sapiens
  misc_RNA (1)...(19): siRNA sense strand
ucucugaucugcagcucau

SEQ ID NO: 1793814 - RNA, 19 nt, Homo sapiens
  misc_RNA (1)...(19): siRNA sense strand
ccgagaaguggauguauuc

SEQ ID NO: 1793815 - RNA, 19 nt, Homo sapiens
  misc_RNA (1)...(19): siRNA sense strand
aaguggagaucgggaaaga

SEQ ID NO: 1793816 - RNA, 19 nt, Homo sapiens
  misc_RNA (1)...(19): siRNA sense strand
gcagggcaggguugaagug

SEQ ID NO: 1793817 - RNA, 19 nt, Homo sapiens
  misc_RNA (1)...(19): siRNA sense strand
ucugaagacuaccgagaca

SEQ ID NO: 1793818 - RNA, 19 nt, Homo sapiens
  misc_RNA (1)...(19): siRNA sense strand
gagugucggcccuaacugu

SEQ ID NO: 1793819 - RNA, 19 nt, Homo sapiens
  misc_RNA (1)...(19): siRNA sense strand
gucugaaguuugagaaugg

SEQ ID NO: 1793820 - RNA, 19 nt, Homo sapiens
  misc_RNA (1)...(19): siRNA sense strand
ccaggugacggcacgcauu

SEQ ID NO: 1793821 - RNA, 19 nt, Homo sapiens
  misc_RNA (1)...(19): siRNA sense strand
ugaaguggagaucgggaaa

SEQ ID NO: 1793822 - RNA, 19 nt, Homo sapiens
  misc_RNA (1)...(19): siRNA sense strand
uauggagugucggcccuaa

SEQ ID NO: 1793823 - RNA, 19 nt, Homo sapiens
  misc_RNA (1)...(19): siRNA sense strand
gggaaagagggucugaagu

SEQ ID NO: 1793824 - RNA, 19 nt, Homo sapiens
  misc_RNA (1)...(19): siRNA sense strand
ggcggaacccaggcguuua

SEQ ID NO: 1793825 - RNA, 19 nt, Homo sapiens
  misc_RNA (1)...(19): siRNA sense strand
caaccauccgcuccacuuc

SEQ ID NO: 1793826 - RNA, 19 nt, Homo sapiens
  misc_RNA (1)...(19): siRNA sense strand
gcaggaagcauauaaauga

SEQ ID NO: 1793827 - RNA, 19 nt, Homo sapiens
  misc_RNA (1)...(19): siRNA sense strand
gaaaguggaaugagcaauu

SEQ ID NO: 1793828 - RNA, 19 nt, Homo sapiens
  misc_RNA (1)...(19): siRNA sense strand
gaagagugcaggaagcaua

SEQ ID NO: 1793829 - RNA, 19 nt, Homo sapiens
  misc_RNA (1)...(19): siRNA sense strand
ggaggagaguuaugacuug

SEQ ID NO: 1793830 - RNA, 19 nt, Homo sapiens
  misc_RNA (1)...(19): siRNA sense strand
ggacaacucaagaaacgua

SEQ ID NO: 1793831 - RNA, 19 nt, Homo sapiens
  misc_RNA (1)...(19): siRNA sense strand
gcuuagaacugccaacaga

SEQ ID NO: 1793832 - RNA, 19 nt, Homo sapiens
  misc_RNA (1)...(19): siRNA sense strand
gaagaggacaacucaagaa

SEQ ID NO: 1793833 - RNA, 19 nt, Homo sapiens
  misc_RNA (1)...(19): siRNA sense strand
gcacuuacauaugagaaau

SEQ ID NO: 1793834 - RNA, 19 nt, Homo sapiens
  misc_RNA (1)...(19): siRNA sense strand
caacagacucuuuggagaa

SEQ ID NO: 1793835 - RNA, 19 nt, Homo sapiens
  misc_RNA (1)...(19): siRNA sense strand
aggcagagcuggaggaguu

SEQ ID NO: 1793836 - RNA, 19 nt, Homo sapiens
  misc_RNA (1)...(19): siRNA sense strand
cagguucucuucuccguaa

SEQ ID NO: 1793837 - RNA, 19 nt, Homo sapiens
  misc_RNA (1)...(19): siRNA sense strand
aaaguggaaugagcaauuu

SEQ ID NO: 1793838 - RNA, 19 nt, Homo sapiens
  misc_RNA (1)...(19): siRNA sense strand
cagagaagacugaagguaa

SEQ ID NO: 1793839 - RNA, 19 nt, Homo sapiens
  misc_RNA (1)...(19): siRNA sense strand
cagugcagaugauguuuaa

SEQ ID NO: 1793840 - RNA, 19 nt, Homo sapiens
  misc_RNA (1)...(19): siRNA sense strand
gccaucagcuuauuuaaaa

SEQ ID NO: 1793841 - RNA, 19 nt, Homo sapiens
  misc_RNA (1)...(19): siRNA sense strand
gaaugucaacugagaagaa

SEQ ID NO: 1793842 - RNA, 19 nt, Homo sapiens
  misc_RNA (1)...(19): siRNA sense strand
auacaaagacggagauauu

SEQ ID NO: 1793843 - RNA, 19 nt, Homo sapiens
  misc_RNA (1)...(19): siRNA sense strand
ucaccgagguuuccaguca

SEQ ID NO: 1793844 - RNA, 19 nt, Homo sapiens
  misc_RNA (1)...(19): siRNA sense strand
gaggacaacucaagaaacg

SEQ ID NO: 1793845 - RNA, 19 nt, Homo sapiens
  misc_RNA (1)...(19): siRNA sense strand
guuaugacuuggagccuuu

SEQ ID NO: 1793846 - RNA, 19 nt, Homo sapiens
  misc_RNA (1)...(19): siRNA sense strand
ggaagaggacaacucaaga

SEQ ID NO: 1793847 - RNA, 19 nt, Homo sapiens
  misc_RNA (1)...(19): siRNA sense strand
cuucgaagauuaggaauga

SEQ ID NO: 1793848 - RNA, 19 nt, Homo sapiens
  misc_RNA (1)...(19): siRNA sense strand
gcagagaagacugaaggua

SEQ ID NO: 1793849 - RNA, 19 nt, Homo sapiens
  misc_RNA (1)...(19): siRNA sense strand
gaagacugaagguaagauu

SEQ ID NO: 1793850 - RNA, 19 nt, Homo sapiens
  misc_RNA (1)...(19): siRNA sense strand
aaagaauacugucagaagu

SEQ ID NO: 1793851 - RNA, 19 nt, Homo sapiens
  misc_RNA (1)...(19): siRNA sense strand
uaggaaugaucgaugcuuu

SEQ ID NO: 1793852 - RNA, 19 nt, Homo sapiens
  misc_RNA (1)...(19): siRNA sense strand
ggaguuguccuuugcugaa

SEQ ID NO: 1793853 - RNA, 19 nt, Homo sapiens
  misc_RNA (1)...(19): siRNA sense strand
uaaagaauacugucagaag

SEQ ID NO: 1793854 - RNA, 19 nt, Homo sapiens
  misc_RNA (1)...(19): siRNA sense strand
uucaaagccuggacaaauu

SEQ ID NO: 1793855 - RNA, 19 nt, Homo sapiens
  misc_RNA (1)...(19): siRNA sense strand
gaagcuaaguuuaaaaugg

SEQ ID NO: 1793856 - RNA, 19 nt, Homo sapiens
  misc_RNA (1)...(19): siRNA sense strand
gagcugagcauggucauuc

SEQ ID NO: 1793857 - RNA, 19 nt, Homo sapiens
  misc_RNA (1)...(19): siRNA sense strand
gcagaauggagccaagauu

SEQ ID NO: 1793858 - RNA, 19 nt, Homo sapiens
  misc_RNA (1)...(19): siRNA sense strand
acucaguacuugcuuagaa

SEQ ID NO: 1793859 - RNA, 19 nt, Homo sapiens
  misc_RNA (1)...(19): siRNA sense strand
caaagcugguccuugugaa

SEQ ID NO: 1793860 - RNA, 19 nt, Homo sapiens
  misc_RNA (1)...(19): siRNA sense strand
cccaggcacuuuguuuaua

SEQ ID NO: 1793861 - RNA, 19 nt, Homo sapiens
  misc_RNA (1)...(19): siRNA sense strand
gagaaaagacgugugauuu

SEQ ID NO: 1793862 - RNA, 19 nt, Homo sapiens
  misc_RNA (1)...(19): siRNA sense strand
ggagauauucaccgagguu

SEQ ID NO: 1793863 - RNA, 19 nt, Homo sapiens
  misc_RNA (1)...(19): siRNA sense strand
gaucgaugcuuuugacgaa

SEQ ID NO: 1793864 - RNA, 19 nt, Homo sapiens
  misc_RNA (1)...(19): siRNA sense strand
gccuuuccuucgaagauua

SEQ ID NO: 1793865 - RNA, 19 nt, Homo sapiens
  misc_RNA (1)...(19): siRNA sense strand
uaaagcuggaggagaguua

SEQ ID NO: 1793866 - RNA, 19 nt, Homo sapiens
  misc_RNA (1)...(19): siRNA sense strand
ggaaugcucuuuaaaacca

SEQ ID NO: 1793867 - RNA, 19 nt, Homo sapiens
  misc_RNA (1)...(19): siRNA sense strand
gaugaccucugugaagcaa

SEQ ID NO: 1793868 - RNA, 19 nt, Homo sapiens
  misc_RNA (1)...(19): siRNA sense strand
guauucuucucucccauga

SEQ ID NO: 1793869 - RNA, 19 nt, Homo sapiens
  misc_RNA (1)...(19): siRNA sense strand
gcagaugauguuuaaggaa

SEQ ID NO: 1793870 - RNA, 19 nt, Homo sapiens
  misc_RNA (1)...(19): siRNA sense strand
caaggggaaugcucuuuaa

SEQ ID NO: 1793871 - RNA, 19 nt, Homo sapiens
  misc_RNA (1)...(19): siRNA sense strand
ggcacucaguacuugcuua

SEQ ID NO: 1793872 - RNA, 19 nt, Homo sapiens
  misc_RNA (1)...(19): siRNA sense strand
ugauuuccuuccagacuuu

SEQ ID NO: 1793873 - RNA, 19 nt, Homo sapiens
  misc_RNA (1)...(19): siRNA sense strand
ucagugaaguuaacagaac

SEQ ID NO: 1793874 - RNA, 19 nt, Homo sapiens
  misc_RNA (1)...(19): siRNA sense strand
gagaagaaugugccucugu

SEQ ID NO: 1793875 - RNA, 19 nt, Homo sapiens
  misc_RNA (1)...(19): siRNA sense strand
ggagcugcccuauguggaa

SEQ ID NO: 1793876 - RNA, 19 nt, Homo sapiens
  misc_RNA (1)...(19): siRNA sense strand
gaaugagcaauuugacaga

SEQ ID NO: 1793877 - RNA, 19 nt, Homo sapiens
  misc_RNA (1)...(19): siRNA sense strand
agagaagacugaagguaag

SEQ ID NO: 1793878 - RNA, 19 nt, Homo sapiens
  misc_RNA (1)...(19): siRNA sense strand
aaagacgugugauuuccuu

SEQ ID NO: 1793879 - RNA, 19 nt, Homo sapiens
  misc_RNA (1)...(19): siRNA sense strand
gggaagaggacaacucaag

SEQ ID NO: 1793880 - RNA, 19 nt, Homo sapiens
  misc_RNA (1)...(19): siRNA sense strand
ccaggcacuuuguuuauac

SEQ ID NO: 1793881 - RNA, 19 nt, Homo sapiens
  misc_RNA (1)...(19): siRNA sense strand
ugaccucugugaagcaaau

SEQ ID NO: 1793882 - RNA, 19 nt, Homo sapiens
  misc_RNA (1)...(19): siRNA sense strand
caacucaagaaacguauuc

SEQ ID NO: 1793883 - RNA, 19 nt, Homo sapiens
  misc_RNA (1)...(19): siRNA sense strand
gugauuuccuuccagacuu

SEQ ID NO: 1793884 - RNA, 19 nt, Homo sapiens
  misc_RNA (1)...(19): siRNA sense strand
ucuggaaugucaacugaga

SEQ ID NO: 1793885 - RNA, 19 nt, Homo sapiens
  misc_RNA (1)...(19): siRNA sense strand
gagugcaggaagcauauaa

SEQ ID NO: 1793886 - RNA, 19 nt, Homo sapiens
  misc_RNA (1)...(19): siRNA sense strand
ggacaaauucagaaaaguu

SEQ ID NO: 1793887 - RNA, 19 nt, Homo sapiens
  misc_RNA (1)...(19): siRNA sense strand
gcagaccacccuuuucuuu

SEQ ID NO: 1793888 - RNA, 19 nt, Homo sapiens
  misc_RNA (1)...(19): siRNA sense strand
agaauacugucagaaguuc

SEQ ID NO: 1793889 - RNA, 19 nt, Homo sapiens
  misc_RNA (1)...(19): siRNA sense strand
guuuaaggaagcuaaguuu

SEQ ID NO: 1793890 - RNA, 19 nt, Homo sapiens
  misc_RNA (1)...(19): siRNA sense strand
gcaauuugacagaaaguac

SEQ ID NO: 1793891 - RNA, 19 nt, Homo sapiens
  misc_RNA (1)...(19): siRNA sense strand
uuucuggaaugucaacuga

SEQ ID NO: 1793892 - RNA, 19 nt, Homo sapiens
  misc_RNA (1)...(19): siRNA sense strand
gcacucaguacuugcuuag

SEQ ID NO: 1793893 - RNA, 19 nt, Homo sapiens
  misc_RNA (1)...(19): siRNA sense strand
agacagugcagaugauguu

SEQ ID NO: 1793894 - RNA, 19 nt, Homo sapiens
  misc_RNA (1)...(19): siRNA sense strand
cuuccagacuuuaaagaau

SEQ ID NO: 1793895 - RNA, 19 nt, Homo sapiens
  misc_RNA (1)...(19): siRNA sense strand
aacagacucuuuggagaaa

SEQ ID NO: 1793896 - RNA, 19 nt, Homo sapiens
  misc_RNA (1)...(19): siRNA sense strand
ggagaaaagacgugugauu

SEQ ID NO: 1793897 - RNA, 19 nt, Homo sapiens
  misc_RNA (1)...(19): siRNA sense strand
ccaacugcaucuuguucug

SEQ ID NO: 1793898 - RNA, 19 nt, Homo sapiens
  misc_RNA (1)...(19): siRNA sense strand
ugaagcaaauggcacuuuu

SEQ ID NO: 1793899 - RNA, 19 nt, Homo sapiens
  misc_RNA (1)...(19): siRNA sense strand
uguccaagguugcccacaa

SEQ ID NO: 1793900 - RNA, 19 nt, Homo sapiens
  misc_RNA (1)...(19): siRNA sense strand
gucccaggcacuuuguuua

SEQ ID NO: 1793901 - RNA, 19 nt, Homo sapiens
  misc_RNA (1)...(19): siRNA sense strand
agacugaagguaagauuuc

SEQ ID NO: 1793902 - RNA, 19 nt, Homo sapiens
  misc_RNA (1)...(19): siRNA sense strand
gugcaggaagcauauaaau

SEQ ID NO: 1793903 - RNA, 19 nt, Homo sapiens
  misc_RNA (1)...(19): siRNA sense strand
aagaauacugucagaaguu

SEQ ID NO: 1793904 - RNA, 19 nt, Homo sapiens
  misc_RNA (1)...(19): siRNA sense strand
ucaaagccuggacaaauuc

SEQ ID NO: 1793905 - RNA, 19 nt, Homo sapiens
  misc_RNA (1)...(19): siRNA sense strand
uccuggagcugcccuaugu

SEQ ID NO: 1793906 - RNA, 19 nt, Homo sapiens
  misc_RNA (1)...(19): siRNA sense strand
acagugcagaugauguuua

SEQ ID NO: 1793907 - RNA, 19 nt, Homo sapiens
  misc_RNA (1)...(19): siRNA sense strand
gagaagacugaagguaaga

SEQ ID NO: 1793908 - RNA, 19 nt, Homo sapiens
  misc_RNA (1)...(19): siRNA sense strand
cgaagccaaggcagacuuu

SEQ ID NO: 1793909 - RNA, 19 nt, Homo sapiens
  misc_RNA (1)...(19): siRNA sense strand
aagaggagcugagcauggu

SEQ ID NO: 1793910 - RNA, 19 nt, Homo sapiens
  misc_RNA (1)...(19): siRNA sense strand
gcacugcagcccagauguc

SEQ ID NO: 1793911 - RNA, 19 nt, Homo sapiens
  misc_RNA (1)...(19): siRNA sense strand
aaugagcaauuugacagaa

SEQ ID NO: 1793912 - RNA, 19 nt, Homo sapiens
  misc_RNA (1)...(19): siRNA sense strand
acaaagacggagauauuca

SEQ ID NO: 1793913 - RNA, 19 nt, Homo sapiens
  misc_RNA (1)...(19): siRNA sense strand
gagauauucaccgagguuu

SEQ ID NO: 1793914 - RNA, 19 nt, Homo sapiens
  misc_RNA (1)...(19): siRNA sense strand
ugagcaauuugacagaaag

SEQ ID NO: 1793915 - RNA, 19 nt, Homo sapiens
  misc_RNA (1)...(19): siRNA sense strand
aagaggacaacucaagaaa

SEQ ID NO: 1793916 - RNA, 19 nt, Homo sapiens
  misc_RNA (1)...(19): siRNA sense strand
gagccuuuccuucgaagau

SEQ ID NO: 1793917 - RNA, 19 nt, Homo sapiens
  misc_RNA (1)...(19): siRNA sense strand
aaugucaacugagaagaau

SEQ ID NO: 1793918 - RNA, 19 nt, Homo sapiens
  misc_RNA (1)...(19): siRNA sense strand
agaaugugccucuguccaa

SEQ ID NO: 1793919 - RNA, 19 nt, Homo sapiens
  misc_RNA (1)...(19): siRNA sense strand
ugccaucagcuuauuuaaa

SEQ ID NO: 1793920 - RNA, 19 nt, Homo sapiens
  misc_RNA (1)...(19): siRNA sense strand
ugcagaugauguuuaagga

SEQ ID NO: 1793921 - RNA, 19 nt, Homo sapiens
  misc_RNA (1)...(19): siRNA sense strand
gugcagaugauguuuaagg

SEQ ID NO: 1793922 - RNA, 19 nt, Homo sapiens
  misc_RNA (1)...(19): siRNA sense strand
ugacuuggagccuuuccuu

SEQ ID NO: 1793923 - RNA, 19 nt, Homo sapiens
  misc_RNA (1)...(19): siRNA sense strand
guccaagguugcccacaag

SEQ ID NO: 1793924 - RNA, 19 nt, Homo sapiens
  misc_RNA (1)...(19): siRNA sense strand
gguuuccagucacuucuca

SEQ ID NO: 1793925 - RNA, 19 nt, Homo sapiens
  misc_RNA (1)...(19): siRNA sense strand
gugaagcaaauggcacuuu

SEQ ID NO: 1793926 - RNA, 19 nt, Homo sapiens
  misc_RNA (1)...(19): siRNA sense strand
gcaggaagcauauaaauga

SEQ ID NO: 1793927 - RNA, 19 nt, Homo sapiens
  misc_RNA (1)...(19): siRNA sense strand
gaaaguggaaugagcaauu

SEQ ID NO: 1793928 - RNA, 19 nt, Homo sapiens
  misc_RNA (1)...(19): siRNA sense strand
gaagagugcaggaagcaua

SEQ ID NO: 1793929 - RNA, 19 nt, Homo sapiens
  misc_RNA (1)...(19): siRNA sense strand
ggaggagaguuaugacuug

SEQ ID NO: 1793930 - RNA, 19 nt, Homo sapiens
  misc_RNA (1)...(19): siRNA sense strand
ggacaacucaagaaacgua

SEQ ID NO: 1793931 - RNA, 19 nt, Homo sapiens
  misc_RNA (1)...(19): siRNA sense strand
gcuuagaacugccaacaga

SEQ ID NO: 1793932 - RNA, 19 nt, Homo sapiens
  misc_RNA (1)...(19): siRNA sense strand
gaagaggacaacucaagaa

SEQ ID NO: 1793933 - RNA, 19 nt, Homo sapiens
  misc_RNA (1)...(19): siRNA sense strand
gcacuuacauaugagaaau

SEQ ID NO: 1793934 - RNA, 19 nt, Homo sapiens
  misc_RNA (1)...(19): siRNA sense strand
caacagacucuuuggagaa

SEQ ID NO: 1793935 - RNA, 19 nt, Homo sapiens
  misc_RNA (1)...(19): siRNA sense strand
aggcagagcuggaggaguu

SEQ ID NO: 1793936 - RNA, 19 nt, Homo sapiens
  misc_RNA (1)...(19): siRNA sense strand
cagguucucuucuccguaa

SEQ ID NO: 1793937 - RNA, 19 nt, Homo sapiens
  misc_RNA (1)...(19): siRNA sense strand
aaaguggaaugagcaauuu

SEQ ID NO: 1793938 - RNA, 19 nt, Homo sapiens
  misc_RNA (1)...(19): siRNA sense strand
cagagaagacugaagguaa

SEQ ID NO: 1793939 - RNA, 19 nt, Homo sapiens
  misc_RNA (1)...(19): siRNA sense strand
cagugcagaugauguuuaa

SEQ ID NO: 1793940 - RNA, 19 nt, Homo sapiens
  misc_RNA (1)...(19): siRNA sense strand
gccaucagcuuauuuaaaa

SEQ ID NO: 1793941 - RNA, 19 nt, Homo sapiens
  misc_RNA (1)...(19): siRNA sense strand
gaaugucaacugagaagaa

SEQ ID NO: 1793942 - RNA, 19 nt, Homo sapiens
  misc_RNA (1)...(19): siRNA sense strand
auacaaagacggagauauu

SEQ ID NO: 1793943 - RNA, 19 nt, Homo sapiens
  misc_RNA (1)...(19): siRNA sense strand
ucaccgagguuuccaguca

SEQ ID NO: 1793944 - RNA, 19 nt, Homo sapiens
  misc_RNA (1)...(19): siRNA sense strand
gaggacaacucaagaaacg

SEQ ID NO: 1793945 - RNA, 19 nt, Homo sapiens
  misc_RNA (1)...(19): siRNA sense strand
guuaugacuuggagccuuu

SEQ ID NO: 1793946 - RNA, 19 nt, Homo sapiens
  misc_RNA (1)...(19): siRNA sense strand
ggaagaggacaacucaaga

SEQ ID NO: 1793947 - RNA, 19 nt, Homo sapiens
  misc_RNA (1)...(19): siRNA sense strand
cuucgaagauuaggaauga

SEQ ID NO: 1793948 - RNA, 19 nt, Homo sapiens
  misc_RNA (1)...(19): siRNA sense strand
gcagagaagacugaaggua

SEQ ID NO: 1793949 - RNA, 19 nt, Homo sapiens
  misc_RNA (1)...(19): siRNA sense strand
gaagacugaagguaagauu

SEQ ID NO: 1793950 - RNA, 19 nt, Homo sapiens
  misc_RNA (1)...(19): siRNA sense strand
aaagaauacugucagaagu

SEQ ID NO: 1793951 - RNA, 19 nt, Homo sapiens
  misc_RNA (1)...(19): siRNA sense strand
uaggaaugaucgaugcuuu

SEQ ID NO: 1793952 - RNA, 19 nt, Homo sapiens
  misc_RNA (1)...(19): siRNA sense strand
ggaguuguccuuugcugaa

SEQ ID NO: 1793953 - RNA, 19 nt, Homo sapiens
  misc_RNA (1)...(19): siRNA sense strand
uaaagaauacugucagaag

SEQ ID NO: 1793954 - RNA, 19 nt, Homo sapiens
  misc_RNA (1)...(19): siRNA sense strand
uucaaagccuggacaaauu

SEQ ID NO: 1793955 - RNA, 19 nt, Homo sapiens
  misc_RNA (1)...(19): siRNA sense strand
gaagcuaaguuuaaaaugg

SEQ ID NO: 1793956 - RNA, 19 nt, Homo sapiens
  misc_RNA (1)...(19): siRNA sense strand
gagcugagcauggucauuc

SEQ ID NO: 1793957 - RNA, 19 nt, Homo sapiens
  misc_RNA (1)...(19): siRNA sense strand
gcagaauggagccaagauu

SEQ ID NO: 1793958 - RNA, 19 nt, Homo sapiens
  misc_RNA (1)...(19): siRNA sense strand
acucaguacuugcuuagaa

SEQ ID NO: 1793959 - RNA, 19 nt, Homo sapiens
  misc_RNA (1)...(19): siRNA sense strand
caaagcugguccuugugaa

SEQ ID NO: 1793960 - RNA, 19 nt, Homo sapiens
  misc_RNA (1)...(19): siRNA sense strand
cccaggcacuuuguuuaua

SEQ ID NO: 1793961 - RNA, 19 nt, Homo sapiens
  misc_RNA (1)...(19): siRNA sense strand
gagaaaagacgugugauuu

SEQ ID NO: 1793962 - RNA, 19 nt, Homo sapiens
  misc_RNA (1)...(19): siRNA sense strand
ggagauauucaccgagguu

SEQ ID NO: 1793963 - RNA, 19 nt, Homo sapiens
  misc_RNA (1)...(19): siRNA sense strand
gaucgaugcuuuugacgaa

SEQ ID NO: 1793964 - RNA, 19 nt, Homo sapiens
  misc_RNA (1)...(19): siRNA sense strand
gccuuuccuucgaagauua

SEQ ID NO: 1793965 - RNA, 19 nt, Homo sapiens
  misc_RNA (1)...(19): siRNA sense strand
uaaagcuggaggagaguua

SEQ ID NO: 1793966 - RNA, 19 nt, Homo sapiens
  misc_RNA (1)...(19): siRNA sense strand
ggaaugcucuuuaaaacca

SEQ ID NO: 1793967 - RNA, 19 nt, Homo sapiens
  misc_RNA (1)...(19): siRNA sense strand
gaugaccucugugaagcaa

SEQ ID NO: 1793968 - RNA, 19 nt, Homo sapiens
  misc_RNA (1)...(19): siRNA sense strand
guauucuucucucccauga

SEQ ID NO: 1793969 - RNA, 19 nt, Homo sapiens
  misc_RNA (1)...(19): siRNA sense strand
gcagaugauguuuaaggaa

SEQ ID NO: 1793970 - RNA, 19 nt, Homo sapiens
  misc_RNA (1)...(19): siRNA sense strand
caaggggaaugcucuuuaa

SEQ ID NO: 1793971 - RNA, 19 nt, Homo sapiens
  misc_RNA (1)...(19): siRNA sense strand
ggcacucaguacuugcuua

SEQ ID NO: 1793972 - RNA, 19 nt, Homo sapiens
  misc_RNA (1)...(19): siRNA sense strand
ugauuuccuuccagacuuu

SEQ ID NO: 1793973 - RNA, 19 nt, Homo sapiens
  misc_RNA (1)...(19): siRNA sense strand
ucagugaaguuaacagaac

SEQ ID NO: 1793974 - RNA, 19 nt, Homo sapiens
  misc_RNA (1)...(19): siRNA sense strand
gagaagaaugugccucugu

SEQ ID NO: 1793975 - RNA, 19 nt, Homo sapiens
  misc_RNA (1)...(19): siRNA sense strand
ggagcugcccuauguggaa

SEQ ID NO: 1793976 - RNA, 19 nt, Homo sapiens
  misc_RNA (1)...(19): siRNA sense strand
gaaugagcaauuugacaga

SEQ ID NO: 1793977 - RNA, 19 nt, Homo sapiens
  misc_RNA (1)...(19): siRNA sense strand
agagaagacugaagguaag

SEQ ID NO: 1793978 - RNA, 19 nt, Homo sapiens
  misc_RNA (1)...(19): siRNA sense strand
aaagacgugugauuuccuu

SEQ ID NO: 1793979 - RNA, 19 nt, Homo sapiens
  misc_RNA (1)...(19): siRNA sense strand
gggaagaggacaacucaag

SEQ ID NO: 1793980 - RNA, 19 nt, Homo sapiens
  misc_RNA (1)...(19): siRNA sense strand
ccaggcacuuuguuuauac

SEQ ID NO: 1793981 - RNA, 19 nt, Homo sapiens
  misc_RNA (1)...(19): siRNA sense strand
ugaccucugugaagcaaau

SEQ ID NO: 1793982 - RNA, 19 nt, Homo sapiens
  misc_RNA (1)...(19): siRNA sense strand
caacucaagaaacguauuc

SEQ ID NO: 1793983 - RNA, 19 nt, Homo sapiens
  misc_RNA (1)...(19): siRNA sense strand
gugauuuccuuccagacuu

SEQ ID NO: 1793984 - RNA, 19 nt, Homo sapiens
  misc_RNA (1)...(19): siRNA sense strand
ucuggaaugucaacugaga

SEQ ID NO: 1793985 - RNA, 19 nt, Homo sapiens
  misc_RNA (1)...(19): siRNA sense strand
gagugcaggaagcauauaa

SEQ ID NO: 1793986 - RNA, 19 nt, Homo sapiens
  misc_RNA (1)...(19): siRNA sense strand
ggacaaauucagaaaaguu

SEQ ID NO: 1793987 - RNA, 19 nt, Homo sapiens
  misc_RNA (1)...(19): siRNA sense strand
gcagaccacccuuuucuuu

SEQ ID NO: 1793988 - RNA, 19 nt, Homo sapiens
  misc_RNA (1)...(19): siRNA sense strand
agaauacugucagaaguuc

SEQ ID NO: 1793989 - RNA, 19 nt, Homo sapiens
  misc_RNA (1)...(19): siRNA sense strand
guuuaaggaagcuaaguuu

SEQ ID NO: 1793990 - RNA, 19 nt, Homo sapiens
  misc_RNA (1)...(19): siRNA sense strand
gcaauuugacagaaaguac

SEQ ID NO: 1793991 - RNA, 19 nt, Homo sapiens
  misc_RNA (1)...(19): siRNA sense strand
uuucuggaaugucaacuga

SEQ ID NO: 1793992 - RNA, 19 nt, Homo sapiens
  misc_RNA (1)...(19): siRNA sense strand
gcacucaguacuugcuuag

SEQ ID NO: 1793993 - RNA, 19 nt, Homo sapiens
  misc_RNA (1)...(19): siRNA sense strand
agacagugcagaugauguu

SEQ ID NO: 1793994 - RNA, 19 nt, Homo sapiens
  misc_RNA (1)...(19): siRNA sense strand
cuuccagacuuuaaagaau

SEQ ID NO: 1793995 - RNA, 19 nt, Homo sapiens
  misc_RNA (1)...(19): siRNA sense strand
aacagacucuuuggagaaa

SEQ ID NO: 1793996 - RNA, 19 nt, Homo sapiens
  misc_RNA (1)...(19): siRNA sense strand
ggagaaaagacgugugauu

SEQ ID NO: 1793997 - RNA, 19 nt, Homo sapiens
  misc_RNA (1)...(19): siRNA sense strand
ccaacugcaucuuguucug

SEQ ID NO: 1793998 - RNA, 19 nt, Homo sapiens
  misc_RNA (1)...(19): siRNA sense strand
ugaagcaaauggcacuuuu

SEQ ID NO: 1793999 - RNA, 19 nt, Homo sapiens
  misc_RNA (1)...(19): siRNA sense strand
uguccaagguugcccacaa

SEQ ID NO: 1794000 - RNA, 19 nt, Homo sapiens
  misc_RNA (1)...(19): siRNA sense strand
gucccaggcacuuuguuua

SEQ ID NO: 1794001 - RNA, 19 nt, Homo sapiens
  misc_RNA (1)...(19): siRNA sense strand
agacugaagguaagauuuc

SEQ ID NO: 1794002 - RNA, 19 nt, Homo sapiens
  misc_RNA (1)...(19): siRNA sense strand
gugcaggaagcauauaaau

SEQ ID NO: 1794003 - RNA, 19 nt, Homo sapiens
  misc_RNA (1)...(19): siRNA sense strand
aagaauacugucagaaguu

SEQ ID NO: 1794004 - RNA, 19 nt, Homo sapiens
  misc_RNA (1)...(19): siRNA sense strand
ucaaagccuggacaaauuc

SEQ ID NO: 1794005 - RNA, 19 nt, Homo sapiens
  misc_RNA (1)...(19): siRNA sense strand
uccuggagcugcccuaugu

SEQ ID NO: 1794006 - RNA, 19 nt, Homo sapiens
  misc_RNA (1)...(19): siRNA sense strand
acagugcagaugauguuua

SEQ ID NO: 1794007 - RNA, 19 nt, Homo sapiens
  misc_RNA (1)...(19): siRNA sense strand
gagaagacugaagguaaga

SEQ ID NO: 1794008 - RNA, 19 nt, Homo sapiens
  misc_RNA (1)...(19): siRNA sense strand
cgaagccaaggcagacuuu

SEQ ID NO: 1794009 - RNA, 19 nt, Homo sapiens
  misc_RNA (1)...(19): siRNA sense strand
aagaggagcugagcauggu

SEQ ID NO: 1794010 - RNA, 19 nt, Homo sapiens
  misc_RNA (1)...(19): siRNA sense strand
gcacugcagcccagauguc

SEQ ID NO: 1794011 - RNA, 19 nt, Homo sapiens
  misc_RNA (1)...(19): siRNA sense strand
aaugagcaauuugacagaa

SEQ ID NO: 1794012 - RNA, 19 nt, Homo sapiens
  misc_RNA (1)...(19): siRNA sense strand
acaaagacggagauauuca

SEQ ID NO: 1794013 - RNA, 19 nt, Homo sapiens
  misc_RNA (1)...(19): siRNA sense strand
gagauauucaccgagguuu

SEQ ID NO: 1794014 - RNA, 19 nt, Homo sapiens
  misc_RNA (1)...(19): siRNA sense strand
ugagcaauuugacagaaag

SEQ ID NO: 1794015 - RNA, 19 nt, Homo sapiens
  misc_RNA (1)...(19): siRNA sense strand
aagaggacaacucaagaaa

SEQ ID NO: 1794016 - RNA, 19 nt, Homo sapiens
  misc_RNA (1)...(19): siRNA sense strand
gagccuuuccuucgaagau

SEQ ID NO: 1794017 - RNA, 19 nt, Homo sapiens
  misc_RNA (1)...(19): siRNA sense strand
aaugucaacugagaagaau

SEQ ID NO: 1794018 - RNA, 19 nt, Homo sapiens
  misc_RNA (1)...(19): siRNA sense strand
agaaugugccucuguccaa

SEQ ID NO: 1794019 - RNA, 19 nt, Homo sapiens
  misc_RNA (1)...(19): siRNA sense strand
ugccaucagcuuauuuaaa

SEQ ID NO: 1794020 - RNA, 19 nt, Homo sapiens
  misc_RNA (1)...(19): siRNA sense strand
ugcagaugauguuuaagga

SEQ ID NO: 1794021 - RNA, 19 nt, Homo sapiens
  misc_RNA (1)...(19): siRNA sense strand
gugcagaugauguuuaagg

SEQ ID NO: 1794022 - RNA, 19 nt, Homo sapiens
  misc_RNA (1)...(19): siRNA sense strand
ugacuuggagccuuuccuu

SEQ ID NO: 1794023 - RNA, 19 nt, Homo sapiens
  misc_RNA (1)...(19): siRNA sense strand
guccaagguugcccacaag

SEQ ID NO: 1794024 - RNA, 19 nt, Homo sapiens
  misc_RNA (1)...(19): siRNA sense strand
gguuuccagucacuucuca

SEQ ID NO: 1794025 - RNA, 19 nt, Homo sapiens
  misc_RNA (1)...(19): siRNA sense strand
gugaagcaaauggcacuuu

SEQ ID NO: 1794026 - RNA, 19 nt, Homo sapiens
  misc_RNA (1)...(19): siRNA sense strand
ccacgaggguuacgaggua

SEQ ID NO: 1794027 - RNA, 19 nt, Homo sapiens
  misc_RNA (1)...(19): siRNA sense strand
caagcuggauggaggcaaa

SEQ ID NO: 1794028 - RNA, 19 nt, Homo sapiens
  misc_RNA (1)...(19): siRNA sense strand
gcgacgaggucuucaucaa

SEQ ID NO: 1794029 - RNA, 19 nt, Homo sapiens
  misc_RNA (1)...(19): siRNA sense strand
guuacgagguacucaaguu

SEQ ID NO: 1794030 - RNA, 19 nt, Homo sapiens
  misc_RNA (1)...(19): siRNA sense strand
ggaaggccacuaugagaug

SEQ ID NO: 1794031 - RNA, 19 nt, Homo sapiens
  misc_RNA (1)...(19): siRNA sense strand
caucaucuacuccgacuga

SEQ ID NO: 1794032 - RNA, 19 nt, Homo sapiens
  misc_RNA (1)...(19): siRNA sense strand
gcggcaacagcaacaaaua

SEQ ID NO: 1794033 - RNA, 19 nt, Homo sapiens
  misc_RNA (1)...(19): siRNA sense strand
caaguuuacgugcaacauu

SEQ ID NO: 1794034 - RNA, 19 nt, Homo sapiens
  misc_RNA (1)...(19): siRNA sense strand
ucaccaaccuaggcaacaa

SEQ ID NO: 1794035 - RNA, 19 nt, Homo sapiens
  misc_RNA (1)...(19): siRNA sense strand
gcggcaaguuuacgugcaa

SEQ ID NO: 1794036 - RNA, 19 nt, Homo sapiens
  misc_RNA (1)...(19): siRNA sense strand
gcggccagcggcaaguuua

SEQ ID NO: 1794037 - RNA, 19 nt, Homo sapiens
  misc_RNA (1)...(19): siRNA sense strand
caaccuaggcaacaacuac

SEQ ID NO: 1794038 - RNA, 19 nt, Homo sapiens
  misc_RNA (1)...(19): siRNA sense strand
aaguuuacgugcaacauuc

SEQ ID NO: 1794039 - RNA, 19 nt, Homo sapiens
  misc_RNA (1)...(19): siRNA sense strand
gcccggaaggccacuauga

SEQ ID NO: 1794040 - RNA, 19 nt, Homo sapiens
  misc_RNA (1)...(19): siRNA sense strand
uuacgagguacucaaguuu

SEQ ID NO: 1794041 - RNA, 19 nt, Homo sapiens
  misc_RNA (1)...(19): siRNA sense strand
cacguucucuggcuucauc

SEQ ID NO: 1794042 - RNA, 19 nt, Homo sapiens
  misc_RNA (1)...(19): siRNA sense strand
ggaccagaacuacgacuac

SEQ ID NO: 1794043 - RNA, 19 nt, Homo sapiens
  misc_RNA (1)...(19): siRNA sense strand
ucucuggcuucaucaucua

SEQ ID NO: 1794044 - RNA, 19 nt, Homo sapiens
  misc_RNA (1)...(19): siRNA sense strand
ggcaacagcaacaaauaca

SEQ ID NO: 1794045 - RNA, 19 nt, Homo sapiens
  misc_RNA (1)...(19): siRNA sense strand
gcaacauucccggcaccua

SEQ ID NO: 1794046 - RNA, 19 nt, Homo sapiens
  misc_RNA (1)...(19): siRNA sense strand
cgacgaggucuucaucaag

SEQ ID NO: 1794047 - RNA, 19 nt, Homo sapiens
  misc_RNA (1)...(19): siRNA sense strand
ccggaaggccacuaugaga

SEQ ID NO: 1794048 - RNA, 19 nt, Homo sapiens
  misc_RNA (1)...(19): siRNA sense strand
gcaacaaauacagcacguu

SEQ ID NO: 1794049 - RNA, 19 nt, Homo sapiens
  misc_RNA (1)...(19): siRNA sense strand
gcaaucagaugucucacua

SEQ ID NO: 1794050 - RNA, 19 nt, Homo sapiens
  misc_RNA (1)...(19): siRNA sense strand
ggauguacgugauauguaa

SEQ ID NO: 1794051 - RNA, 19 nt, Homo sapiens
  misc_RNA (1)...(19): siRNA sense strand
cagagaaacuggaggcuuu

SEQ ID NO: 1794052 - RNA, 19 nt, Homo sapiens
  misc_RNA (1)...(19): siRNA sense strand
cagcagagauugccauguu

SEQ ID NO: 1794053 - RNA, 19 nt, Homo sapiens
  misc_RNA (1)...(19): siRNA sense strand
ggaacccacuggaguuuau

SEQ ID NO: 1794054 - RNA, 19 nt, Homo sapiens
  misc_RNA (1)...(19): siRNA sense strand
caaagcagguagcagagaa

SEQ ID NO: 1794055 - RNA, 19 nt, Homo sapiens
  misc_RNA (1)...(19): siRNA sense strand
aaucagaugucucacuauu

SEQ ID NO: 1794056 - RNA, 19 nt, Homo sapiens
  misc_RNA (1)...(19): siRNA sense strand
cugcauacaucacaaagaa

SEQ ID NO: 1794057 - RNA, 19 nt, Homo sapiens
  misc_RNA (1)...(19): siRNA sense strand
ucagaugucucacuauugg

SEQ ID NO: 1794058 - RNA, 19 nt, Homo sapiens
  misc_RNA (1)...(19): siRNA sense strand
gcucaaugaccauauuauu

SEQ ID NO: 1794059 - RNA, 19 nt, Homo sapiens
  misc_RNA (1)...(19): siRNA sense strand
gaagucacccaguucauca

SEQ ID NO: 1794060 - RNA, 19 nt, Homo sapiens
  misc_RNA (1)...(19): siRNA sense strand
gcauacaucacaaagaaga

SEQ ID NO: 1794061 - RNA, 19 nt, Homo sapiens
  misc_RNA (1)...(19): siRNA sense strand
ggaggaacccacuggaguu

SEQ ID NO: 1794062 - RNA, 19 nt, Homo sapiens
  misc_RNA (1)...(19): siRNA sense strand
gcccugaagucacccaguu

SEQ ID NO: 1794063 - RNA, 19 nt, Homo sapiens
  misc_RNA (1)...(19): siRNA sense strand
gaucacgucaguuucauca

SEQ ID NO: 1794064 - RNA, 19 nt, Homo sapiens
  misc_RNA (1)...(19): siRNA sense strand
gaaagccccugcccaacaa

SEQ ID NO: 1794065 - RNA, 19 nt, Homo sapiens
  misc_RNA (1)...(19): siRNA sense strand
ugaguuacauggacagucu

SEQ ID NO: 1794066 - RNA, 19 nt, Homo sapiens
  misc_RNA (1)...(19): siRNA sense strand
uggucuaccuccaagauaa

SEQ ID NO: 1794067 - RNA, 19 nt, Homo sapiens
  misc_RNA (1)...(19): siRNA sense strand
gcagguagcagagaaacug

SEQ ID NO: 1794068 - RNA, 19 nt, Homo sapiens
  misc_RNA (1)...(19): siRNA sense strand
ccaacagucaguuucauga

SEQ ID NO: 1794069 - RNA, 19 nt, Homo sapiens
  misc_RNA (1)...(19): siRNA sense strand
gaggaacccacuggaguuu

SEQ ID NO: 1794070 - RNA, 19 nt, Homo sapiens
  misc_RNA (1)...(19): siRNA sense strand
ucacccaguucaucaagug

SEQ ID NO: 1794071 - RNA, 19 nt, Homo sapiens
  misc_RNA (1)...(19): siRNA sense strand
gggauguacgugauaugua

SEQ ID NO: 1794072 - RNA, 19 nt, Homo sapiens
  misc_RNA (1)...(19): siRNA sense strand
gguuugcguuugaguacuu

SEQ ID NO: 1794073 - RNA, 19 nt, Homo sapiens
  misc_RNA (1)...(19): siRNA sense strand
uagcaacccagcagagauu

SEQ ID NO: 1794074 - RNA, 19 nt, Homo sapiens
  misc_RNA (1)...(19): siRNA sense strand
gcaaagcagguagcagaga

SEQ ID NO: 1794075 - RNA, 19 nt, Homo sapiens
  misc_RNA (1)...(19): siRNA sense strand
uuucaugacugcucugauc

SEQ ID NO: 1794076 - RNA, 19 nt, Homo sapiens
  misc_RNA (1)...(19): siRNA sense strand
ggucuaccuccaagauaaa

SEQ ID NO: 1794077 - RNA, 19 nt, Homo sapiens
  misc_RNA (1)...(19): siRNA sense strand
uuauuggguuugcguuuga

SEQ ID NO: 1794078 - RNA, 19 nt, Homo sapiens
  misc_RNA (1)...(19): siRNA sense strand
gaacuucuuuaggcaacag

SEQ ID NO: 1794079 - RNA, 19 nt, Homo sapiens
  misc_RNA (1)...(19): siRNA sense strand
gaagaggggagaauggaaa

SEQ ID NO: 1794080 - RNA, 19 nt, Homo sapiens
  misc_RNA (1)...(19): siRNA sense strand
agauugccauguuccuuga

SEQ ID NO: 1794081 - RNA, 19 nt, Homo sapiens
  misc_RNA (1)...(19): siRNA sense strand
gaacccacuggaguuuauu

SEQ ID NO: 1794082 - RNA, 19 nt, Homo sapiens
  misc_RNA (1)...(19): siRNA sense strand
ggccuugugucagaacuuc

SEQ ID NO: 1794083 - RNA, 19 nt, Homo sapiens
  misc_RNA (1)...(19): siRNA sense strand
ugaguacuuugccaacagu

SEQ ID NO: 1794084 - RNA, 19 nt, Homo sapiens
  misc_RNA (1)...(19): siRNA sense strand
ugaccauauuauuggguuu

SEQ ID NO: 1794085 - RNA, 19 nt, Homo sapiens
  misc_RNA (1)...(19): siRNA sense strand
gcggcaaucagaugucuca

SEQ ID NO: 1794086 - RNA, 19 nt, Homo sapiens
  misc_RNA (1)...(19): siRNA sense strand
gaccauauuauuggguuug

SEQ ID NO: 1794087 - RNA, 19 nt, Homo sapiens
  misc_RNA (1)...(19): siRNA sense strand
gcuaugacugugggaugua

SEQ ID NO: 1794088 - RNA, 19 nt, Homo sapiens
  misc_RNA (1)...(19): siRNA sense strand
gccaacagucaguuucaug

SEQ ID NO: 1794089 - RNA, 19 nt, Homo sapiens
  misc_RNA (1)...(19): siRNA sense strand
caacaaaacagcuaugacu

SEQ ID NO: 1794090 - RNA, 19 nt, Homo sapiens
  misc_RNA (1)...(19): siRNA sense strand
cccguagucuugaguuaca

SEQ ID NO: 1794091 - RNA, 19 nt, Homo sapiens
  misc_RNA (1)...(19): siRNA sense strand
ucaaugauaacuccaacca

SEQ ID NO: 1794092 - RNA, 19 nt, Homo sapiens
  misc_RNA (1)...(19): siRNA sense strand
cuacugcggcaaucagaug

SEQ ID NO: 1794093 - RNA, 19 nt, Homo sapiens
  misc_RNA (1)...(19): siRNA sense strand
uggcucaaugaccauauua

SEQ ID NO: 1794094 - RNA, 19 nt, Homo sapiens
  misc_RNA (1)...(19): siRNA sense strand
gaacugaaaugcucccaaa

SEQ ID NO: 1794095 - RNA, 19 nt, Homo sapiens
  misc_RNA (1)...(19): siRNA sense strand
gaaguuaccggcagcauuu

SEQ ID NO: 1794096 - RNA, 19 nt, Homo sapiens
  misc_RNA (1)...(19): siRNA sense strand
gaaggugccuguguucuau

SEQ ID NO: 1794097 - RNA, 19 nt, Homo sapiens
  misc_RNA (1)...(19): siRNA sense strand
ccaagugggugcgcuauaa

SEQ ID NO: 1794098 - RNA, 19 nt, Homo sapiens
  misc_RNA (1)...(19): siRNA sense strand
ggacagcgauggcauuugc

SEQ ID NO: 1794099 - RNA, 19 nt, Homo sapiens
  misc_RNA (1)...(19): siRNA sense strand
gagaaaaccauguaucuua

SEQ ID NO: 1794100 - RNA, 19 nt, Homo sapiens
  misc_RNA (1)...(19): siRNA sense strand
caagaaagaugugaacuac

SEQ ID NO: 1794101 - RNA, 19 nt, Homo sapiens
  misc_RNA (1)...(19): siRNA sense strand
gacagaagguaguaggauu

SEQ ID NO: 1794102 - RNA, 19 nt, Homo sapiens
  misc_RNA (1)...(19): siRNA sense strand
ggaggugucuguggaguau

SEQ ID NO: 1794103 - RNA, 19 nt, Homo sapiens
  misc_RNA (1)...(19): siRNA sense strand
aaaugaagauggcaaagga

SEQ ID NO: 1794104 - RNA, 19 nt, Homo sapiens
  misc_RNA (1)...(19): siRNA sense strand
ggagaggguuaagaacaaa

SEQ ID NO: 1794105 - RNA, 19 nt, Homo sapiens
  misc_RNA (1)...(19): siRNA sense strand
agacgcagauggagacuga

SEQ ID NO: 1794106 - RNA, 19 nt, Homo sapiens
  misc_RNA (1)...(19): siRNA sense strand
caaagaagggcaacagguu

SEQ ID NO: 1794107 - RNA, 19 nt, Homo sapiens
  misc_RNA (1)...(19): siRNA sense strand
guaguaggauugccaccaa

SEQ ID NO: 1794108 - RNA, 19 nt, Homo sapiens
  misc_RNA (1)...(19): siRNA sense strand
agaagaagcccaagucaga

SEQ ID NO: 1794109 - RNA, 19 nt, Homo sapiens
  misc_RNA (1)...(19): siRNA sense strand
gacaacaggcccagguuaa

SEQ ID NO: 1794110 - RNA, 19 nt, Homo sapiens
  misc_RNA (1)...(19): siRNA sense strand
ccaaagaucgucaucaaca

SEQ ID NO: 1794111 - RNA, 19 nt, Homo sapiens
  misc_RNA (1)...(19): siRNA sense strand
gcacagcggaacugaaaug

SEQ ID NO: 1794112 - RNA, 19 nt, Homo sapiens
  misc_RNA (1)...(19): siRNA sense strand
ggaugggacugucuaugau

SEQ ID NO: 1794113 - RNA, 19 nt, Homo sapiens
  misc_RNA (1)...(19): siRNA sense strand
acacauccgucaugguuga

SEQ ID NO: 1794114 - RNA, 19 nt, Homo sapiens
  misc_RNA (1)...(19): siRNA sense strand
ggaagaagaagcccaaguc

SEQ ID NO: 1794115 - RNA, 19 nt, Homo sapiens
  misc_RNA (1)...(19): siRNA sense strand
gaagugaacccaucaucuc

SEQ ID NO: 1794116 - RNA, 19 nt, Homo sapiens
  misc_RNA (1)...(19): siRNA sense strand
cccaucaucucccgaaauu

SEQ ID NO: 1794117 - RNA, 19 nt, Homo sapiens
  misc_RNA (1)...(19): siRNA sense strand
gcuaugagaccgagcaaga

SEQ ID NO: 1794118 - RNA, 19 nt, Homo sapiens
  misc_RNA (1)...(19): siRNA sense strand
gaagaagaagcccaaguca

SEQ ID NO: 1794119 - RNA, 19 nt, Homo sapiens
  misc_RNA (1)...(19): siRNA sense strand
gcaacagguuugucuaugc

SEQ ID NO: 1794120 - RNA, 19 nt, Homo sapiens
  misc_RNA (1)...(19): siRNA sense strand
gaagcagcaugagguguau

SEQ ID NO: 1794121 - RNA, 19 nt, Homo sapiens
  misc_RNA (1)...(19): siRNA sense strand
ucaagaaagaugugaacua

SEQ ID NO: 1794122 - RNA, 19 nt, Homo sapiens
  misc_RNA (1)...(19): siRNA sense strand
ccagguuaaucaagaaaga

SEQ ID NO: 1794123 - RNA, 19 nt, Homo sapiens
  misc_RNA (1)...(19): siRNA sense strand
aaccaaagaucgucaucaa

SEQ ID NO: 1794124 - RNA, 19 nt, Homo sapiens
  misc_RNA (1)...(19): siRNA sense strand
uacaccagcuccuugaauu

SEQ ID NO: 1794125 - RNA, 19 nt, Homo sapiens
  misc_RNA (1)...(19): siRNA sense strand
gaacaaaacggucuuccaa

SEQ ID NO: 1794126 - RNA, 19 nt, Homo sapiens
  misc_RNA (1)...(19): siRNA sense strand
ggaaguuaccggcagcauu

SEQ ID NO: 1794127 - RNA, 19 nt, Homo sapiens
  misc_RNA (1)...(19): siRNA sense strand
cgucaugguugauggagaa

SEQ ID NO: 1794128 - RNA, 19 nt, Homo sapiens
  misc_RNA (1)...(19): siRNA sense strand
ggaccuugcagaagaaaug

SEQ ID NO: 1794129 - RNA, 19 nt, Homo sapiens
  misc_RNA (1)...(19): siRNA sense strand
gagccuaguuucguguuug

SEQ ID NO: 1794130 - RNA, 19 nt, Homo sapiens
  misc_RNA (1)...(19): siRNA sense strand
cagagugccucaacuacau

SEQ ID NO: 1794131 - RNA, 19 nt, Homo sapiens
  misc_RNA (1)...(19): siRNA sense strand
ugaaggagacguuaguaga

SEQ ID NO: 1794132 - RNA, 19 nt, Homo sapiens
  misc_RNA (1)...(19): siRNA sense strand
agccagacaucuacaacua

SEQ ID NO: 1794133 - RNA, 19 nt, Homo sapiens
  misc_RNA (1)...(19): siRNA sense strand
cugaggaccuugcagaaga

SEQ ID NO: 1794134 - RNA, 19 nt, Homo sapiens
  misc_RNA (1)...(19): siRNA sense strand
gaagauggcaaaggaagau

SEQ ID NO: 1794135 - RNA, 19 nt, Homo sapiens
  misc_RNA (1)...(19): siRNA sense strand
cuacacauccgucaugguu

SEQ ID NO: 1794136 - RNA, 19 nt, Homo sapiens
  misc_RNA (1)...(19): siRNA sense strand
gaaggagacguuaguagag

SEQ ID NO: 1794137 - RNA, 19 nt, Homo sapiens
  misc_RNA (1)...(19): siRNA sense strand
gaggagaggguuaagaaca

SEQ ID NO: 1794138 - RNA, 19 nt, Homo sapiens
  misc_RNA (1)...(19): siRNA sense strand
cagaggagaggguuaagaa

SEQ ID NO: 1794139 - RNA, 19 nt, Homo sapiens
  misc_RNA (1)...(19): siRNA sense strand
cgagcacgcuguucacauc

SEQ ID NO: 1794140 - RNA, 19 nt, Homo sapiens
  misc_RNA (1)...(19): siRNA sense strand
agacagagugccucaacua

SEQ ID NO: 1794141 - RNA, 19 nt, Homo sapiens
  misc_RNA (1)...(19): siRNA sense strand
ccagacagugcuugaaauu

SEQ ID NO: 1794142 - RNA, 19 nt, Homo sapiens
  misc_RNA (1)...(19): siRNA sense strand
agaaagaugugaacuacac

SEQ ID NO: 1794143 - RNA, 19 nt, Homo sapiens
  misc_RNA (1)...(19): siRNA sense strand
ugaaggugccuguguucua

SEQ ID NO: 1794144 - RNA, 19 nt, Homo sapiens
  misc_RNA (1)...(19): siRNA sense strand
gacaaccgccuccucaugu

SEQ ID NO: 1794145 - RNA, 19 nt, Homo sapiens
  misc_RNA (1)...(19): siRNA sense strand
gcacauccugcgaaccaaa

SEQ ID NO: 1794146 - RNA, 19 nt, Homo sapiens
  misc_RNA (1)...(19): siRNA sense strand
aaagaagggcaacagguuu

SEQ ID NO: 1794147 - RNA, 19 nt, Homo sapiens
  misc_RNA (1)...(19): siRNA sense strand
ggaagugaacccaucaucu

SEQ ID NO: 1794148 - RNA, 19 nt, Homo sapiens
  misc_RNA (1)...(19): siRNA sense strand
ccaagcacguccuggaagu

SEQ ID NO: 1794149 - RNA, 19 nt, Homo sapiens
  misc_RNA (1)...(19): siRNA sense strand
caacagguuugucuaugcu

SEQ ID NO: 1794150 - RNA, 19 nt, Homo sapiens
  misc_RNA (1)...(19): siRNA sense strand
ugaggaccuugcagaagaa

SEQ ID NO: 1794151 - RNA, 19 nt, Homo sapiens
  misc_RNA (1)...(19): siRNA sense strand
gaggcggucuucgcuguga

SEQ ID NO: 1794152 - RNA, 19 nt, Homo sapiens
  misc_RNA (1)...(19): siRNA sense strand
gaaccaaagaucgucauca

SEQ ID NO: 1794153 - RNA, 19 nt, Homo sapiens
  misc_RNA (1)...(19): siRNA sense strand
agaagcagcaugaggugua

SEQ ID NO: 1794154 - RNA, 19 nt, Homo sapiens
  misc_RNA (1)...(19): siRNA sense strand
guuccagaaugacguguug

SEQ ID NO: 1794155 - RNA, 19 nt, Homo sapiens
  misc_RNA (1)...(19): siRNA sense strand
ggcaacagguuugucuaug

SEQ ID NO: 1794156 - RNA, 19 nt, Homo sapiens
  misc_RNA (1)...(19): siRNA sense strand
gcacgcuguucacaucauc

SEQ ID NO: 1794157 - RNA, 19 nt, Homo sapiens
  misc_RNA (1)...(19): siRNA sense strand
agacaacaggcccagguua

SEQ ID NO: 1794158 - RNA, 19 nt, Homo sapiens
  misc_RNA (1)...(19): siRNA sense strand
gaggacagaauaugcaauc

SEQ ID NO: 1794159 - RNA, 19 nt, Homo sapiens
  misc_RNA (1)...(19): siRNA sense strand
gcucggcccuacuaauugg

SEQ ID NO: 1794160 - RNA, 19 nt, Homo sapiens
  misc_RNA (1)...(19): siRNA sense strand
gcccagacagugcuugaaa

SEQ ID NO: 1794161 - RNA, 19 nt, Homo sapiens
  misc_RNA (1)...(19): siRNA sense strand
aagugaaggugguuccaaa

SEQ ID NO: 1794162 - RNA, 19 nt, Homo sapiens
  misc_RNA (1)...(19): siRNA sense strand
agcaugagguguauuggaa

SEQ ID NO: 1794163 - RNA, 19 nt, Homo sapiens
  misc_RNA (1)...(19): siRNA sense strand
ugacagggucuacuucuuc

SEQ ID NO: 1794164 - RNA, 19 nt, Homo sapiens
  misc_RNA (1)...(19): siRNA sense strand
caugguugauggagaacuu

SEQ ID NO: 1794165 - RNA, 19 nt, Homo sapiens
  misc_RNA (1)...(19): siRNA sense strand
gaagaagcccaagucagau

SEQ ID NO: 1794166 - RNA, 19 nt, Homo sapiens
  misc_RNA (1)...(19): siRNA sense strand
aggagaggguuaagaacaa

SEQ ID NO: 1794167 - RNA, 19 nt, Homo sapiens
  misc_RNA (1)...(19): siRNA sense strand
gagaugagcggcgaugcuu

SEQ ID NO: 1794168 - RNA, 19 nt, Homo sapiens
  misc_RNA (1)...(19): siRNA sense strand
gggcaacagguuugucuau

SEQ ID NO: 1794169 - RNA, 19 nt, Homo sapiens
  misc_RNA (1)...(19): siRNA sense strand
ucaaugugcugcgggaugu

SEQ ID NO: 1794170 - RNA, 19 nt, Homo sapiens
  misc_RNA (1)...(19): siRNA sense strand
caucaucucccgaaauucu

SEQ ID NO: 1794171 - RNA, 19 nt, Homo sapiens
  misc_RNA (1)...(19): siRNA sense strand
agacagugcuugaaauucc

SEQ ID NO: 1794172 - RNA, 19 nt, Homo sapiens
  misc_RNA (1)...(19): siRNA sense strand
cgacaaccgccuccucaug

SEQ ID NO: 1794173 - RNA, 19 nt, Homo sapiens
  misc_RNA (1)...(19): siRNA sense strand
uggcacagcggaacugaaa

SEQ ID NO: 1794174 - RNA, 19 nt, Homo sapiens
  misc_RNA (1)...(19): siRNA sense strand
caacaggcccagguuaauc

SEQ ID NO: 1794175 - RNA, 19 nt, Homo sapiens
  misc_RNA (1)...(19): siRNA sense strand
acaagacgcugcaguucgu

SEQ ID NO: 1794176 - RNA, 19 nt, Homo sapiens
  misc_RNA (1)...(19): siRNA sense strand
ccugaaagcccgacucauc

SEQ ID NO: 1794177 - RNA, 19 nt, Homo sapiens
  misc_RNA (1)...(19): siRNA sense strand
ggaguaugaguuuguguuc

SEQ ID NO: 1794178 - RNA, 19 nt, Homo sapiens
  misc_RNA (1)...(19): siRNA sense strand
ccgaaauucuucccacagu

SEQ ID NO: 1794179 - RNA, 19 nt, Homo sapiens
  misc_RNA (1)...(19): siRNA sense strand
gagcugaaguucgcugacu

SEQ ID NO: 1794180 - RNA, 19 nt, Homo sapiens
  misc_RNA (1)...(19): siRNA sense strand
gaggaucgacgaccuuucu

SEQ ID NO: 1794181 - RNA, 19 nt, Homo sapiens
  misc_RNA (1)...(19): siRNA sense strand
ccgcucggcccuacuaauu

SEQ ID NO: 1794182 - RNA, 19 nt, Homo sapiens
  misc_RNA (1)...(19): siRNA sense strand
uggaugggacugucuauga

SEQ ID NO: 1794183 - RNA, 19 nt, Homo sapiens
  misc_RNA (1)...(19): siRNA sense strand
gaguaugaguuuguguuca

SEQ ID NO: 1794184 - RNA, 19 nt, Homo sapiens
  misc_RNA (1)...(19): siRNA sense strand
ccagacaucuacaacuacu

SEQ ID NO: 1794185 - RNA, 19 nt, Homo sapiens
  misc_RNA (1)...(19): siRNA sense strand
gaagugaaggugguuccaa

SEQ ID NO: 1794186 - RNA, 19 nt, Homo sapiens
  misc_RNA (1)...(19): siRNA sense strand
gacagggucuacuucuucu

SEQ ID NO: 1794187 - RNA, 19 nt, Homo sapiens
  misc_RNA (1)...(19): siRNA sense strand
caacugcuauaagggauac

SEQ ID NO: 1794188 - RNA, 19 nt, Homo sapiens
  misc_RNA (1)...(19): siRNA sense strand
cagacaagacgcugcaguu

SEQ ID NO: 1794189 - RNA, 19 nt, Homo sapiens
  misc_RNA (1)...(19): siRNA sense strand
gacagcggcuuggucuuca

SEQ ID NO: 1794190 - RNA, 19 nt, Homo sapiens
  misc_RNA (1)...(19): siRNA sense strand
ccacggauagcaagagugu

SEQ ID NO: 1794191 - RNA, 19 nt, Homo sapiens
  misc_RNA (1)...(19): siRNA sense strand
gcggcuuggucuucaaugu

SEQ ID NO: 1794192 - RNA, 19 nt, Homo sapiens
  misc_RNA (1)...(19): siRNA sense strand
agggauaccugcccagaca

SEQ ID NO: 1794193 - RNA, 19 nt, Homo sapiens
  misc_RNA (1)...(19): siRNA sense strand
caaagaucgucaucaacac

SEQ ID NO: 1794194 - RNA, 19 nt, Homo sapiens
  misc_RNA (1)...(19): siRNA sense strand
aguccaagcucaaagagua

SEQ ID NO: 1794195 - RNA, 19 nt, Homo sapiens
  misc_RNA (1)...(19): siRNA sense strand
caacacagcaacaaauuca

SEQ ID NO: 1794196 - RNA, 19 nt, Homo sapiens
  misc_RNA (1)...(19): siRNA sense strand
gcgagacccucaccucaug

SEQ ID NO: 1794197 - RNA, 19 nt, Homo sapiens
  misc_RNA (1)...(19): siRNA sense strand
ggacaaauggagcaacuuc

SEQ ID NO: 1794198 - RNA, 19 nt, Homo sapiens
  misc_RNA (1)...(19): siRNA sense strand
ugacaacuguguucuuaag

SEQ ID NO: 1794199 - RNA, 19 nt, Homo sapiens
  misc_RNA (1)...(19): siRNA sense strand
ggacuacgccaucaugaca

SEQ ID NO: 1794200 - RNA, 19 nt, Homo sapiens
  misc_RNA (1)...(19): siRNA sense strand
gcgagccacugaggagaua

SEQ ID NO: 1794201 - RNA, 19 nt, Homo sapiens
  misc_RNA (1)...(19): siRNA sense strand
uuugacaacuguguucuua

SEQ ID NO: 1794202 - RNA, 19 nt, Homo sapiens
  misc_RNA (1)...(19): siRNA sense strand
gaaacucgcccugcacuca

SEQ ID NO: 1794203 - RNA, 19 nt, Homo sapiens
  misc_RNA (1)...(19): siRNA sense strand
ccaggaacaccaagaagaa

SEQ ID NO: 1794204 - RNA, 19 nt, Homo sapiens
  misc_RNA (1)...(19): siRNA sense strand
ccaaggaggcccugaaucu

SEQ ID NO: 1794205 - RNA, 19 nt, Homo sapiens
  misc_RNA (1)...(19): siRNA sense strand
ggagaaugcagacaucauc

SEQ ID NO: 1794206 - RNA, 19 nt, Homo sapiens
  misc_RNA (1)...(19): siRNA sense strand
gauaagcaaggaccucaga

SEQ ID NO: 1794207 - RNA, 19 nt, Homo sapiens
  misc_RNA (1)...(19): siRNA sense strand
caaccaggaacaccaagaa

SEQ ID NO: 1794208 - RNA, 19 nt, Homo sapiens
  misc_RNA (1)...(19): siRNA sense strand
gauggacgccugugugcaa

SEQ ID NO: 1794209 - RNA, 19 nt, Homo sapiens
  misc_RNA (1)...(19): siRNA sense strand
cagcagcgacuucucaaug

SEQ ID NO: 1794210 - RNA, 19 nt, Homo sapiens
  misc_RNA (1)...(19): siRNA sense strand
ccacugaggagauaagcaa

SEQ ID NO: 1794211 - RNA, 19 nt, Homo sapiens
  misc_RNA (1)...(19): siRNA sense strand
gcuggaggguguugugcuu

SEQ ID NO: 1794212 - RNA, 19 nt, Homo sapiens
  misc_RNA (1)...(19): siRNA sense strand
gccaacacagcaacaaauu

SEQ ID NO: 1794213 - RNA, 19 nt, Homo sapiens
  misc_RNA (1)...(19): siRNA sense strand
ggacgccugugugcaagau

SEQ ID NO: 1794214 - RNA, 19 nt, Homo sapiens
  misc_RNA (1)...(19): siRNA sense strand
gcaacaguccaagcucaaa

SEQ ID NO: 1794215 - RNA, 19 nt, Homo sapiens
  misc_RNA (1)...(19): siRNA sense strand
gagcugcggcacaagaaug

SEQ ID NO: 1794216 - RNA, 19 nt, Homo sapiens
  misc_RNA (1)...(19): siRNA sense strand
ggacggcuggcaccuuguu

SEQ ID NO: 1794217 - RNA, 19 nt, Homo sapiens
  misc_RNA (1)...(19): siRNA sense strand
gcgagcagauccgccugaa

SEQ ID NO: 1794218 - RNA, 19 nt, Homo sapiens
  misc_RNA (1)...(19): siRNA sense strand
gcgggagaaugcagacauc

SEQ ID NO: 1794219 - RNA, 19 nt, Homo sapiens
  misc_RNA (1)...(19): siRNA sense strand
cagcaguaccgacagaaga

SEQ ID NO: 1794220 - RNA, 19 nt, Homo sapiens
  misc_RNA (1)...(19): siRNA sense strand
ggucuacucagccaagaau

SEQ ID NO: 1794221 - RNA, 19 nt, Homo sapiens
  misc_RNA (1)...(19): siRNA sense strand
gacgcuguuugccaagaaa

SEQ ID NO: 1794222 - RNA, 19 nt, Homo sapiens
  misc_RNA (1)...(19): siRNA sense strand
agcagcgacuucucaauga

SEQ ID NO: 1794223 - RNA, 19 nt, Homo sapiens
  misc_RNA (1)...(19): siRNA sense strand
gaagaugcgcuggcugaag

SEQ ID NO: 1794224 - RNA, 19 nt, Homo sapiens
  misc_RNA (1)...(19): siRNA sense strand
ggccaacacagcaacaaau

SEQ ID NO: 1794225 - RNA, 19 nt, Homo sapiens
  misc_RNA (1)...(19): siRNA sense strand
gcucuucggcguuaacaag

SEQ ID NO: 1794226 - RNA, 19 nt, Homo sapiens
  misc_RNA (1)...(19): siRNA sense strand
gcaaccaggaacaccaaga

SEQ ID NO: 1794227 - RNA, 19 nt, Homo sapiens
  misc_RNA (1)...(19): siRNA sense strand
agauggagcugcggcacaa

SEQ ID NO: 1794228 - RNA, 19 nt, Homo sapiens
  misc_RNA (1)...(19): siRNA sense strand
agacgcuguuugccaagaa

SEQ ID NO: 1794229 - RNA, 19 nt, Homo sapiens
  misc_RNA (1)...(19): siRNA sense strand
acacagcaacaaauucaug

SEQ ID NO: 1794230 - RNA, 19 nt, Homo sapiens
  misc_RNA (1)...(19): siRNA sense strand
gggccaacacagcaacaaa

SEQ ID NO: 1794231 - RNA, 19 nt, Homo sapiens
  misc_RNA (1)...(19): siRNA sense strand
gccaucaacagccgcauug

SEQ ID NO: 1794232 - RNA, 19 nt, Homo sapiens
  misc_RNA (1)...(19): siRNA sense strand
gcaccgggaagacgcuguu

SEQ ID NO: 1794233 - RNA, 19 nt, Homo sapiens
  misc_RNA (1)...(19): siRNA sense strand
ccaacacagcaacaaauuc

SEQ ID NO: 1794234 - RNA, 19 nt, Homo sapiens
  misc_RNA (1)...(19): siRNA sense strand
ccagggcccaguaucaaga

SEQ ID NO: 1794235 - RNA, 19 nt, Homo sapiens
  misc_RNA (1)...(19): siRNA sense strand
gcuacgaggaccaacugaa

SEQ ID NO: 1794236 - RNA, 19 nt, Homo sapiens
  misc_RNA (1)...(19): siRNA sense strand
guccagcaguaccgacaga

SEQ ID NO: 1794237 - RNA, 19 nt, Homo sapiens
  misc_RNA (1)...(19): siRNA sense strand
caacaguccaagcucaaag

SEQ ID NO: 1794238 - RNA, 19 nt, Homo sapiens
  misc_RNA (1)...(19): siRNA sense strand
caaggaggcccugaaucug

SEQ ID NO: 1794239 - RNA, 19 nt, Homo sapiens
  misc_RNA (1)...(19): siRNA sense strand
acaaauggagcaacuucga

SEQ ID NO: 1794240 - RNA, 19 nt, Homo sapiens
  misc_RNA (1)...(19): siRNA sense strand
cugaggagauaagcaagga

SEQ ID NO: 1794241 - RNA, 19 nt, Homo sapiens
  misc_RNA (1)...(19): siRNA sense strand
ggcacauccugcuguaugg

SEQ ID NO: 1794242 - RNA, 19 nt, Homo sapiens
  misc_RNA (1)...(19): siRNA sense strand
ggaggguguugugcuuagu

SEQ ID NO: 1794243 - RNA, 19 nt, Homo sapiens
  misc_RNA (1)...(19): siRNA sense strand
ggaggaguccgugcagaag

SEQ ID NO: 1794244 - RNA, 19 nt, Homo sapiens
  misc_RNA (1)...(19): siRNA sense strand
guucgacugugccaucaac

SEQ ID NO: 1794245 - RNA, 19 nt, Homo sapiens
  misc_RNA (1)...(19): siRNA sense strand
ucguggcucuucggcguua

SEQ ID NO: 1794246 - RNA, 19 nt, Homo sapiens
  misc_RNA (1)...(19): siRNA sense strand
cuacgaggaccaacugaag

SEQ ID NO: 1794247 - RNA, 19 nt, Homo sapiens
  misc_RNA (1)...(19): siRNA sense strand
ggauuccgugccuuuguga

SEQ ID NO: 1794248 - RNA, 19 nt, Homo sapiens
  misc_RNA (1)...(19): siRNA sense strand
cagccgcauugacgugaug

SEQ ID NO: 1794249 - RNA, 19 nt, Homo sapiens
  misc_RNA (1)...(19): siRNA sense strand
gcacucaggcauggacuac

SEQ ID NO: 1794250 - RNA, 19 nt, Homo sapiens
  misc_RNA (1)...(19): siRNA sense strand
ucaaugaggagaauuuacg

SEQ ID NO: 1794251 - RNA, 19 nt, Homo sapiens
  misc_RNA (1)...(19): siRNA sense strand
gcugaggagaggaggaaga

SEQ ID NO: 1794252 - RNA, 19 nt, Homo sapiens
  misc_RNA (1)...(19): siRNA sense strand
ggcccaguaucaagacaag

SEQ ID NO: 1794253 - RNA, 19 nt, Homo sapiens
  misc_RNA (1)...(19): siRNA sense strand
gaagaagacuuuacucaau

SEQ ID NO: 1794254 - RNA, 19 nt, Homo sapiens
  misc_RNA (1)...(19): siRNA sense strand
gaccaucacuucaauauuc

SEQ ID NO: 1794255 - RNA, 19 nt, Homo sapiens
  misc_RNA (1)...(19): siRNA sense strand
gaagaaagacacaguaaga

SEQ ID NO: 1794256 - RNA, 19 nt, Homo sapiens
  misc_RNA (1)...(19): siRNA sense strand
agaagcagcugaagaauau

SEQ ID NO: 1794257 - RNA, 19 nt, Homo sapiens
  misc_RNA (1)...(19): siRNA sense strand
ugacagcgaugauaaaguu

SEQ ID NO: 1794258 - RNA, 19 nt, Homo sapiens
  misc_RNA (1)...(19): siRNA sense strand
gaauauaugaguccugaua

SEQ ID NO: 1794259 - RNA, 19 nt, Homo sapiens
  misc_RNA (1)...(19): siRNA sense strand
gagaagggccaaacacaua

SEQ ID NO: 1794260 - RNA, 19 nt, Homo sapiens
  misc_RNA (1)...(19): siRNA sense strand
aaagugggcucaagguaua

SEQ ID NO: 1794261 - RNA, 19 nt, Homo sapiens
  misc_RNA (1)...(19): siRNA sense strand
ccacucuccuggacuauua

SEQ ID NO: 1794262 - RNA, 19 nt, Homo sapiens
  misc_RNA (1)...(19): siRNA sense strand
caacagccgugaauauaug

SEQ ID NO: 1794263 - RNA, 19 nt, Homo sapiens
  misc_RNA (1)...(19): siRNA sense strand
ccaaguauccugauuugua

SEQ ID NO: 1794264 - RNA, 19 nt, Homo sapiens
  misc_RNA (1)...(19): siRNA sense strand
ggacugaaguguggaauuc

SEQ ID NO: 1794265 - RNA, 19 nt, Homo sapiens
  misc_RNA (1)...(19): siRNA sense strand
gcagguggauuacauggaa

SEQ ID NO: 1794266 - RNA, 19 nt, Homo sapiens
  misc_RNA (1)...(19): siRNA sense strand
gaggaagacuggaauguuc

SEQ ID NO: 1794267 - RNA, 19 nt, Homo sapiens
  misc_RNA (1)...(19): siRNA sense strand
gagaagcagcugaagaaua

SEQ ID NO: 1794268 - RNA, 19 nt, Homo sapiens
  misc_RNA (1)...(19): siRNA sense strand
gaugacagagcguguaaua

SEQ ID NO: 1794269 - RNA, 19 nt, Homo sapiens
  misc_RNA (1)...(19): siRNA sense strand
gaaagacacaguaagagaa

SEQ ID NO: 1794270 - RNA, 19 nt, Homo sapiens
  misc_RNA (1)...(19): siRNA sense strand
gaugaucugugcuggcuuu

SEQ ID NO: 1794271 - RNA, 19 nt, Homo sapiens
  misc_RNA (1)...(19): siRNA sense strand
caaguauccugauuuguau

SEQ ID NO: 1794272 - RNA, 19 nt, Homo sapiens
  misc_RNA (1)...(19): siRNA sense strand
gaauauaacugugacuucu

SEQ ID NO: 1794273 - RNA, 19 nt, Homo sapiens
  misc_RNA (1)...(19): siRNA sense strand
cacgguaucuacuggauua

SEQ ID NO: 1794274 - RNA, 19 nt, Homo sapiens
  misc_RNA (1)...(19): siRNA sense strand
ucaaauguccuacaagaaa

SEQ ID NO: 1794275 - RNA, 19 nt, Homo sapiens
  misc_RNA (1)...(19): siRNA sense strand
uaacaaaggcccugaguuc

SEQ ID NO: 1794276 - RNA, 19 nt, Homo sapiens
  misc_RNA (1)...(19): siRNA sense strand
caaagugucugaguugaug

SEQ ID NO: 1794277 - RNA, 19 nt, Homo sapiens
  misc_RNA (1)...(19): siRNA sense strand
gcuaagggcucacuuucug

SEQ ID NO: 1794278 - RNA, 19 nt, Homo sapiens
  misc_RNA (1)...(19): siRNA sense strand
ggaagaagacuuuacucaa

SEQ ID NO: 1794279 - RNA, 19 nt, Homo sapiens
  misc_RNA (1)...(19): siRNA sense strand
ggcaguggcuuugagcuua

SEQ ID NO: 1794280 - RNA, 19 nt, Homo sapiens
  misc_RNA (1)...(19): siRNA sense strand
ccagagaagcacauuauaa

SEQ ID NO: 1794281 - RNA, 19 nt, Homo sapiens
  misc_RNA (1)...(19): siRNA sense strand
cagagaagcacauuauaaa

SEQ ID NO: 1794282 - RNA, 19 nt, Homo sapiens
  misc_RNA (1)...(19): siRNA sense strand
caacagagcaggugagaag

SEQ ID NO: 1794283 - RNA, 19 nt, Homo sapiens
  misc_RNA (1)...(19): siRNA sense strand
gacauuccaugcccuugua

SEQ ID NO: 1794284 - RNA, 19 nt, Homo sapiens
  misc_RNA (1)...(19): siRNA sense strand
ugucugaguugauggauuu

SEQ ID NO: 1794285 - RNA, 19 nt, Homo sapiens
  misc_RNA (1)...(19): siRNA sense strand
gaacacacuuacuauucug

SEQ ID NO: 1794286 - RNA, 19 nt, Homo sapiens
  misc_RNA (1)...(19): siRNA sense strand
acagaaaccugaaggaauc

SEQ ID NO: 1794287 - RNA, 19 nt, Homo sapiens
  misc_RNA (1)...(19): siRNA sense strand
uagaagaggugguggaauc

SEQ ID NO: 1794288 - RNA, 19 nt, Homo sapiens
  misc_RNA (1)...(19): siRNA sense strand
gcaggugggucugagguuu

SEQ ID NO: 1794289 - RNA, 19 nt, Homo sapiens
  misc_RNA (1)...(19): siRNA sense strand
gauaagcaagaacagaaua

SEQ ID NO: 1794290 - RNA, 19 nt, Homo sapiens
  misc_RNA (1)...(19): siRNA sense strand
ugacggugauauacuuuaa

SEQ ID NO: 1794291 - RNA, 19 nt, Homo sapiens
  misc_RNA (1)...(19): siRNA sense strand
caaauuuaguccaaacugu

SEQ ID NO: 1794292 - RNA, 19 nt, Homo sapiens
  misc_RNA (1)...(19): siRNA sense strand
gaagcacauuauaaaguug

SEQ ID NO: 1794293 - RNA, 19 nt, Homo sapiens
  misc_RNA (1)...(19): siRNA sense strand
caaauguccuacaagaaau

SEQ ID NO: 1794294 - RNA, 19 nt, Homo sapiens
  misc_RNA (1)...(19): siRNA sense strand
guaagaaacaaccauguga

SEQ ID NO: 1794295 - RNA, 19 nt, Homo sapiens
  misc_RNA (1)...(19): siRNA sense strand
gauaauguaagaaguguug

SEQ ID NO: 1794296 - RNA, 19 nt, Homo sapiens
  misc_RNA (1)...(19): siRNA sense strand
cgaggugcauuugguauaa

SEQ ID NO: 1794297 - RNA, 19 nt, Homo sapiens
  misc_RNA (1)...(19): siRNA sense strand
aaagacggcagguggauua

SEQ ID NO: 1794298 - RNA, 19 nt, Homo sapiens
  misc_RNA (1)...(19): siRNA sense strand
gagaagcacauuauaaagu

SEQ ID NO: 1794299 - RNA, 19 nt, Homo sapiens
  misc_RNA (1)...(19): siRNA sense strand
gagucuggcuauauuggua

SEQ ID NO: 1794300 - RNA, 19 nt, Homo sapiens
  misc_RNA (1)...(19): siRNA sense strand
aauauugccuucaccauug

SEQ ID NO: 1794301 - RNA, 19 nt, Homo sapiens
  misc_RNA (1)...(19): siRNA sense strand
gaucaugacuauguaucuu

SEQ ID NO: 1794302 - RNA, 19 nt, Homo sapiens
  misc_RNA (1)...(19): siRNA sense strand
ucaagaagaucggguuguu

SEQ ID NO: 1794303 - RNA, 19 nt, Homo sapiens
  misc_RNA (1)...(19): siRNA sense strand
ugucaagacucaguucuaa

SEQ ID NO: 1794304 - RNA, 19 nt, Homo sapiens
  misc_RNA (1)...(19): siRNA sense strand
caaaucacucugccaagua

SEQ ID NO: 1794305 - RNA, 19 nt, Homo sapiens
  misc_RNA (1)...(19): siRNA sense strand
cuauguaucuuuacgauca

SEQ ID NO: 1794306 - RNA, 19 nt, Homo sapiens
  misc_RNA (1)...(19): siRNA sense strand
caaaggcccugaguucugu

SEQ ID NO: 1794307 - RNA, 19 nt, Homo sapiens
  misc_RNA (1)...(19): siRNA sense strand
cgaugaagccaacaacuuu

SEQ ID NO: 1794308 - RNA, 19 nt, Homo sapiens
  misc_RNA (1)...(19): siRNA sense strand
aauagugcaugaagacuuu

SEQ ID NO: 1794309 - RNA, 19 nt, Homo sapiens
  misc_RNA (1)...(19): siRNA sense strand
gaugugaucaugacuaugu

SEQ ID NO: 1794310 - RNA, 19 nt, Homo sapiens
  misc_RNA (1)...(19): siRNA sense strand
gaauauuccugucucaaaa

SEQ ID NO: 1794311 - RNA, 19 nt, Homo sapiens
  misc_RNA (1)...(19): siRNA sense strand
caagacucaguucuaauua

SEQ ID NO: 1794312 - RNA, 19 nt, Homo sapiens
  misc_RNA (1)...(19): siRNA sense strand
caaguuggaugugaucaug

SEQ ID NO: 1794313 - RNA, 19 nt, Homo sapiens
  misc_RNA (1)...(19): siRNA sense strand
gaaggcaucacuuggcauu

SEQ ID NO: 1794314 - RNA, 19 nt, Homo sapiens
  misc_RNA (1)...(19): siRNA sense strand
gaguacagccucuuucaga

SEQ ID NO: 1794315 - RNA, 19 nt, Homo sapiens
  misc_RNA (1)...(19): siRNA sense strand
cagaagggaucaugcagau

SEQ ID NO: 1794316 - RNA, 19 nt, Homo sapiens
  misc_RNA (1)...(19): siRNA sense strand
ucaagacucaguucuaauu

SEQ ID NO: 1794317 - RNA, 19 nt, Homo sapiens
  misc_RNA (1)...(19): siRNA sense strand
caggagggaucacagagaa

SEQ ID NO: 1794318 - RNA, 19 nt, Homo sapiens
  misc_RNA (1)...(19): siRNA sense strand
ggaagacgauggaaaacaa

SEQ ID NO: 1794319 - RNA, 19 nt, Homo sapiens
  misc_RNA (1)...(19): siRNA sense strand
guaauacugugcucaagag

SEQ ID NO: 1794320 - RNA, 19 nt, Homo sapiens
  misc_RNA (1)...(19): siRNA sense strand
gauuuacggugauucugaa

SEQ ID NO: 1794321 - RNA, 19 nt, Homo sapiens
  misc_RNA (1)...(19): siRNA sense strand
cagaagaaauuugcaucaa

SEQ ID NO: 1794322 - RNA, 19 nt, Homo sapiens
  misc_RNA (1)...(19): siRNA sense strand
auuauuaacuucccgauga

SEQ ID NO: 1794323 - RNA, 19 nt, Homo sapiens
  misc_RNA (1)...(19): siRNA sense strand
ugacauugcccuaauacaa

SEQ ID NO: 1794324 - RNA, 19 nt, Homo sapiens
  misc_RNA (1)...(19): siRNA sense strand
uaaaagcuauucugcauga

SEQ ID NO: 1794325 - RNA, 19 nt, Homo sapiens
  misc_RNA (1)...(19): siRNA sense strand
gugagaagcagcugaagaa

SEQ ID NO: 1794326 - RNA, 19 nt, Homo sapiens
  misc_RNA (1)...(19): siRNA sense strand
cagauuuggugccugcuaa

SEQ ID NO: 1794327 - RNA, 19 nt, Homo sapiens
  misc_RNA (1)...(19): siRNA sense strand
aaucacaucauucagcuua

SEQ ID NO: 1794328 - RNA, 19 nt, Homo sapiens
  misc_RNA (1)...(19): siRNA sense strand
aagaagacuuuacucaaug

SEQ ID NO: 1794329 - RNA, 19 nt, Homo sapiens
  misc_RNA (1)...(19): siRNA sense strand
gguaucuacuggauuauag

SEQ ID NO: 1794330 - RNA, 19 nt, Homo sapiens
  misc_RNA (1)...(19): siRNA sense strand
gaucugugcuggcuuugca

SEQ ID NO: 1794331 - RNA, 19 nt, Homo sapiens
  misc_RNA (1)...(19): siRNA sense strand
aaagagaggucugugaaca

SEQ ID NO: 1794332 - RNA, 19 nt, Homo sapiens
  misc_RNA (1)...(19): siRNA sense strand
gcaugaagacuuuaacaca

SEQ ID NO: 1794333 - RNA, 19 nt, Homo sapiens
  misc_RNA (1)...(19): siRNA sense strand
uaaacuuuguggaauguug

SEQ ID NO: 1794334 - RNA, 19 nt, Homo sapiens
  misc_RNA (1)...(19): siRNA sense strand
gaauacaacagccgugaau

SEQ ID NO: 1794335 - RNA, 19 nt, Homo sapiens
  misc_RNA (1)...(19): siRNA sense strand
gugggagucuggcuauauu

SEQ ID NO: 1794336 - RNA, 19 nt, Homo sapiens
  misc_RNA (1)...(19): siRNA sense strand
ucaugcagaucccaagaaa

SEQ ID NO: 1794337 - RNA, 19 nt, Homo sapiens
  misc_RNA (1)...(19): siRNA sense strand
guaacaugacggugauaua

SEQ ID NO: 1794338 - RNA, 19 nt, Homo sapiens
  misc_RNA (1)...(19): siRNA sense strand
gcucaagguauauaacaaa

SEQ ID NO: 1794339 - RNA, 19 nt, Homo sapiens
  misc_RNA (1)...(19): siRNA sense strand
uuacauggaagaagacuuu

SEQ ID NO: 1794340 - RNA, 19 nt, Homo sapiens
  misc_RNA (1)...(19): siRNA sense strand
caagaagaucggguuguua

SEQ ID NO: 1794341 - RNA, 19 nt, Homo sapiens
  misc_RNA (1)...(19): siRNA sense strand
ugugugcaauugaagaaua

SEQ ID NO: 1794342 - RNA, 19 nt, Homo sapiens
  misc_RNA (1)...(19): siRNA sense strand
gcuuugagcuuaccguuac

SEQ ID NO: 1794343 - RNA, 19 nt, Homo sapiens
  misc_RNA (1)...(19): siRNA sense strand
uggauuacauggaagaaga

SEQ ID NO: 1794344 - RNA, 19 nt, Homo sapiens
  misc_RNA (1)...(19): siRNA sense strand
cugcuucacuucagacaaa

SEQ ID NO: 1794345 - RNA, 19 nt, Homo sapiens
  misc_RNA (1)...(19): siRNA sense strand
ccagagugaugaucuucuu

SEQ ID NO: 1794346 - RNA, 19 nt, Homo sapiens
  misc_RNA (1)...(19): siRNA sense strand
ucaagugcauguguuagaa

SEQ ID NO: 1794347 - RNA, 19 nt, Homo sapiens
  misc_RNA (1)...(19): siRNA sense strand
ucacuucaauauucaguuc

SEQ ID NO: 1794348 - RNA, 19 nt, Homo sapiens
  misc_RNA (1)...(19): siRNA sense strand
ucagaaggauaagcaagaa

SEQ ID NO: 1794349 - RNA, 19 nt, Homo sapiens
  misc_RNA (1)...(19): siRNA sense strand
agaagacuuuacucaauga

SEQ ID NO: 1794350 - RNA, 19 nt, Homo sapiens
  misc_RNA (1)...(19): siRNA sense strand
gcuaaacuuuguggaaugu

SEQ ID NO: 1794351 - RNA, 19 nt, Homo sapiens
  misc_RNA (1)...(19): siRNA sense strand
ugaacacacuuacuauucu

SEQ ID NO: 1794352 - RNA, 19 nt, Homo sapiens
  misc_RNA (1)...(19): siRNA sense strand
ccaaaggacaguaaaauaa

SEQ ID NO: 1794353 - RNA, 19 nt, Homo sapiens
  misc_RNA (1)...(19): siRNA sense strand
gaucugggauuccauguuu

SEQ ID NO: 1794354 - RNA, 19 nt, Homo sapiens
  misc_RNA (1)...(19): siRNA sense strand
gcacaggucaccaucuuaa

SEQ ID NO: 1794355 - RNA, 19 nt, Homo sapiens
  misc_RNA (1)...(19): siRNA sense strand
ggacugcggucaacccaau

SEQ ID NO: 1794356 - RNA, 19 nt, Homo sapiens
  misc_RNA (1)...(19): siRNA sense strand
cuacagcagucguuacaaa

SEQ ID NO: 1794357 - RNA, 19 nt, Homo sapiens
  misc_RNA (1)...(19): siRNA sense strand
caacaucaguguguacuuc

SEQ ID NO: 1794358 - RNA, 19 nt, Homo sapiens
  misc_RNA (1)...(19): siRNA sense strand
agacuggccucuucuguca

SEQ ID NO: 1794359 - RNA, 19 nt, Homo sapiens
  misc_RNA (1)...(19): siRNA sense strand
caaagugcaggacaucauu

SEQ ID NO: 1794360 - RNA, 19 nt, Homo sapiens
  misc_RNA (1)...(19): siRNA sense strand
ggaauggacugcggucaac

SEQ ID NO: 1794361 - RNA, 19 nt, Homo sapiens
  misc_RNA (1)...(19): siRNA sense strand
cagcagucguuacaaagug

SEQ ID NO: 1794362 - RNA, 19 nt, Homo sapiens
  misc_RNA (1)...(19): siRNA sense strand
aagcacaggucaccaucuu

SEQ ID NO: 1794363 - RNA, 19 nt, Homo sapiens
  misc_RNA (1)...(19): siRNA sense strand
gugcaggacaucauuguga

SEQ ID NO: 1794364 - RNA, 19 nt, Homo sapiens
  misc_RNA (1)...(19): siRNA sense strand
gcugcgcacugcuuccaaa

SEQ ID NO: 1794365 - RNA, 19 nt, Homo sapiens
  misc_RNA (1)...(19): siRNA sense strand
gaggagacgccaccgaugu

SEQ ID NO: 1794366 - RNA, 19 nt, Homo sapiens
  misc_RNA (1)...(19): siRNA sense strand
ccucuucugucaccuacaa

SEQ ID NO: 1794367 - RNA, 19 nt, Homo sapiens
  misc_RNA (1)...(19): siRNA sense strand
guaguaugaucugggauuc

SEQ ID NO: 1794368 - RNA, 19 nt, Homo sapiens
  misc_RNA (1)...(19): siRNA sense strand
ccauuugcaucgagucuuc

SEQ ID NO: 1794369 - RNA, 19 nt, Homo sapiens
  misc_RNA (1)...(19): siRNA sense strand
gcguacauccagcccauuu

SEQ ID NO: 1794370 - RNA, 19 nt, Homo sapiens
  misc_RNA (1)...(19): siRNA sense strand
agggugaugucccacagua

SEQ ID NO: 1794371 - RNA, 19 nt, Homo sapiens
  misc_RNA (1)...(19): siRNA sense strand
ugugaacccugacgcacuu

SEQ ID NO: 1794372 - RNA, 19 nt, Homo sapiens
  misc_RNA (1)...(19): siRNA sense strand
gggaauggacugcggucaa

SEQ ID NO: 1794373 - RNA, 19 nt, Homo sapiens
  misc_RNA (1)...(19): siRNA sense strand
gucaccaucuuaaacaaca

SEQ ID NO: 1794374 - RNA, 19 nt, Homo sapiens
  misc_RNA (1)...(19): siRNA sense strand
caaucggccuggugucuac

SEQ ID NO: 1794375 - RNA, 19 nt, Homo sapiens
  misc_RNA (1)...(19): siRNA sense strand
gguguaauuaccuguuuga

SEQ ID NO: 1794376 - RNA, 19 nt, Homo sapiens
  misc_RNA (1)...(19): siRNA sense strand
ugacauugcccugcugaga

SEQ ID NO: 1794377 - RNA, 19 nt, Homo sapiens
  misc_RNA (1)...(19): siRNA sense strand
guuacaaagugcaggacau

SEQ ID NO: 1794378 - RNA, 19 nt, Homo sapiens
  misc_RNA (1)...(19): siRNA sense strand
gaggauggcaguguagaca

SEQ ID NO: 1794379 - RNA, 19 nt, Homo sapiens
  misc_RNA (1)...(19): siRNA sense strand
ugcaggacaucauugugaa

SEQ ID NO: 1794380 - RNA, 19 nt, Homo sapiens
  misc_RNA (1)...(19): siRNA sense strand
acaaggauggacuguggua

SEQ ID NO: 1794381 - RNA, 19 nt, Homo sapiens
  misc_RNA (1)...(19): siRNA sense strand
ggugaugucccacaguaca

SEQ ID NO: 1794382 - RNA, 19 nt, Homo sapiens
  misc_RNA (1)...(19): siRNA sense strand
aggauggacugugguauca

SEQ ID NO: 1794383 - RNA, 19 nt, Homo sapiens
  misc_RNA (1)...(19): siRNA sense strand
gggccuacagcagucguua

SEQ ID NO: 1794384 - RNA, 19 nt, Homo sapiens
  misc_RNA (1)...(19): siRNA sense strand
ccaaucggccuggugucua

SEQ ID NO: 1794385 - RNA, 19 nt, Homo sapiens
  misc_RNA (1)...(19): siRNA sense strand
gguaucagguuggaaucgu

SEQ ID NO: 1794386 - RNA, 19 nt, Homo sapiens
  misc_RNA (1)...(19): siRNA sense strand
gcaucgagucuuccaccuu

SEQ ID NO: 1794387 - RNA, 19 nt, Homo sapiens
  misc_RNA (1)...(19): siRNA sense strand
cguaguaugaucugggauu

SEQ ID NO: 1794388 - RNA, 19 nt, Homo sapiens
  misc_RNA (1)...(19): siRNA sense strand
caggucaccaucuuaaaca

SEQ ID NO: 1794389 - RNA, 19 nt, Homo sapiens
  misc_RNA (1)...(19): siRNA sense strand
cccucuagccguaguauga

SEQ ID NO: 1794390 - RNA, 19 nt, Homo sapiens
  misc_RNA (1)...(19): siRNA sense strand
guacauccagcccauuugc

SEQ ID NO: 1794391 - RNA, 19 nt, Homo sapiens
  misc_RNA (1)...(19): siRNA sense strand
gggaagcacaggucaccau

SEQ ID NO: 1794392 - RNA, 19 nt, Homo sapiens
  misc_RNA (1)...(19): siRNA sense strand
gaaguugucuuauggauga

SEQ ID NO: 1794393 - RNA, 19 nt, Homo sapiens
  misc_RNA (1)...(19): siRNA sense strand
caacugcaaucuauguuua

SEQ ID NO: 1794394 - RNA, 19 nt, Homo sapiens
  misc_RNA (1)...(19): siRNA sense strand
aaagagagaugcauuugua

SEQ ID NO: 1794395 - RNA, 19 nt, Homo sapiens
  misc_RNA (1)...(19): siRNA sense strand
gggcauauaagaucuauua

SEQ ID NO: 1794396 - RNA, 19 nt, Homo sapiens
  misc_RNA (1)...(19): siRNA sense strand
guacauagaugauuuacca

SEQ ID NO: 1794397 - RNA, 19 nt, Homo sapiens
  misc_RNA (1)...(19): siRNA sense strand
gaacaaugguggccguuug

SEQ ID NO: 1794398 - RNA, 19 nt, Homo sapiens
  misc_RNA (1)...(19): siRNA sense strand
gcauggagauguauuuaga

SEQ ID NO: 1794399 - RNA, 19 nt, Homo sapiens
  misc_RNA (1)...(19): siRNA sense strand
gaaaucgaauuguugaugu

SEQ ID NO: 1794400 - RNA, 19 nt, Homo sapiens
  misc_RNA (1)...(19): siRNA sense strand
gggcuuaguuucaaugauu

SEQ ID NO: 1794401 - RNA, 19 nt, Homo sapiens
  misc_RNA (1)...(19): siRNA sense strand
ggaaggagauggauaaagc

SEQ ID NO: 1794402 - RNA, 19 nt, Homo sapiens
  misc_RNA (1)...(19): siRNA sense strand
gauaauguguggagcgauu

SEQ ID NO: 1794403 - RNA, 19 nt, Homo sapiens
  misc_RNA (1)...(19): siRNA sense strand
ggaggaaggagauggauaa

SEQ ID NO: 1794404 - RNA, 19 nt, Homo sapiens
  misc_RNA (1)...(19): siRNA sense strand
uuaguggucuggauauuaa

SEQ ID NO: 1794405 - RNA, 19 nt, Homo sapiens
  misc_RNA (1)...(19): siRNA sense strand
ggagauggauaaagcagau

SEQ ID NO: 1794406 - RNA, 19 nt, Homo sapiens
  misc_RNA (1)...(19): siRNA sense strand
gaauuuaguggucuggaua

SEQ ID NO: 1794407 - RNA, 19 nt, Homo sapiens
  misc_RNA (1)...(19): siRNA sense strand
guacagccauauuugucua

SEQ ID NO: 1794408 - RNA, 19 nt, Homo sapiens
  misc_RNA (1)...(19): siRNA sense strand
ggagauguauuuagaccau

SEQ ID NO: 1794409 - RNA, 19 nt, Homo sapiens
  misc_RNA (1)...(19): siRNA sense strand
gagagaugcauuuguauau

SEQ ID NO: 1794410 - RNA, 19 nt, Homo sapiens
  misc_RNA (1)...(19): siRNA sense strand
ggauauauggcgguauuua

SEQ ID NO: 1794411 - RNA, 19 nt, Homo sapiens
  misc_RNA (1)...(19): siRNA sense strand
agaaauggaugauauggau

SEQ ID NO: 1794412 - RNA, 19 nt, Homo sapiens
  misc_RNA (1)...(19): siRNA sense strand
agucagaugugaaauuuga

SEQ ID NO: 1794413 - RNA, 19 nt, Homo sapiens
  misc_RNA (1)...(19): siRNA sense strand
ggaggaagucuguaugcua

SEQ ID NO: 1794414 - RNA, 19 nt, Homo sapiens
  misc_RNA (1)...(19): siRNA sense strand
guacaauacuuggccgaaa

SEQ ID NO: 1794415 - RNA, 19 nt, Homo sapiens
  misc_RNA (1)...(19): siRNA sense strand
gaaacugguuccaaauacu

SEQ ID NO: 1794416 - RNA, 19 nt, Homo sapiens
  misc_RNA (1)...(19): siRNA sense strand
gcacugccuucuucaucaa

SEQ ID NO: 1794417 - RNA, 19 nt, Homo sapiens
  misc_RNA (1)...(19): siRNA sense strand
aggaagaaauggaugauau

SEQ ID NO: 1794418 - RNA, 19 nt, Homo sapiens
  misc_RNA (1)...(19): siRNA sense strand
ccuaggagaugaauaugga

SEQ ID NO: 1794419 - RNA, 19 nt, Homo sapiens
  misc_RNA (1)...(19): siRNA sense strand
gcucaguacagccauauuu

SEQ ID NO: 1794420 - RNA, 19 nt, Homo sapiens
  misc_RNA (1)...(19): siRNA sense strand
gaaauggaugauauggaua

SEQ ID NO: 1794421 - RNA, 19 nt, Homo sapiens
  misc_RNA (1)...(19): siRNA sense strand
ggaauuuaguggucuggau

SEQ ID NO: 1794422 - RNA, 19 nt, Homo sapiens
  misc_RNA (1)...(19): siRNA sense strand
gugaaacugguuccaaaua

SEQ ID NO: 1794423 - RNA, 19 nt, Homo sapiens
  misc_RNA (1)...(19): siRNA sense strand
ggaaaucgaauuguugaug

SEQ ID NO: 1794424 - RNA, 19 nt, Homo sapiens
  misc_RNA (1)...(19): siRNA sense strand
gaugugaaauuugaagauc

SEQ ID NO: 1794425 - RNA, 19 nt, Homo sapiens
  misc_RNA (1)...(19): siRNA sense strand
ggauagagaccuaggagau

SEQ ID NO: 1794426 - RNA, 19 nt, Homo sapiens
  misc_RNA (1)...(19): siRNA sense strand
uaaucuaacuagugaagga

SEQ ID NO: 1794427 - RNA, 19 nt, Homo sapiens
  misc_RNA (1)...(19): siRNA sense strand
ggaagaaauggaugauaug

SEQ ID NO: 1794428 - RNA, 19 nt, Homo sapiens
  misc_RNA (1)...(19): siRNA sense strand
guaaagaggaagaaaugga

SEQ ID NO: 1794429 - RNA, 19 nt, Homo sapiens
  misc_RNA (1)...(19): siRNA sense strand
gaagauuaccgguggcaau

SEQ ID NO: 1794430 - RNA, 19 nt, Homo sapiens
  misc_RNA (1)...(19): siRNA sense strand
uggaugauauggauagaga

SEQ ID NO: 1794431 - RNA, 19 nt, Homo sapiens
  misc_RNA (1)...(19): siRNA sense strand
caagugccuuuguccgaaa

SEQ ID NO: 1794432 - RNA, 19 nt, Homo sapiens
  misc_RNA (1)...(19): siRNA sense strand
ugauauggauagagaccua

SEQ ID NO: 1794433 - RNA, 19 nt, Homo sapiens
  misc_RNA (1)...(19): siRNA sense strand
ccagauuucauauucagua

SEQ ID NO: 1794434 - RNA, 19 nt, Homo sapiens
  misc_RNA (1)...(19): siRNA sense strand
gcugcuacgucuccaguga

SEQ ID NO: 1794435 - RNA, 19 nt, Homo sapiens
  misc_RNA (1)...(19): siRNA sense strand
ucaagucacccacugauau

SEQ ID NO: 1794436 - RNA, 19 nt, Homo sapiens
  misc_RNA (1)...(19): siRNA sense strand
ccaugaaacucugggagaa

SEQ ID NO: 1794437 - RNA, 19 nt, Homo sapiens
  misc_RNA (1)...(19): siRNA sense strand
cgucuccagugaaugguua

SEQ ID NO: 1794438 - RNA, 19 nt, Homo sapiens
  misc_RNA (1)...(19): siRNA sense strand
caagucacccacugauauu

SEQ ID NO: 1794439 - RNA, 19 nt, Homo sapiens
  misc_RNA (1)...(19): siRNA sense strand
ugaaacugguuccaaauac

SEQ ID NO: 1794440 - RNA, 19 nt, Homo sapiens
  misc_RNA (1)...(19): siRNA sense strand
agaggaaguugucuuaugg

SEQ ID NO: 1794441 - RNA, 19 nt, Homo sapiens
  misc_RNA (1)...(19): siRNA sense strand
acaggugcauggagaugua

SEQ ID NO: 1794442 - RNA, 19 nt, Homo sapiens
  misc_RNA (1)...(19): siRNA sense strand
agaugaauauggauggaaa

SEQ ID NO: 1794443 - RNA, 19 nt, Homo sapiens
  misc_RNA (1)...(19): siRNA sense strand
ggagaugaauauggaugga

SEQ ID NO: 1794444 - RNA, 19 nt, Homo sapiens
  misc_RNA (1)...(19): siRNA sense strand
ucagauauuugcugugucu

SEQ ID NO: 1794445 - RNA, 19 nt, Homo sapiens
  misc_RNA (1)...(19): siRNA sense strand
ccacuuacugugaaauuga

SEQ ID NO: 1794446 - RNA, 19 nt, Homo sapiens
  misc_RNA (1)...(19): siRNA sense strand
guuauccugugcauuguga

SEQ ID NO: 1794447 - RNA, 19 nt, Homo sapiens
  misc_RNA (1)...(19): siRNA sense strand
uaccagauguacauagaug

SEQ ID NO: 1794448 - RNA, 19 nt, Homo sapiens
  misc_RNA (1)...(19): siRNA sense strand
agagagaugcauuuguaua

SEQ ID NO: 1794449 - RNA, 19 nt, Homo sapiens
  misc_RNA (1)...(19): siRNA sense strand
aaacugguuccaaauacua

SEQ ID NO: 1794450 - RNA, 19 nt, Homo sapiens
  misc_RNA (1)...(19): siRNA sense strand
acaaagauguauggcuuau

SEQ ID NO: 1794451 - RNA, 19 nt, Homo sapiens
  misc_RNA (1)...(19): siRNA sense strand
gaggaagaaauggaugaua

SEQ ID NO: 1794452 - RNA, 19 nt, Homo sapiens
  misc_RNA (1)...(19): siRNA sense strand
gaagaaauggaugauaugg

SEQ ID NO: 1794453 - RNA, 19 nt, Homo sapiens
  misc_RNA (1)...(19): siRNA sense strand
gauauauggcgguauuuag

SEQ ID NO: 1794454 - RNA, 19 nt, Homo sapiens
  misc_RNA (1)...(19): siRNA sense strand
gauuaccgguggcaaugga

SEQ ID NO: 1794455 - RNA, 19 nt, Homo sapiens
  misc_RNA (1)...(19): siRNA sense strand
guauuuagaccaucaaguc

SEQ ID NO: 1794456 - RNA, 19 nt, Homo sapiens
  misc_RNA (1)...(19): siRNA sense strand
caguaaagaggaagaaaug

SEQ ID NO: 1794457 - RNA, 19 nt, Homo sapiens
  misc_RNA (1)...(19): siRNA sense strand
uggcuuauuucaaacauca

SEQ ID NO: 1794458 - RNA, 19 nt, Homo sapiens
  misc_RNA (1)...(19): siRNA sense strand
uacaauacuuggccgaaau

SEQ ID NO: 1794459 - RNA, 19 nt, Homo sapiens
  misc_RNA (1)...(19): siRNA sense strand
auagagaccuaggagauga

SEQ ID NO: 1794460 - RNA, 19 nt, Homo sapiens
  misc_RNA (1)...(19): siRNA sense strand
caacaucggauucauuggu

SEQ ID NO: 1794461 - RNA, 19 nt, Homo sapiens
  misc_RNA (1)...(19): siRNA sense strand
gugcacauauuuucuacua

SEQ ID NO: 1794462 - RNA, 19 nt, Homo sapiens
  misc_RNA (1)...(19): siRNA sense strand
agaccuaggagaugaauau

SEQ ID NO: 1794463 - RNA, 19 nt, Homo sapiens
  misc_RNA (1)...(19): siRNA sense strand
gauagagaccuaggagaug

SEQ ID NO: 1794464 - RNA, 19 nt, Homo sapiens
  misc_RNA (1)...(19): siRNA sense strand
ggcuuaguuucaaugauuu

SEQ ID NO: 1794465 - RNA, 19 nt, Homo sapiens
  misc_RNA (1)...(19): siRNA sense strand
guugucuuauggaugaaua

SEQ ID NO: 1794466 - RNA, 19 nt, Homo sapiens
  misc_RNA (1)...(19): siRNA sense strand
ugucagauauuugcugugu

SEQ ID NO: 1794467 - RNA, 19 nt, Homo sapiens
  misc_RNA (1)...(19): siRNA sense strand
ccauaaucgucaagaaaca

SEQ ID NO: 1794468 - RNA, 19 nt, Homo sapiens
  misc_RNA (1)...(19): siRNA sense strand
gaaaagagagaugcauuug

SEQ ID NO: 1794469 - RNA, 19 nt, Homo sapiens
  misc_RNA (1)...(19): siRNA sense strand
ucacgucuuucugggcaua

SEQ ID NO: 1794470 - RNA, 19 nt, Homo sapiens
  misc_RNA (1)...(19): siRNA sense strand
gagccugcgguuauuguuu

SEQ ID NO: 1794471 - RNA, 19 nt, Homo sapiens
  misc_RNA (1)...(19): siRNA sense strand
cauggagccugcgguuauu

SEQ ID NO: 1794472 - RNA, 19 nt, Homo sapiens
  misc_RNA (1)...(19): siRNA sense strand
ucucucaucguuauuauug

SEQ ID NO: 1794473 - RNA, 19 nt, Homo sapiens
  misc_RNA (1)...(19): siRNA sense strand
gugcauggagauguauuua

SEQ ID NO: 1794474 - RNA, 19 nt, Homo sapiens
  misc_RNA (1)...(19): siRNA sense strand
uaaagaggaagaaauggau

SEQ ID NO: 1794475 - RNA, 19 nt, Homo sapiens
  misc_RNA (1)...(19): siRNA sense strand
gauuaugcucgguacagua

SEQ ID NO: 1794476 - RNA, 19 nt, Homo sapiens
  misc_RNA (1)...(19): siRNA sense strand
agagaugcauuuguauaug

SEQ ID NO: 1794477 - RNA, 19 nt, Homo sapiens
  misc_RNA (1)...(19): siRNA sense strand
ucuuauggaugaauacugu

SEQ ID NO: 1794478 - RNA, 19 nt, Homo sapiens
  misc_RNA (1)...(19): siRNA sense strand
ucuacuaaaugcagaagau

SEQ ID NO: 1794479 - RNA, 19 nt, Homo sapiens
  misc_RNA (1)...(19): siRNA sense strand
caagauaaagaggaaguug

SEQ ID NO: 1794480 - RNA, 19 nt, Homo sapiens
  misc_RNA (1)...(19): siRNA sense strand
cuaccauaaucgucaagaa

SEQ ID NO: 1794481 - RNA, 19 nt, Homo sapiens
  misc_RNA (1)...(19): siRNA sense strand
uaccauaaucgucaagaaa

SEQ ID NO: 1794482 - RNA, 19 nt, Homo sapiens
  misc_RNA (1)...(19): siRNA sense strand
uuggauauauggcgguauu

SEQ ID NO: 1794483 - RNA, 19 nt, Homo sapiens
  misc_RNA (1)...(19): siRNA sense strand
ucauggagccugcgguuau

SEQ ID NO: 1794484 - RNA, 19 nt, Homo sapiens
  misc_RNA (1)...(19): siRNA sense strand
gccagccacuuacugugaa

SEQ ID NO: 1794485 - RNA, 19 nt, Homo sapiens
  misc_RNA (1)...(19): siRNA sense strand
gccacuuacugugaaauug

SEQ ID NO: 1794486 - RNA, 19 nt, Homo sapiens
  misc_RNA (1)...(19): siRNA sense strand
caucaacugcaaucuaugu

SEQ ID NO: 1794487 - RNA, 19 nt, Homo sapiens
  misc_RNA (1)...(19): siRNA sense strand
ggaacaaugguggccguuu

SEQ ID NO: 1794488 - RNA, 19 nt, Homo sapiens
  misc_RNA (1)...(19): siRNA sense strand
auacuuggccgaaaucugu

SEQ ID NO: 1794489 - RNA, 19 nt, Homo sapiens
  misc_RNA (1)...(19): siRNA sense strand
gauguauggcuuauuucaa

SEQ ID NO: 1794490 - RNA, 19 nt, Homo sapiens
  misc_RNA (1)...(19): siRNA sense strand
ucaacugcaaucuauguuu

SEQ ID NO: 1794491 - RNA, 19 nt, Homo sapiens
  misc_RNA (1)...(19): siRNA sense strand
gugacugucugugugacua

SEQ ID NO: 1794492 - RNA, 19 nt, Homo sapiens
  misc_RNA (1)...(19): siRNA sense strand
caacuaugauggccuauua

SEQ ID NO: 1794493 - RNA, 19 nt, Homo sapiens
  misc_RNA (1)...(19): siRNA sense strand
gcaaacagguucucaaugu

SEQ ID NO: 1794494 - RNA, 19 nt, Homo sapiens
  misc_RNA (1)...(19): siRNA sense strand
caaguaagcugaaugagaa

SEQ ID NO: 1794495 - RNA, 19 nt, Homo sapiens
  misc_RNA (1)...(19): siRNA sense strand
gcuaauagauguacuagga

SEQ ID NO: 1794496 - RNA, 19 nt, Homo sapiens
  misc_RNA (1)...(19): siRNA sense strand
gacaagggcuuugaugaua

SEQ ID NO: 1794497 - RNA, 19 nt, Homo sapiens
  misc_RNA (1)...(19): siRNA sense strand
gaaugagucugaaauaugu

SEQ ID NO: 1794498 - RNA, 19 nt, Homo sapiens
  misc_RNA (1)...(19): siRNA sense strand
gaaacugcaucauugguaa

SEQ ID NO: 1794499 - RNA, 19 nt, Homo sapiens
  misc_RNA (1)...(19): siRNA sense strand
gcacaucucuauauaaugg

SEQ ID NO: 1794500 - RNA, 19 nt, Homo sapiens
  misc_RNA (1)...(19): siRNA sense strand
caaacaagaucuggacuaa

SEQ ID NO: 1794501 - RNA, 19 nt, Homo sapiens
  misc_RNA (1)...(19): siRNA sense strand
ggaguacugugcaauuaaa

SEQ ID NO: 1794502 - RNA, 19 nt, Homo sapiens
  misc_RNA (1)...(19): siRNA sense strand
cguaauaucuugugccaaa

SEQ ID NO: 1794503 - RNA, 19 nt, Homo sapiens
  misc_RNA (1)...(19): siRNA sense strand
gcagaccaaugugcuaaua

SEQ ID NO: 1794504 - RNA, 19 nt, Homo sapiens
  misc_RNA (1)...(19): siRNA sense strand
caacuuaucccaaacaaga

SEQ ID NO: 1794505 - RNA, 19 nt, Homo sapiens
  misc_RNA (1)...(19): siRNA sense strand
ggaacaguaucuaucacua

SEQ ID NO: 1794506 - RNA, 19 nt, Homo sapiens
  misc_RNA (1)...(19): siRNA sense strand
gaacaguaucuaucacuaa

SEQ ID NO: 1794507 - RNA, 19 nt, Homo sapiens
  misc_RNA (1)...(19): siRNA sense strand
gagaauuacugccgaaauc

SEQ ID NO: 1794508 - RNA, 19 nt, Homo sapiens
  misc_RNA (1)...(19): siRNA sense strand
gaauuugaccucuaugaaa

SEQ ID NO: 1794509 - RNA, 19 nt, Homo sapiens
  misc_RNA (1)...(19): siRNA sense strand
gaacaaacauaggauggau

SEQ ID NO: 1794510 - RNA, 19 nt, Homo sapiens
  misc_RNA (1)...(19): siRNA sense strand
uaggauggaugguuaguuu

SEQ ID NO: 1794511 - RNA, 19 nt, Homo sapiens
  misc_RNA (1)...(19): siRNA sense strand
gcaaguaagcugaaugaga

SEQ ID NO: 1794512 - RNA, 19 nt, Homo sapiens
  misc_RNA (1)...(19): siRNA sense strand
gaucuggacuaacauguuc

SEQ ID NO: 1794513 - RNA, 19 nt, Homo sapiens
  misc_RNA (1)...(19): siRNA sense strand
gaacauggaagacuuacau

SEQ ID NO: 1794514 - RNA, 19 nt, Homo sapiens
  misc_RNA (1)...(19): siRNA sense strand
ggaaggugacucugaauga

SEQ ID NO: 1794515 - RNA, 19 nt, Homo sapiens
  misc_RNA (1)...(19): siRNA sense strand
gagggaaggugacucugaa

SEQ ID NO: 1794516 - RNA, 19 nt, Homo sapiens
  misc_RNA (1)...(19): siRNA sense strand
guaaagaccuacaggaaaa

SEQ ID NO: 1794517 - RNA, 19 nt, Homo sapiens
  misc_RNA (1)...(19): siRNA sense strand
gggcuuugaugauaauuau

SEQ ID NO: 1794518 - RNA, 19 nt, Homo sapiens
  misc_RNA (1)...(19): siRNA sense strand
gaaaauuacugccgaaauc

SEQ ID NO: 1794519 - RNA, 19 nt, Homo sapiens
  misc_RNA (1)...(19): siRNA sense strand
ugaaagauaucccgacaag

SEQ ID NO: 1794520 - RNA, 19 nt, Homo sapiens
  misc_RNA (1)...(19): siRNA sense strand
gcaaagacuacccuaauca

SEQ ID NO: 1794521 - RNA, 19 nt, Homo sapiens
  misc_RNA (1)...(19): siRNA sense strand
gaagaggagaugagaaaug

SEQ ID NO: 1794522 - RNA, 19 nt, Homo sapiens
  misc_RNA (1)...(19): siRNA sense strand
aaacauaucugcggaggau

SEQ ID NO: 1794523 - RNA, 19 nt, Homo sapiens
  misc_RNA (1)...(19): siRNA sense strand
caagaacauggaagacuua

SEQ ID NO: 1794524 - RNA, 19 nt, Homo sapiens
  misc_RNA (1)...(19): siRNA sense strand
guaagcugaaugagaauua

SEQ ID NO: 1794525 - RNA, 19 nt, Homo sapiens
  misc_RNA (1)...(19): siRNA sense strand
ccaaugugcuaauagaugu

SEQ ID NO: 1794526 - RNA, 19 nt, Homo sapiens
  misc_RNA (1)...(19): siRNA sense strand
gguaaagaccuacaggaaa

SEQ ID NO: 1794527 - RNA, 19 nt, Homo sapiens
  misc_RNA (1)...(19): siRNA sense strand
ggacuuccauucacuugca

SEQ ID NO: 1794528 - RNA, 19 nt, Homo sapiens
  misc_RNA (1)...(19): siRNA sense strand
aaggagaguuggguucuua

SEQ ID NO: 1794529 - RNA, 19 nt, Homo sapiens
  misc_RNA (1)...(19): siRNA sense strand
aacauaggauggaugguua

SEQ ID NO: 1794530 - RNA, 19 nt, Homo sapiens
  misc_RNA (1)...(19): siRNA sense strand
aacaagaucuggacuaaca

SEQ ID NO: 1794531 - RNA, 19 nt, Homo sapiens
  misc_RNA (1)...(19): siRNA sense strand
cauccaaggucaaggagaa

SEQ ID NO: 1794532 - RNA, 19 nt, Homo sapiens
  misc_RNA (1)...(19): siRNA sense strand
cacaaauucuugccugaaa

SEQ ID NO: 1794533 - RNA, 19 nt, Homo sapiens
  misc_RNA (1)...(19): siRNA sense strand
cacaagcaauccagaggua

SEQ ID NO: 1794534 - RNA, 19 nt, Homo sapiens
  misc_RNA (1)...(19): siRNA sense strand
ucucauggaucauacagaa

SEQ ID NO: 1794535 - RNA, 19 nt, Homo sapiens
  misc_RNA (1)...(19): siRNA sense strand
acaagggcuuugaugauaa

SEQ ID NO: 1794536 - RNA, 19 nt, Homo sapiens
  misc_RNA (1)...(19): siRNA sense strand
uggcacaucucuauauaau

SEQ ID NO: 1794537 - RNA, 19 nt, Homo sapiens
  misc_RNA (1)...(19): siRNA sense strand
gggcuacacuggauugauc

SEQ ID NO: 1794538 - RNA, 19 nt, Homo sapiens
  misc_RNA (1)...(19): siRNA sense strand
ucucgagacuugaaagauu

SEQ ID NO: 1794539 - RNA, 19 nt, Homo sapiens
  misc_RNA (1)...(19): siRNA sense strand
caccuacaauagucaauuu

SEQ ID NO: 1794540 - RNA, 19 nt, Homo sapiens
  misc_RNA (1)...(19): siRNA sense strand
ggaaccagaugcaaguaag

SEQ ID NO: 1794541 - RNA, 19 nt, Homo sapiens
  misc_RNA (1)...(19): siRNA sense strand
caaauuccaaacugugaua

SEQ ID NO: 1794542 - RNA, 19 nt, Homo sapiens
  misc_RNA (1)...(19): siRNA sense strand
acaagaacauggaagacuu

SEQ ID NO: 1794543 - RNA, 19 nt, Homo sapiens
  misc_RNA (1)...(19): siRNA sense strand
auuagaaacugcaucauug

SEQ ID NO: 1794544 - RNA, 19 nt, Homo sapiens
  misc_RNA (1)...(19): siRNA sense strand
gaaggugacucugaaugag

SEQ ID NO: 1794545 - RNA, 19 nt, Homo sapiens
  misc_RNA (1)...(19): siRNA sense strand
agacuuacaucgucauauc

SEQ ID NO: 1794546 - RNA, 19 nt, Homo sapiens
  misc_RNA (1)...(19): siRNA sense strand
gaagacuuacaucgucaua

SEQ ID NO: 1794547 - RNA, 19 nt, Homo sapiens
  misc_RNA (1)...(19): siRNA sense strand
gauccaaacauccgaguug

SEQ ID NO: 1794548 - RNA, 19 nt, Homo sapiens
  misc_RNA (1)...(19): siRNA sense strand
gaaaacuacugucgaaauc

SEQ ID NO: 1794549 - RNA, 19 nt, Homo sapiens
  misc_RNA (1)...(19): siRNA sense strand
acacugauguuccuuugga

SEQ ID NO: 1794550 - RNA, 19 nt, Homo sapiens
  misc_RNA (1)...(19): siRNA sense strand
acacuggauugaucaacua

SEQ ID NO: 1794551 - RNA, 19 nt, Homo sapiens
  misc_RNA (1)...(19): siRNA sense strand
ugggaguacugugcaauua

SEQ ID NO: 1794552 - RNA, 19 nt, Homo sapiens
  misc_RNA (1)...(19): siRNA sense strand
agaccaaugugcuaauaga

SEQ ID NO: 1794553 - RNA, 19 nt, Homo sapiens
  misc_RNA (1)...(19): siRNA sense strand
uuuagaccaucccguaaua

SEQ ID NO: 1794554 - RNA, 19 nt, Homo sapiens
  misc_RNA (1)...(19): siRNA sense strand
gauccagcacugaagauaa

SEQ ID NO: 1794555 - RNA, 19 nt, Homo sapiens
  misc_RNA (1)...(19): siRNA sense strand
caugucaaguggagugaaa

SEQ ID NO: 1794556 - RNA, 19 nt, Homo sapiens
  misc_RNA (1)...(19): siRNA sense strand
ugaaugagucugaaauaug

SEQ ID NO: 1794557 - RNA, 19 nt, Homo sapiens
  misc_RNA (1)...(19): siRNA sense strand
cucgagacuugaaagauua

SEQ ID NO: 1794558 - RNA, 19 nt, Homo sapiens
  misc_RNA (1)...(19): siRNA sense strand
caagggcuuugaugauaau

SEQ ID NO: 1794559 - RNA, 19 nt, Homo sapiens
  misc_RNA (1)...(19): siRNA sense strand
gcgcugggaucaucagaca

SEQ ID NO: 1794560 - RNA, 19 nt, Homo sapiens
  misc_RNA (1)...(19): siRNA sense strand
ccaugaauuugaccucuau

SEQ ID NO: 1794561 - RNA, 19 nt, Homo sapiens
  misc_RNA (1)...(19): siRNA sense strand
ugacacugauguuccuuug

SEQ ID NO: 1794562 - RNA, 19 nt, Homo sapiens
  misc_RNA (1)...(19): siRNA sense strand
gcguugggauucucaguau

SEQ ID NO: 1794563 - RNA, 19 nt, Homo sapiens
  misc_RNA (1)...(19): siRNA sense strand
ugacaugacuccugaaaau

SEQ ID NO: 1794564 - RNA, 19 nt, Homo sapiens
  misc_RNA (1)...(19): siRNA sense strand
gcugguauauggcccugaa

SEQ ID NO: 1794565 - RNA, 19 nt, Homo sapiens
  misc_RNA (1)...(19): siRNA sense strand
ggauggaugguuaguuuga

SEQ ID NO: 1794566 - RNA, 19 nt, Homo sapiens
  misc_RNA (1)...(19): siRNA sense strand
cagcaaagacuacccuaau

SEQ ID NO: 1794567 - RNA, 19 nt, Homo sapiens
  misc_RNA (1)...(19): siRNA sense strand
cuacgaagucugugacauu

SEQ ID NO: 1794568 - RNA, 19 nt, Homo sapiens
  misc_RNA (1)...(19): siRNA sense strand
gaauacugcagaccaaugu

SEQ ID NO: 1794569 - RNA, 19 nt, Homo sapiens
  misc_RNA (1)...(19): siRNA sense strand
gcaaggaccuacgagaaaa

SEQ ID NO: 1794570 - RNA, 19 nt, Homo sapiens
  misc_RNA (1)...(19): siRNA sense strand
uaaaggacuuccauucacu

SEQ ID NO: 1794571 - RNA, 19 nt, Homo sapiens
  misc_RNA (1)...(19): siRNA sense strand
gccaugaauuugaccucua

SEQ ID NO: 1794572 - RNA, 19 nt, Homo sapiens
  misc_RNA (1)...(19): siRNA sense strand
cuggauugaucaacuauga

SEQ ID NO: 1794573 - RNA, 19 nt, Homo sapiens
  misc_RNA (1)...(19): siRNA sense strand
cggaagaggagaugagaaa

SEQ ID NO: 1794574 - RNA, 19 nt, Homo sapiens
  misc_RNA (1)...(19): siRNA sense strand
cacgggaaauccacucauu

SEQ ID NO: 1794575 - RNA, 19 nt, Homo sapiens
  misc_RNA (1)...(19): siRNA sense strand
caaagacuacccuaaucaa

SEQ ID NO: 1794576 - RNA, 19 nt, Homo sapiens
  misc_RNA (1)...(19): siRNA sense strand
gcacaaauucuugccugaa

SEQ ID NO: 1794577 - RNA, 19 nt, Homo sapiens
  misc_RNA (1)...(19): siRNA sense strand
ggguaaagaccuacaggaa

SEQ ID NO: 1794578 - RNA, 19 nt, Homo sapiens
  misc_RNA (1)...(19): siRNA sense strand
ggacaaaggaaaagaagaa

SEQ ID NO: 1794579 - RNA, 19 nt, Homo sapiens
  misc_RNA (1)...(19): siRNA sense strand
acgaaacaauugcgaguug

SEQ ID NO: 1794580 - RNA, 19 nt, Homo sapiens
  misc_RNA (1)...(19): siRNA sense strand
gccgaaauccagaugauga

SEQ ID NO: 1794581 - RNA, 19 nt, Homo sapiens
  misc_RNA (1)...(19): siRNA sense strand
ccaaacaagaucuggacua

SEQ ID NO: 1794582 - RNA, 19 nt, Homo sapiens
  misc_RNA (1)...(19): siRNA sense strand
gggaguacugugcaauuaa

SEQ ID NO: 1794583 - RNA, 19 nt, Homo sapiens
  misc_RNA (1)...(19): siRNA sense strand
ccauggugcuauacucuug

SEQ ID NO: 1794584 - RNA, 19 nt, Homo sapiens
  misc_RNA (1)...(19): siRNA sense strand
cgacaagggcuuugaugau

SEQ ID NO: 1794585 - RNA, 19 nt, Homo sapiens
  misc_RNA (1)...(19): siRNA sense strand
cauuagaaacugcaucauu

SEQ ID NO: 1794586 - RNA, 19 nt, Homo sapiens
  misc_RNA (1)...(19): siRNA sense strand
ggucguggaugugccauuc

SEQ ID NO: 1794587 - RNA, 19 nt, Homo sapiens
  misc_RNA (1)...(19): siRNA sense strand
ggccugcuguccuggauga

SEQ ID NO: 1794588 - RNA, 19 nt, Homo sapiens
  misc_RNA (1)...(19): siRNA sense strand
aaacauaggauggaugguu

SEQ ID NO: 1794589 - RNA, 19 nt, Homo sapiens
  misc_RNA (1)...(19): siRNA sense strand
gaaugacacugauguuccu

SEQ ID NO: 1794590 - RNA, 19 nt, Homo sapiens
  misc_RNA (1)...(19): siRNA sense strand
ccgaggccauggugcuaua

SEQ ID NO: 1794591 - RNA, 19 nt, Homo sapiens
  misc_RNA (1)...(19): siRNA sense strand
gaugugccauuccaaaucg

SEQ ID NO: 1794592 - RNA, 19 nt, Homo sapiens
  misc_RNA (1)...(19): siRNA sense strand
gaacaccacugacuuugug

SEQ ID NO: 1794593 - RNA, 19 nt, Homo sapiens
  misc_RNA (1)...(19): siRNA sense strand
gcaggcuucuguaacauua

SEQ ID NO: 1794594 - RNA, 19 nt, Homo sapiens
  misc_RNA (1)...(19): siRNA sense strand
ggagggaacugcuguuagu

SEQ ID NO: 1794595 - RNA, 19 nt, Homo sapiens
  misc_RNA (1)...(19): siRNA sense strand
gaacaacccauacaucauc

SEQ ID NO: 1794596 - RNA, 19 nt, Homo sapiens
  misc_RNA (1)...(19): siRNA sense strand
gaagaucugucaaaaccua

SEQ ID NO: 1794597 - RNA, 19 nt, Homo sapiens
  misc_RNA (1)...(19): siRNA sense strand
uccaaacccuaauaagaua

SEQ ID NO: 1794598 - RNA, 19 nt, Homo sapiens
  misc_RNA (1)...(19): siRNA sense strand
gcauugcuguugauauuag

SEQ ID NO: 1794599 - RNA, 19 nt, Homo sapiens
  misc_RNA (1)...(19): siRNA sense strand
gugaagacgucguugaaca

SEQ ID NO: 1794600 - RNA, 19 nt, Homo sapiens
  misc_RNA (1)...(19): siRNA sense strand
cgagaccucugguugugaa

SEQ ID NO: 1794601 - RNA, 19 nt, Homo sapiens
  misc_RNA (1)...(19): siRNA sense strand
ggaaaccacccaaaaguaa

SEQ ID NO: 1794602 - RNA, 19 nt, Homo sapiens
  misc_RNA (1)...(19): siRNA sense strand
gcgaggauaugcacuucau

SEQ ID NO: 1794603 - RNA, 19 nt, Homo sapiens
  misc_RNA (1)...(19): siRNA sense strand
gauaaggaaaccacccaaa

SEQ ID NO: 1794604 - RNA, 19 nt, Homo sapiens
  misc_RNA (1)...(19): siRNA sense strand
caugaucaccucacacuug

SEQ ID NO: 1794605 - RNA, 19 nt, Homo sapiens
  misc_RNA (1)...(19): siRNA sense strand
gacgagaccucugguugug

SEQ ID NO: 1794606 - RNA, 19 nt, Homo sapiens
  misc_RNA (1)...(19): siRNA sense strand
aaagaaagcagagagaaau

SEQ ID NO: 1794607 - RNA, 19 nt, Homo sapiens
  misc_RNA (1)...(19): siRNA sense strand
gaagugucccugccuguca

SEQ ID NO: 1794608 - RNA, 19 nt, Homo sapiens
  misc_RNA (1)...(19): siRNA sense strand
gagcgaggauaugcacuuc

SEQ ID NO: 1794609 - RNA, 19 nt, Homo sapiens
  misc_RNA (1)...(19): siRNA sense strand
caguuaagccuaagcagaa

SEQ ID NO: 1794610 - RNA, 19 nt, Homo sapiens
  misc_RNA (1)...(19): siRNA sense strand
uguuaguucugguguguaa

SEQ ID NO: 1794611 - RNA, 19 nt, Homo sapiens
  misc_RNA (1)...(19): siRNA sense strand
ccucacacuugauucaguu

SEQ ID NO: 1794612 - RNA, 19 nt, Homo sapiens
  misc_RNA (1)...(19): siRNA sense strand
gaaagcagagagaaaugca

SEQ ID NO: 1794613 - RNA, 19 nt, Homo sapiens
  misc_RNA (1)...(19): siRNA sense strand
gcuguuaguucuggugugu

SEQ ID NO: 1794614 - RNA, 19 nt, Homo sapiens
  misc_RNA (1)...(19): siRNA sense strand
uugauucaguuaagccuaa

SEQ ID NO: 1794615 - RNA, 19 nt, Homo sapiens
  misc_RNA (1)...(19): siRNA sense strand
gggaaaauuuagagacuga

SEQ ID NO: 1794616 - RNA, 19 nt, Homo sapiens
  misc_RNA (1)...(19): siRNA sense strand
agacugaaccucuggaaag

SEQ ID NO: 1794617 - RNA, 19 nt, Homo sapiens
  misc_RNA (1)...(19): siRNA sense strand
agucaagccugccaugauc

SEQ ID NO: 1794618 - RNA, 19 nt, Homo sapiens
  misc_RNA (1)...(19): siRNA sense strand
ggucggcaggcuucuguaa

SEQ ID NO: 1794619 - RNA, 19 nt, Homo sapiens
  misc_RNA (1)...(19): siRNA sense strand
uuaaagcuauuggacuuca

SEQ ID NO: 1794620 - RNA, 19 nt, Homo sapiens
  misc_RNA (1)...(19): siRNA sense strand
ugaagacgucguugaacaa

SEQ ID NO: 1794621 - RNA, 19 nt, Homo sapiens
  misc_RNA (1)...(19): siRNA sense strand
gagacugaaccucuggaaa

SEQ ID NO: 1794622 - RNA, 19 nt, Homo sapiens
  misc_RNA (1)...(19): siRNA sense strand
gaagaaaacagaugcuaag

SEQ ID NO: 1794623 - RNA, 19 nt, Homo sapiens
  misc_RNA (1)...(19): siRNA sense strand
cgaaguaagagccaucauc

SEQ ID NO: 1794624 - RNA, 19 nt, Homo sapiens
  misc_RNA (1)...(19): siRNA sense strand
ccaaacccuaauaagauaa

SEQ ID NO: 1794625 - RNA, 19 nt, Homo sapiens
  misc_RNA (1)...(19): siRNA sense strand
augaucaccucacacuuga

SEQ ID NO: 1794626 - RNA, 19 nt, Homo sapiens
  misc_RNA (1)...(19): siRNA sense strand
ggcugcagcuccucaagca

SEQ ID NO: 1794627 - RNA, 19 nt, Homo sapiens
  misc_RNA (1)...(19): siRNA sense strand
ucggcaggcuucuguaaca

SEQ ID NO: 1794628 - RNA, 19 nt, Homo sapiens
  misc_RNA (1)...(19): siRNA sense strand
cauuggcguuaacgaaguu

SEQ ID NO: 1794629 - RNA, 19 nt, Homo sapiens
  misc_RNA (1)...(19): siRNA sense strand
gaaaccacccaaaaguaaa

SEQ ID NO: 1794630 - RNA, 19 nt, Homo sapiens
  misc_RNA (1)...(19): siRNA sense strand
ugucaaaaccuaagagaaa

SEQ ID NO: 1794631 - RNA, 19 nt, Homo sapiens
  misc_RNA (1)...(19): siRNA sense strand
uugaacaacccauacauca

SEQ ID NO: 1794632 - RNA, 19 nt, Homo sapiens
  misc_RNA (1)...(19): siRNA sense strand
uuccaaacccuaauaagau

SEQ ID NO: 1794633 - RNA, 19 nt, Homo sapiens
  misc_RNA (1)...(19): siRNA sense strand
aaggagggaacugcuguua

SEQ ID NO: 1794634 - RNA, 19 nt, Homo sapiens
  misc_RNA (1)...(19): siRNA sense strand
ucaccucacacuugauuca

SEQ ID NO: 1794635 - RNA, 19 nt, Homo sapiens
  misc_RNA (1)...(19): siRNA sense strand
cuaauaagauaaggaaacc

SEQ ID NO: 1794636 - RNA, 19 nt, Homo sapiens
  misc_RNA (1)...(19): siRNA sense strand
ucacacuugauucaguuaa

SEQ ID NO: 1794637 - RNA, 19 nt, Homo sapiens
  misc_RNA (1)...(19): siRNA sense strand
ugauuccaaacccuaauaa

SEQ ID NO: 1794638 - RNA, 19 nt, Homo sapiens
  misc_RNA (1)...(19): siRNA sense strand
agacgagaccucugguugu

SEQ ID NO: 1794639 - RNA, 19 nt, Homo sapiens
  misc_RNA (1)...(19): siRNA sense strand
auuccaaacccuaauaaga

SEQ ID NO: 1794640 - RNA, 19 nt, Homo sapiens
  misc_RNA (1)...(19): siRNA sense strand
guucugguguguaaaucag

SEQ ID NO: 1794641 - RNA, 19 nt, Homo sapiens
  misc_RNA (1)...(19): siRNA sense strand
ggcaggcuucuguaacauu

SEQ ID NO: 1794642 - RNA, 19 nt, Homo sapiens
  misc_RNA (1)...(19): siRNA sense strand
guaccauggcuucaagaca

SEQ ID NO: 1794643 - RNA, 19 nt, Homo sapiens
  misc_RNA (1)...(19): siRNA sense strand
ccuaauaagauaaggaaac

SEQ ID NO: 1794644 - RNA, 19 nt, Homo sapiens
  misc_RNA (1)...(19): siRNA sense strand
gacugaaccucuggaaagc

SEQ ID NO: 1794645 - RNA, 19 nt, Homo sapiens
  misc_RNA (1)...(19): siRNA sense strand
gaacaccacugacuuugug

SEQ ID NO: 1794646 - RNA, 19 nt, Homo sapiens
  misc_RNA (1)...(19): siRNA sense strand
gcaggcuucuguaacauua

SEQ ID NO: 1794647 - RNA, 19 nt, Homo sapiens
  misc_RNA (1)...(19): siRNA sense strand
ggagggaacugcuguuagu

SEQ ID NO: 1794648 - RNA, 19 nt, Homo sapiens
  misc_RNA (1)...(19): siRNA sense strand
gaacaacccauacaucauc

SEQ ID NO: 1794649 - RNA, 19 nt, Homo sapiens
  misc_RNA (1)...(19): siRNA sense strand
gaagaucugucaaaaccua

SEQ ID NO: 1794650 - RNA, 19 nt, Homo sapiens
  misc_RNA (1)...(19): siRNA sense strand
uccaaacccuaauaagaua

SEQ ID NO: 1794651 - RNA, 19 nt, Homo sapiens
  misc_RNA (1)...(19): siRNA sense strand
gcauugcuguugauauuag

SEQ ID NO: 1794652 - RNA, 19 nt, Homo sapiens
  misc_RNA (1)...(19): siRNA sense strand
gugaagacgucguugaaca

SEQ ID NO: 1794653 - RNA, 19 nt, Homo sapiens
  misc_RNA (1)...(19): siRNA sense strand
cgagaccucugguugugaa

SEQ ID NO: 1794654 - RNA, 19 nt, Homo sapiens
  misc_RNA (1)...(19): siRNA sense strand
ggaaaccacccaaaaguaa

SEQ ID NO: 1794655 - RNA, 19 nt, Homo sapiens
  misc_RNA (1)...(19): siRNA sense strand
gcgaggauaugcacuucau

SEQ ID NO: 1794656 - RNA, 19 nt, Homo sapiens
  misc_RNA (1)...(19): siRNA sense strand
gauaaggaaaccacccaaa

SEQ ID NO: 1794657 - RNA, 19 nt, Homo sapiens
  misc_RNA (1)...(19): siRNA sense strand
caugaucaccucacacuug

SEQ ID NO: 1794658 - RNA, 19 nt, Homo sapiens
  misc_RNA (1)...(19): siRNA sense strand
gacgagaccucugguugug

SEQ ID NO: 1794659 - RNA, 19 nt, Homo sapiens
  misc_RNA (1)...(19): siRNA sense strand
aaagaaagcagagagaaau

SEQ ID NO: 1794660 - RNA, 19 nt, Homo sapiens
  misc_RNA (1)...(19): siRNA sense strand
gaagugucccugccuguca

SEQ ID NO: 1794661 - RNA, 19 nt, Homo sapiens
  misc_RNA (1)...(19): siRNA sense strand
gagcgaggauaugcacuuc

SEQ ID NO: 1794662 - RNA, 19 nt, Homo sapiens
  misc_RNA (1)...(19): siRNA sense strand
caguuaagccuaagcagaa

SEQ ID NO: 1794663 - RNA, 19 nt, Homo sapiens
  misc_RNA (1)...(19): siRNA sense strand
uguuaguucugguguguaa

SEQ ID NO: 1794664 - RNA, 19 nt, Homo sapiens
  misc_RNA (1)...(19): siRNA sense strand
ccucacacuugauucaguu

SEQ ID NO: 1794665 - RNA, 19 nt, Homo sapiens
  misc_RNA (1)...(19): siRNA sense strand
gaaagcagagagaaaugca

SEQ ID NO: 1794666 - RNA, 19 nt, Homo sapiens
  misc_RNA (1)...(19): siRNA sense strand
gcuguuaguucuggugugu

SEQ ID NO: 1794667 - RNA, 19 nt, Homo sapiens
  misc_RNA (1)...(19): siRNA sense strand
uugauucaguuaagccuaa

SEQ ID NO: 1794668 - RNA, 19 nt, Homo sapiens
  misc_RNA (1)...(19): siRNA sense strand
gggaaaauuuagagacuga

SEQ ID NO: 1794669 - RNA, 19 nt, Homo sapiens
  misc_RNA (1)...(19): siRNA sense strand
agacugaaccucuggaaag

SEQ ID NO: 1794670 - RNA, 19 nt, Homo sapiens
  misc_RNA (1)...(19): siRNA sense strand
agucaagccugccaugauc

SEQ ID NO: 1794671 - RNA, 19 nt, Homo sapiens
  misc_RNA (1)...(19): siRNA sense strand
ggucggcaggcuucuguaa

SEQ ID NO: 1794672 - RNA, 19 nt, Homo sapiens
  misc_RNA (1)...(19): siRNA sense strand
uuaaagcuauuggacuuca

SEQ ID NO: 1794673 - RNA, 19 nt, Homo sapiens
  misc_RNA (1)...(19): siRNA sense strand
ugaagacgucguugaacaa

SEQ ID NO: 1794674 - RNA, 19 nt, Homo sapiens
  misc_RNA (1)...(19): siRNA sense strand
gagacugaaccucuggaaa

SEQ ID NO: 1794675 - RNA, 19 nt, Homo sapiens
  misc_RNA (1)...(19): siRNA sense strand
gaagaaaacagaugcuaag

SEQ ID NO: 1794676 - RNA, 19 nt, Homo sapiens
  misc_RNA (1)...(19): siRNA sense strand
cgaaguaagagccaucauc

SEQ ID NO: 1794677 - RNA, 19 nt, Homo sapiens
  misc_RNA (1)...(19): siRNA sense strand
ccaaacccuaauaagauaa

SEQ ID NO: 1794678 - RNA, 19 nt, Homo sapiens
  misc_RNA (1)...(19): siRNA sense strand
augaucaccucacacuuga

SEQ ID NO: 1794679 - RNA, 19 nt, Homo sapiens
  misc_RNA (1)...(19): siRNA sense strand
ggcugcagcuccucaagca

SEQ ID NO: 1794680 - RNA, 19 nt, Homo sapiens
  misc_RNA (1)...(19): siRNA sense strand
ucggcaggcuucuguaaca

SEQ ID NO: 1794681 - RNA, 19 nt, Homo sapiens
  misc_RNA (1)...(19): siRNA sense strand
cauuggcguuaacgaaguu

SEQ ID NO: 1794682 - RNA, 19 nt, Homo sapiens
  misc_RNA (1)...(19): siRNA sense strand
gaaaccacccaaaaguaaa

SEQ ID NO: 1794683 - RNA, 19 nt, Homo sapiens
  misc_RNA (1)...(19): siRNA sense strand
ugucaaaaccuaagagaaa

SEQ ID NO: 1794684 - RNA, 19 nt, Homo sapiens
  misc_RNA (1)...(19): siRNA sense strand
uugaacaacccauacauca

SEQ ID NO: 1794685 - RNA, 19 nt, Homo sapiens
  misc_RNA (1)...(19): siRNA sense strand
uuccaaacccuaauaagau

SEQ ID NO: 1794686 - RNA, 19 nt, Homo sapiens
  misc_RNA (1)...(19): siRNA sense strand
aaggagggaacugcuguua

SEQ ID NO: 1794687 - RNA, 19 nt, Homo sapiens
  misc_RNA (1)...(19): siRNA sense strand
ucaccucacacuugauuca

SEQ ID NO: 1794688 - RNA, 19 nt, Homo sapiens
  misc_RNA (1)...(19): siRNA sense strand
cuaauaagauaaggaaacc

SEQ ID NO: 1794689 - RNA, 19 nt, Homo sapiens
  misc_RNA (1)...(19): siRNA sense strand
ucacacuugauucaguuaa

SEQ ID NO: 1794690 - RNA, 19 nt, Homo sapiens
  misc_RNA (1)...(19): siRNA sense strand
ugauuccaaacccuaauaa

SEQ ID NO: 1794691 - RNA, 19 nt, Homo sapiens
  misc_RNA (1)...(19): siRNA sense strand
agacgagaccucugguugu

SEQ ID NO: 1794692 - RNA, 19 nt, Homo sapiens
  misc_RNA (1)...(19): siRNA sense strand
auuccaaacccuaauaaga

SEQ ID NO: 1794693 - RNA, 19 nt, Homo sapiens
  misc_RNA (1)...(19): siRNA sense strand
guucugguguguaaaucag

SEQ ID NO: 1794694 - RNA, 19 nt, Homo sapiens
  misc_RNA (1)...(19): siRNA sense strand
ggcaggcuucuguaacauu

SEQ ID NO: 1794695 - RNA, 19 nt, Homo sapiens
  misc_RNA (1)...(19): siRNA sense strand
guaccauggcuucaagaca

SEQ ID NO: 1794696 - RNA, 19 nt, Homo sapiens
  misc_RNA (1)...(19): siRNA sense strand
ccuaauaagauaaggaaac

SEQ ID NO: 1794697 - RNA, 19 nt, Homo sapiens
  misc_RNA (1)...(19): siRNA sense strand
gacugaaccucuggaaagc

SEQ ID NO: 1794698 - RNA, 19 nt, Homo sapiens
  misc_RNA (1)...(19): siRNA sense strand
gaagagagauuccuauagu

SEQ ID NO: 1794699 - RNA, 19 nt, Homo sapiens
  misc_RNA (1)...(19): siRNA sense strand
gguaauaacuggaagugaa

SEQ ID NO: 1794700 - RNA, 19 nt, Homo sapiens
  misc_RNA (1)...(19): siRNA sense strand
gaucuucucuuucuaacaa

SEQ ID NO: 1794701 - RNA, 19 nt, Homo sapiens
  misc_RNA (1)...(19): siRNA sense strand
ggacaacauuggcuagaga

SEQ ID NO: 1794702 - RNA, 19 nt, Homo sapiens
  misc_RNA (1)...(19): siRNA sense strand
gaaccugcauuucauagag

SEQ ID NO: 1794703 - RNA, 19 nt, Homo sapiens
  misc_RNA (1)...(19): siRNA sense strand
uaacaaaucgaguugaaga

SEQ ID NO: 1794704 - RNA, 19 nt, Homo sapiens
  misc_RNA (1)...(19): siRNA sense strand
gggauuuguuccuuauauu

SEQ ID NO: 1794705 - RNA, 19 nt, Homo sapiens
  misc_RNA (1)...(19): siRNA sense strand
gauagaaggaagagagauu

SEQ ID NO: 1794706 - RNA, 19 nt, Homo sapiens
  misc_RNA (1)...(19): siRNA sense strand
gaccaaaggagauaauaau

SEQ ID NO: 1794707 - RNA, 19 nt, Homo sapiens
  misc_RNA (1)...(19): siRNA sense strand
gaagugaaaguccgauugu

SEQ ID NO: 1794708 - RNA, 19 nt, Homo sapiens
  misc_RNA (1)...(19): siRNA sense strand
gcauggaaccugcauuuca

SEQ ID NO: 1794709 - RNA, 19 nt, Homo sapiens
  misc_RNA (1)...(19): siRNA sense strand
uaaguaugcaguucucuuu

SEQ ID NO: 1794710 - RNA, 19 nt, Homo sapiens
  misc_RNA (1)...(19): siRNA sense strand
guaauaacuggaagugaaa

SEQ ID NO: 1794711 - RNA, 19 nt, Homo sapiens
  misc_RNA (1)...(19): siRNA sense strand
gagauaauaaugcgguuga

SEQ ID NO: 1794712 - RNA, 19 nt, Homo sapiens
  misc_RNA (1)...(19): siRNA sense strand
ggaagugaaaguccgauug

SEQ ID NO: 1794713 - RNA, 19 nt, Homo sapiens
  misc_RNA (1)...(19): siRNA sense strand
cagcauggaaccugcauuu

SEQ ID NO: 1794714 - RNA, 19 nt, Homo sapiens
  misc_RNA (1)...(19): siRNA sense strand
ucuaacaaaucgaguugaa

SEQ ID NO: 1794715 - RNA, 19 nt, Homo sapiens
  misc_RNA (1)...(19): siRNA sense strand
ggauuuguuccuuauauug

SEQ ID NO: 1794716 - RNA, 19 nt, Homo sapiens
  misc_RNA (1)...(19): siRNA sense strand
gcugguucaucgugaguaa

SEQ ID NO: 1794717 - RNA, 19 nt, Homo sapiens
  misc_RNA (1)...(19): siRNA sense strand
aaaugggcauaucaaguuu

SEQ ID NO: 1794718 - RNA, 19 nt, Homo sapiens
  misc_RNA (1)...(19): siRNA sense strand
ugaccgaggccucuauaaa

SEQ ID NO: 1794719 - RNA, 19 nt, Homo sapiens
  misc_RNA (1)...(19): siRNA sense strand
cauggaaccugcauuucau

SEQ ID NO: 1794720 - RNA, 19 nt, Homo sapiens
  misc_RNA (1)...(19): siRNA sense strand
ugaccaaaggagauaauaa

SEQ ID NO: 1794721 - RNA, 19 nt, Homo sapiens
  misc_RNA (1)...(19): siRNA sense strand
gaagauucaugaaaagcaa

SEQ ID NO: 1794722 - RNA, 19 nt, Homo sapiens
  misc_RNA (1)...(19): siRNA sense strand
gaugaccgaggccucuaua

SEQ ID NO: 1794723 - RNA, 19 nt, Homo sapiens
  misc_RNA (1)...(19): siRNA sense strand
auaauaaugcgguugauga

SEQ ID NO: 1794724 - RNA, 19 nt, Homo sapiens
  misc_RNA (1)...(19): siRNA sense strand
aagagagauuccuauaguu

SEQ ID NO: 1794725 - RNA, 19 nt, Homo sapiens
  misc_RNA (1)...(19): siRNA sense strand
gagagauuccuauaguuca

SEQ ID NO: 1794726 - RNA, 19 nt, Homo sapiens
  misc_RNA (1)...(19): siRNA sense strand
gaccgaggccucuauaaac

SEQ ID NO: 1794727 - RNA, 19 nt, Homo sapiens
  misc_RNA (1)...(19): siRNA sense strand
gauaauaaugcgguugaug

SEQ ID NO: 1794728 - RNA, 19 nt, Homo sapiens
  misc_RNA (1)...(19): siRNA sense strand
ggaaccugcauuucauaga

SEQ ID NO: 1794729 - RNA, 19 nt, Homo sapiens
  misc_RNA (1)...(19): siRNA sense strand
gugacgauccucaugaaug

SEQ ID NO: 1794730 - RNA, 19 nt, Homo sapiens
  misc_RNA (1)...(19): siRNA sense strand
uaaacaaggacaacauugg

SEQ ID NO: 1794731 - RNA, 19 nt, Homo sapiens
  misc_RNA (1)...(19): siRNA sense strand
cauacgagugggagaaauu

SEQ ID NO: 1794732 - RNA, 19 nt, Homo sapiens
  misc_RNA (1)...(19): siRNA sense strand
caucggcacuaaugaucug

SEQ ID NO: 1794733 - RNA, 19 nt, Homo sapiens
  misc_RNA (1)...(19): siRNA sense strand
caugaaugacuauccuaaa

SEQ ID NO: 1794734 - RNA, 19 nt, Homo sapiens
  misc_RNA (1)...(19): siRNA sense strand
ccaaaggagauaauaaugc

SEQ ID NO: 1794735 - RNA, 19 nt, Homo sapiens
  misc_RNA (1)...(19): siRNA sense strand
agagagauuccuauaguuc

SEQ ID NO: 1794736 - RNA, 19 nt, Homo sapiens
  misc_RNA (1)...(19): siRNA sense strand
uggaagggguuaaugguaa

SEQ ID NO: 1794737 - RNA, 19 nt, Homo sapiens
  misc_RNA (1)...(19): siRNA sense strand
cgaggccucuauaaacaag

SEQ ID NO: 1794738 - RNA, 19 nt, Homo sapiens
  misc_RNA (1)...(19): siRNA sense strand
aaaaugggcauaucaaguu

SEQ ID NO: 1794739 - RNA, 19 nt, Homo sapiens
  misc_RNA (1)...(19): siRNA sense strand
gugaaaguccgauuguagu

SEQ ID NO: 1794740 - RNA, 19 nt, Homo sapiens
  misc_RNA (1)...(19): siRNA sense strand
cgagugggagaaauuguug

SEQ ID NO: 1794741 - RNA, 19 nt, Homo sapiens
  misc_RNA (1)...(19): siRNA sense strand
aagugaaaguccgauugua

SEQ ID NO: 1794742 - RNA, 19 nt, Homo sapiens
  misc_RNA (1)...(19): siRNA sense strand
ccaggggauuuguuccuua

SEQ ID NO: 1794743 - RNA, 19 nt, Homo sapiens
  misc_RNA (1)...(19): siRNA sense strand
gacaacauuggcuagagaa

SEQ ID NO: 1794744 - RNA, 19 nt, Homo sapiens
  misc_RNA (1)...(19): siRNA sense strand
ugggagaaauuguuguuuu

SEQ ID NO: 1794745 - RNA, 19 nt, Homo sapiens
  misc_RNA (1)...(19): siRNA sense strand
ggggauuuguuccuuauau

SEQ ID NO: 1794746 - RNA, 19 nt, Homo sapiens
  misc_RNA (1)...(19): siRNA sense strand
cggcacuaaugaucuggaa

SEQ ID NO: 1794747 - RNA, 19 nt, Homo sapiens
  misc_RNA (1)...(19): siRNA sense strand
gcucaguggcagcauggaa

SEQ ID NO: 1794748 - RNA, 19 nt, Homo sapiens
  misc_RNA (1)...(19): siRNA sense strand
accgaggccucuauaaaca

SEQ ID NO: 1794749 - RNA, 19 nt, Homo sapiens
  misc_RNA (1)...(19): siRNA sense strand
aguugaagaucccauacga

SEQ ID NO: 1794750 - RNA, 19 nt, Homo sapiens
  misc_RNA (1)...(19): siRNA sense strand
ggaagggguuaaugguaau

SEQ ID NO: 1794751 - RNA, 19 nt, Homo sapiens
  misc_RNA (1)...(19): siRNA sense strand
ugaaaguccgauuguagug

SEQ ID NO: 1794752 - RNA, 19 nt, Homo sapiens
  misc_RNA (1)...(19): siRNA sense strand
gauuuguuccuuauauugg

SEQ ID NO: 1794753 - RNA, 19 nt, Homo sapiens
  misc_RNA (1)...(19): siRNA sense strand
gaaaagcaaaaugggcaua

SEQ ID NO: 1794754 - RNA, 19 nt, Homo sapiens
  misc_RNA (1)...(19): siRNA sense strand
ugucucaucggcacuaaug

SEQ ID NO: 1794755 - RNA, 19 nt, Homo sapiens
  misc_RNA (1)...(19): siRNA sense strand
gagcauagccaacuugaua

SEQ ID NO: 1794756 - RNA, 19 nt, Homo sapiens
  misc_RNA (1)...(19): siRNA sense strand
ggacuaugcugaaguauca

SEQ ID NO: 1794757 - RNA, 19 nt, Homo sapiens
  misc_RNA (1)...(19): siRNA sense strand
gaaaggaggcaauuugaaa

SEQ ID NO: 1794758 - RNA, 19 nt, Homo sapiens
  misc_RNA (1)...(19): siRNA sense strand
ggaagacuuugcaaugauu

SEQ ID NO: 1794759 - RNA, 19 nt, Homo sapiens
  misc_RNA (1)...(19): siRNA sense strand
gaagcacaguuacaagaaa

SEQ ID NO: 1794760 - RNA, 19 nt, Homo sapiens
  misc_RNA (1)...(19): siRNA sense strand
gaaauuaagcucuguucuu

SEQ ID NO: 1794761 - RNA, 19 nt, Homo sapiens
  misc_RNA (1)...(19): siRNA sense strand
gaucacagcuccugaacgu

SEQ ID NO: 1794762 - RNA, 19 nt, Homo sapiens
  misc_RNA (1)...(19): siRNA sense strand
guacaucuauacuaccaaa

SEQ ID NO: 1794763 - RNA, 19 nt, Homo sapiens
  misc_RNA (1)...(19): siRNA sense strand
uauauaagaugcucucaga

SEQ ID NO: 1794764 - RNA, 19 nt, Homo sapiens
  misc_RNA (1)...(19): siRNA sense strand
uaacaucucuaagcaaguu

SEQ ID NO: 1794765 - RNA, 19 nt, Homo sapiens
  misc_RNA (1)...(19): siRNA sense strand
caacauaaccuggugaguu

SEQ ID NO: 1794766 - RNA, 19 nt, Homo sapiens
  misc_RNA (1)...(19): siRNA sense strand
gcaaaggaggcaaaggaua

SEQ ID NO: 1794767 - RNA, 19 nt, Homo sapiens
  misc_RNA (1)...(19): siRNA sense strand
gcuauaacaucucuaagca

SEQ ID NO: 1794768 - RNA, 19 nt, Homo sapiens
  misc_RNA (1)...(19): siRNA sense strand
uagagacccugaaacguaa

SEQ ID NO: 1794769 - RNA, 19 nt, Homo sapiens
  misc_RNA (1)...(19): siRNA sense strand
ccaggaccuucuauuuaua

SEQ ID NO: 1794770 - RNA, 19 nt, Homo sapiens
  misc_RNA (1)...(19): siRNA sense strand
caaaggaggcaaaggauau

SEQ ID NO: 1794771 - RNA, 19 nt, Homo sapiens
  misc_RNA (1)...(19): siRNA sense strand
gagaauaagcgucuacuag

SEQ ID NO: 1794772 - RNA, 19 nt, Homo sapiens
  misc_RNA (1)...(19): siRNA sense strand
uaagaguaauugcccauga

SEQ ID NO: 1794773 - RNA, 19 nt, Homo sapiens
  misc_RNA (1)...(19): siRNA sense strand
cuggagagcugauuguuga

SEQ ID NO: 1794774 - RNA, 19 nt, Homo sapiens
  misc_RNA (1)...(19): siRNA sense strand
cuagagacccugaaacgua

SEQ ID NO: 1794775 - RNA, 19 nt, Homo sapiens
  misc_RNA (1)...(19): siRNA sense strand
cauggacuaugcugaagua

SEQ ID NO: 1794776 - RNA, 19 nt, Homo sapiens
  misc_RNA (1)...(19): siRNA sense strand
gcaagaccauggacuaugc

SEQ ID NO: 1794777 - RNA, 19 nt, Homo sapiens
  misc_RNA (1)...(19): siRNA sense strand
acauguaccugguuccuaa

SEQ ID NO: 1794778 - RNA, 19 nt, Homo sapiens
  misc_RNA (1)...(19): siRNA sense strand
caaccuccauaaggcauua

SEQ ID NO: 1794779 - RNA, 19 nt, Homo sapiens
  misc_RNA (1)...(19): siRNA sense strand
ccaaaacucuguacaguga

SEQ ID NO: 1794780 - RNA, 19 nt, Homo sapiens
  misc_RNA (1)...(19): siRNA sense strand
guggaagacuuugcaauga

SEQ ID NO: 1794781 - RNA, 19 nt, Homo sapiens
  misc_RNA (1)...(19): siRNA sense strand
gcuggcagaugauccacua

SEQ ID NO: 1794782 - RNA, 19 nt, Homo sapiens
  misc_RNA (1)...(19): siRNA sense strand
cgacagugguggaggaaug

SEQ ID NO: 1794783 - RNA, 19 nt, Homo sapiens
  misc_RNA (1)...(19): siRNA sense strand
gagauuaccacuuccucua

SEQ ID NO: 1794784 - RNA, 19 nt, Homo sapiens
  misc_RNA (1)...(19): siRNA sense strand
ggaagcacaguuacaagaa

SEQ ID NO: 1794785 - RNA, 19 nt, Homo sapiens
  misc_RNA (1)...(19): siRNA sense strand
uauaagaugcucucagaaa

SEQ ID NO: 1794786 - RNA, 19 nt, Homo sapiens
  misc_RNA (1)...(19): siRNA sense strand
uugaggagcuucuguugaa

SEQ ID NO: 1794787 - RNA, 19 nt, Homo sapiens
  misc_RNA (1)...(19): siRNA sense strand
gaaacguaaugucaacaag

SEQ ID NO: 1794788 - RNA, 19 nt, Homo sapiens
  misc_RNA (1)...(19): siRNA sense strand
uaagcucuguucuuuguug

SEQ ID NO: 1794789 - RNA, 19 nt, Homo sapiens
  misc_RNA (1)...(19): siRNA sense strand
ggaggaauguaugucauca

SEQ ID NO: 1794790 - RNA, 19 nt, Homo sapiens
  misc_RNA (1)...(19): siRNA sense strand
ggaggcaauuugaaaccaa

SEQ ID NO: 1794791 - RNA, 19 nt, Homo sapiens
  misc_RNA (1)...(19): siRNA sense strand
gaauguaugucaucaaccu

SEQ ID NO: 1794792 - RNA, 19 nt, Homo sapiens
  misc_RNA (1)...(19): siRNA sense strand
uccaggaccuucuauuuau

SEQ ID NO: 1794793 - RNA, 19 nt, Homo sapiens
  misc_RNA (1)...(19): siRNA sense strand
gaggguagaagccaucauu

SEQ ID NO: 1794794 - RNA, 19 nt, Homo sapiens
  misc_RNA (1)...(19): siRNA sense strand
ugucagcuguugugaagaa

SEQ ID NO: 1794795 - RNA, 19 nt, Homo sapiens
  misc_RNA (1)...(19): siRNA sense strand
cagaugaugggauuuauug

SEQ ID NO: 1794796 - RNA, 19 nt, Homo sapiens
  misc_RNA (1)...(19): siRNA sense strand
gaacgucagcagcuagaga

SEQ ID NO: 1794797 - RNA, 19 nt, Homo sapiens
  misc_RNA (1)...(19): siRNA sense strand
cauccaggaccuucuauuu

SEQ ID NO: 1794798 - RNA, 19 nt, Homo sapiens
  misc_RNA (1)...(19): siRNA sense strand
agaaacacauagagcagaa

SEQ ID NO: 1794799 - RNA, 19 nt, Homo sapiens
  misc_RNA (1)...(19): siRNA sense strand
gaaauagaggagaugauca

SEQ ID NO: 1794800 - RNA, 19 nt, Homo sapiens
  misc_RNA (1)...(19): siRNA sense strand
ccacuagaguuuguuggaa

SEQ ID NO: 1794801 - RNA, 19 nt, Homo sapiens
  misc_RNA (1)...(19): siRNA sense strand
agaauauuccgucuaguuu

SEQ ID NO: 1794802 - RNA, 19 nt, Homo sapiens
  misc_RNA (1)...(19): siRNA sense strand
gauagaaaggaggcaauuu

SEQ ID NO: 1794803 - RNA, 19 nt, Homo sapiens
  misc_RNA (1)...(19): siRNA sense strand
gcagaccggcucacagaga

SEQ ID NO: 1794804 - RNA, 19 nt, Homo sapiens
  misc_RNA (1)...(19): siRNA sense strand
caaagagaauaagcgucua

SEQ ID NO: 1794805 - RNA, 19 nt, Homo sapiens
  misc_RNA (1)...(19): siRNA sense strand
cacuagaguuuguuggaaa

SEQ ID NO: 1794806 - RNA, 19 nt, Homo sapiens
  misc_RNA (1)...(19): siRNA sense strand
gaaccaugcuccgaaugag

SEQ ID NO: 1794807 - RNA, 19 nt, Homo sapiens
  misc_RNA (1)...(19): siRNA sense strand
gccaagagaccaaaauaua

SEQ ID NO: 1794808 - RNA, 19 nt, Homo sapiens
  misc_RNA (1)...(19): siRNA sense strand
gaccauggacuaugcugaa

SEQ ID NO: 1794809 - RNA, 19 nt, Homo sapiens
  misc_RNA (1)...(19): siRNA sense strand
guggugugguggaguauga

SEQ ID NO: 1794810 - RNA, 19 nt, Homo sapiens
  misc_RNA (1)...(19): siRNA sense strand
uagaaaggaggcaauuuga

SEQ ID NO: 1794811 - RNA, 19 nt, Homo sapiens
  misc_RNA (1)...(19): siRNA sense strand
aggccaaccuugacagauu

SEQ ID NO: 1794812 - RNA, 19 nt, Homo sapiens
  misc_RNA (1)...(19): siRNA sense strand
gcugaaguaucaaacacau

SEQ ID NO: 1794813 - RNA, 19 nt, Homo sapiens
  misc_RNA (1)...(19): siRNA sense strand
cagaugauccacuagaguu

SEQ ID NO: 1794814 - RNA, 19 nt, Homo sapiens
  misc_RNA (1)...(19): siRNA sense strand
auagccaacuugauagaaa

SEQ ID NO: 1794815 - RNA, 19 nt, Homo sapiens
  misc_RNA (1)...(19): siRNA sense strand
ccugucagcugcccgaaug

SEQ ID NO: 1794816 - RNA, 19 nt, Homo sapiens
  misc_RNA (1)...(19): siRNA sense strand
ucaugucacuccaggaaau

SEQ ID NO: 1794817 - RNA, 19 nt, Homo sapiens
  misc_RNA (1)...(19): siRNA sense strand
ggaggcaaaggauaugcua

SEQ ID NO: 1794818 - RNA, 19 nt, Homo sapiens
  misc_RNA (1)...(19): siRNA sense strand
uacauugagugcaccauga

SEQ ID NO: 1794819 - RNA, 19 nt, Homo sapiens
  misc_RNA (1)...(19): siRNA sense strand
aacguaaugucaacaaguu

SEQ ID NO: 1794820 - RNA, 19 nt, Homo sapiens
  misc_RNA (1)...(19): siRNA sense strand
aggcaaaggauaugcuaua

SEQ ID NO: 1794821 - RNA, 19 nt, Homo sapiens
  misc_RNA (1)...(19): siRNA sense strand
ggccaaccuugacagauuc

SEQ ID NO: 1794822 - RNA, 19 nt, Homo sapiens
  misc_RNA (1)...(19): siRNA sense strand
gcuggagucuuacauugag

SEQ ID NO: 1794823 - RNA, 19 nt, Homo sapiens
  misc_RNA (1)...(19): siRNA sense strand
gcagcuagagacccugaaa

SEQ ID NO: 1794824 - RNA, 19 nt, Homo sapiens
  misc_RNA (1)...(19): siRNA sense strand
gguagaagccaucauugca

SEQ ID NO: 1794825 - RNA, 19 nt, Homo sapiens
  misc_RNA (1)...(19): siRNA sense strand
aaugucagcuguugugaag

SEQ ID NO: 1794826 - RNA, 19 nt, Homo sapiens
  misc_RNA (1)...(19): siRNA sense strand
gaugaucacagcuccugaa

SEQ ID NO: 1794827 - RNA, 19 nt, Homo sapiens
  misc_RNA (1)...(19): siRNA sense strand
auuaagcucuguucuuugu

SEQ ID NO: 1794828 - RNA, 19 nt, Homo sapiens
  misc_RNA (1)...(19): siRNA sense strand
ucgcugugcuagaauauuc

SEQ ID NO: 1794829 - RNA, 19 nt, Homo sapiens
  misc_RNA (1)...(19): siRNA sense strand
gauuaccacuuccucuagu

SEQ ID NO: 1794830 - RNA, 19 nt, Homo sapiens
  misc_RNA (1)...(19): siRNA sense strand
cgaaccaugcuccgaauga

SEQ ID NO: 1794831 - RNA, 19 nt, Homo sapiens
  misc_RNA (1)...(19): siRNA sense strand
guaccuaccacugagaauu

SEQ ID NO: 1794832 - RNA, 19 nt, Homo sapiens
  misc_RNA (1)...(19): siRNA sense strand
agacacacacuuuguacaa

SEQ ID NO: 1794833 - RNA, 19 nt, Homo sapiens
  misc_RNA (1)...(19): siRNA sense strand
uauugcgaaugcuuagaua

SEQ ID NO: 1794834 - RNA, 19 nt, Homo sapiens
  misc_RNA (1)...(19): siRNA sense strand
caagaaauagaggagauga

SEQ ID NO: 1794835 - RNA, 19 nt, Homo sapiens
  misc_RNA (1)...(19): siRNA sense strand
uggaaagucuggcgacagu

SEQ ID NO: 1794836 - RNA, 19 nt, Homo sapiens
  misc_RNA (1)...(19): siRNA sense strand
ugaagaaagcccugugugu

SEQ ID NO: 1794837 - RNA, 19 nt, Homo sapiens
  misc_RNA (1)...(19): siRNA sense strand
gaacggcaaacugacaaug

SEQ ID NO: 1794838 - RNA, 19 nt, Homo sapiens
  misc_RNA (1)...(19): siRNA sense strand
ggcagacacacacuuugua

SEQ ID NO: 1794839 - RNA, 19 nt, Homo sapiens
  misc_RNA (1)...(19): siRNA sense strand
uacaagaaauagaggagau

SEQ ID NO: 1794840 - RNA, 19 nt, Homo sapiens
  misc_RNA (1)...(19): siRNA sense strand
aagcacaguuacaagaaau

SEQ ID NO: 1794841 - RNA, 19 nt, Homo sapiens
  misc_RNA (1)...(19): siRNA sense strand
gaagccaucauugcaucua

SEQ ID NO: 1794842 - RNA, 19 nt, Homo sapiens
  misc_RNA (1)...(19): siRNA sense strand
gcauagccaacuugauaga

SEQ ID NO: 1794843 - RNA, 19 nt, Homo sapiens
  misc_RNA (1)...(19): siRNA sense strand
gcagaagaaacacauagag

SEQ ID NO: 1794844 - RNA, 19 nt, Homo sapiens
  misc_RNA (1)...(19): siRNA sense strand
guaccugguuccuaaacuc

SEQ ID NO: 1794845 - RNA, 19 nt, Homo sapiens
  misc_RNA (1)...(19): siRNA sense strand
ggaguccaucugauaagaa

SEQ ID NO: 1794846 - RNA, 19 nt, Homo sapiens
  misc_RNA (1)...(19): siRNA sense strand
auagaaaggaggcaauuug

SEQ ID NO: 1794847 - RNA, 19 nt, Homo sapiens
  misc_RNA (1)...(19): siRNA sense strand
acaagagcauagccaacuu

SEQ ID NO: 1794848 - RNA, 19 nt, Homo sapiens
  misc_RNA (1)...(19): siRNA sense strand
uggaagacuuugcaaugau

SEQ ID NO: 1794849 - RNA, 19 nt, Homo sapiens
  misc_RNA (1)...(19): siRNA sense strand
cugcuggagucuuacauug

SEQ ID NO: 1794850 - RNA, 19 nt, Homo sapiens
  misc_RNA (1)...(19): siRNA sense strand
cagcuguugugaagaaagu

SEQ ID NO: 1794851 - RNA, 19 nt, Homo sapiens
  misc_RNA (1)...(19): siRNA sense strand
gcacaguuacaagaaauag

SEQ ID NO: 1794852 - RNA, 19 nt, Homo sapiens
  misc_RNA (1)...(19): siRNA sense strand
auccaggaccuucuauuua

SEQ ID NO: 1794853 - RNA, 19 nt, Homo sapiens
  misc_RNA (1)...(19): siRNA sense strand
gcagaugauccacuagagu

SEQ ID NO: 1794854 - RNA, 19 nt, Homo sapiens
  misc_RNA (1)...(19): siRNA sense strand
gggucucgcugugcuagaa

SEQ ID NO: 1794855 - RNA, 19 nt, Homo sapiens
  misc_RNA (1)...(19): siRNA sense strand
gaaagugucagucaccuua

SEQ ID NO: 1794856 - RNA, 19 nt, Homo sapiens
  misc_RNA (1)...(19): siRNA sense strand
ccaaagacccugugaauca

SEQ ID NO: 1794857 - RNA, 19 nt, Homo sapiens
  misc_RNA (1)...(19): siRNA sense strand
gaugaucccuccuauguca

SEQ ID NO: 1794858 - RNA, 19 nt, Homo sapiens
  misc_RNA (1)...(19): siRNA sense strand
ggaguaaccugaaauuugc

SEQ ID NO: 1794859 - RNA, 19 nt, Homo sapiens
  misc_RNA (1)...(19): siRNA sense strand
gacaaucacuugcccauca

SEQ ID NO: 1794860 - RNA, 19 nt, Homo sapiens
  misc_RNA (1)...(19): siRNA sense strand
gaccacaccuggccaguau

SEQ ID NO: 1794861 - RNA, 19 nt, Homo sapiens
  misc_RNA (1)...(19): siRNA sense strand
ucagagagccugccacauu

SEQ ID NO: 1794862 - RNA, 19 nt, Homo sapiens
  misc_RNA (1)...(19): siRNA sense strand
gaguugcgcuucaaacaau

SEQ ID NO: 1794863 - RNA, 19 nt, Homo sapiens
  misc_RNA (1)...(19): siRNA sense strand
cacgggagcuuugucaaua

SEQ ID NO: 1794864 - RNA, 19 nt, Homo sapiens
  misc_RNA (1)...(19): siRNA sense strand
gaccaucaguacuauaaug

SEQ ID NO: 1794865 - RNA, 19 nt, Homo sapiens
  misc_RNA (1)...(19): siRNA sense strand
caugcaaucuaucucauuu

SEQ ID NO: 1794866 - RNA, 19 nt, Homo sapiens
  misc_RNA (1)...(19): siRNA sense strand
ucagucaccuuaucagcua

SEQ ID NO: 1794867 - RNA, 19 nt, Homo sapiens
  misc_RNA (1)...(19): siRNA sense strand
gacuaaggaucaccgcuuu

SEQ ID NO: 1794868 - RNA, 19 nt, Homo sapiens
  misc_RNA (1)...(19): siRNA sense strand
caggauggcuggcuuugau

SEQ ID NO: 1794869 - RNA, 19 nt, Homo sapiens
  misc_RNA (1)...(19): siRNA sense strand
cagagagccugccacauuc

SEQ ID NO: 1794870 - RNA, 19 nt, Homo sapiens
  misc_RNA (1)...(19): siRNA sense strand
ccacauggacaaucacuug

SEQ ID NO: 1794871 - RNA, 19 nt, Homo sapiens
  misc_RNA (1)...(19): siRNA sense strand
ggaggaguaaccugaaauu

SEQ ID NO: 1794872 - RNA, 19 nt, Homo sapiens
  misc_RNA (1)...(19): siRNA sense strand
caaucuaucucauuugcau

SEQ ID NO: 1794873 - RNA, 19 nt, Homo sapiens
  misc_RNA (1)...(19): siRNA sense strand
ccgaguaugucgccuaugu

SEQ ID NO: 1794874 - RNA, 19 nt, Homo sapiens
  misc_RNA (1)...(19): siRNA sense strand
gcuaccacauggacaauca

SEQ ID NO: 1794875 - RNA, 19 nt, Homo sapiens
  misc_RNA (1)...(19): siRNA sense strand
ccagaaguccgcaaacaga

SEQ ID NO: 1794876 - RNA, 19 nt, Homo sapiens
  misc_RNA (1)...(19): siRNA sense strand
gugggcagccuaagcauuu

SEQ ID NO: 1794877 - RNA, 19 nt, Homo sapiens
  misc_RNA (1)...(19): siRNA sense strand
ccaucagucugguguguga

SEQ ID NO: 1794878 - RNA, 19 nt, Homo sapiens
  misc_RNA (1)...(19): siRNA sense strand
ccugaaauuugcuggaaug

SEQ ID NO: 1794879 - RNA, 19 nt, Homo sapiens
  misc_RNA (1)...(19): siRNA sense strand
ggaccuguuugacaugaag

SEQ ID NO: 1794880 - RNA, 19 nt, Homo sapiens
  misc_RNA (1)...(19): siRNA sense strand
gaguaugucgccuauguug

SEQ ID NO: 1794881 - RNA, 19 nt, Homo sapiens
  misc_RNA (1)...(19): siRNA sense strand
ggaaugccaaucacucuca

SEQ ID NO: 1794882 - RNA, 19 nt, Homo sapiens
  misc_RNA (1)...(19): siRNA sense strand
gaggaguaaccugaaauuu

SEQ ID NO: 1794883 - RNA, 19 nt, Homo sapiens
  misc_RNA (1)...(19): siRNA sense strand
ccacuugggagcuacauug

SEQ ID NO: 1794884 - RNA, 19 nt, Homo sapiens
  misc_RNA (1)...(19): siRNA sense strand
ucaguacuauaaugacuuc

SEQ ID NO: 1794885 - RNA, 19 nt, Homo sapiens
  misc_RNA (1)...(19): siRNA sense strand
aggaguaaccugaaauuug

SEQ ID NO: 1794886 - RNA, 19 nt, Homo sapiens
  misc_RNA (1)...(19): siRNA sense strand
gggaugaggaggaggaaga

SEQ ID NO: 1794887 - RNA, 19 nt, Homo sapiens
  misc_RNA (1)...(19): siRNA sense strand
ccacaugcaaucuaucuca

SEQ ID NO: 1794888 - RNA, 19 nt, Homo sapiens
  misc_RNA (1)...(19): siRNA sense strand
ucgccuauguugccaaaga

SEQ ID NO: 1794889 - RNA, 19 nt, Homo sapiens
  misc_RNA (1)...(19): siRNA sense strand
caaagacccugugaaucag

SEQ ID NO: 1794890 - RNA, 19 nt, Homo sapiens
  misc_RNA (1)...(19): siRNA sense strand
aaggaucaccgcuuugaaa

SEQ ID NO: 1794891 - RNA, 19 nt, Homo sapiens
  misc_RNA (1)...(19): siRNA sense strand
caucaguacuauaaugacu

SEQ ID NO: 1794892 - RNA, 19 nt, Homo sapiens
  misc_RNA (1)...(19): siRNA sense strand
cuacuugguucgguacaug

SEQ ID NO: 1794893 - RNA, 19 nt, Homo sapiens
  misc_RNA (1)...(19): siRNA sense strand
acgggagcuuugucaauaa

SEQ ID NO: 1794894 - RNA, 19 nt, Homo sapiens
  misc_RNA (1)...(19): siRNA sense strand
cuaaggaucaccgcuuuga

SEQ ID NO: 1794895 - RNA, 19 nt, Homo sapiens
  misc_RNA (1)...(19): siRNA sense strand
ggaagagccaccugaccau

SEQ ID NO: 1794896 - RNA, 19 nt, Homo sapiens
  misc_RNA (1)...(19): siRNA sense strand
ccacgggagcuuugucaau

SEQ ID NO: 1794897 - RNA, 19 nt, Homo sapiens
  misc_RNA (1)...(19): siRNA sense strand
cgaguugcgcuucaaacaa

SEQ ID NO: 1794898 - RNA, 19 nt, Homo sapiens
  misc_RNA (1)...(19): siRNA sense strand
uugaugaucccuccuaugu

SEQ ID NO: 1794899 - RNA, 19 nt, Homo sapiens
  misc_RNA (1)...(19): siRNA sense strand
ggccaucagucuggugugu

SEQ ID NO: 1794900 - RNA, 19 nt, Homo sapiens
  misc_RNA (1)...(19): siRNA sense strand
ccagggaggccaucagucu

SEQ ID NO: 1794901 - RNA, 19 nt, Homo sapiens
  misc_RNA (1)...(19): siRNA sense strand
ucaaacaauaccucaggaa

SEQ ID NO: 1794902 - RNA, 19 nt, Homo sapiens
  misc_RNA (1)...(19): siRNA sense strand
aaccugaaauuugcuggaa

SEQ ID NO: 1794903 - RNA, 19 nt, Homo sapiens
  misc_RNA (1)...(19): siRNA sense strand
ggaggagaaagcccuguag

SEQ ID NO: 1794904 - RNA, 19 nt, Homo sapiens
  misc_RNA (1)...(19): siRNA sense strand
cgaccacaccuggccagua

SEQ ID NO: 1794905 - RNA, 19 nt, Homo sapiens
  misc_RNA (1)...(19): siRNA sense strand
ugccaaagacccugugaau

SEQ ID NO: 1794906 - RNA, 19 nt, Homo sapiens
  misc_RNA (1)...(19): siRNA sense strand
ugacaggauggcuggcuuu

SEQ ID NO: 1794907 - RNA, 19 nt, Homo sapiens
  misc_RNA (1)...(19): siRNA sense strand
ccaauccugcuaucaaugg

SEQ ID NO: 1794908 - RNA, 19 nt, Homo sapiens
  misc_RNA (1)...(19): siRNA sense strand
gagggugugguucggacua

SEQ ID NO: 1794909 - RNA, 19 nt, Homo sapiens
  misc_RNA (1)...(19): siRNA sense strand
ccacaccuggccaguaugu

SEQ ID NO: 1794910 - RNA, 19 nt, Homo sapiens
  misc_RNA (1)...(19): siRNA sense strand
ugucgccuauguugccaaa

SEQ ID NO: 1794911 - RNA, 19 nt, Homo sapiens
  misc_RNA (1)...(19): siRNA sense strand
ccucaggaacccacccaaa

SEQ ID NO: 1794912 - RNA, 19 nt, Homo sapiens
  misc_RNA (1)...(19): siRNA sense strand
gggaccuguuugacaugaa

SEQ ID NO: 1794913 - RNA, 19 nt, Homo sapiens
  misc_RNA (1)...(19): siRNA sense strand
gggaggaguaaccugaaau

SEQ ID NO: 1794914 - RNA, 19 nt, Homo sapiens
  misc_RNA (1)...(19): siRNA sense strand
uaaggaucaccgcuuugaa

SEQ ID NO: 1794915 - RNA, 19 nt, Homo sapiens
  misc_RNA (1)...(19): siRNA sense strand
gaaagugucagucaccuua

SEQ ID NO: 1794916 - RNA, 19 nt, Homo sapiens
  misc_RNA (1)...(19): siRNA sense strand
ccaaagacccugugaauca

SEQ ID NO: 1794917 - RNA, 19 nt, Homo sapiens
  misc_RNA (1)...(19): siRNA sense strand
gaugaucccuccuauguca

SEQ ID NO: 1794918 - RNA, 19 nt, Homo sapiens
  misc_RNA (1)...(19): siRNA sense strand
ggaguaaccugaaauuugc

SEQ ID NO: 1794919 - RNA, 19 nt, Homo sapiens
  misc_RNA (1)...(19): siRNA sense strand
gacaaucacuugcccauca

SEQ ID NO: 1794920 - RNA, 19 nt, Homo sapiens
  misc_RNA (1)...(19): siRNA sense strand
gaccacaccuggccaguau

SEQ ID NO: 1794921 - RNA, 19 nt, Homo sapiens
  misc_RNA (1)...(19): siRNA sense strand
ucagagagccugccacauu

SEQ ID NO: 1794922 - RNA, 19 nt, Homo sapiens
  misc_RNA (1)...(19): siRNA sense strand
gaguugcgcuucaaacaau

SEQ ID NO: 1794923 - RNA, 19 nt, Homo sapiens
  misc_RNA (1)...(19): siRNA sense strand
caugcaaucuaucucauuu

SEQ ID NO: 1794924 - RNA, 19 nt, Homo sapiens
  misc_RNA (1)...(19): siRNA sense strand
cacgggagcuuugucaaua

SEQ ID NO: 1794925 - RNA, 19 nt, Homo sapiens
  misc_RNA (1)...(19): siRNA sense strand
gaccaucaguacuauaaug

SEQ ID NO: 1794926 - RNA, 19 nt, Homo sapiens
  misc_RNA (1)...(19): siRNA sense strand
ucagucaccuuaucagcua

SEQ ID NO: 1794927 - RNA, 19 nt, Homo sapiens
  misc_RNA (1)...(19): siRNA sense strand
gacuaaggaucaccgcuuu

SEQ ID NO: 1794928 - RNA, 19 nt, Homo sapiens
  misc_RNA (1)...(19): siRNA sense strand
caggauggcuggcuuugau

SEQ ID NO: 1794929 - RNA, 19 nt, Homo sapiens
  misc_RNA (1)...(19): siRNA sense strand
cagagagccugccacauuc

SEQ ID NO: 1794930 - RNA, 19 nt, Homo sapiens
  misc_RNA (1)...(19): siRNA sense strand
ccacauggacaaucacuug

SEQ ID NO: 1794931 - RNA, 19 nt, Homo sapiens
  misc_RNA (1)...(19): siRNA sense strand
ggaggaguaaccugaaauu

SEQ ID NO: 1794932 - RNA, 19 nt, Homo sapiens
  misc_RNA (1)...(19): siRNA sense strand
caaucuaucucauuugcau

SEQ ID NO: 1794933 - RNA, 19 nt, Homo sapiens
  misc_RNA (1)...(19): siRNA sense strand
ccgaguaugucgccuaugu

SEQ ID NO: 1794934 - RNA, 19 nt, Homo sapiens
  misc_RNA (1)...(19): siRNA sense strand
gcuaccacauggacaauca

SEQ ID NO: 1794935 - RNA, 19 nt, Homo sapiens
  misc_RNA (1)...(19): siRNA sense strand
ccagaaguccgcaaacaga

SEQ ID NO: 1794936 - RNA, 19 nt, Homo sapiens
  misc_RNA (1)...(19): siRNA sense strand
gugggcagccuaagcauuu

SEQ ID NO: 1794937 - RNA, 19 nt, Homo sapiens
  misc_RNA (1)...(19): siRNA sense strand
ccaucagucugguguguga

SEQ ID NO: 1794938 - RNA, 19 nt, Homo sapiens
  misc_RNA (1)...(19): siRNA sense strand
ccugaaauuugcuggaaug

SEQ ID NO: 1794939 - RNA, 19 nt, Homo sapiens
  misc_RNA (1)...(19): siRNA sense strand
ggaccuguuugacaugaag

SEQ ID NO: 1794940 - RNA, 19 nt, Homo sapiens
  misc_RNA (1)...(19): siRNA sense strand
gaguaugucgccuauguug

SEQ ID NO: 1794941 - RNA, 19 nt, Homo sapiens
  misc_RNA (1)...(19): siRNA sense strand
ggaaugccaaucacucuca

SEQ ID NO: 1794942 - RNA, 19 nt, Homo sapiens
  misc_RNA (1)...(19): siRNA sense strand
gaggaguaaccugaaauuu

SEQ ID NO: 1794943 - RNA, 19 nt, Homo sapiens
  misc_RNA (1)...(19): siRNA sense strand
ccacuugggagcuacauug

SEQ ID NO: 1794944 - RNA, 19 nt, Homo sapiens
  misc_RNA (1)...(19): siRNA sense strand
ucaguacuauaaugacuuc

SEQ ID NO: 1794945 - RNA, 19 nt, Homo sapiens
  misc_RNA (1)...(19): siRNA sense strand
aggaguaaccugaaauuug

SEQ ID NO: 1794946 - RNA, 19 nt, Homo sapiens
  misc_RNA (1)...(19): siRNA sense strand
gggaugaggaggaggaaga

SEQ ID NO: 1794947 - RNA, 19 nt, Homo sapiens
  misc_RNA (1)...(19): siRNA sense strand
ccacaugcaaucuaucuca

SEQ ID NO: 1794948 - RNA, 19 nt, Homo sapiens
  misc_RNA (1)...(19): siRNA sense strand
ucgccuauguugccaaaga

SEQ ID NO: 1794949 - RNA, 19 nt, Homo sapiens
  misc_RNA (1)...(19): siRNA sense strand
caaagacccugugaaucag

SEQ ID NO: 1794950 - RNA, 19 nt, Homo sapiens
  misc_RNA (1)...(19): siRNA sense strand
aaggaucaccgcuuugaaa

SEQ ID NO: 1794951 - RNA, 19 nt, Homo sapiens
  misc_RNA (1)...(19): siRNA sense strand
caucaguacuauaaugacu

SEQ ID NO: 1794952 - RNA, 19 nt, Homo sapiens
  misc_RNA (1)...(19): siRNA sense strand
ggaagagccaccugaccau

SEQ ID NO: 1794953 - RNA, 19 nt, Homo sapiens
  misc_RNA (1)...(19): siRNA sense strand
cuaaggaucaccgcuuuga

SEQ ID NO: 1794954 - RNA, 19 nt, Homo sapiens
  misc_RNA (1)...(19): siRNA sense strand
acgggagcuuugucaauaa

SEQ ID NO: 1794955 - RNA, 19 nt, Homo sapiens
  misc_RNA (1)...(19): siRNA sense strand
cuacuugguucgguacaug

SEQ ID NO: 1794956 - RNA, 19 nt, Homo sapiens
  misc_RNA (1)...(19): siRNA sense strand
ccacgggagcuuugucaau

SEQ ID NO: 1794957 - RNA, 19 nt, Homo sapiens
  misc_RNA (1)...(19): siRNA sense strand
cgaguugcgcuucaaacaa

SEQ ID NO: 1794958 - RNA, 19 nt, Homo sapiens
  misc_RNA (1)...(19): siRNA sense strand
ggccaucagucuggugugu

SEQ ID NO: 1794959 - RNA, 19 nt, Homo sapiens
  misc_RNA (1)...(19): siRNA sense strand
uugaugaucccuccuaugu

SEQ ID NO: 1794960 - RNA, 19 nt, Homo sapiens
  misc_RNA (1)...(19): siRNA sense strand
ucaaacaauaccucaggaa

SEQ ID NO: 1794961 - RNA, 19 nt, Homo sapiens
  misc_RNA (1)...(19): siRNA sense strand
ccagggaggccaucagucu

SEQ ID NO: 1794962 - RNA, 19 nt, Homo sapiens
  misc_RNA (1)...(19): siRNA sense strand
aaccugaaauuugcuggaa

SEQ ID NO: 1794963 - RNA, 19 nt, Homo sapiens
  misc_RNA (1)...(19): siRNA sense strand
ggacaugaacaagcugagu

SEQ ID NO: 1794964 - RNA, 19 nt, Homo sapiens
  misc_RNA (1)...(19): siRNA sense strand
cgaccacaccuggccagua

SEQ ID NO: 1794965 - RNA, 19 nt, Homo sapiens
  misc_RNA (1)...(19): siRNA sense strand
ggaggagaaagcccuguag

SEQ ID NO: 1794966 - RNA, 19 nt, Homo sapiens
  misc_RNA (1)...(19): siRNA sense strand
ugccaaagacccugugaau

SEQ ID NO: 1794967 - RNA, 19 nt, Homo sapiens
  misc_RNA (1)...(19): siRNA sense strand
ugacaggauggcuggcuuu

SEQ ID NO: 1794968 - RNA, 19 nt, Homo sapiens
  misc_RNA (1)...(19): siRNA sense strand
ccaauccugcuaucaaugg

SEQ ID NO: 1794969 - RNA, 19 nt, Homo sapiens
  misc_RNA (1)...(19): siRNA sense strand
gagggugugguucggacua

SEQ ID NO: 1794970 - RNA, 19 nt, Homo sapiens
  misc_RNA (1)...(19): siRNA sense strand
ccacaccuggccaguaugu

SEQ ID NO: 1794971 - RNA, 19 nt, Homo sapiens
  misc_RNA (1)...(19): siRNA sense strand
ugucgccuauguugccaaa

SEQ ID NO: 1794972 - RNA, 19 nt, Homo sapiens
  misc_RNA (1)...(19): siRNA sense strand
ccucaggaacccacccaaa

SEQ ID NO: 1794973 - RNA, 19 nt, Homo sapiens
  misc_RNA (1)...(19): siRNA sense strand
gggaccuguuugacaugaa

SEQ ID NO: 1794974 - RNA, 19 nt, Homo sapiens
  misc_RNA (1)...(19): siRNA sense strand
uaaggaucaccgcuuugaa

SEQ ID NO: 1794975 - RNA, 19 nt, Homo sapiens
  misc_RNA (1)...(19): siRNA sense strand
gggaggaguaaccugaaau

SEQ ID NO: 1794976 - RNA, 19 nt, Homo sapiens
  misc_RNA (1)...(19): siRNA sense strand
gggaagagcuacauuacua

SEQ ID NO: 1794977 - RNA, 19 nt, Homo sapiens
  misc_RNA (1)...(19): siRNA sense strand
aaacaauccuucagugaua

SEQ ID NO: 1794978 - RNA, 19 nt, Homo sapiens
  misc_RNA (1)...(19): siRNA sense strand
agacaggccucaaguauuu

SEQ ID NO: 1794979 - RNA, 19 nt, Homo sapiens
  misc_RNA (1)...(19): siRNA sense strand
cgucuuaggucaagucuua

SEQ ID NO: 1794980 - RNA, 19 nt, Homo sapiens
  misc_RNA (1)...(19): siRNA sense strand
ggaaaaggcuucauucgua

SEQ ID NO: 1794981 - RNA, 19 nt, Homo sapiens
  misc_RNA (1)...(19): siRNA sense strand
ggagagaaaccauauaauu

SEQ ID NO: 1794982 - RNA, 19 nt, Homo sapiens
  misc_RNA (1)...(19): siRNA sense strand
gggaagaaauugcaaguga

SEQ ID NO: 1794983 - RNA, 19 nt, Homo sapiens
  misc_RNA (1)...(19): siRNA sense strand
ggaauucagucagaguuua

SEQ ID NO: 1794984 - RNA, 19 nt, Homo sapiens
  misc_RNA (1)...(19): siRNA sense strand
gggagaggcuucagaugua

SEQ ID NO: 1794985 - RNA, 19 nt, Homo sapiens
  misc_RNA (1)...(19): siRNA sense strand
ggacagaaaccuuccaauu

SEQ ID NO: 1794986 - RNA, 19 nt, Homo sapiens
  misc_RNA (1)...(19): siRNA sense strand
gaucagcacuuacaguuca

SEQ ID NO: 1794987 - RNA, 19 nt, Homo sapiens
  misc_RNA (1)...(19): siRNA sense strand
gcgcuugaaucuugauaua

SEQ ID NO: 1794988 - RNA, 19 nt, Homo sapiens
  misc_RNA (1)...(19): siRNA sense strand
gagagaaaccauauaauug

SEQ ID NO: 1794989 - RNA, 19 nt, Homo sapiens
  misc_RNA (1)...(19): siRNA sense strand
ccucaagacucuaccauaa

SEQ ID NO: 1794990 - RNA, 19 nt, Homo sapiens
  misc_RNA (1)...(19): siRNA sense strand
caaauacgcucagcagaga

SEQ ID NO: 1794991 - RNA, 19 nt, Homo sapiens
  misc_RNA (1)...(19): siRNA sense strand
agugugagcuuccgucuua

SEQ ID NO: 1794992 - RNA, 19 nt, Homo sapiens
  misc_RNA (1)...(19): siRNA sense strand
gacagaaaccuuccaauug

SEQ ID NO: 1794993 - RNA, 19 nt, Homo sapiens
  misc_RNA (1)...(19): siRNA sense strand
cagcagaucugggaagaaa

SEQ ID NO: 1794994 - RNA, 19 nt, Homo sapiens
  misc_RNA (1)...(19): siRNA sense strand
gaagaaauugcaagugauu

SEQ ID NO: 1794995 - RNA, 19 nt, Homo sapiens
  misc_RNA (1)...(19): siRNA sense strand
agagagaccuuauaacugu

SEQ ID NO: 1794996 - RNA, 19 nt, Homo sapiens
  misc_RNA (1)...(19): siRNA sense strand
acagaaaccuuccaauugu

SEQ ID NO: 1794997 - RNA, 19 nt, Homo sapiens
  misc_RNA (1)...(19): siRNA sense strand
gguaaggaauucagucaga

SEQ ID NO: 1794998 - RNA, 19 nt, Homo sapiens
  misc_RNA (1)...(19): siRNA sense strand
ggauauagcaacccaaaga

SEQ ID NO: 1794999 - RNA, 19 nt, Homo sapiens
  misc_RNA (1)...(19): siRNA sense strand
aaccugagaugaagacuuu

SEQ ID NO: 1795000 - RNA, 19 nt, Homo sapiens
  misc_RNA (1)...(19): siRNA sense strand
ggagagagaccuuauaacu

SEQ ID NO: 1795001 - RNA, 19 nt, Homo sapiens
  misc_RNA (1)...(19): siRNA sense strand
ggaagaaauugcaagugau

SEQ ID NO: 1795002 - RNA, 19 nt, Homo sapiens
  misc_RNA (1)...(19): siRNA sense strand
agauguagaucagcacuua

SEQ ID NO: 1795003 - RNA, 19 nt, Homo sapiens
  misc_RNA (1)...(19): siRNA sense strand
ucagaaacaucagagaauu

SEQ ID NO: 1795004 - RNA, 19 nt, Homo sapiens
  misc_RNA (1)...(19): siRNA sense strand
gagaugugaugcuggagaa

SEQ ID NO: 1795005 - RNA, 19 nt, Homo sapiens
  misc_RNA (1)...(19): siRNA sense strand
gcagaucugggaagaaauu

SEQ ID NO: 1795006 - RNA, 19 nt, Homo sapiens
  misc_RNA (1)...(19): siRNA sense strand
gggagggccuucauucaug

SEQ ID NO: 1795007 - RNA, 19 nt, Homo sapiens
  misc_RNA (1)...(19): siRNA sense strand
auaaagagcucucaguucu

SEQ ID NO: 1795008 - RNA, 19 nt, Homo sapiens
  misc_RNA (1)...(19): siRNA sense strand
auacaaaugugacaagugu

SEQ ID NO: 1795009 - RNA, 19 nt, Homo sapiens
  misc_RNA (1)...(19): siRNA sense strand
gaaaauccauccaaaugug

SEQ ID NO: 1795010 - RNA, 19 nt, Homo sapiens
  misc_RNA (1)...(19): siRNA sense strand
ugugagauauguaguguga

SEQ ID NO: 1795011 - RNA, 19 nt, Homo sapiens
  misc_RNA (1)...(19): siRNA sense strand
agacgguccuccuaucuuu

SEQ ID NO: 1795012 - RNA, 19 nt, Homo sapiens
  misc_RNA (1)...(19): siRNA sense strand
gaagcuguaucgagaugug

SEQ ID NO: 1795013 - RNA, 19 nt, Homo sapiens
  misc_RNA (1)...(19): siRNA sense strand
ggaagagcuacauuacuaa

SEQ ID NO: 1795014 - RNA, 19 nt, Homo sapiens
  misc_RNA (1)...(19): siRNA sense strand
guaaacaauccuucaguga

SEQ ID NO: 1795015 - RNA, 19 nt, Homo sapiens
  misc_RNA (1)...(19): siRNA sense strand
ccgagauacuuuccacuuu

SEQ ID NO: 1795016 - RNA, 19 nt, Homo sapiens
  misc_RNA (1)...(19): siRNA sense strand
caggagagaaaccauauaa

SEQ ID NO: 1795017 - RNA, 19 nt, Homo sapiens
  misc_RNA (1)...(19): siRNA sense strand
cgagauacuuuccacuuuc

SEQ ID NO: 1795018 - RNA, 19 nt, Homo sapiens
  misc_RNA (1)...(19): siRNA sense strand
ucaagacucuaccauaaag

SEQ ID NO: 1795019 - RNA, 19 nt, Homo sapiens
  misc_RNA (1)...(19): siRNA sense strand
gagaaaagccauacaaaug

SEQ ID NO: 1795020 - RNA, 19 nt, Homo sapiens
  misc_RNA (1)...(19): siRNA sense strand
caggagagagaccuuauaa

SEQ ID NO: 1795021 - RNA, 19 nt, Homo sapiens
  misc_RNA (1)...(19): siRNA sense strand
ugacgugugugguaaggaa

SEQ ID NO: 1795022 - RNA, 19 nt, Homo sapiens
  misc_RNA (1)...(19): siRNA sense strand
gaugaagacuuuuccagaa

SEQ ID NO: 1795023 - RNA, 19 nt, Homo sapiens
  misc_RNA (1)...(19): siRNA sense strand
guggaaagaagcuuguaua

SEQ ID NO: 1795024 - RNA, 19 nt, Homo sapiens
  misc_RNA (1)...(19): siRNA sense strand
gagagagaccuuauaacug

SEQ ID NO: 1795025 - RNA, 19 nt, Homo sapiens
  misc_RNA (1)...(19): siRNA sense strand
ucagugauauguccaucuu

SEQ ID NO: 1795026 - RNA, 19 nt, Homo sapiens
  misc_RNA (1)...(19): siRNA sense strand
gauccaaccugagaugaag

SEQ ID NO: 1795027 - RNA, 19 nt, Homo sapiens
  misc_RNA (1)...(19): siRNA sense strand
gagcuacauuacuaaguca

SEQ ID NO: 1795028 - RNA, 19 nt, Homo sapiens
  misc_RNA (1)...(19): siRNA sense strand
ccaauugugggaaguguaa

SEQ ID NO: 1795029 - RNA, 19 nt, Homo sapiens
  misc_RNA (1)...(19): siRNA sense strand
gaaaagccauacaaaugug

SEQ ID NO: 1795030 - RNA, 19 nt, Homo sapiens
  misc_RNA (1)...(19): siRNA sense strand
gagauacuuuccacuuucu

SEQ ID NO: 1795031 - RNA, 19 nt, Homo sapiens
  misc_RNA (1)...(19): siRNA sense strand
gauacuuuccacuuucuaa

SEQ ID NO: 1795032 - RNA, 19 nt, Homo sapiens
  misc_RNA (1)...(19): siRNA sense strand
gagaaaauccauccaaaug

SEQ ID NO: 1795033 - RNA, 19 nt, Homo sapiens
  misc_RNA (1)...(19): siRNA sense strand
ccaaagagaagggaauuca

SEQ ID NO: 1795034 - RNA, 19 nt, Homo sapiens
  misc_RNA (1)...(19): siRNA sense strand
gcacuuacaguucauugca

SEQ ID NO: 1795035 - RNA, 19 nt, Homo sapiens
  misc_RNA (1)...(19): siRNA sense strand
ggagaggcuucagauguag

SEQ ID NO: 1795036 - RNA, 19 nt, Homo sapiens
  misc_RNA (1)...(19): siRNA sense strand
ggcaagauccaaccugaga

SEQ ID NO: 1795037 - RNA, 19 nt, Homo sapiens
  misc_RNA (1)...(19): siRNA sense strand
gauccacacaggagagaaa

SEQ ID NO: 1795038 - RNA, 19 nt, Homo sapiens
  misc_RNA (1)...(19): siRNA sense strand
ugggagagaaacauuauaa

SEQ ID NO: 1795039 - RNA, 19 nt, Homo sapiens
  misc_RNA (1)...(19): siRNA sense strand
agugauauguccaucuuug

SEQ ID NO: 1795040 - RNA, 19 nt, Homo sapiens
  misc_RNA (1)...(19): siRNA sense strand
uaaacaauccuucagugau

SEQ ID NO: 1795041 - RNA, 19 nt, Homo sapiens
  misc_RNA (1)...(19): siRNA sense strand
caaccauuccaccgagaua

SEQ ID NO: 1795042 - RNA, 19 nt, Homo sapiens
  misc_RNA (1)...(19): siRNA sense strand
cagaaaccuuccaauugug

SEQ ID NO: 1795043 - RNA, 19 nt, Homo sapiens
  misc_RNA (1)...(19): siRNA sense strand
ccauaaagagcucucaguu

SEQ ID NO: 1795044 - RNA, 19 nt, Homo sapiens
  misc_RNA (1)...(19): siRNA sense strand
caucagagaguccauacug

SEQ ID NO: 1795045 - RNA, 19 nt, Homo sapiens
  misc_RNA (1)...(19): siRNA sense strand
gaagagcuacauuacuaag

SEQ ID NO: 1795046 - RNA, 19 nt, Homo sapiens
  misc_RNA (1)...(19): siRNA sense strand
gaagcaggaccacaugaag

SEQ ID NO: 1795047 - RNA, 19 nt, Homo sapiens
  misc_RNA (1)...(19): siRNA sense strand
aaacagcacuggggaauau

SEQ ID NO: 1795048 - RNA, 19 nt, Homo sapiens
  misc_RNA (1)...(19): siRNA sense strand
uauagcaacccaaagagaa

SEQ ID NO: 1795049 - RNA, 19 nt, Homo sapiens
  misc_RNA (1)...(19): siRNA sense strand
aagcuucuguuacaucuca

SEQ ID NO: 1795050 - RNA, 19 nt, Homo sapiens
  misc_RNA (1)...(19): siRNA sense strand
cauaaagagcucucaguuc

SEQ ID NO: 1795051 - RNA, 19 nt, Homo sapiens
  misc_RNA (1)...(19): siRNA sense strand
agaagucucauuccuguga

SEQ ID NO: 1795052 - RNA, 19 nt, Homo sapiens
  misc_RNA (1)...(19): siRNA sense strand
acacaggagagaaaccaua

SEQ ID NO: 1795053 - RNA, 19 nt, Homo sapiens
  misc_RNA (1)...(19): siRNA sense strand
uagaucagcacuuacaguu

SEQ ID NO: 1795054 - RNA, 19 nt, Homo sapiens
  misc_RNA (1)...(19): siRNA sense strand
agaaacucuuuaaguguga

SEQ ID NO: 1795055 - RNA, 19 nt, Homo sapiens
  misc_RNA (1)...(19): siRNA sense strand
caagauccaaccugagaug

SEQ ID NO: 1795056 - RNA, 19 nt, Homo sapiens
  misc_RNA (1)...(19): siRNA sense strand
ugugggaaguguaaacaau

SEQ ID NO: 1795057 - RNA, 19 nt, Homo sapiens
  misc_RNA (1)...(19): siRNA sense strand
ucaaaugugagauauguag

SEQ ID NO: 1795058 - RNA, 19 nt, Homo sapiens
  misc_RNA (1)...(19): siRNA sense strand
gaagucucauuccugugau

SEQ ID NO: 1795059 - RNA, 19 nt, Homo sapiens
  misc_RNA (1)...(19): siRNA sense strand
gaauucaggaggcaagauc

SEQ ID NO: 1795060 - RNA, 19 nt, Homo sapiens
  misc_RNA (1)...(19): siRNA sense strand
ugaucuuccucagcaaaua

SEQ ID NO: 1795061 - RNA, 19 nt, Homo sapiens
  misc_RNA (1)...(19): siRNA sense strand
ggagaaaagccauacaaau

SEQ ID NO: 1795062 - RNA, 19 nt, Homo sapiens
  misc_RNA (1)...(19): siRNA sense strand
uuagacaggccucaaguau

SEQ ID NO: 1795063 - RNA, 19 nt, Homo sapiens
  misc_RNA (1)...(19): siRNA sense strand
uuauaacugugaugacugu

SEQ ID NO: 1795064 - RNA, 19 nt, Homo sapiens
  misc_RNA (1)...(19): siRNA sense strand
agagcuacauuacuaaguc

SEQ ID NO: 1795065 - RNA, 19 nt, Homo sapiens
  misc_RNA (1)...(19): siRNA sense strand
gguccacacaggaaagaaa

SEQ ID NO: 1795066 - RNA, 19 nt, Homo sapiens
  misc_RNA (1)...(19): siRNA sense strand
gaccuuauaacugugauga

SEQ ID NO: 1795067 - RNA, 19 nt, Homo sapiens
  misc_RNA (1)...(19): siRNA sense strand
ggaaguguaaacaauccuu

SEQ ID NO: 1795068 - RNA, 19 nt, Homo sapiens
  misc_RNA (1)...(19): siRNA sense strand
aaucauaagagacuccauu

SEQ ID NO: 1795069 - RNA, 19 nt, Homo sapiens
  misc_RNA (1)...(19): siRNA sense strand
uagacaggccucaaguauu

SEQ ID NO: 1795070 - RNA, 19 nt, Homo sapiens
  misc_RNA (1)...(19): siRNA sense strand
ugugggaagagcuacauua

SEQ ID NO: 1795071 - RNA, 19 nt, Homo sapiens
  misc_RNA (1)...(19): siRNA sense strand
uguaaagaaugugggaaga

SEQ ID NO: 1795072 - RNA, 19 nt, Homo sapiens
  misc_RNA (1)...(19): siRNA sense strand
aaacaucagagaauucaca

SEQ ID NO: 1795073 - RNA, 19 nt, Homo sapiens
  misc_RNA (1)...(19): siRNA sense strand
gauauguccaucuuugauc

SEQ ID NO: 1795074 - RNA, 19 nt, Homo sapiens
  misc_RNA (1)...(19): siRNA sense strand
gaucugggaagaaauugca

SEQ ID NO: 1795075 - RNA, 19 nt, Homo sapiens
  misc_RNA (1)...(19): siRNA sense strand
acacaggaaagaaaccaaa

SEQ ID NO: 1795076 - RNA, 19 nt, Homo sapiens
  misc_RNA (1)...(19): siRNA sense strand
gcaggaagcccucaccuuu

SEQ ID NO: 1795077 - RNA, 19 nt, Homo sapiens
  misc_RNA (1)...(19): siRNA sense strand
caaagaaaggcaccaguuu

SEQ ID NO: 1795078 - RNA, 19 nt, Homo sapiens
  misc_RNA (1)...(19): siRNA sense strand
cagaccagcuugcuuucua

SEQ ID NO: 1795079 - RNA, 19 nt, Homo sapiens
  misc_RNA (1)...(19): siRNA sense strand
uaagaggcccagcaagaua

SEQ ID NO: 1795080 - RNA, 19 nt, Homo sapiens
  misc_RNA (1)...(19): siRNA sense strand
gggcagaccagcuugcuuu

SEQ ID NO: 1795081 - RNA, 19 nt, Homo sapiens
  misc_RNA (1)...(19): siRNA sense strand
gaucuuagaagcacuagug

SEQ ID NO: 1795082 - RNA, 19 nt, Homo sapiens
  misc_RNA (1)...(19): siRNA sense strand
caacuacacuuggccuuuc

SEQ ID NO: 1795083 - RNA, 19 nt, Homo sapiens
  misc_RNA (1)...(19): siRNA sense strand
gcaaugagcaccguuaugg

SEQ ID NO: 1795084 - RNA, 19 nt, Homo sapiens
  misc_RNA (1)...(19): siRNA sense strand
gcaagcugcuggccucaca

SEQ ID NO: 1795085 - RNA, 19 nt, Homo sapiens
  misc_RNA (1)...(19): siRNA sense strand
ccaaagaaaggcaccaguu

SEQ ID NO: 1795086 - RNA, 19 nt, Homo sapiens
  misc_RNA (1)...(19): siRNA sense strand
gacgaggucuuugucauca

SEQ ID NO: 1795087 - RNA, 19 nt, Homo sapiens
  misc_RNA (1)...(19): siRNA sense strand
ggccgacuauauccuguuu

SEQ ID NO: 1795088 - RNA, 19 nt, Homo sapiens
  misc_RNA (1)...(19): siRNA sense strand
gcacuggaccaaagaaagg

SEQ ID NO: 1795089 - RNA, 19 nt, Homo sapiens
  misc_RNA (1)...(19): siRNA sense strand
ccagcaagauaggguuuga

SEQ ID NO: 1795090 - RNA, 19 nt, Homo sapiens
  misc_RNA (1)...(19): siRNA sense strand
gaggaugacgugcgcuuug

SEQ ID NO: 1795091 - RNA, 19 nt, Homo sapiens
  misc_RNA (1)...(19): siRNA sense strand
ggauguggaggcagagaaa

SEQ ID NO: 1795092 - RNA, 19 nt, Homo sapiens
  misc_RNA (1)...(19): siRNA sense strand
acaacauucugaccaacaa

SEQ ID NO: 1795093 - RNA, 19 nt, Homo sapiens
  misc_RNA (1)...(19): siRNA sense strand
ggccucagcucaugugacu

SEQ ID NO: 1795094 - RNA, 19 nt, Homo sapiens
  misc_RNA (1)...(19): siRNA sense strand
ugaaugugccggugaaauc

SEQ ID NO: 1795095 - RNA, 19 nt, Homo sapiens
  misc_RNA (1)...(19): siRNA sense strand
ucuaagaggcccagcaaga

SEQ ID NO: 1795096 - RNA, 19 nt, Homo sapiens
  misc_RNA (1)...(19): siRNA sense strand
ucaggaaccucggcguaga

SEQ ID NO: 1795097 - RNA, 19 nt, Homo sapiens
  misc_RNA (1)...(19): siRNA sense strand
ucauccaccugaucuuaga

SEQ ID NO: 1795098 - RNA, 19 nt, Homo sapiens
  misc_RNA (1)...(19): siRNA sense strand
gcagacacagacaacauuc

SEQ ID NO: 1795099 - RNA, 19 nt, Homo sapiens
  misc_RNA (1)...(19): siRNA sense strand
gcaguacaaggcacacuuc

SEQ ID NO: 1795100 - RNA, 19 nt, Homo sapiens
  misc_RNA (1)...(19): siRNA sense strand
caggaagcccucaccuuug

SEQ ID NO: 1795101 - RNA, 19 nt, Homo sapiens
  misc_RNA (1)...(19): siRNA sense strand
gacgagagggucaacuuca

SEQ ID NO: 1795102 - RNA, 19 nt, Homo sapiens
  misc_RNA (1)...(19): siRNA sense strand
gcaccguuauggguacaug

SEQ ID NO: 1795103 - RNA, 19 nt, Homo sapiens
  misc_RNA (1)...(19): siRNA sense strand
caucaucgucuucgccuau

SEQ ID NO: 1795104 - RNA, 19 nt, Homo sapiens
  misc_RNA (1)...(19): siRNA sense strand
gaccuacuacuccaacuuc

SEQ ID NO: 1795105 - RNA, 19 nt, Homo sapiens
  misc_RNA (1)...(19): siRNA sense strand
cccaagcacuggaccaaag

SEQ ID NO: 1795106 - RNA, 19 nt, Homo sapiens
  misc_RNA (1)...(19): siRNA sense strand
ccacaucccaacuacacuu

SEQ ID NO: 1795107 - RNA, 19 nt, Homo sapiens
  misc_RNA (1)...(19): siRNA sense strand
gaugacgugcgcuuugaga

SEQ ID NO: 1795108 - RNA, 19 nt, Homo sapiens
  misc_RNA (1)...(19): siRNA sense strand
cguuauggguacaugaaug

SEQ ID NO: 1795109 - RNA, 19 nt, Homo sapiens
  misc_RNA (1)...(19): siRNA sense strand
caacuucauccaccugauc

SEQ ID NO: 1795110 - RNA, 19 nt, Homo sapiens
  misc_RNA (1)...(19): siRNA sense strand
cuucauccaccugaucuua

SEQ ID NO: 1795111 - RNA, 19 nt, Homo sapiens
  misc_RNA (1)...(19): siRNA sense strand
gacaacauucugaccaaca

SEQ ID NO: 1795112 - RNA, 19 nt, Homo sapiens
  misc_RNA (1)...(19): siRNA sense strand
cuaagaggcccagcaagau

SEQ ID NO: 1795113 - RNA, 19 nt, Homo sapiens
  misc_RNA (1)...(19): siRNA sense strand
aggaugacgugcgcuuuga

SEQ ID NO: 1795114 - RNA, 19 nt, Homo sapiens
  misc_RNA (1)...(19): siRNA sense strand
ccgcacagccgaguacuuc

SEQ ID NO: 1795115 - RNA, 19 nt, Homo sapiens
  misc_RNA (1)...(19): siRNA sense strand
gacgaguuccugcccauca

SEQ ID NO: 1795116 - RNA, 19 nt, Homo sapiens
  misc_RNA (1)...(19): siRNA sense strand
ccaagcacuggaccaaaga

SEQ ID NO: 1795117 - RNA, 19 nt, Homo sapiens
  misc_RNA (1)...(19): siRNA sense strand
ggcaccaguuucugaugga

SEQ ID NO: 1795118 - RNA, 19 nt, Homo sapiens
  misc_RNA (1)...(19): siRNA sense strand
gugacucggcccucuaaga

SEQ ID NO: 1795119 - RNA, 19 nt, Homo sapiens
  misc_RNA (1)...(19): siRNA sense strand
cgggcuaccaggacccuua

SEQ ID NO: 1795120 - RNA, 19 nt, Homo sapiens
  misc_RNA (1)...(19): siRNA sense strand
ucagugacacggagacauc

SEQ ID NO: 1795121 - RNA, 19 nt, Homo sapiens
  misc_RNA (1)...(19): siRNA sense strand
aggaagcccucaccuuugc

SEQ ID NO: 1795122 - RNA, 19 nt, Homo sapiens
  misc_RNA (1)...(19): siRNA sense strand
aggcagagaaacugucuug

SEQ ID NO: 1795123 - RNA, 19 nt, Homo sapiens
  misc_RNA (1)...(19): siRNA sense strand
ccgacuauauccuguuugc

SEQ ID NO: 1795124 - RNA, 19 nt, Homo sapiens
  misc_RNA (1)...(19): siRNA sense strand
gcaggccucagcucaugug

SEQ ID NO: 1795125 - RNA, 19 nt, Homo sapiens
  misc_RNA (1)...(19): siRNA sense strand
ggaggcagagaaacugucu

SEQ ID NO: 1795126 - RNA, 19 nt, Homo sapiens
  misc_RNA (1)...(19): siRNA sense strand
gaaaucaaguuuaccauuc

SEQ ID NO: 1795127 - RNA, 19 nt, Homo sapiens
  misc_RNA (1)...(19): siRNA sense strand
gcaaugaaaucaaguuuac

SEQ ID NO: 1795128 - RNA, 19 nt, Homo sapiens
  misc_RNA (1)...(19): siRNA sense strand
gugcaucgcuccaagauca

SEQ ID NO: 1795129 - RNA, 19 nt, Homo sapiens
  misc_RNA (1)...(19): siRNA sense strand
caccgaagcuugcuauuuc

SEQ ID NO: 1795130 - RNA, 19 nt, Homo sapiens
  misc_RNA (1)...(19): siRNA sense strand
caucagcauuuacuacuau

SEQ ID NO: 1795131 - RNA, 19 nt, Homo sapiens
  misc_RNA (1)...(19): siRNA sense strand
ggcaaugaaaucaaguuua

SEQ ID NO: 1795132 - RNA, 19 nt, Homo sapiens
  misc_RNA (1)...(19): siRNA sense strand
gcucuaugaugcggucuuu

SEQ ID NO: 1795133 - RNA, 19 nt, Homo sapiens
  misc_RNA (1)...(19): siRNA sense strand
ggucuuaggcaaugaaauc

SEQ ID NO: 1795134 - RNA, 19 nt, Homo sapiens
  misc_RNA (1)...(19): siRNA sense strand
gagaaggucaucauucgau

SEQ ID NO: 1795135 - RNA, 19 nt, Homo sapiens
  misc_RNA (1)...(19): siRNA sense strand
gagcccaggugaccagcaa

SEQ ID NO: 1795136 - RNA, 19 nt, Homo sapiens
  misc_RNA (1)...(19): siRNA sense strand
gcaucucccugaucaugug

SEQ ID NO: 1795137 - RNA, 19 nt, Homo sapiens
  misc_RNA (1)...(19): siRNA sense strand
ucaucagcauuuacuacua

SEQ ID NO: 1795138 - RNA, 19 nt, Homo sapiens
  misc_RNA (1)...(19): siRNA sense strand
uuacuacuauuaccaaguc

SEQ ID NO: 1795139 - RNA, 19 nt, Homo sapiens
  misc_RNA (1)...(19): siRNA sense strand
ucaccgaagcuugcuauuu

SEQ ID NO: 1795140 - RNA, 19 nt, Homo sapiens
  misc_RNA (1)...(19): siRNA sense strand
gcugagaaggucaucauuc

SEQ ID NO: 1795141 - RNA, 19 nt, Homo sapiens
  misc_RNA (1)...(19): siRNA sense strand
ucuaugaugcggucuuuga

SEQ ID NO: 1795142 - RNA, 19 nt, Homo sapiens
  misc_RNA (1)...(19): siRNA sense strand
cagcaucucccugaucaug

SEQ ID NO: 1795143 - RNA, 19 nt, Homo sapiens
  misc_RNA (1)...(19): siRNA sense strand
cugagaaggucaucauucg

SEQ ID NO: 1795144 - RNA, 19 nt, Homo sapiens
  misc_RNA (1)...(19): siRNA sense strand
gcucaccgaagcuugcuau

SEQ ID NO: 1795145 - RNA, 19 nt, Homo sapiens
  misc_RNA (1)...(19): siRNA sense strand
ucccugaccagcucuauga

SEQ ID NO: 1795146 - RNA, 19 nt, Homo sapiens
  misc_RNA (1)...(19): siRNA sense strand
cuuaggcaaugaaaucaag

SEQ ID NO: 1795147 - RNA, 19 nt, Homo sapiens
  misc_RNA (1)...(19): siRNA sense strand
aaaucaaguuuaccauucg

SEQ ID NO: 1795148 - RNA, 19 nt, Homo sapiens
  misc_RNA (1)...(19): siRNA sense strand
cagcauuuacuacuauuac

SEQ ID NO: 1795149 - RNA, 19 nt, Homo sapiens
  misc_RNA (1)...(19): siRNA sense strand
gaggugcaucgcuccaaga

SEQ ID NO: 1795150 - RNA, 19 nt, Homo sapiens
  misc_RNA (1)...(19): siRNA sense strand
gcauuuacuacuauuacca

SEQ ID NO: 1795151 - RNA, 19 nt, Homo sapiens
  misc_RNA (1)...(19): siRNA sense strand
ucaaugugcugauccugua

SEQ ID NO: 1795152 - RNA, 19 nt, Homo sapiens
  misc_RNA (1)...(19): siRNA sense strand
guacuacgccuuccucaug

SEQ ID NO: 1795153 - RNA, 19 nt, Homo sapiens
  misc_RNA (1)...(19): siRNA sense strand
caacgugggccucgucuuc

SEQ ID NO: 1795154 - RNA, 19 nt, Homo sapiens
  misc_RNA (1)...(19): siRNA sense strand
acucggagcucgacgucuu

SEQ ID NO: 1795155 - RNA, 19 nt, Homo sapiens
  misc_RNA (1)...(19): siRNA sense strand
gagcucgacgucuuugaug

SEQ ID NO: 1795156 - RNA, 19 nt, Homo sapiens
  misc_RNA (1)...(19): siRNA sense strand
ggagcucgacgucuuugau

SEQ ID NO: 1795157 - RNA, 19 nt, Homo sapiens
  misc_RNA (1)...(19): siRNA sense strand
uggaguacaucguccucaa

SEQ ID NO: 1795158 - RNA, 19 nt, Homo sapiens
  misc_RNA (1)...(19): siRNA sense strand
cgucuuugaugcguacuug

SEQ ID NO: 1795159 - RNA, 19 nt, Homo sapiens
  misc_RNA (1)...(19): siRNA sense strand
ggccuguucuucgucaaug

SEQ ID NO: 1795160 - RNA, 19 nt, Homo sapiens
  misc_RNA (1)...(19): siRNA sense strand
acgccuuccucauggagua

SEQ ID NO: 1795161 - RNA, 19 nt, Homo sapiens
  misc_RNA (1)...(19): siRNA sense strand
gcugcugcccucuauguuc

SEQ ID NO: 1795162 - RNA, 19 nt, Homo sapiens
  misc_RNA (1)...(19): siRNA sense strand
ggaagguccugacagauua

SEQ ID NO: 1795163 - RNA, 19 nt, Homo sapiens
  misc_RNA (1)...(19): siRNA sense strand
gcagaaauccaccaaugua

SEQ ID NO: 1795164 - RNA, 19 nt, Homo sapiens
  misc_RNA (1)...(19): siRNA sense strand
gaaacucucccuucauuau

SEQ ID NO: 1795165 - RNA, 19 nt, Homo sapiens
  misc_RNA (1)...(19): siRNA sense strand
gaggguagcuaucuuacga

SEQ ID NO: 1795166 - RNA, 19 nt, Homo sapiens
  misc_RNA (1)...(19): siRNA sense strand
caagaaggaucuguaugaa

SEQ ID NO: 1795167 - RNA, 19 nt, Homo sapiens
  misc_RNA (1)...(19): siRNA sense strand
cagcagaaauccaccaaug

SEQ ID NO: 1795168 - RNA, 19 nt, Homo sapiens
  misc_RNA (1)...(19): siRNA sense strand
ccaagaaggaucuguauga

SEQ ID NO: 1795169 - RNA, 19 nt, Homo sapiens
  misc_RNA (1)...(19): siRNA sense strand
uuacagguauugauucuga

SEQ ID NO: 1795170 - RNA, 19 nt, Homo sapiens
  misc_RNA (1)...(19): siRNA sense strand
gcagaacauuguacccuau

SEQ ID NO: 1795171 - RNA, 19 nt, Homo sapiens
  misc_RNA (1)...(19): siRNA sense strand
guaaaaggccucuauaaaa

SEQ ID NO: 1795172 - RNA, 19 nt, Homo sapiens
  misc_RNA (1)...(19): siRNA sense strand
gggcugccauucuuugaaa

SEQ ID NO: 1795173 - RNA, 19 nt, Homo sapiens
  misc_RNA (1)...(19): siRNA sense strand
aaucaaagauauccacgaa

SEQ ID NO: 1795174 - RNA, 19 nt, Homo sapiens
  misc_RNA (1)...(19): siRNA sense strand
ugaauucuaugaacacaga

SEQ ID NO: 1795175 - RNA, 19 nt, Homo sapiens
  misc_RNA (1)...(19): siRNA sense strand
gaccaaggaugacgaugug

SEQ ID NO: 1795176 - RNA, 19 nt, Homo sapiens
  misc_RNA (1)...(19): siRNA sense strand
gaucccaagucaaccauug

SEQ ID NO: 1795177 - RNA, 19 nt, Homo sapiens
  misc_RNA (1)...(19): siRNA sense strand
aaggaguacuuacagguua

SEQ ID NO: 1795178 - RNA, 19 nt, Homo sapiens
  misc_RNA (1)...(19): siRNA sense strand
gaaggaguacuuacagguu

SEQ ID NO: 1795179 - RNA, 19 nt, Homo sapiens
  misc_RNA (1)...(19): siRNA sense strand
cauggaagguccugacaga

SEQ ID NO: 1795180 - RNA, 19 nt, Homo sapiens
  misc_RNA (1)...(19): siRNA sense strand
gcaauccuguccacaaugg

SEQ ID NO: 1795181 - RNA, 19 nt, Homo sapiens
  misc_RNA (1)...(19): siRNA sense strand
ccaccaauguagucuauca

SEQ ID NO: 1795182 - RNA, 19 nt, Homo sapiens
  misc_RNA (1)...(19): siRNA sense strand
ucaaagauauccacgaacu

SEQ ID NO: 1795183 - RNA, 19 nt, Homo sapiens
  misc_RNA (1)...(19): siRNA sense strand
gucauggccuuaacagaaa

SEQ ID NO: 1795184 - RNA, 19 nt, Homo sapiens
  misc_RNA (1)...(19): siRNA sense strand
gcgcaauccuguccacaau

SEQ ID NO: 1795185 - RNA, 19 nt, Homo sapiens
  misc_RNA (1)...(19): siRNA sense strand
ggauguaccguguggcuaa

SEQ ID NO: 1795186 - RNA, 19 nt, Homo sapiens
  misc_RNA (1)...(19): siRNA sense strand
gcacaaugaguuugacuuc

SEQ ID NO: 1795187 - RNA, 19 nt, Homo sapiens
  misc_RNA (1)...(19): siRNA sense strand
ggaagggugcagcaaguuu

SEQ ID NO: 1795188 - RNA, 19 nt, Homo sapiens
  misc_RNA (1)...(19): siRNA sense strand
uaaaaggccucuauaaaag

SEQ ID NO: 1795189 - RNA, 19 nt, Homo sapiens
  misc_RNA (1)...(19): siRNA sense strand
ccucuagacuggcggauga

SEQ ID NO: 1795190 - RNA, 19 nt, Homo sapiens
  misc_RNA (1)...(19): siRNA sense strand
augaugggcuggaccaaua

SEQ ID NO: 1795191 - RNA, 19 nt, Homo sapiens
  misc_RNA (1)...(19): siRNA sense strand
acgagacgcugaauucuau

SEQ ID NO: 1795192 - RNA, 19 nt, Homo sapiens
  misc_RNA (1)...(19): siRNA sense strand
ggauuuacagguauugauu

SEQ ID NO: 1795193 - RNA, 19 nt, Homo sapiens
  misc_RNA (1)...(19): siRNA sense strand
caugugagcaggaauaaga

SEQ ID NO: 1795194 - RNA, 19 nt, Homo sapiens
  misc_RNA (1)...(19): siRNA sense strand
agaugcaccucuaaauauu

SEQ ID NO: 1795195 - RNA, 19 nt, Homo sapiens
  misc_RNA (1)...(19): siRNA sense strand
ugagguggcuaagcuguuu

SEQ ID NO: 1795196 - RNA, 19 nt, Homo sapiens
  misc_RNA (1)...(19): siRNA sense strand
uaagagagggcaagugguu

SEQ ID NO: 1795197 - RNA, 19 nt, Homo sapiens
  misc_RNA (1)...(19): siRNA sense strand
cccaugccaucccuuguua

SEQ ID NO: 1795198 - RNA, 19 nt, Homo sapiens
  misc_RNA (1)...(19): siRNA sense strand
cgucauggccuuaacagaa

SEQ ID NO: 1795199 - RNA, 19 nt, Homo sapiens
  misc_RNA (1)...(19): siRNA sense strand
gagcucaaacagaaaugua

SEQ ID NO: 1795200 - RNA, 19 nt, Homo sapiens
  misc_RNA (1)...(19): siRNA sense strand
gaagggugcagcaaguuug

SEQ ID NO: 1795201 - RNA, 19 nt, Homo sapiens
  misc_RNA (1)...(19): siRNA sense strand
caaaggaucgugagaaugc

SEQ ID NO: 1795202 - RNA, 19 nt, Homo sapiens
  misc_RNA (1)...(19): siRNA sense strand
gaaauccaccaauguaguc

SEQ ID NO: 1795203 - RNA, 19 nt, Homo sapiens
  misc_RNA (1)...(19): siRNA sense strand
gccauggacuucuaugauc

SEQ ID NO: 1795204 - RNA, 19 nt, Homo sapiens
  misc_RNA (1)...(19): siRNA sense strand
caauggccaugcccuguug

SEQ ID NO: 1795205 - RNA, 19 nt, Homo sapiens
  misc_RNA (1)...(19): siRNA sense strand
gaaugcugaugcgguguuu

SEQ ID NO: 1795206 - RNA, 19 nt, Homo sapiens
  misc_RNA (1)...(19): siRNA sense strand
gcaagagcagaacauugua

SEQ ID NO: 1795207 - RNA, 19 nt, Homo sapiens
  misc_RNA (1)...(19): siRNA sense strand
gcuaagcuguuugcugaug

SEQ ID NO: 1795208 - RNA, 19 nt, Homo sapiens
  misc_RNA (1)...(19): siRNA sense strand
uaguggaacuucugcaaga

SEQ ID NO: 1795209 - RNA, 19 nt, Homo sapiens
  misc_RNA (1)...(19): siRNA sense strand
cagcaaggcacaaugaguu

SEQ ID NO: 1795210 - RNA, 19 nt, Homo sapiens
  misc_RNA (1)...(19): siRNA sense strand
ggaccaaggaugacgaugu

SEQ ID NO: 1795211 - RNA, 19 nt, Homo sapiens
  misc_RNA (1)...(19): siRNA sense strand
gagcugaggcugaaacucu

SEQ ID NO: 1795212 - RNA, 19 nt, Homo sapiens
  misc_RNA (1)...(19): siRNA sense strand
gguccuggaucccaaguca

SEQ ID NO: 1795213 - RNA, 19 nt, Homo sapiens
  misc_RNA (1)...(19): siRNA sense strand
gaugcaccucuaaauauuu

SEQ ID NO: 1795214 - RNA, 19 nt, Homo sapiens
  misc_RNA (1)...(19): siRNA sense strand
gcucaaacagaaauguaaa

SEQ ID NO: 1795215 - RNA, 19 nt, Homo sapiens
  misc_RNA (1)...(19): siRNA sense strand
ugcauuaccagcuuuauuu

SEQ ID NO: 1795216 - RNA, 19 nt, Homo sapiens
  misc_RNA (1)...(19): siRNA sense strand
aaaccaagaaggaucugua

SEQ ID NO: 1795217 - RNA, 19 nt, Homo sapiens
  misc_RNA (1)...(19): siRNA sense strand
ggaugacgaugugccucua

SEQ ID NO: 1795218 - RNA, 19 nt, Homo sapiens
  misc_RNA (1)...(19): siRNA sense strand
ugacaccucuggagcucaa

SEQ ID NO: 1795219 - RNA, 19 nt, Homo sapiens
  misc_RNA (1)...(19): siRNA sense strand
ggucugcauuaccagcuuu

SEQ ID NO: 1795220 - RNA, 19 nt, Homo sapiens
  misc_RNA (1)...(19): siRNA sense strand
ggaccaauaccgucugaca

SEQ ID NO: 1795221 - RNA, 19 nt, Homo sapiens
  misc_RNA (1)...(19): siRNA sense strand
cgcaaaggaucgugagaau

SEQ ID NO: 1795222 - RNA, 19 nt, Homo sapiens
  misc_RNA (1)...(19): siRNA sense strand
gcacuuugacacccugcua

SEQ ID NO: 1795223 - RNA, 19 nt, Homo sapiens
  misc_RNA (1)...(19): siRNA sense strand
gcuagaugauggcgugauc

SEQ ID NO: 1795224 - RNA, 19 nt, Homo sapiens
  misc_RNA (1)...(19): siRNA sense strand
gcuggucuggucugcauua

SEQ ID NO: 1795225 - RNA, 19 nt, Homo sapiens
  misc_RNA (1)...(19): siRNA sense strand
gguauugauucugauuaug

SEQ ID NO: 1795226 - RNA, 19 nt, Homo sapiens
  misc_RNA (1)...(19): siRNA sense strand
caaggcacaaugaguuuga

SEQ ID NO: 1795227 - RNA, 19 nt, Homo sapiens
  misc_RNA (1)...(19): siRNA sense strand
aaccauuguugccaucuuu

SEQ ID NO: 1795228 - RNA, 19 nt, Homo sapiens
  misc_RNA (1)...(19): siRNA sense strand
aaaccaauuuguccacagu

SEQ ID NO: 1795229 - RNA, 19 nt, Homo sapiens
  misc_RNA (1)...(19): siRNA sense strand
gcaaaggaucgugagaaug

SEQ ID NO: 1795230 - RNA, 19 nt, Homo sapiens
  misc_RNA (1)...(19): siRNA sense strand
uggaagguccugacagauu

SEQ ID NO: 1795231 - RNA, 19 nt, Homo sapiens
  misc_RNA (1)...(19): siRNA sense strand
ggacggaggguagcuaucu

SEQ ID NO: 1795232 - RNA, 19 nt, Homo sapiens
  misc_RNA (1)...(19): siRNA sense strand
ggacagagaggaaaauauc

SEQ ID NO: 1795233 - RNA, 19 nt, Homo sapiens
  misc_RNA (1)...(19): siRNA sense strand
gaacucgaaugaggaagcu

SEQ ID NO: 1795234 - RNA, 19 nt, Homo sapiens
  misc_RNA (1)...(19): siRNA sense strand
ggagaaggaguacuuacag

SEQ ID NO: 1795235 - RNA, 19 nt, Homo sapiens
  misc_RNA (1)...(19): siRNA sense strand
gcugccauucuuugaaaua

SEQ ID NO: 1795236 - RNA, 19 nt, Homo sapiens
  misc_RNA (1)...(19): siRNA sense strand
gggagaaggaguacuuaca

SEQ ID NO: 1795237 - RNA, 19 nt, Homo sapiens
  misc_RNA (1)...(19): siRNA sense strand
ggccucaccucuguggaaa

SEQ ID NO: 1795238 - RNA, 19 nt, Homo sapiens
  misc_RNA (1)...(19): siRNA sense strand
uaucaggcccaccauguga

SEQ ID NO: 1795239 - RNA, 19 nt, Homo sapiens
  misc_RNA (1)...(19): siRNA sense strand
gggugccaauuucuacauu

SEQ ID NO: 1795240 - RNA, 19 nt, Homo sapiens
  misc_RNA (1)...(19): siRNA sense strand
cucccuucauuaucaauua

SEQ ID NO: 1795241 - RNA, 19 nt, Homo sapiens
  misc_RNA (1)...(19): siRNA sense strand
cagaacauuguacccuaua

SEQ ID NO: 1795242 - RNA, 19 nt, Homo sapiens
  misc_RNA (1)...(19): siRNA sense strand
ugagaaugcccgcaaaaua

SEQ ID NO: 1795243 - RNA, 19 nt, Homo sapiens
  misc_RNA (1)...(19): siRNA sense strand
caccaugugagcaggaaua

SEQ ID NO: 1795244 - RNA, 19 nt, Homo sapiens
  misc_RNA (1)...(19): siRNA sense strand
gcacccgguccuccuacua

SEQ ID NO: 1795245 - RNA, 19 nt, Homo sapiens
  misc_RNA (1)...(19): siRNA sense strand
gccaugcccuguugaugca

SEQ ID NO: 1795246 - RNA, 19 nt, Homo sapiens
  misc_RNA (1)...(19): siRNA sense strand
gcauuccaguugcgcaauc

SEQ ID NO: 1795247 - RNA, 19 nt, Homo sapiens
  misc_RNA (1)...(19): siRNA sense strand
agauauccacgaacucuuu

SEQ ID NO: 1795248 - RNA, 19 nt, Homo sapiens
  misc_RNA (1)...(19): siRNA sense strand
gaacauuguacccuauacu

SEQ ID NO: 1795249 - RNA, 19 nt, Homo sapiens
  misc_RNA (1)...(19): siRNA sense strand
ccagcuuuauuucuccauu

SEQ ID NO: 1795250 - RNA, 19 nt, Homo sapiens
  misc_RNA (1)...(19): siRNA sense strand
ccgaguggcugccuacaac

SEQ ID NO: 1795251 - RNA, 19 nt, Homo sapiens
  misc_RNA (1)...(19): siRNA sense strand
gguguuugcauuccaguug

SEQ ID NO: 1795252 - RNA, 19 nt, Homo sapiens
  misc_RNA (1)...(19): siRNA sense strand
agacggagaaccagcagaa

SEQ ID NO: 1795253 - RNA, 19 nt, Homo sapiens
  misc_RNA (1)...(19): siRNA sense strand
gcauuaccagcuuuauuuc

SEQ ID NO: 1795254 - RNA, 19 nt, Homo sapiens
  misc_RNA (1)...(19): siRNA sense strand
gacggaggguagcuaucuu

SEQ ID NO: 1795255 - RNA, 19 nt, Homo sapiens
  misc_RNA (1)...(19): siRNA sense strand
ccacuccccucaaagguuu

SEQ ID NO: 1795256 - RNA, 19 nt, Homo sapiens
  misc_RNA (1)...(19): siRNA sense strand
cagguauugauucugauua

SEQ ID NO: 1795257 - RNA, 19 nt, Homo sapiens
  misc_RNA (1)...(19): siRNA sense strand
cagcuuuauuucuccauuc

SEQ ID NO: 1795258 - RNA, 19 nt, Homo sapiens
  misc_RNA (1)...(19): siRNA sense strand
gagaaaauaagauggaaug

SEQ ID NO: 1795259 - RNA, 19 nt, Homo sapiens
  misc_RNA (1)...(19): siRNA sense strand
gaagguccugacagauuau

SEQ ID NO: 1795260 - RNA, 19 nt, Homo sapiens
  misc_RNA (1)...(19): siRNA sense strand
gcaaggcacaaugaguuug

SEQ ID NO: 1795261 - RNA, 19 nt, Homo sapiens
  misc_RNA (1)...(19): siRNA sense strand
ggauugcugagguggcuaa

SEQ ID NO: 1795262 - RNA, 19 nt, Homo sapiens
  misc_RNA (1)...(19): siRNA sense strand
guacaucgagugaagauua

SEQ ID NO: 1795263 - RNA, 19 nt, Homo sapiens
  misc_RNA (1)...(19): siRNA sense strand
acagagaacuuaagacuga

SEQ ID NO: 1795264 - RNA, 19 nt, Homo sapiens
  misc_RNA (1)...(19): siRNA sense strand
gaagcuggauguucaguga

SEQ ID NO: 1795265 - RNA, 19 nt, Homo sapiens
  misc_RNA (1)...(19): siRNA sense strand
aagcagagaucauaucauu

SEQ ID NO: 1795266 - RNA, 19 nt, Homo sapiens
  misc_RNA (1)...(19): siRNA sense strand
gaagccagccuguuuauau

SEQ ID NO: 1795267 - RNA, 19 nt, Homo sapiens
  misc_RNA (1)...(19): siRNA sense strand
ggaaugacagcaagaaauu

SEQ ID NO: 1795268 - RNA, 19 nt, Homo sapiens
  misc_RNA (1)...(19): siRNA sense strand
cauagaagcuggauguuca

SEQ ID NO: 1795269 - RNA, 19 nt, Homo sapiens
  misc_RNA (1)...(19): siRNA sense strand
gaucauaucauuaggucua

SEQ ID NO: 1795270 - RNA, 19 nt, Homo sapiens
  misc_RNA (1)...(19): siRNA sense strand
gcagagaucauaucauuag

SEQ ID NO: 1795271 - RNA, 19 nt, Homo sapiens
  misc_RNA (1)...(19): siRNA sense strand
gcaaugaaccaucuaagug

SEQ ID NO: 1795272 - RNA, 19 nt, Homo sapiens
  misc_RNA (1)...(19): siRNA sense strand
gaaagaaaaugccuugguu

SEQ ID NO: 1795273 - RNA, 19 nt, Homo sapiens
  misc_RNA (1)...(19): siRNA sense strand
gaauaucuuuccaccauca

SEQ ID NO: 1795274 - RNA, 19 nt, Homo sapiens
  misc_RNA (1)...(19): siRNA sense strand
guccaaacaucaagcagua

SEQ ID NO: 1795275 - RNA, 19 nt, Homo sapiens
  misc_RNA (1)...(19): siRNA sense strand
cagaauaucuuuccaccau

SEQ ID NO: 1795276 - RNA, 19 nt, Homo sapiens
  misc_RNA (1)...(19): siRNA sense strand
cugaugagcuucuuucuuc

SEQ ID NO: 1795277 - RNA, 19 nt, Homo sapiens
  misc_RNA (1)...(19): siRNA sense strand
gaaaaugccuugguucaga

SEQ ID NO: 1795278 - RNA, 19 nt, Homo sapiens
  misc_RNA (1)...(19): siRNA sense strand
gaucuuaucacaccacaug

SEQ ID NO: 1795279 - RNA, 19 nt, Homo sapiens
  misc_RNA (1)...(19): siRNA sense strand
ucagagacuuuaugggaaa

SEQ ID NO: 1795280 - RNA, 19 nt, Homo sapiens
  misc_RNA (1)...(19): siRNA sense strand
ccguuacuauggugaauua

SEQ ID NO: 1795281 - RNA, 19 nt, Homo sapiens
  misc_RNA (1)...(19): siRNA sense strand
gaagaaccuuuucauagaa

SEQ ID NO: 1795282 - RNA, 19 nt, Homo sapiens
  misc_RNA (1)...(19): siRNA sense strand
cgagugaagauuauguuua

SEQ ID NO: 1795283 - RNA, 19 nt, Homo sapiens
  misc_RNA (1)...(19): siRNA sense strand
gaaagugcuucgugcuaca

SEQ ID NO: 1795284 - RNA, 19 nt, Homo sapiens
  misc_RNA (1)...(19): siRNA sense strand
ccucagaguuuccuucuca

SEQ ID NO: 1795285 - RNA, 19 nt, Homo sapiens
  misc_RNA (1)...(19): siRNA sense strand
ucauugagcuucauaacca

SEQ ID NO: 1795286 - RNA, 19 nt, Homo sapiens
  misc_RNA (1)...(19): siRNA sense strand
gugcuacacuguccaaaca

SEQ ID NO: 1795287 - RNA, 19 nt, Homo sapiens
  misc_RNA (1)...(19): siRNA sense strand
gagauagaccucccuguuc

SEQ ID NO: 1795288 - RNA, 19 nt, Homo sapiens
  misc_RNA (1)...(19): siRNA sense strand
ucagaaagaucgcaaaaug

SEQ ID NO: 1795289 - RNA, 19 nt, Homo sapiens
  misc_RNA (1)...(19): siRNA sense strand
acuaaggauuucagcaaua

SEQ ID NO: 1795290 - RNA, 19 nt, Homo sapiens
  misc_RNA (1)...(19): siRNA sense strand
gccagaauaucuauaaugc

SEQ ID NO: 1795291 - RNA, 19 nt, Homo sapiens
  misc_RNA (1)...(19): siRNA sense strand
ugaggaagcugccguuacu

SEQ ID NO: 1795292 - RNA, 19 nt, Homo sapiens
  misc_RNA (1)...(19): siRNA sense strand
gaaugacagcaagaaauuu

SEQ ID NO: 1795293 - RNA, 19 nt, Homo sapiens
  misc_RNA (1)...(19): siRNA sense strand
gacuaaggauuucagcaau

SEQ ID NO: 1795294 - RNA, 19 nt, Homo sapiens
  misc_RNA (1)...(19): siRNA sense strand
gguauaauuucuucaccau

SEQ ID NO: 1795295 - RNA, 19 nt, Homo sapiens
  misc_RNA (1)...(19): siRNA sense strand
gcagagcccugugcuucga

SEQ ID NO: 1795296 - RNA, 19 nt, Homo sapiens
  misc_RNA (1)...(19): siRNA sense strand
gaacuuaagacugacaauc

SEQ ID NO: 1795297 - RNA, 19 nt, Homo sapiens
  misc_RNA (1)...(19): siRNA sense strand
cgagauagaccucccuguu

SEQ ID NO: 1795298 - RNA, 19 nt, Homo sapiens
  misc_RNA (1)...(19): siRNA sense strand
gaauaguucuacuccuucu

SEQ ID NO: 1795299 - RNA, 19 nt, Homo sapiens
  misc_RNA (1)...(19): siRNA sense strand
gauggcggaugcaaaucaa

SEQ ID NO: 1795300 - RNA, 19 nt, Homo sapiens
  misc_RNA (1)...(19): siRNA sense strand
aagccagccuguuuauauu

SEQ ID NO: 1795301 - RNA, 19 nt, Homo sapiens
  misc_RNA (1)...(19): siRNA sense strand
aucauuaggucuaccauuu

SEQ ID NO: 1795302 - RNA, 19 nt, Homo sapiens
  misc_RNA (1)...(19): siRNA sense strand
uggagucuauggugaugua

SEQ ID NO: 1795303 - RNA, 19 nt, Homo sapiens
  misc_RNA (1)...(19): siRNA sense strand
gggaaugacagcaagaaau

SEQ ID NO: 1795304 - RNA, 19 nt, Homo sapiens
  misc_RNA (1)...(19): siRNA sense strand
gggaaagugcuucgugcua

SEQ ID NO: 1795305 - RNA, 19 nt, Homo sapiens
  misc_RNA (1)...(19): siRNA sense strand
gccauuggauuuccucaag

SEQ ID NO: 1795306 - RNA, 19 nt, Homo sapiens
  misc_RNA (1)...(19): siRNA sense strand
uauccuauuuggagucuau

SEQ ID NO: 1795307 - RNA, 19 nt, Homo sapiens
  misc_RNA (1)...(19): siRNA sense strand
caccgaagcagagaucaua

SEQ ID NO: 1795308 - RNA, 19 nt, Homo sapiens
  misc_RNA (1)...(19): siRNA sense strand
cuaaggauuucagcaauag

SEQ ID NO: 1795309 - RNA, 19 nt, Homo sapiens
  misc_RNA (1)...(19): siRNA sense strand
ucuuauaacagucgguuua

SEQ ID NO: 1795310 - RNA, 19 nt, Homo sapiens
  misc_RNA (1)...(19): siRNA sense strand
ugacuaaggauuucagcaa

SEQ ID NO: 1795311 - RNA, 19 nt, Homo sapiens
  misc_RNA (1)...(19): siRNA sense strand
caaugaaggcacaguccua

SEQ ID NO: 1795312 - RNA, 19 nt, Homo sapiens
  misc_RNA (1)...(19): siRNA sense strand
ggaagcugccguuacuaug

SEQ ID NO: 1795313 - RNA, 19 nt, Homo sapiens
  misc_RNA (1)...(19): siRNA sense strand
gaagcugccguuacuaugg

SEQ ID NO: 1795314 - RNA, 19 nt, Homo sapiens
  misc_RNA (1)...(19): siRNA sense strand
aaucaccaccucagaguuu

SEQ ID NO: 1795315 - RNA, 19 nt, Homo sapiens
  misc_RNA (1)...(19): siRNA sense strand
gaucugaugagcuucuuuc

SEQ ID NO: 1795316 - RNA, 19 nt, Homo sapiens
  misc_RNA (1)...(19): siRNA sense strand
ccaucuaaguggucagaga

SEQ ID NO: 1795317 - RNA, 19 nt, Homo sapiens
  misc_RNA (1)...(19): siRNA sense strand
cugacaaucuaccuaauca

SEQ ID NO: 1795318 - RNA, 19 nt, Homo sapiens
  misc_RNA (1)...(19): siRNA sense strand
agacugacaaucuaccuaa

SEQ ID NO: 1795319 - RNA, 19 nt, Homo sapiens
  misc_RNA (1)...(19): siRNA sense strand
guauuccaaucacagagaa

SEQ ID NO: 1795320 - RNA, 19 nt, Homo sapiens
  misc_RNA (1)...(19): siRNA sense strand
cuucgaagccagccuguuu

SEQ ID NO: 1795321 - RNA, 19 nt, Homo sapiens
  misc_RNA (1)...(19): siRNA sense strand
ucagauggcggaugcaaau

SEQ ID NO: 1795322 - RNA, 19 nt, Homo sapiens
  misc_RNA (1)...(19): siRNA sense strand
uaaauuuggcacagucuug

SEQ ID NO: 1795323 - RNA, 19 nt, Homo sapiens
  misc_RNA (1)...(19): siRNA sense strand
ccugugcuucgaauaauua

SEQ ID NO: 1795324 - RNA, 19 nt, Homo sapiens
  misc_RNA (1)...(19): siRNA sense strand
acuuaagacugacaaucua

SEQ ID NO: 1795325 - RNA, 19 nt, Homo sapiens
  misc_RNA (1)...(19): siRNA sense strand
agacuucacucgcuuagac

SEQ ID NO: 1795326 - RNA, 19 nt, Homo sapiens
  misc_RNA (1)...(19): siRNA sense strand
cagccacucugcaucuuuc

SEQ ID NO: 1795327 - RNA, 19 nt, Homo sapiens
  misc_RNA (1)...(19): siRNA sense strand
cgaagcagagaucauauca

SEQ ID NO: 1795328 - RNA, 19 nt, Homo sapiens
  misc_RNA (1)...(19): siRNA sense strand
gaugaucugaagaaccuuu

SEQ ID NO: 1795329 - RNA, 19 nt, Homo sapiens
  misc_RNA (1)...(19): siRNA sense strand
gcuacacuguccaaacauc

SEQ ID NO: 1795330 - RNA, 19 nt, Homo sapiens
  misc_RNA (1)...(19): siRNA sense strand
ucucaauccugaucuuauc

SEQ ID NO: 1795331 - RNA, 19 nt, Homo sapiens
  misc_RNA (1)...(19): siRNA sense strand
ggccagaauaucuauaaug

SEQ ID NO: 1795332 - RNA, 19 nt, Homo sapiens
  misc_RNA (1)...(19): siRNA sense strand
gacaaucuaccuaaucaag

SEQ ID NO: 1795333 - RNA, 19 nt, Homo sapiens
  misc_RNA (1)...(19): siRNA sense strand
ucacagagaacuuaagacu

SEQ ID NO: 1795334 - RNA, 19 nt, Homo sapiens
  misc_RNA (1)...(19): siRNA sense strand
accaaggucugacuaagga

SEQ ID NO: 1795335 - RNA, 19 nt, Homo sapiens
  misc_RNA (1)...(19): siRNA sense strand
caccagccuuaaugugaaa

SEQ ID NO: 1795336 - RNA, 19 nt, Homo sapiens
  misc_RNA (1)...(19): siRNA sense strand
gcauugacuucuccaagcu

SEQ ID NO: 1795337 - RNA, 19 nt, Homo sapiens
  misc_RNA (1)...(19): siRNA sense strand
ugaagauuaucaccuuuac

SEQ ID NO: 1795338 - RNA, 19 nt, Homo sapiens
  misc_RNA (1)...(19): siRNA sense strand
gccagccuguuuauauuca

SEQ ID NO: 1795339 - RNA, 19 nt, Homo sapiens
  misc_RNA (1)...(19): siRNA sense strand
ucaauugggaucuguggaa

SEQ ID NO: 1795340 - RNA, 19 nt, Homo sapiens
  misc_RNA (1)...(19): siRNA sense strand
ggaugguguuguuacagau

SEQ ID NO: 1795341 - RNA, 19 nt, Homo sapiens
  misc_RNA (1)...(19): siRNA sense strand
accaggaaauucuguucua

SEQ ID NO: 1795342 - RNA, 19 nt, Homo sapiens
  misc_RNA (1)...(19): siRNA sense strand
caaucuaccuaaucaagcu

SEQ ID NO: 1795343 - RNA, 19 nt, Homo sapiens
  misc_RNA (1)...(19): siRNA sense strand
augaauaguucuacuccuu

SEQ ID NO: 1795344 - RNA, 19 nt, Homo sapiens
  misc_RNA (1)...(19): siRNA sense strand
uauaacagucgguuuaaag

SEQ ID NO: 1795345 - RNA, 19 nt, Homo sapiens
  misc_RNA (1)...(19): siRNA sense strand
gcugcacucugcgcauuga

SEQ ID NO: 1795346 - RNA, 19 nt, Homo sapiens
  misc_RNA (1)...(19): siRNA sense strand
gugaauuauuacacuccua

SEQ ID NO: 1795347 - RNA, 19 nt, Homo sapiens
  misc_RNA (1)...(19): siRNA sense strand
gcacucugcgcauugacuu

SEQ ID NO: 1795348 - RNA, 19 nt, Homo sapiens
  misc_RNA (1)...(19): siRNA sense strand
gcccugugcuucgaauaau

SEQ ID NO: 1795349 - RNA, 19 nt, Homo sapiens
  misc_RNA (1)...(19): siRNA sense strand
ccaaucacagagaacuuaa

SEQ ID NO: 1795350 - RNA, 19 nt, Homo sapiens
  misc_RNA (1)...(19): siRNA sense strand
caaggucugacuaaggauu

SEQ ID NO: 1795351 - RNA, 19 nt, Homo sapiens
  misc_RNA (1)...(19): siRNA sense strand
uacaguggaugaucugaag

SEQ ID NO: 1795352 - RNA, 19 nt, Homo sapiens
  misc_RNA (1)...(19): siRNA sense strand
cauuaggucuaccauuugg

SEQ ID NO: 1795353 - RNA, 19 nt, Homo sapiens
  misc_RNA (1)...(19): siRNA sense strand
agugaaggcuuuuaaauuc

SEQ ID NO: 1795354 - RNA, 19 nt, Homo sapiens
  misc_RNA (1)...(19): siRNA sense strand
uacaucgagugaagauuau

SEQ ID NO: 1795355 - RNA, 19 nt, Homo sapiens
  misc_RNA (1)...(19): siRNA sense strand
ugucagugccguccaauca

SEQ ID NO: 1795356 - RNA, 19 nt, Homo sapiens
  misc_RNA (1)...(19): siRNA sense strand
cagcaagaaauuuaaacga

SEQ ID NO: 1795357 - RNA, 19 nt, Homo sapiens
  misc_RNA (1)...(19): siRNA sense strand
uaaccaugaccuuggagaa

SEQ ID NO: 1795358 - RNA, 19 nt, Homo sapiens
  misc_RNA (1)...(19): siRNA sense strand
uggaugaucugaagaaccu

SEQ ID NO: 1795359 - RNA, 19 nt, Homo sapiens
  misc_RNA (1)...(19): siRNA sense strand
cugcaucuuuccaacauuc

SEQ ID NO: 1795360 - RNA, 19 nt, Homo sapiens
  misc_RNA (1)...(19): siRNA sense strand
caccggguauaauuucuuc

SEQ ID NO: 1795361 - RNA, 19 nt, Homo sapiens
  misc_RNA (1)...(19): siRNA sense strand
gaagauuaucaccuuuaca

SEQ ID NO: 1795362 - RNA, 19 nt, Homo sapiens
  misc_RNA (1)...(19): siRNA sense strand
gaagaaggcagcccagaga

SEQ ID NO: 1795363 - RNA, 19 nt, Homo sapiens
  misc_RNA (1)...(19): siRNA sense strand
accagaaacuagccuauua

SEQ ID NO: 1795364 - RNA, 19 nt, Homo sapiens
  misc_RNA (1)...(19): siRNA sense strand
gaaacuagccuauuauucc

SEQ ID NO: 1795365 - RNA, 19 nt, Homo sapiens
  misc_RNA (1)...(19): siRNA sense strand
gcugcguccucuucacuua

SEQ ID NO: 1795366 - RNA, 19 nt, Homo sapiens
  misc_RNA (1)...(19): siRNA sense strand
gauguuauguaccaagucu

SEQ ID NO: 1795367 - RNA, 19 nt, Homo sapiens
  misc_RNA (1)...(19): siRNA sense strand
gaaggcagcccagagaaag

SEQ ID NO: 1795368 - RNA, 19 nt, Homo sapiens
  misc_RNA (1)...(19): siRNA sense strand
cagaaacuagccuauuauu

SEQ ID NO: 1795369 - RNA, 19 nt, Homo sapiens
  misc_RNA (1)...(19): siRNA sense strand
aaacuagccuauuauucca

SEQ ID NO: 1795370 - RNA, 19 nt, Homo sapiens
  misc_RNA (1)...(19): siRNA sense strand
cgugguggaugaacauuuc

SEQ ID NO: 1795371 - RNA, 19 nt, Homo sapiens
  misc_RNA (1)...(19): siRNA sense strand
ccagaaacuagccuauuau

SEQ ID NO: 1795372 - RNA, 19 nt, Homo sapiens
  misc_RNA (1)...(19): siRNA sense strand
cccagcagcuacucuccua

SEQ ID NO: 1795373 - RNA, 19 nt, Homo sapiens
  misc_RNA (1)...(19): siRNA sense strand
cagcggcagcuccucauuu

SEQ ID NO: 1795374 - RNA, 19 nt, Homo sapiens
  misc_RNA (1)...(19): siRNA sense strand
ucagcuccgugguggauga

SEQ ID NO: 1795375 - RNA, 19 nt, Homo sapiens
  misc_RNA (1)...(19): siRNA sense strand
agaaggcagcccagagaaa

SEQ ID NO: 1795376 - RNA, 19 nt, Homo sapiens
  misc_RNA (1)...(19): siRNA sense strand
gcuccgugguggaugaaca

SEQ ID NO: 1795377 - RNA, 19 nt, Homo sapiens
  misc_RNA (1)...(19): siRNA sense strand
agaaacuagccuauuauuc

SEQ ID NO: 1795378 - RNA, 19 nt, Homo sapiens
  misc_RNA (1)...(19): siRNA sense strand
acuagccuauuauuccaaa

SEQ ID NO: 1795379 - RNA, 19 nt, Homo sapiens
  misc_RNA (1)...(19): siRNA sense strand
caccagaaacuagccuauu

SEQ ID NO: 1795380 - RNA, 19 nt, Homo sapiens
  misc_RNA (1)...(19): siRNA sense strand
gcagcggcagcuccucauu

SEQ ID NO: 1795381 - RNA, 19 nt, Homo sapiens
  misc_RNA (1)...(19): siRNA sense strand
ugcguccucuucacuuauu

SEQ ID NO: 1795382 - RNA, 19 nt, Homo sapiens
  misc_RNA (1)...(19): siRNA sense strand
caccagaggcagaguacau

SEQ ID NO: 1795383 - RNA, 19 nt, Homo sapiens
  misc_RNA (1)...(19): siRNA sense strand
gaagaaggcagcccagaga

SEQ ID NO: 1795384 - RNA, 19 nt, Homo sapiens
  misc_RNA (1)...(19): siRNA sense strand
accagaaacuagccuauua

SEQ ID NO: 1795385 - RNA, 19 nt, Homo sapiens
  misc_RNA (1)...(19): siRNA sense strand
gaaacuagccuauuauucc

SEQ ID NO: 1795386 - RNA, 19 nt, Homo sapiens
  misc_RNA (1)...(19): siRNA sense strand
gcugcguccucuucacuua

SEQ ID NO: 1795387 - RNA, 19 nt, Homo sapiens
  misc_RNA (1)...(19): siRNA sense strand
gauguuauguaccaagucu

SEQ ID NO: 1795388 - RNA, 19 nt, Homo sapiens
  misc_RNA (1)...(19): siRNA sense strand
gaaggcagcccagagaaag

SEQ ID NO: 1795389 - RNA, 19 nt, Homo sapiens
  misc_RNA (1)...(19): siRNA sense strand
cagaaacuagccuauuauu

SEQ ID NO: 1795390 - RNA, 19 nt, Homo sapiens
  misc_RNA (1)...(19): siRNA sense strand
aaacuagccuauuauucca

SEQ ID NO: 1795391 - RNA, 19 nt, Homo sapiens
  misc_RNA (1)...(19): siRNA sense strand
cgugguggaugaacauuuc

SEQ ID NO: 1795392 - RNA, 19 nt, Homo sapiens
  misc_RNA (1)...(19): siRNA sense strand
ccagaaacuagccuauuau

SEQ ID NO: 1795393 - RNA, 19 nt, Homo sapiens
  misc_RNA (1)...(19): siRNA sense strand
cccagcagcuacucuccua

SEQ ID NO: 1795394 - RNA, 19 nt, Homo sapiens
  misc_RNA (1)...(19): siRNA sense strand
cagcggcagcuccucauuu

SEQ ID NO: 1795395 - RNA, 19 nt, Homo sapiens
  misc_RNA (1)...(19): siRNA sense strand
ucagcuccgugguggauga

SEQ ID NO: 1795396 - RNA, 19 nt, Homo sapiens
  misc_RNA (1)...(19): siRNA sense strand
agaaggcagcccagagaaa

SEQ ID NO: 1795397 - RNA, 19 nt, Homo sapiens
  misc_RNA (1)...(19): siRNA sense strand
gcuccgugguggaugaaca

SEQ ID NO: 1795398 - RNA, 19 nt, Homo sapiens
  misc_RNA (1)...(19): siRNA sense strand
agaaacuagccuauuauuc

SEQ ID NO: 1795399 - RNA, 19 nt, Homo sapiens
  misc_RNA (1)...(19): siRNA sense strand
acuagccuauuauuccaaa

SEQ ID NO: 1795400 - RNA, 19 nt, Homo sapiens
  misc_RNA (1)...(19): siRNA sense strand
caccagaaacuagccuauu

SEQ ID NO: 1795401 - RNA, 19 nt, Homo sapiens
  misc_RNA (1)...(19): siRNA sense strand
gcagcggcagcuccucauu

SEQ ID NO: 1795402 - RNA, 19 nt, Homo sapiens
  misc_RNA (1)...(19): siRNA sense strand
ugcguccucuucacuuauu

SEQ ID NO: 1795403 - RNA, 19 nt, Homo sapiens
  misc_RNA (1)...(19): siRNA sense strand
caccagaggcagaguacau

SEQ ID NO: 1795404 - RNA, 19 nt, Homo sapiens
  misc_RNA (1)...(19): siRNA sense strand
ggaugcaucuuaugaagua

SEQ ID NO: 1795405 - RNA, 19 nt, Homo sapiens
  misc_RNA (1)...(19): siRNA sense strand
ggaccgugcugacagaaua

SEQ ID NO: 1795406 - RNA, 19 nt, Homo sapiens
  misc_RNA (1)...(19): siRNA sense strand
caauggacaugcccuguua

SEQ ID NO: 1795407 - RNA, 19 nt, Homo sapiens
  misc_RNA (1)...(19): siRNA sense strand
ucaugaaggugcaaguuua

SEQ ID NO: 1795408 - RNA, 19 nt, Homo sapiens
  misc_RNA (1)...(19): siRNA sense strand
caggagaaauuaaagguuu

SEQ ID NO: 1795409 - RNA, 19 nt, Homo sapiens
  misc_RNA (1)...(19): siRNA sense strand
gaggagaucuucaagucuu

SEQ ID NO: 1795410 - RNA, 19 nt, Homo sapiens
  misc_RNA (1)...(19): siRNA sense strand
gacaaaggaugacgauguu

SEQ ID NO: 1795411 - RNA, 19 nt, Homo sapiens
  misc_RNA (1)...(19): siRNA sense strand
cuacugagcuaaagcagaa

SEQ ID NO: 1795412 - RNA, 19 nt, Homo sapiens
  misc_RNA (1)...(19): siRNA sense strand
caucacaaguuucauauca

SEQ ID NO: 1795413 - RNA, 19 nt, Homo sapiens
  misc_RNA (1)...(19): siRNA sense strand
ggacuacuaugacucugaa

SEQ ID NO: 1795414 - RNA, 19 nt, Homo sapiens
  misc_RNA (1)...(19): siRNA sense strand
ggacaaaggaugacgaugu

SEQ ID NO: 1795415 - RNA, 19 nt, Homo sapiens
  misc_RNA (1)...(19): siRNA sense strand
ucacugggaucgauucuga

SEQ ID NO: 1795416 - RNA, 19 nt, Homo sapiens
  misc_RNA (1)...(19): siRNA sense strand
ccaugaagacuuugaauuu

SEQ ID NO: 1795417 - RNA, 19 nt, Homo sapiens
  misc_RNA (1)...(19): siRNA sense strand
gaaugcugaugcugucuuu

SEQ ID NO: 1795418 - RNA, 19 nt, Homo sapiens
  misc_RNA (1)...(19): siRNA sense strand
aaacagggaaggaucuuua

SEQ ID NO: 1795419 - RNA, 19 nt, Homo sapiens
  misc_RNA (1)...(19): siRNA sense strand
aaacagaugcggaaacauu

SEQ ID NO: 1795420 - RNA, 19 nt, Homo sapiens
  misc_RNA (1)...(19): siRNA sense strand
ggaugacgauguuccuuug

SEQ ID NO: 1795421 - RNA, 19 nt, Homo sapiens
  misc_RNA (1)...(19): siRNA sense strand
caaguuucauaucaccuua

SEQ ID NO: 1795422 - RNA, 19 nt, Homo sapiens
  misc_RNA (1)...(19): siRNA sense strand
uaacuugucaguaccuaua

SEQ ID NO: 1795423 - RNA, 19 nt, Homo sapiens
  misc_RNA (1)...(19): siRNA sense strand
cauuugcucugauguauga

SEQ ID NO: 1795424 - RNA, 19 nt, Homo sapiens
  misc_RNA (1)...(19): siRNA sense strand
ggacaugcccuguuaaugc

SEQ ID NO: 1795425 - RNA, 19 nt, Homo sapiens
  misc_RNA (1)...(19): siRNA sense strand
ugaacaccaugaagacuuu

SEQ ID NO: 1795426 - RNA, 19 nt, Homo sapiens
  misc_RNA (1)...(19): siRNA sense strand
acaaggagauuggcugauu

SEQ ID NO: 1795427 - RNA, 19 nt, Homo sapiens
  misc_RNA (1)...(19): siRNA sense strand
ggauggaggugucauuaac

SEQ ID NO: 1795428 - RNA, 19 nt, Homo sapiens
  misc_RNA (1)...(19): siRNA sense strand
cuacaaauccuuggagaaa

SEQ ID NO: 1795429 - RNA, 19 nt, Homo sapiens
  misc_RNA (1)...(19): siRNA sense strand
caaggagauuggcugauug

SEQ ID NO: 1795430 - RNA, 19 nt, Homo sapiens
  misc_RNA (1)...(19): siRNA sense strand
acagagggaugucaaagga

SEQ ID NO: 1795431 - RNA, 19 nt, Homo sapiens
  misc_RNA (1)...(19): siRNA sense strand
agagguggcuuucgugguu

SEQ ID NO: 1795432 - RNA, 19 nt, Homo sapiens
  misc_RNA (1)...(19): siRNA sense strand
gcaauaacgcgcagaacug

SEQ ID NO: 1795433 - RNA, 19 nt, Homo sapiens
  misc_RNA (1)...(19): siRNA sense strand
guuugcagaugcuggcuua

SEQ ID NO: 1795434 - RNA, 19 nt, Homo sapiens
  misc_RNA (1)...(19): siRNA sense strand
ggaggaaggaguucugaau

SEQ ID NO: 1795435 - RNA, 19 nt, Homo sapiens
  misc_RNA (1)...(19): siRNA sense strand
gaacacgaaugcgcaaacu

SEQ ID NO: 1795436 - RNA, 19 nt, Homo sapiens
  misc_RNA (1)...(19): siRNA sense strand
gcauggccuuggaggagua

SEQ ID NO: 1795437 - RNA, 19 nt, Homo sapiens
  misc_RNA (1)...(19): siRNA sense strand
ggaucgaguuuauuggaau

SEQ ID NO: 1795438 - RNA, 19 nt, Homo sapiens
  misc_RNA (1)...(19): siRNA sense strand
gucauuaacuugucaguac

SEQ ID NO: 1795439 - RNA, 19 nt, Homo sapiens
  misc_RNA (1)...(19): siRNA sense strand
caaccaaugucaccuacca

SEQ ID NO: 1795440 - RNA, 19 nt, Homo sapiens
  misc_RNA (1)...(19): siRNA sense strand
gaccagagguggcuuucgu

SEQ ID NO: 1795441 - RNA, 19 nt, Homo sapiens
  misc_RNA (1)...(19): siRNA sense strand
uggcaugccucauccagaa

SEQ ID NO: 1795442 - RNA, 19 nt, Homo sapiens
  misc_RNA (1)...(19): siRNA sense strand
gaucgaguuuauuggaaug

SEQ ID NO: 1795443 - RNA, 19 nt, Homo sapiens
  misc_RNA (1)...(19): siRNA sense strand
aaagucaagcugagcaaua

SEQ ID NO: 1795444 - RNA, 19 nt, Homo sapiens
  misc_RNA (1)...(19): siRNA sense strand
gcugacagaauacuacaaa

SEQ ID NO: 1795445 - RNA, 19 nt, Homo sapiens
  misc_RNA (1)...(19): siRNA sense strand
cgacagugguggccaucuu

SEQ ID NO: 1795446 - RNA, 19 nt, Homo sapiens
  misc_RNA (1)...(19): siRNA sense strand
gacaugcccuguuaaugca

SEQ ID NO: 1795447 - RNA, 19 nt, Homo sapiens
  misc_RNA (1)...(19): siRNA sense strand
cuugaucaguaucgucuua

SEQ ID NO: 1795448 - RNA, 19 nt, Homo sapiens
  misc_RNA (1)...(19): siRNA sense strand
ugaauggcuuuaugagaga

SEQ ID NO: 1795449 - RNA, 19 nt, Homo sapiens
  misc_RNA (1)...(19): siRNA sense strand
aagucaagcugagcaauaa

SEQ ID NO: 1795450 - RNA, 19 nt, Homo sapiens
  misc_RNA (1)...(19): siRNA sense strand
gaaagacuacugugagcau

SEQ ID NO: 1795451 - RNA, 19 nt, Homo sapiens
  misc_RNA (1)...(19): siRNA sense strand
agaagcguauggacuacua

SEQ ID NO: 1795452 - RNA, 19 nt, Homo sapiens
  misc_RNA (1)...(19): siRNA sense strand
cagggaaggaucuuuauga

SEQ ID NO: 1795453 - RNA, 19 nt, Homo sapiens
  misc_RNA (1)...(19): siRNA sense strand
gcagagagcaaccaauguc

SEQ ID NO: 1795454 - RNA, 19 nt, Homo sapiens
  misc_RNA (1)...(19): siRNA sense strand
caacaaugcaaggcaaauu

SEQ ID NO: 1795455 - RNA, 19 nt, Homo sapiens
  misc_RNA (1)...(19): siRNA sense strand
gugcaucacaaguuucaua

SEQ ID NO: 1795456 - RNA, 19 nt, Homo sapiens
  misc_RNA (1)...(19): siRNA sense strand
aggaguaccugguuuguca

SEQ ID NO: 1795457 - RNA, 19 nt, Homo sapiens
  misc_RNA (1)...(19): siRNA sense strand
auaguucccuuucgaguug

SEQ ID NO: 1795458 - RNA, 19 nt, Homo sapiens
  misc_RNA (1)...(19): siRNA sense strand
gagcaaccaaugucaccua

SEQ ID NO: 1795459 - RNA, 19 nt, Homo sapiens
  misc_RNA (1)...(19): siRNA sense strand
gaacagagggaugucaaag

SEQ ID NO: 1795460 - RNA, 19 nt, Homo sapiens
  misc_RNA (1)...(19): siRNA sense strand
gaacuauaugugccagaaa

SEQ ID NO: 1795461 - RNA, 19 nt, Homo sapiens
  misc_RNA (1)...(19): siRNA sense strand
ggagccaacuuuuacauug

SEQ ID NO: 1795462 - RNA, 19 nt, Homo sapiens
  misc_RNA (1)...(19): siRNA sense strand
ccuuugauguggcguauga

SEQ ID NO: 1795463 - RNA, 19 nt, Homo sapiens
  misc_RNA (1)...(19): siRNA sense strand
ugucaaaggacucuacaaa

SEQ ID NO: 1795464 - RNA, 19 nt, Homo sapiens
  misc_RNA (1)...(19): siRNA sense strand
uggaggagaucuucaaguc

SEQ ID NO: 1795465 - RNA, 19 nt, Homo sapiens
  misc_RNA (1)...(19): siRNA sense strand
gcaagaaccaccccuauau

SEQ ID NO: 1795466 - RNA, 19 nt, Homo sapiens
  misc_RNA (1)...(19): siRNA sense strand
agucuuggaucgaguuuau

SEQ ID NO: 1795467 - RNA, 19 nt, Homo sapiens
  misc_RNA (1)...(19): siRNA sense strand
gaaacagggaaggaucuuu

SEQ ID NO: 1795468 - RNA, 19 nt, Homo sapiens
  misc_RNA (1)...(19): siRNA sense strand
gauguaugcuggaccaacu

SEQ ID NO: 1795469 - RNA, 19 nt, Homo sapiens
  misc_RNA (1)...(19): siRNA sense strand
cauaagcaacuucuagaga

SEQ ID NO: 1795470 - RNA, 19 nt, Homo sapiens
  misc_RNA (1)...(19): siRNA sense strand
gcaacccagugcacaaugg

SEQ ID NO: 1795471 - RNA, 19 nt, Homo sapiens
  misc_RNA (1)...(19): siRNA sense strand
gcaggagaaauuaaagguu

SEQ ID NO: 1795472 - RNA, 19 nt, Homo sapiens
  misc_RNA (1)...(19): siRNA sense strand
acacgaaugcgcaaacuug

SEQ ID NO: 1795473 - RNA, 19 nt, Homo sapiens
  misc_RNA (1)...(19): siRNA sense strand
agacuccugugauguaaau

SEQ ID NO: 1795474 - RNA, 19 nt, Homo sapiens
  misc_RNA (1)...(19): siRNA sense strand
gaagacagagaagagaaug

SEQ ID NO: 1795475 - RNA, 19 nt, Homo sapiens
  misc_RNA (1)...(19): siRNA sense strand
ugacgauguuccuuugaug

SEQ ID NO: 1795476 - RNA, 19 nt, Homo sapiens
  misc_RNA (1)...(19): siRNA sense strand
uaaugcaggauacccauaa

SEQ ID NO: 1795477 - RNA, 19 nt, Homo sapiens
  misc_RNA (1)...(19): siRNA sense strand
ugacugcgacucaugaaga

SEQ ID NO: 1795478 - RNA, 19 nt, Homo sapiens
  misc_RNA (1)...(19): siRNA sense strand
ugagagagagggaguacuu

SEQ ID NO: 1795479 - RNA, 19 nt, Homo sapiens
  misc_RNA (1)...(19): siRNA sense strand
uaccagcacugaaaauuaa

SEQ ID NO: 1795480 - RNA, 19 nt, Homo sapiens
  misc_RNA (1)...(19): siRNA sense strand
ggaggugucauuaacuugu

SEQ ID NO: 1795481 - RNA, 19 nt, Homo sapiens
  misc_RNA (1)...(19): siRNA sense strand
gguuuaaucacuuuggaaa

SEQ ID NO: 1795482 - RNA, 19 nt, Homo sapiens
  misc_RNA (1)...(19): siRNA sense strand
ugacagaauacuacaaauc

SEQ ID NO: 1795483 - RNA, 19 nt, Homo sapiens
  misc_RNA (1)...(19): siRNA sense strand
gcaggauacccauaagcaa

SEQ ID NO: 1795484 - RNA, 19 nt, Homo sapiens
  misc_RNA (1)...(19): siRNA sense strand
gccaagucauggugccaaa

SEQ ID NO: 1795485 - RNA, 19 nt, Homo sapiens
  misc_RNA (1)...(19): siRNA sense strand
ucauaucaccuuacacuca

SEQ ID NO: 1795486 - RNA, 19 nt, Homo sapiens
  misc_RNA (1)...(19): siRNA sense strand
gaggaaggaguucugaauc

SEQ ID NO: 1795487 - RNA, 19 nt, Homo sapiens
  misc_RNA (1)...(19): siRNA sense strand
uuucgugguugcacaguuu

SEQ ID NO: 1795488 - RNA, 19 nt, Homo sapiens
  misc_RNA (1)...(19): siRNA sense strand
auauuaagauggugaugga

SEQ ID NO: 1795489 - RNA, 19 nt, Homo sapiens
  misc_RNA (1)...(19): siRNA sense strand
agaacuauaugugccagaa

SEQ ID NO: 1795490 - RNA, 19 nt, Homo sapiens
  misc_RNA (1)...(19): siRNA sense strand
gcaaggcaaauucaugaag

SEQ ID NO: 1795491 - RNA, 19 nt, Homo sapiens
  misc_RNA (1)...(19): siRNA sense strand
guggaugcaucuuaugaag

SEQ ID NO: 1795492 - RNA, 19 nt, Homo sapiens
  misc_RNA (1)...(19): siRNA sense strand
gaaacauuaccagcacuga

SEQ ID NO: 1795493 - RNA, 19 nt, Homo sapiens
  misc_RNA (1)...(19): siRNA sense strand
ucgucaaggucucaauaaa

SEQ ID NO: 1795494 - RNA, 19 nt, Homo sapiens
  misc_RNA (1)...(19): siRNA sense strand
aaaagaagcguauggacua

SEQ ID NO: 1795495 - RNA, 19 nt, Homo sapiens
  misc_RNA (1)...(19): siRNA sense strand
aacagaugcggaaacauua

SEQ ID NO: 1795496 - RNA, 19 nt, Homo sapiens
  misc_RNA (1)...(19): siRNA sense strand
ggaacgggauauuguaccu

SEQ ID NO: 1795497 - RNA, 19 nt, Homo sapiens
  misc_RNA (1)...(19): siRNA sense strand
agacagagaagagaauguu

SEQ ID NO: 1795498 - RNA, 19 nt, Homo sapiens
  misc_RNA (1)...(19): siRNA sense strand
gacgauggccccugguuua

SEQ ID NO: 1795499 - RNA, 19 nt, Homo sapiens
  misc_RNA (1)...(19): siRNA sense strand
guaccugguuugucauggu

SEQ ID NO: 1795500 - RNA, 19 nt, Homo sapiens
  misc_RNA (1)...(19): siRNA sense strand
cgaguuuauuggaaugaug

SEQ ID NO: 1795501 - RNA, 19 nt, Homo sapiens
  misc_RNA (1)...(19): siRNA sense strand
uuaagauggugauggaaca

SEQ ID NO: 1795502 - RNA, 19 nt, Homo sapiens
  misc_RNA (1)...(19): siRNA sense strand
cuacaggaacgggauauug

SEQ ID NO: 1795503 - RNA, 19 nt, Homo sapiens
  misc_RNA (1)...(19): siRNA sense strand
ugaaguauuuguugaugcu

SEQ ID NO: 1795504 - RNA, 19 nt, Homo sapiens
  misc_RNA (1)...(19): siRNA sense strand
caaauaugguccugaguaa

SEQ ID NO: 1795505 - RNA, 19 nt, Homo sapiens
  misc_RNA (1)...(19): siRNA sense strand
agacaaauguggauuauuc

SEQ ID NO: 1795506 - RNA, 19 nt, Homo sapiens
  misc_RNA (1)...(19): siRNA sense strand
gcaccaaugucagcacuuu

SEQ ID NO: 1795507 - RNA, 19 nt, Homo sapiens
  misc_RNA (1)...(19): siRNA sense strand
ugaggaagcuggauaucaa

SEQ ID NO: 1795508 - RNA, 19 nt, Homo sapiens
  misc_RNA (1)...(19): siRNA sense strand
ucacggagccugugucuug

SEQ ID NO: 1795509 - RNA, 19 nt, Homo sapiens
  misc_RNA (1)...(19): siRNA sense strand
caacgugcgugcccaugaa

SEQ ID NO: 1795510 - RNA, 19 nt, Homo sapiens
  misc_RNA (1)...(19): siRNA sense strand
ucaaauaugguccugagua

SEQ ID NO: 1795511 - RNA, 19 nt, Homo sapiens
  misc_RNA (1)...(19): siRNA sense strand
guggcaagguggaguguuu

SEQ ID NO: 1795512 - RNA, 19 nt, Homo sapiens
  misc_RNA (1)...(19): siRNA sense strand
gagagucgcuaugagacaa

SEQ ID NO: 1795513 - RNA, 19 nt, Homo sapiens
  misc_RNA (1)...(19): siRNA sense strand
ggaagagcgagagguguua

SEQ ID NO: 1795514 - RNA, 19 nt, Homo sapiens
  misc_RNA (1)...(19): siRNA sense strand
gccaucuacucgucguuua

SEQ ID NO: 1795515 - RNA, 19 nt, Homo sapiens
  misc_RNA (1)...(19): siRNA sense strand
caagguggaguguuucauu

SEQ ID NO: 1795516 - RNA, 19 nt, Homo sapiens
  misc_RNA (1)...(19): siRNA sense strand
ugagacaaauguggauuau

SEQ ID NO: 1795517 - RNA, 19 nt, Homo sapiens
  misc_RNA (1)...(19): siRNA sense strand
gggugagcguguugucuuu

SEQ ID NO: 1795518 - RNA, 19 nt, Homo sapiens
  misc_RNA (1)...(19): siRNA sense strand
gcagugcaguaugcuguga

SEQ ID NO: 1795519 - RNA, 19 nt, Homo sapiens
  misc_RNA (1)...(19): siRNA sense strand
gcaugcagacucacgugua

SEQ ID NO: 1795520 - RNA, 19 nt, Homo sapiens
  misc_RNA (1)...(19): siRNA sense strand
gagagccacuuacgaugca

SEQ ID NO: 1795521 - RNA, 19 nt, Homo sapiens
  misc_RNA (1)...(19): siRNA sense strand
caaaggcagucgcaaagac

SEQ ID NO: 1795522 - RNA, 19 nt, Homo sapiens
  misc_RNA (1)...(19): siRNA sense strand
cagugacccuguccauuga

SEQ ID NO: 1795523 - RNA, 19 nt, Homo sapiens
  misc_RNA (1)...(19): siRNA sense strand
ccagugaggcagugcagua

SEQ ID NO: 1795524 - RNA, 19 nt, Homo sapiens
  misc_RNA (1)...(19): siRNA sense strand
gcucugaugugacccuuac

SEQ ID NO: 1795525 - RNA, 19 nt, Homo sapiens
  misc_RNA (1)...(19): siRNA sense strand
gcaggagggugagcguguu

SEQ ID NO: 1795526 - RNA, 19 nt, Homo sapiens
  misc_RNA (1)...(19): siRNA sense strand
gcaaaggcagucgcaaaga

SEQ ID NO: 1795527 - RNA, 19 nt, Homo sapiens
  misc_RNA (1)...(19): siRNA sense strand
uauccacgcucaccaucaa

SEQ ID NO: 1795528 - RNA, 19 nt, Homo sapiens
  misc_RNA (1)...(19): siRNA sense strand
caaugucagcacuuuagua

SEQ ID NO: 1795529 - RNA, 19 nt, Homo sapiens
  misc_RNA (1)...(19): siRNA sense strand
aaugucagcacuuuaguaa

SEQ ID NO: 1795530 - RNA, 19 nt, Homo sapiens
  misc_RNA (1)...(19): siRNA sense strand
ggaggaguaugagaugaag

SEQ ID NO: 1795531 - RNA, 19 nt, Homo sapiens
  misc_RNA (1)...(19): siRNA sense strand
cacuuacgaugcauucuga

SEQ ID NO: 1795532 - RNA, 19 nt, Homo sapiens
  misc_RNA (1)...(19): siRNA sense strand
ggacuacggccagcgauuc

SEQ ID NO: 1795533 - RNA, 19 nt, Homo sapiens
  misc_RNA (1)...(19): siRNA sense strand
guuuaaggaugauguggau

SEQ ID NO: 1795534 - RNA, 19 nt, Homo sapiens
  misc_RNA (1)...(19): siRNA sense strand
gggaggugccgcucuaugu

SEQ ID NO: 1795535 - RNA, 19 nt, Homo sapiens
  misc_RNA (1)...(19): siRNA sense strand
acucgucguuuaaggauga

SEQ ID NO: 1795536 - RNA, 19 nt, Homo sapiens
  misc_RNA (1)...(19): siRNA sense strand
gaggugccgcucuauguga

SEQ ID NO: 1795537 - RNA, 19 nt, Homo sapiens
  misc_RNA (1)...(19): siRNA sense strand
caaauguggauuauuccuu

SEQ ID NO: 1795538 - RNA, 19 nt, Homo sapiens
  misc_RNA (1)...(19): siRNA sense strand
gggaggaguaugagaugaa

SEQ ID NO: 1795539 - RNA, 19 nt, Homo sapiens
  misc_RNA (1)...(19): siRNA sense strand
aagguggaguguuucauug

SEQ ID NO: 1795540 - RNA, 19 nt, Homo sapiens
  misc_RNA (1)...(19): siRNA sense strand
ugaagacgcccacgagagu

SEQ ID NO: 1795541 - RNA, 19 nt, Homo sapiens
  misc_RNA (1)...(19): siRNA sense strand
ucucugacgacgccucuua

SEQ ID NO: 1795542 - RNA, 19 nt, Homo sapiens
  misc_RNA (1)...(19): siRNA sense strand
ccacgagagucgcuaugag

SEQ ID NO: 1795543 - RNA, 19 nt, Homo sapiens
  misc_RNA (1)...(19): siRNA sense strand
caugcagacucacguguag

SEQ ID NO: 1795544 - RNA, 19 nt, Homo sapiens
  misc_RNA (1)...(19): siRNA sense strand
gugaaccgagagccacuua

SEQ ID NO: 1795545 - RNA, 19 nt, Homo sapiens
  misc_RNA (1)...(19): siRNA sense strand
cugcucaucuucuucuuca

SEQ ID NO: 1795546 - RNA, 19 nt, Homo sapiens
  misc_RNA (1)...(19): siRNA sense strand
gcauccugcucaucuucuu

SEQ ID NO: 1795547 - RNA, 19 nt, Homo sapiens
  misc_RNA (1)...(19): siRNA sense strand
gccugugucuugugagguu

SEQ ID NO: 1795548 - RNA, 19 nt, Homo sapiens
  misc_RNA (1)...(19): siRNA sense strand
gugggaagcaccaauguca

SEQ ID NO: 1795549 - RNA, 19 nt, Homo sapiens
  misc_RNA (1)...(19): siRNA sense strand
aggaugauguggaucugaa

SEQ ID NO: 1795550 - RNA, 19 nt, Homo sapiens
  misc_RNA (1)...(19): siRNA sense strand
cagcaacccgggucaugaa

SEQ ID NO: 1795551 - RNA, 19 nt, Homo sapiens
  misc_RNA (1)...(19): siRNA sense strand
ggaggugccgcucuaugug

SEQ ID NO: 1795552 - RNA, 19 nt, Homo sapiens
  misc_RNA (1)...(19): siRNA sense strand
gcccagcucaacaccuaua

SEQ ID NO: 1795553 - RNA, 19 nt, Homo sapiens
  misc_RNA (1)...(19): siRNA sense strand
ccgcaaaggcagucgcaaa

SEQ ID NO: 1795554 - RNA, 19 nt, Homo sapiens
  misc_RNA (1)...(19): siRNA sense strand
ugucauggaggccgacuuu

SEQ ID NO: 1795555 - RNA, 19 nt, Homo sapiens
  misc_RNA (1)...(19): siRNA sense strand
cggagccugugucuuguga

SEQ ID NO: 1795556 - RNA, 19 nt, Homo sapiens
  misc_RNA (1)...(19): siRNA sense strand
ggugagcguguugucuuua

SEQ ID NO: 1795557 - RNA, 19 nt, Homo sapiens
  misc_RNA (1)...(19): siRNA sense strand
ccagggcagugcucuaugc

SEQ ID NO: 1795558 - RNA, 19 nt, Homo sapiens
  misc_RNA (1)...(19): siRNA sense strand
ccaccaauggcuacuacaa

SEQ ID NO: 1795559 - RNA, 19 nt, Homo sapiens
  misc_RNA (1)...(19): siRNA sense strand
gccagcgucuccacagcaa

SEQ ID NO: 1795560 - RNA, 19 nt, Homo sapiens
  misc_RNA (1)...(19): siRNA sense strand
gaaccgagagccacuuacg

SEQ ID NO: 1795561 - RNA, 19 nt, Homo sapiens
  misc_RNA (1)...(19): siRNA sense strand
gcucaucuucuucuucauc

SEQ ID NO: 1795562 - RNA, 19 nt, Homo sapiens
  misc_RNA (1)...(19): siRNA sense strand
aauaugguccugaguaaca

SEQ ID NO: 1795563 - RNA, 19 nt, Homo sapiens
  misc_RNA (1)...(19): siRNA sense strand
uaguaaauguccacuuugc

SEQ ID NO: 1795564 - RNA, 19 nt, Homo sapiens
  misc_RNA (1)...(19): siRNA sense strand
gcagugcucuaugcugacu

SEQ ID NO: 1795565 - RNA, 19 nt, Homo sapiens
  misc_RNA (1)...(19): siRNA sense strand
cuucaucgccuugguauuc

SEQ ID NO: 1795566 - RNA, 19 nt, Homo sapiens
  misc_RNA (1)...(19): siRNA sense strand
ccacuuugcuccccggauu

SEQ ID NO: 1795567 - RNA, 19 nt, Homo sapiens
  misc_RNA (1)...(19): siRNA sense strand
gauuguaguugaccccaaa

SEQ ID NO: 1795568 - RNA, 19 nt, Homo sapiens
  misc_RNA (1)...(19): siRNA sense strand
gugaggcagugcaguaugc

SEQ ID NO: 1795569 - RNA, 19 nt, Homo sapiens
  misc_RNA (1)...(19): siRNA sense strand
ccaucuacucgucguuuaa

SEQ ID NO: 1795570 - RNA, 19 nt, Homo sapiens
  misc_RNA (1)...(19): siRNA sense strand
ucauggaggccgacuuuca

SEQ ID NO: 1795571 - RNA, 19 nt, Homo sapiens
  misc_RNA (1)...(19): siRNA sense strand
caaagugggaagcaccaau

SEQ ID NO: 1795572 - RNA, 19 nt, Homo sapiens
  misc_RNA (1)...(19): siRNA sense strand
augcccagcucaacaccua

SEQ ID NO: 1795573 - RNA, 19 nt, Homo sapiens
  misc_RNA (1)...(19): siRNA sense strand
cacgagagucgcuaugaga

SEQ ID NO: 1795574 - RNA, 19 nt, Homo sapiens
  misc_RNA (1)...(19): siRNA sense strand
gagacaaauguggauuauu

SEQ ID NO: 1795575 - RNA, 19 nt, Homo sapiens
  misc_RNA (1)...(19): siRNA sense strand
aaagugggaagcaccaaug

SEQ ID NO: 1795576 - RNA, 19 nt, Homo sapiens
  misc_RNA (1)...(19): siRNA sense strand
gccacucgauucuccuaca

SEQ ID NO: 1795577 - RNA, 19 nt, Homo sapiens
  misc_RNA (1)...(19): siRNA sense strand
ccacuuacgaugcauucug

SEQ ID NO: 1795578 - RNA, 19 nt, Homo sapiens
  misc_RNA (1)...(19): siRNA sense strand
caccaaugucagcacuuua

SEQ ID NO: 1795579 - RNA, 19 nt, Homo sapiens
  misc_RNA (1)...(19): siRNA sense strand
ccuacgagaacuaugagaa

SEQ ID NO: 1795580 - RNA, 19 nt, Homo sapiens
  misc_RNA (1)...(19): siRNA sense strand
ccaaacccacaaccacaga

SEQ ID NO: 1795581 - RNA, 19 nt, Homo sapiens
  misc_RNA (1)...(19): siRNA sense strand
ccacaaccacagacauugg

SEQ ID NO: 1795582 - RNA, 19 nt, Homo sapiens
  misc_RNA (1)...(19): siRNA sense strand
uacgagaacuaugagaagu

SEQ ID NO: 1795583 - RNA, 19 nt, Homo sapiens
  misc_RNA (1)...(19): siRNA sense strand
ggccaucuacucgucguuu

SEQ ID NO: 1795584 - RNA, 19 nt, Homo sapiens
  misc_RNA (1)...(19): siRNA sense strand
uggaagagcgagagguguu

SEQ ID NO: 1795585 - RNA, 19 nt, Homo sapiens
  misc_RNA (1)...(19): siRNA sense strand
gugagcguguugucuuuac

SEQ ID NO: 1795586 - RNA, 19 nt, Homo sapiens
  misc_RNA (1)...(19): siRNA sense strand
uaaggaugauguggaucug

SEQ ID NO: 1795587 - RNA, 19 nt, Homo sapiens
  misc_RNA (1)...(19): siRNA sense strand
ggucaugaaggccaucuac

SEQ ID NO: 1795588 - RNA, 19 nt, Homo sapiens
  misc_RNA (1)...(19): siRNA sense strand
gcauagcaugggccuggaa

SEQ ID NO: 1795589 - RNA, 19 nt, Homo sapiens
  misc_RNA (1)...(19): siRNA sense strand
uguccuacgagaacuauga

SEQ ID NO: 1795590 - RNA, 19 nt, Homo sapiens
  misc_RNA (1)...(19): siRNA sense strand
gcaguacaaccuggagauc

SEQ ID NO: 1795591 - RNA, 19 nt, Homo sapiens
  misc_RNA (1)...(19): siRNA sense strand
ggaagcuggauaucaaggu

SEQ ID NO: 1795592 - RNA, 19 nt, Homo sapiens
  misc_RNA (1)...(19): siRNA sense strand
gcaauugucuacccauuua

SEQ ID NO: 1795593 - RNA, 19 nt, Homo sapiens
  misc_RNA (1)...(19): siRNA sense strand
aaccaaaccuguuacauua

SEQ ID NO: 1795594 - RNA, 19 nt, Homo sapiens
  misc_RNA (1)...(19): siRNA sense strand
aaacauaucucucaaggau

SEQ ID NO: 1795595 - RNA, 19 nt, Homo sapiens
  misc_RNA (1)...(19): siRNA sense strand
ccaauuguguugccauaua

SEQ ID NO: 1795596 - RNA, 19 nt, Homo sapiens
  misc_RNA (1)...(19): siRNA sense strand
gaaacuacaacuuacauga

SEQ ID NO: 1795597 - RNA, 19 nt, Homo sapiens
  misc_RNA (1)...(19): siRNA sense strand
acauaucucucaaggauug

SEQ ID NO: 1795598 - RNA, 19 nt, Homo sapiens
  misc_RNA (1)...(19): siRNA sense strand
gaucauauucuguuucugu

SEQ ID NO: 1795599 - RNA, 19 nt, Homo sapiens
  misc_RNA (1)...(19): siRNA sense strand
caacauguacggaagcauu

SEQ ID NO: 1795600 - RNA, 19 nt, Homo sapiens
  misc_RNA (1)...(19): siRNA sense strand
ccuguuacauuaaguagaa

SEQ ID NO: 1795601 - RNA, 19 nt, Homo sapiens
  misc_RNA (1)...(19): siRNA sense strand
ggaagcauucuguucuuaa

SEQ ID NO: 1795602 - RNA, 19 nt, Homo sapiens
  misc_RNA (1)...(19): siRNA sense strand
caaagacucuaagaaccaa

SEQ ID NO: 1795603 - RNA, 19 nt, Homo sapiens
  misc_RNA (1)...(19): siRNA sense strand
acacggaauuggccauuug

SEQ ID NO: 1795604 - RNA, 19 nt, Homo sapiens
  misc_RNA (1)...(19): siRNA sense strand
cggaagcauucuguucuua

SEQ ID NO: 1795605 - RNA, 19 nt, Homo sapiens
  misc_RNA (1)...(19): siRNA sense strand
ccaaaccuguuacauuaag

SEQ ID NO: 1795606 - RNA, 19 nt, Homo sapiens
  misc_RNA (1)...(19): siRNA sense strand
cccaaucacucucuguauu

SEQ ID NO: 1795607 - RNA, 19 nt, Homo sapiens
  misc_RNA (1)...(19): siRNA sense strand
gaagcauucuguucuuaac

SEQ ID NO: 1795608 - RNA, 19 nt, Homo sapiens
  misc_RNA (1)...(19): siRNA sense strand
guucuaguauggugcuaaa

SEQ ID NO: 1795609 - RNA, 19 nt, Homo sapiens
  misc_RNA (1)...(19): siRNA sense strand
uaaggacaauguacccaau

SEQ ID NO: 1795610 - RNA, 19 nt, Homo sapiens
  misc_RNA (1)...(19): siRNA sense strand
ggguuaauauccaauugug

SEQ ID NO: 1795611 - RNA, 19 nt, Homo sapiens
  misc_RNA (1)...(19): siRNA sense strand
ggguaacaaugccucagaa

SEQ ID NO: 1795612 - RNA, 19 nt, Homo sapiens
  misc_RNA (1)...(19): siRNA sense strand
cgaaaugaaacuacaacuu

SEQ ID NO: 1795613 - RNA, 19 nt, Homo sapiens
  misc_RNA (1)...(19): siRNA sense strand
guucuuaaccuguauuagu

SEQ ID NO: 1795614 - RNA, 19 nt, Homo sapiens
  misc_RNA (1)...(19): siRNA sense strand
guacggaagcauucuguuc

SEQ ID NO: 1795615 - RNA, 19 nt, Homo sapiens
  misc_RNA (1)...(19): siRNA sense strand
guaacuuguucuaguaugg

SEQ ID NO: 1795616 - RNA, 19 nt, Homo sapiens
  misc_RNA (1)...(19): siRNA sense strand
guauuaguguagaucgauu

SEQ ID NO: 1795617 - RNA, 19 nt, Homo sapiens
  misc_RNA (1)...(19): siRNA sense strand
ccucaaaguccgaaaugaa

SEQ ID NO: 1795618 - RNA, 19 nt, Homo sapiens
  misc_RNA (1)...(19): siRNA sense strand
guauugcuguuuccaacug

SEQ ID NO: 1795619 - RNA, 19 nt, Homo sapiens
  misc_RNA (1)...(19): siRNA sense strand
acuuuacccuucaggauuu

SEQ ID NO: 1795620 - RNA, 19 nt, Homo sapiens
  misc_RNA (1)...(19): siRNA sense strand
ggcgugugguuaacuguga

SEQ ID NO: 1795621 - RNA, 19 nt, Homo sapiens
  misc_RNA (1)...(19): siRNA sense strand
gaauuggccauuuggagau

SEQ ID NO: 1795622 - RNA, 19 nt, Homo sapiens
  misc_RNA (1)...(19): siRNA sense strand
caauuguguugccauauac

SEQ ID NO: 1795623 - RNA, 19 nt, Homo sapiens
  misc_RNA (1)...(19): siRNA sense strand
ucccacugcuucuauaaug

SEQ ID NO: 1795624 - RNA, 19 nt, Homo sapiens
  misc_RNA (1)...(19): siRNA sense strand
ggcaauugucuacccauuu

SEQ ID NO: 1795625 - RNA, 19 nt, Homo sapiens
  misc_RNA (1)...(19): siRNA sense strand
uaaccuguauuaguguaga

SEQ ID NO: 1795626 - RNA, 19 nt, Homo sapiens
  misc_RNA (1)...(19): siRNA sense strand
augauuaacuuggcaaugu

SEQ ID NO: 1795627 - RNA, 19 nt, Homo sapiens
  misc_RNA (1)...(19): siRNA sense strand
gcacuggcgugugguuaac

SEQ ID NO: 1795628 - RNA, 19 nt, Homo sapiens
  misc_RNA (1)...(19): siRNA sense strand
gugcuuggguuaauaucca

SEQ ID NO: 1795629 - RNA, 19 nt, Homo sapiens
  misc_RNA (1)...(19): siRNA sense strand
uaguguagaucgauuucug

SEQ ID NO: 1795630 - RNA, 19 nt, Homo sapiens
  misc_RNA (1)...(19): siRNA sense strand
ccauuuggagauuuacuuu

SEQ ID NO: 1795631 - RNA, 19 nt, Homo sapiens
  misc_RNA (1)...(19): siRNA sense strand
cuucuauaaugacuccuuu

SEQ ID NO: 1795632 - RNA, 19 nt, Homo sapiens
  misc_RNA (1)...(19): siRNA sense strand
gcauaaccuacagaccuua

SEQ ID NO: 1795633 - RNA, 19 nt, Homo sapiens
  misc_RNA (1)...(19): siRNA sense strand
caucggacacaauucagaa

SEQ ID NO: 1795634 - RNA, 19 nt, Homo sapiens
  misc_RNA (1)...(19): siRNA sense strand
uuacaucggacacaauuca

SEQ ID NO: 1795635 - RNA, 19 nt, Homo sapiens
  misc_RNA (1)...(19): siRNA sense strand
cucaaaguccgaaaugaaa

SEQ ID NO: 1795636 - RNA, 19 nt, Homo sapiens
  misc_RNA (1)...(19): siRNA sense strand
uaaugacuccuuuaaguac

SEQ ID NO: 1795637 - RNA, 19 nt, Homo sapiens
  misc_RNA (1)...(19): siRNA sense strand
ucaaagacucuaagaacca

SEQ ID NO: 1795638 - RNA, 19 nt, Homo sapiens
  misc_RNA (1)...(19): siRNA sense strand
guuugugcuuggguuaaua

SEQ ID NO: 1795639 - RNA, 19 nt, Homo sapiens
  misc_RNA (1)...(19): siRNA sense strand
uggcaauugucuacccauu

SEQ ID NO: 1795640 - RNA, 19 nt, Homo sapiens
  misc_RNA (1)...(19): siRNA sense strand
caacacggaauuggccauu

SEQ ID NO: 1795641 - RNA, 19 nt, Homo sapiens
  misc_RNA (1)...(19): siRNA sense strand
caauguacccaaucacucu

SEQ ID NO: 1795642 - RNA, 19 nt, Homo sapiens
  misc_RNA (1)...(19): siRNA sense strand
cuuaaccuguauuagugua

SEQ ID NO: 1795643 - RNA, 19 nt, Homo sapiens
  misc_RNA (1)...(19): siRNA sense strand
cauaaccuacagaccuuaa

SEQ ID NO: 1795644 - RNA, 19 nt, Homo sapiens
  misc_RNA (1)...(19): siRNA sense strand
cagcaguaaggacaaugua

SEQ ID NO: 1795645 - RNA, 19 nt, Homo sapiens
  misc_RNA (1)...(19): siRNA sense strand
gcagcaguaaggacaaugu

SEQ ID NO: 1795646 - RNA, 19 nt, Homo sapiens
  misc_RNA (1)...(19): siRNA sense strand
uguguugccauauacauuu

SEQ ID NO: 1795647 - RNA, 19 nt, Homo sapiens
  misc_RNA (1)...(19): siRNA sense strand
ucaucgaaauagugggauu

SEQ ID NO: 1795648 - RNA, 19 nt, Homo sapiens
  misc_RNA (1)...(19): siRNA sense strand
gcucccacugcuucuauaa

SEQ ID NO: 1795649 - RNA, 19 nt, Homo sapiens
  misc_RNA (1)...(19): siRNA sense strand
caaaccuguuacauuaagu

SEQ ID NO: 1795650 - RNA, 19 nt, Homo sapiens
  misc_RNA (1)...(19): siRNA sense strand
cccacugcuucuauaauga

SEQ ID NO: 1795651 - RNA, 19 nt, Homo sapiens
  misc_RNA (1)...(19): siRNA sense strand
auucuguucuuaaccugua

SEQ ID NO: 1795652 - RNA, 19 nt, Homo sapiens
  misc_RNA (1)...(19): siRNA sense strand
ugauuaacuuggcaauguc

SEQ ID NO: 1795653 - RNA, 19 nt, Homo sapiens
  misc_RNA (1)...(19): siRNA sense strand
gacaauguacccaaucacu

SEQ ID NO: 1795654 - RNA, 19 nt, Homo sapiens
  misc_RNA (1)...(19): siRNA sense strand
agauuucugugaugcuguu

SEQ ID NO: 1795655 - RNA, 19 nt, Homo sapiens
  misc_RNA (1)...(19): siRNA sense strand
gguguuugugcuuggguua

SEQ ID NO: 1795656 - RNA, 19 nt, Homo sapiens
  misc_RNA (1)...(19): siRNA sense strand
gaucgauuucuggcaauug

SEQ ID NO: 1795657 - RNA, 19 nt, Homo sapiens
  misc_RNA (1)...(19): siRNA sense strand
aggacaauguacccaauca

SEQ ID NO: 1795658 - RNA, 19 nt, Homo sapiens
  misc_RNA (1)...(19): siRNA sense strand
gaagccacauggaaaacau

SEQ ID NO: 1795659 - RNA, 19 nt, Homo sapiens
  misc_RNA (1)...(19): siRNA sense strand
uuggccauuuggagauuua

SEQ ID NO: 1795660 - RNA, 19 nt, Homo sapiens
  misc_RNA (1)...(19): siRNA sense strand
agcauaaccuacagaccuu

SEQ ID NO: 1795661 - RNA, 19 nt, Homo sapiens
  misc_RNA (1)...(19): siRNA sense strand
gaaguucauggugcagaga

SEQ ID NO: 1795662 - RNA, 19 nt, Homo sapiens
  misc_RNA (1)...(19): siRNA sense strand
guuuugacccuauaguuua

SEQ ID NO: 1795663 - RNA, 19 nt, Homo sapiens
  misc_RNA (1)...(19): siRNA sense strand
gaaccaaaagaaaugcaaa

SEQ ID NO: 1795664 - RNA, 19 nt, Homo sapiens
  misc_RNA (1)...(19): siRNA sense strand
uucuuaaccuguauuagug

SEQ ID NO: 1795665 - RNA, 19 nt, Homo sapiens
  misc_RNA (1)...(19): siRNA sense strand
ccauauacauuuucaucug

SEQ ID NO: 1795666 - RNA, 19 nt, Homo sapiens
  misc_RNA (1)...(19): siRNA sense strand
gauuaacuuggcaauguca

SEQ ID NO: 1795667 - RNA, 19 nt, Homo sapiens
  misc_RNA (1)...(19): siRNA sense strand
acggaagcauucuguucuu

SEQ ID NO: 1795668 - RNA, 19 nt, Homo sapiens
  misc_RNA (1)...(19): siRNA sense strand
gagcagaucugggacaaga

SEQ ID NO: 1795669 - RNA, 19 nt, Homo sapiens
  misc_RNA (1)...(19): siRNA sense strand
gacaagauccuaaguguga

SEQ ID NO: 1795670 - RNA, 19 nt, Homo sapiens
  misc_RNA (1)...(19): siRNA sense strand
ggaagggcguccuggcuaa

SEQ ID NO: 1795671 - RNA, 19 nt, Homo sapiens
  misc_RNA (1)...(19): siRNA sense strand
ggaaugagucucucuggaa

SEQ ID NO: 1795672 - RNA, 19 nt, Homo sapiens
  misc_RNA (1)...(19): siRNA sense strand
gggacaagauccuaagugu

SEQ ID NO: 1795673 - RNA, 19 nt, Homo sapiens
  misc_RNA (1)...(19): siRNA sense strand
gcaccgggauagacaggaa

SEQ ID NO: 1795674 - RNA, 19 nt, Homo sapiens
  misc_RNA (1)...(19): siRNA sense strand
ucucuuccauugcagcuua

SEQ ID NO: 1795675 - RNA, 19 nt, Homo sapiens
  misc_RNA (1)...(19): siRNA sense strand
cuagaacacuggcauugga

SEQ ID NO: 1795676 - RNA, 19 nt, Homo sapiens
  misc_RNA (1)...(19): siRNA sense strand
ccaaggacauccggguaaa

SEQ ID NO: 1795677 - RNA, 19 nt, Homo sapiens
  misc_RNA (1)...(19): siRNA sense strand
ucagaggacugugcaggaa

SEQ ID NO: 1795678 - RNA, 19 nt, Homo sapiens
  misc_RNA (1)...(19): siRNA sense strand
gaacuucaaggaacaucau

SEQ ID NO: 1795679 - RNA, 19 nt, Homo sapiens
  misc_RNA (1)...(19): siRNA sense strand
gaugagcagcaccgggaua

SEQ ID NO: 1795680 - RNA, 19 nt, Homo sapiens
  misc_RNA (1)...(19): siRNA sense strand
gccaguugcugcccuacau

SEQ ID NO: 1795681 - RNA, 19 nt, Homo sapiens
  misc_RNA (1)...(19): siRNA sense strand
cuacuccacucggcucuga

SEQ ID NO: 1795682 - RNA, 19 nt, Homo sapiens
  misc_RNA (1)...(19): siRNA sense strand
cauugcagcuuauaaucca

SEQ ID NO: 1795683 - RNA, 19 nt, Homo sapiens
  misc_RNA (1)...(19): siRNA sense strand
gcugcugggucucacuaga

SEQ ID NO: 1795684 - RNA, 19 nt, Homo sapiens
  misc_RNA (1)...(19): siRNA sense strand
caucagcugcagaggauug

SEQ ID NO: 1795685 - RNA, 19 nt, Homo sapiens
  misc_RNA (1)...(19): siRNA sense strand
gugagcagaucugggacaa

SEQ ID NO: 1795686 - RNA, 19 nt, Homo sapiens
  misc_RNA (1)...(19): siRNA sense strand
gagucucucuggaagaacu

SEQ ID NO: 1795687 - RNA, 19 nt, Homo sapiens
  misc_RNA (1)...(19): siRNA sense strand
agaggacugugcaggaauc

SEQ ID NO: 1795688 - RNA, 19 nt, Homo sapiens
  misc_RNA (1)...(19): siRNA sense strand
ggcgcugggugucuacaau

SEQ ID NO: 1795689 - RNA, 19 nt, Homo sapiens
  misc_RNA (1)...(19): siRNA sense strand
ccuggucucuuccauugca

SEQ ID NO: 1795690 - RNA, 19 nt, Homo sapiens
  misc_RNA (1)...(19): siRNA sense strand
ucacuagaacacuggcauu

SEQ ID NO: 1795691 - RNA, 19 nt, Homo sapiens
  misc_RNA (1)...(19): siRNA sense strand
auccuggucucuuccauug

SEQ ID NO: 1795692 - RNA, 19 nt, Homo sapiens
  misc_RNA (1)...(19): siRNA sense strand
gagcagcaccgggauagac

SEQ ID NO: 1795693 - RNA, 19 nt, Homo sapiens
  misc_RNA (1)...(19): siRNA sense strand
augagucucucuggaagaa

SEQ ID NO: 1795694 - RNA, 19 nt, Homo sapiens
  misc_RNA (1)...(19): siRNA sense strand
caggaauuaucaaaacuga

SEQ ID NO: 1795695 - RNA, 19 nt, Homo sapiens
  misc_RNA (1)...(19): siRNA sense strand
cccaaggacauccggguaa

SEQ ID NO: 1795696 - RNA, 19 nt, Homo sapiens
  misc_RNA (1)...(19): siRNA sense strand
gcgcugcugggucucacua

SEQ ID NO: 1795697 - RNA, 19 nt, Homo sapiens
  misc_RNA (1)...(19): siRNA sense strand
ugugcuaggcuuucuguga

SEQ ID NO: 1795698 - RNA, 19 nt, Homo sapiens
  misc_RNA (1)...(19): siRNA sense strand
gcgcugggugucuacaaug

SEQ ID NO: 1795699 - RNA, 19 nt, Homo sapiens
  misc_RNA (1)...(19): siRNA sense strand
gagcagaucugggacaaga

SEQ ID NO: 1795700 - RNA, 19 nt, Homo sapiens
  misc_RNA (1)...(19): siRNA sense strand
gacaagauccuaaguguga

SEQ ID NO: 1795701 - RNA, 19 nt, Homo sapiens
  misc_RNA (1)...(19): siRNA sense strand
ggaagggcguccuggcuaa

SEQ ID NO: 1795702 - RNA, 19 nt, Homo sapiens
  misc_RNA (1)...(19): siRNA sense strand
ggaaugagucucucuggaa

SEQ ID NO: 1795703 - RNA, 19 nt, Homo sapiens
  misc_RNA (1)...(19): siRNA sense strand
gggacaagauccuaagugu

SEQ ID NO: 1795704 - RNA, 19 nt, Homo sapiens
  misc_RNA (1)...(19): siRNA sense strand
gcaccgggauagacaggaa

SEQ ID NO: 1795705 - RNA, 19 nt, Homo sapiens
  misc_RNA (1)...(19): siRNA sense strand
ucucuuccauugcagcuua

SEQ ID NO: 1795706 - RNA, 19 nt, Homo sapiens
  misc_RNA (1)...(19): siRNA sense strand
cuagaacacuggcauugga

SEQ ID NO: 1795707 - RNA, 19 nt, Homo sapiens
  misc_RNA (1)...(19): siRNA sense strand
ccaaggacauccggguaaa

SEQ ID NO: 1795708 - RNA, 19 nt, Homo sapiens
  misc_RNA (1)...(19): siRNA sense strand
ucagaggacugugcaggaa

SEQ ID NO: 1795709 - RNA, 19 nt, Homo sapiens
  misc_RNA (1)...(19): siRNA sense strand
gaacuucaaggaacaucau

SEQ ID NO: 1795710 - RNA, 19 nt, Homo sapiens
  misc_RNA (1)...(19): siRNA sense strand
gaugagcagcaccgggaua

SEQ ID NO: 1795711 - RNA, 19 nt, Homo sapiens
  misc_RNA (1)...(19): siRNA sense strand
gccaguugcugcccuacau

SEQ ID NO: 1795712 - RNA, 19 nt, Homo sapiens
  misc_RNA (1)...(19): siRNA sense strand
cuacuccacucggcucuga

SEQ ID NO: 1795713 - RNA, 19 nt, Homo sapiens
  misc_RNA (1)...(19): siRNA sense strand
cauugcagcuuauaaucca

SEQ ID NO: 1795714 - RNA, 19 nt, Homo sapiens
  misc_RNA (1)...(19): siRNA sense strand
gcugcugggucucacuaga

SEQ ID NO: 1795715 - RNA, 19 nt, Homo sapiens
  misc_RNA (1)...(19): siRNA sense strand
caucagcugcagaggauug

SEQ ID NO: 1795716 - RNA, 19 nt, Homo sapiens
  misc_RNA (1)...(19): siRNA sense strand
gugagcagaucugggacaa

SEQ ID NO: 1795717 - RNA, 19 nt, Homo sapiens
  misc_RNA (1)...(19): siRNA sense strand
gagucucucuggaagaacu

SEQ ID NO: 1795718 - RNA, 19 nt, Homo sapiens
  misc_RNA (1)...(19): siRNA sense strand
agaggacugugcaggaauc

SEQ ID NO: 1795719 - RNA, 19 nt, Homo sapiens
  misc_RNA (1)...(19): siRNA sense strand
ggcgcugggugucuacaau

SEQ ID NO: 1795720 - RNA, 19 nt, Homo sapiens
  misc_RNA (1)...(19): siRNA sense strand
ccuggucucuuccauugca

SEQ ID NO: 1795721 - RNA, 19 nt, Homo sapiens
  misc_RNA (1)...(19): siRNA sense strand
ucacuagaacacuggcauu

SEQ ID NO: 1795722 - RNA, 19 nt, Homo sapiens
  misc_RNA (1)...(19): siRNA sense strand
auccuggucucuuccauug

SEQ ID NO: 1795723 - RNA, 19 nt, Homo sapiens
  misc_RNA (1)...(19): siRNA sense strand
gagcagcaccgggauagac

SEQ ID NO: 1795724 - RNA, 19 nt, Homo sapiens
  misc_RNA (1)...(19): siRNA sense strand
augagucucucuggaagaa

SEQ ID NO: 1795725 - RNA, 19 nt, Homo sapiens
  misc_RNA (1)...(19): siRNA sense strand
caggaauuaucaaaacuga

SEQ ID NO: 1795726 - RNA, 19 nt, Homo sapiens
  misc_RNA (1)...(19): siRNA sense strand
cccaaggacauccggguaa

SEQ ID NO: 1795727 - RNA, 19 nt, Homo sapiens
  misc_RNA (1)...(19): siRNA sense strand
gcgcugcugggucucacua

SEQ ID NO: 1795728 - RNA, 19 nt, Homo sapiens
  misc_RNA (1)...(19): siRNA sense strand
ugugcuaggcuuucuguga

SEQ ID NO: 1795729 - RNA, 19 nt, Homo sapiens
  misc_RNA (1)...(19): siRNA sense strand
gcgcugggugucuacaaug

SEQ ID NO: 1795730 - RNA, 19 nt, Homo sapiens
  misc_RNA (1)...(19): siRNA sense strand
gacaaugaguugaguaaug

SEQ ID NO: 1795731 - RNA, 19 nt, Homo sapiens
  misc_RNA (1)...(19): siRNA sense strand
ggacugggcccaauuggau

SEQ ID NO: 1795732 - RNA, 19 nt, Homo sapiens
  misc_RNA (1)...(19): siRNA sense strand
cagacugaguaucguaaua

SEQ ID NO: 1795733 - RNA, 19 nt, Homo sapiens
  misc_RNA (1)...(19): siRNA sense strand
uggaggagguggagaaaga

SEQ ID NO: 1795734 - RNA, 19 nt, Homo sapiens
  misc_RNA (1)...(19): siRNA sense strand
gugagaaccucgacaacga

SEQ ID NO: 1795735 - RNA, 19 nt, Homo sapiens
  misc_RNA (1)...(19): siRNA sense strand
gagagugagccaccaguaa

SEQ ID NO: 1795736 - RNA, 19 nt, Homo sapiens
  misc_RNA (1)...(19): siRNA sense strand
gggcugaccuuccggaucu

SEQ ID NO: 1795737 - RNA, 19 nt, Homo sapiens
  misc_RNA (1)...(19): siRNA sense strand
ggagugaccugccucuacu

SEQ ID NO: 1795738 - RNA, 19 nt, Homo sapiens
  misc_RNA (1)...(19): siRNA sense strand
gcaaccacccugcgccuuu

SEQ ID NO: 1795739 - RNA, 19 nt, Homo sapiens
  misc_RNA (1)...(19): siRNA sense strand
acaaugaguugaguaaugu

SEQ ID NO: 1795740 - RNA, 19 nt, Homo sapiens
  misc_RNA (1)...(19): siRNA sense strand
ggacagcgaaagacuccua

SEQ ID NO: 1795741 - RNA, 19 nt, Homo sapiens
  misc_RNA (1)...(19): siRNA sense strand
ccucugagaucuuuaaacu

SEQ ID NO: 1795742 - RNA, 19 nt, Homo sapiens
  misc_RNA (1)...(19): siRNA sense strand
gaggugcucuacacaguca

SEQ ID NO: 1795743 - RNA, 19 nt, Homo sapiens
  misc_RNA (1)...(19): siRNA sense strand
gacaaggcccugcgcguuu

SEQ ID NO: 1795744 - RNA, 19 nt, Homo sapiens
  misc_RNA (1)...(19): siRNA sense strand
gcugucggcucggcaagua

SEQ ID NO: 1795745 - RNA, 19 nt, Homo sapiens
  misc_RNA (1)...(19): siRNA sense strand
ccacaaaaccaaacucuuu

SEQ ID NO: 1795746 - RNA, 19 nt, Homo sapiens
  misc_RNA (1)...(19): siRNA sense strand
gacaggagggugagaguga

SEQ ID NO: 1795747 - RNA, 19 nt, Homo sapiens
  misc_RNA (1)...(19): siRNA sense strand
caaccacccugcgccuuug

SEQ ID NO: 1795748 - RNA, 19 nt, Homo sapiens
  misc_RNA (1)...(19): siRNA sense strand
gaggagggacagcgaaaga

SEQ ID NO: 1795749 - RNA, 19 nt, Homo sapiens
  misc_RNA (1)...(19): siRNA sense strand
cguaauaagugugaguuuc

SEQ ID NO: 1795750 - RNA, 19 nt, Homo sapiens
  misc_RNA (1)...(19): siRNA sense strand
agacugaguaucguaauaa

SEQ ID NO: 1795751 - RNA, 19 nt, Homo sapiens
  misc_RNA (1)...(19): siRNA sense strand
guaauaagugugaguuucu

SEQ ID NO: 1795752 - RNA, 19 nt, Homo sapiens
  misc_RNA (1)...(19): siRNA sense strand
gaagguaaagagggucauu

SEQ ID NO: 1795753 - RNA, 19 nt, Homo sapiens
  misc_RNA (1)...(19): siRNA sense strand
guuuaccucugagaucuuu

SEQ ID NO: 1795754 - RNA, 19 nt, Homo sapiens
  misc_RNA (1)...(19): siRNA sense strand
gcauggugcccucuggaaa

SEQ ID NO: 1795755 - RNA, 19 nt, Homo sapiens
  misc_RNA (1)...(19): siRNA sense strand
gggcagccaugggcaacuu

SEQ ID NO: 1795756 - RNA, 19 nt, Homo sapiens
  misc_RNA (1)...(19): siRNA sense strand
ccauggccauugccuacuu

SEQ ID NO: 1795757 - RNA, 19 nt, Homo sapiens
  misc_RNA (1)...(19): siRNA sense strand
ugaacgcccaggacaauga

SEQ ID NO: 1795758 - RNA, 19 nt, Homo sapiens
  misc_RNA (1)...(19): siRNA sense strand
ccgaggugcucuacacagu

SEQ ID NO: 1795759 - RNA, 19 nt, Homo sapiens
  misc_RNA (1)...(19): siRNA sense strand
ggacaaugaguugaguaau

SEQ ID NO: 1795760 - RNA, 19 nt, Homo sapiens
  misc_RNA (1)...(19): siRNA sense strand
ggugaacgcccaggacaau

SEQ ID NO: 1795761 - RNA, 19 nt, Homo sapiens
  misc_RNA (1)...(19): siRNA sense strand
cagcagacugaguaucgua

SEQ ID NO: 1795762 - RNA, 19 nt, Homo sapiens
  misc_RNA (1)...(19): siRNA sense strand
gacugaguaucguaauaag

SEQ ID NO: 1795763 - RNA, 19 nt, Homo sapiens
  misc_RNA (1)...(19): siRNA sense strand
uaauaagugugaguuucug

SEQ ID NO: 1795764 - RNA, 19 nt, Homo sapiens
  misc_RNA (1)...(19): siRNA sense strand
ugagagugagccaccagua

SEQ ID NO: 1795765 - RNA, 19 nt, Homo sapiens
  misc_RNA (1)...(19): siRNA sense strand
cugaguaucguaauaagug

SEQ ID NO: 1795766 - RNA, 19 nt, Homo sapiens
  misc_RNA (1)...(19): siRNA sense strand
ugaguaucguaauaagugu

SEQ ID NO: 1795767 - RNA, 19 nt, Homo sapiens
  misc_RNA (1)...(19): siRNA sense strand
ucaggcggcugcuguacgu

SEQ ID NO: 1795768 - RNA, 19 nt, Homo sapiens
  misc_RNA (1)...(19): siRNA sense strand
uaagugugaguuucugguu

SEQ ID NO: 1795769 - RNA, 19 nt, Homo sapiens
  misc_RNA (1)...(19): siRNA sense strand
ccaggacaaugaguugagu

SEQ ID NO: 1795770 - RNA, 19 nt, Homo sapiens
  misc_RNA (1)...(19): siRNA sense strand
gugcuggcuugcauuccaa

SEQ ID NO: 1795771 - RNA, 19 nt, Homo sapiens
  misc_RNA (1)...(19): siRNA sense strand
gcagacugaguaucguaau

SEQ ID NO: 1795772 - RNA, 19 nt, Homo sapiens
  misc_RNA (1)...(19): siRNA sense strand
ugaccugccucuacuucgu

SEQ ID NO: 1795773 - RNA, 19 nt, Homo sapiens
  misc_RNA (1)...(19): siRNA sense strand
cagccgaggugcucuacac

SEQ ID NO: 1795774 - RNA, 19 nt, Homo sapiens
  misc_RNA (1)...(19): siRNA sense strand
uuaccucugagaucuuuaa

SEQ ID NO: 1795775 - RNA, 19 nt, Homo sapiens
  misc_RNA (1)...(19): siRNA sense strand
gagugagccaccaguaaca

SEQ ID NO: 1795776 - RNA, 19 nt, Homo sapiens
  misc_RNA (1)...(19): siRNA sense strand
ggagggacagcgaaagacu

SEQ ID NO: 1795777 - RNA, 19 nt, Homo sapiens
  misc_RNA (1)...(19): siRNA sense strand
gcagccaugggcaacuuug

SEQ ID NO: 1795778 - RNA, 19 nt, Homo sapiens
  misc_RNA (1)...(19): siRNA sense strand
gauaacacccuacaagaaa

SEQ ID NO: 1795779 - RNA, 19 nt, Homo sapiens
  misc_RNA (1)...(19): siRNA sense strand
gacaaugaguugaguaaug

SEQ ID NO: 1795780 - RNA, 19 nt, Homo sapiens
  misc_RNA (1)...(19): siRNA sense strand
ggacugggcccaauuggau

SEQ ID NO: 1795781 - RNA, 19 nt, Homo sapiens
  misc_RNA (1)...(19): siRNA sense strand
cagacugaguaucguaaua

SEQ ID NO: 1795782 - RNA, 19 nt, Homo sapiens
  misc_RNA (1)...(19): siRNA sense strand
uggaggagguggagaaaga

SEQ ID NO: 1795783 - RNA, 19 nt, Homo sapiens
  misc_RNA (1)...(19): siRNA sense strand
gugagaaccucgacaacga

SEQ ID NO: 1795784 - RNA, 19 nt, Homo sapiens
  misc_RNA (1)...(19): siRNA sense strand
gagagugagccaccaguaa

SEQ ID NO: 1795785 - RNA, 19 nt, Homo sapiens
  misc_RNA (1)...(19): siRNA sense strand
ccacagcccuccagcucaa

SEQ ID NO: 1795786 - RNA, 19 nt, Homo sapiens
  misc_RNA (1)...(19): siRNA sense strand
gggcugaccuuccggaucu

SEQ ID NO: 1795787 - RNA, 19 nt, Homo sapiens
  misc_RNA (1)...(19): siRNA sense strand
ggagugaccugccucuacu

SEQ ID NO: 1795788 - RNA, 19 nt, Homo sapiens
  misc_RNA (1)...(19): siRNA sense strand
gcaaccacccugcgccuuu

SEQ ID NO: 1795789 - RNA, 19 nt, Homo sapiens
  misc_RNA (1)...(19): siRNA sense strand
acaaugaguugaguaaugu

SEQ ID NO: 1795790 - RNA, 19 nt, Homo sapiens
  misc_RNA (1)...(19): siRNA sense strand
ggacagcgaaagacuccua

SEQ ID NO: 1795791 - RNA, 19 nt, Homo sapiens
  misc_RNA (1)...(19): siRNA sense strand
ccucugagaucuuuaaacu

SEQ ID NO: 1795792 - RNA, 19 nt, Homo sapiens
  misc_RNA (1)...(19): siRNA sense strand
gaggugcucuacacaguca

SEQ ID NO: 1795793 - RNA, 19 nt, Homo sapiens
  misc_RNA (1)...(19): siRNA sense strand
gacaaggcccugcgcguuu

SEQ ID NO: 1795794 - RNA, 19 nt, Homo sapiens
  misc_RNA (1)...(19): siRNA sense strand
gcugucggcucggcaagua

SEQ ID NO: 1795795 - RNA, 19 nt, Homo sapiens
  misc_RNA (1)...(19): siRNA sense strand
ccacaaaaccaaacucuuu

SEQ ID NO: 1795796 - RNA, 19 nt, Homo sapiens
  misc_RNA (1)...(19): siRNA sense strand
gacaggagggugagaguga

SEQ ID NO: 1795797 - RNA, 19 nt, Homo sapiens
  misc_RNA (1)...(19): siRNA sense strand
caaccacccugcgccuuug

SEQ ID NO: 1795798 - RNA, 19 nt, Homo sapiens
  misc_RNA (1)...(19): siRNA sense strand
gaggagggacagcgaaaga

SEQ ID NO: 1795799 - RNA, 19 nt, Homo sapiens
  misc_RNA (1)...(19): siRNA sense strand
cguaauaagugugaguuuc

SEQ ID NO: 1795800 - RNA, 19 nt, Homo sapiens
  misc_RNA (1)...(19): siRNA sense strand
cagauaacacccuacaaga

SEQ ID NO: 1795801 - RNA, 19 nt, Homo sapiens
  misc_RNA (1)...(19): siRNA sense strand
agacugaguaucguaauaa

SEQ ID NO: 1795802 - RNA, 19 nt, Homo sapiens
  misc_RNA (1)...(19): siRNA sense strand
guaauaagugugaguuucu

SEQ ID NO: 1795803 - RNA, 19 nt, Homo sapiens
  misc_RNA (1)...(19): siRNA sense strand
ccagauaacacccuacaag

SEQ ID NO: 1795804 - RNA, 19 nt, Homo sapiens
  misc_RNA (1)...(19): siRNA sense strand
gaagguaaagagggucauu

SEQ ID NO: 1795805 - RNA, 19 nt, Homo sapiens
  misc_RNA (1)...(19): siRNA sense strand
guuuaccucugagaucuuu

SEQ ID NO: 1795806 - RNA, 19 nt, Homo sapiens
  misc_RNA (1)...(19): siRNA sense strand
agauaacacccuacaagaa

SEQ ID NO: 1795807 - RNA, 19 nt, Homo sapiens
  misc_RNA (1)...(19): siRNA sense strand
gcauggugcccucuggaaa

SEQ ID NO: 1795808 - RNA, 19 nt, Homo sapiens
  misc_RNA (1)...(19): siRNA sense strand
gggcagccaugggcaacuu

SEQ ID NO: 1795809 - RNA, 19 nt, Homo sapiens
  misc_RNA (1)...(19): siRNA sense strand
ccauggccauugccuacuu

SEQ ID NO: 1795810 - RNA, 19 nt, Homo sapiens
  misc_RNA (1)...(19): siRNA sense strand
ugaacgcccaggacaauga

SEQ ID NO: 1795811 - RNA, 19 nt, Homo sapiens
  misc_RNA (1)...(19): siRNA sense strand
ccgaggugcucuacacagu

SEQ ID NO: 1795812 - RNA, 19 nt, Homo sapiens
  misc_RNA (1)...(19): siRNA sense strand
ggacaaugaguugaguaau

SEQ ID NO: 1795813 - RNA, 19 nt, Homo sapiens
  misc_RNA (1)...(19): siRNA sense strand
ggugaacgcccaggacaau

SEQ ID NO: 1795814 - RNA, 19 nt, Homo sapiens
  misc_RNA (1)...(19): siRNA sense strand
cagcagacugaguaucgua

SEQ ID NO: 1795815 - RNA, 19 nt, Homo sapiens
  misc_RNA (1)...(19): siRNA sense strand
gacugaguaucguaauaag

SEQ ID NO: 1795816 - RNA, 19 nt, Homo sapiens
  misc_RNA (1)...(19): siRNA sense strand
uaauaagugugaguuucug

SEQ ID NO: 1795817 - RNA, 19 nt, Homo sapiens
  misc_RNA (1)...(19): siRNA sense strand
ugagagugagccaccagua

SEQ ID NO: 1795818 - RNA, 19 nt, Homo sapiens
  misc_RNA (1)...(19): siRNA sense strand
cugaguaucguaauaagug

SEQ ID NO: 1795819 - RNA, 19 nt, Homo sapiens
  misc_RNA (1)...(19): siRNA sense strand
ugaguaucguaauaagugu

SEQ ID NO: 1795820 - RNA, 19 nt, Homo sapiens
  misc_RNA (1)...(19): siRNA sense strand
ucaggcggcugcuguacgu

SEQ ID NO: 1795821 - RNA, 19 nt, Homo sapiens
  misc_RNA (1)...(19): siRNA sense strand
uaagugugaguuucugguu

SEQ ID NO: 1795822 - RNA, 19 nt, Homo sapiens
  misc_RNA (1)...(19): siRNA sense strand
ccaggacaaugaguugagu

SEQ ID NO: 1795823 - RNA, 19 nt, Homo sapiens
  misc_RNA (1)...(19): siRNA sense strand
gugcuggcuugcauuccaa

SEQ ID NO: 1795824 - RNA, 19 nt, Homo sapiens
  misc_RNA (1)...(19): siRNA sense strand
gcagacugaguaucguaau

SEQ ID NO: 1795825 - RNA, 19 nt, Homo sapiens
  misc_RNA (1)...(19): siRNA sense strand
ugaccugccucuacuucgu

SEQ ID NO: 1795826 - RNA, 19 nt, Homo sapiens
  misc_RNA (1)...(19): siRNA sense strand
uuaccucugagaucuuuaa

SEQ ID NO: 1795827 - RNA, 19 nt, Homo sapiens
  misc_RNA (1)...(19): siRNA sense strand
cagccgaggugcucuacac

SEQ ID NO: 1795828 - RNA, 19 nt, Homo sapiens
  misc_RNA (1)...(19): siRNA sense strand
gagugagccaccaguaaca

SEQ ID NO: 1795829 - RNA, 19 nt, Homo sapiens
  misc_RNA (1)...(19): siRNA sense strand
ggagggacagcgaaagacu

SEQ ID NO: 1795830 - RNA, 19 nt, Homo sapiens
  misc_RNA (1)...(19): siRNA sense strand
gcagccaugggcaacuuug

SEQ ID NO: 1795831 - RNA, 19 nt, Homo sapiens
  misc_RNA (1)...(19): siRNA sense strand
gaauguaaguugugaggua

SEQ ID NO: 1795832 - RNA, 19 nt, Homo sapiens
  misc_RNA (1)...(19): siRNA sense strand
caaagucacugguuuaaau

SEQ ID NO: 1795833 - RNA, 19 nt, Homo sapiens
  misc_RNA (1)...(19): siRNA sense strand
cgccagagauugugaaaua

SEQ ID NO: 1795834 - RNA, 19 nt, Homo sapiens
  misc_RNA (1)...(19): siRNA sense strand
gaaacagguguaacuauua

SEQ ID NO: 1795835 - RNA, 19 nt, Homo sapiens
  misc_RNA (1)...(19): siRNA sense strand
caagagacuucauuacuga

SEQ ID NO: 1795836 - RNA, 19 nt, Homo sapiens
  misc_RNA (1)...(19): siRNA sense strand
gcaagagacuucauuacug

SEQ ID NO: 1795837 - RNA, 19 nt, Homo sapiens
  misc_RNA (1)...(19): siRNA sense strand
ugacagaaguaguauugua

SEQ ID NO: 1795838 - RNA, 19 nt, Homo sapiens
  misc_RNA (1)...(19): siRNA sense strand
ucaaaugggucaucuucua

SEQ ID NO: 1795839 - RNA, 19 nt, Homo sapiens
  misc_RNA (1)...(19): siRNA sense strand
ugaaacagguguaacuauu

SEQ ID NO: 1795840 - RNA, 19 nt, Homo sapiens
  misc_RNA (1)...(19): siRNA sense strand
uaaauuaccuggaauacca

SEQ ID NO: 1795841 - RNA, 19 nt, Homo sapiens
  misc_RNA (1)...(19): siRNA sense strand
agaugaagcuguuaacaaa

SEQ ID NO: 1795842 - RNA, 19 nt, Homo sapiens
  misc_RNA (1)...(19): siRNA sense strand
ugagaagggugaaauagaa

SEQ ID NO: 1795843 - RNA, 19 nt, Homo sapiens
  misc_RNA (1)...(19): siRNA sense strand
guauauaccgccacaauaa

SEQ ID NO: 1795844 - RNA, 19 nt, Homo sapiens
  misc_RNA (1)...(19): siRNA sense strand
caaacuaucugagaagaga

SEQ ID NO: 1795845 - RNA, 19 nt, Homo sapiens
  misc_RNA (1)...(19): siRNA sense strand
uggcggaaguuuagcauua

SEQ ID NO: 1795846 - RNA, 19 nt, Homo sapiens
  misc_RNA (1)...(19): siRNA sense strand
caaaauagcuggcacuaau

SEQ ID NO: 1795847 - RNA, 19 nt, Homo sapiens
  misc_RNA (1)...(19): siRNA sense strand
aaauggaccuguuguagaa

SEQ ID NO: 1795848 - RNA, 19 nt, Homo sapiens
  misc_RNA (1)...(19): siRNA sense strand
gaaaugucuucuaguacuu

SEQ ID NO: 1795849 - RNA, 19 nt, Homo sapiens
  misc_RNA (1)...(19): siRNA sense strand
ucacagucaucaucuaauu

SEQ ID NO: 1795850 - RNA, 19 nt, Homo sapiens
  misc_RNA (1)...(19): siRNA sense strand
gauggaggcuauucaacaa

SEQ ID NO: 1795851 - RNA, 19 nt, Homo sapiens
  misc_RNA (1)...(19): siRNA sense strand
guacgaauaggaauaauug

SEQ ID NO: 1795852 - RNA, 19 nt, Homo sapiens
  misc_RNA (1)...(19): siRNA sense strand
ugacaaaguuuccagagau

SEQ ID NO: 1795853 - RNA, 19 nt, Homo sapiens
  misc_RNA (1)...(19): siRNA sense strand
ggacuuaggcaacaggaaa

SEQ ID NO: 1795854 - RNA, 19 nt, Homo sapiens
  misc_RNA (1)...(19): siRNA sense strand
gauggagaauauguuguua

SEQ ID NO: 1795855 - RNA, 19 nt, Homo sapiens
  misc_RNA (1)...(19): siRNA sense strand
gaaauucuaacaagucgaa

SEQ ID NO: 1795856 - RNA, 19 nt, Homo sapiens
  misc_RNA (1)...(19): siRNA sense strand
aaacacaggugcuuuguac

SEQ ID NO: 1795857 - RNA, 19 nt, Homo sapiens
  misc_RNA (1)...(19): siRNA sense strand
aaagucagauugucauguu

SEQ ID NO: 1795858 - RNA, 19 nt, Homo sapiens
  misc_RNA (1)...(19): siRNA sense strand
aaucagagauacuggugua

SEQ ID NO: 1795859 - RNA, 19 nt, Homo sapiens
  misc_RNA (1)...(19): siRNA sense strand
ccauaagaguuacaucuga

SEQ ID NO: 1795860 - RNA, 19 nt, Homo sapiens
  misc_RNA (1)...(19): siRNA sense strand
ggacaccucagaaguuauu

SEQ ID NO: 1795861 - RNA, 19 nt, Homo sapiens
  misc_RNA (1)...(19): siRNA sense strand
ggaucagcauuauuucaaa

SEQ ID NO: 1795862 - RNA, 19 nt, Homo sapiens
  misc_RNA (1)...(19): siRNA sense strand
gagaugaagcuguuaacaa

SEQ ID NO: 1795863 - RNA, 19 nt, Homo sapiens
  misc_RNA (1)...(19): siRNA sense strand
uguagaaacuguucagguu

SEQ ID NO: 1795864 - RNA, 19 nt, Homo sapiens
  misc_RNA (1)...(19): siRNA sense strand
cauaagaguuacaucugaa

SEQ ID NO: 1795865 - RNA, 19 nt, Homo sapiens
  misc_RNA (1)...(19): siRNA sense strand
guaaugggagaaccuauuu

SEQ ID NO: 1795866 - RNA, 19 nt, Homo sapiens
  misc_RNA (1)...(19): siRNA sense strand
gaaguuggccaagaaauuc

SEQ ID NO: 1795867 - RNA, 19 nt, Homo sapiens
  misc_RNA (1)...(19): siRNA sense strand
guagaauucccacaaacua

SEQ ID NO: 1795868 - RNA, 19 nt, Homo sapiens
  misc_RNA (1)...(19): siRNA sense strand
gacagaaguaguauuguaa

SEQ ID NO: 1795869 - RNA, 19 nt, Homo sapiens
  misc_RNA (1)...(19): siRNA sense strand
gcaguacgaauaggaauaa

SEQ ID NO: 1795870 - RNA, 19 nt, Homo sapiens
  misc_RNA (1)...(19): siRNA sense strand
ccagagauugugaaauaua

SEQ ID NO: 1795871 - RNA, 19 nt, Homo sapiens
  misc_RNA (1)...(19): siRNA sense strand
ggaaagcuggccagauuug

SEQ ID NO: 1795872 - RNA, 19 nt, Homo sapiens
  misc_RNA (1)...(19): siRNA sense strand
ugacuucacuuaggaaugu

SEQ ID NO: 1795873 - RNA, 19 nt, Homo sapiens
  misc_RNA (1)...(19): siRNA sense strand
gcuggcuacuucuaugaua

SEQ ID NO: 1795874 - RNA, 19 nt, Homo sapiens
  misc_RNA (1)...(19): siRNA sense strand
gauggaagaaugaggcuuu

SEQ ID NO: 1795875 - RNA, 19 nt, Homo sapiens
  misc_RNA (1)...(19): siRNA sense strand
cagagauacugguguaaug

SEQ ID NO: 1795876 - RNA, 19 nt, Homo sapiens
  misc_RNA (1)...(19): siRNA sense strand
gaauuuggagcaguauaua

SEQ ID NO: 1795877 - RNA, 19 nt, Homo sapiens
  misc_RNA (1)...(19): siRNA sense strand
aaacagguguaacuauuag

SEQ ID NO: 1795878 - RNA, 19 nt, Homo sapiens
  misc_RNA (1)...(19): siRNA sense strand
gacaaaguuuccagagaug

SEQ ID NO: 1795879 - RNA, 19 nt, Homo sapiens
  misc_RNA (1)...(19): siRNA sense strand
agauggcucugcuguagua

SEQ ID NO: 1795880 - RNA, 19 nt, Homo sapiens
  misc_RNA (1)...(19): siRNA sense strand
ggacaaacacaggugcuuu

SEQ ID NO: 1795881 - RNA, 19 nt, Homo sapiens
  misc_RNA (1)...(19): siRNA sense strand
ucauggaucagcauuauuu

SEQ ID NO: 1795882 - RNA, 19 nt, Homo sapiens
  misc_RNA (1)...(19): siRNA sense strand
gaaccuauuucacagucau

SEQ ID NO: 1795883 - RNA, 19 nt, Homo sapiens
  misc_RNA (1)...(19): siRNA sense strand
gaggcaagagacuucauua

SEQ ID NO: 1795884 - RNA, 19 nt, Homo sapiens
  misc_RNA (1)...(19): siRNA sense strand
aaaugagccugauguccua

SEQ ID NO: 1795885 - RNA, 19 nt, Homo sapiens
  misc_RNA (1)...(19): siRNA sense strand
ggucacagcggucaguaaa

SEQ ID NO: 1795886 - RNA, 19 nt, Homo sapiens
  misc_RNA (1)...(19): siRNA sense strand
gauuagaaguuggccaaga

SEQ ID NO: 1795887 - RNA, 19 nt, Homo sapiens
  misc_RNA (1)...(19): siRNA sense strand
aaggagauauuacagauca

SEQ ID NO: 1795888 - RNA, 19 nt, Homo sapiens
  misc_RNA (1)...(19): siRNA sense strand
gauuugacuucacuuagga

SEQ ID NO: 1795889 - RNA, 19 nt, Homo sapiens
  misc_RNA (1)...(19): siRNA sense strand
aaagugggagugaaauaua

SEQ ID NO: 1795890 - RNA, 19 nt, Homo sapiens
  misc_RNA (1)...(19): siRNA sense strand
caaccguggucagaacuuu

SEQ ID NO: 1795891 - RNA, 19 nt, Homo sapiens
  misc_RNA (1)...(19): siRNA sense strand
ccugguggcuauaacuuaa

SEQ ID NO: 1795892 - RNA, 19 nt, Homo sapiens
  misc_RNA (1)...(19): siRNA sense strand
agggugaaauagaagauua

SEQ ID NO: 1795893 - RNA, 19 nt, Homo sapiens
  misc_RNA (1)...(19): siRNA sense strand
ggauuugacuucacuuagg

SEQ ID NO: 1795894 - RNA, 19 nt, Homo sapiens
  misc_RNA (1)...(19): siRNA sense strand
uuacgagcaugacaaaguu

SEQ ID NO: 1795895 - RNA, 19 nt, Homo sapiens
  misc_RNA (1)...(19): siRNA sense strand
ccugauguccuagcaauua

SEQ ID NO: 1795896 - RNA, 19 nt, Homo sapiens
  misc_RNA (1)...(19): siRNA sense strand
ugacauggacuucaaaaua

SEQ ID NO: 1795897 - RNA, 19 nt, Homo sapiens
  misc_RNA (1)...(19): siRNA sense strand
gaucagcauuauuucaaag

SEQ ID NO: 1795898 - RNA, 19 nt, Homo sapiens
  misc_RNA (1)...(19): siRNA sense strand
gcagguagaauucccacaa

SEQ ID NO: 1795899 - RNA, 19 nt, Homo sapiens
  misc_RNA (1)...(19): siRNA sense strand
caacgaaagauuaaacauc

SEQ ID NO: 1795900 - RNA, 19 nt, Homo sapiens
  misc_RNA (1)...(19): siRNA sense strand
gagcgaugguccuuuccuu

SEQ ID NO: 1795901 - RNA, 19 nt, Homo sapiens
  misc_RNA (1)...(19): siRNA sense strand
cauuacaggcugauauuaa

SEQ ID NO: 1795902 - RNA, 19 nt, Homo sapiens
  misc_RNA (1)...(19): siRNA sense strand
gcauuacaggcugauauua

SEQ ID NO: 1795903 - RNA, 19 nt, Homo sapiens
  misc_RNA (1)...(19): siRNA sense strand
guugugagguagauauguu

SEQ ID NO: 1795904 - RNA, 19 nt, Homo sapiens
  misc_RNA (1)...(19): siRNA sense strand
gcauucagcaguugguaaa

SEQ ID NO: 1795905 - RNA, 19 nt, Homo sapiens
  misc_RNA (1)...(19): siRNA sense strand
cagguagaauucccacaaa

SEQ ID NO: 1795906 - RNA, 19 nt, Homo sapiens
  misc_RNA (1)...(19): siRNA sense strand
acaaauaauucagggcauu

SEQ ID NO: 1795907 - RNA, 19 nt, Homo sapiens
  misc_RNA (1)...(19): siRNA sense strand
cagaaguaguauuguaaug

SEQ ID NO: 1795908 - RNA, 19 nt, Homo sapiens
  misc_RNA (1)...(19): siRNA sense strand
ggcggaaguuuagcauuaa

SEQ ID NO: 1795909 - RNA, 19 nt, Homo sapiens
  misc_RNA (1)...(19): siRNA sense strand
caggugcuuuguaccguua

SEQ ID NO: 1795910 - RNA, 19 nt, Homo sapiens
  misc_RNA (1)...(19): siRNA sense strand
auagaauccuucaauguug

SEQ ID NO: 1795911 - RNA, 19 nt, Homo sapiens
  misc_RNA (1)...(19): siRNA sense strand
gguugguacuucugauaaa

SEQ ID NO: 1795912 - RNA, 19 nt, Homo sapiens
  misc_RNA (1)...(19): siRNA sense strand
gcaaagucacugguuuaaa

SEQ ID NO: 1795913 - RNA, 19 nt, Homo sapiens
  misc_RNA (1)...(19): siRNA sense strand
cuaaugaaauuggcaaagu

SEQ ID NO: 1795914 - RNA, 19 nt, Homo sapiens
  misc_RNA (1)...(19): siRNA sense strand
acuacgaguuuccuccuua

SEQ ID NO: 1795915 - RNA, 19 nt, Homo sapiens
  misc_RNA (1)...(19): siRNA sense strand
caaagugggagugaaauau

SEQ ID NO: 1795916 - RNA, 19 nt, Homo sapiens
  misc_RNA (1)...(19): siRNA sense strand
ucaaagugggagugaaaua

SEQ ID NO: 1795917 - RNA, 19 nt, Homo sapiens
  misc_RNA (1)...(19): siRNA sense strand
cgaauaggaauaauugaug

SEQ ID NO: 1795918 - RNA, 19 nt, Homo sapiens
  misc_RNA (1)...(19): siRNA sense strand
gagguugguacuucugaua

SEQ ID NO: 1795919 - RNA, 19 nt, Homo sapiens
  misc_RNA (1)...(19): siRNA sense strand
gcccuaggauuagaaguug

SEQ ID NO: 1795920 - RNA, 19 nt, Homo sapiens
  misc_RNA (1)...(19): siRNA sense strand
gugguugacuacagacaaa

SEQ ID NO: 1795921 - RNA, 19 nt, Homo sapiens
  misc_RNA (1)...(19): siRNA sense strand
gaucaaguuauaacagcua

SEQ ID NO: 1795922 - RNA, 19 nt, Homo sapiens
  misc_RNA (1)...(19): siRNA sense strand
gguauuaagucagaucaag

SEQ ID NO: 1795923 - RNA, 19 nt, Homo sapiens
  misc_RNA (1)...(19): siRNA sense strand
gccgauccauaugaaauaa

SEQ ID NO: 1795924 - RNA, 19 nt, Homo sapiens
  misc_RNA (1)...(19): siRNA sense strand
agaagccgauccauaugaa

SEQ ID NO: 1795925 - RNA, 19 nt, Homo sapiens
  misc_RNA (1)...(19): siRNA sense strand
uuccguagcccucucauua

SEQ ID NO: 1795926 - RNA, 19 nt, Homo sapiens
  misc_RNA (1)...(19): siRNA sense strand
gguucuguguaaucuguua

SEQ ID NO: 1795927 - RNA, 19 nt, Homo sapiens
  misc_RNA (1)...(19): siRNA sense strand
ucaauuagaccgcucuuuc

SEQ ID NO: 1795928 - RNA, 19 nt, Homo sapiens
  misc_RNA (1)...(19): siRNA sense strand
aaagcuuuguauccuguua

SEQ ID NO: 1795929 - RNA, 19 nt, Homo sapiens
  misc_RNA (1)...(19): siRNA sense strand
gaacuuugaaugacagaag

SEQ ID NO: 1795930 - RNA, 19 nt, Homo sapiens
  misc_RNA (1)...(19): siRNA sense strand
caaaugggucaucuucuau

SEQ ID NO: 1795931 - RNA, 19 nt, Homo sapiens
  misc_RNA (1)...(19): siRNA sense strand
gcaaggagcugaacaagag

SEQ ID NO: 1795932 - RNA, 19 nt, Homo sapiens
  misc_RNA (1)...(19): siRNA sense strand
ggacaaaugugagaaagug

SEQ ID NO: 1795933 - RNA, 19 nt, Homo sapiens
  misc_RNA (1)...(19): siRNA sense strand
gaaagccacugcuggagau

SEQ ID NO: 1795934 - RNA, 19 nt, Homo sapiens
  misc_RNA (1)...(19): siRNA sense strand
agagggagcuggagcaaau

SEQ ID NO: 1795935 - RNA, 19 nt, Homo sapiens
  misc_RNA (1)...(19): siRNA sense strand
ggacaagauucccgaagag

SEQ ID NO: 1795936 - RNA, 19 nt, Homo sapiens
  misc_RNA (1)...(19): siRNA sense strand
ccaagcagacccagacuuu

SEQ ID NO: 1795937 - RNA, 19 nt, Homo sapiens
  misc_RNA (1)...(19): siRNA sense strand
guacaaggcugaggaugag

SEQ ID NO: 1795938 - RNA, 19 nt, Homo sapiens
  misc_RNA (1)...(19): siRNA sense strand
gcacagguaaggcuaacaa

SEQ ID NO: 1795939 - RNA, 19 nt, Homo sapiens
  misc_RNA (1)...(19): siRNA sense strand
cagagaaggaggaguauga

SEQ ID NO: 1795940 - RNA, 19 nt, Homo sapiens
  misc_RNA (1)...(19): siRNA sense strand
acaaccagcuggcagagaa

SEQ ID NO: 1795941 - RNA, 19 nt, Homo sapiens
  misc_RNA (1)...(19): siRNA sense strand
uggagaggaugguucauga

SEQ ID NO: 1795942 - RNA, 19 nt, Homo sapiens
  misc_RNA (1)...(19): siRNA sense strand
ggacaaggcccagauucau

SEQ ID NO: 1795943 - RNA, 19 nt, Homo sapiens
  misc_RNA (1)...(19): siRNA sense strand
ccuuugacauugaugcuaa

SEQ ID NO: 1795944 - RNA, 19 nt, Homo sapiens
  misc_RNA (1)...(19): siRNA sense strand
gaggagaggacuucgacaa

SEQ ID NO: 1795945 - RNA, 19 nt, Homo sapiens
  misc_RNA (1)...(19): siRNA sense strand
gagcugaacaagagcauca

SEQ ID NO: 1795946 - RNA, 19 nt, Homo sapiens
  misc_RNA (1)...(19): siRNA sense strand
gugagaaagugcaggaucu

SEQ ID NO: 1795947 - RNA, 19 nt, Homo sapiens
  misc_RNA (1)...(19): siRNA sense strand
caagaucaccaucaccaau

SEQ ID NO: 1795948 - RNA, 19 nt, Homo sapiens
  misc_RNA (1)...(19): siRNA sense strand
gacaaggcccagauucaug

SEQ ID NO: 1795949 - RNA, 19 nt, Homo sapiens
  misc_RNA (1)...(19): siRNA sense strand
uggcagagaaggaggagua

SEQ ID NO: 1795950 - RNA, 19 nt, Homo sapiens
  misc_RNA (1)...(19): siRNA sense strand
ccacgcugauccagaggaa

SEQ ID NO: 1795951 - RNA, 19 nt, Homo sapiens
  misc_RNA (1)...(19): siRNA sense strand
ugucgguucucuccauuga

SEQ ID NO: 1795952 - RNA, 19 nt, Homo sapiens
  misc_RNA (1)...(19): siRNA sense strand
gcuggaggcccaugucuuc

SEQ ID NO: 1795953 - RNA, 19 nt, Homo sapiens
  misc_RNA (1)...(19): siRNA sense strand
cagguaaggcuaacaagau

SEQ ID NO: 1795954 - RNA, 19 nt, Homo sapiens
  misc_RNA (1)...(19): siRNA sense strand
gaagaggacaggcgcaaaa

SEQ ID NO: 1795955 - RNA, 19 nt, Homo sapiens
  misc_RNA (1)...(19): siRNA sense strand
gaaggaggaguaugagcau

SEQ ID NO: 1795956 - RNA, 19 nt, Homo sapiens
  misc_RNA (1)...(19): siRNA sense strand
ccaaggugcgcguaugcua

SEQ ID NO: 1795957 - RNA, 19 nt, Homo sapiens
  misc_RNA (1)...(19): siRNA sense strand
gaagagggagcuggagcaa

SEQ ID NO: 1795958 - RNA, 19 nt, Homo sapiens
  misc_RNA (1)...(19): siRNA sense strand
gggaggacaagacguucua

SEQ ID NO: 1795959 - RNA, 19 nt, Homo sapiens
  misc_RNA (1)...(19): siRNA sense strand
ggagaggaugguucaugaa

SEQ ID NO: 1795960 - RNA, 19 nt, Homo sapiens
  misc_RNA (1)...(19): siRNA sense strand
gcuaacaagaucaccauca

SEQ ID NO: 1795961 - RNA, 19 nt, Homo sapiens
  misc_RNA (1)...(19): siRNA sense strand
acaaggcccagauucauga

SEQ ID NO: 1795962 - RNA, 19 nt, Homo sapiens
  misc_RNA (1)...(19): siRNA sense strand
gagaggaugguucaugaag

SEQ ID NO: 1795963 - RNA, 19 nt, Homo sapiens
  misc_RNA (1)...(19): siRNA sense strand
caucacucgugcccgcuuu

SEQ ID NO: 1795964 - RNA, 19 nt, Homo sapiens
  misc_RNA (1)...(19): siRNA sense strand
ggaaagccuuagggacaag

SEQ ID NO: 1795965 - RNA, 19 nt, Homo sapiens
  misc_RNA (1)...(19): siRNA sense strand
agaucaccaucaccaauga

SEQ ID NO: 1795966 - RNA, 19 nt, Homo sapiens
  misc_RNA (1)...(19): siRNA sense strand
ucauugaggagguugauug

SEQ ID NO: 1795967 - RNA, 19 nt, Homo sapiens
  misc_RNA (1)...(19): siRNA sense strand
aagcagacccagacuuuca

SEQ ID NO: 1795968 - RNA, 19 nt, Homo sapiens
  misc_RNA (1)...(19): siRNA sense strand
ggagcacagguaaggcuaa

SEQ ID NO: 1795969 - RNA, 19 nt, Homo sapiens
  misc_RNA (1)...(19): siRNA sense strand
ggcaaggagcugaacaaga

SEQ ID NO: 1795970 - RNA, 19 nt, Homo sapiens
  misc_RNA (1)...(19): siRNA sense strand
ggaggcccaugucuuccau

SEQ ID NO: 1795971 - RNA, 19 nt, Homo sapiens
  misc_RNA (1)...(19): siRNA sense strand
agagggccaugaccaagga

SEQ ID NO: 1795972 - RNA, 19 nt, Homo sapiens
  misc_RNA (1)...(19): siRNA sense strand
ggagcuggagcaaaucugu

SEQ ID NO: 1795973 - RNA, 19 nt, Homo sapiens
  misc_RNA (1)...(19): siRNA sense strand
ucgagggcguggacuucua

SEQ ID NO: 1795974 - RNA, 19 nt, Homo sapiens
  misc_RNA (1)...(19): siRNA sense strand
aggaggagguggagaggau

SEQ ID NO: 1795975 - RNA, 19 nt, Homo sapiens
  misc_RNA (1)...(19): siRNA sense strand
gagcacagguaaggcuaac

SEQ ID NO: 1795976 - RNA, 19 nt, Homo sapiens
  misc_RNA (1)...(19): siRNA sense strand
ggugaccuuugacauugau

SEQ ID NO: 1795977 - RNA, 19 nt, Homo sapiens
  misc_RNA (1)...(19): siRNA sense strand
gaguaugagcaucagaaga

SEQ ID NO: 1795978 - RNA, 19 nt, Homo sapiens
  misc_RNA (1)...(19): siRNA sense strand
cuaacaagaucaccaucac

SEQ ID NO: 1795979 - RNA, 19 nt, Homo sapiens
  misc_RNA (1)...(19): siRNA sense strand
aggaaagccuuagggacaa

SEQ ID NO: 1795980 - RNA, 19 nt, Homo sapiens
  misc_RNA (1)...(19): siRNA sense strand
gacaggagcacagguaagg

SEQ ID NO: 1795981 - RNA, 19 nt, Homo sapiens
  misc_RNA (1)...(19): siRNA sense strand
ggaguaugagcaucagaag

SEQ ID NO: 1795982 - RNA, 19 nt, Homo sapiens
  misc_RNA (1)...(19): siRNA sense strand
aguacaaggcugaggauga

SEQ ID NO: 1795983 - RNA, 19 nt, Homo sapiens
  misc_RNA (1)...(19): siRNA sense strand
gcaguacaaggcugaggau

SEQ ID NO: 1795984 - RNA, 19 nt, Homo sapiens
  misc_RNA (1)...(19): siRNA sense strand
acaaccggcucgugaacca

SEQ ID NO: 1795985 - RNA, 19 nt, Homo sapiens
  misc_RNA (1)...(19): siRNA sense strand
ggaggaguaugagcaucag

SEQ ID NO: 1795986 - RNA, 19 nt, Homo sapiens
  misc_RNA (1)...(19): siRNA sense strand
gcaaaaugcaagacaagug

SEQ ID NO: 1795987 - RNA, 19 nt, Homo sapiens
  misc_RNA (1)...(19): siRNA sense strand
gcaagaggaaagccuuagg

SEQ ID NO: 1795988 - RNA, 19 nt, Homo sapiens
  misc_RNA (1)...(19): siRNA sense strand
acagguaaggcuaacaaga

SEQ ID NO: 1795989 - RNA, 19 nt, Homo sapiens
  misc_RNA (1)...(19): siRNA sense strand
ggauguggcuccccugucu

SEQ ID NO: 1795990 - RNA, 19 nt, Homo sapiens
  misc_RNA (1)...(19): siRNA sense strand
agguaaggcuaacaagauc

SEQ ID NO: 1795991 - RNA, 19 nt, Homo sapiens
  misc_RNA (1)...(19): siRNA sense strand
aggccacccuggagauaga

SEQ ID NO: 1795992 - RNA, 19 nt, Homo sapiens
  misc_RNA (1)...(19): siRNA sense strand
cauugaggagguugauuga

SEQ ID NO: 1795993 - RNA, 19 nt, Homo sapiens
  misc_RNA (1)...(19): siRNA sense strand
aguaugagcaucagaagag

SEQ ID NO: 1795994 - RNA, 19 nt, Homo sapiens
  misc_RNA (1)...(19): siRNA sense strand
gcagagaaggaggaguaug

SEQ ID NO: 1795995 - RNA, 19 nt, Homo sapiens
  misc_RNA (1)...(19): siRNA sense strand
cccagacuuucaccaccua

SEQ ID NO: 1795996 - RNA, 19 nt, Homo sapiens
  misc_RNA (1)...(19): siRNA sense strand
caccaaggcugaccacaug

SEQ ID NO: 1795997 - RNA, 19 nt, Homo sapiens
  misc_RNA (1)...(19): siRNA sense strand
ccaugaauuugaugaggaa

SEQ ID NO: 1795998 - RNA, 19 nt, Homo sapiens
  misc_RNA (1)...(19): siRNA sense strand
gcccagaccagcuucuauu

SEQ ID NO: 1795999 - RNA, 19 nt, Homo sapiens
  misc_RNA (1)...(19): siRNA sense strand
gcaccguccucaucaucau

SEQ ID NO: 1796000 - RNA, 19 nt, Homo sapiens
  misc_RNA (1)...(19): siRNA sense strand
gaccauuuguuccgcaagu

SEQ ID NO: 1796001 - RNA, 19 nt, Homo sapiens
  misc_RNA (1)...(19): siRNA sense strand
cagccgaggacgucuauga

SEQ ID NO: 1796002 - RNA, 19 nt, Homo sapiens
  misc_RNA (1)...(19): siRNA sense strand
caaagcccaucuggacauc

SEQ ID NO: 1796003 - RNA, 19 nt, Homo sapiens
  misc_RNA (1)...(19): siRNA sense strand
cuacggacccgccuucuac

SEQ ID NO: 1796004 - RNA, 19 nt, Homo sapiens
  misc_RNA (1)...(19): siRNA sense strand
ccaacauccucaucugcau

SEQ ID NO: 1796005 - RNA, 19 nt, Homo sapiens
  misc_RNA (1)...(19): siRNA sense strand
gccugaguuuggcgacuuu

SEQ ID NO: 1796006 - RNA, 19 nt, Homo sapiens
  misc_RNA (1)...(19): siRNA sense strand
gcgccacuccucaggcauu

SEQ ID NO: 1796007 - RNA, 19 nt, Homo sapiens
  misc_RNA (1)...(19): siRNA sense strand
caucguggacaacaucuuc

SEQ ID NO: 1796008 - RNA, 19 nt, Homo sapiens
  misc_RNA (1)...(19): siRNA sense strand
gagcuccaggugccuauuc

SEQ ID NO: 1796009 - RNA, 19 nt, Homo sapiens
  misc_RNA (1)...(19): siRNA sense strand
caucaucaugggcacauau

SEQ ID NO: 1796010 - RNA, 19 nt, Homo sapiens
  misc_RNA (1)...(19): siRNA sense strand
ccaccaaggcugaccacau

SEQ ID NO: 1796011 - RNA, 19 nt, Homo sapiens
  misc_RNA (1)...(19): siRNA sense strand
ucaaagcccaucuggacau

SEQ ID NO: 1796012 - RNA, 19 nt, Homo sapiens
  misc_RNA (1)...(19): siRNA sense strand
uggcgacuuugcccgcuuu

SEQ ID NO: 1796013 - RNA, 19 nt, Homo sapiens
  misc_RNA (1)...(19): siRNA sense strand
ugaauuugaugaggaacag

SEQ ID NO: 1796014 - RNA, 19 nt, Homo sapiens
  misc_RNA (1)...(19): siRNA sense strand
cgacagcgguggucccuuu

SEQ ID NO: 1796015 - RNA, 19 nt, Homo sapiens
  misc_RNA (1)...(19): siRNA sense strand
caauggcgcugacuucuau

SEQ ID NO: 1796016 - RNA, 19 nt, Homo sapiens
  misc_RNA (1)...(19): siRNA sense strand
gaggagaacagcaacgaua

SEQ ID NO: 1796017 - RNA, 19 nt, Homo sapiens
  misc_RNA (1)...(19): siRNA sense strand
gcaaugaugucugcaaugg

SEQ ID NO: 1796018 - RNA, 19 nt, Homo sapiens
  misc_RNA (1)...(19): siRNA sense strand
gcgcugacuucuauggaaa

SEQ ID NO: 1796019 - RNA, 19 nt, Homo sapiens
  misc_RNA (1)...(19): siRNA sense strand
gagaacagcaacgauauug

SEQ ID NO: 1796020 - RNA, 19 nt, Homo sapiens
  misc_RNA (1)...(19): siRNA sense strand
gcaauggcgcugacuucua

SEQ ID NO: 1796021 - RNA, 19 nt, Homo sapiens
  misc_RNA (1)...(19): siRNA sense strand
ggagaacagcaacgauauu

SEQ ID NO: 1796022 - RNA, 19 nt, Homo sapiens
  misc_RNA (1)...(19): siRNA sense strand
gaauacauccagccugugu

SEQ ID NO: 1796023 - RNA, 19 nt, Homo sapiens
  misc_RNA (1)...(19): siRNA sense strand
caagucagccuucgcuaug

SEQ ID NO: 1796024 - RNA, 19 nt, Homo sapiens
  misc_RNA (1)...(19): siRNA sense strand
gcaacacgcaguacuaugg

SEQ ID NO: 1796025 - RNA, 19 nt, Homo sapiens
  misc_RNA (1)...(19): siRNA sense strand
gcaagucagccuucgcuau

SEQ ID NO: 1796026 - RNA, 19 nt, Homo sapiens
  misc_RNA (1)...(19): siRNA sense strand
cagcaaugaugucugcaau

SEQ ID NO: 1796027 - RNA, 19 nt, Homo sapiens
  misc_RNA (1)...(19): siRNA sense strand
gcaguacuauggccaacag

SEQ ID NO: 1796028 - RNA, 19 nt, Homo sapiens
  misc_RNA (1)...(19): siRNA sense strand
gaucaagcccaagauguuc

SEQ ID NO: 1796029 - RNA, 19 nt, Homo sapiens
  misc_RNA (1)...(19): siRNA sense strand
ggcgcugacuucuauggaa

SEQ ID NO: 1796030 - RNA, 19 nt, Homo sapiens
  misc_RNA (1)...(19): siRNA sense strand
gcucauggucuuugacaag

SEQ ID NO: 1796031 - RNA, 19 nt, Homo sapiens
  misc_RNA (1)...(19): siRNA sense strand
gggcaacacgcaguacuau

SEQ ID NO: 1796032 - RNA, 19 nt, Homo sapiens
  misc_RNA (1)...(19): siRNA sense strand
gcacgucgggcuucuucug

SEQ ID NO: 1796033 - RNA, 19 nt, Homo sapiens
  misc_RNA (1)...(19): siRNA sense strand
gaucuuccaggccauaaag

SEQ ID NO: 1796034 - RNA, 19 nt, Homo sapiens
  misc_RNA (1)...(19): siRNA sense strand
uguguggcauugugaguug

SEQ ID NO: 1796035 - RNA, 19 nt, Homo sapiens
  misc_RNA (1)...(19): siRNA sense strand
guggauggcaagaucugua

SEQ ID NO: 1796036 - RNA, 19 nt, Homo sapiens
  misc_RNA (1)...(19): siRNA sense strand
agaucaagcccaagauguu

SEQ ID NO: 1796037 - RNA, 19 nt, Homo sapiens
  misc_RNA (1)...(19): siRNA sense strand
ugauggagcacaccucugu

SEQ ID NO: 1796038 - RNA, 19 nt, Homo sapiens
  misc_RNA (1)...(19): siRNA sense strand
cagcgguggucccuuugug

SEQ ID NO: 1796039 - RNA, 19 nt, Homo sapiens
  misc_RNA (1)...(19): siRNA sense strand
ccugguggauggcaagauc

SEQ ID NO: 1796040 - RNA, 19 nt, Homo sapiens
  misc_RNA (1)...(19): siRNA sense strand
ccagaucaagcccaagaug

SEQ ID NO: 1796041 - RNA, 19 nt, Homo sapiens
  misc_RNA (1)...(19): siRNA sense strand
cagaucaagcccaagaugu

SEQ ID NO: 1796042 - RNA, 19 nt, Homo sapiens
  misc_RNA (1)...(19): siRNA sense strand
caagguggcagcucucacu

SEQ ID NO: 1796043 - RNA, 19 nt, Homo sapiens
  misc_RNA (1)...(19): siRNA sense strand
ccaggcgucuacaccaaag

SEQ ID NO: 1796044 - RNA, 19 nt, Homo sapiens
  misc_RNA (1)...(19): siRNA sense strand
ggugcaggcuguggucuac

SEQ ID NO: 1796045 - RNA, 19 nt, Homo sapiens
  misc_RNA (1)...(19): siRNA sense strand
cgucgggcuucuucugugu

SEQ ID NO: 1796046 - RNA, 19 nt, Homo sapiens
  misc_RNA (1)...(19): siRNA sense strand
ggaucuuccaggccauaaa

SEQ ID NO: 1796047 - RNA, 19 nt, Homo sapiens
  misc_RNA (1)...(19): siRNA sense strand
ccagaagccaggcgucuac

SEQ ID NO: 1796048 - RNA, 19 nt, Homo sapiens
  misc_RNA (1)...(19): siRNA sense strand
guggucccuuuguguguga

SEQ ID NO: 1796049 - RNA, 19 nt, Homo sapiens
  misc_RNA (1)...(19): siRNA sense strand
cgacagcgguggucccuuu

SEQ ID NO: 1796050 - RNA, 19 nt, Homo sapiens
  misc_RNA (1)...(19): siRNA sense strand
caauggcgcugacuucuau

SEQ ID NO: 1796051 - RNA, 19 nt, Homo sapiens
  misc_RNA (1)...(19): siRNA sense strand
gaggagaacagcaacgaua

SEQ ID NO: 1796052 - RNA, 19 nt, Homo sapiens
  misc_RNA (1)...(19): siRNA sense strand
gcaaugaugucugcaaugg

SEQ ID NO: 1796053 - RNA, 19 nt, Homo sapiens
  misc_RNA (1)...(19): siRNA sense strand
gcgcugacuucuauggaaa

SEQ ID NO: 1796054 - RNA, 19 nt, Homo sapiens
  misc_RNA (1)...(19): siRNA sense strand
gagaacagcaacgauauug

SEQ ID NO: 1796055 - RNA, 19 nt, Homo sapiens
  misc_RNA (1)...(19): siRNA sense strand
gcaauggcgcugacuucua

SEQ ID NO: 1796056 - RNA, 19 nt, Homo sapiens
  misc_RNA (1)...(19): siRNA sense strand
ggagaacagcaacgauauu

SEQ ID NO: 1796057 - RNA, 19 nt, Homo sapiens
  misc_RNA (1)...(19): siRNA sense strand
gaauacauccagccugugu

SEQ ID NO: 1796058 - RNA, 19 nt, Homo sapiens
  misc_RNA (1)...(19): siRNA sense strand
caagucagccuucgcuaug

SEQ ID NO: 1796059 - RNA, 19 nt, Homo sapiens
  misc_RNA (1)...(19): siRNA sense strand
gcaacacgcaguacuaugg

SEQ ID NO: 1796060 - RNA, 19 nt, Homo sapiens
  misc_RNA (1)...(19): siRNA sense strand
gcaagucagccuucgcuau

SEQ ID NO: 1796061 - RNA, 19 nt, Homo sapiens
  misc_RNA (1)...(19): siRNA sense strand
cagcaaugaugucugcaau

SEQ ID NO: 1796062 - RNA, 19 nt, Homo sapiens
  misc_RNA (1)...(19): siRNA sense strand
gcaguacuauggccaacag

SEQ ID NO: 1796063 - RNA, 19 nt, Homo sapiens
  misc_RNA (1)...(19): siRNA sense strand
gaucaagcccaagauguuc

SEQ ID NO: 1796064 - RNA, 19 nt, Homo sapiens
  misc_RNA (1)...(19): siRNA sense strand
ggcgcugacuucuauggaa

SEQ ID NO: 1796065 - RNA, 19 nt, Homo sapiens
  misc_RNA (1)...(19): siRNA sense strand
gcucauggucuuugacaag

SEQ ID NO: 1796066 - RNA, 19 nt, Homo sapiens
  misc_RNA (1)...(19): siRNA sense strand
gggcaacacgcaguacuau

SEQ ID NO: 1796067 - RNA, 19 nt, Homo sapiens
  misc_RNA (1)...(19): siRNA sense strand
gcacgucgggcuucuucug

SEQ ID NO: 1796068 - RNA, 19 nt, Homo sapiens
  misc_RNA (1)...(19): siRNA sense strand
gaucuuccaggccauaaag

SEQ ID NO: 1796069 - RNA, 19 nt, Homo sapiens
  misc_RNA (1)...(19): siRNA sense strand
uguguggcauugugaguug

SEQ ID NO: 1796070 - RNA, 19 nt, Homo sapiens
  misc_RNA (1)...(19): siRNA sense strand
guggauggcaagaucugua

SEQ ID NO: 1796071 - RNA, 19 nt, Homo sapiens
  misc_RNA (1)...(19): siRNA sense strand
agaucaagcccaagauguu

SEQ ID NO: 1796072 - RNA, 19 nt, Homo sapiens
  misc_RNA (1)...(19): siRNA sense strand
ugauggagcacaccucugu

SEQ ID NO: 1796073 - RNA, 19 nt, Homo sapiens
  misc_RNA (1)...(19): siRNA sense strand
cagcgguggucccuuugug

SEQ ID NO: 1796074 - RNA, 19 nt, Homo sapiens
  misc_RNA (1)...(19): siRNA sense strand
ccugguggauggcaagauc

SEQ ID NO: 1796075 - RNA, 19 nt, Homo sapiens
  misc_RNA (1)...(19): siRNA sense strand
ccagaucaagcccaagaug

SEQ ID NO: 1796076 - RNA, 19 nt, Homo sapiens
  misc_RNA (1)...(19): siRNA sense strand
cagaucaagcccaagaugu

SEQ ID NO: 1796077 - RNA, 19 nt, Homo sapiens
  misc_RNA (1)...(19): siRNA sense strand
caagguggcagcucucacu

SEQ ID NO: 1796078 - RNA, 19 nt, Homo sapiens
  misc_RNA (1)...(19): siRNA sense strand
ccaggcgucuacaccaaag

SEQ ID NO: 1796079 - RNA, 19 nt, Homo sapiens
  misc_RNA (1)...(19): siRNA sense strand
ggugcaggcuguggucuac

SEQ ID NO: 1796080 - RNA, 19 nt, Homo sapiens
  misc_RNA (1)...(19): siRNA sense strand
cgucgggcuucuucugugu

SEQ ID NO: 1796081 - RNA, 19 nt, Homo sapiens
  misc_RNA (1)...(19): siRNA sense strand
ggaucuuccaggccauaaa

SEQ ID NO: 1796082 - RNA, 19 nt, Homo sapiens
  misc_RNA (1)...(19): siRNA sense strand
ccagaagccaggcgucuac

SEQ ID NO: 1796083 - RNA, 19 nt, Homo sapiens
  misc_RNA (1)...(19): siRNA sense strand
guggucccuuuguguguga

SEQ ID NO: 1796084 - RNA, 19 nt, Homo sapiens
  misc_RNA (1)...(19): siRNA sense strand
ccacagcuguucauauuua

SEQ ID NO: 1796085 - RNA, 19 nt, Homo sapiens
  misc_RNA (1)...(19): siRNA sense strand
ggauucagcugacaaagua

SEQ ID NO: 1796086 - RNA, 19 nt, Homo sapiens
  misc_RNA (1)...(19): siRNA sense strand
gaaagaagauuccaacucu

SEQ ID NO: 1796087 - RNA, 19 nt, Homo sapiens
  misc_RNA (1)...(19): siRNA sense strand
ggacaaagcucuucaucca

SEQ ID NO: 1796088 - RNA, 19 nt, Homo sapiens
  misc_RNA (1)...(19): siRNA sense strand
ggaccuugcuuaaauuuga

SEQ ID NO: 1796089 - RNA, 19 nt, Homo sapiens
  misc_RNA (1)...(19): siRNA sense strand
ggccacagcuguucauauu

SEQ ID NO: 1796090 - RNA, 19 nt, Homo sapiens
  misc_RNA (1)...(19): siRNA sense strand
gaaaccagcuauaugucuu

SEQ ID NO: 1796091 - RNA, 19 nt, Homo sapiens
  misc_RNA (1)...(19): siRNA sense strand
gaccuccacugcauugaua

SEQ ID NO: 1796092 - RNA, 19 nt, Homo sapiens
  misc_RNA (1)...(19): siRNA sense strand
gaggaaagccagacugcua

SEQ ID NO: 1796093 - RNA, 19 nt, Homo sapiens
  misc_RNA (1)...(19): siRNA sense strand
guacaucuuugguggaaug

SEQ ID NO: 1796094 - RNA, 19 nt, Homo sapiens
  misc_RNA (1)...(19): siRNA sense strand
cauuggaccuugcuuaaau

SEQ ID NO: 1796095 - RNA, 19 nt, Homo sapiens
  misc_RNA (1)...(19): siRNA sense strand
ugaaauggcagaagcuaaa

SEQ ID NO: 1796096 - RNA, 19 nt, Homo sapiens
  misc_RNA (1)...(19): siRNA sense strand
gggagcaaauccaaacaga

SEQ ID NO: 1796097 - RNA, 19 nt, Homo sapiens
  misc_RNA (1)...(19): siRNA sense strand
guaccaguaucacacagaa

SEQ ID NO: 1796098 - RNA, 19 nt, Homo sapiens
  misc_RNA (1)...(19): siRNA sense strand
gaacauuccacacaucauc

SEQ ID NO: 1796099 - RNA, 19 nt, Homo sapiens
  misc_RNA (1)...(19): siRNA sense strand
gagcaaauccaaacagaag

SEQ ID NO: 1796100 - RNA, 19 nt, Homo sapiens
  misc_RNA (1)...(19): siRNA sense strand
gaacaugcuagcuucauuc

SEQ ID NO: 1796101 - RNA, 19 nt, Homo sapiens
  misc_RNA (1)...(19): siRNA sense strand
ccaagaacauuccacacau

SEQ ID NO: 1796102 - RNA, 19 nt, Homo sapiens
  misc_RNA (1)...(19): siRNA sense strand
caagaacauuccacacauc

SEQ ID NO: 1796103 - RNA, 19 nt, Homo sapiens
  misc_RNA (1)...(19): siRNA sense strand
cugcuacacugcucuguuu

SEQ ID NO: 1796104 - RNA, 19 nt, Homo sapiens
  misc_RNA (1)...(19): siRNA sense strand
ccaacucucucacucugaa

SEQ ID NO: 1796105 - RNA, 19 nt, Homo sapiens
  misc_RNA (1)...(19): siRNA sense strand
caggagcacuggacacaau

SEQ ID NO: 1796106 - RNA, 19 nt, Homo sapiens
  misc_RNA (1)...(19): siRNA sense strand
gcaacaugguacaccuuga

SEQ ID NO: 1796107 - RNA, 19 nt, Homo sapiens
  misc_RNA (1)...(19): siRNA sense strand
ggacacaauguaccaguau

SEQ ID NO: 1796108 - RNA, 19 nt, Homo sapiens
  misc_RNA (1)...(19): siRNA sense strand
ccacugcauugauauaagu

SEQ ID NO: 1796109 - RNA, 19 nt, Homo sapiens
  misc_RNA (1)...(19): siRNA sense strand
gaaccaugaagcugagaaa

SEQ ID NO: 1796110 - RNA, 19 nt, Homo sapiens
  misc_RNA (1)...(19): siRNA sense strand
ggaaaucgaaauugucuac

SEQ ID NO: 1796111 - RNA, 19 nt, Homo sapiens
  misc_RNA (1)...(19): siRNA sense strand
gggacagauucuaugauga

SEQ ID NO: 1796112 - RNA, 19 nt, Homo sapiens
  misc_RNA (1)...(19): siRNA sense strand
ccaugaagcugagaaagag

SEQ ID NO: 1796113 - RNA, 19 nt, Homo sapiens
  misc_RNA (1)...(19): siRNA sense strand
gguaugaacaugcuagcuu

SEQ ID NO: 1796114 - RNA, 19 nt, Homo sapiens
  misc_RNA (1)...(19): siRNA sense strand
gaagauuccaacucucuca

SEQ ID NO: 1796115 - RNA, 19 nt, Homo sapiens
  misc_RNA (1)...(19): siRNA sense strand
ggaaaccagcuauaugucu

SEQ ID NO: 1796116 - RNA, 19 nt, Homo sapiens
  misc_RNA (1)...(19): siRNA sense strand
ggacagauucuaugaugac

SEQ ID NO: 1796117 - RNA, 19 nt, Homo sapiens
  misc_RNA (1)...(19): siRNA sense strand
ccaggaaagcaacauggua

SEQ ID NO: 1796118 - RNA, 19 nt, Homo sapiens
  misc_RNA (1)...(19): siRNA sense strand
gcauuggaccuugcuuaaa

SEQ ID NO: 1796119 - RNA, 19 nt, Homo sapiens
  misc_RNA (1)...(19): siRNA sense strand
acacagaagagcagcauug

SEQ ID NO: 1796120 - RNA, 19 nt, Homo sapiens
  misc_RNA (1)...(19): siRNA sense strand
ggagcaaauccaaacagaa

SEQ ID NO: 1796121 - RNA, 19 nt, Homo sapiens
  misc_RNA (1)...(19): siRNA sense strand
gagcacuggacacaaugua

SEQ ID NO: 1796122 - RNA, 19 nt, Homo sapiens
  misc_RNA (1)...(19): siRNA sense strand
gaccauuccauguguauca

SEQ ID NO: 1796123 - RNA, 19 nt, Homo sapiens
  misc_RNA (1)...(19): siRNA sense strand
caaccaaucaggaaaucga

SEQ ID NO: 1796124 - RNA, 19 nt, Homo sapiens
  misc_RNA (1)...(19): siRNA sense strand
uaugacgauuguauuguga

SEQ ID NO: 1796125 - RNA, 19 nt, Homo sapiens
  misc_RNA (1)...(19): siRNA sense strand
gaugaccuccacugcauug

SEQ ID NO: 1796126 - RNA, 19 nt, Homo sapiens
  misc_RNA (1)...(19): siRNA sense strand
gaaauggcagaagcuaaau

SEQ ID NO: 1796127 - RNA, 19 nt, Homo sapiens
  misc_RNA (1)...(19): siRNA sense strand
ggagacaagcccaggaaag

SEQ ID NO: 1796128 - RNA, 19 nt, Homo sapiens
  misc_RNA (1)...(19): siRNA sense strand
uggacacaauguaccagua

SEQ ID NO: 1796129 - RNA, 19 nt, Homo sapiens
  misc_RNA (1)...(19): siRNA sense strand
cuaugacgauuguauugug

SEQ ID NO: 1796130 - RNA, 19 nt, Homo sapiens
  misc_RNA (1)...(19): siRNA sense strand
gacaagcccaggaaagcaa

SEQ ID NO: 1796131 - RNA, 19 nt, Homo sapiens
  misc_RNA (1)...(19): siRNA sense strand
guguacaucuuugguggaa

SEQ ID NO: 1796132 - RNA, 19 nt, Homo sapiens
  misc_RNA (1)...(19): siRNA sense strand
cgaagcugcauguguuuga

SEQ ID NO: 1796133 - RNA, 19 nt, Homo sapiens
  misc_RNA (1)...(19): siRNA sense strand
ccagagacacuuggaaauc

SEQ ID NO: 1796134 - RNA, 19 nt, Homo sapiens
  misc_RNA (1)...(19): siRNA sense strand
ggggacagauucuaugaug

SEQ ID NO: 1796135 - RNA, 19 nt, Homo sapiens
  misc_RNA (1)...(19): siRNA sense strand
gcauugauauaagugacau

SEQ ID NO: 1796136 - RNA, 19 nt, Homo sapiens
  misc_RNA (1)...(19): siRNA sense strand
gacacaauguaccaguauc

SEQ ID NO: 1796137 - RNA, 19 nt, Homo sapiens
  misc_RNA (1)...(19): siRNA sense strand
gaccuugcuuaaauuugau

SEQ ID NO: 1796138 - RNA, 19 nt, Homo sapiens
  misc_RNA (1)...(19): siRNA sense strand
ccaaucaggaaaucgaaau

SEQ ID NO: 1796139 - RNA, 19 nt, Homo sapiens
  misc_RNA (1)...(19): siRNA sense strand
ucucagacgugcacaccau

SEQ ID NO: 1796140 - RNA, 19 nt, Homo sapiens
  misc_RNA (1)...(19): siRNA sense strand
caaucaggaaaucgaaauu

SEQ ID NO: 1796141 - RNA, 19 nt, Homo sapiens
  misc_RNA (1)...(19): siRNA sense strand
acgauuguauugugacugu

SEQ ID NO: 1796142 - RNA, 19 nt, Homo sapiens
  misc_RNA (1)...(19): siRNA sense strand
ggucacagccagagacacu

SEQ ID NO: 1796143 - RNA, 19 nt, Homo sapiens
  misc_RNA (1)...(19): siRNA sense strand
caucuuugguggaaugacu

SEQ ID NO: 1796144 - RNA, 19 nt, Homo sapiens
  misc_RNA (1)...(19): siRNA sense strand
caugguacaccuugacugu

SEQ ID NO: 1796145 - RNA, 19 nt, Homo sapiens
  misc_RNA (1)...(19): siRNA sense strand
aaaccagcuauaugucuuu

SEQ ID NO: 1796146 - RNA, 19 nt, Homo sapiens
  misc_RNA (1)...(19): siRNA sense strand
cgaguuggccacagcuguu

SEQ ID NO: 1796147 - RNA, 19 nt, Homo sapiens
  misc_RNA (1)...(19): siRNA sense strand
gccaaccaaucaggaaauc

SEQ ID NO: 1796148 - RNA, 19 nt, Homo sapiens
  misc_RNA (1)...(19): siRNA sense strand
caucggcagccauuggaaa

SEQ ID NO: 1796149 - RNA, 19 nt, Homo sapiens
  misc_RNA (1)...(19): siRNA sense strand
uuggugggaugaauacaga

SEQ ID NO: 1796150 - RNA, 19 nt, Homo sapiens
  misc_RNA (1)...(19): siRNA sense strand
agaaagaagauuccaacuc

SEQ ID NO: 1796151 - RNA, 19 nt, Homo sapiens
  misc_RNA (1)...(19): siRNA sense strand
gcaaauccaaacagaagcu

SEQ ID NO: 1796152 - RNA, 19 nt, Homo sapiens
  misc_RNA (1)...(19): siRNA sense strand
gagacaagcccaggaaagc

SEQ ID NO: 1796153 - RNA, 19 nt, Homo sapiens
  misc_RNA (1)...(19): siRNA sense strand
ucacagccagagacacuug

SEQ ID NO: 1796154 - RNA, 19 nt, Homo sapiens
  misc_RNA (1)...(19): siRNA sense strand
gguguuuggugggaugaau

SEQ ID NO: 1796155 - RNA, 19 nt, Homo sapiens
  misc_RNA (1)...(19): siRNA sense strand
ggaaagccagacugcuaca

SEQ ID NO: 1796156 - RNA, 19 nt, Homo sapiens
  misc_RNA (1)...(19): siRNA sense strand
ccagugacgugugcuucug

SEQ ID NO: 1796157 - RNA, 19 nt, Homo sapiens
  misc_RNA (1)...(19): siRNA sense strand
caggaaaucgaaauugucu

SEQ ID NO: 1796158 - RNA, 19 nt, Homo sapiens
  misc_RNA (1)...(19): siRNA sense strand
cauuccauguguaucauuc

SEQ ID NO: 1796159 - RNA, 19 nt, Homo sapiens
  misc_RNA (1)...(19): siRNA sense strand
gcagggacaaagcucuuca

SEQ ID NO: 1796160 - RNA, 19 nt, Homo sapiens
  misc_RNA (1)...(19): siRNA sense strand
cagagacacuuggaaaucc

SEQ ID NO: 1796161 - RNA, 19 nt, Homo sapiens
  misc_RNA (1)...(19): siRNA sense strand
ccauuggaaaccagcuaua

SEQ ID NO: 1796162 - RNA, 19 nt, Homo sapiens
  misc_RNA (1)...(19): siRNA sense strand
aaagaggauucagcugaca

SEQ ID NO: 1796163 - RNA, 19 nt, Homo sapiens
  misc_RNA (1)...(19): siRNA sense strand
aggcugugcugcccacuca

SEQ ID NO: 1796164 - RNA, 19 nt, Homo sapiens
  misc_RNA (1)...(19): siRNA sense strand
gaagcugcauguguuugac

SEQ ID NO: 1796165 - RNA, 19 nt, Homo sapiens
  misc_RNA (1)...(19): siRNA sense strand
uuggaaaccagcuauaugu

SEQ ID NO: 1796166 - RNA, 19 nt, Homo sapiens
  misc_RNA (1)...(19): siRNA sense strand
ccuggacgauuggaccauu

SEQ ID NO: 1796167 - RNA, 19 nt, Homo sapiens
  misc_RNA (1)...(19): siRNA sense strand
acacaauguaccaguauca

SEQ ID NO: 1796168 - RNA, 19 nt, Homo sapiens
  misc_RNA (1)...(19): siRNA sense strand
caugaaauggcagaagcua

SEQ ID NO: 1796169 - RNA, 19 nt, Homo sapiens
  misc_RNA (1)...(19): siRNA sense strand
gccagagacacuuggaaau

SEQ ID NO: 1796170 - RNA, 19 nt, Homo sapiens
  misc_RNA (1)...(19): siRNA sense strand
cccaagaacauuccacaca

SEQ ID NO: 1796171 - RNA, 19 nt, Homo sapiens
  misc_RNA (1)...(19): siRNA sense strand
gaaaucgaaauugucuaca

SEQ ID NO: 1796172 - RNA, 19 nt, Homo sapiens
  misc_RNA (1)...(19): siRNA sense strand
aaucaggaaaucgaaauug

SEQ ID NO: 1796173 - RNA, 19 nt, Homo sapiens
  misc_RNA (1)...(19): siRNA sense strand
cauuggaaaccagcuauau

SEQ ID NO: 1796174 - RNA, 19 nt, Homo sapiens
  misc_RNA (1)...(19): siRNA sense strand
gauuguauugugacuguag

SEQ ID NO: 1796175 - RNA, 19 nt, Homo sapiens
  misc_RNA (1)...(19): siRNA sense strand
cuacacugcucuguuuggu

SEQ ID NO: 1796176 - RNA, 19 nt, Homo sapiens
  misc_RNA (1)...(19): siRNA sense strand
caacaugguacaccuugac

SEQ ID NO: 1796177 - RNA, 19 nt, Homo sapiens
  misc_RNA (1)...(19): siRNA sense strand
ggaaagaauuguauacaga

SEQ ID NO: 1796178 - RNA, 19 nt, Homo sapiens
  misc_RNA (1)...(19): siRNA sense strand
agaaauaccuccagauguu

SEQ ID NO: 1796179 - RNA, 19 nt, Homo sapiens
  misc_RNA (1)...(19): siRNA sense strand
guacuagaguugcccauaa

SEQ ID NO: 1796180 - RNA, 19 nt, Homo sapiens
  misc_RNA (1)...(19): siRNA sense strand
gaauguagauugggacuga

SEQ ID NO: 1796181 - RNA, 19 nt, Homo sapiens
  misc_RNA (1)...(19): siRNA sense strand
ggacuuggcugucugaucu

SEQ ID NO: 1796182 - RNA, 19 nt, Homo sapiens
  misc_RNA (1)...(19): siRNA sense strand
gaggaaaggugaagcuaug

SEQ ID NO: 1796183 - RNA, 19 nt, Homo sapiens
  misc_RNA (1)...(19): siRNA sense strand
caccugaaguugucaauaa

SEQ ID NO: 1796184 - RNA, 19 nt, Homo sapiens
  misc_RNA (1)...(19): siRNA sense strand
gaucaaagaaucaagaaug

SEQ ID NO: 1796185 - RNA, 19 nt, Homo sapiens
  misc_RNA (1)...(19): siRNA sense strand
gcaguucugugauaccaaa

SEQ ID NO: 1796186 - RNA, 19 nt, Homo sapiens
  misc_RNA (1)...(19): siRNA sense strand
gaacacauuuagacauuac

SEQ ID NO: 1796187 - RNA, 19 nt, Homo sapiens
  misc_RNA (1)...(19): siRNA sense strand
ggacagaggguucgaggaa

SEQ ID NO: 1796188 - RNA, 19 nt, Homo sapiens
  misc_RNA (1)...(19): siRNA sense strand
gggaaccauuugaagaaua

SEQ ID NO: 1796189 - RNA, 19 nt, Homo sapiens
  misc_RNA (1)...(19): siRNA sense strand
ggaggucgaucaaagaauc

SEQ ID NO: 1796190 - RNA, 19 nt, Homo sapiens
  misc_RNA (1)...(19): siRNA sense strand
uaaagaggcacauugaauu

SEQ ID NO: 1796191 - RNA, 19 nt, Homo sapiens
  misc_RNA (1)...(19): siRNA sense strand
ggauguuacucaccaagaa

SEQ ID NO: 1796192 - RNA, 19 nt, Homo sapiens
  misc_RNA (1)...(19): siRNA sense strand
caauggaaauggcuggaaa

SEQ ID NO: 1796193 - RNA, 19 nt, Homo sapiens
  misc_RNA (1)...(19): siRNA sense strand
gaugaggaccgaagugauu

SEQ ID NO: 1796194 - RNA, 19 nt, Homo sapiens
  misc_RNA (1)...(19): siRNA sense strand
aauaugaaguugccgauga

SEQ ID NO: 1796195 - RNA, 19 nt, Homo sapiens
  misc_RNA (1)...(19): siRNA sense strand
gggaggaggucgaucaaag

SEQ ID NO: 1796196 - RNA, 19 nt, Homo sapiens
  misc_RNA (1)...(19): siRNA sense strand
ucaggaggcuggaggcaaa

SEQ ID NO: 1796197 - RNA, 19 nt, Homo sapiens
  misc_RNA (1)...(19): siRNA sense strand
gcagagagccguuuucuau

SEQ ID NO: 1796198 - RNA, 19 nt, Homo sapiens
  misc_RNA (1)...(19): siRNA sense strand
ccaacucgcugcugcugaa

SEQ ID NO: 1796199 - RNA, 19 nt, Homo sapiens
  misc_RNA (1)...(19): siRNA sense strand
ggaaccauuugaagaauac

SEQ ID NO: 1796200 - RNA, 19 nt, Homo sapiens
  misc_RNA (1)...(19): siRNA sense strand
gugaagcuauggcucuaaa

SEQ ID NO: 1796201 - RNA, 19 nt, Homo sapiens
  misc_RNA (1)...(19): siRNA sense strand
agacuucuaugcucgguuu

SEQ ID NO: 1796202 - RNA, 19 nt, Homo sapiens
  misc_RNA (1)...(19): siRNA sense strand
gaagcuauggcucuaaaug

SEQ ID NO: 1796203 - RNA, 19 nt, Homo sapiens
  misc_RNA (1)...(19): siRNA sense strand
gauuauagcagucuuugug

SEQ ID NO: 1796204 - RNA, 19 nt, Homo sapiens
  misc_RNA (1)...(19): siRNA sense strand
gggacauucuccauucaaa

SEQ ID NO: 1796205 - RNA, 19 nt, Homo sapiens
  misc_RNA (1)...(19): siRNA sense strand
gcccauaacuaccuaagag

SEQ ID NO: 1796206 - RNA, 19 nt, Homo sapiens
  misc_RNA (1)...(19): siRNA sense strand
ggagaaagugcaaaguaga

SEQ ID NO: 1796207 - RNA, 19 nt, Homo sapiens
  misc_RNA (1)...(19): siRNA sense strand
ucagggacauucuccauuc

SEQ ID NO: 1796208 - RNA, 19 nt, Homo sapiens
  misc_RNA (1)...(19): siRNA sense strand
ugucugaucuaugaaauga

SEQ ID NO: 1796209 - RNA, 19 nt, Homo sapiens
  misc_RNA (1)...(19): siRNA sense strand
cuacauggcaccugaaguu

SEQ ID NO: 1796210 - RNA, 19 nt, Homo sapiens
  misc_RNA (1)...(19): siRNA sense strand
gggaaagaauuguauacag

SEQ ID NO: 1796211 - RNA, 19 nt, Homo sapiens
  misc_RNA (1)...(19): siRNA sense strand
gauaccaaacccacucuaa

SEQ ID NO: 1796212 - RNA, 19 nt, Homo sapiens
  misc_RNA (1)...(19): siRNA sense strand
uggaugcaguggcagaaua

SEQ ID NO: 1796213 - RNA, 19 nt, Homo sapiens
  misc_RNA (1)...(19): siRNA sense strand
agaaugauaccgaggagua

SEQ ID NO: 1796214 - RNA, 19 nt, Homo sapiens
  misc_RNA (1)...(19): siRNA sense strand
ggaggaggucgaucaaaga

SEQ ID NO: 1796215 - RNA, 19 nt, Homo sapiens
  misc_RNA (1)...(19): siRNA sense strand
ccaaagaugccuugugcuu

SEQ ID NO: 1796216 - RNA, 19 nt, Homo sapiens
  misc_RNA (1)...(19): siRNA sense strand
ccagaaauaccuccagaug

SEQ ID NO: 1796217 - RNA, 19 nt, Homo sapiens
  misc_RNA (1)...(19): siRNA sense strand
aaaucuaucugcaggaugu

SEQ ID NO: 1796218 - RNA, 19 nt, Homo sapiens
  misc_RNA (1)...(19): siRNA sense strand
acaaagagaaagucaaaug

SEQ ID NO: 1796219 - RNA, 19 nt, Homo sapiens
  misc_RNA (1)...(19): siRNA sense strand
uuacagagggaaagaauug

SEQ ID NO: 1796220 - RNA, 19 nt, Homo sapiens
  misc_RNA (1)...(19): siRNA sense strand
gaaagugcaaaguagauuc

SEQ ID NO: 1796221 - RNA, 19 nt, Homo sapiens
  misc_RNA (1)...(19): siRNA sense strand
ugaggaauguacuagaguu

SEQ ID NO: 1796222 - RNA, 19 nt, Homo sapiens
  misc_RNA (1)...(19): siRNA sense strand
gaaauaccuccagauguug

SEQ ID NO: 1796223 - RNA, 19 nt, Homo sapiens
  misc_RNA (1)...(19): siRNA sense strand
ggaaaggcaacccguaaca

SEQ ID NO: 1796224 - RNA, 19 nt, Homo sapiens
  misc_RNA (1)...(19): siRNA sense strand
cugaaguugucaauaauga

SEQ ID NO: 1796225 - RNA, 19 nt, Homo sapiens
  misc_RNA (1)...(19): siRNA sense strand
caaagaacacauuuagaca

SEQ ID NO: 1796226 - RNA, 19 nt, Homo sapiens
  misc_RNA (1)...(19): siRNA sense strand
gaaaggcaacccguaacaa

SEQ ID NO: 1796227 - RNA, 19 nt, Homo sapiens
  misc_RNA (1)...(19): siRNA sense strand
cuaaagaggcacauugaau

SEQ ID NO: 1796228 - RNA, 19 nt, Homo sapiens
  misc_RNA (1)...(19): siRNA sense strand
gaagauuuacagagggaaa

SEQ ID NO: 1796229 - RNA, 19 nt, Homo sapiens
  misc_RNA (1)...(19): siRNA sense strand
aaaggcaacccguaacaaa

SEQ ID NO: 1796230 - RNA, 19 nt, Homo sapiens
  misc_RNA (1)...(19): siRNA sense strand
gcacauugaauucuuggau

SEQ ID NO: 1796231 - RNA, 19 nt, Homo sapiens
  misc_RNA (1)...(19): siRNA sense strand
ggacacauccggauuucag

SEQ ID NO: 1796232 - RNA, 19 nt, Homo sapiens
  misc_RNA (1)...(19): siRNA sense strand
gaggcacauugaauucuug

SEQ ID NO: 1796233 - RNA, 19 nt, Homo sapiens
  misc_RNA (1)...(19): siRNA sense strand
cagaggaugccaaaucuau

SEQ ID NO: 1796234 - RNA, 19 nt, Homo sapiens
  misc_RNA (1)...(19): siRNA sense strand
ggaaguggaacccaagcaa

SEQ ID NO: 1796235 - RNA, 19 nt, Homo sapiens
  misc_RNA (1)...(19): siRNA sense strand
ccaaaucuaucugcaggau

SEQ ID NO: 1796236 - RNA, 19 nt, Homo sapiens
  misc_RNA (1)...(19): siRNA sense strand
ggaggagaacccuuccaaa

SEQ ID NO: 1796237 - RNA, 19 nt, Homo sapiens
  misc_RNA (1)...(19): siRNA sense strand
gaaguggaacccaagcaau

SEQ ID NO: 1796238 - RNA, 19 nt, Homo sapiens
  misc_RNA (1)...(19): siRNA sense strand
gaggaggucgaucaaagaa

SEQ ID NO: 1796239 - RNA, 19 nt, Homo sapiens
  misc_RNA (1)...(19): siRNA sense strand
gagaaagugcaaaguagau

SEQ ID NO: 1796240 - RNA, 19 nt, Homo sapiens
  misc_RNA (1)...(19): siRNA sense strand
gaauaaagaagaggaaagg

SEQ ID NO: 1796241 - RNA, 19 nt, Homo sapiens
  misc_RNA (1)...(19): siRNA sense strand
uuacagaguucuaggaaaa

SEQ ID NO: 1796242 - RNA, 19 nt, Homo sapiens
  misc_RNA (1)...(19): siRNA sense strand
uggagaaagugcaaaguag

SEQ ID NO: 1796243 - RNA, 19 nt, Homo sapiens
  misc_RNA (1)...(19): siRNA sense strand
gacaagcaaccgauaggaa

SEQ ID NO: 1796244 - RNA, 19 nt, Homo sapiens
  misc_RNA (1)...(19): siRNA sense strand
acagaggguucgaggaaga

SEQ ID NO: 1796245 - RNA, 19 nt, Homo sapiens
  misc_RNA (1)...(19): siRNA sense strand
gaggagaacccuuccaaaa

SEQ ID NO: 1796246 - RNA, 19 nt, Homo sapiens
  misc_RNA (1)...(19): siRNA sense strand
gcaccugaaguugucaaua

SEQ ID NO: 1796247 - RNA, 19 nt, Homo sapiens
  misc_RNA (1)...(19): siRNA sense strand
gcaaucccggcuuugauga

SEQ ID NO: 1796248 - RNA, 19 nt, Homo sapiens
  misc_RNA (1)...(19): siRNA sense strand
caaagagaaagucaaaugg

SEQ ID NO: 1796249 - RNA, 19 nt, Homo sapiens
  misc_RNA (1)...(19): siRNA sense strand
ccaagaaagcucauauuuu

SEQ ID NO: 1796250 - RNA, 19 nt, Homo sapiens
  misc_RNA (1)...(19): siRNA sense strand
ggacaccgcagaugaagac

SEQ ID NO: 1796251 - RNA, 19 nt, Homo sapiens
  misc_RNA (1)...(19): siRNA sense strand
ucaaggacaucaacuucag

SEQ ID NO: 1796252 - RNA, 19 nt, Homo sapiens
  misc_RNA (1)...(19): siRNA sense strand
ggcaacccguaacaaagaa

SEQ ID NO: 1796253 - RNA, 19 nt, Homo sapiens
  misc_RNA (1)...(19): siRNA sense strand
cagauguugugacagaaug

SEQ ID NO: 1796254 - RNA, 19 nt, Homo sapiens
  misc_RNA (1)...(19): siRNA sense strand
gaggaagaguuggaacagu

SEQ ID NO: 1796255 - RNA, 19 nt, Homo sapiens
  misc_RNA (1)...(19): siRNA sense strand
cuccagauguugugacaga

SEQ ID NO: 1796256 - RNA, 19 nt, Homo sapiens
  misc_RNA (1)...(19): siRNA sense strand
acaaagaacacauuuagac

SEQ ID NO: 1796257 - RNA, 19 nt, Homo sapiens
  misc_RNA (1)...(19): siRNA sense strand
cuauggcucuaaaugagaa

SEQ ID NO: 1796258 - RNA, 19 nt, Homo sapiens
  misc_RNA (1)...(19): siRNA sense strand
gcaggauguuacucaccaa

SEQ ID NO: 1796259 - RNA, 19 nt, Homo sapiens
  misc_RNA (1)...(19): siRNA sense strand
ggaugcaguggcagaauau

SEQ ID NO: 1796260 - RNA, 19 nt, Homo sapiens
  misc_RNA (1)...(19): siRNA sense strand
cuugaagccugagaauauu

SEQ ID NO: 1796261 - RNA, 19 nt, Homo sapiens
  misc_RNA (1)...(19): siRNA sense strand
cagaaauaccuccagaugu

SEQ ID NO: 1796262 - RNA, 19 nt, Homo sapiens
  misc_RNA (1)...(19): siRNA sense strand
ccucaugccguuuacugua

SEQ ID NO: 1796263 - RNA, 19 nt, Homo sapiens
  misc_RNA (1)...(19): siRNA sense strand
gcugucugaucuaugaaau

SEQ ID NO: 1796264 - RNA, 19 nt, Homo sapiens
  misc_RNA (1)...(19): siRNA sense strand
uaguuuagccuacgcuuau

SEQ ID NO: 1796265 - RNA, 19 nt, Homo sapiens
  misc_RNA (1)...(19): siRNA sense strand
aaagaggcacauugaauuc

SEQ ID NO: 1796266 - RNA, 19 nt, Homo sapiens
  misc_RNA (1)...(19): siRNA sense strand
accaagaaagcucauauuu

SEQ ID NO: 1796267 - RNA, 19 nt, Homo sapiens
  misc_RNA (1)...(19): siRNA sense strand
agaggcacauugaauucuu

SEQ ID NO: 1796268 - RNA, 19 nt, Homo sapiens
  misc_RNA (1)...(19): siRNA sense strand
guucaaggacaucaacuuc

SEQ ID NO: 1796269 - RNA, 19 nt, Homo sapiens
  misc_RNA (1)...(19): siRNA sense strand
gauuucagaccucgguuug

SEQ ID NO: 1796270 - RNA, 19 nt, Homo sapiens
  misc_RNA (1)...(19): siRNA sense strand
acuugaagccugagaauau

SEQ ID NO: 1796271 - RNA, 19 nt, Homo sapiens
  misc_RNA (1)...(19): siRNA sense strand
caagugcgagccacaggaa

SEQ ID NO: 1796272 - RNA, 19 nt, Homo sapiens
  misc_RNA (1)...(19): siRNA sense strand
gaagaggaaaggugaagcu

SEQ ID NO: 1796273 - RNA, 19 nt, Homo sapiens
  misc_RNA (1)...(19): siRNA sense strand
cauggcaccugaaguuguc

SEQ ID NO: 1796274 - RNA, 19 nt, Homo sapiens
  misc_RNA (1)...(19): siRNA sense strand
ggauuucagaccucgguuu

SEQ ID NO: 1796275 - RNA, 19 nt, Homo sapiens
  misc_RNA (1)...(19): siRNA sense strand
caagcaaccgauaggaaga

SEQ ID NO: 1796276 - RNA, 19 nt, Homo sapiens
  misc_RNA (1)...(19): siRNA sense strand
gaggaugccaaaucuaucu

SEQ ID NO: 1796277 - RNA, 19 nt, Homo sapiens
  misc_RNA (1)...(19): siRNA sense strand
ggaaagaauuguauacaga

SEQ ID NO: 1796278 - RNA, 19 nt, Homo sapiens
  misc_RNA (1)...(19): siRNA sense strand
agaaauaccuccagauguu

SEQ ID NO: 1796279 - RNA, 19 nt, Homo sapiens
  misc_RNA (1)...(19): siRNA sense strand
guacuagaguugcccauaa

SEQ ID NO: 1796280 - RNA, 19 nt, Homo sapiens
  misc_RNA (1)...(19): siRNA sense strand
gaauguagauugggacuga

SEQ ID NO: 1796281 - RNA, 19 nt, Homo sapiens
  misc_RNA (1)...(19): siRNA sense strand
ggacuuggcugucugaucu

SEQ ID NO: 1796282 - RNA, 19 nt, Homo sapiens
  misc_RNA (1)...(19): siRNA sense strand
gaggaaaggugaagcuaug

SEQ ID NO: 1796283 - RNA, 19 nt, Homo sapiens
  misc_RNA (1)...(19): siRNA sense strand
caccugaaguugucaauaa

SEQ ID NO: 1796284 - RNA, 19 nt, Homo sapiens
  misc_RNA (1)...(19): siRNA sense strand
gaucaaagaaucaagaaug

SEQ ID NO: 1796285 - RNA, 19 nt, Homo sapiens
  misc_RNA (1)...(19): siRNA sense strand
gcaguucugugauaccaaa

SEQ ID NO: 1796286 - RNA, 19 nt, Homo sapiens
  misc_RNA (1)...(19): siRNA sense strand
gaacacauuuagacauuac

SEQ ID NO: 1796287 - RNA, 19 nt, Homo sapiens
  misc_RNA (1)...(19): siRNA sense strand
ggacagaggguucgaggaa

SEQ ID NO: 1796288 - RNA, 19 nt, Homo sapiens
  misc_RNA (1)...(19): siRNA sense strand
gggaaccauuugaagaaua

SEQ ID NO: 1796289 - RNA, 19 nt, Homo sapiens
  misc_RNA (1)...(19): siRNA sense strand
ggaggucgaucaaagaauc

SEQ ID NO: 1796290 - RNA, 19 nt, Homo sapiens
  misc_RNA (1)...(19): siRNA sense strand
uaaagaggcacauugaauu

SEQ ID NO: 1796291 - RNA, 19 nt, Homo sapiens
  misc_RNA (1)...(19): siRNA sense strand
ggauguuacucaccaagaa

SEQ ID NO: 1796292 - RNA, 19 nt, Homo sapiens
  misc_RNA (1)...(19): siRNA sense strand
caauggaaauggcuggaaa

SEQ ID NO: 1796293 - RNA, 19 nt, Homo sapiens
  misc_RNA (1)...(19): siRNA sense strand
gaugaggaccgaagugauu

SEQ ID NO: 1796294 - RNA, 19 nt, Homo sapiens
  misc_RNA (1)...(19): siRNA sense strand
aauaugaaguugccgauga

SEQ ID NO: 1796295 - RNA, 19 nt, Homo sapiens
  misc_RNA (1)...(19): siRNA sense strand
gggaggaggucgaucaaag

SEQ ID NO: 1796296 - RNA, 19 nt, Homo sapiens
  misc_RNA (1)...(19): siRNA sense strand
ucaggaggcuggaggcaaa

SEQ ID NO: 1796297 - RNA, 19 nt, Homo sapiens
  misc_RNA (1)...(19): siRNA sense strand
gcagagagccguuuucuau

SEQ ID NO: 1796298 - RNA, 19 nt, Homo sapiens
  misc_RNA (1)...(19): siRNA sense strand
ccaacucgcugcugcugaa

SEQ ID NO: 1796299 - RNA, 19 nt, Homo sapiens
  misc_RNA (1)...(19): siRNA sense strand
ggaaccauuugaagaauac

SEQ ID NO: 1796300 - RNA, 19 nt, Homo sapiens
  misc_RNA (1)...(19): siRNA sense strand
gugaagcuauggcucuaaa

SEQ ID NO: 1796301 - RNA, 19 nt, Homo sapiens
  misc_RNA (1)...(19): siRNA sense strand
agacuucuaugcucgguuu

SEQ ID NO: 1796302 - RNA, 19 nt, Homo sapiens
  misc_RNA (1)...(19): siRNA sense strand
gaagcuauggcucuaaaug

SEQ ID NO: 1796303 - RNA, 19 nt, Homo sapiens
  misc_RNA (1)...(19): siRNA sense strand
gauuauagcagucuuugug

SEQ ID NO: 1796304 - RNA, 19 nt, Homo sapiens
  misc_RNA (1)...(19): siRNA sense strand
gggacauucuccauucaaa

SEQ ID NO: 1796305 - RNA, 19 nt, Homo sapiens
  misc_RNA (1)...(19): siRNA sense strand
gcccauaacuaccuaagag

SEQ ID NO: 1796306 - RNA, 19 nt, Homo sapiens
  misc_RNA (1)...(19): siRNA sense strand
ggagaaagugcaaaguaga

SEQ ID NO: 1796307 - RNA, 19 nt, Homo sapiens
  misc_RNA (1)...(19): siRNA sense strand
ucagggacauucuccauuc

SEQ ID NO: 1796308 - RNA, 19 nt, Homo sapiens
  misc_RNA (1)...(19): siRNA sense strand
ugucugaucuaugaaauga

SEQ ID NO: 1796309 - RNA, 19 nt, Homo sapiens
  misc_RNA (1)...(19): siRNA sense strand
cuacauggcaccugaaguu

SEQ ID NO: 1796310 - RNA, 19 nt, Homo sapiens
  misc_RNA (1)...(19): siRNA sense strand
gggaaagaauuguauacag

SEQ ID NO: 1796311 - RNA, 19 nt, Homo sapiens
  misc_RNA (1)...(19): siRNA sense strand
gauaccaaacccacucuaa

SEQ ID NO: 1796312 - RNA, 19 nt, Homo sapiens
  misc_RNA (1)...(19): siRNA sense strand
uggaugcaguggcagaaua

SEQ ID NO: 1796313 - RNA, 19 nt, Homo sapiens
  misc_RNA (1)...(19): siRNA sense strand
agaaugauaccgaggagua

SEQ ID NO: 1796314 - RNA, 19 nt, Homo sapiens
  misc_RNA (1)...(19): siRNA sense strand
ggaggaggucgaucaaaga

SEQ ID NO: 1796315 - RNA, 19 nt, Homo sapiens
  misc_RNA (1)...(19): siRNA sense strand
ccaaagaugccuugugcuu

SEQ ID NO: 1796316 - RNA, 19 nt, Homo sapiens
  misc_RNA (1)...(19): siRNA sense strand
ccagaaauaccuccagaug

SEQ ID NO: 1796317 - RNA, 19 nt, Homo sapiens
  misc_RNA (1)...(19): siRNA sense strand
aaaucuaucugcaggaugu

SEQ ID NO: 1796318 - RNA, 19 nt, Homo sapiens
  misc_RNA (1)...(19): siRNA sense strand
acaaagagaaagucaaaug

SEQ ID NO: 1796319 - RNA, 19 nt, Homo sapiens
  misc_RNA (1)...(19): siRNA sense strand
uuacagagggaaagaauug

SEQ ID NO: 1796320 - RNA, 19 nt, Homo sapiens
  misc_RNA (1)...(19): siRNA sense strand
gaaagugcaaaguagauuc

SEQ ID NO: 1796321 - RNA, 19 nt, Homo sapiens
  misc_RNA (1)...(19): siRNA sense strand
ugaggaauguacuagaguu

SEQ ID NO: 1796322 - RNA, 19 nt, Homo sapiens
  misc_RNA (1)...(19): siRNA sense strand
gaaauaccuccagauguug

SEQ ID NO: 1796323 - RNA, 19 nt, Homo sapiens
  misc_RNA (1)...(19): siRNA sense strand
ggaaaggcaacccguaaca

SEQ ID NO: 1796324 - RNA, 19 nt, Homo sapiens
  misc_RNA (1)...(19): siRNA sense strand
cugaaguugucaauaauga

SEQ ID NO: 1796325 - RNA, 19 nt, Homo sapiens
  misc_RNA (1)...(19): siRNA sense strand
caaagaacacauuuagaca

SEQ ID NO: 1796326 - RNA, 19 nt, Homo sapiens
  misc_RNA (1)...(19): siRNA sense strand
gaaaggcaacccguaacaa

SEQ ID NO: 1796327 - RNA, 19 nt, Homo sapiens
  misc_RNA (1)...(19): siRNA sense strand
cuaaagaggcacauugaau

SEQ ID NO: 1796328 - RNA, 19 nt, Homo sapiens
  misc_RNA (1)...(19): siRNA sense strand
gaagauuuacagagggaaa

SEQ ID NO: 1796329 - RNA, 19 nt, Homo sapiens
  misc_RNA (1)...(19): siRNA sense strand
aaaggcaacccguaacaaa

SEQ ID NO: 1796330 - RNA, 19 nt, Homo sapiens
  misc_RNA (1)...(19): siRNA sense strand
gcacauugaauucuuggau

SEQ ID NO: 1796331 - RNA, 19 nt, Homo sapiens
  misc_RNA (1)...(19): siRNA sense strand
ggacacauccggauuucag

SEQ ID NO: 1796332 - RNA, 19 nt, Homo sapiens
  misc_RNA (1)...(19): siRNA sense strand
gaggcacauugaauucuug

SEQ ID NO: 1796333 - RNA, 19 nt, Homo sapiens
  misc_RNA (1)...(19): siRNA sense strand
cagaggaugccaaaucuau

SEQ ID NO: 1796334 - RNA, 19 nt, Homo sapiens
  misc_RNA (1)...(19): siRNA sense strand
ggaaguggaacccaagcaa

SEQ ID NO: 1796335 - RNA, 19 nt, Homo sapiens
  misc_RNA (1)...(19): siRNA sense strand
ccaaaucuaucugcaggau

SEQ ID NO: 1796336 - RNA, 19 nt, Homo sapiens
  misc_RNA (1)...(19): siRNA sense strand
ggaggagaacccuuccaaa

SEQ ID NO: 1796337 - RNA, 19 nt, Homo sapiens
  misc_RNA (1)...(19): siRNA sense strand
gaaguggaacccaagcaau

SEQ ID NO: 1796338 - RNA, 19 nt, Homo sapiens
  misc_RNA (1)...(19): siRNA sense strand
gaggaggucgaucaaagaa

SEQ ID NO: 1796339 - RNA, 19 nt, Homo sapiens
  misc_RNA (1)...(19): siRNA sense strand
gagaaagugcaaaguagau

SEQ ID NO: 1796340 - RNA, 19 nt, Homo sapiens
  misc_RNA (1)...(19): siRNA sense strand
gaauaaagaagaggaaagg

SEQ ID NO: 1796341 - RNA, 19 nt, Homo sapiens
  misc_RNA (1)...(19): siRNA sense strand
uuacagaguucuaggaaaa

SEQ ID NO: 1796342 - RNA, 19 nt, Homo sapiens
  misc_RNA (1)...(19): siRNA sense strand
uggagaaagugcaaaguag

SEQ ID NO: 1796343 - RNA, 19 nt, Homo sapiens
  misc_RNA (1)...(19): siRNA sense strand
gacaagcaaccgauaggaa

SEQ ID NO: 1796344 - RNA, 19 nt, Homo sapiens
  misc_RNA (1)...(19): siRNA sense strand
acagaggguucgaggaaga

SEQ ID NO: 1796345 - RNA, 19 nt, Homo sapiens
  misc_RNA (1)...(19): siRNA sense strand
gaggagaacccuuccaaaa

SEQ ID NO: 1796346 - RNA, 19 nt, Homo sapiens
  misc_RNA (1)...(19): siRNA sense strand
gcaccugaaguugucaaua

SEQ ID NO: 1796347 - RNA, 19 nt, Homo sapiens
  misc_RNA (1)...(19): siRNA sense strand
gcaaucccggcuuugauga

SEQ ID NO: 1796348 - RNA, 19 nt, Homo sapiens
  misc_RNA (1)...(19): siRNA sense strand
caaagagaaagucaaaugg

SEQ ID NO: 1796349 - RNA, 19 nt, Homo sapiens
  misc_RNA (1)...(19): siRNA sense strand
ccaagaaagcucauauuuu

SEQ ID NO: 1796350 - RNA, 19 nt, Homo sapiens
  misc_RNA (1)...(19): siRNA sense strand
ggacaccgcagaugaagac

SEQ ID NO: 1796351 - RNA, 19 nt, Homo sapiens
  misc_RNA (1)...(19): siRNA sense strand
ucaaggacaucaacuucag

SEQ ID NO: 1796352 - RNA, 19 nt, Homo sapiens
  misc_RNA (1)...(19): siRNA sense strand
ggcaacccguaacaaagaa

SEQ ID NO: 1796353 - RNA, 19 nt, Homo sapiens
  misc_RNA (1)...(19): siRNA sense strand
cagauguugugacagaaug

SEQ ID NO: 1796354 - RNA, 19 nt, Homo sapiens
  misc_RNA (1)...(19): siRNA sense strand
gaggaagaguuggaacagu

SEQ ID NO: 1796355 - RNA, 19 nt, Homo sapiens
  misc_RNA (1)...(19): siRNA sense strand
cuccagauguugugacaga

SEQ ID NO: 1796356 - RNA, 19 nt, Homo sapiens
  misc_RNA (1)...(19): siRNA sense strand
acaaagaacacauuuagac

SEQ ID NO: 1796357 - RNA, 19 nt, Homo sapiens
  misc_RNA (1)...(19): siRNA sense strand
cuauggcucuaaaugagaa

SEQ ID NO: 1796358 - RNA, 19 nt, Homo sapiens
  misc_RNA (1)...(19): siRNA sense strand
gcaggauguuacucaccaa

SEQ ID NO: 1796359 - RNA, 19 nt, Homo sapiens
  misc_RNA (1)...(19): siRNA sense strand
ggaugcaguggcagaauau

SEQ ID NO: 1796360 - RNA, 19 nt, Homo sapiens
  misc_RNA (1)...(19): siRNA sense strand
cuugaagccugagaauauu

SEQ ID NO: 1796361 - RNA, 19 nt, Homo sapiens
  misc_RNA (1)...(19): siRNA sense strand
cagaaauaccuccagaugu

SEQ ID NO: 1796362 - RNA, 19 nt, Homo sapiens
  misc_RNA (1)...(19): siRNA sense strand
ccucaugccguuuacugua

SEQ ID NO: 1796363 - RNA, 19 nt, Homo sapiens
  misc_RNA (1)...(19): siRNA sense strand
gcugucugaucuaugaaau

SEQ ID NO: 1796364 - RNA, 19 nt, Homo sapiens
  misc_RNA (1)...(19): siRNA sense strand
uaguuuagccuacgcuuau

SEQ ID NO: 1796365 - RNA, 19 nt, Homo sapiens
  misc_RNA (1)...(19): siRNA sense strand
aaagaggcacauugaauuc

SEQ ID NO: 1796366 - RNA, 19 nt, Homo sapiens
  misc_RNA (1)...(19): siRNA sense strand
accaagaaagcucauauuu

SEQ ID NO: 1796367 - RNA, 19 nt, Homo sapiens
  misc_RNA (1)...(19): siRNA sense strand
agaggcacauugaauucuu

SEQ ID NO: 1796368 - RNA, 19 nt, Homo sapiens
  misc_RNA (1)...(19): siRNA sense strand
guucaaggacaucaacuuc

SEQ ID NO: 1796369 - RNA, 19 nt, Homo sapiens
  misc_RNA (1)...(19): siRNA sense strand
gauuucagaccucgguuug

SEQ ID NO: 1796370 - RNA, 19 nt, Homo sapiens
  misc_RNA (1)...(19): siRNA sense strand
acuugaagccugagaauau

SEQ ID NO: 1796371 - RNA, 19 nt, Homo sapiens
  misc_RNA (1)...(19): siRNA sense strand
caagugcgagccacaggaa

SEQ ID NO: 1796372 - RNA, 19 nt, Homo sapiens
  misc_RNA (1)...(19): siRNA sense strand
gaagaggaaaggugaagcu

SEQ ID NO: 1796373 - RNA, 19 nt, Homo sapiens
  misc_RNA (1)...(19): siRNA sense strand
cauggcaccugaaguuguc

SEQ ID NO: 1796374 - RNA, 19 nt, Homo sapiens
  misc_RNA (1)...(19): siRNA sense strand
ggauuucagaccucgguuu

SEQ ID NO: 1796375 - RNA, 19 nt, Homo sapiens
  misc_RNA (1)...(19): siRNA sense strand
caagcaaccgauaggaaga

SEQ ID NO: 1796376 - RNA, 19 nt, Homo sapiens
  misc_RNA (1)...(19): siRNA sense strand
gaggaugccaaaucuaucu

SEQ ID NO: 1796377 - RNA, 19 nt, Homo sapiens
  misc_RNA (1)...(19): siRNA sense strand
gaacagagauuuaggaaga

SEQ ID NO: 1796378 - RNA, 19 nt, Homo sapiens
  misc_RNA (1)...(19): siRNA sense strand
gaaaugaucuccugucaag

SEQ ID NO: 1796379 - RNA, 19 nt, Homo sapiens
  misc_RNA (1)...(19): siRNA sense strand
ccgaagaccucaugaauuu

SEQ ID NO: 1796380 - RNA, 19 nt, Homo sapiens
  misc_RNA (1)...(19): siRNA sense strand
ggaaacacauaccaaacua

SEQ ID NO: 1796381 - RNA, 19 nt, Homo sapiens
  misc_RNA (1)...(19): siRNA sense strand
gcagagaucucaauaagag

SEQ ID NO: 1796382 - RNA, 19 nt, Homo sapiens
  misc_RNA (1)...(19): siRNA sense strand
gaacgaagguaugcuaaug

SEQ ID NO: 1796383 - RNA, 19 nt, Homo sapiens
  misc_RNA (1)...(19): siRNA sense strand
ggagagagaugauuuaaaa

SEQ ID NO: 1796384 - RNA, 19 nt, Homo sapiens
  misc_RNA (1)...(19): siRNA sense strand
ccacaaaguuucaccaaga

SEQ ID NO: 1796385 - RNA, 19 nt, Homo sapiens
  misc_RNA (1)...(19): siRNA sense strand
gaucuccugucaagaguua

SEQ ID NO: 1796386 - RNA, 19 nt, Homo sapiens
  misc_RNA (1)...(19): siRNA sense strand
gaagaggagcugcaagaua

SEQ ID NO: 1796387 - RNA, 19 nt, Homo sapiens
  misc_RNA (1)...(19): siRNA sense strand
caagagaaguggaugcauu

SEQ ID NO: 1796388 - RNA, 19 nt, Homo sapiens
  misc_RNA (1)...(19): siRNA sense strand
agaagacgcuuucaacaaa

SEQ ID NO: 1796389 - RNA, 19 nt, Homo sapiens
  misc_RNA (1)...(19): siRNA sense strand
cuaaagagcuagaacaugu

SEQ ID NO: 1796390 - RNA, 19 nt, Homo sapiens
  misc_RNA (1)...(19): siRNA sense strand
caagaaugcuacucucuga

SEQ ID NO: 1796391 - RNA, 19 nt, Homo sapiens
  misc_RNA (1)...(19): siRNA sense strand
uggcgaagcucaccaauga

SEQ ID NO: 1796392 - RNA, 19 nt, Homo sapiens
  misc_RNA (1)...(19): siRNA sense strand
uuaaggagcucucucaaga

SEQ ID NO: 1796393 - RNA, 19 nt, Homo sapiens
  misc_RNA (1)...(19): siRNA sense strand
gaaauccacaacagcauua

SEQ ID NO: 1796394 - RNA, 19 nt, Homo sapiens
  misc_RNA (1)...(19): siRNA sense strand
uaucauggcugaaguggaa

SEQ ID NO: 1796395 - RNA, 19 nt, Homo sapiens
  misc_RNA (1)...(19): siRNA sense strand
gaaaagauguacagcguaa

SEQ ID NO: 1796396 - RNA, 19 nt, Homo sapiens
  misc_RNA (1)...(19): siRNA sense strand
gcacucagccggcagauug

SEQ ID NO: 1796397 - RNA, 19 nt, Homo sapiens
  misc_RNA (1)...(19): siRNA sense strand
cuaaagaaguucagacaga

SEQ ID NO: 1796398 - RNA, 19 nt, Homo sapiens
  misc_RNA (1)...(19): siRNA sense strand
aagaggagcugcaagauau

SEQ ID NO: 1796399 - RNA, 19 nt, Homo sapiens
  misc_RNA (1)...(19): siRNA sense strand
caaagcaguugucucaaga

SEQ ID NO: 1796400 - RNA, 19 nt, Homo sapiens
  misc_RNA (1)...(19): siRNA sense strand
ugaaagccauugaggauga

SEQ ID NO: 1796401 - RNA, 19 nt, Homo sapiens
  misc_RNA (1)...(19): siRNA sense strand
gcagauugaugaguuagaa

SEQ ID NO: 1796402 - RNA, 19 nt, Homo sapiens
  misc_RNA (1)...(19): siRNA sense strand
acaaacaggucuuuacgaa

SEQ ID NO: 1796403 - RNA, 19 nt, Homo sapiens
  misc_RNA (1)...(19): siRNA sense strand
uccaagagcugaccacaaa

SEQ ID NO: 1796404 - RNA, 19 nt, Homo sapiens
  misc_RNA (1)...(19): siRNA sense strand
gcacagcucacccuucaaa

SEQ ID NO: 1796405 - RNA, 19 nt, Homo sapiens
  misc_RNA (1)...(19): siRNA sense strand
acaaugaaccaccugauua

SEQ ID NO: 1796406 - RNA, 19 nt, Homo sapiens
  misc_RNA (1)...(19): siRNA sense strand
gaccacaaaugcaaaggaa

SEQ ID NO: 1796407 - RNA, 19 nt, Homo sapiens
  misc_RNA (1)...(19): siRNA sense strand
agucaucaauggucaguua

SEQ ID NO: 1796408 - RNA, 19 nt, Homo sapiens
  misc_RNA (1)...(19): siRNA sense strand
uaaagaaguucagacagaa

SEQ ID NO: 1796409 - RNA, 19 nt, Homo sapiens
  misc_RNA (1)...(19): siRNA sense strand
aagaaaggaugaccacaaa

SEQ ID NO: 1796410 - RNA, 19 nt, Homo sapiens
  misc_RNA (1)...(19): siRNA sense strand
aaacaggaacagagauuua

SEQ ID NO: 1796411 - RNA, 19 nt, Homo sapiens
  misc_RNA (1)...(19): siRNA sense strand
gggcagccacuucauauaa

SEQ ID NO: 1796412 - RNA, 19 nt, Homo sapiens
  misc_RNA (1)...(19): siRNA sense strand
gaucugugcuguccuucaa

SEQ ID NO: 1796413 - RNA, 19 nt, Homo sapiens
  misc_RNA (1)...(19): siRNA sense strand
gugcagagaucucaauaag

SEQ ID NO: 1796414 - RNA, 19 nt, Homo sapiens
  misc_RNA (1)...(19): siRNA sense strand
cagaagcaguagacaauga

SEQ ID NO: 1796415 - RNA, 19 nt, Homo sapiens
  misc_RNA (1)...(19): siRNA sense strand
ggagcucucucaagaagug

SEQ ID NO: 1796416 - RNA, 19 nt, Homo sapiens
  misc_RNA (1)...(19): siRNA sense strand
gaagagaaaggaaaugauc

SEQ ID NO: 1796417 - RNA, 19 nt, Homo sapiens
  misc_RNA (1)...(19): siRNA sense strand
agacagaauucacucuaaa

SEQ ID NO: 1796418 - RNA, 19 nt, Homo sapiens
  misc_RNA (1)...(19): siRNA sense strand
gaaagcggaagaagagaaa

SEQ ID NO: 1796419 - RNA, 19 nt, Homo sapiens
  misc_RNA (1)...(19): siRNA sense strand
gacugaaacugaagcuaaa

SEQ ID NO: 1796420 - RNA, 19 nt, Homo sapiens
  misc_RNA (1)...(19): siRNA sense strand
caaacuagcccuugcugaa

SEQ ID NO: 1796421 - RNA, 19 nt, Homo sapiens
  misc_RNA (1)...(19): siRNA sense strand
uggaaacgcugguaucaug

SEQ ID NO: 1796422 - RNA, 19 nt, Homo sapiens
  misc_RNA (1)...(19): siRNA sense strand
aaaccucacuaaggaguua

SEQ ID NO: 1796423 - RNA, 19 nt, Homo sapiens
  misc_RNA (1)...(19): siRNA sense strand
uaacugugauguuuguaga

SEQ ID NO: 1796424 - RNA, 19 nt, Homo sapiens
  misc_RNA (1)...(19): siRNA sense strand
uaacagaaagcuauggauu

SEQ ID NO: 1796425 - RNA, 19 nt, Homo sapiens
  misc_RNA (1)...(19): siRNA sense strand
gaagcuaaaggacaugaaa

SEQ ID NO: 1796426 - RNA, 19 nt, Homo sapiens
  misc_RNA (1)...(19): siRNA sense strand
caacagcauuacaccaaga

SEQ ID NO: 1796427 - RNA, 19 nt, Homo sapiens
  misc_RNA (1)...(19): siRNA sense strand
caaggagagagaugauuua

SEQ ID NO: 1796428 - RNA, 19 nt, Homo sapiens
  misc_RNA (1)...(19): siRNA sense strand
caaccagacuagagaagga

SEQ ID NO: 1796429 - RNA, 19 nt, Homo sapiens
  misc_RNA (1)...(19): siRNA sense strand
caaggcauguccccaauua

SEQ ID NO: 1796430 - RNA, 19 nt, Homo sapiens
  misc_RNA (1)...(19): siRNA sense strand
uaaacccaaugccaacuuu

SEQ ID NO: 1796431 - RNA, 19 nt, Homo sapiens
  misc_RNA (1)...(19): siRNA sense strand
ggagggccaucuucagaau

SEQ ID NO: 1796432 - RNA, 19 nt, Homo sapiens
  misc_RNA (1)...(19): siRNA sense strand
gucaagaguuaauauguug

SEQ ID NO: 1796433 - RNA, 19 nt, Homo sapiens
  misc_RNA (1)...(19): siRNA sense strand
aaacaggucuuuacgaaaa

SEQ ID NO: 1796434 - RNA, 19 nt, Homo sapiens
  misc_RNA (1)...(19): siRNA sense strand
ggaagaagagaaaggaaau

SEQ ID NO: 1796435 - RNA, 19 nt, Homo sapiens
  misc_RNA (1)...(19): siRNA sense strand
ccucaugaauuuagaacaa

SEQ ID NO: 1796436 - RNA, 19 nt, Homo sapiens
  misc_RNA (1)...(19): siRNA sense strand
ucaauggucaguuauauga

SEQ ID NO: 1796437 - RNA, 19 nt, Homo sapiens
  misc_RNA (1)...(19): siRNA sense strand
caucaauggucaguuauau

SEQ ID NO: 1796438 - RNA, 19 nt, Homo sapiens
  misc_RNA (1)...(19): siRNA sense strand
aaagggcgcucaaguccaa

SEQ ID NO: 1796439 - RNA, 19 nt, Homo sapiens
  misc_RNA (1)...(19): siRNA sense strand
gaagaccucaugaauuuag

SEQ ID NO: 1796440 - RNA, 19 nt, Homo sapiens
  misc_RNA (1)...(19): siRNA sense strand
ccaaggagagagaugauuu

SEQ ID NO: 1796441 - RNA, 19 nt, Homo sapiens
  misc_RNA (1)...(19): siRNA sense strand
caaaaccgauguagaagaa

SEQ ID NO: 1796442 - RNA, 19 nt, Homo sapiens
  misc_RNA (1)...(19): siRNA sense strand
gcagaaggcaaccagacua

SEQ ID NO: 1796443 - RNA, 19 nt, Homo sapiens
  misc_RNA (1)...(19): siRNA sense strand
caagaccaagacacaauua

SEQ ID NO: 1796444 - RNA, 19 nt, Homo sapiens
  misc_RNA (1)...(19): siRNA sense strand
aaacacagccacucuugaa

SEQ ID NO: 1796445 - RNA, 19 nt, Homo sapiens
  misc_RNA (1)...(19): siRNA sense strand
ggcagccacuucauauaaa

SEQ ID NO: 1796446 - RNA, 19 nt, Homo sapiens
  misc_RNA (1)...(19): siRNA sense strand
cauggcaacugaagaccua

SEQ ID NO: 1796447 - RNA, 19 nt, Homo sapiens
  misc_RNA (1)...(19): siRNA sense strand
guggaaagacugaaacuga

SEQ ID NO: 1796448 - RNA, 19 nt, Homo sapiens
  misc_RNA (1)...(19): siRNA sense strand
ggaaauccacaacagcauu

SEQ ID NO: 1796449 - RNA, 19 nt, Homo sapiens
  misc_RNA (1)...(19): siRNA sense strand
gcuagaagccauugaaagu

SEQ ID NO: 1796450 - RNA, 19 nt, Homo sapiens
  misc_RNA (1)...(19): siRNA sense strand
gaaagggagacguuacaga

SEQ ID NO: 1796451 - RNA, 19 nt, Homo sapiens
  misc_RNA (1)...(19): siRNA sense strand
gaacgugcagucaucaaug

SEQ ID NO: 1796452 - RNA, 19 nt, Homo sapiens
  misc_RNA (1)...(19): siRNA sense strand
gacagaagcaguagacaau

SEQ ID NO: 1796453 - RNA, 19 nt, Homo sapiens
  misc_RNA (1)...(19): siRNA sense strand
uggaagcaauugagaaaga

SEQ ID NO: 1796454 - RNA, 19 nt, Homo sapiens
  misc_RNA (1)...(19): siRNA sense strand
gaaugcuacucucugaaau

SEQ ID NO: 1796455 - RNA, 19 nt, Homo sapiens
  misc_RNA (1)...(19): siRNA sense strand
gcuacucucugaaaugcaa

SEQ ID NO: 1796456 - RNA, 19 nt, Homo sapiens
  misc_RNA (1)...(19): siRNA sense strand
cugaagaccuaauauguca

SEQ ID NO: 1796457 - RNA, 19 nt, Homo sapiens
  misc_RNA (1)...(19): siRNA sense strand
caacugaagaccuaauaug

SEQ ID NO: 1796458 - RNA, 19 nt, Homo sapiens
  misc_RNA (1)...(19): siRNA sense strand
ggaaaacaaugagugaaaa

SEQ ID NO: 1796459 - RNA, 19 nt, Homo sapiens
  misc_RNA (1)...(19): siRNA sense strand
aaacgcagaccacaaaguu

SEQ ID NO: 1796460 - RNA, 19 nt, Homo sapiens
  misc_RNA (1)...(19): siRNA sense strand
gagaaguggaugcauuaaa

SEQ ID NO: 1796461 - RNA, 19 nt, Homo sapiens
  misc_RNA (1)...(19): siRNA sense strand
uggaaagacugaaacugaa

SEQ ID NO: 1796462 - RNA, 19 nt, Homo sapiens
  misc_RNA (1)...(19): siRNA sense strand
ggaagcaauugagaaagau

SEQ ID NO: 1796463 - RNA, 19 nt, Homo sapiens
  misc_RNA (1)...(19): siRNA sense strand
guuuguagaugaacggaaa

SEQ ID NO: 1796464 - RNA, 19 nt, Homo sapiens
  misc_RNA (1)...(19): siRNA sense strand
cggcacagcucacccuuca

SEQ ID NO: 1796465 - RNA, 19 nt, Homo sapiens
  misc_RNA (1)...(19): siRNA sense strand
gacaaugaaccaccugauu

SEQ ID NO: 1796466 - RNA, 19 nt, Homo sapiens
  misc_RNA (1)...(19): siRNA sense strand
gaggagcagugcagagauc

SEQ ID NO: 1796467 - RNA, 19 nt, Homo sapiens
  misc_RNA (1)...(19): siRNA sense strand
ucuacuccauguccuguua

SEQ ID NO: 1796468 - RNA, 19 nt, Homo sapiens
  misc_RNA (1)...(19): siRNA sense strand
gagcugaccacaaaugcaa

SEQ ID NO: 1796469 - RNA, 19 nt, Homo sapiens
  misc_RNA (1)...(19): siRNA sense strand
gaagagagauugaaaaccu

SEQ ID NO: 1796470 - RNA, 19 nt, Homo sapiens
  misc_RNA (1)...(19): siRNA sense strand
gcuagaacauguuaaaaug

SEQ ID NO: 1796471 - RNA, 19 nt, Homo sapiens
  misc_RNA (1)...(19): siRNA sense strand
agacugaaacugaagcuaa

SEQ ID NO: 1796472 - RNA, 19 nt, Homo sapiens
  misc_RNA (1)...(19): siRNA sense strand
aaagagcuagaacauguua

SEQ ID NO: 1796473 - RNA, 19 nt, Homo sapiens
  misc_RNA (1)...(19): siRNA sense strand
uuagagagguaccggcauu

SEQ ID NO: 1796474 - RNA, 19 nt, Homo sapiens
  misc_RNA (1)...(19): siRNA sense strand
augaauacauggcaacuga

SEQ ID NO: 1796475 - RNA, 19 nt, Homo sapiens
  misc_RNA (1)...(19): siRNA sense strand
ccacuucauauaaagguua

SEQ ID NO: 1796476 - RNA, 19 nt, Homo sapiens
  misc_RNA (1)...(19): siRNA sense strand
aaaggaaacacauaccaaa

SEQ ID NO: 1796477 - RNA, 19 nt, Homo sapiens
  misc_RNA (1)...(19): siRNA sense strand
gaacagagauuuaggaaga

SEQ ID NO: 1796478 - RNA, 19 nt, Homo sapiens
  misc_RNA (1)...(19): siRNA sense strand
gaaaugaucuccugucaag

SEQ ID NO: 1796479 - RNA, 19 nt, Homo sapiens
  misc_RNA (1)...(19): siRNA sense strand
ugaccaagcugaagucuuu

SEQ ID NO: 1796480 - RNA, 19 nt, Homo sapiens
  misc_RNA (1)...(19): siRNA sense strand
gcagagaucucaauaagag

SEQ ID NO: 1796481 - RNA, 19 nt, Homo sapiens
  misc_RNA (1)...(19): siRNA sense strand
ggaaacacauaccaaacua

SEQ ID NO: 1796482 - RNA, 19 nt, Homo sapiens
  misc_RNA (1)...(19): siRNA sense strand
gaacgaagguaugcuaaug

SEQ ID NO: 1796483 - RNA, 19 nt, Homo sapiens
  misc_RNA (1)...(19): siRNA sense strand
ggagagagaugauuuaaaa

SEQ ID NO: 1796484 - RNA, 19 nt, Homo sapiens
  misc_RNA (1)...(19): siRNA sense strand
ccacaaaguuucaccaaga

SEQ ID NO: 1796485 - RNA, 19 nt, Homo sapiens
  misc_RNA (1)...(19): siRNA sense strand
gaucuccugucaagaguua

SEQ ID NO: 1796486 - RNA, 19 nt, Homo sapiens
  misc_RNA (1)...(19): siRNA sense strand
gaagcuaauugaucaagaa

SEQ ID NO: 1796487 - RNA, 19 nt, Homo sapiens
  misc_RNA (1)...(19): siRNA sense strand
gaagaggagcugcaagaua

SEQ ID NO: 1796488 - RNA, 19 nt, Homo sapiens
  misc_RNA (1)...(19): siRNA sense strand
caagagaaguggaugcauu

SEQ ID NO: 1796489 - RNA, 19 nt, Homo sapiens
  misc_RNA (1)...(19): siRNA sense strand
agaagacgcuuucaacaaa

SEQ ID NO: 1796490 - RNA, 19 nt, Homo sapiens
  misc_RNA (1)...(19): siRNA sense strand
cuaaagagcuagaacaugu

SEQ ID NO: 1796491 - RNA, 19 nt, Homo sapiens
  misc_RNA (1)...(19): siRNA sense strand
caagaaugcuacucucuga

SEQ ID NO: 1796492 - RNA, 19 nt, Homo sapiens
  misc_RNA (1)...(19): siRNA sense strand
uggcgaagcucaccaauga

SEQ ID NO: 1796493 - RNA, 19 nt, Homo sapiens
  misc_RNA (1)...(19): siRNA sense strand
uuaaggagcucucucaaga

SEQ ID NO: 1796494 - RNA, 19 nt, Homo sapiens
  misc_RNA (1)...(19): siRNA sense strand
gaaauccacaacagcauua

SEQ ID NO: 1796495 - RNA, 19 nt, Homo sapiens
  misc_RNA (1)...(19): siRNA sense strand
uaucauggcugaaguggaa

SEQ ID NO: 1796496 - RNA, 19 nt, Homo sapiens
  misc_RNA (1)...(19): siRNA sense strand
gaaaagauguacagcguaa

SEQ ID NO: 1796497 - RNA, 19 nt, Homo sapiens
  misc_RNA (1)...(19): siRNA sense strand
gcacucagccggcagauug

SEQ ID NO: 1796498 - RNA, 19 nt, Homo sapiens
  misc_RNA (1)...(19): siRNA sense strand
aagaggagcugcaagauau

SEQ ID NO: 1796499 - RNA, 19 nt, Homo sapiens
  misc_RNA (1)...(19): siRNA sense strand
caaagcaguugucucaaga

SEQ ID NO: 1796500 - RNA, 19 nt, Homo sapiens
  misc_RNA (1)...(19): siRNA sense strand
ugaaagccauugaggauga

SEQ ID NO: 1796501 - RNA, 19 nt, Homo sapiens
  misc_RNA (1)...(19): siRNA sense strand
gcagauugaugaguuagaa

SEQ ID NO: 1796502 - RNA, 19 nt, Homo sapiens
  misc_RNA (1)...(19): siRNA sense strand
acaaacaggucuuuacgaa

SEQ ID NO: 1796503 - RNA, 19 nt, Homo sapiens
  misc_RNA (1)...(19): siRNA sense strand
gcacagcucacccuucaaa

SEQ ID NO: 1796504 - RNA, 19 nt, Homo sapiens
  misc_RNA (1)...(19): siRNA sense strand
gcuaauugaucaagaaauc

SEQ ID NO: 1796505 - RNA, 19 nt, Homo sapiens
  misc_RNA (1)...(19): siRNA sense strand
uccaagagcugaccacaaa

SEQ ID NO: 1796506 - RNA, 19 nt, Homo sapiens
  misc_RNA (1)...(19): siRNA sense strand
gaccacaaaugcaaaggaa

SEQ ID NO: 1796507 - RNA, 19 nt, Homo sapiens
  misc_RNA (1)...(19): siRNA sense strand
aagaaaggaugaccacaaa

SEQ ID NO: 1796508 - RNA, 19 nt, Homo sapiens
  misc_RNA (1)...(19): siRNA sense strand
aaacaggaacagagauuua

SEQ ID NO: 1796509 - RNA, 19 nt, Homo sapiens
  misc_RNA (1)...(19): siRNA sense strand
gugcagagaucucaauaag

SEQ ID NO: 1796510 - RNA, 19 nt, Homo sapiens
  misc_RNA (1)...(19): siRNA sense strand
ggagcucucucaagaagug

SEQ ID NO: 1796511 - RNA, 19 nt, Homo sapiens
  misc_RNA (1)...(19): siRNA sense strand
gaagagaaaggaaaugauc

SEQ ID NO: 1796512 - RNA, 19 nt, Homo sapiens
  misc_RNA (1)...(19): siRNA sense strand
agacagaauucacucuaaa

SEQ ID NO: 1796513 - RNA, 19 nt, Homo sapiens
  misc_RNA (1)...(19): siRNA sense strand
gaaagcggaagaagagaaa

SEQ ID NO: 1796514 - RNA, 19 nt, Homo sapiens
  misc_RNA (1)...(19): siRNA sense strand
gacugaaacugaagcuaaa

SEQ ID NO: 1796515 - RNA, 19 nt, Homo sapiens
  misc_RNA (1)...(19): siRNA sense strand
caaacuagcccuugcugaa

SEQ ID NO: 1796516 - RNA, 19 nt, Homo sapiens
  misc_RNA (1)...(19): siRNA sense strand
uggaaacgcugguaucaug

SEQ ID NO: 1796517 - RNA, 19 nt, Homo sapiens
  misc_RNA (1)...(19): siRNA sense strand
uaacugugauguuuguaga

SEQ ID NO: 1796518 - RNA, 19 nt, Homo sapiens
  misc_RNA (1)...(19): siRNA sense strand
gaagcuaaaggacaugaaa

SEQ ID NO: 1796519 - RNA, 19 nt, Homo sapiens
  misc_RNA (1)...(19): siRNA sense strand
caacagcauuacaccaaga

SEQ ID NO: 1796520 - RNA, 19 nt, Homo sapiens
  misc_RNA (1)...(19): siRNA sense strand
caaggagagagaugauuua

SEQ ID NO: 1796521 - RNA, 19 nt, Homo sapiens
  misc_RNA (1)...(19): siRNA sense strand
caaccagacuagagaagga

SEQ ID NO: 1796522 - RNA, 19 nt, Homo sapiens
  misc_RNA (1)...(19): siRNA sense strand
gucaagaguuaauauguug

SEQ ID NO: 1796523 - RNA, 19 nt, Homo sapiens
  misc_RNA (1)...(19): siRNA sense strand
aaacaggucuuuacgaaaa

SEQ ID NO: 1796524 - RNA, 19 nt, Homo sapiens
  misc_RNA (1)...(19): siRNA sense strand
ggaagaagagaaaggaaau

SEQ ID NO: 1796525 - RNA, 19 nt, Homo sapiens
  misc_RNA (1)...(19): siRNA sense strand
gcagaaggcaaccagacua

SEQ ID NO: 1796526 - RNA, 19 nt, Homo sapiens
  misc_RNA (1)...(19): siRNA sense strand
ccaaggagagagaugauuu

SEQ ID NO: 1796527 - RNA, 19 nt, Homo sapiens
  misc_RNA (1)...(19): siRNA sense strand
caaaaccgauguagaagaa

SEQ ID NO: 1796528 - RNA, 19 nt, Homo sapiens
  misc_RNA (1)...(19): siRNA sense strand
aaagggcgcucaaguccaa

SEQ ID NO: 1796529 - RNA, 19 nt, Homo sapiens
  misc_RNA (1)...(19): siRNA sense strand
caagaccaagacacaauua

SEQ ID NO: 1796530 - RNA, 19 nt, Homo sapiens
  misc_RNA (1)...(19): siRNA sense strand
cauggcaacugaagaccua

SEQ ID NO: 1796531 - RNA, 19 nt, Homo sapiens
  misc_RNA (1)...(19): siRNA sense strand
guggaaagacugaaacuga

SEQ ID NO: 1796532 - RNA, 19 nt, Homo sapiens
  misc_RNA (1)...(19): siRNA sense strand
ggaaauccacaacagcauu

SEQ ID NO: 1796533 - RNA, 19 nt, Homo sapiens
  misc_RNA (1)...(19): siRNA sense strand
gcuagaagccauugaaagu

SEQ ID NO: 1796534 - RNA, 19 nt, Homo sapiens
  misc_RNA (1)...(19): siRNA sense strand
gaaagggagacguuacaga

SEQ ID NO: 1796535 - RNA, 19 nt, Homo sapiens
  misc_RNA (1)...(19): siRNA sense strand
uggaagcaauugagaaaga

SEQ ID NO: 1796536 - RNA, 19 nt, Homo sapiens
  misc_RNA (1)...(19): siRNA sense strand
gaaugcuacucucugaaau

SEQ ID NO: 1796537 - RNA, 19 nt, Homo sapiens
  misc_RNA (1)...(19): siRNA sense strand
gcuacucucugaaaugcaa

SEQ ID NO: 1796538 - RNA, 19 nt, Homo sapiens
  misc_RNA (1)...(19): siRNA sense strand
cugaagaccuaauauguca

SEQ ID NO: 1796539 - RNA, 19 nt, Homo sapiens
  misc_RNA (1)...(19): siRNA sense strand
caacugaagaccuaauaug

SEQ ID NO: 1796540 - RNA, 19 nt, Homo sapiens
  misc_RNA (1)...(19): siRNA sense strand
ggaaaacaaugagugaaaa

SEQ ID NO: 1796541 - RNA, 19 nt, Homo sapiens
  misc_RNA (1)...(19): siRNA sense strand
aaacgcagaccacaaaguu

SEQ ID NO: 1796542 - RNA, 19 nt, Homo sapiens
  misc_RNA (1)...(19): siRNA sense strand
gagaaguggaugcauuaaa

SEQ ID NO: 1796543 - RNA, 19 nt, Homo sapiens
  misc_RNA (1)...(19): siRNA sense strand
uggaaagacugaaacugaa

SEQ ID NO: 1796544 - RNA, 19 nt, Homo sapiens
  misc_RNA (1)...(19): siRNA sense strand
ggaagcaauugagaaagau

SEQ ID NO: 1796545 - RNA, 19 nt, Homo sapiens
  misc_RNA (1)...(19): siRNA sense strand
guuuguagaugaacggaaa

SEQ ID NO: 1796546 - RNA, 19 nt, Homo sapiens
  misc_RNA (1)...(19): siRNA sense strand
cggcacagcucacccuuca

SEQ ID NO: 1796547 - RNA, 19 nt, Homo sapiens
  misc_RNA (1)...(19): siRNA sense strand
gaggagcagugcagagauc

SEQ ID NO: 1796548 - RNA, 19 nt, Homo sapiens
  misc_RNA (1)...(19): siRNA sense strand
gcuagaacauguuaaaaug

SEQ ID NO: 1796549 - RNA, 19 nt, Homo sapiens
  misc_RNA (1)...(19): siRNA sense strand
agacugaaacugaagcuaa

SEQ ID NO: 1796550 - RNA, 19 nt, Homo sapiens
  misc_RNA (1)...(19): siRNA sense strand
gagcugaccacaaaugcaa

SEQ ID NO: 1796551 - RNA, 19 nt, Homo sapiens
  misc_RNA (1)...(19): siRNA sense strand
aaagagcuagaacauguua

SEQ ID NO: 1796552 - RNA, 19 nt, Homo sapiens
  misc_RNA (1)...(19): siRNA sense strand
aaaggaaacacauaccaaa

SEQ ID NO: 1796553 - RNA, 19 nt, Homo sapiens
  misc_RNA (1)...(19): siRNA sense strand
augaauacauggcaacuga

SEQ ID NO: 1796554 - RNA, 19 nt, Homo sapiens
  misc_RNA (1)...(19): siRNA sense strand
aagagaaguggaugcauua

SEQ ID NO: 1796555 - RNA, 19 nt, Homo sapiens
  misc_RNA (1)...(19): siRNA sense strand
aagacagaauucacucuaa

SEQ ID NO: 1796556 - RNA, 19 nt, Homo sapiens
  misc_RNA (1)...(19): siRNA sense strand
agggagacguuacagagua

SEQ ID NO: 1796557 - RNA, 19 nt, Homo sapiens
  misc_RNA (1)...(19): siRNA sense strand
caaaggaaacacauaccaa

SEQ ID NO: 1796558 - RNA, 19 nt, Homo sapiens
  misc_RNA (1)...(19): siRNA sense strand
ggugguggaugaacagcaa

SEQ ID NO: 1796559 - RNA, 19 nt, Homo sapiens
  misc_RNA (1)...(19): siRNA sense strand
uagaagacgcuuucaacaa

SEQ ID NO: 1796560 - RNA, 19 nt, Homo sapiens
  misc_RNA (1)...(19): siRNA sense strand
agaaguggaugcauuaaaa

SEQ ID NO: 1796561 - RNA, 19 nt, Homo sapiens
  misc_RNA (1)...(19): siRNA sense strand
gagcuagaagccauugaaa

SEQ ID NO: 1796562 - RNA, 19 nt, Homo sapiens
  misc_RNA (1)...(19): siRNA sense strand
gaaaggaugaccacaaagc

SEQ ID NO: 1796563 - RNA, 19 nt, Homo sapiens
  misc_RNA (1)...(19): siRNA sense strand
cagaagaggagcugcaaga

SEQ ID NO: 1796564 - RNA, 19 nt, Homo sapiens
  misc_RNA (1)...(19): siRNA sense strand
gaagacgcuuucaacaaaa

SEQ ID NO: 1796565 - RNA, 19 nt, Homo sapiens
  misc_RNA (1)...(19): siRNA sense strand
gaccaagacacaauuaugg

SEQ ID NO: 1796566 - RNA, 19 nt, Homo sapiens
  misc_RNA (1)...(19): siRNA sense strand
caagagcugaccacaaaug

SEQ ID NO: 1796567 - RNA, 19 nt, Homo sapiens
  misc_RNA (1)...(19): siRNA sense strand
agacagagaccagccauga

SEQ ID NO: 1796568 - RNA, 19 nt, Homo sapiens
  misc_RNA (1)...(19): siRNA sense strand
aaagaaaggaugaccacaa

SEQ ID NO: 1796569 - RNA, 19 nt, Homo sapiens
  misc_RNA (1)...(19): siRNA sense strand
ugaaagaggagcugaccaa

SEQ ID NO: 1796570 - RNA, 19 nt, Homo sapiens
  misc_RNA (1)...(19): siRNA sense strand
caaacaggucuuuacgaaa

SEQ ID NO: 1796571 - RNA, 19 nt, Homo sapiens
  misc_RNA (1)...(19): siRNA sense strand
gccggcagauugaugaguu

SEQ ID NO: 1796572 - RNA, 19 nt, Homo sapiens
  misc_RNA (1)...(19): siRNA sense strand
ggaaaugaucuccugucaa

SEQ ID NO: 1796573 - RNA, 19 nt, Homo sapiens
  misc_RNA (1)...(19): siRNA sense strand
cauuaacugugauguuugu

SEQ ID NO: 1796574 - RNA, 19 nt, Homo sapiens
  misc_RNA (1)...(19): siRNA sense strand
gaggagaaggagcaagaaa

SEQ ID NO: 1796575 - RNA, 19 nt, Homo sapiens
  misc_RNA (1)...(19): siRNA sense strand
gaggagcugcaagauauaa

SEQ ID NO: 1796576 - RNA, 19 nt, Homo sapiens
  misc_RNA (1)...(19): siRNA sense strand
gaaaacaggaacagagauu

SEQ ID NO: 1796577 - RNA, 19 nt, Homo sapiens
  misc_RNA (1)...(19): siRNA sense strand
gagaaacagcuuuaucgua

SEQ ID NO: 1796578 - RNA, 19 nt, Homo sapiens
  misc_RNA (1)...(19): siRNA sense strand
gaaacagcuuuaucguaga

SEQ ID NO: 1796579 - RNA, 19 nt, Homo sapiens
  misc_RNA (1)...(19): siRNA sense strand
gaacagguggcccgauuau

SEQ ID NO: 1796580 - RNA, 19 nt, Homo sapiens
  misc_RNA (1)...(19): siRNA sense strand
gagcaucagcuucuucuug

SEQ ID NO: 1796581 - RNA, 19 nt, Homo sapiens
  misc_RNA (1)...(19): siRNA sense strand
cacaacaugucugaugaua

SEQ ID NO: 1796582 - RNA, 19 nt, Homo sapiens
  misc_RNA (1)...(19): siRNA sense strand
caacaugucugaugauacc

SEQ ID NO: 1796583 - RNA, 19 nt, Homo sapiens
  misc_RNA (1)...(19): siRNA sense strand
cagaaagccugcaucuaca

SEQ ID NO: 1796584 - RNA, 19 nt, Homo sapiens
  misc_RNA (1)...(19): siRNA sense strand
ucaaagaauuccgcaugaa

SEQ ID NO: 1796585 - RNA, 19 nt, Homo sapiens
  misc_RNA (1)...(19): siRNA sense strand
gcaucccuaucuacaguuu

SEQ ID NO: 1796586 - RNA, 19 nt, Homo sapiens
  misc_RNA (1)...(19): siRNA sense strand
ggaagcaucccuaucuaca

SEQ ID NO: 1796587 - RNA, 19 nt, Homo sapiens
  misc_RNA (1)...(19): siRNA sense strand
aagaacagguggcccgauu

SEQ ID NO: 1796588 - RNA, 19 nt, Homo sapiens
  misc_RNA (1)...(19): siRNA sense strand
gaucaaccuggcagucuuu

SEQ ID NO: 1796589 - RNA, 19 nt, Homo sapiens
  misc_RNA (1)...(19): siRNA sense strand
gaauuccgcaugaacauca

SEQ ID NO: 1796590 - RNA, 19 nt, Homo sapiens
  misc_RNA (1)...(19): siRNA sense strand
gcaccuuccuuaagaacag

SEQ ID NO: 1796591 - RNA, 19 nt, Homo sapiens
  misc_RNA (1)...(19): siRNA sense strand
gcuacuacuuugucaucaa

SEQ ID NO: 1796592 - RNA, 19 nt, Homo sapiens
  misc_RNA (1)...(19): siRNA sense strand
ccggaagcaucccuaucua

SEQ ID NO: 1796593 - RNA, 19 nt, Homo sapiens
  misc_RNA (1)...(19): siRNA sense strand
aaacagcuuuaucguagag

SEQ ID NO: 1796594 - RNA, 19 nt, Homo sapiens
  misc_RNA (1)...(19): siRNA sense strand
ccaccuccaucuacaugau

SEQ ID NO: 1796595 - RNA, 19 nt, Homo sapiens
  misc_RNA (1)...(19): siRNA sense strand
gcaauuguccauguguuuc

SEQ ID NO: 1796596 - RNA, 19 nt, Homo sapiens
  misc_RNA (1)...(19): siRNA sense strand
aagcaucccuaucuacagu

SEQ ID NO: 1796597 - RNA, 19 nt, Homo sapiens
  misc_RNA (1)...(19): siRNA sense strand
gggaucugcugcaccaucu

SEQ ID NO: 1796598 - RNA, 19 nt, Homo sapiens
  misc_RNA (1)...(19): siRNA sense strand
ggcuucagcaccuuccuua

SEQ ID NO: 1796599 - RNA, 19 nt, Homo sapiens
  misc_RNA (1)...(19): siRNA sense strand
caaagaauuccgcaugaac

SEQ ID NO: 1796600 - RNA, 19 nt, Homo sapiens
  misc_RNA (1)...(19): siRNA sense strand
uccacaacaugucugauga

SEQ ID NO: 1796601 - RNA, 19 nt, Homo sapiens
  misc_RNA (1)...(19): siRNA sense strand
ucagcaccuuccuuaagaa

SEQ ID NO: 1796602 - RNA, 19 nt, Homo sapiens
  misc_RNA (1)...(19): siRNA sense strand
uucagcaccuuccuuaaga

SEQ ID NO: 1796603 - RNA, 19 nt, Homo sapiens
  misc_RNA (1)...(19): siRNA sense strand
ggacugggugcagcagaaa

SEQ ID NO: 1796604 - RNA, 19 nt, Homo sapiens
  misc_RNA (1)...(19): siRNA sense strand
ucaacgagcugaugaaaac

SEQ ID NO: 1796605 - RNA, 19 nt, Homo sapiens
  misc_RNA (1)...(19): siRNA sense strand
cagcauggaccgguucuug

SEQ ID NO: 1796606 - RNA, 19 nt, Homo sapiens
  misc_RNA (1)...(19): siRNA sense strand
gcagagcaucagcuucuuc

SEQ ID NO: 1796607 - RNA, 19 nt, Homo sapiens
  misc_RNA (1)...(19): siRNA sense strand
ggugagaaacagcuuuauc

SEQ ID NO: 1796608 - RNA, 19 nt, Homo sapiens
  misc_RNA (1)...(19): siRNA sense strand
aaagaauuccgcaugaaca

SEQ ID NO: 1796609 - RNA, 19 nt, Homo sapiens
  misc_RNA (1)...(19): siRNA sense strand
ugaucaaccuggcagucuu

SEQ ID NO: 1796610 - RNA, 19 nt, Homo sapiens
  misc_RNA (1)...(19): siRNA sense strand
agaacagguggcccgauua

SEQ ID NO: 1796611 - RNA, 19 nt, Homo sapiens
  misc_RNA (1)...(19): siRNA sense strand
caacugcugccuggauguu

SEQ ID NO: 1796612 - RNA, 19 nt, Homo sapiens
  misc_RNA (1)...(19): siRNA sense strand
ugcaguuccuggugagaaa

SEQ ID NO: 1796613 - RNA, 19 nt, Homo sapiens
  misc_RNA (1)...(19): siRNA sense strand
gugagaaacagcuuuaucg

SEQ ID NO: 1796614 - RNA, 19 nt, Homo sapiens
  misc_RNA (1)...(19): siRNA sense strand
aucaaagaauuccgcauga

SEQ ID NO: 1796615 - RNA, 19 nt, Homo sapiens
  misc_RNA (1)...(19): siRNA sense strand
gcugccaccuccaucuaca

SEQ ID NO: 1796616 - RNA, 19 nt, Homo sapiens
  misc_RNA (1)...(19): siRNA sense strand
ggaccggaagcaucccuau

SEQ ID NO: 1796617 - RNA, 19 nt, Homo sapiens
  misc_RNA (1)...(19): siRNA sense strand
gaagcaucccuaucuacag

SEQ ID NO: 1796618 - RNA, 19 nt, Homo sapiens
  misc_RNA (1)...(19): siRNA sense strand
ggugucaacgagcugauga

SEQ ID NO: 1796619 - RNA, 19 nt, Homo sapiens
  misc_RNA (1)...(19): siRNA sense strand
gguggagugccuuuacuuc

SEQ ID NO: 1796620 - RNA, 19 nt, Homo sapiens
  misc_RNA (1)...(19): siRNA sense strand
caucagcuucuucuugcaa

SEQ ID NO: 1796621 - RNA, 19 nt, Homo sapiens
  misc_RNA (1)...(19): siRNA sense strand
ucagcuucuucuugcaauu

SEQ ID NO: 1796622 - RNA, 19 nt, Homo sapiens
  misc_RNA (1)...(19): siRNA sense strand
acagguggcccgauuaugc

SEQ ID NO: 1796623 - RNA, 19 nt, Homo sapiens
  misc_RNA (1)...(19): siRNA sense strand
cagcuucuucuugcaauug

SEQ ID NO: 1796624 - RNA, 19 nt, Homo sapiens
  misc_RNA (1)...(19): siRNA sense strand
gcagagccaagcagagcau

SEQ ID NO: 1796625 - RNA, 19 nt, Homo sapiens
  misc_RNA (1)...(19): siRNA sense strand
cuggugagaaacagcuuua

SEQ ID NO: 1796626 - RNA, 19 nt, Homo sapiens
  misc_RNA (1)...(19): siRNA sense strand
ccacaacaugucugaugau

SEQ ID NO: 1796627 - RNA, 19 nt, Homo sapiens
  misc_RNA (1)...(19): siRNA sense strand
gcugagaaguccaauguua

SEQ ID NO: 1796628 - RNA, 19 nt, Homo sapiens
  misc_RNA (1)...(19): siRNA sense strand
gaacaaucaccuccaguua

SEQ ID NO: 1796629 - RNA, 19 nt, Homo sapiens
  misc_RNA (1)...(19): siRNA sense strand
caaucaagcuucaaauaug

SEQ ID NO: 1796630 - RNA, 19 nt, Homo sapiens
  misc_RNA (1)...(19): siRNA sense strand
guagaacagucuuucauga

SEQ ID NO: 1796631 - RNA, 19 nt, Homo sapiens
  misc_RNA (1)...(19): siRNA sense strand
gcaugaaucccgaauauga

SEQ ID NO: 1796632 - RNA, 19 nt, Homo sapiens
  misc_RNA (1)...(19): siRNA sense strand
ggaaaccagugcuaagaau

SEQ ID NO: 1796633 - RNA, 19 nt, Homo sapiens
  misc_RNA (1)...(19): siRNA sense strand
gauggcagcugagauuaaa

SEQ ID NO: 1796634 - RNA, 19 nt, Homo sapiens
  misc_RNA (1)...(19): siRNA sense strand
cagcaugaaucccgaauau

SEQ ID NO: 1796635 - RNA, 19 nt, Homo sapiens
  misc_RNA (1)...(19): siRNA sense strand
acaaucaccuccaguuauu

SEQ ID NO: 1796636 - RNA, 19 nt, Homo sapiens
  misc_RNA (1)...(19): siRNA sense strand
ggacacagcaggccaggaa

SEQ ID NO: 1796637 - RNA, 19 nt, Homo sapiens
  misc_RNA (1)...(19): siRNA sense strand
ggaaagucuugccuucuuc

SEQ ID NO: 1796638 - RNA, 19 nt, Homo sapiens
  misc_RNA (1)...(19): siRNA sense strand
gggaacaaaugugaucuga

SEQ ID NO: 1796639 - RNA, 19 nt, Homo sapiens
  misc_RNA (1)...(19): siRNA sense strand
gcgaaggaauuugcugauu

SEQ ID NO: 1796640 - RNA, 19 nt, Homo sapiens
  misc_RNA (1)...(19): siRNA sense strand
gaaugcaacgaauguagaa

SEQ ID NO: 1796641 - RNA, 19 nt, Homo sapiens
  misc_RNA (1)...(19): siRNA sense strand
ggaaaacaaucaagcuuca

SEQ ID NO: 1796642 - RNA, 19 nt, Homo sapiens
  misc_RNA (1)...(19): siRNA sense strand
ucagagcacuccagucaag

SEQ ID NO: 1796643 - RNA, 19 nt, Homo sapiens
  misc_RNA (1)...(19): siRNA sense strand
gaucugaccacaaagaaag

SEQ ID NO: 1796644 - RNA, 19 nt, Homo sapiens
  misc_RNA (1)...(19): siRNA sense strand
gcccauggcaucauaguug

SEQ ID NO: 1796645 - RNA, 19 nt, Homo sapiens
  misc_RNA (1)...(19): siRNA sense strand
gacgauggcagcugagauu

SEQ ID NO: 1796646 - RNA, 19 nt, Homo sapiens
  misc_RNA (1)...(19): siRNA sense strand
ugagaaguccaauguuaaa

SEQ ID NO: 1796647 - RNA, 19 nt, Homo sapiens
  misc_RNA (1)...(19): siRNA sense strand
guuugcagaugauacauau

SEQ ID NO: 1796648 - RNA, 19 nt, Homo sapiens
  misc_RNA (1)...(19): siRNA sense strand
gaaaccagugcuaagaaug

SEQ ID NO: 1796649 - RNA, 19 nt, Homo sapiens
  misc_RNA (1)...(19): siRNA sense strand
ccacaaagaaaguaguaga

SEQ ID NO: 1796650 - RNA, 19 nt, Homo sapiens
  misc_RNA (1)...(19): siRNA sense strand
gaccacaaagaaaguagua

SEQ ID NO: 1796651 - RNA, 19 nt, Homo sapiens
  misc_RNA (1)...(19): siRNA sense strand
ugcaggaaauagaucguua

SEQ ID NO: 1796652 - RNA, 19 nt, Homo sapiens
  misc_RNA (1)...(19): siRNA sense strand
uggaaagucuugccuucuu

SEQ ID NO: 1796653 - RNA, 19 nt, Homo sapiens
  misc_RNA (1)...(19): siRNA sense strand
caauugguguggauuucaa

SEQ ID NO: 1796654 - RNA, 19 nt, Homo sapiens
  misc_RNA (1)...(19): siRNA sense strand
acacaacagcgaaggaauu

SEQ ID NO: 1796655 - RNA, 19 nt, Homo sapiens
  misc_RNA (1)...(19): siRNA sense strand
cagcaggccaggaaagauu

SEQ ID NO: 1796656 - RNA, 19 nt, Homo sapiens
  misc_RNA (1)...(19): siRNA sense strand
cgaacaaucaccuccaguu

SEQ ID NO: 1796657 - RNA, 19 nt, Homo sapiens
  misc_RNA (1)...(19): siRNA sense strand
aacaguggcugcaggaaau

SEQ ID NO: 1796658 - RNA, 19 nt, Homo sapiens
  misc_RNA (1)...(19): siRNA sense strand
aaucaagcuucaaauaugg

SEQ ID NO: 1796659 - RNA, 19 nt, Homo sapiens
  misc_RNA (1)...(19): siRNA sense strand
gcuaagaaugcaacgaaug

SEQ ID NO: 1796660 - RNA, 19 nt, Homo sapiens
  misc_RNA (1)...(19): siRNA sense strand
gcaggaaauagaucguuau

SEQ ID NO: 1796661 - RNA, 19 nt, Homo sapiens
  misc_RNA (1)...(19): siRNA sense strand
aaacaguggcugcaggaaa

SEQ ID NO: 1796662 - RNA, 19 nt, Homo sapiens
  misc_RNA (1)...(19): siRNA sense strand
cagaugauacauauacaga

SEQ ID NO: 1796663 - RNA, 19 nt, Homo sapiens
  misc_RNA (1)...(19): siRNA sense strand
gaauguagaacagucuuuc

SEQ ID NO: 1796664 - RNA, 19 nt, Homo sapiens
  misc_RNA (1)...(19): siRNA sense strand
gugcuaagaaugcaacgaa

SEQ ID NO: 1796665 - RNA, 19 nt, Homo sapiens
  misc_RNA (1)...(19): siRNA sense strand
gaaagcuacaucagcacaa

SEQ ID NO: 1796666 - RNA, 19 nt, Homo sapiens
  misc_RNA (1)...(19): siRNA sense strand
caacagcgaaggaauuugc

SEQ ID NO: 1796667 - RNA, 19 nt, Homo sapiens
  misc_RNA (1)...(19): siRNA sense strand
gugcugagaaguccaaugu

SEQ ID NO: 1796668 - RNA, 19 nt, Homo sapiens
  misc_RNA (1)...(19): siRNA sense strand
cacaacagcgaaggaauuu

SEQ ID NO: 1796669 - RNA, 19 nt, Homo sapiens
  misc_RNA (1)...(19): siRNA sense strand
cuaagaaugcaacgaaugu

SEQ ID NO: 1796670 - RNA, 19 nt, Homo sapiens
  misc_RNA (1)...(19): siRNA sense strand
cuucuuagguuugcagaug

SEQ ID NO: 1796671 - RNA, 19 nt, Homo sapiens
  misc_RNA (1)...(19): siRNA sense strand
uaagaaugcaacgaaugua

SEQ ID NO: 1796672 - RNA, 19 nt, Homo sapiens
  misc_RNA (1)...(19): siRNA sense strand
cgauggcagcugagauuaa

SEQ ID NO: 1796673 - RNA, 19 nt, Homo sapiens
  misc_RNA (1)...(19): siRNA sense strand
aaagcuacaucagcacaau

SEQ ID NO: 1796674 - RNA, 19 nt, Homo sapiens
  misc_RNA (1)...(19): siRNA sense strand
agguggagguugcugcuaa

SEQ ID NO: 1796675 - RNA, 19 nt, Homo sapiens
  misc_RNA (1)...(19): siRNA sense strand
cugagaaguccaauguuaa

SEQ ID NO: 1796676 - RNA, 19 nt, Homo sapiens
  misc_RNA (1)...(19): siRNA sense strand
guagggaacaaaugugauc

SEQ ID NO: 1796677 - RNA, 19 nt, Homo sapiens
  misc_RNA (1)...(19): siRNA sense strand
caaucaccuccaguuauua

SEQ ID NO: 1796678 - RNA, 19 nt, Homo sapiens
  misc_RNA (1)...(19): siRNA sense strand
gguuugcagaugauacaua

SEQ ID NO: 1796679 - RNA, 19 nt, Homo sapiens
  misc_RNA (1)...(19): siRNA sense strand
caccuccaguuauuacaga

SEQ ID NO: 1796680 - RNA, 19 nt, Homo sapiens
  misc_RNA (1)...(19): siRNA sense strand
aggagcccauggcaucaua

SEQ ID NO: 1796681 - RNA, 19 nt, Homo sapiens
  misc_RNA (1)...(19): siRNA sense strand
agucuugccuucuucuuag

SEQ ID NO: 1796682 - RNA, 19 nt, Homo sapiens
  misc_RNA (1)...(19): siRNA sense strand
gaaagucuugccuucuucu

SEQ ID NO: 1796683 - RNA, 19 nt, Homo sapiens
  misc_RNA (1)...(19): siRNA sense strand
aacaaucaccuccaguuau

SEQ ID NO: 1796684 - RNA, 19 nt, Homo sapiens
  misc_RNA (1)...(19): siRNA sense strand
cgaauguagaacagucuuu

SEQ ID NO: 1796685 - RNA, 19 nt, Homo sapiens
  misc_RNA (1)...(19): siRNA sense strand
ccagcaugaaucccgaaua

SEQ ID NO: 1796686 - RNA, 19 nt, Homo sapiens
  misc_RNA (1)...(19): siRNA sense strand
agaaugcaacgaauguaga

SEQ ID NO: 1796687 - RNA, 19 nt, Homo sapiens
  misc_RNA (1)...(19): siRNA sense strand
aagucuugccuucuucuua

SEQ ID NO: 1796688 - RNA, 19 nt, Homo sapiens
  misc_RNA (1)...(19): siRNA sense strand
cagugaaaaugucaacaaa

SEQ ID NO: 1796689 - RNA, 19 nt, Homo sapiens
  misc_RNA (1)...(19): siRNA sense strand
caggaaauagaucguuaug

SEQ ID NO: 1796690 - RNA, 19 nt, Homo sapiens
  misc_RNA (1)...(19): siRNA sense strand
gaucguuaugccagugaaa

SEQ ID NO: 1796691 - RNA, 19 nt, Homo sapiens
  misc_RNA (1)...(19): siRNA sense strand
auucagagcacuccaguca

SEQ ID NO: 1796692 - RNA, 19 nt, Homo sapiens
  misc_RNA (1)...(19): siRNA sense strand
gcagaugauacauauacag

SEQ ID NO: 1796693 - RNA, 19 nt, Homo sapiens
  misc_RNA (1)...(19): siRNA sense strand
cuacacaacagcgaaggaa

SEQ ID NO: 1796694 - RNA, 19 nt, Homo sapiens
  misc_RNA (1)...(19): siRNA sense strand
guugguagggaacaaaugu

SEQ ID NO: 1796695 - RNA, 19 nt, Homo sapiens
  misc_RNA (1)...(19): siRNA sense strand
uggaaaccagugcuaagaa

SEQ ID NO: 1796696 - RNA, 19 nt, Homo sapiens
  misc_RNA (1)...(19): siRNA sense strand
ugauacauauacagaaagc

SEQ ID NO: 1796697 - RNA, 19 nt, Homo sapiens
  misc_RNA (1)...(19): siRNA sense strand
caugaaucccgaauaugau

SEQ ID NO: 1796698 - RNA, 19 nt, Homo sapiens
  misc_RNA (1)...(19): siRNA sense strand
ggaguccuucaauaauguu

SEQ ID NO: 1796699 - RNA, 19 nt, Homo sapiens
  misc_RNA (1)...(19): siRNA sense strand
uguagaacagucuuucaug

SEQ ID NO: 1796700 - RNA, 19 nt, Homo sapiens
  misc_RNA (1)...(19): siRNA sense strand
gugaucugaccacaaagaa

SEQ ID NO: 1796701 - RNA, 19 nt, Homo sapiens
  misc_RNA (1)...(19): siRNA sense strand
gaauuuaccucuucaguuu

SEQ ID NO: 1796702 - RNA, 19 nt, Homo sapiens
  misc_RNA (1)...(19): siRNA sense strand
caaauacccuuuagagaaa

SEQ ID NO: 1796703 - RNA, 19 nt, Homo sapiens
  misc_RNA (1)...(19): siRNA sense strand
gaaggaaagugaacuagga

SEQ ID NO: 1796704 - RNA, 19 nt, Homo sapiens
  misc_RNA (1)...(19): siRNA sense strand
gaagcgaacuuacacaaug

SEQ ID NO: 1796705 - RNA, 19 nt, Homo sapiens
  misc_RNA (1)...(19): siRNA sense strand
gcacauguauugaagaaca

SEQ ID NO: 1796706 - RNA, 19 nt, Homo sapiens
  misc_RNA (1)...(19): siRNA sense strand
gaacagcacauguauugaa

SEQ ID NO: 1796707 - RNA, 19 nt, Homo sapiens
  misc_RNA (1)...(19): siRNA sense strand
gaaacaggaagauaugaua

SEQ ID NO: 1796708 - RNA, 19 nt, Homo sapiens
  misc_RNA (1)...(19): siRNA sense strand
gaaagugaacuaggaauuu

SEQ ID NO: 1796709 - RNA, 19 nt, Homo sapiens
  misc_RNA (1)...(19): siRNA sense strand
gcaaaucaaccucaacuug

SEQ ID NO: 1796710 - RNA, 19 nt, Homo sapiens
  misc_RNA (1)...(19): siRNA sense strand
ugcauuaacucucccuuua

SEQ ID NO: 1796711 - RNA, 19 nt, Homo sapiens
  misc_RNA (1)...(19): siRNA sense strand
acaaauacccuuuagagaa

SEQ ID NO: 1796712 - RNA, 19 nt, Homo sapiens
  misc_RNA (1)...(19): siRNA sense strand
uuagagaaauggcaaauca

SEQ ID NO: 1796713 - RNA, 19 nt, Homo sapiens
  misc_RNA (1)...(19): siRNA sense strand
uagaaucacgguugcauua

SEQ ID NO: 1796714 - RNA, 19 nt, Homo sapiens
  misc_RNA (1)...(19): siRNA sense strand
ggaaagugaacuaggaauu

SEQ ID NO: 1796715 - RNA, 19 nt, Homo sapiens
  misc_RNA (1)...(19): siRNA sense strand
aauuagagguccuugagua

SEQ ID NO: 1796716 - RNA, 19 nt, Homo sapiens
  misc_RNA (1)...(19): siRNA sense strand
ugaccuggaucacuauuug

SEQ ID NO: 1796717 - RNA, 19 nt, Homo sapiens
  misc_RNA (1)...(19): siRNA sense strand
ggaauuuaccucuucaguu

SEQ ID NO: 1796718 - RNA, 19 nt, Homo sapiens
  misc_RNA (1)...(19): siRNA sense strand
cagcacauguauugaagaa

SEQ ID NO: 1796719 - RNA, 19 nt, Homo sapiens
  misc_RNA (1)...(19): siRNA sense strand
gugggaagaugaaacaguu

SEQ ID NO: 1796720 - RNA, 19 nt, Homo sapiens
  misc_RNA (1)...(19): siRNA sense strand
guauuuggcuguugucuac

SEQ ID NO: 1796721 - RNA, 19 nt, Homo sapiens
  misc_RNA (1)...(19): siRNA sense strand
cagauuuacucuaugcauu

SEQ ID NO: 1796722 - RNA, 19 nt, Homo sapiens
  misc_RNA (1)...(19): siRNA sense strand
gcuguugucuacccuuuga

SEQ ID NO: 1796723 - RNA, 19 nt, Homo sapiens
  misc_RNA (1)...(19): siRNA sense strand
cuucaaugcugucauguug

SEQ ID NO: 1796724 - RNA, 19 nt, Homo sapiens
  misc_RNA (1)...(19): siRNA sense strand
cauuaacucucccuuuaug

SEQ ID NO: 1796725 - RNA, 19 nt, Homo sapiens
  misc_RNA (1)...(19): siRNA sense strand
aaaucaaccucaacuuguu

SEQ ID NO: 1796726 - RNA, 19 nt, Homo sapiens
  misc_RNA (1)...(19): siRNA sense strand
caaaucaaccucaacuugu

SEQ ID NO: 1796727 - RNA, 19 nt, Homo sapiens
  misc_RNA (1)...(19): siRNA sense strand
caugugauguugcugauuc

SEQ ID NO: 1796728 - RNA, 19 nt, Homo sapiens
  misc_RNA (1)...(19): siRNA sense strand
caucuucaaugcugucaug

SEQ ID NO: 1796729 - RNA, 19 nt, Homo sapiens
  misc_RNA (1)...(19): siRNA sense strand
guuugucacuaucagauuu

SEQ ID NO: 1796730 - RNA, 19 nt, Homo sapiens
  misc_RNA (1)...(19): siRNA sense strand
ugucuacccuuugaaguuu

SEQ ID NO: 1796731 - RNA, 19 nt, Homo sapiens
  misc_RNA (1)...(19): siRNA sense strand
aagcaaagaaggaaaguga

SEQ ID NO: 1796732 - RNA, 19 nt, Homo sapiens
  misc_RNA (1)...(19): siRNA sense strand
ggaauuagagguccuugag

SEQ ID NO: 1796733 - RNA, 19 nt, Homo sapiens
  misc_RNA (1)...(19): siRNA sense strand
gacaaauacccuuuagaga

SEQ ID NO: 1796734 - RNA, 19 nt, Homo sapiens
  misc_RNA (1)...(19): siRNA sense strand
ucaaugcugucauguugug

SEQ ID NO: 1796735 - RNA, 19 nt, Homo sapiens
  misc_RNA (1)...(19): siRNA sense strand
gaaucacgguugcauuaac

SEQ ID NO: 1796736 - RNA, 19 nt, Homo sapiens
  misc_RNA (1)...(19): siRNA sense strand
ugacaaauacccuuuagag

SEQ ID NO: 1796737 - RNA, 19 nt, Homo sapiens
  misc_RNA (1)...(19): siRNA sense strand
gcauuaacucucccuuuau

SEQ ID NO: 1796738 - RNA, 19 nt, Homo sapiens
  misc_RNA (1)...(19): siRNA sense strand
guguacaggcuaugcaaua

SEQ ID NO: 1796739 - RNA, 19 nt, Homo sapiens
  misc_RNA (1)...(19): siRNA sense strand
aaagaaggaaagugaacua

SEQ ID NO: 1796740 - RNA, 19 nt, Homo sapiens
  misc_RNA (1)...(19): siRNA sense strand
ggaagcgaacuuacacaau

SEQ ID NO: 1796741 - RNA, 19 nt, Homo sapiens
  misc_RNA (1)...(19): siRNA sense strand
agcaugaccuggaucacua

SEQ ID NO: 1796742 - RNA, 19 nt, Homo sapiens
  misc_RNA (1)...(19): siRNA sense strand
ucccauuguuuacaucuuu

SEQ ID NO: 1796743 - RNA, 19 nt, Homo sapiens
  misc_RNA (1)...(19): siRNA sense strand
gcaaagaaggaaagugaac

SEQ ID NO: 1796744 - RNA, 19 nt, Homo sapiens
  misc_RNA (1)...(19): siRNA sense strand
gaagaccacagcaauucug

SEQ ID NO: 1796745 - RNA, 19 nt, Homo sapiens
  misc_RNA (1)...(19): siRNA sense strand
cacaguuacuuuugucuua

SEQ ID NO: 1796746 - RNA, 19 nt, Homo sapiens
  misc_RNA (1)...(19): siRNA sense strand
cuugucagcaucacaguua

SEQ ID NO: 1796747 - RNA, 19 nt, Homo sapiens
  misc_RNA (1)...(19): siRNA sense strand
ggaaaagaagagaaucaua

SEQ ID NO: 1796748 - RNA, 19 nt, Homo sapiens
  misc_RNA (1)...(19): siRNA sense strand
gcuaugacaaauacccuuu

SEQ ID NO: 1796749 - RNA, 19 nt, Homo sapiens
  misc_RNA (1)...(19): siRNA sense strand
gauauuggaaaccaucuuc

SEQ ID NO: 1796750 - RNA, 19 nt, Homo sapiens
  misc_RNA (1)...(19): siRNA sense strand
uaucagauuuacucuaugc

SEQ ID NO: 1796751 - RNA, 19 nt, Homo sapiens
  misc_RNA (1)...(19): siRNA sense strand
uaaccgaaacaggaagaua

SEQ ID NO: 1796752 - RNA, 19 nt, Homo sapiens
  misc_RNA (1)...(19): siRNA sense strand
ucaccugcauugccguuga

SEQ ID NO: 1796753 - RNA, 19 nt, Homo sapiens
  misc_RNA (1)...(19): siRNA sense strand
ggagugcuuuucucaugua

SEQ ID NO: 1796754 - RNA, 19 nt, Homo sapiens
  misc_RNA (1)...(19): siRNA sense strand
gggaagcgaacuuacacaa

SEQ ID NO: 1796755 - RNA, 19 nt, Homo sapiens
  misc_RNA (1)...(19): siRNA sense strand
uuuacucccuuucauguga

SEQ ID NO: 1796756 - RNA, 19 nt, Homo sapiens
  misc_RNA (1)...(19): siRNA sense strand
aaacgcauacuuucugugu

SEQ ID NO: 1796757 - RNA, 19 nt, Homo sapiens
  misc_RNA (1)...(19): siRNA sense strand
aaucacgguugcauuaaca

SEQ ID NO: 1796758 - RNA, 19 nt, Homo sapiens
  misc_RNA (1)...(19): siRNA sense strand
ugucuuuccugcaagcaaa

SEQ ID NO: 1796759 - RNA, 19 nt, Homo sapiens
  misc_RNA (1)...(19): siRNA sense strand
uaugacaaauacccuuuag

SEQ ID NO: 1796760 - RNA, 19 nt, Homo sapiens
  misc_RNA (1)...(19): siRNA sense strand
cagcauuccucaccugcau

SEQ ID NO: 1796761 - RNA, 19 nt, Homo sapiens
  misc_RNA (1)...(19): siRNA sense strand
caucacaaagacaaagaaa

SEQ ID NO: 1796762 - RNA, 19 nt, Homo sapiens
  misc_RNA (1)...(19): siRNA sense strand
auccaauucuguacuguuu

SEQ ID NO: 1796763 - RNA, 19 nt, Homo sapiens
  misc_RNA (1)...(19): siRNA sense strand
aagcgaacuuacacaaugu

SEQ ID NO: 1796764 - RNA, 19 nt, Homo sapiens
  misc_RNA (1)...(19): siRNA sense strand
cagcauuccagccaauauu

SEQ ID NO: 1796765 - RNA, 19 nt, Homo sapiens
  misc_RNA (1)...(19): siRNA sense strand
gaucgguauuuggcuguug

SEQ ID NO: 1796766 - RNA, 19 nt, Homo sapiens
  misc_RNA (1)...(19): siRNA sense strand
acuaggaauuuaccucuuc

SEQ ID NO: 1796767 - RNA, 19 nt, Homo sapiens
  misc_RNA (1)...(19): siRNA sense strand
gcacugggagguguaauac

SEQ ID NO: 1796768 - RNA, 19 nt, Homo sapiens
  misc_RNA (1)...(19): siRNA sense strand
gauccaauucuguacuguu

SEQ ID NO: 1796769 - RNA, 19 nt, Homo sapiens
  misc_RNA (1)...(19): siRNA sense strand
uggaaaccaucuucaaugc

SEQ ID NO: 1796770 - RNA, 19 nt, Homo sapiens
  misc_RNA (1)...(19): siRNA sense strand
ccucuucaguuugucacua

SEQ ID NO: 1796771 - RNA, 19 nt, Homo sapiens
  misc_RNA (1)...(19): siRNA sense strand
cacaauaaagccacggaaa

SEQ ID NO: 1796772 - RNA, 19 nt, Homo sapiens
  misc_RNA (1)...(19): siRNA sense strand
gugauuauagucagcauuc

SEQ ID NO: 1796773 - RNA, 19 nt, Homo sapiens
  misc_RNA (1)...(19): siRNA sense strand
gguauuuggcuguugucua

SEQ ID NO: 1796774 - RNA, 19 nt, Homo sapiens
  misc_RNA (1)...(19): siRNA sense strand
gcauuccucaccugcauug

SEQ ID NO: 1796775 - RNA, 19 nt, Homo sapiens
  misc_RNA (1)...(19): siRNA sense strand
cgaaacaggaagauaugau

SEQ ID NO: 1796776 - RNA, 19 nt, Homo sapiens
  misc_RNA (1)...(19): siRNA sense strand
gaaaacaaggaaaagaaga

SEQ ID NO: 1796777 - RNA, 19 nt, Homo sapiens
  misc_RNA (1)...(19): siRNA sense strand
gaauauugcgaugccgaaa

SEQ ID NO: 1796778 - RNA, 19 nt, Homo sapiens
  misc_RNA (1)...(19): siRNA sense strand
gcuaugcaauaccuuuggu

SEQ ID NO: 1796779 - RNA, 19 nt, Homo sapiens
  misc_RNA (1)...(19): siRNA sense strand
acgguugcauuaacaaguu

SEQ ID NO: 1796780 - RNA, 19 nt, Homo sapiens
  misc_RNA (1)...(19): siRNA sense strand
gugugugucuuuccugcaa

SEQ ID NO: 1796781 - RNA, 19 nt, Homo sapiens
  misc_RNA (1)...(19): siRNA sense strand
guauugaagaacagcauga

SEQ ID NO: 1796782 - RNA, 19 nt, Homo sapiens
  misc_RNA (1)...(19): siRNA sense strand
gaucucugugugugucuuu

SEQ ID NO: 1796783 - RNA, 19 nt, Homo sapiens
  misc_RNA (1)...(19): siRNA sense strand
ccaauucuguacuguuuug

SEQ ID NO: 1796784 - RNA, 19 nt, Homo sapiens
  misc_RNA (1)...(19): siRNA sense strand
cacuauuuguuucccauug

SEQ ID NO: 1796785 - RNA, 19 nt, Homo sapiens
  misc_RNA (1)...(19): siRNA sense strand
gaauuagagguccuugagu

SEQ ID NO: 1796786 - RNA, 19 nt, Homo sapiens
  misc_RNA (1)...(19): siRNA sense strand
uacuuucugugucuacaaa

SEQ ID NO: 1796787 - RNA, 19 nt, Homo sapiens
  misc_RNA (1)...(19): siRNA sense strand
gcuuuacucccuuucaugu

SEQ ID NO: 1796788 - RNA, 19 nt, Homo sapiens
  misc_RNA (1)...(19): siRNA sense strand
cuggaucacuauuuguuuc

SEQ ID NO: 1796789 - RNA, 19 nt, Homo sapiens
  misc_RNA (1)...(19): siRNA sense strand
uggcuguugucuacccuuu

SEQ ID NO: 1796790 - RNA, 19 nt, Homo sapiens
  misc_RNA (1)...(19): siRNA sense strand
cuaggaauuuaccucuuca

SEQ ID NO: 1796791 - RNA, 19 nt, Homo sapiens
  misc_RNA (1)...(19): siRNA sense strand
caauauuggaucucugugu

SEQ ID NO: 1796792 - RNA, 19 nt, Homo sapiens
  misc_RNA (1)...(19): siRNA sense strand
gggaagaugaaacaguugu

SEQ ID NO: 1796793 - RNA, 19 nt, Homo sapiens
  misc_RNA (1)...(19): siRNA sense strand
cuauuuguuucccauuguu

SEQ ID NO: 1796794 - RNA, 19 nt, Homo sapiens
  misc_RNA (1)...(19): siRNA sense strand
cuaugacaaauacccuuua

SEQ ID NO: 1796795 - RNA, 19 nt, Homo sapiens
  misc_RNA (1)...(19): siRNA sense strand
acgcauacuuucugugucu

SEQ ID NO: 1796796 - RNA, 19 nt, Homo sapiens
  misc_RNA (1)...(19): siRNA sense strand
aaccgaaacaggaagauau

SEQ ID NO: 1796797 - RNA, 19 nt, Homo sapiens
  misc_RNA (1)...(19): siRNA sense strand
ucgaagaccacagcaauuc

SEQ ID NO: 1796798 - RNA, 19 nt, Homo sapiens
  misc_RNA (1)...(19): siRNA sense strand
uaacucucccuuuauggau

SEQ ID NO: 1796799 - RNA, 19 nt, Homo sapiens
  misc_RNA (1)...(19): siRNA sense strand
guaauacaucacaaagaca

SEQ ID NO: 1796800 - RNA, 19 nt, Homo sapiens
  misc_RNA (1)...(19): siRNA sense strand
agaacagcaugaccuggau

SEQ ID NO: 1796801 - RNA, 19 nt, Homo sapiens
  misc_RNA (1)...(19): siRNA sense strand
gccaugagcuccuccagaa

SEQ ID NO: 1796802 - RNA, 19 nt, Homo sapiens
  misc_RNA (1)...(19): siRNA sense strand
ggacaucgcccacuacuac

SEQ ID NO: 1796803 - RNA, 19 nt, Homo sapiens
  misc_RNA (1)...(19): siRNA sense strand
gggacuacguggucaagaa

SEQ ID NO: 1796804 - RNA, 19 nt, Homo sapiens
  misc_RNA (1)...(19): siRNA sense strand
gcucuuugaugcccuucua

SEQ ID NO: 1796805 - RNA, 19 nt, Homo sapiens
  misc_RNA (1)...(19): siRNA sense strand
ucaaccagcugcccaagau

SEQ ID NO: 1796806 - RNA, 19 nt, Homo sapiens
  misc_RNA (1)...(19): siRNA sense strand
ggacaacuucgugagguuu

SEQ ID NO: 1796807 - RNA, 19 nt, Homo sapiens
  misc_RNA (1)...(19): siRNA sense strand
ccagcucccugcuaaggaa

SEQ ID NO: 1796808 - RNA, 19 nt, Homo sapiens
  misc_RNA (1)...(19): siRNA sense strand
guggccagcucccugcuaa

SEQ ID NO: 1796809 - RNA, 19 nt, Homo sapiens
  misc_RNA (1)...(19): siRNA sense strand
gggacaacuucgugagguu

SEQ ID NO: 1796810 - RNA, 19 nt, Homo sapiens
  misc_RNA (1)...(19): siRNA sense strand
uaaggaaggagaccaggaa

SEQ ID NO: 1796811 - RNA, 19 nt, Homo sapiens
  misc_RNA (1)...(19): siRNA sense strand
gacccuguccucaucauug

SEQ ID NO: 1796812 - RNA, 19 nt, Homo sapiens
  misc_RNA (1)...(19): siRNA sense strand
gaccaggaagccacccuaa

SEQ ID NO: 1796813 - RNA, 19 nt, Homo sapiens
  misc_RNA (1)...(19): siRNA sense strand
gcuacacacccuacacgaa

SEQ ID NO: 1796814 - RNA, 19 nt, Homo sapiens
  misc_RNA (1)...(19): siRNA sense strand
aggacuggaugcagaagaa

SEQ ID NO: 1796815 - RNA, 19 nt, Homo sapiens
  misc_RNA (1)...(19): siRNA sense strand
ccacaaggugcaccagaug

SEQ ID NO: 1796816 - RNA, 19 nt, Homo sapiens
  misc_RNA (1)...(19): siRNA sense strand
ggacuacguggucaagaag

SEQ ID NO: 1796817 - RNA, 19 nt, Homo sapiens
  misc_RNA (1)...(19): siRNA sense strand
ccguggcccugcucuuuga

SEQ ID NO: 1796818 - RNA, 19 nt, Homo sapiens
  misc_RNA (1)...(19): siRNA sense strand
guccggugcuguagucaca

SEQ ID NO: 1796819 - RNA, 19 nt, Homo sapiens
  misc_RNA (1)...(19): siRNA sense strand
caugagcuccuccagaaag

SEQ ID NO: 1796820 - RNA, 19 nt, Homo sapiens
  misc_RNA (1)...(19): siRNA sense strand
ucaaggacuggaugcagaa

SEQ ID NO: 1796821 - RNA, 19 nt, Homo sapiens
  misc_RNA (1)...(19): siRNA sense strand
caacaucccggugauccau

SEQ ID NO: 1796822 - RNA, 19 nt, Homo sapiens
  misc_RNA (1)...(19): siRNA sense strand
gagccuggcacuccaucga

SEQ ID NO: 1796823 - RNA, 19 nt, Homo sapiens
  misc_RNA (1)...(19): siRNA sense strand
gacaacuucgugagguuug

SEQ ID NO: 1796824 - RNA, 19 nt, Homo sapiens
  misc_RNA (1)...(19): siRNA sense strand
agaagggucuggggcauaa

SEQ ID NO: 1796825 - RNA, 19 nt, Homo sapiens
  misc_RNA (1)...(19): siRNA sense strand
cacaaggugcaccagauga

SEQ ID NO: 1796826 - RNA, 19 nt, Homo sapiens
  misc_RNA (1)...(19): siRNA sense strand
caaggugcaccagaugaug

SEQ ID NO: 1796827 - RNA, 19 nt, Homo sapiens
  misc_RNA (1)...(19): siRNA sense strand
ggacaucgcccacuacuac

SEQ ID NO: 1796828 - RNA, 19 nt, Homo sapiens
  misc_RNA (1)...(19): siRNA sense strand
gggacuacguggucaagaa

SEQ ID NO: 1796829 - RNA, 19 nt, Homo sapiens
  misc_RNA (1)...(19): siRNA sense strand
gcucuuugaugcccuucua

SEQ ID NO: 1796830 - RNA, 19 nt, Homo sapiens
  misc_RNA (1)...(19): siRNA sense strand
ucaaccagcugcccaagau

SEQ ID NO: 1796831 - RNA, 19 nt, Homo sapiens
  misc_RNA (1)...(19): siRNA sense strand
ggacaacuucgugagguuu

SEQ ID NO: 1796832 - RNA, 19 nt, Homo sapiens
  misc_RNA (1)...(19): siRNA sense strand
ccagcucccugcuaaggaa

SEQ ID NO: 1796833 - RNA, 19 nt, Homo sapiens
  misc_RNA (1)...(19): siRNA sense strand
guggccagcucccugcuaa

SEQ ID NO: 1796834 - RNA, 19 nt, Homo sapiens
  misc_RNA (1)...(19): siRNA sense strand
gggacaacuucgugagguu

SEQ ID NO: 1796835 - RNA, 19 nt, Homo sapiens
  misc_RNA (1)...(19): siRNA sense strand
uaaggaaggagaccaggaa

SEQ ID NO: 1796836 - RNA, 19 nt, Homo sapiens
  misc_RNA (1)...(19): siRNA sense strand
gacccuguccucaucauug

SEQ ID NO: 1796837 - RNA, 19 nt, Homo sapiens
  misc_RNA (1)...(19): siRNA sense strand
gaccaggaagccacccuaa

SEQ ID NO: 1796838 - RNA, 19 nt, Homo sapiens
  misc_RNA (1)...(19): siRNA sense strand
gcuacacacccuacacgaa

SEQ ID NO: 1796839 - RNA, 19 nt, Homo sapiens
  misc_RNA (1)...(19): siRNA sense strand
aggacuggaugcagaagaa

SEQ ID NO: 1796840 - RNA, 19 nt, Homo sapiens
  misc_RNA (1)...(19): siRNA sense strand
ccacaaggugcaccagaug

SEQ ID NO: 1796841 - RNA, 19 nt, Homo sapiens
  misc_RNA (1)...(19): siRNA sense strand
ggacuacguggucaagaag

SEQ ID NO: 1796842 - RNA, 19 nt, Homo sapiens
  misc_RNA (1)...(19): siRNA sense strand
ccguggcccugcucuuuga

SEQ ID NO: 1796843 - RNA, 19 nt, Homo sapiens
  misc_RNA (1)...(19): siRNA sense strand
guccggugcuguagucaca

SEQ ID NO: 1796844 - RNA, 19 nt, Homo sapiens
  misc_RNA (1)...(19): siRNA sense strand
ucaaggacuggaugcagaa

SEQ ID NO: 1796845 - RNA, 19 nt, Homo sapiens
  misc_RNA (1)...(19): siRNA sense strand
caacaucccggugauccau

SEQ ID NO: 1796846 - RNA, 19 nt, Homo sapiens
  misc_RNA (1)...(19): siRNA sense strand
gagccuggcacuccaucga

SEQ ID NO: 1796847 - RNA, 19 nt, Homo sapiens
  misc_RNA (1)...(19): siRNA sense strand
gacaacuucgugagguuug

SEQ ID NO: 1796848 - RNA, 19 nt, Homo sapiens
  misc_RNA (1)...(19): siRNA sense strand
agaagggucuggggcauaa

SEQ ID NO: 1796849 - RNA, 19 nt, Homo sapiens
  misc_RNA (1)...(19): siRNA sense strand
cacaaggugcaccagauga

SEQ ID NO: 1796850 - RNA, 19 nt, Homo sapiens
  misc_RNA (1)...(19): siRNA sense strand
caaggugcaccagaugaug

SEQ ID NO: 1796851 - RNA, 19 nt, Homo sapiens
  misc_RNA (1)...(19): siRNA sense strand
ggacaucgcccacuacuac

SEQ ID NO: 1796852 - RNA, 19 nt, Homo sapiens
  misc_RNA (1)...(19): siRNA sense strand
gggacuacguggucaagaa

SEQ ID NO: 1796853 - RNA, 19 nt, Homo sapiens
  misc_RNA (1)...(19): siRNA sense strand
gcucuuugaugcccuucua

SEQ ID NO: 1796854 - RNA, 19 nt, Homo sapiens
  misc_RNA (1)...(19): siRNA sense strand
ucaaccagcugcccaagau

SEQ ID NO: 1796855 - RNA, 19 nt, Homo sapiens
  misc_RNA (1)...(19): siRNA sense strand
ggacaacuucgugagguuu

SEQ ID NO: 1796856 - RNA, 19 nt, Homo sapiens
  misc_RNA (1)...(19): siRNA sense strand
ccagcucccugcuaaggaa

SEQ ID NO: 1796857 - RNA, 19 nt, Homo sapiens
  misc_RNA (1)...(19): siRNA sense strand
guggccagcucccugcuaa

SEQ ID NO: 1796858 - RNA, 19 nt, Homo sapiens
  misc_RNA (1)...(19): siRNA sense strand
gggacaacuucgugagguu

SEQ ID NO: 1796859 - RNA, 19 nt, Homo sapiens
  misc_RNA (1)...(19): siRNA sense strand
uaaggaaggagaccaggaa

SEQ ID NO: 1796860 - RNA, 19 nt, Homo sapiens
  misc_RNA (1)...(19): siRNA sense strand
gacccuguccucaucauug

SEQ ID NO: 1796861 - RNA, 19 nt, Homo sapiens
  misc_RNA (1)...(19): siRNA sense strand
gaccaggaagccacccuaa

SEQ ID NO: 1796862 - RNA, 19 nt, Homo sapiens
  misc_RNA (1)...(19): siRNA sense strand
gcuacacacccuacacgaa

SEQ ID NO: 1796863 - RNA, 19 nt, Homo sapiens
  misc_RNA (1)...(19): siRNA sense strand
aggacuggaugcagaagaa

SEQ ID NO: 1796864 - RNA, 19 nt, Homo sapiens
  misc_RNA (1)...(19): siRNA sense strand
ccacaaggugcaccagaug

SEQ ID NO: 1796865 - RNA, 19 nt, Homo sapiens
  misc_RNA (1)...(19): siRNA sense strand
ggacuacguggucaagaag

SEQ ID NO: 1796866 - RNA, 19 nt, Homo sapiens
  misc_RNA (1)...(19): siRNA sense strand
ccguggcccugcucuuuga

SEQ ID NO: 1796867 - RNA, 19 nt, Homo sapiens
  misc_RNA (1)...(19): siRNA sense strand
guccggugcuguagucaca

SEQ ID NO: 1796868 - RNA, 19 nt, Homo sapiens
  misc_RNA (1)...(19): siRNA sense strand
ucaaggacuggaugcagaa

SEQ ID NO: 1796869 - RNA, 19 nt, Homo sapiens
  misc_RNA (1)...(19): siRNA sense strand
caacaucccggugauccau

SEQ ID NO: 1796870 - RNA, 19 nt, Homo sapiens
  misc_RNA (1)...(19): siRNA sense strand
gagccuggcacuccaucga

SEQ ID NO: 1796871 - RNA, 19 nt, Homo sapiens
  misc_RNA (1)...(19): siRNA sense strand
gacaacuucgugagguuug

SEQ ID NO: 1796872 - RNA, 19 nt, Homo sapiens
  misc_RNA (1)...(19): siRNA sense strand
agaagggucuggggcauaa

SEQ ID NO: 1796873 - RNA, 19 nt, Homo sapiens
  misc_RNA (1)...(19): siRNA sense strand
cacaaggugcaccagauga

SEQ ID NO: 1796874 - RNA, 19 nt, Homo sapiens
  misc_RNA (1)...(19): siRNA sense strand
caaggugcaccagaugaug

SEQ ID NO: 1796875 - RNA, 19 nt, Homo sapiens
  misc_RNA (1)...(19): siRNA sense strand
gccaugagcuccuccagaa

SEQ ID NO: 1796876 - RNA, 19 nt, Homo sapiens
  misc_RNA (1)...(19): siRNA sense strand
ggacaucgcccacuacuac

SEQ ID NO: 1796877 - RNA, 19 nt, Homo sapiens
  misc_RNA (1)...(19): siRNA sense strand
gggacuacguggucaagaa

SEQ ID NO: 1796878 - RNA, 19 nt, Homo sapiens
  misc_RNA (1)...(19): siRNA sense strand
gcucuuugaugcccuucua

SEQ ID NO: 1796879 - RNA, 19 nt, Homo sapiens
  misc_RNA (1)...(19): siRNA sense strand
ucaaccagcugcccaagau

SEQ ID NO: 1796880 - RNA, 19 nt, Homo sapiens
  misc_RNA (1)...(19): siRNA sense strand
ggacaacuucgugagguuu

SEQ ID NO: 1796881 - RNA, 19 nt, Homo sapiens
  misc_RNA (1)...(19): siRNA sense strand
ccagcucccugcuaaggaa

SEQ ID NO: 1796882 - RNA, 19 nt, Homo sapiens
  misc_RNA (1)...(19): siRNA sense strand
guggccagcucccugcuaa

SEQ ID NO: 1796883 - RNA, 19 nt, Homo sapiens
  misc_RNA (1)...(19): siRNA sense strand
gggacaacuucgugagguu

SEQ ID NO: 1796884 - RNA, 19 nt, Homo sapiens
  misc_RNA (1)...(19): siRNA sense strand
uaaggaaggagaccaggaa

SEQ ID NO: 1796885 - RNA, 19 nt, Homo sapiens
  misc_RNA (1)...(19): siRNA sense strand
gacccuguccucaucauug

SEQ ID NO: 1796886 - RNA, 19 nt, Homo sapiens
  misc_RNA (1)...(19): siRNA sense strand
gaccaggaagccacccuaa

SEQ ID NO: 1796887 - RNA, 19 nt, Homo sapiens
  misc_RNA (1)...(19): siRNA sense strand
gcuacacacccuacacgaa

SEQ ID NO: 1796888 - RNA, 19 nt, Homo sapiens
  misc_RNA (1)...(19): siRNA sense strand
aggacuggaugcagaagaa

SEQ ID NO: 1796889 - RNA, 19 nt, Homo sapiens
  misc_RNA (1)...(19): siRNA sense strand
ccacaaggugcaccagaug

SEQ ID NO: 1796890 - RNA, 19 nt, Homo sapiens
  misc_RNA (1)...(19): siRNA sense strand
ggacuacguggucaagaag

SEQ ID NO: 1796891 - RNA, 19 nt, Homo sapiens
  misc_RNA (1)...(19): siRNA sense strand
ccguggcccugcucuuuga

SEQ ID NO: 1796892 - RNA, 19 nt, Homo sapiens
  misc_RNA (1)...(19): siRNA sense strand
guccggugcuguagucaca

SEQ ID NO: 1796893 - RNA, 19 nt, Homo sapiens
  misc_RNA (1)...(19): siRNA sense strand
caugagcuccuccagaaag

SEQ ID NO: 1796894 - RNA, 19 nt, Homo sapiens
  misc_RNA (1)...(19): siRNA sense strand
ucaaggacuggaugcagaa

SEQ ID NO: 1796895 - RNA, 19 nt, Homo sapiens
  misc_RNA (1)...(19): siRNA sense strand
caacaucccggugauccau

SEQ ID NO: 1796896 - RNA, 19 nt, Homo sapiens
  misc_RNA (1)...(19): siRNA sense strand
gagccuggcacuccaucga

SEQ ID NO: 1796897 - RNA, 19 nt, Homo sapiens
  misc_RNA (1)...(19): siRNA sense strand
gacaacuucgugagguuug

SEQ ID NO: 1796898 - RNA, 19 nt, Homo sapiens
  misc_RNA (1)...(19): siRNA sense strand
agaagggucuggggcauaa

SEQ ID NO: 1796899 - RNA, 19 nt, Homo sapiens
  misc_RNA (1)...(19): siRNA sense strand
cacaaggugcaccagauga

SEQ ID NO: 1796900 - RNA, 19 nt, Homo sapiens
  misc_RNA (1)...(19): siRNA sense strand
caaggugcaccagaugaug

SEQ ID NO: 1796901 - RNA, 19 nt, Homo sapiens
  misc_RNA (1)...(19): siRNA sense strand
ggacaucgcccacuacuac

SEQ ID NO: 1796902 - RNA, 19 nt, Homo sapiens
  misc_RNA (1)...(19): siRNA sense strand
gggacuacguggucaagaa

SEQ ID NO: 1796903 - RNA, 19 nt, Homo sapiens
  misc_RNA (1)...(19): siRNA sense strand
gcucuuugaugcccuucua

SEQ ID NO: 1796904 - RNA, 19 nt, Homo sapiens
  misc_RNA (1)...(19): siRNA sense strand
ucaaccagcugcccaagau

SEQ ID NO: 1796905 - RNA, 19 nt, Homo sapiens
  misc_RNA (1)...(19): siRNA sense strand
ggacaacuucgugagguuu

SEQ ID NO: 1796906 - RNA, 19 nt, Homo sapiens
  misc_RNA (1)...(19): siRNA sense strand
ccagcucccugcuaaggaa

SEQ ID NO: 1796907 - RNA, 19 nt, Homo sapiens
  misc_RNA (1)...(19): siRNA sense strand
guggccagcucccugcuaa

SEQ ID NO: 1796908 - RNA, 19 nt, Homo sapiens
  misc_RNA (1)...(19): siRNA sense strand
gggacaacuucgugagguu

SEQ ID NO: 1796909 - RNA, 19 nt, Homo sapiens
  misc_RNA (1)...(19): siRNA sense strand
uaaggaaggagaccaggaa

SEQ ID NO: 1796910 - RNA, 19 nt, Homo sapiens
  misc_RNA (1)...(19): siRNA sense strand
gacccuguccucaucauug

SEQ ID NO: 1796911 - RNA, 19 nt, Homo sapiens
  misc_RNA (1)...(19): siRNA sense strand
gaccaggaagccacccuaa

SEQ ID NO: 1796912 - RNA, 19 nt, Homo sapiens
  misc_RNA (1)...(19): siRNA sense strand
gcuacacacccuacacgaa

SEQ ID NO: 1796913 - RNA, 19 nt, Homo sapiens
  misc_RNA (1)...(19): siRNA sense strand
aggacuggaugcagaagaa

SEQ ID NO: 1796914 - RNA, 19 nt, Homo sapiens
  misc_RNA (1)...(19): siRNA sense strand
ccacaaggugcaccagaug

SEQ ID NO: 1796915 - RNA, 19 nt, Homo sapiens
  misc_RNA (1)...(19): siRNA sense strand
ggacuacguggucaagaag

SEQ ID NO: 1796916 - RNA, 19 nt, Homo sapiens
  misc_RNA (1)...(19): siRNA sense strand
ccguggcccugcucuuuga

SEQ ID NO: 1796917 - RNA, 19 nt, Homo sapiens
  misc_RNA (1)...(19): siRNA sense strand
guccggugcuguagucaca

SEQ ID NO: 1796918 - RNA, 19 nt, Homo sapiens
  misc_RNA (1)...(19): siRNA sense strand
ucaaggacuggaugcagaa

SEQ ID NO: 1796919 - RNA, 19 nt, Homo sapiens
  misc_RNA (1)...(19): siRNA sense strand
caacaucccggugauccau

SEQ ID NO: 1796920 - RNA, 19 nt, Homo sapiens
  misc_RNA (1)...(19): siRNA sense strand
gagccuggcacuccaucga

SEQ ID NO: 1796921 - RNA, 19 nt, Homo sapiens
  misc_RNA (1)...(19): siRNA sense strand
gacaacuucgugagguuug

SEQ ID NO: 1796922 - RNA, 19 nt, Homo sapiens
  misc_RNA (1)...(19): siRNA sense strand
agaagggucuggggcauaa

SEQ ID NO: 1796923 - RNA, 19 nt, Homo sapiens
  misc_RNA (1)...(19): siRNA sense strand
cacaaggugcaccagauga

SEQ ID NO: 1796924 - RNA, 19 nt, Homo sapiens
  misc_RNA (1)...(19): siRNA sense strand
caaggugcaccagaugaug

SEQ ID NO: 1796925 - RNA, 19 nt, Homo sapiens
  misc_RNA (1)...(19): siRNA sense strand
ggacaucgcccacuacuac

SEQ ID NO: 1796926 - RNA, 19 nt, Homo sapiens
  misc_RNA (1)...(19): siRNA sense strand
gggacuacguggucaagaa

SEQ ID NO: 1796927 - RNA, 19 nt, Homo sapiens
  misc_RNA (1)...(19): siRNA sense strand
gcucuuugaugcccuucua

SEQ ID NO: 1796928 - RNA, 19 nt, Homo sapiens
  misc_RNA (1)...(19): siRNA sense strand
ucaaccagcugcccaagau

SEQ ID NO: 1796929 - RNA, 19 nt, Homo sapiens
  misc_RNA (1)...(19): siRNA sense strand
ggacaacuucgugagguuu

SEQ ID NO: 1796930 - RNA, 19 nt, Homo sapiens
  misc_RNA (1)...(19): siRNA sense strand
ccagcucccugcuaaggaa

SEQ ID NO: 1796931 - RNA, 19 nt, Homo sapiens
  misc_RNA (1)...(19): siRNA sense strand
guggccagcucccugcuaa

SEQ ID NO: 1796932 - RNA, 19 nt, Homo sapiens
  misc_RNA (1)...(19): siRNA sense strand
gggacaacuucgugagguu

SEQ ID NO: 1796933 - RNA, 19 nt, Homo sapiens
  misc_RNA (1)...(19): siRNA sense strand
uaaggaaggagaccaggaa

SEQ ID NO: 1796934 - RNA, 19 nt, Homo sapiens
  misc_RNA (1)...(19): siRNA sense strand
gacccuguccucaucauug

SEQ ID NO: 1796935 - RNA, 19 nt, Homo sapiens
  misc_RNA (1)...(19): siRNA sense strand
gaccaggaagccacccuaa

SEQ ID NO: 1796936 - RNA, 19 nt, Homo sapiens
  misc_RNA (1)...(19): siRNA sense strand
gcuacacacccuacacgaa

SEQ ID NO: 1796937 - RNA, 19 nt, Homo sapiens
  misc_RNA (1)...(19): siRNA sense strand
aggacuggaugcagaagaa

SEQ ID NO: 1796938 - RNA, 19 nt, Homo sapiens
  misc_RNA (1)...(19): siRNA sense strand
ccacaaggugcaccagaug

SEQ ID NO: 1796939 - RNA, 19 nt, Homo sapiens
  misc_RNA (1)...(19): siRNA sense strand
ggacuacguggucaagaag

SEQ ID NO: 1796940 - RNA, 19 nt, Homo sapiens
  misc_RNA (1)...(19): siRNA sense strand
ccguggcccugcucuuuga

SEQ ID NO: 1796941 - RNA, 19 nt, Homo sapiens
  misc_RNA (1)...(19): siRNA sense strand
guccggugcuguagucaca

SEQ ID NO: 1796942 - RNA, 19 nt, Homo sapiens
  misc_RNA (1)...(19): siRNA sense strand
ucaaggacuggaugcagaa

SEQ ID NO: 1796943 - RNA, 19 nt, Homo sapiens
  misc_RNA (1)...(19): siRNA sense strand
caacaucccggugauccau

SEQ ID NO: 1796944 - RNA, 19 nt, Homo sapiens
  misc_RNA (1)...(19): siRNA sense strand
gagccuggcacuccaucga

SEQ ID NO: 1796945 - RNA, 19 nt, Homo sapiens
  misc_RNA (1)...(19): siRNA sense strand
gacaacuucgugagguuug

SEQ ID NO: 1796946 - RNA, 19 nt, Homo sapiens
  misc_RNA (1)...(19): siRNA sense strand
agaagggucuggggcauaa

SEQ ID NO: 1796947 - RNA, 19 nt, Homo sapiens
  misc_RNA (1)...(19): siRNA sense strand
cacaaggugcaccagauga

SEQ ID NO: 1796948 - RNA, 19 nt, Homo sapiens
  misc_RNA (1)...(19): siRNA sense strand
caaggugcaccagaugaug

SEQ ID NO: 1796949 - RNA, 19 nt, Homo sapiens
  misc_RNA (1)...(19): siRNA sense strand
gaaagaagaucaagcuaca

SEQ ID NO: 1796950 - RNA, 19 nt, Homo sapiens
  misc_RNA (1)...(19): siRNA sense strand
gaugaugccuucaauacua

SEQ ID NO: 1796951 - RNA, 19 nt, Homo sapiens
  misc_RNA (1)...(19): siRNA sense strand
ggaauagacuucaagauca

SEQ ID NO: 1796952 - RNA, 19 nt, Homo sapiens
  misc_RNA (1)...(19): siRNA sense strand
gcaaauggcuuagaaacau

SEQ ID NO: 1796953 - RNA, 19 nt, Homo sapiens
  misc_RNA (1)...(19): siRNA sense strand
gaagaucaagcuacagaua

SEQ ID NO: 1796954 - RNA, 19 nt, Homo sapiens
  misc_RNA (1)...(19): siRNA sense strand
gaauagacuucaagaucaa

SEQ ID NO: 1796955 - RNA, 19 nt, Homo sapiens
  misc_RNA (1)...(19): siRNA sense strand
caaauggcuuagaaacaua

SEQ ID NO: 1796956 - RNA, 19 nt, Homo sapiens
  misc_RNA (1)...(19): siRNA sense strand
gggaagaccugcguccuuu

SEQ ID NO: 1796957 - RNA, 19 nt, Homo sapiens
  misc_RNA (1)...(19): siRNA sense strand
ggaaacaagugugauaugg

SEQ ID NO: 1796958 - RNA, 19 nt, Homo sapiens
  misc_RNA (1)...(19): siRNA sense strand
caaugaagauguggaaaga

SEQ ID NO: 1796959 - RNA, 19 nt, Homo sapiens
  misc_RNA (1)...(19): siRNA sense strand
caaaagaguuguaccuaaa

SEQ ID NO: 1796960 - RNA, 19 nt, Homo sapiens
  misc_RNA (1)...(19): siRNA sense strand
uagaugagcaugccaauga

SEQ ID NO: 1796961 - RNA, 19 nt, Homo sapiens
  misc_RNA (1)...(19): siRNA sense strand
gcaagggagcaugguauua

SEQ ID NO: 1796962 - RNA, 19 nt, Homo sapiens
  misc_RNA (1)...(19): siRNA sense strand
uaaaagagcccaacaguga

SEQ ID NO: 1796963 - RNA, 19 nt, Homo sapiens
  misc_RNA (1)...(19): siRNA sense strand
cacguuagcugaagauauc

SEQ ID NO: 1796964 - RNA, 19 nt, Homo sapiens
  misc_RNA (1)...(19): siRNA sense strand
uauaugacaucaccaaugg

SEQ ID NO: 1796965 - RNA, 19 nt, Homo sapiens
  misc_RNA (1)...(19): siRNA sense strand
gaaacaagugugauaugga

SEQ ID NO: 1796966 - RNA, 19 nt, Homo sapiens
  misc_RNA (1)...(19): siRNA sense strand
gaagauguggaaagaaugu

SEQ ID NO: 1796967 - RNA, 19 nt, Homo sapiens
  misc_RNA (1)...(19): siRNA sense strand
gaaagaccccuguaaaaga

SEQ ID NO: 1796968 - RNA, 19 nt, Homo sapiens
  misc_RNA (1)...(19): siRNA sense strand
ggagcaugguauuagguuu

SEQ ID NO: 1796969 - RNA, 19 nt, Homo sapiens
  misc_RNA (1)...(19): siRNA sense strand
acaguugaauuacaaggaa

SEQ ID NO: 1796970 - RNA, 19 nt, Homo sapiens
  misc_RNA (1)...(19): siRNA sense strand
gaauuacaaggaaagaaga

SEQ ID NO: 1796971 - RNA, 19 nt, Homo sapiens
  misc_RNA (1)...(19): siRNA sense strand
gaagacguacgaccugcuu

SEQ ID NO: 1796972 - RNA, 19 nt, Homo sapiens
  misc_RNA (1)...(19): siRNA sense strand
caagggagcaugguauuag

SEQ ID NO: 1796973 - RNA, 19 nt, Homo sapiens
  misc_RNA (1)...(19): siRNA sense strand
agaucaagcuacagauaug

SEQ ID NO: 1796974 - RNA, 19 nt, Homo sapiens
  misc_RNA (1)...(19): siRNA sense strand
cgcaauggguaucaugcua

SEQ ID NO: 1796975 - RNA, 19 nt, Homo sapiens
  misc_RNA (1)...(19): siRNA sense strand
aaagaauguuacugggaaa

SEQ ID NO: 1796976 - RNA, 19 nt, Homo sapiens
  misc_RNA (1)...(19): siRNA sense strand
guauaugacaucaccaaug

SEQ ID NO: 1796977 - RNA, 19 nt, Homo sapiens
  misc_RNA (1)...(19): siRNA sense strand
ggaaaaggaggacagauug

SEQ ID NO: 1796978 - RNA, 19 nt, Homo sapiens
  misc_RNA (1)...(19): siRNA sense strand
augaagauguggaaagaau

SEQ ID NO: 1796979 - RNA, 19 nt, Homo sapiens
  misc_RNA (1)...(19): siRNA sense strand
caucacaaccuccuacuac

SEQ ID NO: 1796980 - RNA, 19 nt, Homo sapiens
  misc_RNA (1)...(19): siRNA sense strand
gggaaacaagugugauaug

SEQ ID NO: 1796981 - RNA, 19 nt, Homo sapiens
  misc_RNA (1)...(19): siRNA sense strand
gcaugccaaugaagaugug

SEQ ID NO: 1796982 - RNA, 19 nt, Homo sapiens
  misc_RNA (1)...(19): siRNA sense strand
ccauaggaauagacuucaa

SEQ ID NO: 1796983 - RNA, 19 nt, Homo sapiens
  misc_RNA (1)...(19): siRNA sense strand
cuacagauaugggauacag

SEQ ID NO: 1796984 - RNA, 19 nt, Homo sapiens
  misc_RNA (1)...(19): siRNA sense strand
aaagagcccaacagugaaa

SEQ ID NO: 1796985 - RNA, 19 nt, Homo sapiens
  misc_RNA (1)...(19): siRNA sense strand
gcccaacagugaaaaugua

SEQ ID NO: 1796986 - RNA, 19 nt, Homo sapiens
  misc_RNA (1)...(19): siRNA sense strand
aggaauagacuucaagauc

SEQ ID NO: 1796987 - RNA, 19 nt, Homo sapiens
  misc_RNA (1)...(19): siRNA sense strand
caauggguaucaugcuagu

SEQ ID NO: 1796988 - RNA, 19 nt, Homo sapiens
  misc_RNA (1)...(19): siRNA sense strand
aagaagaucaagcuacaga

SEQ ID NO: 1796989 - RNA, 19 nt, Homo sapiens
  misc_RNA (1)...(19): siRNA sense strand
ccaaugaagauguggaaag

SEQ ID NO: 1796990 - RNA, 19 nt, Homo sapiens
  misc_RNA (1)...(19): siRNA sense strand
ugaauuacaaggaaagaag

SEQ ID NO: 1796991 - RNA, 19 nt, Homo sapiens
  misc_RNA (1)...(19): siRNA sense strand
gaguuguaccuaaaggaaa

SEQ ID NO: 1796992 - RNA, 19 nt, Homo sapiens
  misc_RNA (1)...(19): siRNA sense strand
caguugaauuacaaggaaa

SEQ ID NO: 1796993 - RNA, 19 nt, Homo sapiens
  misc_RNA (1)...(19): siRNA sense strand
agauguggaaagaauguua

SEQ ID NO: 1796994 - RNA, 19 nt, Homo sapiens
  misc_RNA (1)...(19): siRNA sense strand
aacaucagcaaauggcuua

SEQ ID NO: 1796995 - RNA, 19 nt, Homo sapiens
  misc_RNA (1)...(19): siRNA sense strand
cagcaggccaggagcgauu

SEQ ID NO: 1796996 - RNA, 19 nt, Homo sapiens
  misc_RNA (1)...(19): siRNA sense strand
caccauaggaauagacuuc

SEQ ID NO: 1796997 - RNA, 19 nt, Homo sapiens
  misc_RNA (1)...(19): siRNA sense strand
uaccuuuauuuccaccaua

SEQ ID NO: 1796998 - RNA, 19 nt, Homo sapiens
  misc_RNA (1)...(19): siRNA sense strand
gagcaugccaaugaagaug

SEQ ID NO: 1796999 - RNA, 19 nt, Homo sapiens
  misc_RNA (1)...(19): siRNA sense strand
agaugagcaugccaaugaa

SEQ ID NO: 1797000 - RNA, 19 nt, Homo sapiens
  misc_RNA (1)...(19): siRNA sense strand
cacaaccuccuacuacaga

SEQ ID NO: 1797001 - RNA, 19 nt, Homo sapiens
  misc_RNA (1)...(19): siRNA sense strand
ucacguuagcugaagauau

SEQ ID NO: 1797002 - RNA, 19 nt, Homo sapiens
  misc_RNA (1)...(19): siRNA sense strand
uggguaucaugcuaguaua

SEQ ID NO: 1797003 - RNA, 19 nt, Homo sapiens
  misc_RNA (1)...(19): siRNA sense strand
aagaucaagcuacagauau

SEQ ID NO: 1797004 - RNA, 19 nt, Homo sapiens
  misc_RNA (1)...(19): siRNA sense strand
gggagcaugguauuagguu

SEQ ID NO: 1797005 - RNA, 19 nt, Homo sapiens
  misc_RNA (1)...(19): siRNA sense strand
gguaucaugcuaguauaug

SEQ ID NO: 1797006 - RNA, 19 nt, Homo sapiens
  misc_RNA (1)...(19): siRNA sense strand
ggaugaugccuucaauacu

SEQ ID NO: 1797007 - RNA, 19 nt, Homo sapiens
  misc_RNA (1)...(19): siRNA sense strand
cggaugaugccuucaauac

SEQ ID NO: 1797008 - RNA, 19 nt, Homo sapiens
  misc_RNA (1)...(19): siRNA sense strand
aaagaguuguaccuaaagg

SEQ ID NO: 1797009 - RNA, 19 nt, Homo sapiens
  misc_RNA (1)...(19): siRNA sense strand
uuacaaggaaagaagauca

SEQ ID NO: 1797010 - RNA, 19 nt, Homo sapiens
  misc_RNA (1)...(19): siRNA sense strand
ugccuucaauacuaccuuu

SEQ ID NO: 1797011 - RNA, 19 nt, Homo sapiens
  misc_RNA (1)...(19): siRNA sense strand
agugugauauggacgacaa

SEQ ID NO: 1797012 - RNA, 19 nt, Homo sapiens
  misc_RNA (1)...(19): siRNA sense strand
cagcaaauggcuuagaaac

SEQ ID NO: 1797013 - RNA, 19 nt, Homo sapiens
  misc_RNA (1)...(19): siRNA sense strand
aaaggcguuccucacguua

SEQ ID NO: 1797014 - RNA, 19 nt, Homo sapiens
  misc_RNA (1)...(19): siRNA sense strand
gagcaugguauuagguuuu

SEQ ID NO: 1797015 - RNA, 19 nt, Homo sapiens
  misc_RNA (1)...(19): siRNA sense strand
agaguuguaccuaaaggaa

SEQ ID NO: 1797016 - RNA, 19 nt, Homo sapiens
  misc_RNA (1)...(19): siRNA sense strand
aagcuacagauaugggaua

SEQ ID NO: 1797017 - RNA, 19 nt, Homo sapiens
  misc_RNA (1)...(19): siRNA sense strand
cugggaaacaagugugaua

SEQ ID NO: 1797018 - RNA, 19 nt, Homo sapiens
  misc_RNA (1)...(19): siRNA sense strand
ggguaucaugcuaguauau

SEQ ID NO: 1797019 - RNA, 19 nt, Homo sapiens
  misc_RNA (1)...(19): siRNA sense strand
aaaaggcguuccucacguu

SEQ ID NO: 1797020 - RNA, 19 nt, Homo sapiens
  misc_RNA (1)...(19): siRNA sense strand
aaaggaggacagauugcaa

SEQ ID NO: 1797021 - RNA, 19 nt, Homo sapiens
  misc_RNA (1)...(19): siRNA sense strand
ggacggagacccgcaucua

SEQ ID NO: 1797022 - RNA, 19 nt, Homo sapiens
  misc_RNA (1)...(19): siRNA sense strand
ggagcacccggcacaauuu

SEQ ID NO: 1797023 - RNA, 19 nt, Homo sapiens
  misc_RNA (1)...(19): siRNA sense strand
gggccaaccuccugguguu

SEQ ID NO: 1797024 - RNA, 19 nt, Homo sapiens
  misc_RNA (1)...(19): siRNA sense strand
gcaucuaccugaccaacag

SEQ ID NO: 1797025 - RNA, 19 nt, Homo sapiens
  misc_RNA (1)...(19): siRNA sense strand
gagacccgcaucuacauga

SEQ ID NO: 1797026 - RNA, 19 nt, Homo sapiens
  misc_RNA (1)...(19): siRNA sense strand
gggcuucuacgccuacuug

SEQ ID NO: 1797027 - RNA, 19 nt, Homo sapiens
  misc_RNA (1)...(19): siRNA sense strand
gcacccggcacaauuucaa

SEQ ID NO: 1797028 - RNA, 19 nt, Homo sapiens
  misc_RNA (1)...(19): siRNA sense strand
gugcgugacccucgccuaa

SEQ ID NO: 1797029 - RNA, 19 nt, Homo sapiens
  misc_RNA (1)...(19): siRNA sense strand
caucugcuacuacuacaug

SEQ ID NO: 1797030 - RNA, 19 nt, Homo sapiens
  misc_RNA (1)...(19): siRNA sense strand
gcaucuacaugaccaaccu

SEQ ID NO: 1797031 - RNA, 19 nt, Homo sapiens
  misc_RNA (1)...(19): siRNA sense strand
cuacauggccaaggaguuc

SEQ ID NO: 1797032 - RNA, 19 nt, Homo sapiens
  misc_RNA (1)...(19): siRNA sense strand
ggagacccgcaucuacaug

SEQ ID NO: 1797033 - RNA, 19 nt, Homo sapiens
  misc_RNA (1)...(19): siRNA sense strand
acuacuacauggccaagga

SEQ ID NO: 1797034 - RNA, 19 nt, Homo sapiens
  misc_RNA (1)...(19): siRNA sense strand
gagcacccggcacaauuuc

SEQ ID NO: 1797035 - RNA, 19 nt, Homo sapiens
  misc_RNA (1)...(19): siRNA sense strand
ggcacaauuucaacuccau

SEQ ID NO: 1797036 - RNA, 19 nt, Homo sapiens
  misc_RNA (1)...(19): siRNA sense strand
uaaccagcaagcucucaga

SEQ ID NO: 1797037 - RNA, 19 nt, Homo sapiens
  misc_RNA (1)...(19): siRNA sense strand
gccaugagcuccuccagaa

SEQ ID NO: 1797038 - RNA, 19 nt, Homo sapiens
  misc_RNA (1)...(19): siRNA sense strand
ggacaucgcccacuacuac

SEQ ID NO: 1797039 - RNA, 19 nt, Homo sapiens
  misc_RNA (1)...(19): siRNA sense strand
gggacuacguggucaagaa

SEQ ID NO: 1797040 - RNA, 19 nt, Homo sapiens
  misc_RNA (1)...(19): siRNA sense strand
gcucuuugaugcccuucua

SEQ ID NO: 1797041 - RNA, 19 nt, Homo sapiens
  misc_RNA (1)...(19): siRNA sense strand
ucaaccagcugcccaagau

SEQ ID NO: 1797042 - RNA, 19 nt, Homo sapiens
  misc_RNA (1)...(19): siRNA sense strand
ggacaacuucgugagguuu

SEQ ID NO: 1797043 - RNA, 19 nt, Homo sapiens
  misc_RNA (1)...(19): siRNA sense strand
ccagcucccugcuaaggaa

SEQ ID NO: 1797044 - RNA, 19 nt, Homo sapiens
  misc_RNA (1)...(19): siRNA sense strand
guggccagcucccugcuaa

SEQ ID NO: 1797045 - RNA, 19 nt, Homo sapiens
  misc_RNA (1)...(19): siRNA sense strand
gggacaacuucgugagguu

SEQ ID NO: 1797046 - RNA, 19 nt, Homo sapiens
  misc_RNA (1)...(19): siRNA sense strand
uaaggaaggagaccaggaa

SEQ ID NO: 1797047 - RNA, 19 nt, Homo sapiens
  misc_RNA (1)...(19): siRNA sense strand
gacccuguccucaucauug

SEQ ID NO: 1797048 - RNA, 19 nt, Homo sapiens
  misc_RNA (1)...(19): siRNA sense strand
gaccaggaagccacccuaa

SEQ ID NO: 1797049 - RNA, 19 nt, Homo sapiens
  misc_RNA (1)...(19): siRNA sense strand
gcuacacacccuacacgaa

SEQ ID NO: 1797050 - RNA, 19 nt, Homo sapiens
  misc_RNA (1)...(19): siRNA sense strand
aggacuggaugcagaagaa

SEQ ID NO: 1797051 - RNA, 19 nt, Homo sapiens
  misc_RNA (1)...(19): siRNA sense strand
ccacaaggugcaccagaug

SEQ ID NO: 1797052 - RNA, 19 nt, Homo sapiens
  misc_RNA (1)...(19): siRNA sense strand
ggacuacguggucaagaag

SEQ ID NO: 1797053 - RNA, 19 nt, Homo sapiens
  misc_RNA (1)...(19): siRNA sense strand
ccguggcccugcucuuuga

SEQ ID NO: 1797054 - RNA, 19 nt, Homo sapiens
  misc_RNA (1)...(19): siRNA sense strand
guccggugcuguagucaca

SEQ ID NO: 1797055 - RNA, 19 nt, Homo sapiens
  misc_RNA (1)...(19): siRNA sense strand
caugagcuccuccagaaag

SEQ ID NO: 1797056 - RNA, 19 nt, Homo sapiens
  misc_RNA (1)...(19): siRNA sense strand
ucaaggacuggaugcagaa

SEQ ID NO: 1797057 - RNA, 19 nt, Homo sapiens
  misc_RNA (1)...(19): siRNA sense strand
caacaucccggugauccau

SEQ ID NO: 1797058 - RNA, 19 nt, Homo sapiens
  misc_RNA (1)...(19): siRNA sense strand
gagccuggcacuccaucga

SEQ ID NO: 1797059 - RNA, 19 nt, Homo sapiens
  misc_RNA (1)...(19): siRNA sense strand
gacaacuucgugagguuug

SEQ ID NO: 1797060 - RNA, 19 nt, Homo sapiens
  misc_RNA (1)...(19): siRNA sense strand
agaagggucuggggcauaa

SEQ ID NO: 1797061 - RNA, 19 nt, Homo sapiens
  misc_RNA (1)...(19): siRNA sense strand
cacaaggugcaccagauga

SEQ ID NO: 1797062 - RNA, 19 nt, Homo sapiens
  misc_RNA (1)...(19): siRNA sense strand
caaggugcaccagaugaug

SEQ ID NO: 1797063 - RNA, 19 nt, Homo sapiens
  misc_RNA (1)...(19): siRNA sense strand
ggacaucgcccacuacuac

SEQ ID NO: 1797064 - RNA, 19 nt, Homo sapiens
  misc_RNA (1)...(19): siRNA sense strand
gggacuacguggucaagaa

SEQ ID NO: 1797065 - RNA, 19 nt, Homo sapiens
  misc_RNA (1)...(19): siRNA sense strand
gcucuuugaugcccuucua

SEQ ID NO: 1797066 - RNA, 19 nt, Homo sapiens
  misc_RNA (1)...(19): siRNA sense strand
ucaaccagcugcccaagau

SEQ ID NO: 1797067 - RNA, 19 nt, Homo sapiens
  misc_RNA (1)...(19): siRNA sense strand
ggacaacuucgugagguuu

SEQ ID NO: 1797068 - RNA, 19 nt, Homo sapiens
  misc_RNA (1)...(19): siRNA sense strand
ccagcucccugcuaaggaa

SEQ ID NO: 1797069 - RNA, 19 nt, Homo sapiens
  misc_RNA (1)...(19): siRNA sense strand
guggccagcucccugcuaa

SEQ ID NO: 1797070 - RNA, 19 nt, Homo sapiens
  misc_RNA (1)...(19): siRNA sense strand
gggacaacuucgugagguu

SEQ ID NO: 1797071 - RNA, 19 nt, Homo sapiens
  misc_RNA (1)...(19): siRNA sense strand
uaaggaaggagaccaggaa

SEQ ID NO: 1797072 - RNA, 19 nt, Homo sapiens
  misc_RNA (1)...(19): siRNA sense strand
gacccuguccucaucauug

SEQ ID NO: 1797073 - RNA, 19 nt, Homo sapiens
  misc_RNA (1)...(19): siRNA sense strand
gaccaggaagccacccuaa

SEQ ID NO: 1797074 - RNA, 19 nt, Homo sapiens
  misc_RNA (1)...(19): siRNA sense strand
gcuacacacccuacacgaa

SEQ ID NO: 1797075 - RNA, 19 nt, Homo sapiens
  misc_RNA (1)...(19): siRNA sense strand
aggacuggaugcagaagaa

SEQ ID NO: 1797076 - RNA, 19 nt, Homo sapiens
  misc_RNA (1)...(19): siRNA sense strand
ccacaaggugcaccagaug

SEQ ID NO: 1797077 - RNA, 19 nt, Homo sapiens
  misc_RNA (1)...(19): siRNA sense strand
ggacuacguggucaagaag

SEQ ID NO: 1797078 - RNA, 19 nt, Homo sapiens
  misc_RNA (1)...(19): siRNA sense strand
ccguggcccugcucuuuga

SEQ ID NO: 1797079 - RNA, 19 nt, Homo sapiens
  misc_RNA (1)...(19): siRNA sense strand
guccggugcuguagucaca

SEQ ID NO: 1797080 - RNA, 19 nt, Homo sapiens
  misc_RNA (1)...(19): siRNA sense strand
ucaaggacuggaugcagaa

SEQ ID NO: 1797081 - RNA, 19 nt, Homo sapiens
  misc_RNA (1)...(19): siRNA sense strand
caacaucccggugauccau

SEQ ID NO: 1797082 - RNA, 19 nt, Homo sapiens
  misc_RNA (1)...(19): siRNA sense strand
gagccuggcacuccaucga

SEQ ID NO: 1797083 - RNA, 19 nt, Homo sapiens
  misc_RNA (1)...(19): siRNA sense strand
gacaacuucgugagguuug

SEQ ID NO: 1797084 - RNA, 19 nt, Homo sapiens
  misc_RNA (1)...(19): siRNA sense strand
agaagggucuggggcauaa

SEQ ID NO: 1797085 - RNA, 19 nt, Homo sapiens
  misc_RNA (1)...(19): siRNA sense strand
cacaaggugcaccagauga

SEQ ID NO: 1797086 - RNA, 19 nt, Homo sapiens
  misc_RNA (1)...(19): siRNA sense strand
caaggugcaccagaugaug

SEQ ID NO: 1797087 - RNA, 19 nt, Homo sapiens
  misc_RNA (1)...(19): siRNA sense strand
ggacaucgcccacuacuac

SEQ ID NO: 1797088 - RNA, 19 nt, Homo sapiens
  misc_RNA (1)...(19): siRNA sense strand
gggacuacguggucaagaa

SEQ ID NO: 1797089 - RNA, 19 nt, Homo sapiens
  misc_RNA (1)...(19): siRNA sense strand
gcucuuugaugcccuucua

SEQ ID NO: 1797090 - RNA, 19 nt, Homo sapiens
  misc_RNA (1)...(19): siRNA sense strand
ucaaccagcugcccaagau

SEQ ID NO: 1797091 - RNA, 19 nt, Homo sapiens
  misc_RNA (1)...(19): siRNA sense strand
ggacaacuucgugagguuu

SEQ ID NO: 1797092 - RNA, 19 nt, Homo sapiens
  misc_RNA (1)...(19): siRNA sense strand
ccagcucccugcuaaggaa

SEQ ID NO: 1797093 - RNA, 19 nt, Homo sapiens
  misc_RNA (1)...(19): siRNA sense strand
guggccagcucccugcuaa

SEQ ID NO: 1797094 - RNA, 19 nt, Homo sapiens
  misc_RNA (1)...(19): siRNA sense strand
gggacaacuucgugagguu

SEQ ID NO: 1797095 - RNA, 19 nt, Homo sapiens
  misc_RNA (1)...(19): siRNA sense strand
uaaggaaggagaccaggaa

SEQ ID NO: 1797096 - RNA, 19 nt, Homo sapiens
  misc_RNA (1)...(19): siRNA sense strand
gacccuguccucaucauug

SEQ ID NO: 1797097 - RNA, 19 nt, Homo sapiens
  misc_RNA (1)...(19): siRNA sense strand
gaccaggaagccacccuaa

SEQ ID NO: 1797098 - RNA, 19 nt, Homo sapiens
  misc_RNA (1)...(19): siRNA sense strand
gcuacacacccuacacgaa

SEQ ID NO: 1797099 - RNA, 19 nt, Homo sapiens
  misc_RNA (1)...(19): siRNA sense strand
aggacuggaugcagaagaa

SEQ ID NO: 1797100 - RNA, 19 nt, Homo sapiens
  misc_RNA (1)...(19): siRNA sense strand
ccacaaggugcaccagaug

SEQ ID NO: 1797101 - RNA, 19 nt, Homo sapiens
  misc_RNA (1)...(19): siRNA sense strand
ggacuacguggucaagaag

SEQ ID NO: 1797102 - RNA, 19 nt, Homo sapiens
  misc_RNA (1)...(19): siRNA sense strand
ccguggcccugcucuuuga

SEQ ID NO: 1797103 - RNA, 19 nt, Homo sapiens
  misc_RNA (1)...(19): siRNA sense strand
guccggugcuguagucaca

SEQ ID NO: 1797104 - RNA, 19 nt, Homo sapiens
  misc_RNA (1)...(19): siRNA sense strand
ucaaggacuggaugcagaa

SEQ ID NO: 1797105 - RNA, 19 nt, Homo sapiens
  misc_RNA (1)...(19): siRNA sense strand
caacaucccggugauccau

SEQ ID NO: 1797106 - RNA, 19 nt, Homo sapiens
  misc_RNA (1)...(19): siRNA sense strand
gagccuggcacuccaucga

SEQ ID NO: 1797107 - RNA, 19 nt, Homo sapiens
  misc_RNA (1)...(19): siRNA sense strand
gacaacuucgugagguuug

SEQ ID NO: 1797108 - RNA, 19 nt, Homo sapiens
  misc_RNA (1)...(19): siRNA sense strand
agaagggucuggggcauaa

SEQ ID NO: 1797109 - RNA, 19 nt, Homo sapiens
  misc_RNA (1)...(19): siRNA sense strand
cacaaggugcaccagauga

SEQ ID NO: 1797110 - RNA, 19 nt, Homo sapiens
  misc_RNA (1)...(19): siRNA sense strand
caaggugcaccagaugaug

SEQ ID NO: 1797111 - RNA, 19 nt, Homo sapiens
  misc_RNA (1)...(19): siRNA sense strand
gaaagcaucuggaacaaca

SEQ ID NO: 1797112 - RNA, 19 nt, Homo sapiens
  misc_RNA (1)...(19): siRNA sense strand
ggaugcaccucaagcagua

SEQ ID NO: 1797113 - RNA, 19 nt, Homo sapiens
  misc_RNA (1)...(19): siRNA sense strand
ggagaagaucccaaaguua

SEQ ID NO: 1797114 - RNA, 19 nt, Homo sapiens
  misc_RNA (1)...(19): siRNA sense strand
ucacugacuuugaauauuc

SEQ ID NO: 1797115 - RNA, 19 nt, Homo sapiens
  misc_RNA (1)...(19): siRNA sense strand
gaaaauggauccagugcuu

SEQ ID NO: 1797116 - RNA, 19 nt, Homo sapiens
  misc_RNA (1)...(19): siRNA sense strand
gaccauuucuaucaucuug

SEQ ID NO: 1797117 - RNA, 19 nt, Homo sapiens
  misc_RNA (1)...(19): siRNA sense strand
gaagauaacaacaccaaca

SEQ ID NO: 1797118 - RNA, 19 nt, Homo sapiens
  misc_RNA (1)...(19): siRNA sense strand
gcaaugaguacuauaauac

SEQ ID NO: 1797119 - RNA, 19 nt, Homo sapiens
  misc_RNA (1)...(19): siRNA sense strand
ggaauucuuugaccaugug

SEQ ID NO: 1797120 - RNA, 19 nt, Homo sapiens
  misc_RNA (1)...(19): siRNA sense strand
gagaagaucccaaaguuac

SEQ ID NO: 1797121 - RNA, 19 nt, Homo sapiens
  misc_RNA (1)...(19): siRNA sense strand
ugaagacuauuucccagaa

SEQ ID NO: 1797122 - RNA, 19 nt, Homo sapiens
  misc_RNA (1)...(19): siRNA sense strand
gcacgucaauggguuuaau

SEQ ID NO: 1797123 - RNA, 19 nt, Homo sapiens
  misc_RNA (1)...(19): siRNA sense strand
guucugacaucugggauuu

SEQ ID NO: 1797124 - RNA, 19 nt, Homo sapiens
  misc_RNA (1)...(19): siRNA sense strand
uaaagaugcuaucgugaca

SEQ ID NO: 1797125 - RNA, 19 nt, Homo sapiens
  misc_RNA (1)...(19): siRNA sense strand
aggagaagaucccaaaguu

SEQ ID NO: 1797126 - RNA, 19 nt, Homo sapiens
  misc_RNA (1)...(19): siRNA sense strand
gaaggcaugcuuugagaga

SEQ ID NO: 1797127 - RNA, 19 nt, Homo sapiens
  misc_RNA (1)...(19): siRNA sense strand
gaugcuaucgugacaauug

SEQ ID NO: 1797128 - RNA, 19 nt, Homo sapiens
  misc_RNA (1)...(19): siRNA sense strand
ucuaucaucuuguucuuga

SEQ ID NO: 1797129 - RNA, 19 nt, Homo sapiens
  misc_RNA (1)...(19): siRNA sense strand
gugaaggcaugcuuugaga

SEQ ID NO: 1797130 - RNA, 19 nt, Homo sapiens
  misc_RNA (1)...(19): siRNA sense strand
caagauaugcuggcagaaa

SEQ ID NO: 1797131 - RNA, 19 nt, Homo sapiens
  misc_RNA (1)...(19): siRNA sense strand
gagaagauaacaacaccaa

SEQ ID NO: 1797132 - RNA, 19 nt, Homo sapiens
  misc_RNA (1)...(19): siRNA sense strand
caacgaauaccagcugauu

SEQ ID NO: 1797133 - RNA, 19 nt, Homo sapiens
  misc_RNA (1)...(19): siRNA sense strand
gaagacuauuucccagaau

SEQ ID NO: 1797134 - RNA, 19 nt, Homo sapiens
  misc_RNA (1)...(19): siRNA sense strand
cccagaauaugcaaauuau

SEQ ID NO: 1797135 - RNA, 19 nt, Homo sapiens
  misc_RNA (1)...(19): siRNA sense strand
aaauggauccagugcuuua

SEQ ID NO: 1797136 - RNA, 19 nt, Homo sapiens
  misc_RNA (1)...(19): siRNA sense strand
gagagucccuggaucuuuu

SEQ ID NO: 1797137 - RNA, 19 nt, Homo sapiens
  misc_RNA (1)...(19): siRNA sense strand
ucacagcuaucauuuacgu

SEQ ID NO: 1797138 - RNA, 19 nt, Homo sapiens
  misc_RNA (1)...(19): siRNA sense strand
ccauuucuaucaucuuguu

SEQ ID NO: 1797139 - RNA, 19 nt, Homo sapiens
  misc_RNA (1)...(19): siRNA sense strand
gaugucacagcuaucauuu

SEQ ID NO: 1797140 - RNA, 19 nt, Homo sapiens
  misc_RNA (1)...(19): siRNA sense strand
ugucacagcuaucauuuac

SEQ ID NO: 1797141 - RNA, 19 nt, Homo sapiens
  misc_RNA (1)...(19): siRNA sense strand
gaagaucccaaaguuacaa

SEQ ID NO: 1797142 - RNA, 19 nt, Homo sapiens
  misc_RNA (1)...(19): siRNA sense strand
ucagcaaugaguacuauaa

SEQ ID NO: 1797143 - RNA, 19 nt, Homo sapiens
  misc_RNA (1)...(19): siRNA sense strand
uuacggaccauuucuauca

SEQ ID NO: 1797144 - RNA, 19 nt, Homo sapiens
  misc_RNA (1)...(19): siRNA sense strand
uuaacgaugucacagcuau

SEQ ID NO: 1797145 - RNA, 19 nt, Homo sapiens
  misc_RNA (1)...(19): siRNA sense strand
gcaguaugagcucuuguga

SEQ ID NO: 1797146 - RNA, 19 nt, Homo sapiens
  misc_RNA (1)...(19): siRNA sense strand
ucccagaauaugcaaauua

SEQ ID NO: 1797147 - RNA, 19 nt, Homo sapiens
  misc_RNA (1)...(19): siRNA sense strand
ugagagauccaacgaauac

SEQ ID NO: 1797148 - RNA, 19 nt, Homo sapiens
  misc_RNA (1)...(19): siRNA sense strand
caacauggugauucgagaa

SEQ ID NO: 1797149 - RNA, 19 nt, Homo sapiens
  misc_RNA (1)...(19): siRNA sense strand
cagcuugguugacuacaca

SEQ ID NO: 1797150 - RNA, 19 nt, Homo sapiens
  misc_RNA (1)...(19): siRNA sense strand
gaagacgcaacaccagaug

SEQ ID NO: 1797151 - RNA, 19 nt, Homo sapiens
  misc_RNA (1)...(19): siRNA sense strand
acgaauaccagcugauuga

SEQ ID NO: 1797152 - RNA, 19 nt, Homo sapiens
  misc_RNA (1)...(19): siRNA sense strand
gaucagacuacaucaagag

SEQ ID NO: 1797153 - RNA, 19 nt, Homo sapiens
  misc_RNA (1)...(19): siRNA sense strand
aagaugcuaucgugacaau

SEQ ID NO: 1797154 - RNA, 19 nt, Homo sapiens
  misc_RNA (1)...(19): siRNA sense strand
uuugagagauccaacgaau

SEQ ID NO: 1797155 - RNA, 19 nt, Homo sapiens
  misc_RNA (1)...(19): siRNA sense strand
gcuaucgugacaauuguuu

SEQ ID NO: 1797156 - RNA, 19 nt, Homo sapiens
  misc_RNA (1)...(19): siRNA sense strand
ccggugacggcaaacauua

SEQ ID NO: 1797157 - RNA, 19 nt, Homo sapiens
  misc_RNA (1)...(19): siRNA sense strand
gcuacaacauggugauucg

SEQ ID NO: 1797158 - RNA, 19 nt, Homo sapiens
  misc_RNA (1)...(19): siRNA sense strand
cgaucagacuacaucaaga

SEQ ID NO: 1797159 - RNA, 19 nt, Homo sapiens
  misc_RNA (1)...(19): siRNA sense strand
caauuucgaucagacuaca

SEQ ID NO: 1797160 - RNA, 19 nt, Homo sapiens
  misc_RNA (1)...(19): siRNA sense strand
ugacugugcacaauacuuc

SEQ ID NO: 1797161 - RNA, 19 nt, Homo sapiens
  misc_RNA (1)...(19): siRNA sense strand
cccuaucacugacuuugaa

SEQ ID NO: 1797162 - RNA, 19 nt, Homo sapiens
  misc_RNA (1)...(19): siRNA sense strand
cagacuacaucaagagcau

SEQ ID NO: 1797163 - RNA, 19 nt, Homo sapiens
  misc_RNA (1)...(19): siRNA sense strand
cgaugucacagcuaucauu

SEQ ID NO: 1797164 - RNA, 19 nt, Homo sapiens
  misc_RNA (1)...(19): siRNA sense strand
cgacagcgucagcuugguu

SEQ ID NO: 1797165 - RNA, 19 nt, Homo sapiens
  misc_RNA (1)...(19): siRNA sense strand
caacgacugccgcgacauc

SEQ ID NO: 1797166 - RNA, 19 nt, Homo sapiens
  misc_RNA (1)...(19): siRNA sense strand
gguuacggaccauuucuau

SEQ ID NO: 1797167 - RNA, 19 nt, Homo sapiens
  misc_RNA (1)...(19): siRNA sense strand
gcugagagagucccuggau

SEQ ID NO: 1797168 - RNA, 19 nt, Homo sapiens
  misc_RNA (1)...(19): siRNA sense strand
ccaaguggacaaaguaaac

SEQ ID NO: 1797169 - RNA, 19 nt, Homo sapiens
  misc_RNA (1)...(19): siRNA sense strand
cagcaaugaguacuauaau

SEQ ID NO: 1797170 - RNA, 19 nt, Homo sapiens
  misc_RNA (1)...(19): siRNA sense strand
gagagagucccuggaucuu

SEQ ID NO: 1797171 - RNA, 19 nt, Homo sapiens
  misc_RNA (1)...(19): siRNA sense strand
cauggugauucgagaagau

SEQ ID NO: 1797172 - RNA, 19 nt, Homo sapiens
  misc_RNA (1)...(19): siRNA sense strand
uuucagcaaugaguacuau

SEQ ID NO: 1797173 - RNA, 19 nt, Homo sapiens
  misc_RNA (1)...(19): siRNA sense strand
gcugauugacugugcacaa

SEQ ID NO: 1797174 - RNA, 19 nt, Homo sapiens
  misc_RNA (1)...(19): siRNA sense strand
ugagagagucccuggaucu

SEQ ID NO: 1797175 - RNA, 19 nt, Homo sapiens
  misc_RNA (1)...(19): siRNA sense strand
gauccagugcuuuaacgau

SEQ ID NO: 1797176 - RNA, 19 nt, Homo sapiens
  misc_RNA (1)...(19): siRNA sense strand
ugaggauccugcacgucaa

SEQ ID NO: 1797177 - RNA, 19 nt, Homo sapiens
  misc_RNA (1)...(19): siRNA sense strand
caggagaagaucccaaagu

SEQ ID NO: 1797178 - RNA, 19 nt, Homo sapiens
  misc_RNA (1)...(19): siRNA sense strand
auuauacuguuccugaaga

SEQ ID NO: 1797179 - RNA, 19 nt, Homo sapiens
  misc_RNA (1)...(19): siRNA sense strand
aagauaugcuggcagaaaa

SEQ ID NO: 1797180 - RNA, 19 nt, Homo sapiens
  misc_RNA (1)...(19): siRNA sense strand
gaaucgacagcgucagcuu

SEQ ID NO: 1797181 - RNA, 19 nt, Homo sapiens
  misc_RNA (1)...(19): siRNA sense strand
gaauaccagcugauugacu

SEQ ID NO: 1797182 - RNA, 19 nt, Homo sapiens
  misc_RNA (1)...(19): siRNA sense strand
ggacgaugaaggcgugaag

SEQ ID NO: 1797183 - RNA, 19 nt, Homo sapiens
  misc_RNA (1)...(19): siRNA sense strand
ggccaacccugaaaaccaa

SEQ ID NO: 1797184 - RNA, 19 nt, Homo sapiens
  misc_RNA (1)...(19): siRNA sense strand
aacaccagaugcaggagaa

SEQ ID NO: 1797185 - RNA, 19 nt, Homo sapiens
  misc_RNA (1)...(19): siRNA sense strand
cuccucagaugcagaguuc

SEQ ID NO: 1797186 - RNA, 19 nt, Homo sapiens
  misc_RNA (1)...(19): siRNA sense strand
ucaaacagaugaggauccu

SEQ ID NO: 1797187 - RNA, 19 nt, Homo sapiens
  misc_RNA (1)...(19): siRNA sense strand
acuauaauaccuccaguuc

SEQ ID NO: 1797188 - RNA, 19 nt, Homo sapiens
  misc_RNA (1)...(19): siRNA sense strand
agagagucccuggaucuuu

SEQ ID NO: 1797189 - RNA, 19 nt, Homo sapiens
  misc_RNA (1)...(19): siRNA sense strand
ugagacacgauuccaagug

SEQ ID NO: 1797190 - RNA, 19 nt, Homo sapiens
  misc_RNA (1)...(19): siRNA sense strand
cgacugccgcgacaucauc

SEQ ID NO: 1797191 - RNA, 19 nt, Homo sapiens
  misc_RNA (1)...(19): siRNA sense strand
ugaagacgcaacaccagau

SEQ ID NO: 1797192 - RNA, 19 nt, Homo sapiens
  misc_RNA (1)...(19): siRNA sense strand
uuugaaagcaucuggaaca

SEQ ID NO: 1797193 - RNA, 19 nt, Homo sapiens
  misc_RNA (1)...(19): siRNA sense strand
uugaaagcaucuggaacaa

SEQ ID NO: 1797194 - RNA, 19 nt, Homo sapiens
  misc_RNA (1)...(19): siRNA sense strand
gaaagcaucuggaacaaca

SEQ ID NO: 1797195 - RNA, 19 nt, Homo sapiens
  misc_RNA (1)...(19): siRNA sense strand
ggaugcaccucaagcagua

SEQ ID NO: 1797196 - RNA, 19 nt, Homo sapiens
  misc_RNA (1)...(19): siRNA sense strand
ggagaagaucccaaaguua

SEQ ID NO: 1797197 - RNA, 19 nt, Homo sapiens
  misc_RNA (1)...(19): siRNA sense strand
ucacugacuuugaauauuc

SEQ ID NO: 1797198 - RNA, 19 nt, Homo sapiens
  misc_RNA (1)...(19): siRNA sense strand
gaaaauggauccagugcuu

SEQ ID NO: 1797199 - RNA, 19 nt, Homo sapiens
  misc_RNA (1)...(19): siRNA sense strand
gaccauuucuaucaucuug

SEQ ID NO: 1797200 - RNA, 19 nt, Homo sapiens
  misc_RNA (1)...(19): siRNA sense strand
gaagauaacaacaccaaca

SEQ ID NO: 1797201 - RNA, 19 nt, Homo sapiens
  misc_RNA (1)...(19): siRNA sense strand
gcaaugaguacuauaauac

SEQ ID NO: 1797202 - RNA, 19 nt, Homo sapiens
  misc_RNA (1)...(19): siRNA sense strand
ggaauucuuugaccaugug

SEQ ID NO: 1797203 - RNA, 19 nt, Homo sapiens
  misc_RNA (1)...(19): siRNA sense strand
gagaagaucccaaaguuac

SEQ ID NO: 1797204 - RNA, 19 nt, Homo sapiens
  misc_RNA (1)...(19): siRNA sense strand
ugaagacuauuucccagaa

SEQ ID NO: 1797205 - RNA, 19 nt, Homo sapiens
  misc_RNA (1)...(19): siRNA sense strand
gcacgucaauggguuuaau

SEQ ID NO: 1797206 - RNA, 19 nt, Homo sapiens
  misc_RNA (1)...(19): siRNA sense strand
guucugacaucugggauuu

SEQ ID NO: 1797207 - RNA, 19 nt, Homo sapiens
  misc_RNA (1)...(19): siRNA sense strand
uaaagaugcuaucgugaca

SEQ ID NO: 1797208 - RNA, 19 nt, Homo sapiens
  misc_RNA (1)...(19): siRNA sense strand
aggagaagaucccaaaguu

SEQ ID NO: 1797209 - RNA, 19 nt, Homo sapiens
  misc_RNA (1)...(19): siRNA sense strand
gaaggcaugcuuugagaga

SEQ ID NO: 1797210 - RNA, 19 nt, Homo sapiens
  misc_RNA (1)...(19): siRNA sense strand
gaugcuaucgugacaauug

SEQ ID NO: 1797211 - RNA, 19 nt, Homo sapiens
  misc_RNA (1)...(19): siRNA sense strand
ucuaucaucuuguucuuga

SEQ ID NO: 1797212 - RNA, 19 nt, Homo sapiens
  misc_RNA (1)...(19): siRNA sense strand
gugaaggcaugcuuugaga

SEQ ID NO: 1797213 - RNA, 19 nt, Homo sapiens
  misc_RNA (1)...(19): siRNA sense strand
caagauaugcuggcagaaa

SEQ ID NO: 1797214 - RNA, 19 nt, Homo sapiens
  misc_RNA (1)...(19): siRNA sense strand
gagaagauaacaacaccaa

SEQ ID NO: 1797215 - RNA, 19 nt, Homo sapiens
  misc_RNA (1)...(19): siRNA sense strand
caacgaauaccagcugauu

SEQ ID NO: 1797216 - RNA, 19 nt, Homo sapiens
  misc_RNA (1)...(19): siRNA sense strand
gaagacuauuucccagaau

SEQ ID NO: 1797217 - RNA, 19 nt, Homo sapiens
  misc_RNA (1)...(19): siRNA sense strand
cccagaauaugcaaauuau

SEQ ID NO: 1797218 - RNA, 19 nt, Homo sapiens
  misc_RNA (1)...(19): siRNA sense strand
aaauggauccagugcuuua

SEQ ID NO: 1797219 - RNA, 19 nt, Homo sapiens
  misc_RNA (1)...(19): siRNA sense strand
gagagucccuggaucuuuu

SEQ ID NO: 1797220 - RNA, 19 nt, Homo sapiens
  misc_RNA (1)...(19): siRNA sense strand
ucacagcuaucauuuacgu

SEQ ID NO: 1797221 - RNA, 19 nt, Homo sapiens
  misc_RNA (1)...(19): siRNA sense strand
ccauuucuaucaucuuguu

SEQ ID NO: 1797222 - RNA, 19 nt, Homo sapiens
  misc_RNA (1)...(19): siRNA sense strand
gaugucacagcuaucauuu

SEQ ID NO: 1797223 - RNA, 19 nt, Homo sapiens
  misc_RNA (1)...(19): siRNA sense strand
ugucacagcuaucauuuac

SEQ ID NO: 1797224 - RNA, 19 nt, Homo sapiens
  misc_RNA (1)...(19): siRNA sense strand
gaagaucccaaaguuacaa

SEQ ID NO: 1797225 - RNA, 19 nt, Homo sapiens
  misc_RNA (1)...(19): siRNA sense strand
ucagcaaugaguacuauaa

SEQ ID NO: 1797226 - RNA, 19 nt, Homo sapiens
  misc_RNA (1)...(19): siRNA sense strand
uuacggaccauuucuauca

SEQ ID NO: 1797227 - RNA, 19 nt, Homo sapiens
  misc_RNA (1)...(19): siRNA sense strand
uuaacgaugucacagcuau

SEQ ID NO: 1797228 - RNA, 19 nt, Homo sapiens
  misc_RNA (1)...(19): siRNA sense strand
gcaguaugagcucuuguga

SEQ ID NO: 1797229 - RNA, 19 nt, Homo sapiens
  misc_RNA (1)...(19): siRNA sense strand
ucccagaauaugcaaauua

SEQ ID NO: 1797230 - RNA, 19 nt, Homo sapiens
  misc_RNA (1)...(19): siRNA sense strand
ugagagauccaacgaauac

SEQ ID NO: 1797231 - RNA, 19 nt, Homo sapiens
  misc_RNA (1)...(19): siRNA sense strand
caacauggugauucgagaa

SEQ ID NO: 1797232 - RNA, 19 nt, Homo sapiens
  misc_RNA (1)...(19): siRNA sense strand
cagcuugguugacuacaca

SEQ ID NO: 1797233 - RNA, 19 nt, Homo sapiens
  misc_RNA (1)...(19): siRNA sense strand
gaagacgcaacaccagaug

SEQ ID NO: 1797234 - RNA, 19 nt, Homo sapiens
  misc_RNA (1)...(19): siRNA sense strand
acgaauaccagcugauuga

SEQ ID NO: 1797235 - RNA, 19 nt, Homo sapiens
  misc_RNA (1)...(19): siRNA sense strand
gaucagacuacaucaagag

SEQ ID NO: 1797236 - RNA, 19 nt, Homo sapiens
  misc_RNA (1)...(19): siRNA sense strand
aagaugcuaucgugacaau

SEQ ID NO: 1797237 - RNA, 19 nt, Homo sapiens
  misc_RNA (1)...(19): siRNA sense strand
uuugagagauccaacgaau

SEQ ID NO: 1797238 - RNA, 19 nt, Homo sapiens
  misc_RNA (1)...(19): siRNA sense strand
gcuaucgugacaauuguuu

SEQ ID NO: 1797239 - RNA, 19 nt, Homo sapiens
  misc_RNA (1)...(19): siRNA sense strand
ccggugacggcaaacauua

SEQ ID NO: 1797240 - RNA, 19 nt, Homo sapiens
  misc_RNA (1)...(19): siRNA sense strand
gcuacaacauggugauucg

SEQ ID NO: 1797241 - RNA, 19 nt, Homo sapiens
  misc_RNA (1)...(19): siRNA sense strand
cgaucagacuacaucaaga

SEQ ID NO: 1797242 - RNA, 19 nt, Homo sapiens
  misc_RNA (1)...(19): siRNA sense strand
caauuucgaucagacuaca

SEQ ID NO: 1797243 - RNA, 19 nt, Homo sapiens
  misc_RNA (1)...(19): siRNA sense strand
ugacugugcacaauacuuc

SEQ ID NO: 1797244 - RNA, 19 nt, Homo sapiens
  misc_RNA (1)...(19): siRNA sense strand
cccuaucacugacuuugaa

SEQ ID NO: 1797245 - RNA, 19 nt, Homo sapiens
  misc_RNA (1)...(19): siRNA sense strand
cagacuacaucaagagcau

SEQ ID NO: 1797246 - RNA, 19 nt, Homo sapiens
  misc_RNA (1)...(19): siRNA sense strand
cgaugucacagcuaucauu

SEQ ID NO: 1797247 - RNA, 19 nt, Homo sapiens
  misc_RNA (1)...(19): siRNA sense strand
cgacagcgucagcuugguu

SEQ ID NO: 1797248 - RNA, 19 nt, Homo sapiens
  misc_RNA (1)...(19): siRNA sense strand
caacgacugccgcgacauc

SEQ ID NO: 1797249 - RNA, 19 nt, Homo sapiens
  misc_RNA (1)...(19): siRNA sense strand
gguuacggaccauuucuau

SEQ ID NO: 1797250 - RNA, 19 nt, Homo sapiens
  misc_RNA (1)...(19): siRNA sense strand
gcugagagagucccuggau

SEQ ID NO: 1797251 - RNA, 19 nt, Homo sapiens
  misc_RNA (1)...(19): siRNA sense strand
ccaaguggacaaaguaaac

SEQ ID NO: 1797252 - RNA, 19 nt, Homo sapiens
  misc_RNA (1)...(19): siRNA sense strand
cagcaaugaguacuauaau

SEQ ID NO: 1797253 - RNA, 19 nt, Homo sapiens
  misc_RNA (1)...(19): siRNA sense strand
gagagagucccuggaucuu

SEQ ID NO: 1797254 - RNA, 19 nt, Homo sapiens
  misc_RNA (1)...(19): siRNA sense strand
cauggugauucgagaagau

SEQ ID NO: 1797255 - RNA, 19 nt, Homo sapiens
  misc_RNA (1)...(19): siRNA sense strand
uuucagcaaugaguacuau

SEQ ID NO: 1797256 - RNA, 19 nt, Homo sapiens
  misc_RNA (1)...(19): siRNA sense strand
gcugauugacugugcacaa

SEQ ID NO: 1797257 - RNA, 19 nt, Homo sapiens
  misc_RNA (1)...(19): siRNA sense strand
ugagagagucccuggaucu

SEQ ID NO: 1797258 - RNA, 19 nt, Homo sapiens
  misc_RNA (1)...(19): siRNA sense strand
gauccagugcuuuaacgau

SEQ ID NO: 1797259 - RNA, 19 nt, Homo sapiens
  misc_RNA (1)...(19): siRNA sense strand
ugaggauccugcacgucaa

SEQ ID NO: 1797260 - RNA, 19 nt, Homo sapiens
  misc_RNA (1)...(19): siRNA sense strand
caggagaagaucccaaagu

SEQ ID NO: 1797261 - RNA, 19 nt, Homo sapiens
  misc_RNA (1)...(19): siRNA sense strand
auuauacuguuccugaaga

SEQ ID NO: 1797262 - RNA, 19 nt, Homo sapiens
  misc_RNA (1)...(19): siRNA sense strand
aagauaugcuggcagaaaa

SEQ ID NO: 1797263 - RNA, 19 nt, Homo sapiens
  misc_RNA (1)...(19): siRNA sense strand
gaaucgacagcgucagcuu

SEQ ID NO: 1797264 - RNA, 19 nt, Homo sapiens
  misc_RNA (1)...(19): siRNA sense strand
gaauaccagcugauugacu

SEQ ID NO: 1797265 - RNA, 19 nt, Homo sapiens
  misc_RNA (1)...(19): siRNA sense strand
ggacgaugaaggcgugaag

SEQ ID NO: 1797266 - RNA, 19 nt, Homo sapiens
  misc_RNA (1)...(19): siRNA sense strand
ggccaacccugaaaaccaa

SEQ ID NO: 1797267 - RNA, 19 nt, Homo sapiens
  misc_RNA (1)...(19): siRNA sense strand
aacaccagaugcaggagaa

SEQ ID NO: 1797268 - RNA, 19 nt, Homo sapiens
  misc_RNA (1)...(19): siRNA sense strand
cuccucagaugcagaguuc

SEQ ID NO: 1797269 - RNA, 19 nt, Homo sapiens
  misc_RNA (1)...(19): siRNA sense strand
ucaaacagaugaggauccu

SEQ ID NO: 1797270 - RNA, 19 nt, Homo sapiens
  misc_RNA (1)...(19): siRNA sense strand
acuauaauaccuccaguuc

SEQ ID NO: 1797271 - RNA, 19 nt, Homo sapiens
  misc_RNA (1)...(19): siRNA sense strand
agagagucccuggaucuuu

SEQ ID NO: 1797272 - RNA, 19 nt, Homo sapiens
  misc_RNA (1)...(19): siRNA sense strand
ugagacacgauuccaagug

SEQ ID NO: 1797273 - RNA, 19 nt, Homo sapiens
  misc_RNA (1)...(19): siRNA sense strand
cgacugccgcgacaucauc

SEQ ID NO: 1797274 - RNA, 19 nt, Homo sapiens
  misc_RNA (1)...(19): siRNA sense strand
ugaagacgcaacaccagau

SEQ ID NO: 1797275 - RNA, 19 nt, Homo sapiens
  misc_RNA (1)...(19): siRNA sense strand
uuugaaagcaucuggaaca

SEQ ID NO: 1797276 - RNA, 19 nt, Homo sapiens
  misc_RNA (1)...(19): siRNA sense strand
uugaaagcaucuggaacaa

SEQ ID NO: 1797277 - RNA, 19 nt, Homo sapiens
  misc_RNA (1)...(19): siRNA sense strand
gagaaagaguugcugaaug

SEQ ID NO: 1797278 - RNA, 19 nt, Homo sapiens
  misc_RNA (1)...(19): siRNA sense strand
caagaaagucugcauugua

SEQ ID NO: 1797279 - RNA, 19 nt, Homo sapiens
  misc_RNA (1)...(19): siRNA sense strand
gcaagaaagucugcauugu

SEQ ID NO: 1797280 - RNA, 19 nt, Homo sapiens
  misc_RNA (1)...(19): siRNA sense strand
ggaagacauuggaggcaaa

SEQ ID NO: 1797281 - RNA, 19 nt, Homo sapiens
  misc_RNA (1)...(19): siRNA sense strand
acaccaaacuuccguauca

SEQ ID NO: 1797282 - RNA, 19 nt, Homo sapiens
  misc_RNA (1)...(19): siRNA sense strand
agagaucuguggagccuua

SEQ ID NO: 1797283 - RNA, 19 nt, Homo sapiens
  misc_RNA (1)...(19): siRNA sense strand
agaaagaguugcugaaugg

SEQ ID NO: 1797284 - RNA, 19 nt, Homo sapiens
  misc_RNA (1)...(19): siRNA sense strand
acuggcauaucucuuauua

SEQ ID NO: 1797285 - RNA, 19 nt, Homo sapiens
  misc_RNA (1)...(19): siRNA sense strand
gcaugagaaugucaaauac

SEQ ID NO: 1797286 - RNA, 19 nt, Homo sapiens
  misc_RNA (1)...(19): siRNA sense strand
aagaaagucugcauuguag

SEQ ID NO: 1797287 - RNA, 19 nt, Homo sapiens
  misc_RNA (1)...(19): siRNA sense strand
cgagguggcugaugagaag

SEQ ID NO: 1797288 - RNA, 19 nt, Homo sapiens
  misc_RNA (1)...(19): siRNA sense strand
gcaagagguggacacagua

SEQ ID NO: 1797289 - RNA, 19 nt, Homo sapiens
  misc_RNA (1)...(19): siRNA sense strand
gcucaucucggaagugauu

SEQ ID NO: 1797290 - RNA, 19 nt, Homo sapiens
  misc_RNA (1)...(19): siRNA sense strand
gcagaaucauccagaacau

SEQ ID NO: 1797291 - RNA, 19 nt, Homo sapiens
  misc_RNA (1)...(19): siRNA sense strand
gcucagccaucgccaagau

SEQ ID NO: 1797292 - RNA, 19 nt, Homo sapiens
  misc_RNA (1)...(19): siRNA sense strand
guacaggaaaguccauuga

SEQ ID NO: 1797293 - RNA, 19 nt, Homo sapiens
  misc_RNA (1)...(19): siRNA sense strand
ccaaugggcugaagcucau

SEQ ID NO: 1797294 - RNA, 19 nt, Homo sapiens
  misc_RNA (1)...(19): siRNA sense strand
gaucguggguggcaaugca

SEQ ID NO: 1797295 - RNA, 19 nt, Homo sapiens
  misc_RNA (1)...(19): siRNA sense strand
ggagaaagaguugcugaau

SEQ ID NO: 1797296 - RNA, 19 nt, Homo sapiens
  misc_RNA (1)...(19): siRNA sense strand
uugagcagcuggagaaaga

SEQ ID NO: 1797297 - RNA, 19 nt, Homo sapiens
  misc_RNA (1)...(19): siRNA sense strand
guucauggcuguguacaag

SEQ ID NO: 1797298 - RNA, 19 nt, Homo sapiens
  misc_RNA (1)...(19): siRNA sense strand
gcugacauccugaucuuug

SEQ ID NO: 1797299 - RNA, 19 nt, Homo sapiens
  misc_RNA (1)...(19): siRNA sense strand
acaagggccugguagacaa

SEQ ID NO: 1797300 - RNA, 19 nt, Homo sapiens
  misc_RNA (1)...(19): siRNA sense strand
ccacuggcauaucucuuau

SEQ ID NO: 1797301 - RNA, 19 nt, Homo sapiens
  misc_RNA (1)...(19): siRNA sense strand
gguccaggcugcagaggau

SEQ ID NO: 1797302 - RNA, 19 nt, Homo sapiens
  misc_RNA (1)...(19): siRNA sense strand
agggacaacuccugaaaga

SEQ ID NO: 1797303 - RNA, 19 nt, Homo sapiens
  misc_RNA (1)...(19): siRNA sense strand
gccagugggugaauucauc

SEQ ID NO: 1797304 - RNA, 19 nt, Homo sapiens
  misc_RNA (1)...(19): siRNA sense strand
uuggagagcugugguguug

SEQ ID NO: 1797305 - RNA, 19 nt, Homo sapiens
  misc_RNA (1)...(19): siRNA sense strand
ggagagcugugguguugcu

SEQ ID NO: 1797306 - RNA, 19 nt, Homo sapiens
  misc_RNA (1)...(19): siRNA sense strand
acacgcagcaugagaaugu

SEQ ID NO: 1797307 - RNA, 19 nt, Homo sapiens
  misc_RNA (1)...(19): siRNA sense strand
ccauugagcagcuggagaa

SEQ ID NO: 1797308 - RNA, 19 nt, Homo sapiens
  misc_RNA (1)...(19): siRNA sense strand
aagcucaucucggaaguga

SEQ ID NO: 1797309 - RNA, 19 nt, Homo sapiens
  misc_RNA (1)...(19): siRNA sense strand
agcaugagaaugucaaaua

SEQ ID NO: 1797310 - RNA, 19 nt, Homo sapiens
  misc_RNA (1)...(19): siRNA sense strand
uguggagccuuaaagaaug

SEQ ID NO: 1797311 - RNA, 19 nt, Homo sapiens
  misc_RNA (1)...(19): siRNA sense strand
agaaucauccagaacauau

SEQ ID NO: 1797312 - RNA, 19 nt, Homo sapiens
  misc_RNA (1)...(19): siRNA sense strand
ccugaucacuaccugcuau

SEQ ID NO: 1797313 - RNA, 19 nt, Homo sapiens
  misc_RNA (1)...(19): siRNA sense strand
gcucaagggccaucugaag

SEQ ID NO: 1797314 - RNA, 19 nt, Homo sapiens
  misc_RNA (1)...(19): siRNA sense strand
cagaaucauccagaacaua

SEQ ID NO: 1797315 - RNA, 19 nt, Homo sapiens
  misc_RNA (1)...(19): siRNA sense strand
gguauuugaggaagacauu

SEQ ID NO: 1797316 - RNA, 19 nt, Homo sapiens
  misc_RNA (1)...(19): siRNA sense strand
ugcaagagguggacacagu

SEQ ID NO: 1797317 - RNA, 19 nt, Homo sapiens
  misc_RNA (1)...(19): siRNA sense strand
gagcugaugcagacaccaa

SEQ ID NO: 1797318 - RNA, 19 nt, Homo sapiens
  misc_RNA (1)...(19): siRNA sense strand
gaucacuaccugcuaugga

SEQ ID NO: 1797319 - RNA, 19 nt, Homo sapiens
  misc_RNA (1)...(19): siRNA sense strand
guaucacaguggugcaaga

SEQ ID NO: 1797320 - RNA, 19 nt, Homo sapiens
  misc_RNA (1)...(19): siRNA sense strand
ucaacacgcagcaugagaa

SEQ ID NO: 1797321 - RNA, 19 nt, Homo sapiens
  misc_RNA (1)...(19): siRNA sense strand
agacaaccauuggcugcaa

SEQ ID NO: 1797322 - RNA, 19 nt, Homo sapiens
  misc_RNA (1)...(19): siRNA sense strand
caacacgcagcaugagaau

SEQ ID NO: 1797323 - RNA, 19 nt, Homo sapiens
  misc_RNA (1)...(19): siRNA sense strand
uugcugaccugaucacuac

SEQ ID NO: 1797324 - RNA, 19 nt, Homo sapiens
  misc_RNA (1)...(19): siRNA sense strand
guggagccuuaaagaaugu

SEQ ID NO: 1797325 - RNA, 19 nt, Homo sapiens
  misc_RNA (1)...(19): siRNA sense strand
gcacaagggccugguagac

SEQ ID NO: 1797326 - RNA, 19 nt, Homo sapiens
  misc_RNA (1)...(19): siRNA sense strand
gcagcuggagaaagaguug

SEQ ID NO: 1797327 - RNA, 19 nt, Homo sapiens
  misc_RNA (1)...(19): siRNA sense strand
ugugguggcugucccagau

SEQ ID NO: 1797328 - RNA, 19 nt, Homo sapiens
  misc_RNA (1)...(19): siRNA sense strand
gaaucauccagaacauaug

SEQ ID NO: 1797329 - RNA, 19 nt, Homo sapiens
  misc_RNA (1)...(19): siRNA sense strand
gcgagguggcugaugagaa

SEQ ID NO: 1797330 - RNA, 19 nt, Homo sapiens
  misc_RNA (1)...(19): siRNA sense strand
gaucuguggagccuuaaag

SEQ ID NO: 1797331 - RNA, 19 nt, Homo sapiens
  misc_RNA (1)...(19): siRNA sense strand
gaugcagacaccaaacuuc

SEQ ID NO: 1797332 - RNA, 19 nt, Homo sapiens
  misc_RNA (1)...(19): siRNA sense strand
uagcaagaaagucugcauu

SEQ ID NO: 1797333 - RNA, 19 nt, Homo sapiens
  misc_RNA (1)...(19): siRNA sense strand
gggccugguagacaaguuu

SEQ ID NO: 1797334 - RNA, 19 nt, Homo sapiens
  misc_RNA (1)...(19): siRNA sense strand
caagaucguggguggcaau

SEQ ID NO: 1797335 - RNA, 19 nt, Homo sapiens
  misc_RNA (1)...(19): siRNA sense strand
gugaccauguggguauuug

SEQ ID NO: 1797336 - RNA, 19 nt, Homo sapiens
  misc_RNA (1)...(19): siRNA sense strand
gcagcaugagaaugucaaa

SEQ ID NO: 1797337 - RNA, 19 nt, Homo sapiens
  misc_RNA (1)...(19): siRNA sense strand
cagcucaagggccaucuga

SEQ ID NO: 1797338 - RNA, 19 nt, Homo sapiens
  misc_RNA (1)...(19): siRNA sense strand
ccugcagaaucauccagaa

SEQ ID NO: 1797339 - RNA, 19 nt, Homo sapiens
  misc_RNA (1)...(19): siRNA sense strand
ucauggcuguguacaaggu

SEQ ID NO: 1797340 - RNA, 19 nt, Homo sapiens
  misc_RNA (1)...(19): siRNA sense strand
caccaaggcggcagugauc

SEQ ID NO: 1797341 - RNA, 19 nt, Homo sapiens
  misc_RNA (1)...(19): siRNA sense strand
caagagguggacacaguag

SEQ ID NO: 1797342 - RNA, 19 nt, Homo sapiens
  misc_RNA (1)...(19): siRNA sense strand
gagguggacacaguagaga

SEQ ID NO: 1797343 - RNA, 19 nt, Homo sapiens
  misc_RNA (1)...(19): siRNA sense strand
uguacaaggugugcuacga

SEQ ID NO: 1797344 - RNA, 19 nt, Homo sapiens
  misc_RNA (1)...(19): siRNA sense strand
guugcugaccugaucacua

SEQ ID NO: 1797345 - RNA, 19 nt, Homo sapiens
  misc_RNA (1)...(19): siRNA sense strand
ggcugggacucauggagau

SEQ ID NO: 1797346 - RNA, 19 nt, Homo sapiens
  misc_RNA (1)...(19): siRNA sense strand
gugauggccugggcuuugg

SEQ ID NO: 1797347 - RNA, 19 nt, Homo sapiens
  misc_RNA (1)...(19): siRNA sense strand
ggagaacucuacauucaua

SEQ ID NO: 1797348 - RNA, 19 nt, Homo sapiens
  misc_RNA (1)...(19): siRNA sense strand
gaaggaagguucaguuguu

SEQ ID NO: 1797349 - RNA, 19 nt, Homo sapiens
  misc_RNA (1)...(19): siRNA sense strand
gaagaucccaacucuauua

SEQ ID NO: 1797350 - RNA, 19 nt, Homo sapiens
  misc_RNA (1)...(19): siRNA sense strand
gaugaaagaugguaaagug

SEQ ID NO: 1797351 - RNA, 19 nt, Homo sapiens
  misc_RNA (1)...(19): siRNA sense strand
caggaacgcugauuaguuu

SEQ ID NO: 1797352 - RNA, 19 nt, Homo sapiens
  misc_RNA (1)...(19): siRNA sense strand
ggaaggcacuuacucaaug

SEQ ID NO: 1797353 - RNA, 19 nt, Homo sapiens
  misc_RNA (1)...(19): siRNA sense strand
gaaagaugguaaagugauu

SEQ ID NO: 1797354 - RNA, 19 nt, Homo sapiens
  misc_RNA (1)...(19): siRNA sense strand
gaucccaacucuauuauug

SEQ ID NO: 1797355 - RNA, 19 nt, Homo sapiens
  misc_RNA (1)...(19): siRNA sense strand
gaacuguagugaugaaaga

SEQ ID NO: 1797356 - RNA, 19 nt, Homo sapiens
  misc_RNA (1)...(19): siRNA sense strand
gggcgaagcuuccaaguuc

SEQ ID NO: 1797357 - RNA, 19 nt, Homo sapiens
  misc_RNA (1)...(19): siRNA sense strand
caaagcaggugauuguuau

SEQ ID NO: 1797358 - RNA, 19 nt, Homo sapiens
  misc_RNA (1)...(19): siRNA sense strand
caaaagagauguccaaaga

SEQ ID NO: 1797359 - RNA, 19 nt, Homo sapiens
  misc_RNA (1)...(19): siRNA sense strand
caucgugggugcacucaua

SEQ ID NO: 1797360 - RNA, 19 nt, Homo sapiens
  misc_RNA (1)...(19): siRNA sense strand
caggagaacucuacauuca

SEQ ID NO: 1797361 - RNA, 19 nt, Homo sapiens
  misc_RNA (1)...(19): siRNA sense strand
gaaacucuuugcucaacaa

SEQ ID NO: 1797362 - RNA, 19 nt, Homo sapiens
  misc_RNA (1)...(19): siRNA sense strand
uaagggaauuacucacaua

SEQ ID NO: 1797363 - RNA, 19 nt, Homo sapiens
  misc_RNA (1)...(19): siRNA sense strand
cuacagugguuauaacauu

SEQ ID NO: 1797364 - RNA, 19 nt, Homo sapiens
  misc_RNA (1)...(19): siRNA sense strand
gacccaagcuuuacuacug

SEQ ID NO: 1797365 - RNA, 19 nt, Homo sapiens
  misc_RNA (1)...(19): siRNA sense strand
ggaaauuucuggcacacau

SEQ ID NO: 1797366 - RNA, 19 nt, Homo sapiens
  misc_RNA (1)...(19): siRNA sense strand
caagaacugugguguaaag

SEQ ID NO: 1797367 - RNA, 19 nt, Homo sapiens
  misc_RNA (1)...(19): siRNA sense strand
ucacagggauacuggguuu

SEQ ID NO: 1797368 - RNA, 19 nt, Homo sapiens
  misc_RNA (1)...(19): siRNA sense strand
uagaggaacuguagugaug

SEQ ID NO: 1797369 - RNA, 19 nt, Homo sapiens
  misc_RNA (1)...(19): siRNA sense strand
uggaugagaucaaccauga

SEQ ID NO: 1797370 - RNA, 19 nt, Homo sapiens
  misc_RNA (1)...(19): siRNA sense strand
aaccaggaauuccauauaa

SEQ ID NO: 1797371 - RNA, 19 nt, Homo sapiens
  misc_RNA (1)...(19): siRNA sense strand
ucaaagcaggugauuguua

SEQ ID NO: 1797372 - RNA, 19 nt, Homo sapiens
  misc_RNA (1)...(19): siRNA sense strand
ggaaauggaugagaucaac

SEQ ID NO: 1797373 - RNA, 19 nt, Homo sapiens
  misc_RNA (1)...(19): siRNA sense strand
cagcuaagauucugauagu

SEQ ID NO: 1797374 - RNA, 19 nt, Homo sapiens
  misc_RNA (1)...(19): siRNA sense strand
ucaugaagcugaccuuuua

SEQ ID NO: 1797375 - RNA, 19 nt, Homo sapiens
  misc_RNA (1)...(19): siRNA sense strand
guucucagaugaucacuau

SEQ ID NO: 1797376 - RNA, 19 nt, Homo sapiens
  misc_RNA (1)...(19): siRNA sense strand
ccaaagagauauuccaaaa

SEQ ID NO: 1797377 - RNA, 19 nt, Homo sapiens
  misc_RNA (1)...(19): siRNA sense strand
ucaagaagaucccaacucu

SEQ ID NO: 1797378 - RNA, 19 nt, Homo sapiens
  misc_RNA (1)...(19): siRNA sense strand
caacauugcagguggcuuu

SEQ ID NO: 1797379 - RNA, 19 nt, Homo sapiens
  misc_RNA (1)...(19): siRNA sense strand
cauauccucugucaacauu

SEQ ID NO: 1797380 - RNA, 19 nt, Homo sapiens
  misc_RNA (1)...(19): siRNA sense strand
uuauaaggcuguuguccua

SEQ ID NO: 1797381 - RNA, 19 nt, Homo sapiens
  misc_RNA (1)...(19): siRNA sense strand
aaagagauguccaaagagu

SEQ ID NO: 1797382 - RNA, 19 nt, Homo sapiens
  misc_RNA (1)...(19): siRNA sense strand
guucaguuguuguggauuu

SEQ ID NO: 1797383 - RNA, 19 nt, Homo sapiens
  misc_RNA (1)...(19): siRNA sense strand
gcuaagauucugauaguug

SEQ ID NO: 1797384 - RNA, 19 nt, Homo sapiens
  misc_RNA (1)...(19): siRNA sense strand
gagcuaaugacacuguuaa

SEQ ID NO: 1797385 - RNA, 19 nt, Homo sapiens
  misc_RNA (1)...(19): siRNA sense strand
cauaugacauuguguugga

SEQ ID NO: 1797386 - RNA, 19 nt, Homo sapiens
  misc_RNA (1)...(19): siRNA sense strand
gcacacauacggaaaucaa

SEQ ID NO: 1797387 - RNA, 19 nt, Homo sapiens
  misc_RNA (1)...(19): siRNA sense strand
uugcauagcugaguacauu

SEQ ID NO: 1797388 - RNA, 19 nt, Homo sapiens
  misc_RNA (1)...(19): siRNA sense strand
gccaaacgcauccagauuu

SEQ ID NO: 1797389 - RNA, 19 nt, Homo sapiens
  misc_RNA (1)...(19): siRNA sense strand
gcucuccacucaccacuga

SEQ ID NO: 1797390 - RNA, 19 nt, Homo sapiens
  misc_RNA (1)...(19): siRNA sense strand
aauccagaguugcuaaaua

SEQ ID NO: 1797391 - RNA, 19 nt, Homo sapiens
  misc_RNA (1)...(19): siRNA sense strand
gagaauccuaucagaagua

SEQ ID NO: 1797392 - RNA, 19 nt, Homo sapiens
  misc_RNA (1)...(19): siRNA sense strand
gcauucauauccucuguca

SEQ ID NO: 1797393 - RNA, 19 nt, Homo sapiens
  misc_RNA (1)...(19): siRNA sense strand
ggacaaggaggauaugcaa

SEQ ID NO: 1797394 - RNA, 19 nt, Homo sapiens
  misc_RNA (1)...(19): siRNA sense strand
gagguggacuugaaggaau

SEQ ID NO: 1797395 - RNA, 19 nt, Homo sapiens
  misc_RNA (1)...(19): siRNA sense strand
gaaauuucuggcacacaua

SEQ ID NO: 1797396 - RNA, 19 nt, Homo sapiens
  misc_RNA (1)...(19): siRNA sense strand
gaggaacuguagugaugaa

SEQ ID NO: 1797397 - RNA, 19 nt, Homo sapiens
  misc_RNA (1)...(19): siRNA sense strand
gucaacggcuucugcauau

SEQ ID NO: 1797398 - RNA, 19 nt, Homo sapiens
  misc_RNA (1)...(19): siRNA sense strand
ccaaacgcauccagauuuc

SEQ ID NO: 1797399 - RNA, 19 nt, Homo sapiens
  misc_RNA (1)...(19): siRNA sense strand
agagaaugcuggacauguu

SEQ ID NO: 1797400 - RNA, 19 nt, Homo sapiens
  misc_RNA (1)...(19): siRNA sense strand
gacaguggcugagcuggaa

SEQ ID NO: 1797401 - RNA, 19 nt, Homo sapiens
  misc_RNA (1)...(19): siRNA sense strand
aagaagaucccaacucuau

SEQ ID NO: 1797402 - RNA, 19 nt, Homo sapiens
  misc_RNA (1)...(19): siRNA sense strand
auccagaguugcuaaauaa

SEQ ID NO: 1797403 - RNA, 19 nt, Homo sapiens
  misc_RNA (1)...(19): siRNA sense strand
cuaaugacacuguuaauuc

SEQ ID NO: 1797404 - RNA, 19 nt, Homo sapiens
  misc_RNA (1)...(19): siRNA sense strand
gcuaaugacacuguuaauu

SEQ ID NO: 1797405 - RNA, 19 nt, Homo sapiens
  misc_RNA (1)...(19): siRNA sense strand
ugguaaagaugcucacuga

SEQ ID NO: 1797406 - RNA, 19 nt, Homo sapiens
  misc_RNA (1)...(19): siRNA sense strand
gauaguugguggugguguu

SEQ ID NO: 1797407 - RNA, 19 nt, Homo sapiens
  misc_RNA (1)...(19): siRNA sense strand
gaugggaggacauuuguau

SEQ ID NO: 1797408 - RNA, 19 nt, Homo sapiens
  misc_RNA (1)...(19): siRNA sense strand
aaagucagguuuggaauuc

SEQ ID NO: 1797409 - RNA, 19 nt, Homo sapiens
  misc_RNA (1)...(19): siRNA sense strand
guuagagaauccuaucaga

SEQ ID NO: 1797410 - RNA, 19 nt, Homo sapiens
  misc_RNA (1)...(19): siRNA sense strand
gaaaaguuccuccagcuaa

SEQ ID NO: 1797411 - RNA, 19 nt, Homo sapiens
  misc_RNA (1)...(19): siRNA sense strand
ggucaugucauuagaggaa

SEQ ID NO: 1797412 - RNA, 19 nt, Homo sapiens
  misc_RNA (1)...(19): siRNA sense strand
uacgaugggucaugucauu

SEQ ID NO: 1797413 - RNA, 19 nt, Homo sapiens
  misc_RNA (1)...(19): siRNA sense strand
gcaggugauuguuaugaag

SEQ ID NO: 1797414 - RNA, 19 nt, Homo sapiens
  misc_RNA (1)...(19): siRNA sense strand
aaaccaggaauuccauaua

SEQ ID NO: 1797415 - RNA, 19 nt, Homo sapiens
  misc_RNA (1)...(19): siRNA sense strand
cuacaguucuggcaaugga

SEQ ID NO: 1797416 - RNA, 19 nt, Homo sapiens
  misc_RNA (1)...(19): siRNA sense strand
uggccuaccucggcacuua

SEQ ID NO: 1797417 - RNA, 19 nt, Homo sapiens
  misc_RNA (1)...(19): siRNA sense strand
gauacuggguuugggcauu

SEQ ID NO: 1797418 - RNA, 19 nt, Homo sapiens
  misc_RNA (1)...(19): siRNA sense strand
ccaacaacaucaccaaacu

SEQ ID NO: 1797419 - RNA, 19 nt, Homo sapiens
  misc_RNA (1)...(19): siRNA sense strand
uggccaacauugcggguua

SEQ ID NO: 1797420 - RNA, 19 nt, Homo sapiens
  misc_RNA (1)...(19): siRNA sense strand
caacauugcggguuauaag

SEQ ID NO: 1797421 - RNA, 19 nt, Homo sapiens
  misc_RNA (1)...(19): siRNA sense strand
gaaaguuagagaauccuau

SEQ ID NO: 1797422 - RNA, 19 nt, Homo sapiens
  misc_RNA (1)...(19): siRNA sense strand
ggagguagacauccuuauc

SEQ ID NO: 1797423 - RNA, 19 nt, Homo sapiens
  misc_RNA (1)...(19): siRNA sense strand
cacaauugcucagggauau

SEQ ID NO: 1797424 - RNA, 19 nt, Homo sapiens
  misc_RNA (1)...(19): siRNA sense strand
uaauucagcagcucaagaa

SEQ ID NO: 1797425 - RNA, 19 nt, Homo sapiens
  misc_RNA (1)...(19): siRNA sense strand
ggagcuaaugacacuguua

SEQ ID NO: 1797426 - RNA, 19 nt, Homo sapiens
  misc_RNA (1)...(19): siRNA sense strand
ccgaaugccuggucagcuu

SEQ ID NO: 1797427 - RNA, 19 nt, Homo sapiens
  misc_RNA (1)...(19): siRNA sense strand
gaugggucaugucauuaga

SEQ ID NO: 1797428 - RNA, 19 nt, Homo sapiens
  misc_RNA (1)...(19): siRNA sense strand
gagguagacauccuuauca

SEQ ID NO: 1797429 - RNA, 19 nt, Homo sapiens
  misc_RNA (1)...(19): siRNA sense strand
cagcacuuauuccagguaa

SEQ ID NO: 1797430 - RNA, 19 nt, Homo sapiens
  misc_RNA (1)...(19): siRNA sense strand
ggaaaacccauggaaauuu

SEQ ID NO: 1797431 - RNA, 19 nt, Homo sapiens
  misc_RNA (1)...(19): siRNA sense strand
gcacugaugggaggacauu

SEQ ID NO: 1797432 - RNA, 19 nt, Homo sapiens
  misc_RNA (1)...(19): siRNA sense strand
gaaacuuugaaaccacuaa

SEQ ID NO: 1797433 - RNA, 19 nt, Homo sapiens
  misc_RNA (1)...(19): siRNA sense strand
agaauccuaucagaaguaa

SEQ ID NO: 1797434 - RNA, 19 nt, Homo sapiens
  misc_RNA (1)...(19): siRNA sense strand
gaaggcacuuacucaaugc

SEQ ID NO: 1797435 - RNA, 19 nt, Homo sapiens
  misc_RNA (1)...(19): siRNA sense strand
guaagggucuacgugugaa

SEQ ID NO: 1797436 - RNA, 19 nt, Homo sapiens
  misc_RNA (1)...(19): siRNA sense strand
cauauaagcaacugacugu

SEQ ID NO: 1797437 - RNA, 19 nt, Homo sapiens
  misc_RNA (1)...(19): siRNA sense strand
gcauagcugaguacauuau

SEQ ID NO: 1797438 - RNA, 19 nt, Homo sapiens
  misc_RNA (1)...(19): siRNA sense strand
ugaggcugguggaaacuuu

SEQ ID NO: 1797439 - RNA, 19 nt, Homo sapiens
  misc_RNA (1)...(19): siRNA sense strand
uaucagcacagcacuuauu

SEQ ID NO: 1797440 - RNA, 19 nt, Homo sapiens
  misc_RNA (1)...(19): siRNA sense strand
gguggaaacuuugaaacca

SEQ ID NO: 1797441 - RNA, 19 nt, Homo sapiens
  misc_RNA (1)...(19): siRNA sense strand
guaauuggagcuaaugaca

SEQ ID NO: 1797442 - RNA, 19 nt, Homo sapiens
  misc_RNA (1)...(19): siRNA sense strand
gauuugguccuuguaauug

SEQ ID NO: 1797443 - RNA, 19 nt, Homo sapiens
  misc_RNA (1)...(19): siRNA sense strand
caucauguguguggcaaug

SEQ ID NO: 1797444 - RNA, 19 nt, Homo sapiens
  misc_RNA (1)...(19): siRNA sense strand
acaacaaucugcugaccau

SEQ ID NO: 1797445 - RNA, 19 nt, Homo sapiens
  misc_RNA (1)...(19): siRNA sense strand
ugucaacggcuucugcaua

SEQ ID NO: 1797446 - RNA, 19 nt, Homo sapiens
  misc_RNA (1)...(19): siRNA sense strand
gccaggagaacucuacauu

SEQ ID NO: 1797447 - RNA, 19 nt, Homo sapiens
  misc_RNA (1)...(19): siRNA sense strand
ggagaacucuacauucaua

SEQ ID NO: 1797448 - RNA, 19 nt, Homo sapiens
  misc_RNA (1)...(19): siRNA sense strand
gaaggaagguucaguuguu

SEQ ID NO: 1797449 - RNA, 19 nt, Homo sapiens
  misc_RNA (1)...(19): siRNA sense strand
gaagaucccaacucuauua

SEQ ID NO: 1797450 - RNA, 19 nt, Homo sapiens
  misc_RNA (1)...(19): siRNA sense strand
gaugaaagaugguaaagug

SEQ ID NO: 1797451 - RNA, 19 nt, Homo sapiens
  misc_RNA (1)...(19): siRNA sense strand
caggaacgcugauuaguuu

SEQ ID NO: 1797452 - RNA, 19 nt, Homo sapiens
  misc_RNA (1)...(19): siRNA sense strand
ggaaggcacuuacucaaug

SEQ ID NO: 1797453 - RNA, 19 nt, Homo sapiens
  misc_RNA (1)...(19): siRNA sense strand
gaaagaugguaaagugauu

SEQ ID NO: 1797454 - RNA, 19 nt, Homo sapiens
  misc_RNA (1)...(19): siRNA sense strand
gaucccaacucuauuauug

SEQ ID NO: 1797455 - RNA, 19 nt, Homo sapiens
  misc_RNA (1)...(19): siRNA sense strand
gaacuguagugaugaaaga

SEQ ID NO: 1797456 - RNA, 19 nt, Homo sapiens
  misc_RNA (1)...(19): siRNA sense strand
gggcgaagcuuccaaguuc

SEQ ID NO: 1797457 - RNA, 19 nt, Homo sapiens
  misc_RNA (1)...(19): siRNA sense strand
caaagcaggugauuguuau

SEQ ID NO: 1797458 - RNA, 19 nt, Homo sapiens
  misc_RNA (1)...(19): siRNA sense strand
caaaagagauguccaaaga

SEQ ID NO: 1797459 - RNA, 19 nt, Homo sapiens
  misc_RNA (1)...(19): siRNA sense strand
caucgugggugcacucaua

SEQ ID NO: 1797460 - RNA, 19 nt, Homo sapiens
  misc_RNA (1)...(19): siRNA sense strand
caggagaacucuacauuca

SEQ ID NO: 1797461 - RNA, 19 nt, Homo sapiens
  misc_RNA (1)...(19): siRNA sense strand
gaaacucuuugcucaacaa

SEQ ID NO: 1797462 - RNA, 19 nt, Homo sapiens
  misc_RNA (1)...(19): siRNA sense strand
uaagggaauuacucacaua

SEQ ID NO: 1797463 - RNA, 19 nt, Homo sapiens
  misc_RNA (1)...(19): siRNA sense strand
cuacagugguuauaacauu

SEQ ID NO: 1797464 - RNA, 19 nt, Homo sapiens
  misc_RNA (1)...(19): siRNA sense strand
gacccaagcuuuacuacug

SEQ ID NO: 1797465 - RNA, 19 nt, Homo sapiens
  misc_RNA (1)...(19): siRNA sense strand
ggaaauuucuggcacacau

SEQ ID NO: 1797466 - RNA, 19 nt, Homo sapiens
  misc_RNA (1)...(19): siRNA sense strand
caagaacugugguguaaag

SEQ ID NO: 1797467 - RNA, 19 nt, Homo sapiens
  misc_RNA (1)...(19): siRNA sense strand
ucacagggauacuggguuu

SEQ ID NO: 1797468 - RNA, 19 nt, Homo sapiens
  misc_RNA (1)...(19): siRNA sense strand
uagaggaacuguagugaug

SEQ ID NO: 1797469 - RNA, 19 nt, Homo sapiens
  misc_RNA (1)...(19): siRNA sense strand
uggaugagaucaaccauga

SEQ ID NO: 1797470 - RNA, 19 nt, Homo sapiens
  misc_RNA (1)...(19): siRNA sense strand
aaccaggaauuccauauaa

SEQ ID NO: 1797471 - RNA, 19 nt, Homo sapiens
  misc_RNA (1)...(19): siRNA sense strand
ucaaagcaggugauuguua

SEQ ID NO: 1797472 - RNA, 19 nt, Homo sapiens
  misc_RNA (1)...(19): siRNA sense strand
ggaaauggaugagaucaac

SEQ ID NO: 1797473 - RNA, 19 nt, Homo sapiens
  misc_RNA (1)...(19): siRNA sense strand
cagcuaagauucugauagu

SEQ ID NO: 1797474 - RNA, 19 nt, Homo sapiens
  misc_RNA (1)...(19): siRNA sense strand
ucaugaagcugaccuuuua

SEQ ID NO: 1797475 - RNA, 19 nt, Homo sapiens
  misc_RNA (1)...(19): siRNA sense strand
guucucagaugaucacuau

SEQ ID NO: 1797476 - RNA, 19 nt, Homo sapiens
  misc_RNA (1)...(19): siRNA sense strand
ccaaagagauauuccaaaa

SEQ ID NO: 1797477 - RNA, 19 nt, Homo sapiens
  misc_RNA (1)...(19): siRNA sense strand
ucaagaagaucccaacucu

SEQ ID NO: 1797478 - RNA, 19 nt, Homo sapiens
  misc_RNA (1)...(19): siRNA sense strand
caacauugcagguggcuuu

SEQ ID NO: 1797479 - RNA, 19 nt, Homo sapiens
  misc_RNA (1)...(19): siRNA sense strand
cauauccucugucaacauu

SEQ ID NO: 1797480 - RNA, 19 nt, Homo sapiens
  misc_RNA (1)...(19): siRNA sense strand
uuauaaggcuguuguccua

SEQ ID NO: 1797481 - RNA, 19 nt, Homo sapiens
  misc_RNA (1)...(19): siRNA sense strand
aaagagauguccaaagagu

SEQ ID NO: 1797482 - RNA, 19 nt, Homo sapiens
  misc_RNA (1)...(19): siRNA sense strand
guucaguuguuguggauuu

SEQ ID NO: 1797483 - RNA, 19 nt, Homo sapiens
  misc_RNA (1)...(19): siRNA sense strand
gcuaagauucugauaguug

SEQ ID NO: 1797484 - RNA, 19 nt, Homo sapiens
  misc_RNA (1)...(19): siRNA sense strand
gagcuaaugacacuguuaa

SEQ ID NO: 1797485 - RNA, 19 nt, Homo sapiens
  misc_RNA (1)...(19): siRNA sense strand
cauaugacauuguguugga

SEQ ID NO: 1797486 - RNA, 19 nt, Homo sapiens
  misc_RNA (1)...(19): siRNA sense strand
gcacacauacggaaaucaa

SEQ ID NO: 1797487 - RNA, 19 nt, Homo sapiens
  misc_RNA (1)...(19): siRNA sense strand
uugcauagcugaguacauu

SEQ ID NO: 1797488 - RNA, 19 nt, Homo sapiens
  misc_RNA (1)...(19): siRNA sense strand
gccaaacgcauccagauuu

SEQ ID NO: 1797489 - RNA, 19 nt, Homo sapiens
  misc_RNA (1)...(19): siRNA sense strand
gcucuccacucaccacuga

SEQ ID NO: 1797490 - RNA, 19 nt, Homo sapiens
  misc_RNA (1)...(19): siRNA sense strand
aauccagaguugcuaaaua

SEQ ID NO: 1797491 - RNA, 19 nt, Homo sapiens
  misc_RNA (1)...(19): siRNA sense strand
gagaauccuaucagaagua

SEQ ID NO: 1797492 - RNA, 19 nt, Homo sapiens
  misc_RNA (1)...(19): siRNA sense strand
gcauucauauccucuguca

SEQ ID NO: 1797493 - RNA, 19 nt, Homo sapiens
  misc_RNA (1)...(19): siRNA sense strand
ggacaaggaggauaugcaa

SEQ ID NO: 1797494 - RNA, 19 nt, Homo sapiens
  misc_RNA (1)...(19): siRNA sense strand
gagguggacuugaaggaau

SEQ ID NO: 1797495 - RNA, 19 nt, Homo sapiens
  misc_RNA (1)...(19): siRNA sense strand
gaaauuucuggcacacaua

SEQ ID NO: 1797496 - RNA, 19 nt, Homo sapiens
  misc_RNA (1)...(19): siRNA sense strand
gaggaacuguagugaugaa

SEQ ID NO: 1797497 - RNA, 19 nt, Homo sapiens
  misc_RNA (1)...(19): siRNA sense strand
gucaacggcuucugcauau

SEQ ID NO: 1797498 - RNA, 19 nt, Homo sapiens
  misc_RNA (1)...(19): siRNA sense strand
ccaaacgcauccagauuuc

SEQ ID NO: 1797499 - RNA, 19 nt, Homo sapiens
  misc_RNA (1)...(19): siRNA sense strand
agagaaugcuggacauguu

SEQ ID NO: 1797500 - RNA, 19 nt, Homo sapiens
  misc_RNA (1)...(19): siRNA sense strand
gacaguggcugagcuggaa

SEQ ID NO: 1797501 - RNA, 19 nt, Homo sapiens
  misc_RNA (1)...(19): siRNA sense strand
aagaagaucccaacucuau

SEQ ID NO: 1797502 - RNA, 19 nt, Homo sapiens
  misc_RNA (1)...(19): siRNA sense strand
auccagaguugcuaaauaa

SEQ ID NO: 1797503 - RNA, 19 nt, Homo sapiens
  misc_RNA (1)...(19): siRNA sense strand
cuaaugacacuguuaauuc

SEQ ID NO: 1797504 - RNA, 19 nt, Homo sapiens
  misc_RNA (1)...(19): siRNA sense strand
gcuaaugacacuguuaauu

SEQ ID NO: 1797505 - RNA, 19 nt, Homo sapiens
  misc_RNA (1)...(19): siRNA sense strand
ugguaaagaugcucacuga

SEQ ID NO: 1797506 - RNA, 19 nt, Homo sapiens
  misc_RNA (1)...(19): siRNA sense strand
gauaguugguggugguguu

SEQ ID NO: 1797507 - RNA, 19 nt, Homo sapiens
  misc_RNA (1)...(19): siRNA sense strand
gaugggaggacauuuguau

SEQ ID NO: 1797508 - RNA, 19 nt, Homo sapiens
  misc_RNA (1)...(19): siRNA sense strand
aaagucagguuuggaauuc

SEQ ID NO: 1797509 - RNA, 19 nt, Homo sapiens
  misc_RNA (1)...(19): siRNA sense strand
guuagagaauccuaucaga

SEQ ID NO: 1797510 - RNA, 19 nt, Homo sapiens
  misc_RNA (1)...(19): siRNA sense strand
gaaaaguuccuccagcuaa

SEQ ID NO: 1797511 - RNA, 19 nt, Homo sapiens
  misc_RNA (1)...(19): siRNA sense strand
ggucaugucauuagaggaa

SEQ ID NO: 1797512 - RNA, 19 nt, Homo sapiens
  misc_RNA (1)...(19): siRNA sense strand
uacgaugggucaugucauu

SEQ ID NO: 1797513 - RNA, 19 nt, Homo sapiens
  misc_RNA (1)...(19): siRNA sense strand
gcaggugauuguuaugaag

SEQ ID NO: 1797514 - RNA, 19 nt, Homo sapiens
  misc_RNA (1)...(19): siRNA sense strand
aaaccaggaauuccauaua

SEQ ID NO: 1797515 - RNA, 19 nt, Homo sapiens
  misc_RNA (1)...(19): siRNA sense strand
cuacaguucuggcaaugga

SEQ ID NO: 1797516 - RNA, 19 nt, Homo sapiens
  misc_RNA (1)...(19): siRNA sense strand
uggccuaccucggcacuua

SEQ ID NO: 1797517 - RNA, 19 nt, Homo sapiens
  misc_RNA (1)...(19): siRNA sense strand
gauacuggguuugggcauu

SEQ ID NO: 1797518 - RNA, 19 nt, Homo sapiens
  misc_RNA (1)...(19): siRNA sense strand
ccaacaacaucaccaaacu

SEQ ID NO: 1797519 - RNA, 19 nt, Homo sapiens
  misc_RNA (1)...(19): siRNA sense strand
uggccaacauugcggguua

SEQ ID NO: 1797520 - RNA, 19 nt, Homo sapiens
  misc_RNA (1)...(19): siRNA sense strand
caacauugcggguuauaag

SEQ ID NO: 1797521 - RNA, 19 nt, Homo sapiens
  misc_RNA (1)...(19): siRNA sense strand
gaaaguuagagaauccuau

SEQ ID NO: 1797522 - RNA, 19 nt, Homo sapiens
  misc_RNA (1)...(19): siRNA sense strand
ggagguagacauccuuauc

SEQ ID NO: 1797523 - RNA, 19 nt, Homo sapiens
  misc_RNA (1)...(19): siRNA sense strand
cacaauugcucagggauau

SEQ ID NO: 1797524 - RNA, 19 nt, Homo sapiens
  misc_RNA (1)...(19): siRNA sense strand
uaauucagcagcucaagaa

SEQ ID NO: 1797525 - RNA, 19 nt, Homo sapiens
  misc_RNA (1)...(19): siRNA sense strand
ggagcuaaugacacuguua

SEQ ID NO: 1797526 - RNA, 19 nt, Homo sapiens
  misc_RNA (1)...(19): siRNA sense strand
ccgaaugccuggucagcuu

SEQ ID NO: 1797527 - RNA, 19 nt, Homo sapiens
  misc_RNA (1)...(19): siRNA sense strand
gaugggucaugucauuaga

SEQ ID NO: 1797528 - RNA, 19 nt, Homo sapiens
  misc_RNA (1)...(19): siRNA sense strand
gagguagacauccuuauca

SEQ ID NO: 1797529 - RNA, 19 nt, Homo sapiens
  misc_RNA (1)...(19): siRNA sense strand
cagcacuuauuccagguaa

SEQ ID NO: 1797530 - RNA, 19 nt, Homo sapiens
  misc_RNA (1)...(19): siRNA sense strand
ggaaaacccauggaaauuu

SEQ ID NO: 1797531 - RNA, 19 nt, Homo sapiens
  misc_RNA (1)...(19): siRNA sense strand
gcacugaugggaggacauu

SEQ ID NO: 1797532 - RNA, 19 nt, Homo sapiens
  misc_RNA (1)...(19): siRNA sense strand
gaaacuuugaaaccacuaa

SEQ ID NO: 1797533 - RNA, 19 nt, Homo sapiens
  misc_RNA (1)...(19): siRNA sense strand
agaauccuaucagaaguaa

SEQ ID NO: 1797534 - RNA, 19 nt, Homo sapiens
  misc_RNA (1)...(19): siRNA sense strand
gaaggcacuuacucaaugc

SEQ ID NO: 1797535 - RNA, 19 nt, Homo sapiens
  misc_RNA (1)...(19): siRNA sense strand
guaagggucuacgugugaa

SEQ ID NO: 1797536 - RNA, 19 nt, Homo sapiens
  misc_RNA (1)...(19): siRNA sense strand
cauauaagcaacugacugu

SEQ ID NO: 1797537 - RNA, 19 nt, Homo sapiens
  misc_RNA (1)...(19): siRNA sense strand
gcauagcugaguacauuau

SEQ ID NO: 1797538 - RNA, 19 nt, Homo sapiens
  misc_RNA (1)...(19): siRNA sense strand
ugaggcugguggaaacuuu

SEQ ID NO: 1797539 - RNA, 19 nt, Homo sapiens
  misc_RNA (1)...(19): siRNA sense strand
uaucagcacagcacuuauu

SEQ ID NO: 1797540 - RNA, 19 nt, Homo sapiens
  misc_RNA (1)...(19): siRNA sense strand
gguggaaacuuugaaacca

SEQ ID NO: 1797541 - RNA, 19 nt, Homo sapiens
  misc_RNA (1)...(19): siRNA sense strand
guaauuggagcuaaugaca

SEQ ID NO: 1797542 - RNA, 19 nt, Homo sapiens
  misc_RNA (1)...(19): siRNA sense strand
gauuugguccuuguaauug

SEQ ID NO: 1797543 - RNA, 19 nt, Homo sapiens
  misc_RNA (1)...(19): siRNA sense strand
caucauguguguggcaaug

SEQ ID NO: 1797544 - RNA, 19 nt, Homo sapiens
  misc_RNA (1)...(19): siRNA sense strand
acaacaaucugcugaccau

SEQ ID NO: 1797545 - RNA, 19 nt, Homo sapiens
  misc_RNA (1)...(19): siRNA sense strand
ugucaacggcuucugcaua

SEQ ID NO: 1797546 - RNA, 19 nt, Homo sapiens
  misc_RNA (1)...(19): siRNA sense strand
gccaggagaacucuacauu

SEQ ID NO: 1797547 - RNA, 19 nt, Homo sapiens
  misc_RNA (1)...(19): siRNA sense strand
ggagaacucuacauucaua

SEQ ID NO: 1797548 - RNA, 19 nt, Homo sapiens
  misc_RNA (1)...(19): siRNA sense strand
gaaggaagguucaguuguu

SEQ ID NO: 1797549 - RNA, 19 nt, Homo sapiens
  misc_RNA (1)...(19): siRNA sense strand
gaagaucccaacucuauua

SEQ ID NO: 1797550 - RNA, 19 nt, Homo sapiens
  misc_RNA (1)...(19): siRNA sense strand
gaugaaagaugguaaagug

SEQ ID NO: 1797551 - RNA, 19 nt, Homo sapiens
  misc_RNA (1)...(19): siRNA sense strand
caggaacgcugauuaguuu

SEQ ID NO: 1797552 - RNA, 19 nt, Homo sapiens
  misc_RNA (1)...(19): siRNA sense strand
ggaaggcacuuacucaaug

SEQ ID NO: 1797553 - RNA, 19 nt, Homo sapiens
  misc_RNA (1)...(19): siRNA sense strand
gaaagaugguaaagugauu

SEQ ID NO: 1797554 - RNA, 19 nt, Homo sapiens
  misc_RNA (1)...(19): siRNA sense strand
gaucccaacucuauuauug

SEQ ID NO: 1797555 - RNA, 19 nt, Homo sapiens
  misc_RNA (1)...(19): siRNA sense strand
gaacuguagugaugaaaga

SEQ ID NO: 1797556 - RNA, 19 nt, Homo sapiens
  misc_RNA (1)...(19): siRNA sense strand
gggcgaagcuuccaaguuc

SEQ ID NO: 1797557 - RNA, 19 nt, Homo sapiens
  misc_RNA (1)...(19): siRNA sense strand
caaagcaggugauuguuau

SEQ ID NO: 1797558 - RNA, 19 nt, Homo sapiens
  misc_RNA (1)...(19): siRNA sense strand
caaaagagauguccaaaga

SEQ ID NO: 1797559 - RNA, 19 nt, Homo sapiens
  misc_RNA (1)...(19): siRNA sense strand
caucgugggugcacucaua

SEQ ID NO: 1797560 - RNA, 19 nt, Homo sapiens
  misc_RNA (1)...(19): siRNA sense strand
caggagaacucuacauuca

SEQ ID NO: 1797561 - RNA, 19 nt, Homo sapiens
  misc_RNA (1)...(19): siRNA sense strand
gaaacucuuugcucaacaa

SEQ ID NO: 1797562 - RNA, 19 nt, Homo sapiens
  misc_RNA (1)...(19): siRNA sense strand
uaagggaauuacucacaua

SEQ ID NO: 1797563 - RNA, 19 nt, Homo sapiens
  misc_RNA (1)...(19): siRNA sense strand
cuacagugguuauaacauu

SEQ ID NO: 1797564 - RNA, 19 nt, Homo sapiens
  misc_RNA (1)...(19): siRNA sense strand
gacccaagcuuuacuacug

SEQ ID NO: 1797565 - RNA, 19 nt, Homo sapiens
  misc_RNA (1)...(19): siRNA sense strand
ggaaauuucuggcacacau

SEQ ID NO: 1797566 - RNA, 19 nt, Homo sapiens
  misc_RNA (1)...(19): siRNA sense strand
caagaacugugguguaaag

SEQ ID NO: 1797567 - RNA, 19 nt, Homo sapiens
  misc_RNA (1)...(19): siRNA sense strand
ucacagggauacuggguuu

SEQ ID NO: 1797568 - RNA, 19 nt, Homo sapiens
  misc_RNA (1)...(19): siRNA sense strand
uagaggaacuguagugaug

SEQ ID NO: 1797569 - RNA, 19 nt, Homo sapiens
  misc_RNA (1)...(19): siRNA sense strand
uggaugagaucaaccauga

SEQ ID NO: 1797570 - RNA, 19 nt, Homo sapiens
  misc_RNA (1)...(19): siRNA sense strand
aaccaggaauuccauauaa

SEQ ID NO: 1797571 - RNA, 19 nt, Homo sapiens
  misc_RNA (1)...(19): siRNA sense strand
ucaaagcaggugauuguua

SEQ ID NO: 1797572 - RNA, 19 nt, Homo sapiens
  misc_RNA (1)...(19): siRNA sense strand
ggaaauggaugagaucaac

SEQ ID NO: 1797573 - RNA, 19 nt, Homo sapiens
  misc_RNA (1)...(19): siRNA sense strand
cagcuaagauucugauagu

SEQ ID NO: 1797574 - RNA, 19 nt, Homo sapiens
  misc_RNA (1)...(19): siRNA sense strand
ucaugaagcugaccuuuua

SEQ ID NO: 1797575 - RNA, 19 nt, Homo sapiens
  misc_RNA (1)...(19): siRNA sense strand
guucucagaugaucacuau

SEQ ID NO: 1797576 - RNA, 19 nt, Homo sapiens
  misc_RNA (1)...(19): siRNA sense strand
ccaaagagauauuccaaaa

SEQ ID NO: 1797577 - RNA, 19 nt, Homo sapiens
  misc_RNA (1)...(19): siRNA sense strand
ucaagaagaucccaacucu

SEQ ID NO: 1797578 - RNA, 19 nt, Homo sapiens
  misc_RNA (1)...(19): siRNA sense strand
caacauugcagguggcuuu

SEQ ID NO: 1797579 - RNA, 19 nt, Homo sapiens
  misc_RNA (1)...(19): siRNA sense strand
cauauccucugucaacauu

SEQ ID NO: 1797580 - RNA, 19 nt, Homo sapiens
  misc_RNA (1)...(19): siRNA sense strand
uuauaaggcuguuguccua

SEQ ID NO: 1797581 - RNA, 19 nt, Homo sapiens
  misc_RNA (1)...(19): siRNA sense strand
aaagagauguccaaagagu

SEQ ID NO: 1797582 - RNA, 19 nt, Homo sapiens
  misc_RNA (1)...(19): siRNA sense strand
guucaguuguuguggauuu

SEQ ID NO: 1797583 - RNA, 19 nt, Homo sapiens
  misc_RNA (1)...(19): siRNA sense strand
gcuaagauucugauaguug

SEQ ID NO: 1797584 - RNA, 19 nt, Homo sapiens
  misc_RNA (1)...(19): siRNA sense strand
gagcuaaugacacuguuaa

SEQ ID NO: 1797585 - RNA, 19 nt, Homo sapiens
  misc_RNA (1)...(19): siRNA sense strand
cauaugacauuguguugga

SEQ ID NO: 1797586 - RNA, 19 nt, Homo sapiens
  misc_RNA (1)...(19): siRNA sense strand
gcacacauacggaaaucaa

SEQ ID NO: 1797587 - RNA, 19 nt, Homo sapiens
  misc_RNA (1)...(19): siRNA sense strand
uugcauagcugaguacauu

SEQ ID NO: 1797588 - RNA, 19 nt, Homo sapiens
  misc_RNA (1)...(19): siRNA sense strand
gccaaacgcauccagauuu

SEQ ID NO: 1797589 - RNA, 19 nt, Homo sapiens
  misc_RNA (1)...(19): siRNA sense strand
gcucuccacucaccacuga

SEQ ID NO: 1797590 - RNA, 19 nt, Homo sapiens
  misc_RNA (1)...(19): siRNA sense strand
aauccagaguugcuaaaua

SEQ ID NO: 1797591 - RNA, 19 nt, Homo sapiens
  misc_RNA (1)...(19): siRNA sense strand
gagaauccuaucagaagua

SEQ ID NO: 1797592 - RNA, 19 nt, Homo sapiens
  misc_RNA (1)...(19): siRNA sense strand
gcauucauauccucuguca

SEQ ID NO: 1797593 - RNA, 19 nt, Homo sapiens
  misc_RNA (1)...(19): siRNA sense strand
ggacaaggaggauaugcaa

SEQ ID NO: 1797594 - RNA, 19 nt, Homo sapiens
  misc_RNA (1)...(19): siRNA sense strand
gagguggacuugaaggaau

SEQ ID NO: 1797595 - RNA, 19 nt, Homo sapiens
  misc_RNA (1)...(19): siRNA sense strand
gaaauuucuggcacacaua

SEQ ID NO: 1797596 - RNA, 19 nt, Homo sapiens
  misc_RNA (1)...(19): siRNA sense strand
gaggaacuguagugaugaa

SEQ ID NO: 1797597 - RNA, 19 nt, Homo sapiens
  misc_RNA (1)...(19): siRNA sense strand
gucaacggcuucugcauau

SEQ ID NO: 1797598 - RNA, 19 nt, Homo sapiens
  misc_RNA (1)...(19): siRNA sense strand
ccaaacgcauccagauuuc

SEQ ID NO: 1797599 - RNA, 19 nt, Homo sapiens
  misc_RNA (1)...(19): siRNA sense strand
agagaaugcuggacauguu

SEQ ID NO: 1797600 - RNA, 19 nt, Homo sapiens
  misc_RNA (1)...(19): siRNA sense strand
gacaguggcugagcuggaa

SEQ ID NO: 1797601 - RNA, 19 nt, Homo sapiens
  misc_RNA (1)...(19): siRNA sense strand
aagaagaucccaacucuau

SEQ ID NO: 1797602 - RNA, 19 nt, Homo sapiens
  misc_RNA (1)...(19): siRNA sense strand
auccagaguugcuaaauaa

SEQ ID NO: 1797603 - RNA, 19 nt, Homo sapiens
  misc_RNA (1)...(19): siRNA sense strand
cuaaugacacuguuaauuc

SEQ ID NO: 1797604 - RNA, 19 nt, Homo sapiens
  misc_RNA (1)...(19): siRNA sense strand
gcuaaugacacuguuaauu

SEQ ID NO: 1797605 - RNA, 19 nt, Homo sapiens
  misc_RNA (1)...(19): siRNA sense strand
ugguaaagaugcucacuga

SEQ ID NO: 1797606 - RNA, 19 nt, Homo sapiens
  misc_RNA (1)...(19): siRNA sense strand
gauaguugguggugguguu

SEQ ID NO: 1797607 - RNA, 19 nt, Homo sapiens
  misc_RNA (1)...(19): siRNA sense strand
gaugggaggacauuuguau

SEQ ID NO: 1797608 - RNA, 19 nt, Homo sapiens
  misc_RNA (1)...(19): siRNA sense strand
aaagucagguuuggaauuc

SEQ ID NO: 1797609 - RNA, 19 nt, Homo sapiens
  misc_RNA (1)...(19): siRNA sense strand
guuagagaauccuaucaga

SEQ ID NO: 1797610 - RNA, 19 nt, Homo sapiens
  misc_RNA (1)...(19): siRNA sense strand
gaaaaguuccuccagcuaa

SEQ ID NO: 1797611 - RNA, 19 nt, Homo sapiens
  misc_RNA (1)...(19): siRNA sense strand
ggucaugucauuagaggaa

SEQ ID NO: 1797612 - RNA, 19 nt, Homo sapiens
  misc_RNA (1)...(19): siRNA sense strand
uacgaugggucaugucauu

SEQ ID NO: 1797613 - RNA, 19 nt, Homo sapiens
  misc_RNA (1)...(19): siRNA sense strand
gcaggugauuguuaugaag

SEQ ID NO: 1797614 - RNA, 19 nt, Homo sapiens
  misc_RNA (1)...(19): siRNA sense strand
aaaccaggaauuccauaua

SEQ ID NO: 1797615 - RNA, 19 nt, Homo sapiens
  misc_RNA (1)...(19): siRNA sense strand
cuacaguucuggcaaugga

SEQ ID NO: 1797616 - RNA, 19 nt, Homo sapiens
  misc_RNA (1)...(19): siRNA sense strand
uggccuaccucggcacuua

SEQ ID NO: 1797617 - RNA, 19 nt, Homo sapiens
  misc_RNA (1)...(19): siRNA sense strand
gauacuggguuugggcauu

SEQ ID NO: 1797618 - RNA, 19 nt, Homo sapiens
  misc_RNA (1)...(19): siRNA sense strand
ccaacaacaucaccaaacu

SEQ ID NO: 1797619 - RNA, 19 nt, Homo sapiens
  misc_RNA (1)...(19): siRNA sense strand
uggccaacauugcggguua

SEQ ID NO: 1797620 - RNA, 19 nt, Homo sapiens
  misc_RNA (1)...(19): siRNA sense strand
caacauugcggguuauaag

SEQ ID NO: 1797621 - RNA, 19 nt, Homo sapiens
  misc_RNA (1)...(19): siRNA sense strand
gaaaguuagagaauccuau

SEQ ID NO: 1797622 - RNA, 19 nt, Homo sapiens
  misc_RNA (1)...(19): siRNA sense strand
ggagguagacauccuuauc

SEQ ID NO: 1797623 - RNA, 19 nt, Homo sapiens
  misc_RNA (1)...(19): siRNA sense strand
cacaauugcucagggauau

SEQ ID NO: 1797624 - RNA, 19 nt, Homo sapiens
  misc_RNA (1)...(19): siRNA sense strand
uaauucagcagcucaagaa

SEQ ID NO: 1797625 - RNA, 19 nt, Homo sapiens
  misc_RNA (1)...(19): siRNA sense strand
ggagcuaaugacacuguua

SEQ ID NO: 1797626 - RNA, 19 nt, Homo sapiens
  misc_RNA (1)...(19): siRNA sense strand
ccgaaugccuggucagcuu

SEQ ID NO: 1797627 - RNA, 19 nt, Homo sapiens
  misc_RNA (1)...(19): siRNA sense strand
gaugggucaugucauuaga

SEQ ID NO: 1797628 - RNA, 19 nt, Homo sapiens
  misc_RNA (1)...(19): siRNA sense strand
gagguagacauccuuauca

SEQ ID NO: 1797629 - RNA, 19 nt, Homo sapiens
  misc_RNA (1)...(19): siRNA sense strand
cagcacuuauuccagguaa

SEQ ID NO: 1797630 - RNA, 19 nt, Homo sapiens
  misc_RNA (1)...(19): siRNA sense strand
ggaaaacccauggaaauuu

SEQ ID NO: 1797631 - RNA, 19 nt, Homo sapiens
  misc_RNA (1)...(19): siRNA sense strand
gcacugaugggaggacauu

SEQ ID NO: 1797632 - RNA, 19 nt, Homo sapiens
  misc_RNA (1)...(19): siRNA sense strand
gaaacuuugaaaccacuaa

SEQ ID NO: 1797633 - RNA, 19 nt, Homo sapiens
  misc_RNA (1)...(19): siRNA sense strand
agaauccuaucagaaguaa

SEQ ID NO: 1797634 - RNA, 19 nt, Homo sapiens
  misc_RNA (1)...(19): siRNA sense strand
gaaggcacuuacucaaugc

SEQ ID NO: 1797635 - RNA, 19 nt, Homo sapiens
  misc_RNA (1)...(19): siRNA sense strand
guaagggucuacgugugaa

SEQ ID NO: 1797636 - RNA, 19 nt, Homo sapiens
  misc_RNA (1)...(19): siRNA sense strand
cauauaagcaacugacugu

SEQ ID NO: 1797637 - RNA, 19 nt, Homo sapiens
  misc_RNA (1)...(19): siRNA sense strand
gcauagcugaguacauuau

SEQ ID NO: 1797638 - RNA, 19 nt, Homo sapiens
  misc_RNA (1)...(19): siRNA sense strand
ugaggcugguggaaacuuu

SEQ ID NO: 1797639 - RNA, 19 nt, Homo sapiens
  misc_RNA (1)...(19): siRNA sense strand
uaucagcacagcacuuauu

SEQ ID NO: 1797640 - RNA, 19 nt, Homo sapiens
  misc_RNA (1)...(19): siRNA sense strand
gguggaaacuuugaaacca

SEQ ID NO: 1797641 - RNA, 19 nt, Homo sapiens
  misc_RNA (1)...(19): siRNA sense strand
guaauuggagcuaaugaca

SEQ ID NO: 1797642 - RNA, 19 nt, Homo sapiens
  misc_RNA (1)...(19): siRNA sense strand
gauuugguccuuguaauug

SEQ ID NO: 1797643 - RNA, 19 nt, Homo sapiens
  misc_RNA (1)...(19): siRNA sense strand
caucauguguguggcaaug

SEQ ID NO: 1797644 - RNA, 19 nt, Homo sapiens
  misc_RNA (1)...(19): siRNA sense strand
acaacaaucugcugaccau

SEQ ID NO: 1797645 - RNA, 19 nt, Homo sapiens
  misc_RNA (1)...(19): siRNA sense strand
ugucaacggcuucugcaua

SEQ ID NO: 1797646 - RNA, 19 nt, Homo sapiens
  misc_RNA (1)...(19): siRNA sense strand
gccaggagaacucuacauu

SEQ ID NO: 1797647 - RNA, 19 nt, Homo sapiens
  misc_RNA (1)...(19): siRNA sense strand
ggagaacucuacauucaua

SEQ ID NO: 1797648 - RNA, 19 nt, Homo sapiens
  misc_RNA (1)...(19): siRNA sense strand
gaaggaagguucaguuguu

SEQ ID NO: 1797649 - RNA, 19 nt, Homo sapiens
  misc_RNA (1)...(19): siRNA sense strand
gaagaucccaacucuauua

SEQ ID NO: 1797650 - RNA, 19 nt, Homo sapiens
  misc_RNA (1)...(19): siRNA sense strand
gaugaaagaugguaaagug

SEQ ID NO: 1797651 - RNA, 19 nt, Homo sapiens
  misc_RNA (1)...(19): siRNA sense strand
caggaacgcugauuaguuu

SEQ ID NO: 1797652 - RNA, 19 nt, Homo sapiens
  misc_RNA (1)...(19): siRNA sense strand
ggaaggcacuuacucaaug

SEQ ID NO: 1797653 - RNA, 19 nt, Homo sapiens
  misc_RNA (1)...(19): siRNA sense strand
gaaagaugguaaagugauu

SEQ ID NO: 1797654 - RNA, 19 nt, Homo sapiens
  misc_RNA (1)...(19): siRNA sense strand
gaucccaacucuauuauug

SEQ ID NO: 1797655 - RNA, 19 nt, Homo sapiens
  misc_RNA (1)...(19): siRNA sense strand
gaacuguagugaugaaaga

SEQ ID NO: 1797656 - RNA, 19 nt, Homo sapiens
  misc_RNA (1)...(19): siRNA sense strand
gggcgaagcuuccaaguuc

SEQ ID NO: 1797657 - RNA, 19 nt, Homo sapiens
  misc_RNA (1)...(19): siRNA sense strand
caaagcaggugauuguuau

SEQ ID NO: 1797658 - RNA, 19 nt, Homo sapiens
  misc_RNA (1)...(19): siRNA sense strand
caaaagagauguccaaaga

SEQ ID NO: 1797659 - RNA, 19 nt, Homo sapiens
  misc_RNA (1)...(19): siRNA sense strand
caucgugggugcacucaua

SEQ ID NO: 1797660 - RNA, 19 nt, Homo sapiens
  misc_RNA (1)...(19): siRNA sense strand
caggagaacucuacauuca

SEQ ID NO: 1797661 - RNA, 19 nt, Homo sapiens
  misc_RNA (1)...(19): siRNA sense strand
gaaacucuuugcucaacaa

SEQ ID NO: 1797662 - RNA, 19 nt, Homo sapiens
  misc_RNA (1)...(19): siRNA sense strand
uaagggaauuacucacaua

SEQ ID NO: 1797663 - RNA, 19 nt, Homo sapiens
  misc_RNA (1)...(19): siRNA sense strand
cuacagugguuauaacauu

SEQ ID NO: 1797664 - RNA, 19 nt, Homo sapiens
  misc_RNA (1)...(19): siRNA sense strand
gacccaagcuuuacuacug

SEQ ID NO: 1797665 - RNA, 19 nt, Homo sapiens
  misc_RNA (1)...(19): siRNA sense strand
ggaaauuucuggcacacau

SEQ ID NO: 1797666 - RNA, 19 nt, Homo sapiens
  misc_RNA (1)...(19): siRNA sense strand
caagaacugugguguaaag

SEQ ID NO: 1797667 - RNA, 19 nt, Homo sapiens
  misc_RNA (1)...(19): siRNA sense strand
ucacagggauacuggguuu

SEQ ID NO: 1797668 - RNA, 19 nt, Homo sapiens
  misc_RNA (1)...(19): siRNA sense strand
uagaggaacuguagugaug

SEQ ID NO: 1797669 - RNA, 19 nt, Homo sapiens
  misc_RNA (1)...(19): siRNA sense strand
uggaugagaucaaccauga

SEQ ID NO: 1797670 - RNA, 19 nt, Homo sapiens
  misc_RNA (1)...(19): siRNA sense strand
aaccaggaauuccauauaa

SEQ ID NO: 1797671 - RNA, 19 nt, Homo sapiens
  misc_RNA (1)...(19): siRNA sense strand
ucaaagcaggugauuguua

SEQ ID NO: 1797672 - RNA, 19 nt, Homo sapiens
  misc_RNA (1)...(19): siRNA sense strand
ggaaauggaugagaucaac

SEQ ID NO: 1797673 - RNA, 19 nt, Homo sapiens
  misc_RNA (1)...(19): siRNA sense strand
cagcuaagauucugauagu

SEQ ID NO: 1797674 - RNA, 19 nt, Homo sapiens
  misc_RNA (1)...(19): siRNA sense strand
ucaugaagcugaccuuuua

SEQ ID NO: 1797675 - RNA, 19 nt, Homo sapiens
  misc_RNA (1)...(19): siRNA sense strand
guucucagaugaucacuau

SEQ ID NO: 1797676 - RNA, 19 nt, Homo sapiens
  misc_RNA (1)...(19): siRNA sense strand
ccaaagagauauuccaaaa

SEQ ID NO: 1797677 - RNA, 19 nt, Homo sapiens
  misc_RNA (1)...(19): siRNA sense strand
ucaagaagaucccaacucu

SEQ ID NO: 1797678 - RNA, 19 nt, Homo sapiens
  misc_RNA (1)...(19): siRNA sense strand
caacauugcagguggcuuu

SEQ ID NO: 1797679 - RNA, 19 nt, Homo sapiens
  misc_RNA (1)...(19): siRNA sense strand
cauauccucugucaacauu

SEQ ID NO: 1797680 - RNA, 19 nt, Homo sapiens
  misc_RNA (1)...(19): siRNA sense strand
uuauaaggcuguuguccua

SEQ ID NO: 1797681 - RNA, 19 nt, Homo sapiens
  misc_RNA (1)...(19): siRNA sense strand
aaagagauguccaaagagu

SEQ ID NO: 1797682 - RNA, 19 nt, Homo sapiens
  misc_RNA (1)...(19): siRNA sense strand
guucaguuguuguggauuu

SEQ ID NO: 1797683 - RNA, 19 nt, Homo sapiens
  misc_RNA (1)...(19): siRNA sense strand
gcuaagauucugauaguug

SEQ ID NO: 1797684 - RNA, 19 nt, Homo sapiens
  misc_RNA (1)...(19): siRNA sense strand
gagcuaaugacacuguuaa

SEQ ID NO: 1797685 - RNA, 19 nt, Homo sapiens
  misc_RNA (1)...(19): siRNA sense strand
cauaugacauuguguugga

SEQ ID NO: 1797686 - RNA, 19 nt, Homo sapiens
  misc_RNA (1)...(19): siRNA sense strand
gcacacauacggaaaucaa

SEQ ID NO: 1797687 - RNA, 19 nt, Homo sapiens
  misc_RNA (1)...(19): siRNA sense strand
uugcauagcugaguacauu

SEQ ID NO: 1797688 - RNA, 19 nt, Homo sapiens
  misc_RNA (1)...(19): siRNA sense strand
gccaaacgcauccagauuu

SEQ ID NO: 1797689 - RNA, 19 nt, Homo sapiens
  misc_RNA (1)...(19): siRNA sense strand
gcucuccacucaccacuga

SEQ ID NO: 1797690 - RNA, 19 nt, Homo sapiens
  misc_RNA (1)...(19): siRNA sense strand
aauccagaguugcuaaaua

SEQ ID NO: 1797691 - RNA, 19 nt, Homo sapiens
  misc_RNA (1)...(19): siRNA sense strand
gagaauccuaucagaagua

SEQ ID NO: 1797692 - RNA, 19 nt, Homo sapiens
  misc_RNA (1)...(19): siRNA sense strand
gcauucauauccucuguca

SEQ ID NO: 1797693 - RNA, 19 nt, Homo sapiens
  misc_RNA (1)...(19): siRNA sense strand
ggacaaggaggauaugcaa

SEQ ID NO: 1797694 - RNA, 19 nt, Homo sapiens
  misc_RNA (1)...(19): siRNA sense strand
gagguggacuugaaggaau

SEQ ID NO: 1797695 - RNA, 19 nt, Homo sapiens
  misc_RNA (1)...(19): siRNA sense strand
gaaauuucuggcacacaua

SEQ ID NO: 1797696 - RNA, 19 nt, Homo sapiens
  misc_RNA (1)...(19): siRNA sense strand
gaggaacuguagugaugaa

SEQ ID NO: 1797697 - RNA, 19 nt, Homo sapiens
  misc_RNA (1)...(19): siRNA sense strand
gucaacggcuucugcauau

SEQ ID NO: 1797698 - RNA, 19 nt, Homo sapiens
  misc_RNA (1)...(19): siRNA sense strand
ccaaacgcauccagauuuc

SEQ ID NO: 1797699 - RNA, 19 nt, Homo sapiens
  misc_RNA (1)...(19): siRNA sense strand
agagaaugcuggacauguu

SEQ ID NO: 1797700 - RNA, 19 nt, Homo sapiens
  misc_RNA (1)...(19): siRNA sense strand
gacaguggcugagcuggaa

SEQ ID NO: 1797701 - RNA, 19 nt, Homo sapiens
  misc_RNA (1)...(19): siRNA sense strand
aagaagaucccaacucuau

SEQ ID NO: 1797702 - RNA, 19 nt, Homo sapiens
  misc_RNA (1)...(19): siRNA sense strand
auccagaguugcuaaauaa

SEQ ID NO: 1797703 - RNA, 19 nt, Homo sapiens
  misc_RNA (1)...(19): siRNA sense strand
cuaaugacacuguuaauuc

SEQ ID NO: 1797704 - RNA, 19 nt, Homo sapiens
  misc_RNA (1)...(19): siRNA sense strand
gcuaaugacacuguuaauu

SEQ ID NO: 1797705 - RNA, 19 nt, Homo sapiens
  misc_RNA (1)...(19): siRNA sense strand
ugguaaagaugcucacuga

SEQ ID NO: 1797706 - RNA, 19 nt, Homo sapiens
  misc_RNA (1)...(19): siRNA sense strand
gauaguugguggugguguu

SEQ ID NO: 1797707 - RNA, 19 nt, Homo sapiens
  misc_RNA (1)...(19): siRNA sense strand
gaugggaggacauuuguau

SEQ ID NO: 1797708 - RNA, 19 nt, Homo sapiens
  misc_RNA (1)...(19): siRNA sense strand
aaagucagguuuggaauuc

SEQ ID NO: 1797709 - RNA, 19 nt, Homo sapiens
  misc_RNA (1)...(19): siRNA sense strand
guuagagaauccuaucaga

SEQ ID NO: 1797710 - RNA, 19 nt, Homo sapiens
  misc_RNA (1)...(19): siRNA sense strand
gaaaaguuccuccagcuaa

SEQ ID NO: 1797711 - RNA, 19 nt, Homo sapiens
  misc_RNA (1)...(19): siRNA sense strand
ggucaugucauuagaggaa

SEQ ID NO: 1797712 - RNA, 19 nt, Homo sapiens
  misc_RNA (1)...(19): siRNA sense strand
uacgaugggucaugucauu

SEQ ID NO: 1797713 - RNA, 19 nt, Homo sapiens
  misc_RNA (1)...(19): siRNA sense strand
gcaggugauuguuaugaag

SEQ ID NO: 1797714 - RNA, 19 nt, Homo sapiens
  misc_RNA (1)...(19): siRNA sense strand
aaaccaggaauuccauaua

SEQ ID NO: 1797715 - RNA, 19 nt, Homo sapiens
  misc_RNA (1)...(19): siRNA sense strand
cuacaguucuggcaaugga

SEQ ID NO: 1797716 - RNA, 19 nt, Homo sapiens
  misc_RNA (1)...(19): siRNA sense strand
uggccuaccucggcacuua

SEQ ID NO: 1797717 - RNA, 19 nt, Homo sapiens
  misc_RNA (1)...(19): siRNA sense strand
gauacuggguuugggcauu

SEQ ID NO: 1797718 - RNA, 19 nt, Homo sapiens
  misc_RNA (1)...(19): siRNA sense strand
ccaacaacaucaccaaacu

SEQ ID NO: 1797719 - RNA, 19 nt, Homo sapiens
  misc_RNA (1)...(19): siRNA sense strand
uggccaacauugcggguua

SEQ ID NO: 1797720 - RNA, 19 nt, Homo sapiens
  misc_RNA (1)...(19): siRNA sense strand
caacauugcggguuauaag

SEQ ID NO: 1797721 - RNA, 19 nt, Homo sapiens
  misc_RNA (1)...(19): siRNA sense strand
gaaaguuagagaauccuau

SEQ ID NO: 1797722 - RNA, 19 nt, Homo sapiens
  misc_RNA (1)...(19): siRNA sense strand
ggagguagacauccuuauc

SEQ ID NO: 1797723 - RNA, 19 nt, Homo sapiens
  misc_RNA (1)...(19): siRNA sense strand
cacaauugcucagggauau

SEQ ID NO: 1797724 - RNA, 19 nt, Homo sapiens
  misc_RNA (1)...(19): siRNA sense strand
uaauucagcagcucaagaa

SEQ ID NO: 1797725 - RNA, 19 nt, Homo sapiens
  misc_RNA (1)...(19): siRNA sense strand
ggagcuaaugacacuguua

SEQ ID NO: 1797726 - RNA, 19 nt, Homo sapiens
  misc_RNA (1)...(19): siRNA sense strand
ccgaaugccuggucagcuu

SEQ ID NO: 1797727 - RNA, 19 nt, Homo sapiens
  misc_RNA (1)...(19): siRNA sense strand
gaugggucaugucauuaga

SEQ ID NO: 1797728 - RNA, 19 nt, Homo sapiens
  misc_RNA (1)...(19): siRNA sense strand
gagguagacauccuuauca

SEQ ID NO: 1797729 - RNA, 19 nt, Homo sapiens
  misc_RNA (1)...(19): siRNA sense strand
cagcacuuauuccagguaa

SEQ ID NO: 1797730 - RNA, 19 nt, Homo sapiens
  misc_RNA (1)...(19): siRNA sense strand
ggaaaacccauggaaauuu

SEQ ID NO: 1797731 - RNA, 19 nt, Homo sapiens
  misc_RNA (1)...(19): siRNA sense strand
gcacugaugggaggacauu

SEQ ID NO: 1797732 - RNA, 19 nt, Homo sapiens
  misc_RNA (1)...(19): siRNA sense strand
gaaacuuugaaaccacuaa

SEQ ID NO: 1797733 - RNA, 19 nt, Homo sapiens
  misc_RNA (1)...(19): siRNA sense strand
agaauccuaucagaaguaa

SEQ ID NO: 1797734 - RNA, 19 nt, Homo sapiens
  misc_RNA (1)...(19): siRNA sense strand
gaaggcacuuacucaaugc

SEQ ID NO: 1797735 - RNA, 19 nt, Homo sapiens
  misc_RNA (1)...(19): siRNA sense strand
guaagggucuacgugugaa

SEQ ID NO: 1797736 - RNA, 19 nt, Homo sapiens
  misc_RNA (1)...(19): siRNA sense strand
cauauaagcaacugacugu

SEQ ID NO: 1797737 - RNA, 19 nt, Homo sapiens
  misc_RNA (1)...(19): siRNA sense strand
gcauagcugaguacauuau

SEQ ID NO: 1797738 - RNA, 19 nt, Homo sapiens
  misc_RNA (1)...(19): siRNA sense strand
ugaggcugguggaaacuuu

SEQ ID NO: 1797739 - RNA, 19 nt, Homo sapiens
  misc_RNA (1)...(19): siRNA sense strand
uaucagcacagcacuuauu

SEQ ID NO: 1797740 - RNA, 19 nt, Homo sapiens
  misc_RNA (1)...(19): siRNA sense strand
gguggaaacuuugaaacca

SEQ ID NO: 1797741 - RNA, 19 nt, Homo sapiens
  misc_RNA (1)...(19): siRNA sense strand
guaauuggagcuaaugaca

SEQ ID NO: 1797742 - RNA, 19 nt, Homo sapiens
  misc_RNA (1)...(19): siRNA sense strand
gauuugguccuuguaauug

SEQ ID NO: 1797743 - RNA, 19 nt, Homo sapiens
  misc_RNA (1)...(19): siRNA sense strand
caucauguguguggcaaug

SEQ ID NO: 1797744 - RNA, 19 nt, Homo sapiens
  misc_RNA (1)...(19): siRNA sense strand
acaacaaucugcugaccau

SEQ ID NO: 1797745 - RNA, 19 nt, Homo sapiens
  misc_RNA (1)...(19): siRNA sense strand
ugucaacggcuucugcaua

SEQ ID NO: 1797746 - RNA, 19 nt, Homo sapiens
  misc_RNA (1)...(19): siRNA sense strand
gccaggagaacucuacauu

SEQ ID NO: 1797747 - RNA, 19 nt, Homo sapiens
  misc_RNA (1)...(19): siRNA sense strand
gaacuacuguggagaaagg

SEQ ID NO: 1797748 - RNA, 19 nt, Homo sapiens
  misc_RNA (1)...(19): siRNA sense strand
gagaacuacuguggagaaa

SEQ ID NO: 1797749 - RNA, 19 nt, Homo sapiens
  misc_RNA (1)...(19): siRNA sense strand
agagggagguguccacuau

SEQ ID NO: 1797750 - RNA, 19 nt, Homo sapiens
  misc_RNA (1)...(19): siRNA sense strand
guucaucagcagauucuaa

SEQ ID NO: 1797751 - RNA, 19 nt, Homo sapiens
  misc_RNA (1)...(19): siRNA sense strand
gugaacagcgcugguauga

SEQ ID NO: 1797752 - RNA, 19 nt, Homo sapiens
  misc_RNA (1)...(19): siRNA sense strand
ggagguguccacuauguag

SEQ ID NO: 1797753 - RNA, 19 nt, Homo sapiens
  misc_RNA (1)...(19): siRNA sense strand
cgaaugagagaacuacugu

SEQ ID NO: 1797754 - RNA, 19 nt, Homo sapiens
  misc_RNA (1)...(19): siRNA sense strand
gaagauugccagagguuuu

SEQ ID NO: 1797755 - RNA, 19 nt, Homo sapiens
  misc_RNA (1)...(19): siRNA sense strand
gcgcugguaugaggaggaa

SEQ ID NO: 1797756 - RNA, 19 nt, Homo sapiens
  misc_RNA (1)...(19): siRNA sense strand
agcaacaaguuccugauug

SEQ ID NO: 1797757 - RNA, 19 nt, Homo sapiens
  misc_RNA (1)...(19): siRNA sense strand
ggaagauugccagagguuu

SEQ ID NO: 1797758 - RNA, 19 nt, Homo sapiens
  misc_RNA (1)...(19): siRNA sense strand
gcuguggcccugugugcua

SEQ ID NO: 1797759 - RNA, 19 nt, Homo sapiens
  misc_RNA (1)...(19): siRNA sense strand
cagcagauucuaagcaaca

SEQ ID NO: 1797760 - RNA, 19 nt, Homo sapiens
  misc_RNA (1)...(19): siRNA sense strand
gggagguguccacuaugua

SEQ ID NO: 1797761 - RNA, 19 nt, Homo sapiens
  misc_RNA (1)...(19): siRNA sense strand
agagaacuacuguggagaa

SEQ ID NO: 1797762 - RNA, 19 nt, Homo sapiens
  misc_RNA (1)...(19): siRNA sense strand
ucagugaacagcgcuggua

SEQ ID NO: 1797763 - RNA, 19 nt, Homo sapiens
  misc_RNA (1)...(19): siRNA sense strand
aauccgagccuacauccuu

SEQ ID NO: 1797764 - RNA, 19 nt, Homo sapiens
  misc_RNA (1)...(19): siRNA sense strand
aagcaacaaguuccugauu

SEQ ID NO: 1797765 - RNA, 19 nt, Homo sapiens
  misc_RNA (1)...(19): siRNA sense strand
gguucggacucugugguuu

SEQ ID NO: 1797766 - RNA, 19 nt, Homo sapiens
  misc_RNA (1)...(19): siRNA sense strand
ggaguuucggccucacuga

SEQ ID NO: 1797767 - RNA, 19 nt, Homo sapiens
  misc_RNA (1)...(19): siRNA sense strand
guuccugauuguacgaaug

SEQ ID NO: 1797768 - RNA, 19 nt, Homo sapiens
  misc_RNA (1)...(19): siRNA sense strand
gcugguaugaggaggaaga

SEQ ID NO: 1797769 - RNA, 19 nt, Homo sapiens
  misc_RNA (1)...(19): siRNA sense strand
agggagguguccacuaugu

SEQ ID NO: 1797770 - RNA, 19 nt, Homo sapiens
  misc_RNA (1)...(19): siRNA sense strand
agagauugcagccuucuuc

SEQ ID NO: 1797771 - RNA, 19 nt, Homo sapiens
  misc_RNA (1)...(19): siRNA sense strand
ggaggaagagccccaguug

SEQ ID NO: 1797772 - RNA, 19 nt, Homo sapiens
  misc_RNA (1)...(19): siRNA sense strand
guacgaaugagagaacuac

SEQ ID NO: 1797773 - RNA, 19 nt, Homo sapiens
  misc_RNA (1)...(19): siRNA sense strand
gauucuauccgugggaguu

SEQ ID NO: 1797774 - RNA, 19 nt, Homo sapiens
  misc_RNA (1)...(19): siRNA sense strand
aucagaggcugguggaguu

SEQ ID NO: 1797775 - RNA, 19 nt, Homo sapiens
  misc_RNA (1)...(19): siRNA sense strand
caucagcagauucuaagca

SEQ ID NO: 1797776 - RNA, 19 nt, Homo sapiens
  misc_RNA (1)...(19): siRNA sense strand
gauucuaagcaacaaguuc

SEQ ID NO: 1797777 - RNA, 19 nt, Homo sapiens
  misc_RNA (1)...(19): siRNA sense strand
gaucagcuaugccgacuuu

SEQ ID NO: 1797778 - RNA, 19 nt, Homo sapiens
  misc_RNA (1)...(19): siRNA sense strand
ucaaccagcugaccgaauu

SEQ ID NO: 1797779 - RNA, 19 nt, Homo sapiens
  misc_RNA (1)...(19): siRNA sense strand
gaaggaggcguccgaguuc

SEQ ID NO: 1797780 - RNA, 19 nt, Homo sapiens
  misc_RNA (1)...(19): siRNA sense strand
ugaccgaauucuucucgua

SEQ ID NO: 1797781 - RNA, 19 nt, Homo sapiens
  misc_RNA (1)...(19): siRNA sense strand
uggacgagcuguuccugua

SEQ ID NO: 1797782 - RNA, 19 nt, Homo sapiens
  misc_RNA (1)...(19): siRNA sense strand
gcagaaaagugcagaagga

SEQ ID NO: 1797783 - RNA, 19 nt, Homo sapiens
  misc_RNA (1)...(19): siRNA sense strand
gaagggaagaucagcuaug

SEQ ID NO: 1797784 - RNA, 19 nt, Homo sapiens
  misc_RNA (1)...(19): siRNA sense strand
ccguggaccuguacgagua

SEQ ID NO: 1797785 - RNA, 19 nt, Homo sapiens
  misc_RNA (1)...(19): siRNA sense strand
ugaaggaggcguccgaguu

SEQ ID NO: 1797786 - RNA, 19 nt, Homo sapiens
  misc_RNA (1)...(19): siRNA sense strand
gcuccuuccugcagaaugu

SEQ ID NO: 1797787 - RNA, 19 nt, Homo sapiens
  misc_RNA (1)...(19): siRNA sense strand
gccaaagcauuccgaccuu

SEQ ID NO: 1797788 - RNA, 19 nt, Homo sapiens
  misc_RNA (1)...(19): siRNA sense strand
gaagguggacgagcuguuc

SEQ ID NO: 1797789 - RNA, 19 nt, Homo sapiens
  misc_RNA (1)...(19): siRNA sense strand
gaugauagacaggaucuuc

SEQ ID NO: 1797790 - RNA, 19 nt, Homo sapiens
  misc_RNA (1)...(19): siRNA sense strand
ggagcuccuuccugcagaa

SEQ ID NO: 1797791 - RNA, 19 nt, Homo sapiens
  misc_RNA (1)...(19): siRNA sense strand
gcugcaagcuggccaacgu

SEQ ID NO: 1797792 - RNA, 19 nt, Homo sapiens
  misc_RNA (1)...(19): siRNA sense strand
ccaagaugauagacaggau

SEQ ID NO: 1797793 - RNA, 19 nt, Homo sapiens
  misc_RNA (1)...(19): siRNA sense strand
gagcauuucuacgucaucu

SEQ ID NO: 1797794 - RNA, 19 nt, Homo sapiens
  misc_RNA (1)...(19): siRNA sense strand
cgaccagcaucgaguacug

SEQ ID NO: 1797795 - RNA, 19 nt, Homo sapiens
  misc_RNA (1)...(19): siRNA sense strand
gcauuccgaccuucuacuu

SEQ ID NO: 1797796 - RNA, 19 nt, Homo sapiens
  misc_RNA (1)...(19): siRNA sense strand
guucagacacggaaagaag

SEQ ID NO: 1797797 - RNA, 19 nt, Homo sapiens
  misc_RNA (1)...(19): siRNA sense strand
caagcuggccaacgucuuc

SEQ ID NO: 1797798 - RNA, 19 nt, Homo sapiens
  misc_RNA (1)...(19): siRNA sense strand
gaucucugaggaagacaaa

SEQ ID NO: 1797799 - RNA, 19 nt, Homo sapiens
  misc_RNA (1)...(19): siRNA sense strand
ggaagggaagaucagcuau

SEQ ID NO: 1797800 - RNA, 19 nt, Homo sapiens
  misc_RNA (1)...(19): siRNA sense strand
ggaggaggcggacaucaac

SEQ ID NO: 1797801 - RNA, 19 nt, Homo sapiens
  misc_RNA (1)...(19): siRNA sense strand
gagcagaaagagcagaucu

SEQ ID NO: 1797802 - RNA, 19 nt, Homo sapiens
  misc_RNA (1)...(19): siRNA sense strand
cagccgguccugaagauga

SEQ ID NO: 1797803 - RNA, 19 nt, Homo sapiens
  misc_RNA (1)...(19): siRNA sense strand
gccacgagccaaagcauuc

SEQ ID NO: 1797804 - RNA, 19 nt, Homo sapiens
  misc_RNA (1)...(19): siRNA sense strand
gcagaaggaagggaagauc

SEQ ID NO: 1797805 - RNA, 19 nt, Homo sapiens
  misc_RNA (1)...(19): siRNA sense strand
cgagagggccaccauggau

SEQ ID NO: 1797806 - RNA, 19 nt, Homo sapiens
  misc_RNA (1)...(19): siRNA sense strand
ccagcugaccgaauucuuc

SEQ ID NO: 1797807 - RNA, 19 nt, Homo sapiens
  misc_RNA (1)...(19): siRNA sense strand
cgucaucuacugcaaguuc

SEQ ID NO: 1797808 - RNA, 19 nt, Homo sapiens
  misc_RNA (1)...(19): siRNA sense strand
gcauuucuacgucaucuac

SEQ ID NO: 1797809 - RNA, 19 nt, Homo sapiens
  misc_RNA (1)...(19): siRNA sense strand
acaaugaccacgcccuuuc

SEQ ID NO: 1797810 - RNA, 19 nt, Homo sapiens
  misc_RNA (1)...(19): siRNA sense strand
cagaaggaagggaagauca

SEQ ID NO: 1797811 - RNA, 19 nt, Homo sapiens
  misc_RNA (1)...(19): siRNA sense strand
gauagacaggaucuucuca

SEQ ID NO: 1797812 - RNA, 19 nt, Homo sapiens
  misc_RNA (1)...(19): siRNA sense strand
gacgagaguaguucagaca

SEQ ID NO: 1797813 - RNA, 19 nt, Homo sapiens
  misc_RNA (1)...(19): siRNA sense strand
gcagggacgagaguaguuc

SEQ ID NO: 1797814 - RNA, 19 nt, Homo sapiens
  misc_RNA (1)...(19): siRNA sense strand
gcagucacacgaggcagaa

SEQ ID NO: 1797815 - RNA, 19 nt, Homo sapiens
  misc_RNA (1)...(19): siRNA sense strand
guucguccaucugcucaug

SEQ ID NO: 1797816 - RNA, 19 nt, Homo sapiens
  misc_RNA (1)...(19): siRNA sense strand
guucgaggcacccguagau

SEQ ID NO: 1797817 - RNA, 19 nt, Homo sapiens
  misc_RNA (1)...(19): siRNA sense strand
gaucuucuacgccgugaac

SEQ ID NO: 1797818 - RNA, 19 nt, Homo sapiens
  misc_RNA (1)...(19): siRNA sense strand
gacgagcuguuccuguacu

SEQ ID NO: 1797819 - RNA, 19 nt, Homo sapiens
  misc_RNA (1)...(19): siRNA sense strand
acaaguucgucgccaugug

SEQ ID NO: 1797820 - RNA, 19 nt, Homo sapiens
  misc_RNA (1)...(19): siRNA sense strand
ggaccacgaccugcucauc

SEQ ID NO: 1797821 - RNA, 19 nt, Homo sapiens
  misc_RNA (1)...(19): siRNA sense strand
gggccaccauggaugacau

SEQ ID NO: 1797822 - RNA, 19 nt, Homo sapiens
  misc_RNA (1)...(19): siRNA sense strand
ggacugaagggaagaucac

SEQ ID NO: 1797823 - RNA, 19 nt, Homo sapiens
  misc_RNA (1)...(19): siRNA sense strand
aagggaagaucagcuaugc

SEQ ID NO: 1797824 - RNA, 19 nt, Homo sapiens
  misc_RNA (1)...(19): siRNA sense strand
gaccacgcccuuucuacca

SEQ ID NO: 1797825 - RNA, 19 nt, Homo sapiens
  misc_RNA (1)...(19): siRNA sense strand
cggccaaguucguccaucu

SEQ ID NO: 1797826 - RNA, 19 nt, Homo sapiens
  misc_RNA (1)...(19): siRNA sense strand
ccguguccguccacaaguu

SEQ ID NO: 1797827 - RNA, 19 nt, Homo sapiens
  misc_RNA (1)...(19): siRNA sense strand
gcaaauaagcacuucauga

SEQ ID NO: 1797828 - RNA, 19 nt, Homo sapiens
  misc_RNA (1)...(19): siRNA sense strand
ccaagaacuucccuuauga

SEQ ID NO: 1797829 - RNA, 19 nt, Homo sapiens
  misc_RNA (1)...(19): siRNA sense strand
gcauacagcugggaucuug

SEQ ID NO: 1797830 - RNA, 19 nt, Homo sapiens
  misc_RNA (1)...(19): siRNA sense strand
cagcugggaucuugcauuu

SEQ ID NO: 1797831 - RNA, 19 nt, Homo sapiens
  misc_RNA (1)...(19): siRNA sense strand
acagggagauuucuauuau

SEQ ID NO: 1797832 - RNA, 19 nt, Homo sapiens
  misc_RNA (1)...(19): siRNA sense strand
guucaaagcauuuaaagug

SEQ ID NO: 1797833 - RNA, 19 nt, Homo sapiens
  misc_RNA (1)...(19): siRNA sense strand
gaacacaucgccagucaca

SEQ ID NO: 1797834 - RNA, 19 nt, Homo sapiens
  misc_RNA (1)...(19): siRNA sense strand
gacagggagauuucuauua

SEQ ID NO: 1797835 - RNA, 19 nt, Homo sapiens
  misc_RNA (1)...(19): siRNA sense strand
agaaugcuguuauugguuu

SEQ ID NO: 1797836 - RNA, 19 nt, Homo sapiens
  misc_RNA (1)...(19): siRNA sense strand
gaacggaguuauucaugac

SEQ ID NO: 1797837 - RNA, 19 nt, Homo sapiens
  misc_RNA (1)...(19): siRNA sense strand
gcccugauguuauaacgaa

SEQ ID NO: 1797838 - RNA, 19 nt, Homo sapiens
  misc_RNA (1)...(19): siRNA sense strand
gaaaagcaccuuaacaaau

SEQ ID NO: 1797839 - RNA, 19 nt, Homo sapiens
  misc_RNA (1)...(19): siRNA sense strand
uaaacccacuaagcuguua

SEQ ID NO: 1797840 - RNA, 19 nt, Homo sapiens
  misc_RNA (1)...(19): siRNA sense strand
ccaaccaggucuuccagaa

SEQ ID NO: 1797841 - RNA, 19 nt, Homo sapiens
  misc_RNA (1)...(19): siRNA sense strand
ggacagggagauuucuauu

SEQ ID NO: 1797842 - RNA, 19 nt, Homo sapiens
  misc_RNA (1)...(19): siRNA sense strand
uuucaggaaucaccaagua

SEQ ID NO: 1797843 - RNA, 19 nt, Homo sapiens
  misc_RNA (1)...(19): siRNA sense strand
gaacguucaaagcauuuaa

SEQ ID NO: 1797844 - RNA, 19 nt, Homo sapiens
  misc_RNA (1)...(19): siRNA sense strand
aaagaaugcuguuauuggu

SEQ ID NO: 1797845 - RNA, 19 nt, Homo sapiens
  misc_RNA (1)...(19): siRNA sense strand
ugauguugguugagcguua

SEQ ID NO: 1797846 - RNA, 19 nt, Homo sapiens
  misc_RNA (1)...(19): siRNA sense strand
ggaaucaccaaguagaaga

SEQ ID NO: 1797847 - RNA, 19 nt, Homo sapiens
  misc_RNA (1)...(19): siRNA sense strand
caaauaagcacuucaugac

SEQ ID NO: 1797848 - RNA, 19 nt, Homo sapiens
  misc_RNA (1)...(19): siRNA sense strand
gaacuucggcucucagacu

SEQ ID NO: 1797849 - RNA, 19 nt, Homo sapiens
  misc_RNA (1)...(19): siRNA sense strand
gaauaucugaacggaguua

SEQ ID NO: 1797850 - RNA, 19 nt, Homo sapiens
  misc_RNA (1)...(19): siRNA sense strand
gagccugggugaacacauc

SEQ ID NO: 1797851 - RNA, 19 nt, Homo sapiens
  misc_RNA (1)...(19): siRNA sense strand
gugaacacaucgccaguca

SEQ ID NO: 1797852 - RNA, 19 nt, Homo sapiens
  misc_RNA (1)...(19): siRNA sense strand
accaagaacuucccuuaug

SEQ ID NO: 1797853 - RNA, 19 nt, Homo sapiens
  misc_RNA (1)...(19): siRNA sense strand
ucagaaacaccaagaacuu

SEQ ID NO: 1797854 - RNA, 19 nt, Homo sapiens
  misc_RNA (1)...(19): siRNA sense strand
acaccaagaacuucccuua

SEQ ID NO: 1797855 - RNA, 19 nt, Homo sapiens
  misc_RNA (1)...(19): siRNA sense strand
aaaacgcccugauguuaua

SEQ ID NO: 1797856 - RNA, 19 nt, Homo sapiens
  misc_RNA (1)...(19): siRNA sense strand
caagcugccugacauagag

SEQ ID NO: 1797857 - RNA, 19 nt, Homo sapiens
  misc_RNA (1)...(19): siRNA sense strand
ucagacugguuucauccua

SEQ ID NO: 1797858 - RNA, 19 nt, Homo sapiens
  misc_RNA (1)...(19): siRNA sense strand
cucaauagcacuuaugaaa

SEQ ID NO: 1797859 - RNA, 19 nt, Homo sapiens
  misc_RNA (1)...(19): siRNA sense strand
aaccaggucuuccagaaug

SEQ ID NO: 1797860 - RNA, 19 nt, Homo sapiens
  misc_RNA (1)...(19): siRNA sense strand
gcacaccccauaauauuuu

SEQ ID NO: 1797861 - RNA, 19 nt, Homo sapiens
  misc_RNA (1)...(19): siRNA sense strand
caauagcacuuaugaaaag

SEQ ID NO: 1797862 - RNA, 19 nt, Homo sapiens
  misc_RNA (1)...(19): siRNA sense strand
gaaggcggaauaucacugu

SEQ ID NO: 1797863 - RNA, 19 nt, Homo sapiens
  misc_RNA (1)...(19): siRNA sense strand
gaaaacgcccugauguuau

SEQ ID NO: 1797864 - RNA, 19 nt, Homo sapiens
  misc_RNA (1)...(19): siRNA sense strand
ucaauaaacccacuaagcu

SEQ ID NO: 1797865 - RNA, 19 nt, Homo sapiens
  misc_RNA (1)...(19): siRNA sense strand
gauguugguugagcguuau

SEQ ID NO: 1797866 - RNA, 19 nt, Homo sapiens
  misc_RNA (1)...(19): siRNA sense strand
cauuacagaaggcggaaua

SEQ ID NO: 1797867 - RNA, 19 nt, Homo sapiens
  misc_RNA (1)...(19): siRNA sense strand
caucaaagaauaucugaac

SEQ ID NO: 1797868 - RNA, 19 nt, Homo sapiens
  misc_RNA (1)...(19): siRNA sense strand
uacagaaggcggaauauca

SEQ ID NO: 1797869 - RNA, 19 nt, Homo sapiens
  misc_RNA (1)...(19): siRNA sense strand
gagcguuauuucaggaauc

SEQ ID NO: 1797870 - RNA, 19 nt, Homo sapiens
  misc_RNA (1)...(19): siRNA sense strand
ggacucaauagcacuuaug

SEQ ID NO: 1797871 - RNA, 19 nt, Homo sapiens
  misc_RNA (1)...(19): siRNA sense strand
gaaucaccaaguagaagaa

SEQ ID NO: 1797872 - RNA, 19 nt, Homo sapiens
  misc_RNA (1)...(19): siRNA sense strand
gcuaccgagugaucuucua

SEQ ID NO: 1797873 - RNA, 19 nt, Homo sapiens
  misc_RNA (1)...(19): siRNA sense strand
ugaagagccugggugaaca

SEQ ID NO: 1797874 - RNA, 19 nt, Homo sapiens
  misc_RNA (1)...(19): siRNA sense strand
gcugggaucuugcauuuuc

SEQ ID NO: 1797875 - RNA, 19 nt, Homo sapiens
  misc_RNA (1)...(19): siRNA sense strand
agaaaacgcccugauguua

SEQ ID NO: 1797876 - RNA, 19 nt, Homo sapiens
  misc_RNA (1)...(19): siRNA sense strand
cagggagauuucuauuaug

SEQ ID NO: 1797877 - RNA, 19 nt, Homo sapiens
  misc_RNA (1)...(19): siRNA sense strand
uuccuacacuccgcaaaua

SEQ ID NO: 1797878 - RNA, 19 nt, Homo sapiens
  misc_RNA (1)...(19): siRNA sense strand
ccaguccucuucgaacguu

SEQ ID NO: 1797879 - RNA, 19 nt, Homo sapiens
  misc_RNA (1)...(19): siRNA sense strand
acacaucgccagucacauc

SEQ ID NO: 1797880 - RNA, 19 nt, Homo sapiens
  misc_RNA (1)...(19): siRNA sense strand
agacugguuucauccuaga

SEQ ID NO: 1797881 - RNA, 19 nt, Homo sapiens
  misc_RNA (1)...(19): siRNA sense strand
uaucugaacggaguuauuc

SEQ ID NO: 1797882 - RNA, 19 nt, Homo sapiens
  misc_RNA (1)...(19): siRNA sense strand
ucaggaaucaccaaguaga

SEQ ID NO: 1797883 - RNA, 19 nt, Homo sapiens
  misc_RNA (1)...(19): siRNA sense strand
caaccaggucuuccagaau

SEQ ID NO: 1797884 - RNA, 19 nt, Homo sapiens
  misc_RNA (1)...(19): siRNA sense strand
gcucgcuccuguccuaugg

SEQ ID NO: 1797885 - RNA, 19 nt, Homo sapiens
  misc_RNA (1)...(19): siRNA sense strand
gucaaggucgcacaugauu

SEQ ID NO: 1797886 - RNA, 19 nt, Homo sapiens
  misc_RNA (1)...(19): siRNA sense strand
cagcuugcaucccguuugg

SEQ ID NO: 1797887 - RNA, 19 nt, Homo sapiens
  misc_RNA (1)...(19): siRNA sense strand
gguggacgccuucuucaag

SEQ ID NO: 1797888 - RNA, 19 nt, Homo sapiens
  misc_RNA (1)...(19): siRNA sense strand
gcagguuugcagaggagua

SEQ ID NO: 1797889 - RNA, 19 nt, Homo sapiens
  misc_RNA (1)...(19): siRNA sense strand
agggagauuucuauuaugg

SEQ ID NO: 1797890 - RNA, 19 nt, Homo sapiens
  misc_RNA (1)...(19): siRNA sense strand
ucaagcugccugacauaga

SEQ ID NO: 1797891 - RNA, 19 nt, Homo sapiens
  misc_RNA (1)...(19): siRNA sense strand
gagcccaguccucuucgaa

SEQ ID NO: 1797892 - RNA, 19 nt, Homo sapiens
  misc_RNA (1)...(19): siRNA sense strand
gcagcuugcaucccguuug

SEQ ID NO: 1797893 - RNA, 19 nt, Homo sapiens
  misc_RNA (1)...(19): siRNA sense strand
ggaguuauucaugacauca

SEQ ID NO: 1797894 - RNA, 19 nt, Homo sapiens
  misc_RNA (1)...(19): siRNA sense strand
gacucaauagcacuuauga

SEQ ID NO: 1797895 - RNA, 19 nt, Homo sapiens
  misc_RNA (1)...(19): siRNA sense strand
cagaaacaccaagaacuuc

SEQ ID NO: 1797896 - RNA, 19 nt, Homo sapiens
  misc_RNA (1)...(19): siRNA sense strand
caggaaucaccaaguagaa

SEQ ID NO: 1797897 - RNA, 19 nt, Homo sapiens
  misc_RNA (1)...(19): siRNA sense strand
gugaagagccugggugaac

SEQ ID NO: 1797898 - RNA, 19 nt, Homo sapiens
  misc_RNA (1)...(19): siRNA sense strand
ugaaaagcaccuuaacaaa

SEQ ID NO: 1797899 - RNA, 19 nt, Homo sapiens
  misc_RNA (1)...(19): siRNA sense strand
uuucuauuauggcaacuug

SEQ ID NO: 1797900 - RNA, 19 nt, Homo sapiens
  misc_RNA (1)...(19): siRNA sense strand
cuggcucgcuccuguccua

SEQ ID NO: 1797901 - RNA, 19 nt, Homo sapiens
  misc_RNA (1)...(19): siRNA sense strand
caccaagaacuucccuuau

SEQ ID NO: 1797902 - RNA, 19 nt, Homo sapiens
  misc_RNA (1)...(19): siRNA sense strand
aaauaagcacuucaugaca

SEQ ID NO: 1797903 - RNA, 19 nt, Homo sapiens
  misc_RNA (1)...(19): siRNA sense strand
cuucgaacguucaaagcau

SEQ ID NO: 1797904 - RNA, 19 nt, Homo sapiens
  misc_RNA (1)...(19): siRNA sense strand
caugguggacgccuucuuc

SEQ ID NO: 1797905 - RNA, 19 nt, Homo sapiens
  misc_RNA (1)...(19): siRNA sense strand
caagaacuucccuuaugag

SEQ ID NO: 1797906 - RNA, 19 nt, Homo sapiens
  misc_RNA (1)...(19): siRNA sense strand
uuucacugauguugguuga

SEQ ID NO: 1797907 - RNA, 19 nt, Homo sapiens
  misc_RNA (1)...(19): siRNA sense strand
cgaacguucaaagcauuua

SEQ ID NO: 1797908 - RNA, 19 nt, Homo sapiens
  misc_RNA (1)...(19): siRNA sense strand
acgucaaggucgcacauga

SEQ ID NO: 1797909 - RNA, 19 nt, Homo sapiens
  misc_RNA (1)...(19): siRNA sense strand
gcagaaagguguaacauaa

SEQ ID NO: 1797910 - RNA, 19 nt, Homo sapiens
  misc_RNA (1)...(19): siRNA sense strand
gaauggacauccugugaaa

SEQ ID NO: 1797911 - RNA, 19 nt, Homo sapiens
  misc_RNA (1)...(19): siRNA sense strand
gagccaagcuugugcagaa

SEQ ID NO: 1797912 - RNA, 19 nt, Homo sapiens
  misc_RNA (1)...(19): siRNA sense strand
guggagaccuugagaaauu

SEQ ID NO: 1797913 - RNA, 19 nt, Homo sapiens
  misc_RNA (1)...(19): siRNA sense strand
cgaauagauuucaguagua

SEQ ID NO: 1797914 - RNA, 19 nt, Homo sapiens
  misc_RNA (1)...(19): siRNA sense strand
gauugcagaccaagaauua

SEQ ID NO: 1797915 - RNA, 19 nt, Homo sapiens
  misc_RNA (1)...(19): siRNA sense strand
gaagauauaaggcaacaga

SEQ ID NO: 1797916 - RNA, 19 nt, Homo sapiens
  misc_RNA (1)...(19): siRNA sense strand
ggaagaggcuccggaaagu

SEQ ID NO: 1797917 - RNA, 19 nt, Homo sapiens
  misc_RNA (1)...(19): siRNA sense strand
gccaaacucuucaauacuu

SEQ ID NO: 1797918 - RNA, 19 nt, Homo sapiens
  misc_RNA (1)...(19): siRNA sense strand
acagaucauuggcuucuua

SEQ ID NO: 1797919 - RNA, 19 nt, Homo sapiens
  misc_RNA (1)...(19): siRNA sense strand
gcaaagauagaagaagaua

SEQ ID NO: 1797920 - RNA, 19 nt, Homo sapiens
  misc_RNA (1)...(19): siRNA sense strand
agaaaggauucgucuguuu

SEQ ID NO: 1797921 - RNA, 19 nt, Homo sapiens
  misc_RNA (1)...(19): siRNA sense strand
gccaaguagugaugcuuua

SEQ ID NO: 1797922 - RNA, 19 nt, Homo sapiens
  misc_RNA (1)...(19): siRNA sense strand
caacagaacauugaggaaa

SEQ ID NO: 1797923 - RNA, 19 nt, Homo sapiens
  misc_RNA (1)...(19): siRNA sense strand
ggagauugcagaccaagaa

SEQ ID NO: 1797924 - RNA, 19 nt, Homo sapiens
  misc_RNA (1)...(19): siRNA sense strand
uagcucagguucagauuga

SEQ ID NO: 1797925 - RNA, 19 nt, Homo sapiens
  misc_RNA (1)...(19): siRNA sense strand
gacaauagcuauggaagag

SEQ ID NO: 1797926 - RNA, 19 nt, Homo sapiens
  misc_RNA (1)...(19): siRNA sense strand
agaaagguguaacauaaug

SEQ ID NO: 1797927 - RNA, 19 nt, Homo sapiens
  misc_RNA (1)...(19): siRNA sense strand
caagaaaggauucgucugu

SEQ ID NO: 1797928 - RNA, 19 nt, Homo sapiens
  misc_RNA (1)...(19): siRNA sense strand
ccgaauagauuucaguagu

SEQ ID NO: 1797929 - RNA, 19 nt, Homo sapiens
  misc_RNA (1)...(19): siRNA sense strand
gaucgucuaugcggaaaga

SEQ ID NO: 1797930 - RNA, 19 nt, Homo sapiens
  misc_RNA (1)...(19): siRNA sense strand
ggagagagcaagaaaggau

SEQ ID NO: 1797931 - RNA, 19 nt, Homo sapiens
  misc_RNA (1)...(19): siRNA sense strand
caaguagugaugcuuuaua

SEQ ID NO: 1797932 - RNA, 19 nt, Homo sapiens
  misc_RNA (1)...(19): siRNA sense strand
ugacucaggugcccagaug

SEQ ID NO: 1797933 - RNA, 19 nt, Homo sapiens
  misc_RNA (1)...(19): siRNA sense strand
gaaagguguaacauaauga

SEQ ID NO: 1797934 - RNA, 19 nt, Homo sapiens
  misc_RNA (1)...(19): siRNA sense strand
gauagaagaagauauaagg

SEQ ID NO: 1797935 - RNA, 19 nt, Homo sapiens
  misc_RNA (1)...(19): siRNA sense strand
aaagaccucucacagacaa

SEQ ID NO: 1797936 - RNA, 19 nt, Homo sapiens
  misc_RNA (1)...(19): siRNA sense strand
gauauaaggcaacagaaca

SEQ ID NO: 1797937 - RNA, 19 nt, Homo sapiens
  misc_RNA (1)...(19): siRNA sense strand
aggcaaagauagaagaaga

SEQ ID NO: 1797938 - RNA, 19 nt, Homo sapiens
  misc_RNA (1)...(19): siRNA sense strand
ggaaaguuuuggccaagua

SEQ ID NO: 1797939 - RNA, 19 nt, Homo sapiens
  misc_RNA (1)...(19): siRNA sense strand
gaucauuggcuucuuaugg

SEQ ID NO: 1797940 - RNA, 19 nt, Homo sapiens
  misc_RNA (1)...(19): siRNA sense strand
ccaaacucuucaauacuug

SEQ ID NO: 1797941 - RNA, 19 nt, Homo sapiens
  misc_RNA (1)...(19): siRNA sense strand
uaaggcaacagaacauuga

SEQ ID NO: 1797942 - RNA, 19 nt, Homo sapiens
  misc_RNA (1)...(19): siRNA sense strand
gaaaggauucgucuguuuu

SEQ ID NO: 1797943 - RNA, 19 nt, Homo sapiens
  misc_RNA (1)...(19): siRNA sense strand
ggacuggacaugcuuaaac

SEQ ID NO: 1797944 - RNA, 19 nt, Homo sapiens
  misc_RNA (1)...(19): siRNA sense strand
gaaagaccucucacagaca

SEQ ID NO: 1797945 - RNA, 19 nt, Homo sapiens
  misc_RNA (1)...(19): siRNA sense strand
gaaaacaugacaauagcua

SEQ ID NO: 1797946 - RNA, 19 nt, Homo sapiens
  misc_RNA (1)...(19): siRNA sense strand
uggccaaacucuucaauac

SEQ ID NO: 1797947 - RNA, 19 nt, Homo sapiens
  misc_RNA (1)...(19): siRNA sense strand
gaagaggcuccggaaaguu

SEQ ID NO: 1797948 - RNA, 19 nt, Homo sapiens
  misc_RNA (1)...(19): siRNA sense strand
gcagaggaugcagguauuu

SEQ ID NO: 1797949 - RNA, 19 nt, Homo sapiens
  misc_RNA (1)...(19): siRNA sense strand
ccucagggcuuggacaauc

SEQ ID NO: 1797950 - RNA, 19 nt, Homo sapiens
  misc_RNA (1)...(19): siRNA sense strand
cagcagaggaugcagguau

SEQ ID NO: 1797951 - RNA, 19 nt, Homo sapiens
  misc_RNA (1)...(19): siRNA sense strand
aagaggcuccggaaaguuu

SEQ ID NO: 1797952 - RNA, 19 nt, Homo sapiens
  misc_RNA (1)...(19): siRNA sense strand
gaccaagaauuagcagaag

SEQ ID NO: 1797953 - RNA, 19 nt, Homo sapiens
  misc_RNA (1)...(19): siRNA sense strand
gugaauggacauccuguga

SEQ ID NO: 1797954 - RNA, 19 nt, Homo sapiens
  misc_RNA (1)...(19): siRNA sense strand
gagagagcaagaaaggauu

SEQ ID NO: 1797955 - RNA, 19 nt, Homo sapiens
  misc_RNA (1)...(19): siRNA sense strand
ccauguuccuucucuauac

SEQ ID NO: 1797956 - RNA, 19 nt, Homo sapiens
  misc_RNA (1)...(19): siRNA sense strand
gccauguuccuucucuaua

SEQ ID NO: 1797957 - RNA, 19 nt, Homo sapiens
  misc_RNA (1)...(19): siRNA sense strand
gcaacagaacauugaggaa

SEQ ID NO: 1797958 - RNA, 19 nt, Homo sapiens
  misc_RNA (1)...(19): siRNA sense strand
cggaaagaccucucacaga

SEQ ID NO: 1797959 - RNA, 19 nt, Homo sapiens
  misc_RNA (1)...(19): siRNA sense strand
caguggagaccuugagaaa

SEQ ID NO: 1797960 - RNA, 19 nt, Homo sapiens
  misc_RNA (1)...(19): siRNA sense strand
aagaaaggauucgucuguu

SEQ ID NO: 1797961 - RNA, 19 nt, Homo sapiens
  misc_RNA (1)...(19): siRNA sense strand
aaacaugacaauagcuaug

SEQ ID NO: 1797962 - RNA, 19 nt, Homo sapiens
  misc_RNA (1)...(19): siRNA sense strand
caaagugaauggacauccu

SEQ ID NO: 1797963 - RNA, 19 nt, Homo sapiens
  misc_RNA (1)...(19): siRNA sense strand
uggagaccuugagaaauuu

SEQ ID NO: 1797964 - RNA, 19 nt, Homo sapiens
  misc_RNA (1)...(19): siRNA sense strand
ugacaauagcuauggaaga

SEQ ID NO: 1797965 - RNA, 19 nt, Homo sapiens
  misc_RNA (1)...(19): siRNA sense strand
gaggaaaacaugacaauag

SEQ ID NO: 1797966 - RNA, 19 nt, Homo sapiens
  misc_RNA (1)...(19): siRNA sense strand
gaacauugaggaaaacaug

SEQ ID NO: 1797967 - RNA, 19 nt, Homo sapiens
  misc_RNA (1)...(19): siRNA sense strand
ucacagacaaccacagauc

SEQ ID NO: 1797968 - RNA, 19 nt, Homo sapiens
  misc_RNA (1)...(19): siRNA sense strand
gcacccagaagauuauugg

SEQ ID NO: 1797969 - RNA, 19 nt, Homo sapiens
  misc_RNA (1)...(19): siRNA sense strand
gguguaacauaaugagacu

SEQ ID NO: 1797970 - RNA, 19 nt, Homo sapiens
  misc_RNA (1)...(19): siRNA sense strand
agacaaccacagaucauug

SEQ ID NO: 1797971 - RNA, 19 nt, Homo sapiens
  misc_RNA (1)...(19): siRNA sense strand
gaagcucaggcaaagauag

SEQ ID NO: 1797972 - RNA, 19 nt, Homo sapiens
  misc_RNA (1)...(19): siRNA sense strand
agaccaagaauuagcagaa

SEQ ID NO: 1797973 - RNA, 19 nt, Homo sapiens
  misc_RNA (1)...(19): siRNA sense strand
cagaaagguguaacauaau

SEQ ID NO: 1797974 - RNA, 19 nt, Homo sapiens
  misc_RNA (1)...(19): siRNA sense strand
ggccaaguagugaugcuuu

SEQ ID NO: 1797975 - RNA, 19 nt, Homo sapiens
  misc_RNA (1)...(19): siRNA sense strand
cagccuugcuccgagauau

SEQ ID NO: 1797976 - RNA, 19 nt, Homo sapiens
  misc_RNA (1)...(19): siRNA sense strand
ugaauggacauccugugaa

SEQ ID NO: 1797977 - RNA, 19 nt, Homo sapiens
  misc_RNA (1)...(19): siRNA sense strand
aagaagauauaaggcaaca

SEQ ID NO: 1797978 - RNA, 19 nt, Homo sapiens
  misc_RNA (1)...(19): siRNA sense strand
uuaaacggcaccaguguuc

SEQ ID NO: 1797979 - RNA, 19 nt, Homo sapiens
  misc_RNA (1)...(19): siRNA sense strand
ucucuauacuugaggaaca

SEQ ID NO: 1797980 - RNA, 19 nt, Homo sapiens
  misc_RNA (1)...(19): siRNA sense strand
ugcagaaagguguaacaua

SEQ ID NO: 1797981 - RNA, 19 nt, Homo sapiens
  misc_RNA (1)...(19): siRNA sense strand
cuggagaaauaacuucauc

SEQ ID NO: 1797982 - RNA, 19 nt, Homo sapiens
  misc_RNA (1)...(19): siRNA sense strand
acuucgagcugcacaacuu

SEQ ID NO: 1797983 - RNA, 19 nt, Homo sapiens
  misc_RNA (1)...(19): siRNA sense strand
gcccggagagagcaagaaa

SEQ ID NO: 1797984 - RNA, 19 nt, Homo sapiens
  misc_RNA (1)...(19): siRNA sense strand
cgcaugagcuguccuugcu

SEQ ID NO: 1797985 - RNA, 19 nt, Homo sapiens
  misc_RNA (1)...(19): siRNA sense strand
aaacuuaccccgaauagau

SEQ ID NO: 1797986 - RNA, 19 nt, Homo sapiens
  misc_RNA (1)...(19): siRNA sense strand
acacagcagucccacucau

SEQ ID NO: 1797987 - RNA, 19 nt, Homo sapiens
  misc_RNA (1)...(19): siRNA sense strand
ccacagaucauuggcuucu

SEQ ID NO: 1797988 - RNA, 19 nt, Homo sapiens
  misc_RNA (1)...(19): siRNA sense strand
cagaucgucuaugcggaaa

SEQ ID NO: 1797989 - RNA, 19 nt, Homo sapiens
  misc_RNA (1)...(19): siRNA sense strand
gacuggacaugcuuaaacg

SEQ ID NO: 1797990 - RNA, 19 nt, Homo sapiens
  misc_RNA (1)...(19): siRNA sense strand
cagacaaccacagaucauu

SEQ ID NO: 1797991 - RNA, 19 nt, Homo sapiens
  misc_RNA (1)...(19): siRNA sense strand
ucaggugcccagaugacua

SEQ ID NO: 1797992 - RNA, 19 nt, Homo sapiens
  misc_RNA (1)...(19): siRNA sense strand
ccuugaagcucaggcaaag

SEQ ID NO: 1797993 - RNA, 19 nt, Homo sapiens
  misc_RNA (1)...(19): siRNA sense strand
agcagaggaugcagguauu

SEQ ID NO: 1797994 - RNA, 19 nt, Homo sapiens
  misc_RNA (1)...(19): siRNA sense strand
gagauugcagaccaagaau

SEQ ID NO: 1797995 - RNA, 19 nt, Homo sapiens
  misc_RNA (1)...(19): siRNA sense strand
ccaaguagugaugcuuuau

SEQ ID NO: 1797996 - RNA, 19 nt, Homo sapiens
  misc_RNA (1)...(19): siRNA sense strand
uggaagaggcuccggaaag

SEQ ID NO: 1797997 - RNA, 19 nt, Homo sapiens
  misc_RNA (1)...(19): siRNA sense strand
gacaaccacagaucauugg

SEQ ID NO: 1797998 - RNA, 19 nt, Homo sapiens
  misc_RNA (1)...(19): siRNA sense strand
agagccagaucgucuaugc

SEQ ID NO: 1797999 - RNA, 19 nt, Homo sapiens
  misc_RNA (1)...(19): siRNA sense strand
ccaagcuugugcagaaagg

SEQ ID NO: 1798000 - RNA, 19 nt, Homo sapiens
  misc_RNA (1)...(19): siRNA sense strand
uaucaugagccaagcuugu

SEQ ID NO: 1798001 - RNA, 19 nt, Homo sapiens
  misc_RNA (1)...(19): siRNA sense strand
caggugcccagaugacuau

SEQ ID NO: 1798002 - RNA, 19 nt, Homo sapiens
  misc_RNA (1)...(19): siRNA sense strand
ugaagcucaggcaaagaua

SEQ ID NO: 1798003 - RNA, 19 nt, Homo sapiens
  misc_RNA (1)...(19): siRNA sense strand
agaggagauugcagaccaa

SEQ ID NO: 1798004 - RNA, 19 nt, Homo sapiens
  misc_RNA (1)...(19): siRNA sense strand
gcuuaaacggcaccagugu

SEQ ID NO: 1798005 - RNA, 19 nt, Homo sapiens
  misc_RNA (1)...(19): siRNA sense strand
ucucacagacaaccacaga

SEQ ID NO: 1798006 - RNA, 19 nt, Homo sapiens
  misc_RNA (1)...(19): siRNA sense strand
uauaaggcaacagaacauu

SEQ ID NO: 1798007 - RNA, 19 nt, Homo sapiens
  misc_RNA (1)...(19): siRNA sense strand
gaagaugucugcguuaaga

SEQ ID NO: 1798008 - RNA, 19 nt, Homo sapiens
  misc_RNA (1)...(19): siRNA sense strand
gcaaugcggucagaaaggu

SEQ ID NO: 1798009 - RNA, 19 nt, Homo sapiens
  misc_RNA (1)...(19): siRNA sense strand
gguugcagcuggaagaugu

SEQ ID NO: 1798010 - RNA, 19 nt, Homo sapiens
  misc_RNA (1)...(19): siRNA sense strand
gcagcaaugcggucagaaa

SEQ ID NO: 1798011 - RNA, 19 nt, Homo sapiens
  misc_RNA (1)...(19): siRNA sense strand
uggagacgcuuaugaugga

SEQ ID NO: 1798012 - RNA, 19 nt, Homo sapiens
  misc_RNA (1)...(19): siRNA sense strand
uggaagaugucugcguuaa

SEQ ID NO: 1798013 - RNA, 19 nt, Homo sapiens
  misc_RNA (1)...(19): siRNA sense strand
ucucauggcuucgguggaa

SEQ ID NO: 1798014 - RNA, 19 nt, Homo sapiens
  misc_RNA (1)...(19): siRNA sense strand
uaagauccacccauccuau

SEQ ID NO: 1798015 - RNA, 19 nt, Homo sapiens
  misc_RNA (1)...(19): siRNA sense strand
gcaccgguguggacuacag

SEQ ID NO: 1798016 - RNA, 19 nt, Homo sapiens
  misc_RNA (1)...(19): siRNA sense strand
ggaagaggaggcccacaag

SEQ ID NO: 1798017 - RNA, 19 nt, Homo sapiens
  misc_RNA (1)...(19): siRNA sense strand
ggaggugucccagcucuuc

SEQ ID NO: 1798018 - RNA, 19 nt, Homo sapiens
  misc_RNA (1)...(19): siRNA sense strand
gauccacccauccuauugu

SEQ ID NO: 1798019 - RNA, 19 nt, Homo sapiens
  misc_RNA (1)...(19): siRNA sense strand
ccuggagcaugcccgaauu

SEQ ID NO: 1798020 - RNA, 19 nt, Homo sapiens
  misc_RNA (1)...(19): siRNA sense strand
ggaagaugucugcguuaag

SEQ ID NO: 1798021 - RNA, 19 nt, Homo sapiens
  misc_RNA (1)...(19): siRNA sense strand
gcuggagacgcuuaugaug

SEQ ID NO: 1798022 - RNA, 19 nt, Homo sapiens
  misc_RNA (1)...(19): siRNA sense strand
gugcuggagacgcuuauga

SEQ ID NO: 1798023 - RNA, 19 nt, Homo sapiens
  misc_RNA (1)...(19): siRNA sense strand
cagcaaugcggucagaaag

SEQ ID NO: 1798024 - RNA, 19 nt, Homo sapiens
  misc_RNA (1)...(19): siRNA sense strand
gaaauacgcaggaaggaaa

SEQ ID NO: 1798025 - RNA, 19 nt, Homo sapiens
  misc_RNA (1)...(19): siRNA sense strand
gaaagagacuucaaaucag

SEQ ID NO: 1798026 - RNA, 19 nt, Homo sapiens
  misc_RNA (1)...(19): siRNA sense strand
gaacaaggagcacuucugu

SEQ ID NO: 1798027 - RNA, 19 nt, Homo sapiens
  misc_RNA (1)...(19): siRNA sense strand
agaaagagacuucaaauca

SEQ ID NO: 1798028 - RNA, 19 nt, Homo sapiens
  misc_RNA (1)...(19): siRNA sense strand
gcagaaagagacuucaaau

SEQ ID NO: 1798029 - RNA, 19 nt, Homo sapiens
  misc_RNA (1)...(19): siRNA sense strand
gggaacagccaguguguga

SEQ ID NO: 1798030 - RNA, 19 nt, Homo sapiens
  misc_RNA (1)...(19): siRNA sense strand
gggccaaccugccaacuca

SEQ ID NO: 1798031 - RNA, 19 nt, Homo sapiens
  misc_RNA (1)...(19): siRNA sense strand
gacgacagcuggccucaca

SEQ ID NO: 1798032 - RNA, 19 nt, Homo sapiens
  misc_RNA (1)...(19): siRNA sense strand
ggucaccguuccuaagcua

SEQ ID NO: 1798033 - RNA, 19 nt, Homo sapiens
  misc_RNA (1)...(19): siRNA sense strand
gagcucacagggagacaua

SEQ ID NO: 1798034 - RNA, 19 nt, Homo sapiens
  misc_RNA (1)...(19): siRNA sense strand
ggaaauacgcaggaaggaa

SEQ ID NO: 1798035 - RNA, 19 nt, Homo sapiens
  misc_RNA (1)...(19): siRNA sense strand
gcugcucacugcuucaaug

SEQ ID NO: 1798036 - RNA, 19 nt, Homo sapiens
  misc_RNA (1)...(19): siRNA sense strand
caagccagccuucgagaga

SEQ ID NO: 1798037 - RNA, 19 nt, Homo sapiens
  misc_RNA (1)...(19): siRNA sense strand
gaccagcccucugccuuuc

SEQ ID NO: 1798038 - RNA, 19 nt, Homo sapiens
  misc_RNA (1)...(19): siRNA sense strand
cgaaguggguggccuacgu

SEQ ID NO: 1798039 - RNA, 19 nt, Homo sapiens
  misc_RNA (1)...(19): siRNA sense strand
ccacuucccaggugucuau

SEQ ID NO: 1798040 - RNA, 19 nt, Homo sapiens
  misc_RNA (1)...(19): siRNA sense strand
ucaguaccgugccucuuga

SEQ ID NO: 1798041 - RNA, 19 nt, Homo sapiens
  misc_RNA (1)...(19): siRNA sense strand
guacggccauucacucacu

SEQ ID NO: 1798042 - RNA, 19 nt, Homo sapiens
  misc_RNA (1)...(19): siRNA sense strand
ggacacggccgacuuugac

SEQ ID NO: 1798043 - RNA, 19 nt, Homo sapiens
  misc_RNA (1)...(19): siRNA sense strand
agccagaggugcugcagaa

SEQ ID NO: 1798044 - RNA, 19 nt, Homo sapiens
  misc_RNA (1)...(19): siRNA sense strand
gagagaacaaggagcacuu

SEQ ID NO: 1798045 - RNA, 19 nt, Homo sapiens
  misc_RNA (1)...(19): siRNA sense strand
uuccuaagcuacaagaaug

SEQ ID NO: 1798046 - RNA, 19 nt, Homo sapiens
  misc_RNA (1)...(19): siRNA sense strand
ggcagaaagagacuucaaa

SEQ ID NO: 1798047 - RNA, 19 nt, Homo sapiens
  misc_RNA (1)...(19): siRNA sense strand
acaagcacccguucuacaa

SEQ ID NO: 1798048 - RNA, 19 nt, Homo sapiens
  misc_RNA (1)...(19): siRNA sense strand
ggccggaagugcaugaucu

SEQ ID NO: 1798049 - RNA, 19 nt, Homo sapiens
  misc_RNA (1)...(19): siRNA sense strand
ugaccagcccucugccuuu

SEQ ID NO: 1798050 - RNA, 19 nt, Homo sapiens
  misc_RNA (1)...(19): siRNA sense strand
ucuacacgcucgacuacga

SEQ ID NO: 1798051 - RNA, 19 nt, Homo sapiens
  misc_RNA (1)...(19): siRNA sense strand
cagaaagagacuucaaauc

SEQ ID NO: 1798052 - RNA, 19 nt, Homo sapiens
  misc_RNA (1)...(19): siRNA sense strand
gggcaucauagaccagaaa

SEQ ID NO: 1798053 - RNA, 19 nt, Homo sapiens
  misc_RNA (1)...(19): siRNA sense strand
cagaggugcugcagaaagc

SEQ ID NO: 1798054 - RNA, 19 nt, Homo sapiens
  misc_RNA (1)...(19): siRNA sense strand
gcaagaagugccugaucuc

SEQ ID NO: 1798055 - RNA, 19 nt, Homo sapiens
  misc_RNA (1)...(19): siRNA sense strand
caagaagugccugaucuca

SEQ ID NO: 1798056 - RNA, 19 nt, Homo sapiens
  misc_RNA (1)...(19): siRNA sense strand
uggaggcacugcugcacuu

SEQ ID NO: 1798057 - RNA, 19 nt, Homo sapiens
  misc_RNA (1)...(19): siRNA sense strand
gcugugagaggcuggauag

SEQ ID NO: 1798058 - RNA, 19 nt, Homo sapiens
  misc_RNA (1)...(19): siRNA sense strand
gccagugugugaccaaggu

SEQ ID NO: 1798059 - RNA, 19 nt, Homo sapiens
  misc_RNA (1)...(19): siRNA sense strand
gcacugcuucgacgucuac

SEQ ID NO: 1798060 - RNA, 19 nt, Homo sapiens
  misc_RNA (1)...(19): siRNA sense strand
ccugccaacucaaccuuau

SEQ ID NO: 1798061 - RNA, 19 nt, Homo sapiens
  misc_RNA (1)...(19): siRNA sense strand
agcccgagcuccugcagaa

SEQ ID NO: 1798062 - RNA, 19 nt, Homo sapiens
  misc_RNA (1)...(19): siRNA sense strand
gcacuucugcggagcaacu

SEQ ID NO: 1798063 - RNA, 19 nt, Homo sapiens
  misc_RNA (1)...(19): siRNA sense strand
ucuacaagcacccguucua

SEQ ID NO: 1798064 - RNA, 19 nt, Homo sapiens
  misc_RNA (1)...(19): siRNA sense strand
caagcacccguucuacaau

SEQ ID NO: 1798065 - RNA, 19 nt, Homo sapiens
  misc_RNA (1)...(19): siRNA sense strand
uccaagacccgacgaagug

SEQ ID NO: 1798066 - RNA, 19 nt, Homo sapiens
  misc_RNA (1)...(19): siRNA sense strand
ggacggugggugcuaacug

SEQ ID NO: 1798067 - RNA, 19 nt, Homo sapiens
  misc_RNA (1)...(19): siRNA sense strand
guuccuaagcuacaagaau

SEQ ID NO: 1798068 - RNA, 19 nt, Homo sapiens
  misc_RNA (1)...(19): siRNA sense strand
gggagaccucggacuauca

SEQ ID NO: 1798069 - RNA, 19 nt, Homo sapiens
  misc_RNA (1)...(19): siRNA sense strand
aagcacccguucuacaauc

SEQ ID NO: 1798070 - RNA, 19 nt, Homo sapiens
  misc_RNA (1)...(19): siRNA sense strand
cccuggccuucaacaaaua

SEQ ID NO: 1798071 - RNA, 19 nt, Homo sapiens
  misc_RNA (1)...(19): siRNA sense strand
ccucacagaccgcaugauc

SEQ ID NO: 1798072 - RNA, 19 nt, Homo sapiens
  misc_RNA (1)...(19): siRNA sense strand
cgggagaccucggacuauc

SEQ ID NO: 1798073 - RNA, 19 nt, Homo sapiens
  misc_RNA (1)...(19): siRNA sense strand
gcugcgcucagguuaagaa

SEQ ID NO: 1798074 - RNA, 19 nt, Homo sapiens
  misc_RNA (1)...(19): siRNA sense strand
cagcuuguacggccauuca

SEQ ID NO: 1798075 - RNA, 19 nt, Homo sapiens
  misc_RNA (1)...(19): siRNA sense strand
agcaagaagugccugaucu

SEQ ID NO: 1798076 - RNA, 19 nt, Homo sapiens
  misc_RNA (1)...(19): siRNA sense strand
ccagaggugcugcagaaag

SEQ ID NO: 1798077 - RNA, 19 nt, Homo sapiens
  misc_RNA (1)...(19): siRNA sense strand
uggcugcgcucagguuaag

SEQ ID NO: 1798078 - RNA, 19 nt, Homo sapiens
  misc_RNA (1)...(19): siRNA sense strand
ucuggacggugggugcuaa

SEQ ID NO: 1798079 - RNA, 19 nt, Homo sapiens
  misc_RNA (1)...(19): siRNA sense strand
ggaggcacugcugcacuuu

SEQ ID NO: 1798080 - RNA, 19 nt, Homo sapiens
  misc_RNA (1)...(19): siRNA sense strand
ggaauuccacuguaucuaa

SEQ ID NO: 1798081 - RNA, 19 nt, Homo sapiens
  misc_RNA (1)...(19): siRNA sense strand
gaauuccacuguaucuaaa

SEQ ID NO: 1798082 - RNA, 19 nt, Homo sapiens
  misc_RNA (1)...(19): siRNA sense strand
ccaggaggaugauggaauu

SEQ ID NO: 1798083 - RNA, 19 nt, Homo sapiens
  misc_RNA (1)...(19): siRNA sense strand
ggaaucugcuggcucuuca

SEQ ID NO: 1798084 - RNA, 19 nt, Homo sapiens
  misc_RNA (1)...(19): siRNA sense strand
uggcuucauuucccaauaa

SEQ ID NO: 1798085 - RNA, 19 nt, Homo sapiens
  misc_RNA (1)...(19): siRNA sense strand
ucauucagcucucuaugga

SEQ ID NO: 1798086 - RNA, 19 nt, Homo sapiens
  misc_RNA (1)...(19): siRNA sense strand
gcaaucacuugguucacau

SEQ ID NO: 1798087 - RNA, 19 nt, Homo sapiens
  misc_RNA (1)...(19): siRNA sense strand
auaaaggagugacuucaau

SEQ ID NO: 1798088 - RNA, 19 nt, Homo sapiens
  misc_RNA (1)...(19): siRNA sense strand
caccaugauucuuacaguu

SEQ ID NO: 1798089 - RNA, 19 nt, Homo sapiens
  misc_RNA (1)...(19): siRNA sense strand
gggcagaggaccauaagca

SEQ ID NO: 1798090 - RNA, 19 nt, Homo sapiens
  misc_RNA (1)...(19): siRNA sense strand
ucacuugguucacauucau

SEQ ID NO: 1798091 - RNA, 19 nt, Homo sapiens
  misc_RNA (1)...(19): siRNA sense strand
ccaccaugauucuuacagu

SEQ ID NO: 1798092 - RNA, 19 nt, Homo sapiens
  misc_RNA (1)...(19): siRNA sense strand
agagccaccaugauucuua

SEQ ID NO: 1798093 - RNA, 19 nt, Homo sapiens
  misc_RNA (1)...(19): siRNA sense strand
ucaaucaucccagcaauca

SEQ ID NO: 1798094 - RNA, 19 nt, Homo sapiens
  misc_RNA (1)...(19): siRNA sense strand
gagccaccaugauucuuac

SEQ ID NO: 1798095 - RNA, 19 nt, Homo sapiens
  misc_RNA (1)...(19): siRNA sense strand
cugaugcccuccuucauag

SEQ ID NO: 1798096 - RNA, 19 nt, Homo sapiens
  misc_RNA (1)...(19): siRNA sense strand
aggagugacuucaaucauc

SEQ ID NO: 1798097 - RNA, 19 nt, Homo sapiens
  misc_RNA (1)...(19): siRNA sense strand
ccaauaaaggagugacuuc

SEQ ID NO: 1798098 - RNA, 19 nt, Homo sapiens
  misc_RNA (1)...(19): siRNA sense strand
guggcuucauuucccaaua

SEQ ID NO: 1798099 - RNA, 19 nt, Homo sapiens
  misc_RNA (1)...(19): siRNA sense strand
cauagagccaccaugauuc

SEQ ID NO: 1798100 - RNA, 19 nt, Homo sapiens
  misc_RNA (1)...(19): siRNA sense strand
ucccagcaaucacuugguu

SEQ ID NO: 1798101 - RNA, 19 nt, Homo sapiens
  misc_RNA (1)...(19): siRNA sense strand
uaaaggagugacuucaauc

SEQ ID NO: 1798102 - RNA, 19 nt, Homo sapiens
  misc_RNA (1)...(19): siRNA sense strand
caauaaaggagugacuuca

SEQ ID NO: 1798103 - RNA, 19 nt, Homo sapiens
  misc_RNA (1)...(19): siRNA sense strand
ggcuucauuucccaauaaa

SEQ ID NO: 1798104 - RNA, 19 nt, Homo sapiens
  misc_RNA (1)...(19): siRNA sense strand
aaaggagugacuucaauca

SEQ ID NO: 1798105 - RNA, 19 nt, Homo sapiens
  misc_RNA (1)...(19): siRNA sense strand
aauaaaggagugacuucaa

SEQ ID NO: 1798106 - RNA, 19 nt, Homo sapiens
  misc_RNA (1)...(19): siRNA sense strand
uaaaguuccagagaaacaa

SEQ ID NO: 1798107 - RNA, 19 nt, Homo sapiens
  misc_RNA (1)...(19): siRNA sense strand
ccagcaaucacuugguuca

SEQ ID NO: 1798108 - RNA, 19 nt, Homo sapiens
  misc_RNA (1)...(19): siRNA sense strand
aaaguuccagagaaacaaa

SEQ ID NO: 1798109 - RNA, 19 nt, Homo sapiens
  misc_RNA (1)...(19): siRNA sense strand
gcuggcucuucaucagauu

SEQ ID NO: 1798110 - RNA, 19 nt, Homo sapiens
  misc_RNA (1)...(19): siRNA sense strand
ccacuugucugugaauuca

SEQ ID NO: 1798111 - RNA, 19 nt, Homo sapiens
  misc_RNA (1)...(19): siRNA sense strand
gaagacccgcauuguguuu

SEQ ID NO: 1798112 - RNA, 19 nt, Homo sapiens
  misc_RNA (1)...(19): siRNA sense strand
cagacgagcugcaggagau

SEQ ID NO: 1798113 - RNA, 19 nt, Homo sapiens
  misc_RNA (1)...(19): siRNA sense strand
gggacauccugaaugcuaa

SEQ ID NO: 1798114 - RNA, 19 nt, Homo sapiens
  misc_RNA (1)...(19): siRNA sense strand
ggacaagaauaucaaaauc

SEQ ID NO: 1798115 - RNA, 19 nt, Homo sapiens
  misc_RNA (1)...(19): siRNA sense strand
ggacuagucucaaaacaag

SEQ ID NO: 1798116 - RNA, 19 nt, Homo sapiens
  misc_RNA (1)...(19): siRNA sense strand
gcggcuccauccucaauga

SEQ ID NO: 1798117 - RNA, 19 nt, Homo sapiens
  misc_RNA (1)...(19): siRNA sense strand
caaaaucuaugacauguac

SEQ ID NO: 1798118 - RNA, 19 nt, Homo sapiens
  misc_RNA (1)...(19): siRNA sense strand
cagcauugguccacagaca

SEQ ID NO: 1798119 - RNA, 19 nt, Homo sapiens
  misc_RNA (1)...(19): siRNA sense strand
gcagcugguugcagauugg

SEQ ID NO: 1798120 - RNA, 19 nt, Homo sapiens
  misc_RNA (1)...(19): siRNA sense strand
ucuguacccuggaguguau

SEQ ID NO: 1798121 - RNA, 19 nt, Homo sapiens
  misc_RNA (1)...(19): siRNA sense strand
gcugcgcacugcuuucaca

SEQ ID NO: 1798122 - RNA, 19 nt, Homo sapiens
  misc_RNA (1)...(19): siRNA sense strand
guaugccaguguuuccuau

SEQ ID NO: 1798123 - RNA, 19 nt, Homo sapiens
  misc_RNA (1)...(19): siRNA sense strand
gcugaagacccgcauugug

SEQ ID NO: 1798124 - RNA, 19 nt, Homo sapiens
  misc_RNA (1)...(19): siRNA sense strand
cugaagacccgcauugugu

SEQ ID NO: 1798125 - RNA, 19 nt, Homo sapiens
  misc_RNA (1)...(19): siRNA sense strand
gauggggacuagucucaaa

SEQ ID NO: 1798126 - RNA, 19 nt, Homo sapiens
  misc_RNA (1)...(19): siRNA sense strand
cagcugaagacccgcauug

SEQ ID NO: 1798127 - RNA, 19 nt, Homo sapiens
  misc_RNA (1)...(19): siRNA sense strand
augccaguguuuccuauuu

SEQ ID NO: 1798128 - RNA, 19 nt, Homo sapiens
  misc_RNA (1)...(19): siRNA sense strand
gguugcagauuggaauugu

SEQ ID NO: 1798129 - RNA, 19 nt, Homo sapiens
  misc_RNA (1)...(19): siRNA sense strand
gaaccuuaccagugccaau

SEQ ID NO: 1798130 - RNA, 19 nt, Homo sapiens
  misc_RNA (1)...(19): siRNA sense strand
ccuugcaacuccagaagug

SEQ ID NO: 1798131 - RNA, 19 nt, Homo sapiens
  misc_RNA (1)...(19): siRNA sense strand
ggaguguaugccaguguuu

SEQ ID NO: 1798132 - RNA, 19 nt, Homo sapiens
  misc_RNA (1)...(19): siRNA sense strand
ugaagacccgcauuguguu

SEQ ID NO: 1798133 - RNA, 19 nt, Homo sapiens
  misc_RNA (1)...(19): siRNA sense strand
ccagagaaccagggaaucu

SEQ ID NO: 1798134 - RNA, 19 nt, Homo sapiens
  misc_RNA (1)...(19): siRNA sense strand
uggaguguaugccaguguu

SEQ ID NO: 1798135 - RNA, 19 nt, Homo sapiens
  misc_RNA (1)...(19): siRNA sense strand
gccaguguuuccuauuucu

SEQ ID NO: 1798136 - RNA, 19 nt, Homo sapiens
  misc_RNA (1)...(19): siRNA sense strand
ccacagacagccagagaac

SEQ ID NO: 1798137 - RNA, 19 nt, Homo sapiens
  misc_RNA (1)...(19): siRNA sense strand
uuucacagggacaagaaua

SEQ ID NO: 1798138 - RNA, 19 nt, Homo sapiens
  misc_RNA (1)...(19): siRNA sense strand
augcuaagaccguguguga

SEQ ID NO: 1798139 - RNA, 19 nt, Homo sapiens
  misc_RNA (1)...(19): siRNA sense strand
gggcccacuugucugugaa

SEQ ID NO: 1798140 - RNA, 19 nt, Homo sapiens
  misc_RNA (1)...(19): siRNA sense strand
gcccacuugucugugaauu

SEQ ID NO: 1798141 - RNA, 19 nt, Homo sapiens
  misc_RNA (1)...(19): siRNA sense strand
ggaaagcggagcuaagugu

SEQ ID NO: 1798142 - RNA, 19 nt, Homo sapiens
  misc_RNA (1)...(19): siRNA sense strand
acacugcgcugcacuaugc

SEQ ID NO: 1798143 - RNA, 19 nt, Homo sapiens
  misc_RNA (1)...(19): siRNA sense strand
ggcaugaccagucugcaua

SEQ ID NO: 1798144 - RNA, 19 nt, Homo sapiens
  misc_RNA (1)...(19): siRNA sense strand
ugaagcauuuaauccagaa

SEQ ID NO: 1798145 - RNA, 19 nt, Homo sapiens
  misc_RNA (1)...(19): siRNA sense strand
gcaugaccagucugcauaa

SEQ ID NO: 1798146 - RNA, 19 nt, Homo sapiens
  misc_RNA (1)...(19): siRNA sense strand
ucacgcggcuccugcuauc

SEQ ID NO: 1798147 - RNA, 19 nt, Homo sapiens
  misc_RNA (1)...(19): siRNA sense strand
aggcacggcuagcauguga

SEQ ID NO: 1798148 - RNA, 19 nt, Homo sapiens
  misc_RNA (1)...(19): siRNA sense strand
gcacuaugccagccgcaau

SEQ ID NO: 1798149 - RNA, 19 nt, Homo sapiens
  misc_RNA (1)...(19): siRNA sense strand
uggaggagauggacuucga

SEQ ID NO: 1798150 - RNA, 19 nt, Homo sapiens
  misc_RNA (1)...(19): siRNA sense strand
gagugaagcauuuaaucca

SEQ ID NO: 1798151 - RNA, 19 nt, Homo sapiens
  misc_RNA (1)...(19): siRNA sense strand
gaaggccgaggacccaagu

SEQ ID NO: 1798152 - RNA, 19 nt, Homo sapiens
  misc_RNA (1)...(19): siRNA sense strand
gggccgagugaagcauuua

SEQ ID NO: 1798153 - RNA, 19 nt, Homo sapiens
  misc_RNA (1)...(19): siRNA sense strand
cgaaaggcacggcuagcau

SEQ ID NO: 1798154 - RNA, 19 nt, Homo sapiens
  misc_RNA (1)...(19): siRNA sense strand
aagcggagcuaagugugau

SEQ ID NO: 1798155 - RNA, 19 nt, Homo sapiens
  misc_RNA (1)...(19): siRNA sense strand
aaagcggagcuaaguguga

SEQ ID NO: 1798156 - RNA, 19 nt, Homo sapiens
  misc_RNA (1)...(19): siRNA sense strand
gcuacacugcgcugcacua

SEQ ID NO: 1798157 - RNA, 19 nt, Homo sapiens
  misc_RNA (1)...(19): siRNA sense strand
ugagaaaccuuaccacugu

SEQ ID NO: 1798158 - RNA, 19 nt, Homo sapiens
  misc_RNA (1)...(19): siRNA sense strand
ggacggcuguggauggaaa

SEQ ID NO: 1798159 - RNA, 19 nt, Homo sapiens
  misc_RNA (1)...(19): siRNA sense strand
ggagagagaccgaggaguu

SEQ ID NO: 1798160 - RNA, 19 nt, Homo sapiens
  misc_RNA (1)...(19): siRNA sense strand
acaaagaguucccaucuca

SEQ ID NO: 1798161 - RNA, 19 nt, Homo sapiens
  misc_RNA (1)...(19): siRNA sense strand
gaccuggacuuuauucucu

SEQ ID NO: 1798162 - RNA, 19 nt, Homo sapiens
  misc_RNA (1)...(19): siRNA sense strand
cagaggagcccaagccaaa

SEQ ID NO: 1798163 - RNA, 19 nt, Homo sapiens
  misc_RNA (1)...(19): siRNA sense strand
gagaagacacugcgucaag

SEQ ID NO: 1798164 - RNA, 19 nt, Homo sapiens
  misc_RNA (1)...(19): siRNA sense strand
ggacuuuauucucuccaau

SEQ ID NO: 1798165 - RNA, 19 nt, Homo sapiens
  misc_RNA (1)...(19): siRNA sense strand
ggcaaaaccuacacaaaga

SEQ ID NO: 1798166 - RNA, 19 nt, Homo sapiens
  misc_RNA (1)...(19): siRNA sense strand
caccucgccuuacacauga

SEQ ID NO: 1798167 - RNA, 19 nt, Homo sapiens
  misc_RNA (1)...(19): siRNA sense strand
ccaccucgccuuacacaug

SEQ ID NO: 1798168 - RNA, 19 nt, Homo sapiens
  misc_RNA (1)...(19): siRNA sense strand
ggucaucagcgucagcaaa

SEQ ID NO: 1798169 - RNA, 19 nt, Homo sapiens
  misc_RNA (1)...(19): siRNA sense strand
gaccaggcacuaccguaaa

SEQ ID NO: 1798170 - RNA, 19 nt, Homo sapiens
  misc_RNA (1)...(19): siRNA sense strand
ugaccaggcacuaccguaa

SEQ ID NO: 1798171 - RNA, 19 nt, Homo sapiens
  misc_RNA (1)...(19): siRNA sense strand
gaggagcccaagccaaaga

SEQ ID NO: 1798172 - RNA, 19 nt, Homo sapiens
  misc_RNA (1)...(19): siRNA sense strand
acacaaagaguucccaucu

SEQ ID NO: 1798173 - RNA, 19 nt, Homo sapiens
  misc_RNA (1)...(19): siRNA sense strand
gagagagaccgaggaguuc

SEQ ID NO: 1798174 - RNA, 19 nt, Homo sapiens
  misc_RNA (1)...(19): siRNA sense strand
ccgaggaguucaacgaucu

SEQ ID NO: 1798175 - RNA, 19 nt, Homo sapiens
  misc_RNA (1)...(19): siRNA sense strand
gaagacacugcgucaagca

SEQ ID NO: 1798176 - RNA, 19 nt, Homo sapiens
  misc_RNA (1)...(19): siRNA sense strand
ggaccuggacuuuauucuc

SEQ ID NO: 1798177 - RNA, 19 nt, Homo sapiens
  misc_RNA (1)...(19): siRNA sense strand
acgcgcugcucccaucuuu

SEQ ID NO: 1798178 - RNA, 19 nt, Homo sapiens
  misc_RNA (1)...(19): siRNA sense strand
gacuuuauucucuccaauu

SEQ ID NO: 1798179 - RNA, 19 nt, Homo sapiens
  misc_RNA (1)...(19): siRNA sense strand
cauccuuccugcccgauca

SEQ ID NO: 1798180 - RNA, 19 nt, Homo sapiens
  misc_RNA (1)...(19): siRNA sense strand
aaaccuacacaaagaguuc

SEQ ID NO: 1798181 - RNA, 19 nt, Homo sapiens
  misc_RNA (1)...(19): siRNA sense strand
uccuggaccuggacuuuau

SEQ ID NO: 1798182 - RNA, 19 nt, Homo sapiens
  misc_RNA (1)...(19): siRNA sense strand
caaagaguucccaucucaa

SEQ ID NO: 1798183 - RNA, 19 nt, Homo sapiens
  misc_RNA (1)...(19): siRNA sense strand
gcgcugcucccaucuuucu

SEQ ID NO: 1798184 - RNA, 19 nt, Homo sapiens
  misc_RNA (1)...(19): siRNA sense strand
caaccuggcggacaucaac

SEQ ID NO: 1798185 - RNA, 19 nt, Homo sapiens
  misc_RNA (1)...(19): siRNA sense strand
ggagaagacacugcgucaa

SEQ ID NO: 1798186 - RNA, 19 nt, Homo sapiens
  misc_RNA (1)...(19): siRNA sense strand
gaacccacacaggugagaa

SEQ ID NO: 1798187 - RNA, 19 nt, Homo sapiens
  misc_RNA (1)...(19): siRNA sense strand
aaagaguucccaucucaag

SEQ ID NO: 1798188 - RNA, 19 nt, Homo sapiens
  misc_RNA (1)...(19): siRNA sense strand
cagaauuggacccggugua

SEQ ID NO: 1798189 - RNA, 19 nt, Homo sapiens
  misc_RNA (1)...(19): siRNA sense strand
gagagaccgaggaguucaa

SEQ ID NO: 1798190 - RNA, 19 nt, Homo sapiens
  misc_RNA (1)...(19): siRNA sense strand
cacaaagaguucccaucuc

SEQ ID NO: 1798191 - RNA, 19 nt, Homo sapiens
  misc_RNA (1)...(19): siRNA sense strand
acuuuauucucuccaauuc

SEQ ID NO: 1798192 - RNA, 19 nt, Homo sapiens
  misc_RNA (1)...(19): siRNA sense strand
cggaccaccucgccuuaca

SEQ ID NO: 1798193 - RNA, 19 nt, Homo sapiens
  misc_RNA (1)...(19): siRNA sense strand
gaauuggacccgguguaca

SEQ ID NO: 1798194 - RNA, 19 nt, Homo sapiens
  misc_RNA (1)...(19): siRNA sense strand
gcuccugcggccagaauug

SEQ ID NO: 1798195 - RNA, 19 nt, Homo sapiens
  misc_RNA (1)...(19): siRNA sense strand
gaccgaggaguucaacgau

SEQ ID NO: 1798196 - RNA, 19 nt, Homo sapiens
  misc_RNA (1)...(19): siRNA sense strand
ucccaucuuucuccacguu

SEQ ID NO: 1798197 - RNA, 19 nt, Homo sapiens
  misc_RNA (1)...(19): siRNA sense strand
gcacgugccccaagaucaa

SEQ ID NO: 1798198 - RNA, 19 nt, Homo sapiens
  misc_RNA (1)...(19): siRNA sense strand
gggugaagcuucugauugg

SEQ ID NO: 1798199 - RNA, 19 nt, Homo sapiens
  misc_RNA (1)...(19): siRNA sense strand
ccacggcacccaagaacaa

SEQ ID NO: 1798200 - RNA, 19 nt, Homo sapiens
  misc_RNA (1)...(19): siRNA sense strand
gagacaccaucuaccaagu

SEQ ID NO: 1798201 - RNA, 19 nt, Homo sapiens
  misc_RNA (1)...(19): siRNA sense strand
ccaagaacaagagguauau

SEQ ID NO: 1798202 - RNA, 19 nt, Homo sapiens
  misc_RNA (1)...(19): siRNA sense strand
ucagggaauuuaccaaguc

SEQ ID NO: 1798203 - RNA, 19 nt, Homo sapiens
  misc_RNA (1)...(19): siRNA sense strand
gcaaccgggugaagcuucu

SEQ ID NO: 1798204 - RNA, 19 nt, Homo sapiens
  misc_RNA (1)...(19): siRNA sense strand
cagccugccucuggacuga

SEQ ID NO: 1798205 - RNA, 19 nt, Homo sapiens
  misc_RNA (1)...(19): siRNA sense strand
cccaagaacaagagguaua

SEQ ID NO: 1798206 - RNA, 19 nt, Homo sapiens
  misc_RNA (1)...(19): siRNA sense strand
ccgaggaacuggccuuucg

SEQ ID NO: 1798207 - RNA, 19 nt, Homo sapiens
  misc_RNA (1)...(19): siRNA sense strand
caccaucagugcagagaag

SEQ ID NO: 1798208 - RNA, 19 nt, Homo sapiens
  misc_RNA (1)...(19): siRNA sense strand
gcagaccuuuggccaacag

SEQ ID NO: 1798209 - RNA, 19 nt, Homo sapiens
  misc_RNA (1)...(19): siRNA sense strand
cacccaagaacaagaggua

SEQ ID NO: 1798210 - RNA, 19 nt, Homo sapiens
  misc_RNA (1)...(19): siRNA sense strand
aagaacaagagguauauca

SEQ ID NO: 1798211 - RNA, 19 nt, Homo sapiens
  misc_RNA (1)...(19): siRNA sense strand
cgggugaagcuucugauug

SEQ ID NO: 1798212 - RNA, 19 nt, Homo sapiens
  misc_RNA (1)...(19): siRNA sense strand
gugccaccuuccuaccaaa

SEQ ID NO: 1798213 - RNA, 19 nt, Homo sapiens
  misc_RNA (1)...(19): siRNA sense strand
cccagagugugccgaggaa

SEQ ID NO: 1798214 - RNA, 19 nt, Homo sapiens
  misc_RNA (1)...(19): siRNA sense strand
ucagugcagagaagcauug

SEQ ID NO: 1798215 - RNA, 19 nt, Homo sapiens
  misc_RNA (1)...(19): siRNA sense strand
gggugaagcuucugauugg

SEQ ID NO: 1798216 - RNA, 19 nt, Homo sapiens
  misc_RNA (1)...(19): siRNA sense strand
gcaaccgggugaagcuucu

SEQ ID NO: 1798217 - RNA, 19 nt, Homo sapiens
  misc_RNA (1)...(19): siRNA sense strand
cagccugccucuggacuga

SEQ ID NO: 1798218 - RNA, 19 nt, Homo sapiens
  misc_RNA (1)...(19): siRNA sense strand
ccgaggaacuggccuuucg

SEQ ID NO: 1798219 - RNA, 19 nt, Homo sapiens
  misc_RNA (1)...(19): siRNA sense strand
gcagaccuuuggccaacag

SEQ ID NO: 1798220 - RNA, 19 nt, Homo sapiens
  misc_RNA (1)...(19): siRNA sense strand
cgggugaagcuucugauug

SEQ ID NO: 1798221 - RNA, 19 nt, Homo sapiens
  misc_RNA (1)...(19): siRNA sense strand
cccagagugugccgaggaa

SEQ ID NO: 1798222 - RNA, 19 nt, Homo sapiens
  misc_RNA (1)...(19): siRNA sense strand
gggugaagcuucugauugg

SEQ ID NO: 1798223 - RNA, 19 nt, Homo sapiens
  misc_RNA (1)...(19): siRNA sense strand
ccacggcacccaagaacaa

SEQ ID NO: 1798224 - RNA, 19 nt, Homo sapiens
  misc_RNA (1)...(19): siRNA sense strand
gagacaccaucuaccaagu

SEQ ID NO: 1798225 - RNA, 19 nt, Homo sapiens
  misc_RNA (1)...(19): siRNA sense strand
ccaagaacaagagguauau

SEQ ID NO: 1798226 - RNA, 19 nt, Homo sapiens
  misc_RNA (1)...(19): siRNA sense strand
ucagggaauuuaccaaguc

SEQ ID NO: 1798227 - RNA, 19 nt, Homo sapiens
  misc_RNA (1)...(19): siRNA sense strand
gcaaccgggugaagcuucu

SEQ ID NO: 1798228 - RNA, 19 nt, Homo sapiens
  misc_RNA (1)...(19): siRNA sense strand
cagccugccucuggacuga

SEQ ID NO: 1798229 - RNA, 19 nt, Homo sapiens
  misc_RNA (1)...(19): siRNA sense strand
cccaagaacaagagguaua

SEQ ID NO: 1798230 - RNA, 19 nt, Homo sapiens
  misc_RNA (1)...(19): siRNA sense strand
ccgaggaacuggccuuucg

SEQ ID NO: 1798231 - RNA, 19 nt, Homo sapiens
  misc_RNA (1)...(19): siRNA sense strand
caccaucagugcagagaag

SEQ ID NO: 1798232 - RNA, 19 nt, Homo sapiens
  misc_RNA (1)...(19): siRNA sense strand
gcagaccuuuggccaacag

SEQ ID NO: 1798233 - RNA, 19 nt, Homo sapiens
  misc_RNA (1)...(19): siRNA sense strand
cacccaagaacaagaggua

SEQ ID NO: 1798234 - RNA, 19 nt, Homo sapiens
  misc_RNA (1)...(19): siRNA sense strand
aagaacaagagguauauca

SEQ ID NO: 1798235 - RNA, 19 nt, Homo sapiens
  misc_RNA (1)...(19): siRNA sense strand
cgggugaagcuucugauug

SEQ ID NO: 1798236 - RNA, 19 nt, Homo sapiens
  misc_RNA (1)...(19): siRNA sense strand
gugccaccuuccuaccaaa

SEQ ID NO: 1798237 - RNA, 19 nt, Homo sapiens
  misc_RNA (1)...(19): siRNA sense strand
cccagagugugccgaggaa

SEQ ID NO: 1798238 - RNA, 19 nt, Homo sapiens
  misc_RNA (1)...(19): siRNA sense strand
ucagugcagagaagcauug

SEQ ID NO: 1798239 - RNA, 19 nt, Homo sapiens
  misc_RNA (1)...(19): siRNA sense strand
gggugaagcuucugauugg

SEQ ID NO: 1798240 - RNA, 19 nt, Homo sapiens
  misc_RNA (1)...(19): siRNA sense strand
gcaaccgggugaagcuucu

SEQ ID NO: 1798241 - RNA, 19 nt, Homo sapiens
  misc_RNA (1)...(19): siRNA sense strand
cagccugccucuggacuga

SEQ ID NO: 1798242 - RNA, 19 nt, Homo sapiens
  misc_RNA (1)...(19): siRNA sense strand
ccgaggaacuggccuuucg

SEQ ID NO: 1798243 - RNA, 19 nt, Homo sapiens
  misc_RNA (1)...(19): siRNA sense strand
gcagaccuuuggccaacag

SEQ ID NO: 1798244 - RNA, 19 nt, Homo sapiens
  misc_RNA (1)...(19): siRNA sense strand
cgggugaagcuucugauug

SEQ ID NO: 1798245 - RNA, 19 nt, Homo sapiens
  misc_RNA (1)...(19): siRNA sense strand
cccagagugugccgaggaa

SEQ ID NO: 1798246 - RNA, 19 nt, Homo sapiens
  misc_RNA (1)...(19): siRNA sense strand
gaagaaagcuaccgugaau

SEQ ID NO: 1798247 - RNA, 19 nt, Homo sapiens
  misc_RNA (1)...(19): siRNA sense strand
gcugaauucuucucugaua

SEQ ID NO: 1798248 - RNA, 19 nt, Homo sapiens
  misc_RNA (1)...(19): siRNA sense strand
gggcugaacugcucuacaa

SEQ ID NO: 1798249 - RNA, 19 nt, Homo sapiens
  misc_RNA (1)...(19): siRNA sense strand
cagccuacaucucaauuaa

SEQ ID NO: 1798250 - RNA, 19 nt, Homo sapiens
  misc_RNA (1)...(19): siRNA sense strand
gaaagcuaccgugaauuua

SEQ ID NO: 1798251 - RNA, 19 nt, Homo sapiens
  misc_RNA (1)...(19): siRNA sense strand
agaaagcuaccgugaauuu

SEQ ID NO: 1798252 - RNA, 19 nt, Homo sapiens
  misc_RNA (1)...(19): siRNA sense strand
caucauccguccuuucuuc

SEQ ID NO: 1798253 - RNA, 19 nt, Homo sapiens
  misc_RNA (1)...(19): siRNA sense strand
uauagagagucccaacaaa

SEQ ID NO: 1798254 - RNA, 19 nt, Homo sapiens
  misc_RNA (1)...(19): siRNA sense strand
gagccucucuccucugcaa

SEQ ID NO: 1798255 - RNA, 19 nt, Homo sapiens
  misc_RNA (1)...(19): siRNA sense strand
gaauuuacugggugaagaa

SEQ ID NO: 1798256 - RNA, 19 nt, Homo sapiens
  misc_RNA (1)...(19): siRNA sense strand
gccuacaucucaauuaaag

SEQ ID NO: 1798257 - RNA, 19 nt, Homo sapiens
  misc_RNA (1)...(19): siRNA sense strand
uagagagucccaacaaaga

SEQ ID NO: 1798258 - RNA, 19 nt, Homo sapiens
  misc_RNA (1)...(19): siRNA sense strand
ugaauuuacugggugaaga

SEQ ID NO: 1798259 - RNA, 19 nt, Homo sapiens
  misc_RNA (1)...(19): siRNA sense strand
cgaagaaagcuaccgugaa

SEQ ID NO: 1798260 - RNA, 19 nt, Homo sapiens
  misc_RNA (1)...(19): siRNA sense strand
uuaaagacaaggccaaaga

SEQ ID NO: 1798261 - RNA, 19 nt, Homo sapiens
  misc_RNA (1)...(19): siRNA sense strand
uaugguguguucagcauug

SEQ ID NO: 1798262 - RNA, 19 nt, Homo sapiens
  misc_RNA (1)...(19): siRNA sense strand
gaauucuucucugauaucu

SEQ ID NO: 1798263 - RNA, 19 nt, Homo sapiens
  misc_RNA (1)...(19): siRNA sense strand
ucugcaaccugauaggauu

SEQ ID NO: 1798264 - RNA, 19 nt, Homo sapiens
  misc_RNA (1)...(19): siRNA sense strand
gaagcacgagucccagaug

SEQ ID NO: 1798265 - RNA, 19 nt, Homo sapiens
  misc_RNA (1)...(19): siRNA sense strand
caacaaagaagaugauacc

SEQ ID NO: 1798266 - RNA, 19 nt, Homo sapiens
  misc_RNA (1)...(19): siRNA sense strand
uugcugaauucuucucuga

SEQ ID NO: 1798267 - RNA, 19 nt, Homo sapiens
  misc_RNA (1)...(19): siRNA sense strand
auucuucucugauaucuuc

SEQ ID NO: 1798268 - RNA, 19 nt, Homo sapiens
  misc_RNA (1)...(19): siRNA sense strand
ucacuaaagaagcgaagaa

SEQ ID NO: 1798269 - RNA, 19 nt, Homo sapiens
  misc_RNA (1)...(19): siRNA sense strand
ucuacuacaugcugaagug

SEQ ID NO: 1798270 - RNA, 19 nt, Homo sapiens
  misc_RNA (1)...(19): siRNA sense strand
ucugauaucuuccugucau

SEQ ID NO: 1798271 - RNA, 19 nt, Homo sapiens
  misc_RNA (1)...(19): siRNA sense strand
cuacccagccuacaucuca

SEQ ID NO: 1798272 - RNA, 19 nt, Homo sapiens
  misc_RNA (1)...(19): siRNA sense strand
ccagccuacaucucaauua

SEQ ID NO: 1798273 - RNA, 19 nt, Homo sapiens
  misc_RNA (1)...(19): siRNA sense strand
cuauagagagucccaacaa

SEQ ID NO: 1798274 - RNA, 19 nt, Homo sapiens
  misc_RNA (1)...(19): siRNA sense strand
cuaaagaagcgaagaaagc

SEQ ID NO: 1798275 - RNA, 19 nt, Homo sapiens
  misc_RNA (1)...(19): siRNA sense strand
cugcaugacugaccuucug

SEQ ID NO: 1798276 - RNA, 19 nt, Homo sapiens
  misc_RNA (1)...(19): siRNA sense strand
agaagaacugcaugacuga

SEQ ID NO: 1798277 - RNA, 19 nt, Homo sapiens
  misc_RNA (1)...(19): siRNA sense strand
aaagacaaggccaaagaga

SEQ ID NO: 1798278 - RNA, 19 nt, Homo sapiens
  misc_RNA (1)...(19): siRNA sense strand
cugaauucuucucugauau

SEQ ID NO: 1798279 - RNA, 19 nt, Homo sapiens
  misc_RNA (1)...(19): siRNA sense strand
gaacugcaugacugaccuu

SEQ ID NO: 1798280 - RNA, 19 nt, Homo sapiens
  misc_RNA (1)...(19): siRNA sense strand
uguaccugguguucgguua

SEQ ID NO: 1798281 - RNA, 19 nt, Homo sapiens
  misc_RNA (1)...(19): siRNA sense strand
gauggacaguguggucaag

SEQ ID NO: 1798282 - RNA, 19 nt, Homo sapiens
  misc_RNA (1)...(19): siRNA sense strand
aaguguggcuuccuguugu

SEQ ID NO: 1798283 - RNA, 19 nt, Homo sapiens
  misc_RNA (1)...(19): siRNA sense strand
gagagucccaacaaagaag

SEQ ID NO: 1798284 - RNA, 19 nt, Homo sapiens
  misc_RNA (1)...(19): siRNA sense strand
agagagucccaacaaagaa

SEQ ID NO: 1798285 - RNA, 19 nt, Homo sapiens
  misc_RNA (1)...(19): siRNA sense strand
aaagaagcgaagaaagcua

SEQ ID NO: 1798286 - RNA, 19 nt, Homo sapiens
  misc_RNA (1)...(19): siRNA sense strand
uaaagaagcgaagaaagcu

SEQ ID NO: 1798287 - RNA, 19 nt, Homo sapiens
  misc_RNA (1)...(19): siRNA sense strand
agacaaggccaaagagacu

SEQ ID NO: 1798288 - RNA, 19 nt, Homo sapiens
  misc_RNA (1)...(19): siRNA sense strand
uaaagacaaggccaaagag

SEQ ID NO: 1798289 - RNA, 19 nt, Homo sapiens
  misc_RNA (1)...(19): siRNA sense strand
ugaauucuucucugauauc

SEQ ID NO: 1798290 - RNA, 19 nt, Homo sapiens
  misc_RNA (1)...(19): siRNA sense strand
aaagcuaccgugaauuuac

SEQ ID NO: 1798291 - RNA, 19 nt, Homo sapiens
  misc_RNA (1)...(19): siRNA sense strand
ucggacugguggccuugua

SEQ ID NO: 1798292 - RNA, 19 nt, Homo sapiens
  misc_RNA (1)...(19): siRNA sense strand
gcgcaucauccguccuuuc

SEQ ID NO: 1798293 - RNA, 19 nt, Homo sapiens
  misc_RNA (1)...(19): siRNA sense strand
ggccaaagagacugcagau

SEQ ID NO: 1798294 - RNA, 19 nt, Homo sapiens
  misc_RNA (1)...(19): siRNA sense strand
gaacagaucccaaaugauu

SEQ ID NO: 1798295 - RNA, 19 nt, Homo sapiens
  misc_RNA (1)...(19): siRNA sense strand
caaaugcccuuacauaauu

SEQ ID NO: 1798296 - RNA, 19 nt, Homo sapiens
  misc_RNA (1)...(19): siRNA sense strand
ccacaucucuuucuuauug

SEQ ID NO: 1798297 - RNA, 19 nt, Homo sapiens
  misc_RNA (1)...(19): siRNA sense strand
cagcauagauuccaacauu

SEQ ID NO: 1798298 - RNA, 19 nt, Homo sapiens
  misc_RNA (1)...(19): siRNA sense strand
gaaggaggcaggcauguua

SEQ ID NO: 1798299 - RNA, 19 nt, Homo sapiens
  misc_RNA (1)...(19): siRNA sense strand
uaagauaguugucagcuuu

SEQ ID NO: 1798300 - RNA, 19 nt, Homo sapiens
  misc_RNA (1)...(19): siRNA sense strand
gaacaaugcuguggacaug

SEQ ID NO: 1798301 - RNA, 19 nt, Homo sapiens
  misc_RNA (1)...(19): siRNA sense strand
gaaguacucugcccaggaa

SEQ ID NO: 1798302 - RNA, 19 nt, Homo sapiens
  misc_RNA (1)...(19): siRNA sense strand
gagaagagcagaaccauga

SEQ ID NO: 1798303 - RNA, 19 nt, Homo sapiens
  misc_RNA (1)...(19): siRNA sense strand
ccauugagcugcuaaagaa

SEQ ID NO: 1798304 - RNA, 19 nt, Homo sapiens
  misc_RNA (1)...(19): siRNA sense strand
gaagagaucaggaauggaa

SEQ ID NO: 1798305 - RNA, 19 nt, Homo sapiens
  misc_RNA (1)...(19): siRNA sense strand
ccacaaaugcccuuacaua

SEQ ID NO: 1798306 - RNA, 19 nt, Homo sapiens
  misc_RNA (1)...(19): siRNA sense strand
gagaaggacuccagcucua

SEQ ID NO: 1798307 - RNA, 19 nt, Homo sapiens
  misc_RNA (1)...(19): siRNA sense strand
gcaagaagaugcaaaagaa

SEQ ID NO: 1798308 - RNA, 19 nt, Homo sapiens
  misc_RNA (1)...(19): siRNA sense strand
ggaggaagcucauggaaac

SEQ ID NO: 1798309 - RNA, 19 nt, Homo sapiens
  misc_RNA (1)...(19): siRNA sense strand
gagcucaacugcaaaggaa

SEQ ID NO: 1798310 - RNA, 19 nt, Homo sapiens
  misc_RNA (1)...(19): siRNA sense strand
gacagccgcuuccggaaua

SEQ ID NO: 1798311 - RNA, 19 nt, Homo sapiens
  misc_RNA (1)...(19): siRNA sense strand
gaccacaucucuuucuuau

SEQ ID NO: 1798312 - RNA, 19 nt, Homo sapiens
  misc_RNA (1)...(19): siRNA sense strand
aagaacagaucccaaauga

SEQ ID NO: 1798313 - RNA, 19 nt, Homo sapiens
  misc_RNA (1)...(19): siRNA sense strand
gcaagaauguggaccucaa

SEQ ID NO: 1798314 - RNA, 19 nt, Homo sapiens
  misc_RNA (1)...(19): siRNA sense strand
gaaaugaguuaagagacaa

SEQ ID NO: 1798315 - RNA, 19 nt, Homo sapiens
  misc_RNA (1)...(19): siRNA sense strand
gcaaaucccucagcgugaa

SEQ ID NO: 1798316 - RNA, 19 nt, Homo sapiens
  misc_RNA (1)...(19): siRNA sense strand
ggagaaggauaaggagaaa

SEQ ID NO: 1798317 - RNA, 19 nt, Homo sapiens
  misc_RNA (1)...(19): siRNA sense strand
ggaacaagauucaacuuuu

SEQ ID NO: 1798318 - RNA, 19 nt, Homo sapiens
  misc_RNA (1)...(19): siRNA sense strand
gaaggugacccgcugauga

SEQ ID NO: 1798319 - RNA, 19 nt, Homo sapiens
  misc_RNA (1)...(19): siRNA sense strand
cagaaugcauggauaguga

SEQ ID NO: 1798320 - RNA, 19 nt, Homo sapiens
  misc_RNA (1)...(19): siRNA sense strand
gaacagagucuugguaaca

SEQ ID NO: 1798321 - RNA, 19 nt, Homo sapiens
  misc_RNA (1)...(19): siRNA sense strand
gaugacggauucuucuuug

SEQ ID NO: 1798322 - RNA, 19 nt, Homo sapiens
  misc_RNA (1)...(19): siRNA sense strand
cagcaacacuuccgaaaca

SEQ ID NO: 1798323 - RNA, 19 nt, Homo sapiens
  misc_RNA (1)...(19): siRNA sense strand
gagaugaagcugacggaua

SEQ ID NO: 1798324 - RNA, 19 nt, Homo sapiens
  misc_RNA (1)...(19): siRNA sense strand
ggaacacuuugccuaagaa

SEQ ID NO: 1798325 - RNA, 19 nt, Homo sapiens
  misc_RNA (1)...(19): siRNA sense strand
cgaaaugaguuaagagaca

SEQ ID NO: 1798326 - RNA, 19 nt, Homo sapiens
  misc_RNA (1)...(19): siRNA sense strand
gcagcaacauagagaguga

SEQ ID NO: 1798327 - RNA, 19 nt, Homo sapiens
  misc_RNA (1)...(19): siRNA sense strand
ccaaccggcugucugagua

SEQ ID NO: 1798328 - RNA, 19 nt, Homo sapiens
  misc_RNA (1)...(19): siRNA sense strand
gcugaaagcugagaaugau

SEQ ID NO: 1798329 - RNA, 19 nt, Homo sapiens
  misc_RNA (1)...(19): siRNA sense strand
agaugaagcugacggauau

SEQ ID NO: 1798330 - RNA, 19 nt, Homo sapiens
  misc_RNA (1)...(19): siRNA sense strand
ucagggaucuccagcaaga

SEQ ID NO: 1798331 - RNA, 19 nt, Homo sapiens
  misc_RNA (1)...(19): siRNA sense strand
caagaagaauccugucauc

SEQ ID NO: 1798332 - RNA, 19 nt, Homo sapiens
  misc_RNA (1)...(19): siRNA sense strand
gaagaacagaucccaaaug

SEQ ID NO: 1798333 - RNA, 19 nt, Homo sapiens
  misc_RNA (1)...(19): siRNA sense strand
ugaauuuccuggcagcuaa

SEQ ID NO: 1798334 - RNA, 19 nt, Homo sapiens
  misc_RNA (1)...(19): siRNA sense strand
ucaaugggcugcucaacug

SEQ ID NO: 1798335 - RNA, 19 nt, Homo sapiens
  misc_RNA (1)...(19): siRNA sense strand
guucuuggcuacagcauug

SEQ ID NO: 1798336 - RNA, 19 nt, Homo sapiens
  misc_RNA (1)...(19): siRNA sense strand
gcacaucgucaguuuauuc

SEQ ID NO: 1798337 - RNA, 19 nt, Homo sapiens
  misc_RNA (1)...(19): siRNA sense strand
gggagacccugcaacgaaa

SEQ ID NO: 1798338 - RNA, 19 nt, Homo sapiens
  misc_RNA (1)...(19): siRNA sense strand
gcagguucaucaacacuga

SEQ ID NO: 1798339 - RNA, 19 nt, Homo sapiens
  misc_RNA (1)...(19): siRNA sense strand
gaauguuacugccgaguca

SEQ ID NO: 1798340 - RNA, 19 nt, Homo sapiens
  misc_RNA (1)...(19): siRNA sense strand
cgacgcagccagagcuuua

SEQ ID NO: 1798341 - RNA, 19 nt, Homo sapiens
  misc_RNA (1)...(19): siRNA sense strand
uuagacggcuguucaaaga

SEQ ID NO: 1798342 - RNA, 19 nt, Homo sapiens
  misc_RNA (1)...(19): siRNA sense strand
gcccuaagcucccggacaa

SEQ ID NO: 1798343 - RNA, 19 nt, Homo sapiens
  misc_RNA (1)...(19): siRNA sense strand
gaaaggcaaugagaaagag

SEQ ID NO: 1798344 - RNA, 19 nt, Homo sapiens
  misc_RNA (1)...(19): siRNA sense strand
gugaugaugucaagaaauc

SEQ ID NO: 1798345 - RNA, 19 nt, Homo sapiens
  misc_RNA (1)...(19): siRNA sense strand
caccugagcucaacugcaa

SEQ ID NO: 1798346 - RNA, 19 nt, Homo sapiens
  misc_RNA (1)...(19): siRNA sense strand
gaaucaggaugacggguau

SEQ ID NO: 1798347 - RNA, 19 nt, Homo sapiens
  misc_RNA (1)...(19): siRNA sense strand
ggucggaagucaaguaugg

SEQ ID NO: 1798348 - RNA, 19 nt, Homo sapiens
  misc_RNA (1)...(19): siRNA sense strand
cagaagagaucaggaaugg

SEQ ID NO: 1798349 - RNA, 19 nt, Homo sapiens
  misc_RNA (1)...(19): siRNA sense strand
ugaacaggaugcagaguga

SEQ ID NO: 1798350 - RNA, 19 nt, Homo sapiens
  misc_RNA (1)...(19): siRNA sense strand
gaacaagauucaacuuuuc

SEQ ID NO: 1798351 - RNA, 19 nt, Homo sapiens
  misc_RNA (1)...(19): siRNA sense strand
guaacucggugaaagugaa

SEQ ID NO: 1798352 - RNA, 19 nt, Homo sapiens
  misc_RNA (1)...(19): siRNA sense strand
gcaaugagaaagagaagga

SEQ ID NO: 1798353 - RNA, 19 nt, Homo sapiens
  misc_RNA (1)...(19): siRNA sense strand
auagaugccugcuugaauu

SEQ ID NO: 1798354 - RNA, 19 nt, Homo sapiens
  misc_RNA (1)...(19): siRNA sense strand
gcaggcauguuaagauagu

SEQ ID NO: 1798355 - RNA, 19 nt, Homo sapiens
  misc_RNA (1)...(19): siRNA sense strand
gcaguccucucuacagcaa

SEQ ID NO: 1798356 - RNA, 19 nt, Homo sapiens
  misc_RNA (1)...(19): siRNA sense strand
agaaaggcaucucaucaga

SEQ ID NO: 1798357 - RNA, 19 nt, Homo sapiens
  misc_RNA (1)...(19): siRNA sense strand
gcaaaggugucugagaaag

SEQ ID NO: 1798358 - RNA, 19 nt, Homo sapiens
  misc_RNA (1)...(19): siRNA sense strand
gcacugaccaacaagaaga

SEQ ID NO: 1798359 - RNA, 19 nt, Homo sapiens
  misc_RNA (1)...(19): siRNA sense strand
caucagggaucuccagcaa

SEQ ID NO: 1798360 - RNA, 19 nt, Homo sapiens
  misc_RNA (1)...(19): siRNA sense strand
ugaaagggcucgcagaaaa

SEQ ID NO: 1798361 - RNA, 19 nt, Homo sapiens
  misc_RNA (1)...(19): siRNA sense strand
ccaacucucuaauuucaga

SEQ ID NO: 1798362 - RNA, 19 nt, Homo sapiens
  misc_RNA (1)...(19): siRNA sense strand
ggacaccgcugccaauucc

SEQ ID NO: 1798363 - RNA, 19 nt, Homo sapiens
  misc_RNA (1)...(19): siRNA sense strand
gcacgucgggcaagaagaa

SEQ ID NO: 1798364 - RNA, 19 nt, Homo sapiens
  misc_RNA (1)...(19): siRNA sense strand
gaggaaaccauguccaguu

SEQ ID NO: 1798365 - RNA, 19 nt, Homo sapiens
  misc_RNA (1)...(19): siRNA sense strand
acgcaaaggugucugagaa

SEQ ID NO: 1798366 - RNA, 19 nt, Homo sapiens
  misc_RNA (1)...(19): siRNA sense strand
cacaaaugcccuuacauaa

SEQ ID NO: 1798367 - RNA, 19 nt, Homo sapiens
  misc_RNA (1)...(19): siRNA sense strand
gaagugggaugugcucgau

SEQ ID NO: 1798368 - RNA, 19 nt, Homo sapiens
  misc_RNA (1)...(19): siRNA sense strand
aggcaggcauguuaagaua

SEQ ID NO: 1798369 - RNA, 19 nt, Homo sapiens
  misc_RNA (1)...(19): siRNA sense strand
gagcagcaguccucucuac

SEQ ID NO: 1798370 - RNA, 19 nt, Homo sapiens
  misc_RNA (1)...(19): siRNA sense strand
caacagcgggagaaggaua

SEQ ID NO: 1798371 - RNA, 19 nt, Homo sapiens
  misc_RNA (1)...(19): siRNA sense strand
gaaaucaagcgcagcaaca

SEQ ID NO: 1798372 - RNA, 19 nt, Homo sapiens
  misc_RNA (1)...(19): siRNA sense strand
uaagaaaggacucagguau

SEQ ID NO: 1798373 - RNA, 19 nt, Homo sapiens
  misc_RNA (1)...(19): siRNA sense strand
cuacgucucccuccugaua

SEQ ID NO: 1798374 - RNA, 19 nt, Homo sapiens
  misc_RNA (1)...(19): siRNA sense strand
ggaugacacuggugaaugc

SEQ ID NO: 1798375 - RNA, 19 nt, Homo sapiens
  misc_RNA (1)...(19): siRNA sense strand
gcagaaggacucagaacug

SEQ ID NO: 1798376 - RNA, 19 nt, Homo sapiens
  misc_RNA (1)...(19): siRNA sense strand
cagacugggccaaucauua

SEQ ID NO: 1798377 - RNA, 19 nt, Homo sapiens
  misc_RNA (1)...(19): siRNA sense strand
ggaagcucauggaaacaga

SEQ ID NO: 1798378 - RNA, 19 nt, Homo sapiens
  misc_RNA (1)...(19): siRNA sense strand
cacaauggguccacagguu

SEQ ID NO: 1798379 - RNA, 19 nt, Homo sapiens
  misc_RNA (1)...(19): siRNA sense strand
gcuccuccaucagcucuua

SEQ ID NO: 1798380 - RNA, 19 nt, Homo sapiens
  misc_RNA (1)...(19): siRNA sense strand
ugaagaacaucgcugaucu

SEQ ID NO: 1798381 - RNA, 19 nt, Homo sapiens
  misc_RNA (1)...(19): siRNA sense strand
gagcagcugugcccgagau

SEQ ID NO: 1798382 - RNA, 19 nt, Homo sapiens
  misc_RNA (1)...(19): siRNA sense strand
gaagcaauaccgucagugu

SEQ ID NO: 1798383 - RNA, 19 nt, Homo sapiens
  misc_RNA (1)...(19): siRNA sense strand
ggagagaacacgaccaucu

SEQ ID NO: 1798384 - RNA, 19 nt, Homo sapiens
  misc_RNA (1)...(19): siRNA sense strand
gcuccgaaaugaguuaaga

SEQ ID NO: 1798385 - RNA, 19 nt, Homo sapiens
  misc_RNA (1)...(19): siRNA sense strand
aaaggcaucucaucagaca

SEQ ID NO: 1798386 - RNA, 19 nt, Homo sapiens
  misc_RNA (1)...(19): siRNA sense strand
gcaauaccgucaguguuca

SEQ ID NO: 1798387 - RNA, 19 nt, Homo sapiens
  misc_RNA (1)...(19): siRNA sense strand
gcucaacagugccaagaag

SEQ ID NO: 1798388 - RNA, 19 nt, Homo sapiens
  misc_RNA (1)...(19): siRNA sense strand
gaacuaacagugugaagac

SEQ ID NO: 1798389 - RNA, 19 nt, Homo sapiens
  misc_RNA (1)...(19): siRNA sense strand
guucauggauccucacucu

SEQ ID NO: 1798390 - RNA, 19 nt, Homo sapiens
  misc_RNA (1)...(19): siRNA sense strand
acaaaugcccuuacauaau

SEQ ID NO: 1798391 - RNA, 19 nt, Homo sapiens
  misc_RNA (1)...(19): siRNA sense strand
caacugcaaguaccacaaa

SEQ ID NO: 1798392 - RNA, 19 nt, Homo sapiens
  misc_RNA (1)...(19): siRNA sense strand
ccuuuaacguggaccauaa

SEQ ID NO: 1798393 - RNA, 19 nt, Homo sapiens
  misc_RNA (1)...(19): siRNA sense strand
gcaggcagcacuccucaga

SEQ ID NO: 1798394 - RNA, 19 nt, Homo sapiens
  misc_RNA (1)...(19): siRNA sense strand
gaacagaucccaaaugauu

SEQ ID NO: 1798395 - RNA, 19 nt, Homo sapiens
  misc_RNA (1)...(19): siRNA sense strand
caaaugcccuuacauaauu

SEQ ID NO: 1798396 - RNA, 19 nt, Homo sapiens
  misc_RNA (1)...(19): siRNA sense strand
ccacaucucuuucuuauug

SEQ ID NO: 1798397 - RNA, 19 nt, Homo sapiens
  misc_RNA (1)...(19): siRNA sense strand
cagcauagauuccaacauu

SEQ ID NO: 1798398 - RNA, 19 nt, Homo sapiens
  misc_RNA (1)...(19): siRNA sense strand
gaaggaggcaggcauguua

SEQ ID NO: 1798399 - RNA, 19 nt, Homo sapiens
  misc_RNA (1)...(19): siRNA sense strand
uaagauaguugucagcuuu

SEQ ID NO: 1798400 - RNA, 19 nt, Homo sapiens
  misc_RNA (1)...(19): siRNA sense strand
gaacaaugcuguggacaug

SEQ ID NO: 1798401 - RNA, 19 nt, Homo sapiens
  misc_RNA (1)...(19): siRNA sense strand
gaaguacucugcccaggaa

SEQ ID NO: 1798402 - RNA, 19 nt, Homo sapiens
  misc_RNA (1)...(19): siRNA sense strand
gagaagagcagaaccauga

SEQ ID NO: 1798403 - RNA, 19 nt, Homo sapiens
  misc_RNA (1)...(19): siRNA sense strand
ccauugagcugcuaaagaa

SEQ ID NO: 1798404 - RNA, 19 nt, Homo sapiens
  misc_RNA (1)...(19): siRNA sense strand
gaagagaucaggaauggaa

SEQ ID NO: 1798405 - RNA, 19 nt, Homo sapiens
  misc_RNA (1)...(19): siRNA sense strand
ccacaaaugcccuuacaua

SEQ ID NO: 1798406 - RNA, 19 nt, Homo sapiens
  misc_RNA (1)...(19): siRNA sense strand
gagaaggacuccagcucua

SEQ ID NO: 1798407 - RNA, 19 nt, Homo sapiens
  misc_RNA (1)...(19): siRNA sense strand
gcaagaagaugcaaaagaa

SEQ ID NO: 1798408 - RNA, 19 nt, Homo sapiens
  misc_RNA (1)...(19): siRNA sense strand
ggaggaagcucauggaaac

SEQ ID NO: 1798409 - RNA, 19 nt, Homo sapiens
  misc_RNA (1)...(19): siRNA sense strand
gagcucaacugcaaaggaa

SEQ ID NO: 1798410 - RNA, 19 nt, Homo sapiens
  misc_RNA (1)...(19): siRNA sense strand
gacagccgcuuccggaaua

SEQ ID NO: 1798411 - RNA, 19 nt, Homo sapiens
  misc_RNA (1)...(19): siRNA sense strand
gaccacaucucuuucuuau

SEQ ID NO: 1798412 - RNA, 19 nt, Homo sapiens
  misc_RNA (1)...(19): siRNA sense strand
aagaacagaucccaaauga

SEQ ID NO: 1798413 - RNA, 19 nt, Homo sapiens
  misc_RNA (1)...(19): siRNA sense strand
gcaagaauguggaccucaa

SEQ ID NO: 1798414 - RNA, 19 nt, Homo sapiens
  misc_RNA (1)...(19): siRNA sense strand
gaaaugaguuaagagacaa

SEQ ID NO: 1798415 - RNA, 19 nt, Homo sapiens
  misc_RNA (1)...(19): siRNA sense strand
gcaaaucccucagcgugaa

SEQ ID NO: 1798416 - RNA, 19 nt, Homo sapiens
  misc_RNA (1)...(19): siRNA sense strand
ggagaaggauaaggagaaa

SEQ ID NO: 1798417 - RNA, 19 nt, Homo sapiens
  misc_RNA (1)...(19): siRNA sense strand
ggaacaagauucaacuuuu

SEQ ID NO: 1798418 - RNA, 19 nt, Homo sapiens
  misc_RNA (1)...(19): siRNA sense strand
gaaggugacccgcugauga

SEQ ID NO: 1798419 - RNA, 19 nt, Homo sapiens
  misc_RNA (1)...(19): siRNA sense strand
cagaaugcauggauaguga

SEQ ID NO: 1798420 - RNA, 19 nt, Homo sapiens
  misc_RNA (1)...(19): siRNA sense strand
gaacagagucuugguaaca

SEQ ID NO: 1798421 - RNA, 19 nt, Homo sapiens
  misc_RNA (1)...(19): siRNA sense strand
gaugacggauucuucuuug

SEQ ID NO: 1798422 - RNA, 19 nt, Homo sapiens
  misc_RNA (1)...(19): siRNA sense strand
cagcaacacuuccgaaaca

SEQ ID NO: 1798423 - RNA, 19 nt, Homo sapiens
  misc_RNA (1)...(19): siRNA sense strand
gagaugaagcugacggaua

SEQ ID NO: 1798424 - RNA, 19 nt, Homo sapiens
  misc_RNA (1)...(19): siRNA sense strand
ggaacacuuugccuaagaa

SEQ ID NO: 1798425 - RNA, 19 nt, Homo sapiens
  misc_RNA (1)...(19): siRNA sense strand
cgaaaugaguuaagagaca

SEQ ID NO: 1798426 - RNA, 19 nt, Homo sapiens
  misc_RNA (1)...(19): siRNA sense strand
gcagcaacauagagaguga

SEQ ID NO: 1798427 - RNA, 19 nt, Homo sapiens
  misc_RNA (1)...(19): siRNA sense strand
ccaaccggcugucugagua

SEQ ID NO: 1798428 - RNA, 19 nt, Homo sapiens
  misc_RNA (1)...(19): siRNA sense strand
gcugaaagcugagaaugau

SEQ ID NO: 1798429 - RNA, 19 nt, Homo sapiens
  misc_RNA (1)...(19): siRNA sense strand
agaugaagcugacggauau

SEQ ID NO: 1798430 - RNA, 19 nt, Homo sapiens
  misc_RNA (1)...(19): siRNA sense strand
ucagggaucuccagcaaga

SEQ ID NO: 1798431 - RNA, 19 nt, Homo sapiens
  misc_RNA (1)...(19): siRNA sense strand
caagaagaauccugucauc

SEQ ID NO: 1798432 - RNA, 19 nt, Homo sapiens
  misc_RNA (1)...(19): siRNA sense strand
gaagaacagaucccaaaug

SEQ ID NO: 1798433 - RNA, 19 nt, Homo sapiens
  misc_RNA (1)...(19): siRNA sense strand
ugaauuuccuggcagcuaa

SEQ ID NO: 1798434 - RNA, 19 nt, Homo sapiens
  misc_RNA (1)...(19): siRNA sense strand
ucaaugggcugcucaacug

SEQ ID NO: 1798435 - RNA, 19 nt, Homo sapiens
  misc_RNA (1)...(19): siRNA sense strand
guucuuggcuacagcauug

SEQ ID NO: 1798436 - RNA, 19 nt, Homo sapiens
  misc_RNA (1)...(19): siRNA sense strand
gcacaucgucaguuuauuc

SEQ ID NO: 1798437 - RNA, 19 nt, Homo sapiens
  misc_RNA (1)...(19): siRNA sense strand
gggagacccugcaacgaaa

SEQ ID NO: 1798438 - RNA, 19 nt, Homo sapiens
  misc_RNA (1)...(19): siRNA sense strand
gcagguucaucaacacuga

SEQ ID NO: 1798439 - RNA, 19 nt, Homo sapiens
  misc_RNA (1)...(19): siRNA sense strand
gaauguuacugccgaguca

SEQ ID NO: 1798440 - RNA, 19 nt, Homo sapiens
  misc_RNA (1)...(19): siRNA sense strand
cgacgcagccagagcuuua

SEQ ID NO: 1798441 - RNA, 19 nt, Homo sapiens
  misc_RNA (1)...(19): siRNA sense strand
uuagacggcuguucaaaga

SEQ ID NO: 1798442 - RNA, 19 nt, Homo sapiens
  misc_RNA (1)...(19): siRNA sense strand
gcccuaagcucccggacaa

SEQ ID NO: 1798443 - RNA, 19 nt, Homo sapiens
  misc_RNA (1)...(19): siRNA sense strand
gaaaggcaaugagaaagag

SEQ ID NO: 1798444 - RNA, 19 nt, Homo sapiens
  misc_RNA (1)...(19): siRNA sense strand
gugaugaugucaagaaauc

SEQ ID NO: 1798445 - RNA, 19 nt, Homo sapiens
  misc_RNA (1)...(19): siRNA sense strand
caccugagcucaacugcaa

SEQ ID NO: 1798446 - RNA, 19 nt, Homo sapiens
  misc_RNA (1)...(19): siRNA sense strand
gaaucaggaugacggguau

SEQ ID NO: 1798447 - RNA, 19 nt, Homo sapiens
  misc_RNA (1)...(19): siRNA sense strand
ggucggaagucaaguaugg

SEQ ID NO: 1798448 - RNA, 19 nt, Homo sapiens
  misc_RNA (1)...(19): siRNA sense strand
cagaagagaucaggaaugg

SEQ ID NO: 1798449 - RNA, 19 nt, Homo sapiens
  misc_RNA (1)...(19): siRNA sense strand
ugaacaggaugcagaguga

SEQ ID NO: 1798450 - RNA, 19 nt, Homo sapiens
  misc_RNA (1)...(19): siRNA sense strand
gaacaagauucaacuuuuc

SEQ ID NO: 1798451 - RNA, 19 nt, Homo sapiens
  misc_RNA (1)...(19): siRNA sense strand
guaacucggugaaagugaa

SEQ ID NO: 1798452 - RNA, 19 nt, Homo sapiens
  misc_RNA (1)...(19): siRNA sense strand
gcaaugagaaagagaagga

SEQ ID NO: 1798453 - RNA, 19 nt, Homo sapiens
  misc_RNA (1)...(19): siRNA sense strand
auagaugccugcuugaauu

SEQ ID NO: 1798454 - RNA, 19 nt, Homo sapiens
  misc_RNA (1)...(19): siRNA sense strand
gcaggcauguuaagauagu

SEQ ID NO: 1798455 - RNA, 19 nt, Homo sapiens
  misc_RNA (1)...(19): siRNA sense strand
gcaguccucucuacagcaa

SEQ ID NO: 1798456 - RNA, 19 nt, Homo sapiens
  misc_RNA (1)...(19): siRNA sense strand
agaaaggcaucucaucaga

SEQ ID NO: 1798457 - RNA, 19 nt, Homo sapiens
  misc_RNA (1)...(19): siRNA sense strand
gcaaaggugucugagaaag

SEQ ID NO: 1798458 - RNA, 19 nt, Homo sapiens
  misc_RNA (1)...(19): siRNA sense strand
gcacugaccaacaagaaga

SEQ ID NO: 1798459 - RNA, 19 nt, Homo sapiens
  misc_RNA (1)...(19): siRNA sense strand
caucagggaucuccagcaa

SEQ ID NO: 1798460 - RNA, 19 nt, Homo sapiens
  misc_RNA (1)...(19): siRNA sense strand
ugaaagggcucgcagaaaa

SEQ ID NO: 1798461 - RNA, 19 nt, Homo sapiens
  misc_RNA (1)...(19): siRNA sense strand
ccaacucucuaauuucaga

SEQ ID NO: 1798462 - RNA, 19 nt, Homo sapiens
  misc_RNA (1)...(19): siRNA sense strand
ggacaccgcugccaauucc

SEQ ID NO: 1798463 - RNA, 19 nt, Homo sapiens
  misc_RNA (1)...(19): siRNA sense strand
gcacgucgggcaagaagaa

SEQ ID NO: 1798464 - RNA, 19 nt, Homo sapiens
  misc_RNA (1)...(19): siRNA sense strand
gaggaaaccauguccaguu

SEQ ID NO: 1798465 - RNA, 19 nt, Homo sapiens
  misc_RNA (1)...(19): siRNA sense strand
acgcaaaggugucugagaa

SEQ ID NO: 1798466 - RNA, 19 nt, Homo sapiens
  misc_RNA (1)...(19): siRNA sense strand
cacaaaugcccuuacauaa

SEQ ID NO: 1798467 - RNA, 19 nt, Homo sapiens
  misc_RNA (1)...(19): siRNA sense strand
gaagugggaugugcucgau

SEQ ID NO: 1798468 - RNA, 19 nt, Homo sapiens
  misc_RNA (1)...(19): siRNA sense strand
aggcaggcauguuaagaua

SEQ ID NO: 1798469 - RNA, 19 nt, Homo sapiens
  misc_RNA (1)...(19): siRNA sense strand
gagcagcaguccucucuac

SEQ ID NO: 1798470 - RNA, 19 nt, Homo sapiens
  misc_RNA (1)...(19): siRNA sense strand
caacagcgggagaaggaua

SEQ ID NO: 1798471 - RNA, 19 nt, Homo sapiens
  misc_RNA (1)...(19): siRNA sense strand
gaaaucaagcgcagcaaca

SEQ ID NO: 1798472 - RNA, 19 nt, Homo sapiens
  misc_RNA (1)...(19): siRNA sense strand
uaagaaaggacucagguau

SEQ ID NO: 1798473 - RNA, 19 nt, Homo sapiens
  misc_RNA (1)...(19): siRNA sense strand
cuacgucucccuccugaua

SEQ ID NO: 1798474 - RNA, 19 nt, Homo sapiens
  misc_RNA (1)...(19): siRNA sense strand
ggaugacacuggugaaugc

SEQ ID NO: 1798475 - RNA, 19 nt, Homo sapiens
  misc_RNA (1)...(19): siRNA sense strand
gcagaaggacucagaacug

SEQ ID NO: 1798476 - RNA, 19 nt, Homo sapiens
  misc_RNA (1)...(19): siRNA sense strand
cagacugggccaaucauua

SEQ ID NO: 1798477 - RNA, 19 nt, Homo sapiens
  misc_RNA (1)...(19): siRNA sense strand
ggaagcucauggaaacaga

SEQ ID NO: 1798478 - RNA, 19 nt, Homo sapiens
  misc_RNA (1)...(19): siRNA sense strand
cacaauggguccacagguu

SEQ ID NO: 1798479 - RNA, 19 nt, Homo sapiens
  misc_RNA (1)...(19): siRNA sense strand
gcuccuccaucagcucuua

SEQ ID NO: 1798480 - RNA, 19 nt, Homo sapiens
  misc_RNA (1)...(19): siRNA sense strand
ugaagaacaucgcugaucu

SEQ ID NO: 1798481 - RNA, 19 nt, Homo sapiens
  misc_RNA (1)...(19): siRNA sense strand
gagcagcugugcccgagau

SEQ ID NO: 1798482 - RNA, 19 nt, Homo sapiens
  misc_RNA (1)...(19): siRNA sense strand
gaagcaauaccgucagugu

SEQ ID NO: 1798483 - RNA, 19 nt, Homo sapiens
  misc_RNA (1)...(19): siRNA sense strand
ggagagaacacgaccaucu

SEQ ID NO: 1798484 - RNA, 19 nt, Homo sapiens
  misc_RNA (1)...(19): siRNA sense strand
gcuccgaaaugaguuaaga

SEQ ID NO: 1798485 - RNA, 19 nt, Homo sapiens
  misc_RNA (1)...(19): siRNA sense strand
aaaggcaucucaucagaca

SEQ ID NO: 1798486 - RNA, 19 nt, Homo sapiens
  misc_RNA (1)...(19): siRNA sense strand
gcaauaccgucaguguuca

SEQ ID NO: 1798487 - RNA, 19 nt, Homo sapiens
  misc_RNA (1)...(19): siRNA sense strand
gcucaacagugccaagaag

SEQ ID NO: 1798488 - RNA, 19 nt, Homo sapiens
  misc_RNA (1)...(19): siRNA sense strand
gaacuaacagugugaagac

SEQ ID NO: 1798489 - RNA, 19 nt, Homo sapiens
  misc_RNA (1)...(19): siRNA sense strand
guucauggauccucacucu

SEQ ID NO: 1798490 - RNA, 19 nt, Homo sapiens
  misc_RNA (1)...(19): siRNA sense strand
acaaaugcccuuacauaau

SEQ ID NO: 1798491 - RNA, 19 nt, Homo sapiens
  misc_RNA (1)...(19): siRNA sense strand
caacugcaaguaccacaaa

SEQ ID NO: 1798492 - RNA, 19 nt, Homo sapiens
  misc_RNA (1)...(19): siRNA sense strand
ccuuuaacguggaccauaa

SEQ ID NO: 1798493 - RNA, 19 nt, Homo sapiens
  misc_RNA (1)...(19): siRNA sense strand
gcaggcagcacuccucaga

SEQ ID NO: 1798494 - RNA, 19 nt, Homo sapiens
  misc_RNA (1)...(19): siRNA sense strand
gaggaaagaucccagcauu

SEQ ID NO: 1798495 - RNA, 19 nt, Homo sapiens
  misc_RNA (1)...(19): siRNA sense strand
gaacaugccauugagauaa

SEQ ID NO: 1798496 - RNA, 19 nt, Homo sapiens
  misc_RNA (1)...(19): siRNA sense strand
gaaauucaguaugauguug

SEQ ID NO: 1798497 - RNA, 19 nt, Homo sapiens
  misc_RNA (1)...(19): siRNA sense strand
ugacaagcauuuaaacaga

SEQ ID NO: 1798498 - RNA, 19 nt, Homo sapiens
  misc_RNA (1)...(19): siRNA sense strand
ggaagaugcuugugauuuu

SEQ ID NO: 1798499 - RNA, 19 nt, Homo sapiens
  misc_RNA (1)...(19): siRNA sense strand
guacaguccuugacagaau

SEQ ID NO: 1798500 - RNA, 19 nt, Homo sapiens
  misc_RNA (1)...(19): siRNA sense strand
ggauuaagcagaagaugaa

SEQ ID NO: 1798501 - RNA, 19 nt, Homo sapiens
  misc_RNA (1)...(19): siRNA sense strand
ggaacaugccauugagaua

SEQ ID NO: 1798502 - RNA, 19 nt, Homo sapiens
  misc_RNA (1)...(19): siRNA sense strand
gaagaugcuugugauuuua

SEQ ID NO: 1798503 - RNA, 19 nt, Homo sapiens
  misc_RNA (1)...(19): siRNA sense strand
gagacgauaacacucuuua

SEQ ID NO: 1798504 - RNA, 19 nt, Homo sapiens
  misc_RNA (1)...(19): siRNA sense strand
ucacaaggcagaacaguau

SEQ ID NO: 1798505 - RNA, 19 nt, Homo sapiens
  misc_RNA (1)...(19): siRNA sense strand
ugagauaacuacccaagag

SEQ ID NO: 1798506 - RNA, 19 nt, Homo sapiens
  misc_RNA (1)...(19): siRNA sense strand
ggaaagaucccagcauuuu

SEQ ID NO: 1798507 - RNA, 19 nt, Homo sapiens
  misc_RNA (1)...(19): siRNA sense strand
ggauggaguggaugaaauu

SEQ ID NO: 1798508 - RNA, 19 nt, Homo sapiens
  misc_RNA (1)...(19): siRNA sense strand
cgacacaucaguaccacua

SEQ ID NO: 1798509 - RNA, 19 nt, Homo sapiens
  misc_RNA (1)...(19): siRNA sense strand
gcacuggugucaggcauca

SEQ ID NO: 1798510 - RNA, 19 nt, Homo sapiens
  misc_RNA (1)...(19): siRNA sense strand
caugaagaaucgagaggaa

SEQ ID NO: 1798511 - RNA, 19 nt, Homo sapiens
  misc_RNA (1)...(19): siRNA sense strand
aaccgacgcuuucuuguug

SEQ ID NO: 1798512 - RNA, 19 nt, Homo sapiens
  misc_RNA (1)...(19): siRNA sense strand
agcagaagaugaaagaauu

SEQ ID NO: 1798513 - RNA, 19 nt, Homo sapiens
  misc_RNA (1)...(19): siRNA sense strand
gcucauuguuguccucguu

SEQ ID NO: 1798514 - RNA, 19 nt, Homo sapiens
  misc_RNA (1)...(19): siRNA sense strand
ugacagaauugacuauaac

SEQ ID NO: 1798515 - RNA, 19 nt, Homo sapiens
  misc_RNA (1)...(19): siRNA sense strand
cgauaacacucuuuaccau

SEQ ID NO: 1798516 - RNA, 19 nt, Homo sapiens
  misc_RNA (1)...(19): siRNA sense strand
gaagagcgggaacgagaga

SEQ ID NO: 1798517 - RNA, 19 nt, Homo sapiens
  misc_RNA (1)...(19): siRNA sense strand
gcagaagaugaaagaauug

SEQ ID NO: 1798518 - RNA, 19 nt, Homo sapiens
  misc_RNA (1)...(19): siRNA sense strand
gcagaacaguaucaaaaga

SEQ ID NO: 1798519 - RNA, 19 nt, Homo sapiens
  misc_RNA (1)...(19): siRNA sense strand
gaauugacuauaacguuga

SEQ ID NO: 1798520 - RNA, 19 nt, Homo sapiens
  misc_RNA (1)...(19): siRNA sense strand
gaagaggaacaugccauug

SEQ ID NO: 1798521 - RNA, 19 nt, Homo sapiens
  misc_RNA (1)...(19): siRNA sense strand
caucaucauugugcucauu

SEQ ID NO: 1798522 - RNA, 19 nt, Homo sapiens
  misc_RNA (1)...(19): siRNA sense strand
aaagaagaaucggaagaug

SEQ ID NO: 1798523 - RNA, 19 nt, Homo sapiens
  misc_RNA (1)...(19): siRNA sense strand
cgagagauucgccagauug

SEQ ID NO: 1798524 - RNA, 19 nt, Homo sapiens
  misc_RNA (1)...(19): siRNA sense strand
gggcgaugauuguagaaca

SEQ ID NO: 1798525 - RNA, 19 nt, Homo sapiens
  misc_RNA (1)...(19): siRNA sense strand
gagauucgccagauuguac

SEQ ID NO: 1798526 - RNA, 19 nt, Homo sapiens
  misc_RNA (1)...(19): siRNA sense strand
gaauuggccagccuucaug

SEQ ID NO: 1798527 - RNA, 19 nt, Homo sapiens
  misc_RNA (1)...(19): siRNA sense strand
cagaauugacuauaacguu

SEQ ID NO: 1798528 - RNA, 19 nt, Homo sapiens
  misc_RNA (1)...(19): siRNA sense strand
ggugucaggcaucagcuua

SEQ ID NO: 1798529 - RNA, 19 nt, Homo sapiens
  misc_RNA (1)...(19): siRNA sense strand
aacugaagaugguuugaaa

SEQ ID NO: 1798530 - RNA, 19 nt, Homo sapiens
  misc_RNA (1)...(19): siRNA sense strand
uaaccgacgcuuucuuguu

SEQ ID NO: 1798531 - RNA, 19 nt, Homo sapiens
  misc_RNA (1)...(19): siRNA sense strand
acacacugaugguggaaga

SEQ ID NO: 1798532 - RNA, 19 nt, Homo sapiens
  misc_RNA (1)...(19): siRNA sense strand
cggaagaugcuugugauuu

SEQ ID NO: 1798533 - RNA, 19 nt, Homo sapiens
  misc_RNA (1)...(19): siRNA sense strand
aaacagacccacccuggau

SEQ ID NO: 1798534 - RNA, 19 nt, Homo sapiens
  misc_RNA (1)...(19): siRNA sense strand
guccauuucugaccugaau

SEQ ID NO: 1798535 - RNA, 19 nt, Homo sapiens
  misc_RNA (1)...(19): siRNA sense strand
gcuguuagccgagcaacuu

SEQ ID NO: 1798536 - RNA, 19 nt, Homo sapiens
  misc_RNA (1)...(19): siRNA sense strand
caguaccacuaauggauga

SEQ ID NO: 1798537 - RNA, 19 nt, Homo sapiens
  misc_RNA (1)...(19): siRNA sense strand
ucaaacgcaugaagaaucg

SEQ ID NO: 1798538 - RNA, 19 nt, Homo sapiens
  misc_RNA (1)...(19): siRNA sense strand
gagauaacuacccaagaga

SEQ ID NO: 1798539 - RNA, 19 nt, Homo sapiens
  misc_RNA (1)...(19): siRNA sense strand
cgaagaggaacaugccauu

SEQ ID NO: 1798540 - RNA, 19 nt, Homo sapiens
  misc_RNA (1)...(19): siRNA sense strand
ugacagcagcgaagaggaa

SEQ ID NO: 1798541 - RNA, 19 nt, Homo sapiens
  misc_RNA (1)...(19): siRNA sense strand
cagauuguacaguccauuu

SEQ ID NO: 1798542 - RNA, 19 nt, Homo sapiens
  misc_RNA (1)...(19): siRNA sense strand
acacaucaguaccacuaau

SEQ ID NO: 1798543 - RNA, 19 nt, Homo sapiens
  misc_RNA (1)...(19): siRNA sense strand
aagaggaacaugccauuga

SEQ ID NO: 1798544 - RNA, 19 nt, Homo sapiens
  misc_RNA (1)...(19): siRNA sense strand
uuaagcagaagaugaaaga

SEQ ID NO: 1798545 - RNA, 19 nt, Homo sapiens
  misc_RNA (1)...(19): siRNA sense strand
ucauugugcucauuguugu

SEQ ID NO: 1798546 - RNA, 19 nt, Homo sapiens
  misc_RNA (1)...(19): siRNA sense strand
gaagaaucgagaggaaaga

SEQ ID NO: 1798547 - RNA, 19 nt, Homo sapiens
  misc_RNA (1)...(19): siRNA sense strand
gauaacuacccaagagauc

SEQ ID NO: 1798548 - RNA, 19 nt, Homo sapiens
  misc_RNA (1)...(19): siRNA sense strand
gauguuggccggauuaagc

SEQ ID NO: 1798549 - RNA, 19 nt, Homo sapiens
  misc_RNA (1)...(19): siRNA sense strand
acagucaggcuaccucaaa

SEQ ID NO: 1798550 - RNA, 19 nt, Homo sapiens
  misc_RNA (1)...(19): siRNA sense strand
uacaguccuugacagaauu

SEQ ID NO: 1798551 - RNA, 19 nt, Homo sapiens
  misc_RNA (1)...(19): siRNA sense strand
gaaauauucagggacuuag

SEQ ID NO: 1798552 - RNA, 19 nt, Homo sapiens
  misc_RNA (1)...(19): siRNA sense strand
guaugauguuggccggauu

SEQ ID NO: 1798553 - RNA, 19 nt, Homo sapiens
  misc_RNA (1)...(19): siRNA sense strand
uaucaaaacugaagauggu

SEQ ID NO: 1798554 - RNA, 19 nt, Homo sapiens
  misc_RNA (1)...(19): siRNA sense strand
ggagacgauaacacucuuu

SEQ ID NO: 1798555 - RNA, 19 nt, Homo sapiens
  misc_RNA (1)...(19): siRNA sense strand
cuucaugacaagcauuuaa

SEQ ID NO: 1798556 - RNA, 19 nt, Homo sapiens
  misc_RNA (1)...(19): siRNA sense strand
cggauuaagcagaagauga

SEQ ID NO: 1798557 - RNA, 19 nt, Homo sapiens
  misc_RNA (1)...(19): siRNA sense strand
uggauggaguggaugaaau

SEQ ID NO: 1798558 - RNA, 19 nt, Homo sapiens
  misc_RNA (1)...(19): siRNA sense strand
uaugauguuggccggauua

SEQ ID NO: 1798559 - RNA, 19 nt, Homo sapiens
  misc_RNA (1)...(19): siRNA sense strand
uuacagaggaccaguuagu

SEQ ID NO: 1798560 - RNA, 19 nt, Homo sapiens
  misc_RNA (1)...(19): siRNA sense strand
gagagauucgccagauugu

SEQ ID NO: 1798561 - RNA, 19 nt, Homo sapiens
  misc_RNA (1)...(19): siRNA sense strand
aagcagaagaugaaagaau

SEQ ID NO: 1798562 - RNA, 19 nt, Homo sapiens
  misc_RNA (1)...(19): siRNA sense strand
gaacacacugaugguggaa

SEQ ID NO: 1798563 - RNA, 19 nt, Homo sapiens
  misc_RNA (1)...(19): siRNA sense strand
caaaacggccaccuccuaa

SEQ ID NO: 1798564 - RNA, 19 nt, Homo sapiens
  misc_RNA (1)...(19): siRNA sense strand
agaggaacaugccauugag

SEQ ID NO: 1798565 - RNA, 19 nt, Homo sapiens
  misc_RNA (1)...(19): siRNA sense strand
guggguggauggaguggau

SEQ ID NO: 1798566 - RNA, 19 nt, Homo sapiens
  misc_RNA (1)...(19): siRNA sense strand
ggccagccuucaugacaag

SEQ ID NO: 1798567 - RNA, 19 nt, Homo sapiens
  misc_RNA (1)...(19): siRNA sense strand
aaucggaagaugcuuguga

SEQ ID NO: 1798568 - RNA, 19 nt, Homo sapiens
  misc_RNA (1)...(19): siRNA sense strand
ugaagaaucgagaggaaag

SEQ ID NO: 1798569 - RNA, 19 nt, Homo sapiens
  misc_RNA (1)...(19): siRNA sense strand
gaggaacaugccauugaga

SEQ ID NO: 1798570 - RNA, 19 nt, Homo sapiens
  misc_RNA (1)...(19): siRNA sense strand
aaacggccaccuccuaagu

SEQ ID NO: 1798571 - RNA, 19 nt, Homo sapiens
  misc_RNA (1)...(19): siRNA sense strand
agaacaggguacaguccuu

SEQ ID NO: 1798572 - RNA, 19 nt, Homo sapiens
  misc_RNA (1)...(19): siRNA sense strand
acagaggaccaguuaguuc

SEQ ID NO: 1798573 - RNA, 19 nt, Homo sapiens
  misc_RNA (1)...(19): siRNA sense strand
ugucaggcaucagcuuaga

SEQ ID NO: 1798574 - RNA, 19 nt, Homo sapiens
  misc_RNA (1)...(19): siRNA sense strand
caugacaagcauuuaaaca

SEQ ID NO: 1798575 - RNA, 19 nt, Homo sapiens
  misc_RNA (1)...(19): siRNA sense strand
gaagcagcgauugguguga

SEQ ID NO: 1798576 - RNA, 19 nt, Homo sapiens
  misc_RNA (1)...(19): siRNA sense strand
uggccagccuucaugacaa

SEQ ID NO: 1798577 - RNA, 19 nt, Homo sapiens
  misc_RNA (1)...(19): siRNA sense strand
gagcgggaacgagagauuc

SEQ ID NO: 1798578 - RNA, 19 nt, Homo sapiens
  misc_RNA (1)...(19): siRNA sense strand
gguacaguccuugacagaa

SEQ ID NO: 1798579 - RNA, 19 nt, Homo sapiens
  misc_RNA (1)...(19): siRNA sense strand
ggguacaguccuugacaga

SEQ ID NO: 1798580 - RNA, 19 nt, Homo sapiens
  misc_RNA (1)...(19): siRNA sense strand
ggacuuaggggcgaugauu

SEQ ID NO: 1798581 - RNA, 19 nt, Homo sapiens
  misc_RNA (1)...(19): siRNA sense strand
acgagagauucgccagauu

SEQ ID NO: 1798582 - RNA, 19 nt, Homo sapiens
  misc_RNA (1)...(19): siRNA sense strand
aggaaagaucccagcauuu

SEQ ID NO: 1798583 - RNA, 19 nt, Homo sapiens
  misc_RNA (1)...(19): siRNA sense strand
caucagcuuagauccagaa

SEQ ID NO: 1798584 - RNA, 19 nt, Homo sapiens
  misc_RNA (1)...(19): siRNA sense strand
caaaagaagaaucggaaga

SEQ ID NO: 1798585 - RNA, 19 nt, Homo sapiens
  misc_RNA (1)...(19): siRNA sense strand
ggagcagaacacacugaug

SEQ ID NO: 1798586 - RNA, 19 nt, Homo sapiens
  misc_RNA (1)...(19): siRNA sense strand
uggaugauggagacgauaa

SEQ ID NO: 1798587 - RNA, 19 nt, Homo sapiens
  misc_RNA (1)...(19): siRNA sense strand
caucaguaccacuaaugga

SEQ ID NO: 1798588 - RNA, 19 nt, Homo sapiens
  misc_RNA (1)...(19): siRNA sense strand
gaugauggagacgauaaca

SEQ ID NO: 1798589 - RNA, 19 nt, Homo sapiens
  misc_RNA (1)...(19): siRNA sense strand
caucauugugcucauuguu

SEQ ID NO: 1798590 - RNA, 19 nt, Homo sapiens
  misc_RNA (1)...(19): siRNA sense strand
cagaggaccaguuaguucu

SEQ ID NO: 1798591 - RNA, 19 nt, Homo sapiens
  misc_RNA (1)...(19): siRNA sense strand
ggaaggccgugcaguacga

SEQ ID NO: 1798592 - RNA, 19 nt, Homo sapiens
  misc_RNA (1)...(19): siRNA sense strand
gaaagaccggcuagcagaa

SEQ ID NO: 1798593 - RNA, 19 nt, Homo sapiens
  misc_RNA (1)...(19): siRNA sense strand
cgucaucgagcucaacgua

SEQ ID NO: 1798594 - RNA, 19 nt, Homo sapiens
  misc_RNA (1)...(19): siRNA sense strand
ucaucgagcucaacguaca

SEQ ID NO: 1798595 - RNA, 19 nt, Homo sapiens
  misc_RNA (1)...(19): siRNA sense strand
gcaauaugaccagcaguuc

SEQ ID NO: 1798596 - RNA, 19 nt, Homo sapiens
  misc_RNA (1)...(19): siRNA sense strand
ccagaucgaggacauguuc

SEQ ID NO: 1798597 - RNA, 19 nt, Homo sapiens
  misc_RNA (1)...(19): siRNA sense strand
gcaucaagcgcgacaccaa

SEQ ID NO: 1798598 - RNA, 19 nt, Homo sapiens
  misc_RNA (1)...(19): siRNA sense strand
uacacgagcucuucuugca

SEQ ID NO: 1798599 - RNA, 19 nt, Homo sapiens
  misc_RNA (1)...(19): siRNA sense strand
ggagaucaugggcaaggaa

SEQ ID NO: 1798600 - RNA, 19 nt, Homo sapiens
  misc_RNA (1)...(19): siRNA sense strand
ugaagcggcugggaaagca

SEQ ID NO: 1798601 - RNA, 19 nt, Homo sapiens
  misc_RNA (1)...(19): siRNA sense strand
uggcggugcugguggagaa

SEQ ID NO: 1798602 - RNA, 19 nt, Homo sapiens
  misc_RNA (1)...(19): siRNA sense strand
gcgaggucauccacugcaa

SEQ ID NO: 1798603 - RNA, 19 nt, Homo sapiens
  misc_RNA (1)...(19): siRNA sense strand
gcgaccagaucgaggacau

SEQ ID NO: 1798604 - RNA, 19 nt, Homo sapiens
  misc_RNA (1)...(19): siRNA sense strand
ugaagcagcgcgacaacug

SEQ ID NO: 1798605 - RNA, 19 nt, Homo sapiens
  misc_RNA (1)...(19): siRNA sense strand
cgagacauccgggacauuc

SEQ ID NO: 1798606 - RNA, 19 nt, Homo sapiens
  misc_RNA (1)...(19): siRNA sense strand
uccgggacauucaggauga

SEQ ID NO: 1798607 - RNA, 19 nt, Homo sapiens
  misc_RNA (1)...(19): siRNA sense strand
cgacguacacgagcucuuc

SEQ ID NO: 1798608 - RNA, 19 nt, Homo sapiens
  misc_RNA (1)...(19): siRNA sense strand
ggguaagugggacguguuu

SEQ ID NO: 1798609 - RNA, 19 nt, Homo sapiens
  misc_RNA (1)...(19): siRNA sense strand
caaccaggccgagaugaag

SEQ ID NO: 1798610 - RNA, 19 nt, Homo sapiens
  misc_RNA (1)...(19): siRNA sense strand
gagcucaacguacaaaaga

SEQ ID NO: 1798611 - RNA, 19 nt, Homo sapiens
  misc_RNA (1)...(19): siRNA sense strand
gaucaugggcaaggaaguc

SEQ ID NO: 1798612 - RNA, 19 nt, Homo sapiens
  misc_RNA (1)...(19): siRNA sense strand
gaccagaucgaggacaugu

SEQ ID NO: 1798613 - RNA, 19 nt, Homo sapiens
  misc_RNA (1)...(19): siRNA sense strand
gcgcgacaacugcaagauc

SEQ ID NO: 1798614 - RNA, 19 nt, Homo sapiens
  misc_RNA (1)...(19): siRNA sense strand
cuacaaccaggccgagaug

SEQ ID NO: 1798615 - RNA, 19 nt, Homo sapiens
  misc_RNA (1)...(19): siRNA sense strand
acaaccaggccgagaugaa

SEQ ID NO: 1798616 - RNA, 19 nt, Homo sapiens
  misc_RNA (1)...(19): siRNA sense strand
gaaguuauauccagagaaa

SEQ ID NO: 1798617 - RNA, 19 nt, Homo sapiens
  misc_RNA (1)...(19): siRNA sense strand
caaagaagguuauuucaga

SEQ ID NO: 1798618 - RNA, 19 nt, Homo sapiens
  misc_RNA (1)...(19): siRNA sense strand
caaauaaugucacuggaaa

SEQ ID NO: 1798619 - RNA, 19 nt, Homo sapiens
  misc_RNA (1)...(19): siRNA sense strand
gcaacaugcucuccaguuu

SEQ ID NO: 1798620 - RNA, 19 nt, Homo sapiens
  misc_RNA (1)...(19): siRNA sense strand
gaaauucacagaagcuaua

SEQ ID NO: 1798621 - RNA, 19 nt, Homo sapiens
  misc_RNA (1)...(19): siRNA sense strand
ucaauuauguucaguggua

SEQ ID NO: 1798622 - RNA, 19 nt, Homo sapiens
  misc_RNA (1)...(19): siRNA sense strand
gagaagaacuggaaaauau

SEQ ID NO: 1798623 - RNA, 19 nt, Homo sapiens
  misc_RNA (1)...(19): siRNA sense strand
gaagucauguucagguaaa

SEQ ID NO: 1798624 - RNA, 19 nt, Homo sapiens
  misc_RNA (1)...(19): siRNA sense strand
gagaauagagacagauaua

SEQ ID NO: 1798625 - RNA, 19 nt, Homo sapiens
  misc_RNA (1)...(19): siRNA sense strand
gaagggaaauucacagaag

SEQ ID NO: 1798626 - RNA, 19 nt, Homo sapiens
  misc_RNA (1)...(19): siRNA sense strand
ucacaaggauucagcuaaa

SEQ ID NO: 1798627 - RNA, 19 nt, Homo sapiens
  misc_RNA (1)...(19): siRNA sense strand
caagaaccuuucacaacua

SEQ ID NO: 1798628 - RNA, 19 nt, Homo sapiens
  misc_RNA (1)...(19): siRNA sense strand
gauaucagauuccuacaca

SEQ ID NO: 1798629 - RNA, 19 nt, Homo sapiens
  misc_RNA (1)...(19): siRNA sense strand
acaauucgcuaucgagaaa

SEQ ID NO: 1798630 - RNA, 19 nt, Homo sapiens
  misc_RNA (1)...(19): siRNA sense strand
gaagguggaauuuggagua

SEQ ID NO: 1798631 - RNA, 19 nt, Homo sapiens
  misc_RNA (1)...(19): siRNA sense strand
cagcauaugucccaaggaa

SEQ ID NO: 1798632 - RNA, 19 nt, Homo sapiens
  misc_RNA (1)...(19): siRNA sense strand
ccaagucacugucccaaug

SEQ ID NO: 1798633 - RNA, 19 nt, Homo sapiens
  misc_RNA (1)...(19): siRNA sense strand
aaacacgaguuaugaauuc

SEQ ID NO: 1798634 - RNA, 19 nt, Homo sapiens
  misc_RNA (1)...(19): siRNA sense strand
caaggaaacuaaucccaau

SEQ ID NO: 1798635 - RNA, 19 nt, Homo sapiens
  misc_RNA (1)...(19): siRNA sense strand
aaacaacacuggcuucaag

SEQ ID NO: 1798636 - RNA, 19 nt, Homo sapiens
  misc_RNA (1)...(19): siRNA sense strand
ggaauuuggaguaagauuu

SEQ ID NO: 1798637 - RNA, 19 nt, Homo sapiens
  misc_RNA (1)...(19): siRNA sense strand
ccacacagauuuuauacua

SEQ ID NO: 1798638 - RNA, 19 nt, Homo sapiens
  misc_RNA (1)...(19): siRNA sense strand
gaugugcuccuuccucaua

SEQ ID NO: 1798639 - RNA, 19 nt, Homo sapiens
  misc_RNA (1)...(19): siRNA sense strand
ccaacacaguuuaugaauu

SEQ ID NO: 1798640 - RNA, 19 nt, Homo sapiens
  misc_RNA (1)...(19): siRNA sense strand
gcaacucucucagauacaa

SEQ ID NO: 1798641 - RNA, 19 nt, Homo sapiens
  misc_RNA (1)...(19): siRNA sense strand
caacugaacuagcaaagac

SEQ ID NO: 1798642 - RNA, 19 nt, Homo sapiens
  misc_RNA (1)...(19): siRNA sense strand
ccaagaaccuuucacaacu

SEQ ID NO: 1798643 - RNA, 19 nt, Homo sapiens
  misc_RNA (1)...(19): siRNA sense strand
acaagugccggaacaauua

SEQ ID NO: 1798644 - RNA, 19 nt, Homo sapiens
  misc_RNA (1)...(19): siRNA sense strand
ggaagugcaggaaucauuu

SEQ ID NO: 1798645 - RNA, 19 nt, Homo sapiens
  misc_RNA (1)...(19): siRNA sense strand
ggauauggcagcaauguau

SEQ ID NO: 1798646 - RNA, 19 nt, Homo sapiens
  misc_RNA (1)...(19): siRNA sense strand
ggcagcaacucacuucuga

SEQ ID NO: 1798647 - RNA, 19 nt, Homo sapiens
  misc_RNA (1)...(19): siRNA sense strand
gcacagaaauugccaaaag

SEQ ID NO: 1798648 - RNA, 19 nt, Homo sapiens
  misc_RNA (1)...(19): siRNA sense strand
aacagucccugcuccauua

SEQ ID NO: 1798649 - RNA, 19 nt, Homo sapiens
  misc_RNA (1)...(19): siRNA sense strand
gaaacuaaucccaauaaca

SEQ ID NO: 1798650 - RNA, 19 nt, Homo sapiens
  misc_RNA (1)...(19): siRNA sense strand
gaaagacaauguggaaggu

SEQ ID NO: 1798651 - RNA, 19 nt, Homo sapiens
  misc_RNA (1)...(19): siRNA sense strand
gcagcaauguaucaccaaa

SEQ ID NO: 1798652 - RNA, 19 nt, Homo sapiens
  misc_RNA (1)...(19): siRNA sense strand
aagaacaaguccauucaaa

SEQ ID NO: 1798653 - RNA, 19 nt, Homo sapiens
  misc_RNA (1)...(19): siRNA sense strand
gagagaauagagacagaua

SEQ ID NO: 1798654 - RNA, 19 nt, Homo sapiens
  misc_RNA (1)...(19): siRNA sense strand
gaaccaaaccugaaagaac

SEQ ID NO: 1798655 - RNA, 19 nt, Homo sapiens
  misc_RNA (1)...(19): siRNA sense strand
gguggaauuuggaguaaga

SEQ ID NO: 1798656 - RNA, 19 nt, Homo sapiens
  misc_RNA (1)...(19): siRNA sense strand
gggcaaacaauaugucaaa

SEQ ID NO: 1798657 - RNA, 19 nt, Homo sapiens
  misc_RNA (1)...(19): siRNA sense strand
gaacaacugaacuagcaaa

SEQ ID NO: 1798658 - RNA, 19 nt, Homo sapiens
  misc_RNA (1)...(19): siRNA sense strand
gcacgacccacaacaguga

SEQ ID NO: 1798659 - RNA, 19 nt, Homo sapiens
  misc_RNA (1)...(19): siRNA sense strand
gaauguuacucacaaggau

SEQ ID NO: 1798660 - RNA, 19 nt, Homo sapiens
  misc_RNA (1)...(19): siRNA sense strand
ucaagcaagugauucagaa

SEQ ID NO: 1798661 - RNA, 19 nt, Homo sapiens
  misc_RNA (1)...(19): siRNA sense strand
ucacagaagcuauaguuga

SEQ ID NO: 1798662 - RNA, 19 nt, Homo sapiens
  misc_RNA (1)...(19): siRNA sense strand
aaacacaaccaguuccuaa

SEQ ID NO: 1798663 - RNA, 19 nt, Homo sapiens
  misc_RNA (1)...(19): siRNA sense strand
gaaccuacauggacaacac

SEQ ID NO: 1798664 - RNA, 19 nt, Homo sapiens
  misc_RNA (1)...(19): siRNA sense strand
caauaacaaucaucaagca

SEQ ID NO: 1798665 - RNA, 19 nt, Homo sapiens
  misc_RNA (1)...(19): siRNA sense strand
ggaagaacaaguccauuca

SEQ ID NO: 1798666 - RNA, 19 nt, Homo sapiens
  misc_RNA (1)...(19): siRNA sense strand
gauacuaguccaccuuauu

SEQ ID NO: 1798667 - RNA, 19 nt, Homo sapiens
  misc_RNA (1)...(19): siRNA sense strand
gaaccuuucacaacuaaga

SEQ ID NO: 1798668 - RNA, 19 nt, Homo sapiens
  misc_RNA (1)...(19): siRNA sense strand
auacuaguccaccuuauua

SEQ ID NO: 1798669 - RNA, 19 nt, Homo sapiens
  misc_RNA (1)...(19): siRNA sense strand
uaacaaucaucaagcaagu

SEQ ID NO: 1798670 - RNA, 19 nt, Homo sapiens
  misc_RNA (1)...(19): siRNA sense strand
ggucacacccaaaucaauu

SEQ ID NO: 1798671 - RNA, 19 nt, Homo sapiens
  misc_RNA (1)...(19): siRNA sense strand
ucucucagauacaagauuu

SEQ ID NO: 1798672 - RNA, 19 nt, Homo sapiens
  misc_RNA (1)...(19): siRNA sense strand
cacagaagcuauaguugau

SEQ ID NO: 1798673 - RNA, 19 nt, Homo sapiens
  misc_RNA (1)...(19): siRNA sense strand
gugcaacucucucagauac

SEQ ID NO: 1798674 - RNA, 19 nt, Homo sapiens
  misc_RNA (1)...(19): siRNA sense strand
caaacacgaguuaugaauu

SEQ ID NO: 1798675 - RNA, 19 nt, Homo sapiens
  misc_RNA (1)...(19): siRNA sense strand
gaagaacaaguccauucaa

SEQ ID NO: 1798676 - RNA, 19 nt, Homo sapiens
  misc_RNA (1)...(19): siRNA sense strand
ugcauuagauguuucagaa

SEQ ID NO: 1798677 - RNA, 19 nt, Homo sapiens
  misc_RNA (1)...(19): siRNA sense strand
ccaaagaggaggccacaga

SEQ ID NO: 1798678 - RNA, 19 nt, Homo sapiens
  misc_RNA (1)...(19): siRNA sense strand
ggauugugccuacagcuaa

SEQ ID NO: 1798679 - RNA, 19 nt, Homo sapiens
  misc_RNA (1)...(19): siRNA sense strand
cagaugcacucaagacaca

SEQ ID NO: 1798680 - RNA, 19 nt, Homo sapiens
  misc_RNA (1)...(19): siRNA sense strand
ccaaaucaauuauguucag

SEQ ID NO: 1798681 - RNA, 19 nt, Homo sapiens
  misc_RNA (1)...(19): siRNA sense strand
acucacuucugaccaguua

SEQ ID NO: 1798682 - RNA, 19 nt, Homo sapiens
  misc_RNA (1)...(19): siRNA sense strand
gcgacucccucacaggaaa

SEQ ID NO: 1798683 - RNA, 19 nt, Homo sapiens
  misc_RNA (1)...(19): siRNA sense strand
ugaaaccaaacacgaguua

SEQ ID NO: 1798684 - RNA, 19 nt, Homo sapiens
  misc_RNA (1)...(19): siRNA sense strand
gggaaaagccacuaaauga

SEQ ID NO: 1798685 - RNA, 19 nt, Homo sapiens
  misc_RNA (1)...(19): siRNA sense strand
caacagucccugcuccauu

SEQ ID NO: 1798686 - RNA, 19 nt, Homo sapiens
  misc_RNA (1)...(19): siRNA sense strand
ccggaacaauuacaccuaa

SEQ ID NO: 1798687 - RNA, 19 nt, Homo sapiens
  misc_RNA (1)...(19): siRNA sense strand
ccaagaaccaaaccugaaa

SEQ ID NO: 1798688 - RNA, 19 nt, Homo sapiens
  misc_RNA (1)...(19): siRNA sense strand
cagaugagccugagauauc

SEQ ID NO: 1798689 - RNA, 19 nt, Homo sapiens
  misc_RNA (1)...(19): siRNA sense strand
agacacaauuagcuaagaa

SEQ ID NO: 1798690 - RNA, 19 nt, Homo sapiens
  misc_RNA (1)...(19): siRNA sense strand
guccaaauguaaagcuuga

SEQ ID NO: 1798691 - RNA, 19 nt, Homo sapiens
  misc_RNA (1)...(19): siRNA sense strand
ccacaucaauaccacaagu

SEQ ID NO: 1798692 - RNA, 19 nt, Homo sapiens
  misc_RNA (1)...(19): siRNA sense strand
gauugugccuacagcuaaa

SEQ ID NO: 1798693 - RNA, 19 nt, Homo sapiens
  misc_RNA (1)...(19): siRNA sense strand
ccugggaaaugcacagaaa

SEQ ID NO: 1798694 - RNA, 19 nt, Homo sapiens
  misc_RNA (1)...(19): siRNA sense strand
aagaagucauguucaggua

SEQ ID NO: 1798695 - RNA, 19 nt, Homo sapiens
  misc_RNA (1)...(19): siRNA sense strand
gugcaggaaucauuucauc

SEQ ID NO: 1798696 - RNA, 19 nt, Homo sapiens
  misc_RNA (1)...(19): siRNA sense strand
cuacaucuaucccuucuac

SEQ ID NO: 1798697 - RNA, 19 nt, Homo sapiens
  misc_RNA (1)...(19): siRNA sense strand
cugcaucccuaauguuuga

SEQ ID NO: 1798698 - RNA, 19 nt, Homo sapiens
  misc_RNA (1)...(19): siRNA sense strand
ggaaacuaaucccaauaac

SEQ ID NO: 1798699 - RNA, 19 nt, Homo sapiens
  misc_RNA (1)...(19): siRNA sense strand
acacccaaaucaauuaugu

SEQ ID NO: 1798700 - RNA, 19 nt, Homo sapiens
  misc_RNA (1)...(19): siRNA sense strand
agagacagauauaaagcaa

SEQ ID NO: 1798701 - RNA, 19 nt, Homo sapiens
  misc_RNA (1)...(19): siRNA sense strand
ccaaauaaugucacuggaa

SEQ ID NO: 1798702 - RNA, 19 nt, Homo sapiens
  misc_RNA (1)...(19): siRNA sense strand
aagaaccuuucacaacuaa

SEQ ID NO: 1798703 - RNA, 19 nt, Homo sapiens
  misc_RNA (1)...(19): siRNA sense strand
ggaagaaacagaccaaucc

SEQ ID NO: 1798704 - RNA, 19 nt, Homo sapiens
  misc_RNA (1)...(19): siRNA sense strand
ccacaaacacaaccaguuc

SEQ ID NO: 1798705 - RNA, 19 nt, Homo sapiens
  misc_RNA (1)...(19): siRNA sense strand
gauuucagaugcacucaag

SEQ ID NO: 1798706 - RNA, 19 nt, Homo sapiens
  misc_RNA (1)...(19): siRNA sense strand
caacaugcucuccaguuug

SEQ ID NO: 1798707 - RNA, 19 nt, Homo sapiens
  misc_RNA (1)...(19): siRNA sense strand
ccaguuaccaaucaaagaa

SEQ ID NO: 1798708 - RNA, 19 nt, Homo sapiens
  misc_RNA (1)...(19): siRNA sense strand
gggaagaacaaguccauuc

SEQ ID NO: 1798709 - RNA, 19 nt, Homo sapiens
  misc_RNA (1)...(19): siRNA sense strand
gcaacaagugaucguauuc

SEQ ID NO: 1798710 - RNA, 19 nt, Homo sapiens
  misc_RNA (1)...(19): siRNA sense strand
guuaugaauuccaggugaa

SEQ ID NO: 1798711 - RNA, 19 nt, Homo sapiens
  misc_RNA (1)...(19): siRNA sense strand
gggaaaugcacagaaauug

SEQ ID NO: 1798712 - RNA, 19 nt, Homo sapiens
  misc_RNA (1)...(19): siRNA sense strand
cuaaagcccaacacaguuu

SEQ ID NO: 1798713 - RNA, 19 nt, Homo sapiens
  misc_RNA (1)...(19): siRNA sense strand
aaaccuuuaccaccaaaua

SEQ ID NO: 1798714 - RNA, 19 nt, Homo sapiens
  misc_RNA (1)...(19): siRNA sense strand
gaaacaacacuggcuucaa

SEQ ID NO: 1798715 - RNA, 19 nt, Homo sapiens
  misc_RNA (1)...(19): siRNA sense strand
gcacucaagacacaauuag

SEQ ID NO: 1798716 - RNA, 19 nt, Homo sapiens
  misc_RNA (1)...(19): siRNA sense strand
gaaaguaccuaauauccaa

SEQ ID NO: 1798717 - RNA, 19 nt, Homo sapiens
  misc_RNA (1)...(19): siRNA sense strand
ggacagaguucauucaaag

SEQ ID NO: 1798718 - RNA, 19 nt, Homo sapiens
  misc_RNA (1)...(19): siRNA sense strand
gaagggaauuagaaucaug

SEQ ID NO: 1798719 - RNA, 19 nt, Homo sapiens
  misc_RNA (1)...(19): siRNA sense strand
ggaaagaaacauggccaua

SEQ ID NO: 1798720 - RNA, 19 nt, Homo sapiens
  misc_RNA (1)...(19): siRNA sense strand
gaauuagaaucauggagau

SEQ ID NO: 1798721 - RNA, 19 nt, Homo sapiens
  misc_RNA (1)...(19): siRNA sense strand
ucauggagaugcugcuaaa

SEQ ID NO: 1798722 - RNA, 19 nt, Homo sapiens
  misc_RNA (1)...(19): siRNA sense strand
caaagaggcaggauuucaa

SEQ ID NO: 1798723 - RNA, 19 nt, Homo sapiens
  misc_RNA (1)...(19): siRNA sense strand
gaaagaaacauggccauac

SEQ ID NO: 1798724 - RNA, 19 nt, Homo sapiens
  misc_RNA (1)...(19): siRNA sense strand
gcucaauccucgggaaaga

SEQ ID NO: 1798725 - RNA, 19 nt, Homo sapiens
  misc_RNA (1)...(19): siRNA sense strand
cagaagggaauuagaauca

SEQ ID NO: 1798726 - RNA, 19 nt, Homo sapiens
  misc_RNA (1)...(19): siRNA sense strand
ggauuucucaacuguguuu

SEQ ID NO: 1798727 - RNA, 19 nt, Homo sapiens
  misc_RNA (1)...(19): siRNA sense strand
gcccagaagggaauuagaa

SEQ ID NO: 1798728 - RNA, 19 nt, Homo sapiens
  misc_RNA (1)...(19): siRNA sense strand
uggagaugcugcuaaagga

SEQ ID NO: 1798729 - RNA, 19 nt, Homo sapiens
  misc_RNA (1)...(19): siRNA sense strand
gaggagucauggcucaauc

SEQ ID NO: 1798730 - RNA, 19 nt, Homo sapiens
  misc_RNA (1)...(19): siRNA sense strand
aaagaaacauggccauacg

SEQ ID NO: 1798731 - RNA, 19 nt, Homo sapiens
  misc_RNA (1)...(19): siRNA sense strand
ggagaugcugcuaaaggaa

SEQ ID NO: 1798732 - RNA, 19 nt, Homo sapiens
  misc_RNA (1)...(19): siRNA sense strand
ccaauuagaagaggaguca

SEQ ID NO: 1798733 - RNA, 19 nt, Homo sapiens
  misc_RNA (1)...(19): siRNA sense strand
ggacacaguaugcauccau

SEQ ID NO: 1798734 - RNA, 19 nt, Homo sapiens
  misc_RNA (1)...(19): siRNA sense strand
ucaaagaggcaggauuuca

SEQ ID NO: 1798735 - RNA, 19 nt, Homo sapiens
  misc_RNA (1)...(19): siRNA sense strand
uggacagaguucauucaaa

SEQ ID NO: 1798736 - RNA, 19 nt, Homo sapiens
  misc_RNA (1)...(19): siRNA sense strand
ucaauccucgggaaagaaa

SEQ ID NO: 1798737 - RNA, 19 nt, Homo sapiens
  misc_RNA (1)...(19): siRNA sense strand
auucaaagaggcaggauuu

SEQ ID NO: 1798738 - RNA, 19 nt, Homo sapiens
  misc_RNA (1)...(19): siRNA sense strand
caaauuggacagaguucau

SEQ ID NO: 1798739 - RNA, 19 nt, Homo sapiens
  misc_RNA (1)...(19): siRNA sense strand
auacggagucacugccuua

SEQ ID NO: 1798740 - RNA, 19 nt, Homo sapiens
  misc_RNA (1)...(19): siRNA sense strand
caacaggggucaucuacag

SEQ ID NO: 1798741 - RNA, 19 nt, Homo sapiens
  misc_RNA (1)...(19): siRNA sense strand
acagaaagaggauugcaau

SEQ ID NO: 1798742 - RNA, 19 nt, Homo sapiens
  misc_RNA (1)...(19): siRNA sense strand
cggagucacugccuuacgu

SEQ ID NO: 1798743 - RNA, 19 nt, Homo sapiens
  misc_RNA (1)...(19): siRNA sense strand
aaagaggcaggauuucaau

SEQ ID NO: 1798744 - RNA, 19 nt, Homo sapiens
  misc_RNA (1)...(19): siRNA sense strand
gacagaguucauucaaaga

SEQ ID NO: 1798745 - RNA, 19 nt, Homo sapiens
  misc_RNA (1)...(19): siRNA sense strand
augcauccaugaaggaaga

SEQ ID NO: 1798746 - RNA, 19 nt, Homo sapiens
  misc_RNA (1)...(19): siRNA sense strand
ucucaacuguguuuuagaa

SEQ ID NO: 1798747 - RNA, 19 nt, Homo sapiens
  misc_RNA (1)...(19): siRNA sense strand
ugaaaguaccuaauaucca

SEQ ID NO: 1798748 - RNA, 19 nt, Homo sapiens
  misc_RNA (1)...(19): siRNA sense strand
ggugagcauuuugaaagua

SEQ ID NO: 1798749 - RNA, 19 nt, Homo sapiens
  misc_RNA (1)...(19): siRNA sense strand
ccagaagggaauuagaauc

SEQ ID NO: 1798750 - RNA, 19 nt, Homo sapiens
  misc_RNA (1)...(19): siRNA sense strand
ggggucaucuacagaaaga

SEQ ID NO: 1798751 - RNA, 19 nt, Homo sapiens
  misc_RNA (1)...(19): siRNA sense strand
uuggauuucucaacugugu

SEQ ID NO: 1798752 - RNA, 19 nt, Homo sapiens
  misc_RNA (1)...(19): siRNA sense strand
cacaguaugcauccaugaa

SEQ ID NO: 1798753 - RNA, 19 nt, Homo sapiens
  misc_RNA (1)...(19): siRNA sense strand
agaagggaauuagaaucau

SEQ ID NO: 1798754 - RNA, 19 nt, Homo sapiens
  misc_RNA (1)...(19): siRNA sense strand
gaaaguaccuaauauccaa

SEQ ID NO: 1798755 - RNA, 19 nt, Homo sapiens
  misc_RNA (1)...(19): siRNA sense strand
ggacagaguucauucaaag

SEQ ID NO: 1798756 - RNA, 19 nt, Homo sapiens
  misc_RNA (1)...(19): siRNA sense strand
gaagggaauuagaaucaug

SEQ ID NO: 1798757 - RNA, 19 nt, Homo sapiens
  misc_RNA (1)...(19): siRNA sense strand
ggaaagaaacauggccaua

SEQ ID NO: 1798758 - RNA, 19 nt, Homo sapiens
  misc_RNA (1)...(19): siRNA sense strand
gaauuagaaucauggagau

SEQ ID NO: 1798759 - RNA, 19 nt, Homo sapiens
  misc_RNA (1)...(19): siRNA sense strand
ucauggagaugcugcuaaa

SEQ ID NO: 1798760 - RNA, 19 nt, Homo sapiens
  misc_RNA (1)...(19): siRNA sense strand
caaagaggcaggauuucaa

SEQ ID NO: 1798761 - RNA, 19 nt, Homo sapiens
  misc_RNA (1)...(19): siRNA sense strand
gaaagaaacauggccauac

SEQ ID NO: 1798762 - RNA, 19 nt, Homo sapiens
  misc_RNA (1)...(19): siRNA sense strand
gcucaauccucgggaaaga

SEQ ID NO: 1798763 - RNA, 19 nt, Homo sapiens
  misc_RNA (1)...(19): siRNA sense strand
cagaagggaauuagaauca

SEQ ID NO: 1798764 - RNA, 19 nt, Homo sapiens
  misc_RNA (1)...(19): siRNA sense strand
ggauuucucaacuguguuu

SEQ ID NO: 1798765 - RNA, 19 nt, Homo sapiens
  misc_RNA (1)...(19): siRNA sense strand
gcagguggucgccagcuuu

SEQ ID NO: 1798766 - RNA, 19 nt, Homo sapiens
  misc_RNA (1)...(19): siRNA sense strand
gcccagaagggaauuagaa

SEQ ID NO: 1798767 - RNA, 19 nt, Homo sapiens
  misc_RNA (1)...(19): siRNA sense strand
uggagaugcugcuaaagga

SEQ ID NO: 1798768 - RNA, 19 nt, Homo sapiens
  misc_RNA (1)...(19): siRNA sense strand
gaggagucauggcucaauc

SEQ ID NO: 1798769 - RNA, 19 nt, Homo sapiens
  misc_RNA (1)...(19): siRNA sense strand
aaagaaacauggccauacg

SEQ ID NO: 1798770 - RNA, 19 nt, Homo sapiens
  misc_RNA (1)...(19): siRNA sense strand
ggagaugcugcuaaaggaa

SEQ ID NO: 1798771 - RNA, 19 nt, Homo sapiens
  misc_RNA (1)...(19): siRNA sense strand
ccaauuagaagaggaguca

SEQ ID NO: 1798772 - RNA, 19 nt, Homo sapiens
  misc_RNA (1)...(19): siRNA sense strand
ggacacaguaugcauccau

SEQ ID NO: 1798773 - RNA, 19 nt, Homo sapiens
  misc_RNA (1)...(19): siRNA sense strand
ucaaagaggcaggauuuca

SEQ ID NO: 1798774 - RNA, 19 nt, Homo sapiens
  misc_RNA (1)...(19): siRNA sense strand
uggacagaguucauucaaa

SEQ ID NO: 1798775 - RNA, 19 nt, Homo sapiens
  misc_RNA (1)...(19): siRNA sense strand
ucaauccucgggaaagaaa

SEQ ID NO: 1798776 - RNA, 19 nt, Homo sapiens
  misc_RNA (1)...(19): siRNA sense strand
auucaaagaggcaggauuu

SEQ ID NO: 1798777 - RNA, 19 nt, Homo sapiens
  misc_RNA (1)...(19): siRNA sense strand
caaauuggacagaguucau

SEQ ID NO: 1798778 - RNA, 19 nt, Homo sapiens
  misc_RNA (1)...(19): siRNA sense strand
acagaaagaggauugcaau

SEQ ID NO: 1798779 - RNA, 19 nt, Homo sapiens
  misc_RNA (1)...(19): siRNA sense strand
auacggagucacugccuua

SEQ ID NO: 1798780 - RNA, 19 nt, Homo sapiens
  misc_RNA (1)...(19): siRNA sense strand
caacaggggucaucuacag

SEQ ID NO: 1798781 - RNA, 19 nt, Homo sapiens
  misc_RNA (1)...(19): siRNA sense strand
cggagucacugccuuacgu

SEQ ID NO: 1798782 - RNA, 19 nt, Homo sapiens
  misc_RNA (1)...(19): siRNA sense strand
aaagaggcaggauuucaau

SEQ ID NO: 1798783 - RNA, 19 nt, Homo sapiens
  misc_RNA (1)...(19): siRNA sense strand
gacagaguucauucaaaga

SEQ ID NO: 1798784 - RNA, 19 nt, Homo sapiens
  misc_RNA (1)...(19): siRNA sense strand
augcauccaugaaggaaga

SEQ ID NO: 1798785 - RNA, 19 nt, Homo sapiens
  misc_RNA (1)...(19): siRNA sense strand
ucucaacuguguuuuagaa

SEQ ID NO: 1798786 - RNA, 19 nt, Homo sapiens
  misc_RNA (1)...(19): siRNA sense strand
ugaaaguaccuaauaucca

SEQ ID NO: 1798787 - RNA, 19 nt, Homo sapiens
  misc_RNA (1)...(19): siRNA sense strand
ggugagcauuuugaaagua

SEQ ID NO: 1798788 - RNA, 19 nt, Homo sapiens
  misc_RNA (1)...(19): siRNA sense strand
ccagaagggaauuagaauc

SEQ ID NO: 1798789 - RNA, 19 nt, Homo sapiens
  misc_RNA (1)...(19): siRNA sense strand
ggggucaucuacagaaaga

SEQ ID NO: 1798790 - RNA, 19 nt, Homo sapiens
  misc_RNA (1)...(19): siRNA sense strand
uuggauuucucaacugugu

SEQ ID NO: 1798791 - RNA, 19 nt, Homo sapiens
  misc_RNA (1)...(19): siRNA sense strand
cacaguaugcauccaugaa

SEQ ID NO: 1798792 - RNA, 19 nt, Homo sapiens
  misc_RNA (1)...(19): siRNA sense strand
agaagggaauuagaaucau

SEQ ID NO: 1798793 - RNA, 19 nt, Homo sapiens
  misc_RNA (1)...(19): siRNA sense strand
gaaaguaccuaauauccaa

SEQ ID NO: 1798794 - RNA, 19 nt, Homo sapiens
  misc_RNA (1)...(19): siRNA sense strand
ggacagaguucauucaaag

SEQ ID NO: 1798795 - RNA, 19 nt, Homo sapiens
  misc_RNA (1)...(19): siRNA sense strand
gaagggaauuagaaucaug

SEQ ID NO: 1798796 - RNA, 19 nt, Homo sapiens
  misc_RNA (1)...(19): siRNA sense strand
ggaaagaaacauggccaua

SEQ ID NO: 1798797 - RNA, 19 nt, Homo sapiens
  misc_RNA (1)...(19): siRNA sense strand
gaauuagaaucauggagau

SEQ ID NO: 1798798 - RNA, 19 nt, Homo sapiens
  misc_RNA (1)...(19): siRNA sense strand
ucauggagaugcugcuaaa

SEQ ID NO: 1798799 - RNA, 19 nt, Homo sapiens
  misc_RNA (1)...(19): siRNA sense strand
caaagaggcaggauuucaa

SEQ ID NO: 1798800 - RNA, 19 nt, Homo sapiens
  misc_RNA (1)...(19): siRNA sense strand
gaaagaaacauggccauac

SEQ ID NO: 1798801 - RNA, 19 nt, Homo sapiens
  misc_RNA (1)...(19): siRNA sense strand
gcucaauccucgggaaaga

SEQ ID NO: 1798802 - RNA, 19 nt, Homo sapiens
  misc_RNA (1)...(19): siRNA sense strand
cagaagggaauuagaauca

SEQ ID NO: 1798803 - RNA, 19 nt, Homo sapiens
  misc_RNA (1)...(19): siRNA sense strand
ggauuucucaacuguguuu

SEQ ID NO: 1798804 - RNA, 19 nt, Homo sapiens
  misc_RNA (1)...(19): siRNA sense strand
gcccagaagggaauuagaa

SEQ ID NO: 1798805 - RNA, 19 nt, Homo sapiens
  misc_RNA (1)...(19): siRNA sense strand
uggagaugcugcuaaagga

SEQ ID NO: 1798806 - RNA, 19 nt, Homo sapiens
  misc_RNA (1)...(19): siRNA sense strand
gaggagucauggcucaauc

SEQ ID NO: 1798807 - RNA, 19 nt, Homo sapiens
  misc_RNA (1)...(19): siRNA sense strand
aaagaaacauggccauacg

SEQ ID NO: 1798808 - RNA, 19 nt, Homo sapiens
  misc_RNA (1)...(19): siRNA sense strand
ggagaugcugcuaaaggaa

SEQ ID NO: 1798809 - RNA, 19 nt, Homo sapiens
  misc_RNA (1)...(19): siRNA sense strand
ccaauuagaagaggaguca

SEQ ID NO: 1798810 - RNA, 19 nt, Homo sapiens
  misc_RNA (1)...(19): siRNA sense strand
ggacacaguaugcauccau

SEQ ID NO: 1798811 - RNA, 19 nt, Homo sapiens
  misc_RNA (1)...(19): siRNA sense strand
ucaaagaggcaggauuuca

SEQ ID NO: 1798812 - RNA, 19 nt, Homo sapiens
  misc_RNA (1)...(19): siRNA sense strand
uggacagaguucauucaaa

SEQ ID NO: 1798813 - RNA, 19 nt, Homo sapiens
  misc_RNA (1)...(19): siRNA sense strand
ucaauccucgggaaagaaa

SEQ ID NO: 1798814 - RNA, 19 nt, Homo sapiens
  misc_RNA (1)...(19): siRNA sense strand
auucaaagaggcaggauuu

SEQ ID NO: 1798815 - RNA, 19 nt, Homo sapiens
  misc_RNA (1)...(19): siRNA sense strand
caaauuggacagaguucau

SEQ ID NO: 1798816 - RNA, 19 nt, Homo sapiens
  misc_RNA (1)...(19): siRNA sense strand
auacggagucacugccuua

SEQ ID NO: 1798817 - RNA, 19 nt, Homo sapiens
  misc_RNA (1)...(19): siRNA sense strand
caacaggggucaucuacag

SEQ ID NO: 1798818 - RNA, 19 nt, Homo sapiens
  misc_RNA (1)...(19): siRNA sense strand
acagaaagaggauugcaau

SEQ ID NO: 1798819 - RNA, 19 nt, Homo sapiens
  misc_RNA (1)...(19): siRNA sense strand
cggagucacugccuuacgu

SEQ ID NO: 1798820 - RNA, 19 nt, Homo sapiens
  misc_RNA (1)...(19): siRNA sense strand
aaagaggcaggauuucaau

SEQ ID NO: 1798821 - RNA, 19 nt, Homo sapiens
  misc_RNA (1)...(19): siRNA sense strand
gacagaguucauucaaaga

SEQ ID NO: 1798822 - RNA, 19 nt, Homo sapiens
  misc_RNA (1)...(19): siRNA sense strand
augcauccaugaaggaaga

SEQ ID NO: 1798823 - RNA, 19 nt, Homo sapiens
  misc_RNA (1)...(19): siRNA sense strand
ucucaacuguguuuuagaa

SEQ ID NO: 1798824 - RNA, 19 nt, Homo sapiens
  misc_RNA (1)...(19): siRNA sense strand
ugaaaguaccuaauaucca

SEQ ID NO: 1798825 - RNA, 19 nt, Homo sapiens
  misc_RNA (1)...(19): siRNA sense strand
ggugagcauuuugaaagua

SEQ ID NO: 1798826 - RNA, 19 nt, Homo sapiens
  misc_RNA (1)...(19): siRNA sense strand
ccagaagggaauuagaauc

SEQ ID NO: 1798827 - RNA, 19 nt, Homo sapiens
  misc_RNA (1)...(19): siRNA sense strand
ggggucaucuacagaaaga

SEQ ID NO: 1798828 - RNA, 19 nt, Homo sapiens
  misc_RNA (1)...(19): siRNA sense strand
uuggauuucucaacugugu

SEQ ID NO: 1798829 - RNA, 19 nt, Homo sapiens
  misc_RNA (1)...(19): siRNA sense strand
cacaguaugcauccaugaa

SEQ ID NO: 1798830 - RNA, 19 nt, Homo sapiens
  misc_RNA (1)...(19): siRNA sense strand
agaagggaauuagaaucau

SEQ ID NO: 1798831 - RNA, 19 nt, Homo sapiens
  misc_RNA (1)...(19): siRNA sense strand
gaaaguaccuaauauccaa

SEQ ID NO: 1798832 - RNA, 19 nt, Homo sapiens
  misc_RNA (1)...(19): siRNA sense strand
ggacagaguucauucaaag

SEQ ID NO: 1798833 - RNA, 19 nt, Homo sapiens
  misc_RNA (1)...(19): siRNA sense strand
gaagggaauuagaaucaug

SEQ ID NO: 1798834 - RNA, 19 nt, Homo sapiens
  misc_RNA (1)...(19): siRNA sense strand
ggaaagaaacauggccaua

SEQ ID NO: 1798835 - RNA, 19 nt, Homo sapiens
  misc_RNA (1)...(19): siRNA sense strand
gaauuagaaucauggagau

SEQ ID NO: 1798836 - RNA, 19 nt, Homo sapiens
  misc_RNA (1)...(19): siRNA sense strand
ucauggagaugcugcuaaa

SEQ ID NO: 1798837 - RNA, 19 nt, Homo sapiens
  misc_RNA (1)...(19): siRNA sense strand
caaagaggcaggauuucaa

SEQ ID NO: 1798838 - RNA, 19 nt, Homo sapiens
  misc_RNA (1)...(19): siRNA sense strand
gaaagaaacauggccauac

SEQ ID NO: 1798839 - RNA, 19 nt, Homo sapiens
  misc_RNA (1)...(19): siRNA sense strand
gcucaauccucgggaaaga

SEQ ID NO: 1798840 - RNA, 19 nt, Homo sapiens
  misc_RNA (1)...(19): siRNA sense strand
cagaagggaauuagaauca

SEQ ID NO: 1798841 - RNA, 19 nt, Homo sapiens
  misc_RNA (1)...(19): siRNA sense strand
ggauuucucaacuguguuu

SEQ ID NO: 1798842 - RNA, 19 nt, Homo sapiens
  misc_RNA (1)...(19): siRNA sense strand
gcagguggucgccagcuuu

SEQ ID NO: 1798843 - RNA, 19 nt, Homo sapiens
  misc_RNA (1)...(19): siRNA sense strand
gcccagaagggaauuagaa

SEQ ID NO: 1798844 - RNA, 19 nt, Homo sapiens
  misc_RNA (1)...(19): siRNA sense strand
uggagaugcugcuaaagga

SEQ ID NO: 1798845 - RNA, 19 nt, Homo sapiens
  misc_RNA (1)...(19): siRNA sense strand
gaggagucauggcucaauc

SEQ ID NO: 1798846 - RNA, 19 nt, Homo sapiens
  misc_RNA (1)...(19): siRNA sense strand
aaagaaacauggccauacg

SEQ ID NO: 1798847 - RNA, 19 nt, Homo sapiens
  misc_RNA (1)...(19): siRNA sense strand
ggagaugcugcuaaaggaa

SEQ ID NO: 1798848 - RNA, 19 nt, Homo sapiens
  misc_RNA (1)...(19): siRNA sense strand
ccaauuagaagaggaguca

SEQ ID NO: 1798849 - RNA, 19 nt, Homo sapiens
  misc_RNA (1)...(19): siRNA sense strand
ggacacaguaugcauccau

SEQ ID NO: 1798850 - RNA, 19 nt, Homo sapiens
  misc_RNA (1)...(19): siRNA sense strand
ucaaagaggcaggauuuca

SEQ ID NO: 1798851 - RNA, 19 nt, Homo sapiens
  misc_RNA (1)...(19): siRNA sense strand
uggacagaguucauucaaa

SEQ ID NO: 1798852 - RNA, 19 nt, Homo sapiens
  misc_RNA (1)...(19): siRNA sense strand
ucaauccucgggaaagaaa

SEQ ID NO: 1798853 - RNA, 19 nt, Homo sapiens
  misc_RNA (1)...(19): siRNA sense strand
auucaaagaggcaggauuu

SEQ ID NO: 1798854 - RNA, 19 nt, Homo sapiens
  misc_RNA (1)...(19): siRNA sense strand
caaauuggacagaguucau

SEQ ID NO: 1798855 - RNA, 19 nt, Homo sapiens
  misc_RNA (1)...(19): siRNA sense strand
acagaaagaggauugcaau

SEQ ID NO: 1798856 - RNA, 19 nt, Homo sapiens
  misc_RNA (1)...(19): siRNA sense strand
auacggagucacugccuua

SEQ ID NO: 1798857 - RNA, 19 nt, Homo sapiens
  misc_RNA (1)...(19): siRNA sense strand
caacaggggucaucuacag

SEQ ID NO: 1798858 - RNA, 19 nt, Homo sapiens
  misc_RNA (1)...(19): siRNA sense strand
cggagucacugccuuacgu

SEQ ID NO: 1798859 - RNA, 19 nt, Homo sapiens
  misc_RNA (1)...(19): siRNA sense strand
aaagaggcaggauuucaau

SEQ ID NO: 1798860 - RNA, 19 nt, Homo sapiens
  misc_RNA (1)...(19): siRNA sense strand
gacagaguucauucaaaga

SEQ ID NO: 1798861 - RNA, 19 nt, Homo sapiens
  misc_RNA (1)...(19): siRNA sense strand
augcauccaugaaggaaga

SEQ ID NO: 1798862 - RNA, 19 nt, Homo sapiens
  misc_RNA (1)...(19): siRNA sense strand
ucucaacuguguuuuagaa

SEQ ID NO: 1798863 - RNA, 19 nt, Homo sapiens
  misc_RNA (1)...(19): siRNA sense strand
ugaaaguaccuaauaucca

SEQ ID NO: 1798864 - RNA, 19 nt, Homo sapiens
  misc_RNA (1)...(19): siRNA sense strand
ggugagcauuuugaaagua

SEQ ID NO: 1798865 - RNA, 19 nt, Homo sapiens
  misc_RNA (1)...(19): siRNA sense strand
ccagaagggaauuagaauc

SEQ ID NO: 1798866 - RNA, 19 nt, Homo sapiens
  misc_RNA (1)...(19): siRNA sense strand
ggggucaucuacagaaaga

SEQ ID NO: 1798867 - RNA, 19 nt, Homo sapiens
  misc_RNA (1)...(19): siRNA sense strand
uuggauuucucaacugugu

SEQ ID NO: 1798868 - RNA, 19 nt, Homo sapiens
  misc_RNA (1)...(19): siRNA sense strand
cacaguaugcauccaugaa

SEQ ID NO: 1798869 - RNA, 19 nt, Homo sapiens
  misc_RNA (1)...(19): siRNA sense strand
agaagggaauuagaaucau

SEQ ID NO: 1798870 - RNA, 19 nt, Homo sapiens
  misc_RNA (1)...(19): siRNA sense strand
gcaauaaucuucaagguaa

SEQ ID NO: 1798871 - RNA, 19 nt, Homo sapiens
  misc_RNA (1)...(19): siRNA sense strand
ggacugaucuuggcaauaa

SEQ ID NO: 1798872 - RNA, 19 nt, Homo sapiens
  misc_RNA (1)...(19): siRNA sense strand
ggaaauggguguuagguaa

SEQ ID NO: 1798873 - RNA, 19 nt, Homo sapiens
  misc_RNA (1)...(19): siRNA sense strand
gaacaucuuugccauuaug

SEQ ID NO: 1798874 - RNA, 19 nt, Homo sapiens
  misc_RNA (1)...(19): siRNA sense strand
gccaagcccuaaaugauua

SEQ ID NO: 1798875 - RNA, 19 nt, Homo sapiens
  misc_RNA (1)...(19): siRNA sense strand
auagagaacugcaaccuua

SEQ ID NO: 1798876 - RNA, 19 nt, Homo sapiens
  misc_RNA (1)...(19): siRNA sense strand
aaaguugucuugagaauug

SEQ ID NO: 1798877 - RNA, 19 nt, Homo sapiens
  misc_RNA (1)...(19): siRNA sense strand
gaagaacccugacuguaca

SEQ ID NO: 1798878 - RNA, 19 nt, Homo sapiens
  misc_RNA (1)...(19): siRNA sense strand
caccagagcugagaacuuu

SEQ ID NO: 1798879 - RNA, 19 nt, Homo sapiens
  misc_RNA (1)...(19): siRNA sense strand
gaaaugucccucucucgua

SEQ ID NO: 1798880 - RNA, 19 nt, Homo sapiens
  misc_RNA (1)...(19): siRNA sense strand
gaagcggugucaauauuug

SEQ ID NO: 1798881 - RNA, 19 nt, Homo sapiens
  misc_RNA (1)...(19): siRNA sense strand
ucaaguauuuccagaugua

SEQ ID NO: 1798882 - RNA, 19 nt, Homo sapiens
  misc_RNA (1)...(19): siRNA sense strand
ucuaaagacucucauacua

SEQ ID NO: 1798883 - RNA, 19 nt, Homo sapiens
  misc_RNA (1)...(19): siRNA sense strand
caacaaagaaguucaagug

SEQ ID NO: 1798884 - RNA, 19 nt, Homo sapiens
  misc_RNA (1)...(19): siRNA sense strand
gaccucgugucaaagauua

SEQ ID NO: 1798885 - RNA, 19 nt, Homo sapiens
  misc_RNA (1)...(19): siRNA sense strand
ggaaauacaacauguggaa

SEQ ID NO: 1798886 - RNA, 19 nt, Homo sapiens
  misc_RNA (1)...(19): siRNA sense strand
caaagaaguucaagugucu

SEQ ID NO: 1798887 - RNA, 19 nt, Homo sapiens
  misc_RNA (1)...(19): siRNA sense strand
ggucugcucuggucugaaa

SEQ ID NO: 1798888 - RNA, 19 nt, Homo sapiens
  misc_RNA (1)...(19): siRNA sense strand
gcucacaucuacccucauu

SEQ ID NO: 1798889 - RNA, 19 nt, Homo sapiens
  misc_RNA (1)...(19): siRNA sense strand
ucgaacaucuuugccauua

SEQ ID NO: 1798890 - RNA, 19 nt, Homo sapiens
  misc_RNA (1)...(19): siRNA sense strand
ggaaggagaaucugguaaa

SEQ ID NO: 1798891 - RNA, 19 nt, Homo sapiens
  misc_RNA (1)...(19): siRNA sense strand
uaucccagauuaauccuua

SEQ ID NO: 1798892 - RNA, 19 nt, Homo sapiens
  misc_RNA (1)...(19): siRNA sense strand
gaagagagaagaggucauu

SEQ ID NO: 1798893 - RNA, 19 nt, Homo sapiens
  misc_RNA (1)...(19): siRNA sense strand
caagguaacgggcaucuaa

SEQ ID NO: 1798894 - RNA, 19 nt, Homo sapiens
  misc_RNA (1)...(19): siRNA sense strand
gaacccugacuguacauua

SEQ ID NO: 1798895 - RNA, 19 nt, Homo sapiens
  misc_RNA (1)...(19): siRNA sense strand
uuaauagccugaaggauga

SEQ ID NO: 1798896 - RNA, 19 nt, Homo sapiens
  misc_RNA (1)...(19): siRNA sense strand
gggcagaggugguucaucu

SEQ ID NO: 1798897 - RNA, 19 nt, Homo sapiens
  misc_RNA (1)...(19): siRNA sense strand
ugucaaagauuauguccaa

SEQ ID NO: 1798898 - RNA, 19 nt, Homo sapiens
  misc_RNA (1)...(19): siRNA sense strand
gaaaacgccuugaaagaug

SEQ ID NO: 1798899 - RNA, 19 nt, Homo sapiens
  misc_RNA (1)...(19): siRNA sense strand
gcacaggaaauggguguua

SEQ ID NO: 1798900 - RNA, 19 nt, Homo sapiens
  misc_RNA (1)...(19): siRNA sense strand
ucauaccucuguugcauaa

SEQ ID NO: 1798901 - RNA, 19 nt, Homo sapiens
  misc_RNA (1)...(19): siRNA sense strand
uaaagacucucauacuaag

SEQ ID NO: 1798902 - RNA, 19 nt, Homo sapiens
  misc_RNA (1)...(19): siRNA sense strand
caaggugucuuucgguaau

SEQ ID NO: 1798903 - RNA, 19 nt, Homo sapiens
  misc_RNA (1)...(19): siRNA sense strand
gagaggcugucgauagaga

SEQ ID NO: 1798904 - RNA, 19 nt, Homo sapiens
  misc_RNA (1)...(19): siRNA sense strand
ucauaaaguugucuugaga

SEQ ID NO: 1798905 - RNA, 19 nt, Homo sapiens
  misc_RNA (1)...(19): siRNA sense strand
ggacuugaaugugggagaa

SEQ ID NO: 1798906 - RNA, 19 nt, Homo sapiens
  misc_RNA (1)...(19): siRNA sense strand
cuaaagacucucauacuaa

SEQ ID NO: 1798907 - RNA, 19 nt, Homo sapiens
  misc_RNA (1)...(19): siRNA sense strand
gaaauggguguuagguaaa

SEQ ID NO: 1798908 - RNA, 19 nt, Homo sapiens
  misc_RNA (1)...(19): siRNA sense strand
gguguuagguaaagaagau

SEQ ID NO: 1798909 - RNA, 19 nt, Homo sapiens
  misc_RNA (1)...(19): siRNA sense strand
uuuaauugcugucaggaua

SEQ ID NO: 1798910 - RNA, 19 nt, Homo sapiens
  misc_RNA (1)...(19): siRNA sense strand
caccugagcuuggcagaaa

SEQ ID NO: 1798911 - RNA, 19 nt, Homo sapiens
  misc_RNA (1)...(19): siRNA sense strand
gugaauagcaccauguuga

SEQ ID NO: 1798912 - RNA, 19 nt, Homo sapiens
  misc_RNA (1)...(19): siRNA sense strand
ggaaacugcugaaagucau

SEQ ID NO: 1798913 - RNA, 19 nt, Homo sapiens
  misc_RNA (1)...(19): siRNA sense strand
aaaugucccucucucguaa

SEQ ID NO: 1798914 - RNA, 19 nt, Homo sapiens
  misc_RNA (1)...(19): siRNA sense strand
agaggaaacugcugaaagu

SEQ ID NO: 1798915 - RNA, 19 nt, Homo sapiens
  misc_RNA (1)...(19): siRNA sense strand
ggaggaagccuuuguaagc

SEQ ID NO: 1798916 - RNA, 19 nt, Homo sapiens
  misc_RNA (1)...(19): siRNA sense strand
ggugguucaucucuugaua

SEQ ID NO: 1798917 - RNA, 19 nt, Homo sapiens
  misc_RNA (1)...(19): siRNA sense strand
ugagaaacgugagccauga

SEQ ID NO: 1798918 - RNA, 19 nt, Homo sapiens
  misc_RNA (1)...(19): siRNA sense strand
agacuuaugcucuguguuu

SEQ ID NO: 1798919 - RNA, 19 nt, Homo sapiens
  misc_RNA (1)...(19): siRNA sense strand
cgguauaaaucgaauguga

SEQ ID NO: 1798920 - RNA, 19 nt, Homo sapiens
  misc_RNA (1)...(19): siRNA sense strand
cugaagcggugucaauauu

SEQ ID NO: 1798921 - RNA, 19 nt, Homo sapiens
  misc_RNA (1)...(19): siRNA sense strand
gaaagucauaccucuguug

SEQ ID NO: 1798922 - RNA, 19 nt, Homo sapiens
  misc_RNA (1)...(19): siRNA sense strand
uaugggacauuacgacuug

SEQ ID NO: 1798923 - RNA, 19 nt, Homo sapiens
  misc_RNA (1)...(19): siRNA sense strand
aaucaaguauuuccagaug

SEQ ID NO: 1798924 - RNA, 19 nt, Homo sapiens
  misc_RNA (1)...(19): siRNA sense strand
ggcaauaaucuucaaggua

SEQ ID NO: 1798925 - RNA, 19 nt, Homo sapiens
  misc_RNA (1)...(19): siRNA sense strand
ugagauacuuggaaauaca

SEQ ID NO: 1798926 - RNA, 19 nt, Homo sapiens
  misc_RNA (1)...(19): siRNA sense strand
gagaauuggcaacaacaaa

SEQ ID NO: 1798927 - RNA, 19 nt, Homo sapiens
  misc_RNA (1)...(19): siRNA sense strand
gagaauugcaggugaggaa

SEQ ID NO: 1798928 - RNA, 19 nt, Homo sapiens
  misc_RNA (1)...(19): siRNA sense strand
gagaaacacaggugaaucu

SEQ ID NO: 1798929 - RNA, 19 nt, Homo sapiens
  misc_RNA (1)...(19): siRNA sense strand
gagcaagaaugcgauugga

SEQ ID NO: 1798930 - RNA, 19 nt, Homo sapiens
  misc_RNA (1)...(19): siRNA sense strand
gaucuuggcaauaaucuuc

SEQ ID NO: 1798931 - RNA, 19 nt, Homo sapiens
  misc_RNA (1)...(19): siRNA sense strand
guacuuaccaugucugcuu

SEQ ID NO: 1798932 - RNA, 19 nt, Homo sapiens
  misc_RNA (1)...(19): siRNA sense strand
aggagaaucugguaaaaua

SEQ ID NO: 1798933 - RNA, 19 nt, Homo sapiens
  misc_RNA (1)...(19): siRNA sense strand
gaaugcgauuggagucuau

SEQ ID NO: 1798934 - RNA, 19 nt, Homo sapiens
  misc_RNA (1)...(19): siRNA sense strand
uggagaggcugucgauaga

SEQ ID NO: 1798935 - RNA, 19 nt, Homo sapiens
  misc_RNA (1)...(19): siRNA sense strand
gcaaggugucuuucgguaa

SEQ ID NO: 1798936 - RNA, 19 nt, Homo sapiens
  misc_RNA (1)...(19): siRNA sense strand
gcugagaacuuuuccagaa

SEQ ID NO: 1798937 - RNA, 19 nt, Homo sapiens
  misc_RNA (1)...(19): siRNA sense strand
acacagucauguccaaaug

SEQ ID NO: 1798938 - RNA, 19 nt, Homo sapiens
  misc_RNA (1)...(19): siRNA sense strand
ucacaucuacccucauuga

SEQ ID NO: 1798939 - RNA, 19 nt, Homo sapiens
  misc_RNA (1)...(19): siRNA sense strand
ggacucgaauaacuagcuu

SEQ ID NO: 1798940 - RNA, 19 nt, Homo sapiens
  misc_RNA (1)...(19): siRNA sense strand
gacugccuaucccagauua

SEQ ID NO: 1798941 - RNA, 19 nt, Homo sapiens
  misc_RNA (1)...(19): siRNA sense strand
gaaggagaaucugguaaaa

SEQ ID NO: 1798942 - RNA, 19 nt, Homo sapiens
  misc_RNA (1)...(19): siRNA sense strand
gcgauuggagucuauggua

SEQ ID NO: 1798943 - RNA, 19 nt, Homo sapiens
  misc_RNA (1)...(19): siRNA sense strand
caacaacaaagaaguucaa

SEQ ID NO: 1798944 - RNA, 19 nt, Homo sapiens
  misc_RNA (1)...(19): siRNA sense strand
gaauuggcaacaacaaaga

SEQ ID NO: 1798945 - RNA, 19 nt, Homo sapiens
  misc_RNA (1)...(19): siRNA sense strand
gaaacugcugaaagucaua

SEQ ID NO: 1798946 - RNA, 19 nt, Homo sapiens
  misc_RNA (1)...(19): siRNA sense strand
ccaccaagcacaacuggaa

SEQ ID NO: 1798947 - RNA, 19 nt, Homo sapiens
  misc_RNA (1)...(19): siRNA sense strand
gaggaguacuuaccauguc

SEQ ID NO: 1798948 - RNA, 19 nt, Homo sapiens
  misc_RNA (1)...(19): siRNA sense strand
acucacaguucucauauuc

SEQ ID NO: 1798949 - RNA, 19 nt, Homo sapiens
  misc_RNA (1)...(19): siRNA sense strand
gaggaaggagaaucuggua

SEQ ID NO: 1798950 - RNA, 19 nt, Homo sapiens
  misc_RNA (1)...(19): siRNA sense strand
ggaaacaaucucacacagu

SEQ ID NO: 1798951 - RNA, 19 nt, Homo sapiens
  misc_RNA (1)...(19): siRNA sense strand
guauaaaucgaaugugaug

SEQ ID NO: 1798952 - RNA, 19 nt, Homo sapiens
  misc_RNA (1)...(19): siRNA sense strand
ugagacaucuggacuugag

SEQ ID NO: 1798953 - RNA, 19 nt, Homo sapiens
  misc_RNA (1)...(19): siRNA sense strand
aaagcuaucucucucacau

SEQ ID NO: 1798954 - RNA, 19 nt, Homo sapiens
  misc_RNA (1)...(19): siRNA sense strand
cuacugaucaugauaagau

SEQ ID NO: 1798955 - RNA, 19 nt, Homo sapiens
  misc_RNA (1)...(19): siRNA sense strand
gaaaccagagggacuucuu

SEQ ID NO: 1798956 - RNA, 19 nt, Homo sapiens
  misc_RNA (1)...(19): siRNA sense strand
uaaaucgaaugugauggaa

SEQ ID NO: 1798957 - RNA, 19 nt, Homo sapiens
  misc_RNA (1)...(19): siRNA sense strand
gaacugugauaaaaugugu

SEQ ID NO: 1798958 - RNA, 19 nt, Homo sapiens
  misc_RNA (1)...(19): siRNA sense strand
gaagaggucauuuucugua

SEQ ID NO: 1798959 - RNA, 19 nt, Homo sapiens
  misc_RNA (1)...(19): siRNA sense strand
gcucuguguuugcaacgaa

SEQ ID NO: 1798960 - RNA, 19 nt, Homo sapiens
  misc_RNA (1)...(19): siRNA sense strand
caagacuuaugcucugugu

SEQ ID NO: 1798961 - RNA, 19 nt, Homo sapiens
  misc_RNA (1)...(19): siRNA sense strand
gcucuuggauggcuuugag

SEQ ID NO: 1798962 - RNA, 19 nt, Homo sapiens
  misc_RNA (1)...(19): siRNA sense strand
gauaaaauguguguuguag

SEQ ID NO: 1798963 - RNA, 19 nt, Homo sapiens
  misc_RNA (1)...(19): siRNA sense strand
ugaagaacccugacuguac

SEQ ID NO: 1798964 - RNA, 19 nt, Homo sapiens
  misc_RNA (1)...(19): siRNA sense strand
uaacgggcaucuaaagacu

SEQ ID NO: 1798965 - RNA, 19 nt, Homo sapiens
  misc_RNA (1)...(19): siRNA sense strand
ccaaaugccaccucugugu

SEQ ID NO: 1798966 - RNA, 19 nt, Homo sapiens
  misc_RNA (1)...(19): siRNA sense strand
ccaagaccguggccauaca

SEQ ID NO: 1798967 - RNA, 19 nt, Homo sapiens
  misc_RNA (1)...(19): siRNA sense strand
ucuuuacccucgugacuuu

SEQ ID NO: 1798968 - RNA, 19 nt, Homo sapiens
  misc_RNA (1)...(19): siRNA sense strand
ucugagauacuuggaaaua

SEQ ID NO: 1798969 - RNA, 19 nt, Homo sapiens
  misc_RNA (1)...(19): siRNA sense strand
gaaguucaagugucugcuu

SEQ ID NO: 1798970 - RNA, 19 nt, Homo sapiens
  misc_RNA (1)...(19): siRNA sense strand
gcacagagcucgggaugua

SEQ ID NO: 1798971 - RNA, 19 nt, Homo sapiens
  misc_RNA (1)...(19): siRNA sense strand
gagcaagcaugcccaguuu

SEQ ID NO: 1798972 - RNA, 19 nt, Homo sapiens
  misc_RNA (1)...(19): siRNA sense strand
ggaagguccuggcccuguu

SEQ ID NO: 1798973 - RNA, 19 nt, Homo sapiens
  misc_RNA (1)...(19): siRNA sense strand
uggaugggcugguggauga

SEQ ID NO: 1798974 - RNA, 19 nt, Homo sapiens
  misc_RNA (1)...(19): siRNA sense strand
gugaugaaguuuaacaagu

SEQ ID NO: 1798975 - RNA, 19 nt, Homo sapiens
  misc_RNA (1)...(19): siRNA sense strand
gaugaaguuuaacaaguuc

SEQ ID NO: 1798976 - RNA, 19 nt, Homo sapiens
  misc_RNA (1)...(19): siRNA sense strand
ggagcaagcaugcccaguu

SEQ ID NO: 1798977 - RNA, 19 nt, Homo sapiens
  misc_RNA (1)...(19): siRNA sense strand
ucaacaaguucgaccucua

SEQ ID NO: 1798978 - RNA, 19 nt, Homo sapiens
  misc_RNA (1)...(19): siRNA sense strand
acccagagguggccaaaga

SEQ ID NO: 1798979 - RNA, 19 nt, Homo sapiens
  misc_RNA (1)...(19): siRNA sense strand
ggaaggcccacccagacaa

SEQ ID NO: 1798980 - RNA, 19 nt, Homo sapiens
  misc_RNA (1)...(19): siRNA sense strand
uguaccaggugaugaaguu

SEQ ID NO: 1798981 - RNA, 19 nt, Homo sapiens
  misc_RNA (1)...(19): siRNA sense strand
ccugaggcuuucuacauga

SEQ ID NO: 1798982 - RNA, 19 nt, Homo sapiens
  misc_RNA (1)...(19): siRNA sense strand
ccaaagacaaggccagcuu

SEQ ID NO: 1798983 - RNA, 19 nt, Homo sapiens
  misc_RNA (1)...(19): siRNA sense strand
gcaagcaugcccaguuugg

SEQ ID NO: 1798984 - RNA, 19 nt, Homo sapiens
  misc_RNA (1)...(19): siRNA sense strand
caacaaguucgaccucuac

SEQ ID NO: 1798985 - RNA, 19 nt, Homo sapiens
  misc_RNA (1)...(19): siRNA sense strand
uaccaggugaugaaguuua

SEQ ID NO: 1798986 - RNA, 19 nt, Homo sapiens
  misc_RNA (1)...(19): siRNA sense strand
accaggugaugaaguuuaa

SEQ ID NO: 1798987 - RNA, 19 nt, Homo sapiens
  misc_RNA (1)...(19): siRNA sense strand
gugcgggaguucaacaagu

SEQ ID NO: 1798988 - RNA, 19 nt, Homo sapiens
  misc_RNA (1)...(19): siRNA sense strand
ugcgggaguucaacaaguu

SEQ ID NO: 1798989 - RNA, 19 nt, Homo sapiens
  misc_RNA (1)...(19): siRNA sense strand
cccugaggcuuucuacaug

SEQ ID NO: 1798990 - RNA, 19 nt, Homo sapiens
  misc_RNA (1)...(19): siRNA sense strand
gaagguccuggcccuguuc

SEQ ID NO: 1798991 - RNA, 19 nt, Homo sapiens
  misc_RNA (1)...(19): siRNA sense strand
gcaccagacaguggacuuc

SEQ ID NO: 1798992 - RNA, 19 nt, Homo sapiens
  misc_RNA (1)...(19): siRNA sense strand
gaaguuuaacaaguucuca

SEQ ID NO: 1798993 - RNA, 19 nt, Homo sapiens
  misc_RNA (1)...(19): siRNA sense strand
gaaggcccacccagacaag

SEQ ID NO: 1798994 - RNA, 19 nt, Homo sapiens
  misc_RNA (1)...(19): siRNA sense strand
ggugaugaaguuuaacaag

SEQ ID NO: 1798995 - RNA, 19 nt, Homo sapiens
  misc_RNA (1)...(19): siRNA sense strand
ccuccaggauccucgauac

SEQ ID NO: 1798996 - RNA, 19 nt, Homo sapiens
  misc_RNA (1)...(19): siRNA sense strand
acauguaccaggugaugaa

SEQ ID NO: 1798997 - RNA, 19 nt, Homo sapiens
  misc_RNA (1)...(19): siRNA sense strand
ggacccagagguggccaaa

SEQ ID NO: 1798998 - RNA, 19 nt, Homo sapiens
  misc_RNA (1)...(19): siRNA sense strand
gcucagaccuuacacauag

SEQ ID NO: 1798999 - RNA, 19 nt, Homo sapiens
  misc_RNA (1)...(19): siRNA sense strand
ggacaucaccuuucaguau

SEQ ID NO: 1799000 - RNA, 19 nt, Homo sapiens
  misc_RNA (1)...(19): siRNA sense strand
gaaagaaugaggagaccua

SEQ ID NO: 1799001 - RNA, 19 nt, Homo sapiens
  misc_RNA (1)...(19): siRNA sense strand
gacaucaccuuucaguauu

SEQ ID NO: 1799002 - RNA, 19 nt, Homo sapiens
  misc_RNA (1)...(19): siRNA sense strand
ggaagaagaggaaauggaa

SEQ ID NO: 1799003 - RNA, 19 nt, Homo sapiens
  misc_RNA (1)...(19): siRNA sense strand
aaauuugagucccucuuua

SEQ ID NO: 1799004 - RNA, 19 nt, Homo sapiens
  misc_RNA (1)...(19): siRNA sense strand
ggaaaggaaaugaaguuau

SEQ ID NO: 1799005 - RNA, 19 nt, Homo sapiens
  misc_RNA (1)...(19): siRNA sense strand
gaggaaauggaaagaauga

SEQ ID NO: 1799006 - RNA, 19 nt, Homo sapiens
  misc_RNA (1)...(19): siRNA sense strand
caaauuugagucccucuuu

SEQ ID NO: 1799007 - RNA, 19 nt, Homo sapiens
  misc_RNA (1)...(19): siRNA sense strand
gaaggaggaagaagaggaa

SEQ ID NO: 1799008 - RNA, 19 nt, Homo sapiens
  misc_RNA (1)...(19): siRNA sense strand
gacaagcaguuucugaucu

SEQ ID NO: 1799009 - RNA, 19 nt, Homo sapiens
  misc_RNA (1)...(19): siRNA sense strand
gaagaggaaauggaaagaa

SEQ ID NO: 1799010 - RNA, 19 nt, Homo sapiens
  misc_RNA (1)...(19): siRNA sense strand
gaagaagaggaaauggaaa

SEQ ID NO: 1799011 - RNA, 19 nt, Homo sapiens
  misc_RNA (1)...(19): siRNA sense strand
ucaaacgagucagaauaaa

SEQ ID NO: 1799012 - RNA, 19 nt, Homo sapiens
  misc_RNA (1)...(19): siRNA sense strand
aagaggaaauggaaagaau

SEQ ID NO: 1799013 - RNA, 19 nt, Homo sapiens
  misc_RNA (1)...(19): siRNA sense strand
gggaaaggaaaugaaguua

SEQ ID NO: 1799014 - RNA, 19 nt, Homo sapiens
  misc_RNA (1)...(19): siRNA sense strand
gcauaagacugaguuucug

SEQ ID NO: 1799015 - RNA, 19 nt, Homo sapiens
  misc_RNA (1)...(19): siRNA sense strand
ggaggaagaagaggaaaug

SEQ ID NO: 1799016 - RNA, 19 nt, Homo sapiens
  misc_RNA (1)...(19): siRNA sense strand
acuaugaucucuuauaugc

SEQ ID NO: 1799017 - RNA, 19 nt, Homo sapiens
  misc_RNA (1)...(19): siRNA sense strand
gacuggagcuucauugacu

SEQ ID NO: 1799018 - RNA, 19 nt, Homo sapiens
  misc_RNA (1)...(19): siRNA sense strand
ccagugggauggaaacaag

SEQ ID NO: 1799019 - RNA, 19 nt, Homo sapiens
  misc_RNA (1)...(19): siRNA sense strand
cuucaaacgagucagaaua

SEQ ID NO: 1799020 - RNA, 19 nt, Homo sapiens
  misc_RNA (1)...(19): siRNA sense strand
gauggaaacaaguggaaga

SEQ ID NO: 1799021 - RNA, 19 nt, Homo sapiens
  misc_RNA (1)...(19): siRNA sense strand
ugagagugaucaagagaag

SEQ ID NO: 1799022 - RNA, 19 nt, Homo sapiens
  misc_RNA (1)...(19): siRNA sense strand
ggacguaugacaaggacau

SEQ ID NO: 1799023 - RNA, 19 nt, Homo sapiens
  misc_RNA (1)...(19): siRNA sense strand
gaggagaccuaagccaaaa

SEQ ID NO: 1799024 - RNA, 19 nt, Homo sapiens
  misc_RNA (1)...(19): siRNA sense strand
acaucaccuuucaguauuu

SEQ ID NO: 1799025 - RNA, 19 nt, Homo sapiens
  misc_RNA (1)...(19): siRNA sense strand
ugaggagaccuaagccaaa

SEQ ID NO: 1799026 - RNA, 19 nt, Homo sapiens
  misc_RNA (1)...(19): siRNA sense strand
gagcuucaaacgagucaga

SEQ ID NO: 1799027 - RNA, 19 nt, Homo sapiens
  misc_RNA (1)...(19): siRNA sense strand
caaacgagucagaauaaac

SEQ ID NO: 1799028 - RNA, 19 nt, Homo sapiens
  misc_RNA (1)...(19): siRNA sense strand
uaugugagagugaucaaga

SEQ ID NO: 1799029 - RNA, 19 nt, Homo sapiens
  misc_RNA (1)...(19): siRNA sense strand
aaacgagucagaauaaacu

SEQ ID NO: 1799030 - RNA, 19 nt, Homo sapiens
  misc_RNA (1)...(19): siRNA sense strand
uucaaacgagucagaauaa

SEQ ID NO: 1799031 - RNA, 19 nt, Homo sapiens
  misc_RNA (1)...(19): siRNA sense strand
gcgacuggagcuucauuga

SEQ ID NO: 1799032 - RNA, 19 nt, Homo sapiens
  misc_RNA (1)...(19): siRNA sense strand
caaauccagacaagcaguu

SEQ ID NO: 1799033 - RNA, 19 nt, Homo sapiens
  misc_RNA (1)...(19): siRNA sense strand
aagagaaggaggaagaaga

SEQ ID NO: 1799034 - RNA, 19 nt, Homo sapiens
  misc_RNA (1)...(19): siRNA sense strand
cgagucagaauaaacuuca

SEQ ID NO: 1799035 - RNA, 19 nt, Homo sapiens
  misc_RNA (1)...(19): siRNA sense strand
gccaggcuccagcugcaua

SEQ ID NO: 1799036 - RNA, 19 nt, Homo sapiens
  misc_RNA (1)...(19): siRNA sense strand
gggauggaaacaaguggaa

SEQ ID NO: 1799037 - RNA, 19 nt, Homo sapiens
  misc_RNA (1)...(19): siRNA sense strand
acaagcaguuucugaucuc

SEQ ID NO: 1799038 - RNA, 19 nt, Homo sapiens
  misc_RNA (1)...(19): siRNA sense strand
ugggaaaggaaaugaaguu

SEQ ID NO: 1799039 - RNA, 19 nt, Homo sapiens
  misc_RNA (1)...(19): siRNA sense strand
uauaugccaucuccaagcu

SEQ ID NO: 1799040 - RNA, 19 nt, Homo sapiens
  misc_RNA (1)...(19): siRNA sense strand
cagcguggugguccaugua

SEQ ID NO: 1799041 - RNA, 19 nt, Homo sapiens
  misc_RNA (1)...(19): siRNA sense strand
ccagcguggugguccaugu

SEQ ID NO: 1799042 - RNA, 19 nt, Homo sapiens
  misc_RNA (1)...(19): siRNA sense strand
agagugaucaagagaagga

SEQ ID NO: 1799043 - RNA, 19 nt, Homo sapiens
  misc_RNA (1)...(19): siRNA sense strand
aaagaaugaggagaccuaa

SEQ ID NO: 1799044 - RNA, 19 nt, Homo sapiens
  misc_RNA (1)...(19): siRNA sense strand
agacaagcaguuucugauc

SEQ ID NO: 1799045 - RNA, 19 nt, Homo sapiens
  misc_RNA (1)...(19): siRNA sense strand
ccauguaugugagagugau

SEQ ID NO: 1799046 - RNA, 19 nt, Homo sapiens
  misc_RNA (1)...(19): siRNA sense strand
ggaagaggcucgggacaua

SEQ ID NO: 1799047 - RNA, 19 nt, Homo sapiens
  misc_RNA (1)...(19): siRNA sense strand
ccagagggauugccacaua

SEQ ID NO: 1799048 - RNA, 19 nt, Homo sapiens
  misc_RNA (1)...(19): siRNA sense strand
acaaaugucuguagaagaa

SEQ ID NO: 1799049 - RNA, 19 nt, Homo sapiens
  misc_RNA (1)...(19): siRNA sense strand
gagcauagcccuucagaau

SEQ ID NO: 1799050 - RNA, 19 nt, Homo sapiens
  misc_RNA (1)...(19): siRNA sense strand
gaucauugccacaguguua

SEQ ID NO: 1799051 - RNA, 19 nt, Homo sapiens
  misc_RNA (1)...(19): siRNA sense strand
ggaauuggcugaggacaug

SEQ ID NO: 1799052 - RNA, 19 nt, Homo sapiens
  misc_RNA (1)...(19): siRNA sense strand
ggaaauggaagaagaagaa

SEQ ID NO: 1799053 - RNA, 19 nt, Homo sapiens
  misc_RNA (1)...(19): siRNA sense strand
caacuugucucagaauuug

SEQ ID NO: 1799054 - RNA, 19 nt, Homo sapiens
  misc_RNA (1)...(19): siRNA sense strand
gaaggaauuucuaccugaa

SEQ ID NO: 1799055 - RNA, 19 nt, Homo sapiens
  misc_RNA (1)...(19): siRNA sense strand
gaggaugccuucuacaguu

SEQ ID NO: 1799056 - RNA, 19 nt, Homo sapiens
  misc_RNA (1)...(19): siRNA sense strand
gggcuuagcuggaaggaau

SEQ ID NO: 1799057 - RNA, 19 nt, Homo sapiens
  misc_RNA (1)...(19): siRNA sense strand
gaacagaagguggaguaua

SEQ ID NO: 1799058 - RNA, 19 nt, Homo sapiens
  misc_RNA (1)...(19): siRNA sense strand
gcaaaccgguuccagaauc

SEQ ID NO: 1799059 - RNA, 19 nt, Homo sapiens
  misc_RNA (1)...(19): siRNA sense strand
guuaaugaccgaagauaua

SEQ ID NO: 1799060 - RNA, 19 nt, Homo sapiens
  misc_RNA (1)...(19): siRNA sense strand
caaagaugaugaugagguu

SEQ ID NO: 1799061 - RNA, 19 nt, Homo sapiens
  misc_RNA (1)...(19): siRNA sense strand
agaaggaguuugagaaaga

SEQ ID NO: 1799062 - RNA, 19 nt, Homo sapiens
  misc_RNA (1)...(19): siRNA sense strand
gggaacagaaguaugaaua

SEQ ID NO: 1799063 - RNA, 19 nt, Homo sapiens
  misc_RNA (1)...(19): siRNA sense strand
gaauauaagucagaucagu

SEQ ID NO: 1799064 - RNA, 19 nt, Homo sapiens
  misc_RNA (1)...(19): siRNA sense strand
ccacagaaagcacagauaa

SEQ ID NO: 1799065 - RNA, 19 nt, Homo sapiens
  misc_RNA (1)...(19): siRNA sense strand
agacuucacuccauccuuu

SEQ ID NO: 1799066 - RNA, 19 nt, Homo sapiens
  misc_RNA (1)...(19): siRNA sense strand
acagaaagcacagauaaua

SEQ ID NO: 1799067 - RNA, 19 nt, Homo sapiens
  misc_RNA (1)...(19): siRNA sense strand
cgaaagcuguuguugaauc

SEQ ID NO: 1799068 - RNA, 19 nt, Homo sapiens
  misc_RNA (1)...(19): siRNA sense strand
agacaaagaugaugaugag

SEQ ID NO: 1799069 - RNA, 19 nt, Homo sapiens
  misc_RNA (1)...(19): siRNA sense strand
uggagaagcugcugaagga

SEQ ID NO: 1799070 - RNA, 19 nt, Homo sapiens
  misc_RNA (1)...(19): siRNA sense strand
uaccaaggguuguaugaaa

SEQ ID NO: 1799071 - RNA, 19 nt, Homo sapiens
  misc_RNA (1)...(19): siRNA sense strand
gaaccacgcaagaucauug

SEQ ID NO: 1799072 - RNA, 19 nt, Homo sapiens
  misc_RNA (1)...(19): siRNA sense strand
gaacaucgagagcacauca

SEQ ID NO: 1799073 - RNA, 19 nt, Homo sapiens
  misc_RNA (1)...(19): siRNA sense strand
caacuucucuguggccuau

SEQ ID NO: 1799074 - RNA, 19 nt, Homo sapiens
  misc_RNA (1)...(19): siRNA sense strand
guggaagccucuaaaccua

SEQ ID NO: 1799075 - RNA, 19 nt, Homo sapiens
  misc_RNA (1)...(19): siRNA sense strand
gaauaucuccaucucaaug

SEQ ID NO: 1799076 - RNA, 19 nt, Homo sapiens
  misc_RNA (1)...(19): siRNA sense strand
gaggacgccugaaggaaga

SEQ ID NO: 1799077 - RNA, 19 nt, Homo sapiens
  misc_RNA (1)...(19): siRNA sense strand
gaauggaucaguauuucaa

SEQ ID NO: 1799078 - RNA, 19 nt, Homo sapiens
  misc_RNA (1)...(19): siRNA sense strand
uaaggaggcugagauggaa

SEQ ID NO: 1799079 - RNA, 19 nt, Homo sapiens
  misc_RNA (1)...(19): siRNA sense strand
ggaagaagaagaagaagag

SEQ ID NO: 1799080 - RNA, 19 nt, Homo sapiens
  misc_RNA (1)...(19): siRNA sense strand
gauguuaacagaggcaaua

SEQ ID NO: 1799081 - RNA, 19 nt, Homo sapiens
  misc_RNA (1)...(19): siRNA sense strand
ggacucaaaggaagacaaa

SEQ ID NO: 1799082 - RNA, 19 nt, Homo sapiens
  misc_RNA (1)...(19): siRNA sense strand
gaaauccaaggcuaucauu

SEQ ID NO: 1799083 - RNA, 19 nt, Homo sapiens
  misc_RNA (1)...(19): siRNA sense strand
uccgaaagcuguuguugaa

SEQ ID NO: 1799084 - RNA, 19 nt, Homo sapiens
  misc_RNA (1)...(19): siRNA sense strand
uaagaaccaugaugaagag

SEQ ID NO: 1799085 - RNA, 19 nt, Homo sapiens
  misc_RNA (1)...(19): siRNA sense strand
ggaacagaaguaugaauau

SEQ ID NO: 1799086 - RNA, 19 nt, Homo sapiens
  misc_RNA (1)...(19): siRNA sense strand
gaugaagagucccuugagu

SEQ ID NO: 1799087 - RNA, 19 nt, Homo sapiens
  misc_RNA (1)...(19): siRNA sense strand
ggaggagucugaccacaac

SEQ ID NO: 1799088 - RNA, 19 nt, Homo sapiens
  misc_RNA (1)...(19): siRNA sense strand
gaacugguaacacccauuc

SEQ ID NO: 1799089 - RNA, 19 nt, Homo sapiens
  misc_RNA (1)...(19): siRNA sense strand
gcauagcccuucagaaucc

SEQ ID NO: 1799090 - RNA, 19 nt, Homo sapiens
  misc_RNA (1)...(19): siRNA sense strand
caugacggcugucugcuau

SEQ ID NO: 1799091 - RNA, 19 nt, Homo sapiens
  misc_RNA (1)...(19): siRNA sense strand
gggacacuaugacaacuau

SEQ ID NO: 1799092 - RNA, 19 nt, Homo sapiens
  misc_RNA (1)...(19): siRNA sense strand
gaaagacaaagaugaugau

SEQ ID NO: 1799093 - RNA, 19 nt, Homo sapiens
  misc_RNA (1)...(19): siRNA sense strand
ggaaauucaugagccuaau

SEQ ID NO: 1799094 - RNA, 19 nt, Homo sapiens
  misc_RNA (1)...(19): siRNA sense strand
ucacagccuucuucaagug

SEQ ID NO: 1799095 - RNA, 19 nt, Homo sapiens
  misc_RNA (1)...(19): siRNA sense strand
gaggaggaguuagagaaga

SEQ ID NO: 1799096 - RNA, 19 nt, Homo sapiens
  misc_RNA (1)...(19): siRNA sense strand
ccauugaccagauccauaa

SEQ ID NO: 1799097 - RNA, 19 nt, Homo sapiens
  misc_RNA (1)...(19): siRNA sense strand
caaguuuauuggagaguug

SEQ ID NO: 1799098 - RNA, 19 nt, Homo sapiens
  misc_RNA (1)...(19): siRNA sense strand
gaaagcuguuguugaaucg

SEQ ID NO: 1799099 - RNA, 19 nt, Homo sapiens
  misc_RNA (1)...(19): siRNA sense strand
gugaguuccugcuugguuu

SEQ ID NO: 1799100 - RNA, 19 nt, Homo sapiens
  misc_RNA (1)...(19): siRNA sense strand
ggaggaaauggaagaagaa

SEQ ID NO: 1799101 - RNA, 19 nt, Homo sapiens
  misc_RNA (1)...(19): siRNA sense strand
cugaggacauggaaauuga

SEQ ID NO: 1799102 - RNA, 19 nt, Homo sapiens
  misc_RNA (1)...(19): siRNA sense strand
aggaauaucuccaucucaa

SEQ ID NO: 1799103 - RNA, 19 nt, Homo sapiens
  misc_RNA (1)...(19): siRNA sense strand
cagaggcaauaaugcauga

SEQ ID NO: 1799104 - RNA, 19 nt, Homo sapiens
  misc_RNA (1)...(19): siRNA sense strand
ugacgcagcuggccaucga

SEQ ID NO: 1799105 - RNA, 19 nt, Homo sapiens
  misc_RNA (1)...(19): siRNA sense strand
ucacaaugcugagaacauc

SEQ ID NO: 1799106 - RNA, 19 nt, Homo sapiens
  misc_RNA (1)...(19): siRNA sense strand
ccagccaacuugucucaga

SEQ ID NO: 1799107 - RNA, 19 nt, Homo sapiens
  misc_RNA (1)...(19): siRNA sense strand
gaaaggaggagaggaacug

SEQ ID NO: 1799108 - RNA, 19 nt, Homo sapiens
  misc_RNA (1)...(19): siRNA sense strand
ggacauggaaauugacauc

SEQ ID NO: 1799109 - RNA, 19 nt, Homo sapiens
  misc_RNA (1)...(19): siRNA sense strand
gaagaaauccaaggcuauc

SEQ ID NO: 1799110 - RNA, 19 nt, Homo sapiens
  misc_RNA (1)...(19): siRNA sense strand
ccaagaccauugaccagau

SEQ ID NO: 1799111 - RNA, 19 nt, Homo sapiens
  misc_RNA (1)...(19): siRNA sense strand
gaucugcgagggagcaauu

SEQ ID NO: 1799112 - RNA, 19 nt, Homo sapiens
  misc_RNA (1)...(19): siRNA sense strand
ucaaacugcuuaagaacca

SEQ ID NO: 1799113 - RNA, 19 nt, Homo sapiens
  misc_RNA (1)...(19): siRNA sense strand
uaacagaggcaauaaugca

SEQ ID NO: 1799114 - RNA, 19 nt, Homo sapiens
  misc_RNA (1)...(19): siRNA sense strand
gaaauucaugagccuaaug

SEQ ID NO: 1799115 - RNA, 19 nt, Homo sapiens
  misc_RNA (1)...(19): siRNA sense strand
uaugaaaucuuggaauugg

SEQ ID NO: 1799116 - RNA, 19 nt, Homo sapiens
  misc_RNA (1)...(19): siRNA sense strand
gaugucagaaggaguuuga

SEQ ID NO: 1799117 - RNA, 19 nt, Homo sapiens
  misc_RNA (1)...(19): siRNA sense strand
gagauuacaaagccucuga

SEQ ID NO: 1799118 - RNA, 19 nt, Homo sapiens
  misc_RNA (1)...(19): siRNA sense strand
guuaacagaggcaauaaug

SEQ ID NO: 1799119 - RNA, 19 nt, Homo sapiens
  misc_RNA (1)...(19): siRNA sense strand
ucagaaggaguuugagaaa

SEQ ID NO: 1799120 - RNA, 19 nt, Homo sapiens
  misc_RNA (1)...(19): siRNA sense strand
ggaggugacagcaucaaug

SEQ ID NO: 1799121 - RNA, 19 nt, Homo sapiens
  misc_RNA (1)...(19): siRNA sense strand
ugucugcuauucugcaauu

SEQ ID NO: 1799122 - RNA, 19 nt, Homo sapiens
  misc_RNA (1)...(19): siRNA sense strand
gcaaaagcauggguccuaa

SEQ ID NO: 1799123 - RNA, 19 nt, Homo sapiens
  misc_RNA (1)...(19): siRNA sense strand
agaaagcacagauaauaga

SEQ ID NO: 1799124 - RNA, 19 nt, Homo sapiens
  misc_RNA (1)...(19): siRNA sense strand
ccgaauggaucaguauuuc

SEQ ID NO: 1799125 - RNA, 19 nt, Homo sapiens
  misc_RNA (1)...(19): siRNA sense strand
uagcaaaccgguuccagaa

SEQ ID NO: 1799126 - RNA, 19 nt, Homo sapiens
  misc_RNA (1)...(19): siRNA sense strand
gagcuguucagggagauua

SEQ ID NO: 1799127 - RNA, 19 nt, Homo sapiens
  misc_RNA (1)...(19): siRNA sense strand
gaucaguggaagccucuaa

SEQ ID NO: 1799128 - RNA, 19 nt, Homo sapiens
  misc_RNA (1)...(19): siRNA sense strand
caggagaagcugagaguga

SEQ ID NO: 1799129 - RNA, 19 nt, Homo sapiens
  misc_RNA (1)...(19): siRNA sense strand
agaagaagaagaagaggaa

SEQ ID NO: 1799130 - RNA, 19 nt, Homo sapiens
  misc_RNA (1)...(19): siRNA sense strand
ggacguugcagugcugaaa

SEQ ID NO: 1799131 - RNA, 19 nt, Homo sapiens
  misc_RNA (1)...(19): siRNA sense strand
aacagaagguggaguauac

SEQ ID NO: 1799132 - RNA, 19 nt, Homo sapiens
  misc_RNA (1)...(19): siRNA sense strand
ccaucucaaugacaugaaa

SEQ ID NO: 1799133 - RNA, 19 nt, Homo sapiens
  misc_RNA (1)...(19): siRNA sense strand
ugaaggcggcucucucuga

SEQ ID NO: 1799134 - RNA, 19 nt, Homo sapiens
  misc_RNA (1)...(19): siRNA sense strand
uuaagaaccaugaugaaga

SEQ ID NO: 1799135 - RNA, 19 nt, Homo sapiens
  misc_RNA (1)...(19): siRNA sense strand
ggacaaggccaauaaaaca

SEQ ID NO: 1799136 - RNA, 19 nt, Homo sapiens
  misc_RNA (1)...(19): siRNA sense strand
gcagaagccagagggauug

SEQ ID NO: 1799137 - RNA, 19 nt, Homo sapiens
  misc_RNA (1)...(19): siRNA sense strand
ugagaaaggaggagaggaa

SEQ ID NO: 1799138 - RNA, 19 nt, Homo sapiens
  misc_RNA (1)...(19): siRNA sense strand
cagaggagcaggccaagga

SEQ ID NO: 1799139 - RNA, 19 nt, Homo sapiens
  misc_RNA (1)...(19): siRNA sense strand
cugcuauucugcaauuauu

SEQ ID NO: 1799140 - RNA, 19 nt, Homo sapiens
  misc_RNA (1)...(19): siRNA sense strand
ccucacgacucaccaagau

SEQ ID NO: 1799141 - RNA, 19 nt, Homo sapiens
  misc_RNA (1)...(19): siRNA sense strand
agaaagacaaagaugauga

SEQ ID NO: 1799142 - RNA, 19 nt, Homo sapiens
  misc_RNA (1)...(19): siRNA sense strand
cagagggauugccacauau

SEQ ID NO: 1799143 - RNA, 19 nt, Homo sapiens
  misc_RNA (1)...(19): siRNA sense strand
ccaacuugucucagaauuu

SEQ ID NO: 1799144 - RNA, 19 nt, Homo sapiens
  misc_RNA (1)...(19): siRNA sense strand
gauagaggccaaccugagu

SEQ ID NO: 1799145 - RNA, 19 nt, Homo sapiens
  misc_RNA (1)...(19): siRNA sense strand
ggaggaugccuucuacagu

SEQ ID NO: 1799146 - RNA, 19 nt, Homo sapiens
  misc_RNA (1)...(19): siRNA sense strand
ggaagaggcucgggacaua

SEQ ID NO: 1799147 - RNA, 19 nt, Homo sapiens
  misc_RNA (1)...(19): siRNA sense strand
ccagagggauugccacaua

SEQ ID NO: 1799148 - RNA, 19 nt, Homo sapiens
  misc_RNA (1)...(19): siRNA sense strand
acaaaugucuguagaagaa

SEQ ID NO: 1799149 - RNA, 19 nt, Homo sapiens
  misc_RNA (1)...(19): siRNA sense strand
gagcauagcccuucagaau

SEQ ID NO: 1799150 - RNA, 19 nt, Homo sapiens
  misc_RNA (1)...(19): siRNA sense strand
gaucauugccacaguguua

SEQ ID NO: 1799151 - RNA, 19 nt, Homo sapiens
  misc_RNA (1)...(19): siRNA sense strand
ggaauuggcugaggacaug

SEQ ID NO: 1799152 - RNA, 19 nt, Homo sapiens
  misc_RNA (1)...(19): siRNA sense strand
ggaaauggaagaagaagaa

SEQ ID NO: 1799153 - RNA, 19 nt, Homo sapiens
  misc_RNA (1)...(19): siRNA sense strand
caacuugucucagaauuug

SEQ ID NO: 1799154 - RNA, 19 nt, Homo sapiens
  misc_RNA (1)...(19): siRNA sense strand
gaaggaauuucuaccugaa

SEQ ID NO: 1799155 - RNA, 19 nt, Homo sapiens
  misc_RNA (1)...(19): siRNA sense strand
gaggaugccuucuacaguu

SEQ ID NO: 1799156 - RNA, 19 nt, Homo sapiens
  misc_RNA (1)...(19): siRNA sense strand
gggcuuagcuggaaggaau

SEQ ID NO: 1799157 - RNA, 19 nt, Homo sapiens
  misc_RNA (1)...(19): siRNA sense strand
gaacagaagguggaguaua

SEQ ID NO: 1799158 - RNA, 19 nt, Homo sapiens
  misc_RNA (1)...(19): siRNA sense strand
gcaaaccgguuccagaauc

SEQ ID NO: 1799159 - RNA, 19 nt, Homo sapiens
  misc_RNA (1)...(19): siRNA sense strand
guuaaugaccgaagauaua

SEQ ID NO: 1799160 - RNA, 19 nt, Homo sapiens
  misc_RNA (1)...(19): siRNA sense strand
caaagaugaugaugagguu

SEQ ID NO: 1799161 - RNA, 19 nt, Homo sapiens
  misc_RNA (1)...(19): siRNA sense strand
agaaggaguuugagaaaga

SEQ ID NO: 1799162 - RNA, 19 nt, Homo sapiens
  misc_RNA (1)...(19): siRNA sense strand
gggaacagaaguaugaaua

SEQ ID NO: 1799163 - RNA, 19 nt, Homo sapiens
  misc_RNA (1)...(19): siRNA sense strand
gaauauaagucagaucagu

SEQ ID NO: 1799164 - RNA, 19 nt, Homo sapiens
  misc_RNA (1)...(19): siRNA sense strand
ccacagaaagcacagauaa

SEQ ID NO: 1799165 - RNA, 19 nt, Homo sapiens
  misc_RNA (1)...(19): siRNA sense strand
agacuucacuccauccuuu

SEQ ID NO: 1799166 - RNA, 19 nt, Homo sapiens
  misc_RNA (1)...(19): siRNA sense strand
acagaaagcacagauaaua

SEQ ID NO: 1799167 - RNA, 19 nt, Homo sapiens
  misc_RNA (1)...(19): siRNA sense strand
cgaaagcuguuguugaauc

SEQ ID NO: 1799168 - RNA, 19 nt, Homo sapiens
  misc_RNA (1)...(19): siRNA sense strand
agacaaagaugaugaugag

SEQ ID NO: 1799169 - RNA, 19 nt, Homo sapiens
  misc_RNA (1)...(19): siRNA sense strand
uggagaagcugcugaagga

SEQ ID NO: 1799170 - RNA, 19 nt, Homo sapiens
  misc_RNA (1)...(19): siRNA sense strand
uaccaaggguuguaugaaa

SEQ ID NO: 1799171 - RNA, 19 nt, Homo sapiens
  misc_RNA (1)...(19): siRNA sense strand
gaaccacgcaagaucauug

SEQ ID NO: 1799172 - RNA, 19 nt, Homo sapiens
  misc_RNA (1)...(19): siRNA sense strand
gaacaucgagagcacauca

SEQ ID NO: 1799173 - RNA, 19 nt, Homo sapiens
  misc_RNA (1)...(19): siRNA sense strand
caacuucucuguggccuau

SEQ ID NO: 1799174 - RNA, 19 nt, Homo sapiens
  misc_RNA (1)...(19): siRNA sense strand
guggaagccucuaaaccua

SEQ ID NO: 1799175 - RNA, 19 nt, Homo sapiens
  misc_RNA (1)...(19): siRNA sense strand
gaauaucuccaucucaaug

SEQ ID NO: 1799176 - RNA, 19 nt, Homo sapiens
  misc_RNA (1)...(19): siRNA sense strand
gaggacgccugaaggaaga

SEQ ID NO: 1799177 - RNA, 19 nt, Homo sapiens
  misc_RNA (1)...(19): siRNA sense strand
gaggaaaggauaucacaga

SEQ ID NO: 1799178 - RNA, 19 nt, Homo sapiens
  misc_RNA (1)...(19): siRNA sense strand
uaaggaggcugagauggaa

SEQ ID NO: 1799179 - RNA, 19 nt, Homo sapiens
  misc_RNA (1)...(19): siRNA sense strand
gaauggaucaguauuucaa

SEQ ID NO: 1799180 - RNA, 19 nt, Homo sapiens
  misc_RNA (1)...(19): siRNA sense strand
ggaagaagaagaagaagag

SEQ ID NO: 1799181 - RNA, 19 nt, Homo sapiens
  misc_RNA (1)...(19): siRNA sense strand
gauguuaacagaggcaaua

SEQ ID NO: 1799182 - RNA, 19 nt, Homo sapiens
  misc_RNA (1)...(19): siRNA sense strand
ggacucaaaggaagacaaa

SEQ ID NO: 1799183 - RNA, 19 nt, Homo sapiens
  misc_RNA (1)...(19): siRNA sense strand
gaaauccaaggcuaucauu

SEQ ID NO: 1799184 - RNA, 19 nt, Homo sapiens
  misc_RNA (1)...(19): siRNA sense strand
uccgaaagcuguuguugaa

SEQ ID NO: 1799185 - RNA, 19 nt, Homo sapiens
  misc_RNA (1)...(19): siRNA sense strand
uaagaaccaugaugaagag

SEQ ID NO: 1799186 - RNA, 19 nt, Homo sapiens
  misc_RNA (1)...(19): siRNA sense strand
ggaacagaaguaugaauau

SEQ ID NO: 1799187 - RNA, 19 nt, Homo sapiens
  misc_RNA (1)...(19): siRNA sense strand
gaugaagagucccuugagu

SEQ ID NO: 1799188 - RNA, 19 nt, Homo sapiens
  misc_RNA (1)...(19): siRNA sense strand
ggaggagucugaccacaac

SEQ ID NO: 1799189 - RNA, 19 nt, Homo sapiens
  misc_RNA (1)...(19): siRNA sense strand
gaacugguaacacccauuc

SEQ ID NO: 1799190 - RNA, 19 nt, Homo sapiens
  misc_RNA (1)...(19): siRNA sense strand
gcauagcccuucagaaucc

SEQ ID NO: 1799191 - RNA, 19 nt, Homo sapiens
  misc_RNA (1)...(19): siRNA sense strand
caugacggcugucugcuau

SEQ ID NO: 1799192 - RNA, 19 nt, Homo sapiens
  misc_RNA (1)...(19): siRNA sense strand
gggacacuaugacaacuau

SEQ ID NO: 1799193 - RNA, 19 nt, Homo sapiens
  misc_RNA (1)...(19): siRNA sense strand
gaaagacaaagaugaugau

SEQ ID NO: 1799194 - RNA, 19 nt, Homo sapiens
  misc_RNA (1)...(19): siRNA sense strand
ggaaauucaugagccuaau

SEQ ID NO: 1799195 - RNA, 19 nt, Homo sapiens
  misc_RNA (1)...(19): siRNA sense strand
ucacagccuucuucaagug

SEQ ID NO: 1799196 - RNA, 19 nt, Homo sapiens
  misc_RNA (1)...(19): siRNA sense strand
gaggaggaguuagagaaga

SEQ ID NO: 1799197 - RNA, 19 nt, Homo sapiens
  misc_RNA (1)...(19): siRNA sense strand
ccauugaccagauccauaa

SEQ ID NO: 1799198 - RNA, 19 nt, Homo sapiens
  misc_RNA (1)...(19): siRNA sense strand
caaguuuauuggagaguug

SEQ ID NO: 1799199 - RNA, 19 nt, Homo sapiens
  misc_RNA (1)...(19): siRNA sense strand
gaaagcuguuguugaaucg

SEQ ID NO: 1799200 - RNA, 19 nt, Homo sapiens
  misc_RNA (1)...(19): siRNA sense strand
gugaguuccugcuugguuu

SEQ ID NO: 1799201 - RNA, 19 nt, Homo sapiens
  misc_RNA (1)...(19): siRNA sense strand
ggaggaaauggaagaagaa

SEQ ID NO: 1799202 - RNA, 19 nt, Homo sapiens
  misc_RNA (1)...(19): siRNA sense strand
cugaggacauggaaauuga

SEQ ID NO: 1799203 - RNA, 19 nt, Homo sapiens
  misc_RNA (1)...(19): siRNA sense strand
aggaauaucuccaucucaa

SEQ ID NO: 1799204 - RNA, 19 nt, Homo sapiens
  misc_RNA (1)...(19): siRNA sense strand
cagaggcaauaaugcauga

SEQ ID NO: 1799205 - RNA, 19 nt, Homo sapiens
  misc_RNA (1)...(19): siRNA sense strand
ugacgcagcuggccaucga

SEQ ID NO: 1799206 - RNA, 19 nt, Homo sapiens
  misc_RNA (1)...(19): siRNA sense strand
ucacaaugcugagaacauc

SEQ ID NO: 1799207 - RNA, 19 nt, Homo sapiens
  misc_RNA (1)...(19): siRNA sense strand
ccagccaacuugucucaga

SEQ ID NO: 1799208 - RNA, 19 nt, Homo sapiens
  misc_RNA (1)...(19): siRNA sense strand
gaaaggaggagaggaacug

SEQ ID NO: 1799209 - RNA, 19 nt, Homo sapiens
  misc_RNA (1)...(19): siRNA sense strand
ggacauggaaauugacauc

SEQ ID NO: 1799210 - RNA, 19 nt, Homo sapiens
  misc_RNA (1)...(19): siRNA sense strand
gaagaaauccaaggcuauc

SEQ ID NO: 1799211 - RNA, 19 nt, Homo sapiens
  misc_RNA (1)...(19): siRNA sense strand
ccaagaccauugaccagau

SEQ ID NO: 1799212 - RNA, 19 nt, Homo sapiens
  misc_RNA (1)...(19): siRNA sense strand
gaucugcgagggagcaauu

SEQ ID NO: 1799213 - RNA, 19 nt, Homo sapiens
  misc_RNA (1)...(19): siRNA sense strand
ucaaacugcuuaagaacca

SEQ ID NO: 1799214 - RNA, 19 nt, Homo sapiens
  misc_RNA (1)...(19): siRNA sense strand
uaacagaggcaauaaugca

SEQ ID NO: 1799215 - RNA, 19 nt, Homo sapiens
  misc_RNA (1)...(19): siRNA sense strand
gaaauucaugagccuaaug

SEQ ID NO: 1799216 - RNA, 19 nt, Homo sapiens
  misc_RNA (1)...(19): siRNA sense strand
uaugaaaucuuggaauugg

SEQ ID NO: 1799217 - RNA, 19 nt, Homo sapiens
  misc_RNA (1)...(19): siRNA sense strand
gaugucagaaggaguuuga

SEQ ID NO: 1799218 - RNA, 19 nt, Homo sapiens
  misc_RNA (1)...(19): siRNA sense strand
gagauuacaaagccucuga

SEQ ID NO: 1799219 - RNA, 19 nt, Homo sapiens
  misc_RNA (1)...(19): siRNA sense strand
guuaacagaggcaauaaug

SEQ ID NO: 1799220 - RNA, 19 nt, Homo sapiens
  misc_RNA (1)...(19): siRNA sense strand
ucagaaggaguuugagaaa

SEQ ID NO: 1799221 - RNA, 19 nt, Homo sapiens
  misc_RNA (1)...(19): siRNA sense strand
ggaggugacagcaucaaug

SEQ ID NO: 1799222 - RNA, 19 nt, Homo sapiens
  misc_RNA (1)...(19): siRNA sense strand
ugucugcuauucugcaauu

SEQ ID NO: 1799223 - RNA, 19 nt, Homo sapiens
  misc_RNA (1)...(19): siRNA sense strand
gcaaaagcauggguccuaa

SEQ ID NO: 1799224 - RNA, 19 nt, Homo sapiens
  misc_RNA (1)...(19): siRNA sense strand
agaaagcacagauaauaga

SEQ ID NO: 1799225 - RNA, 19 nt, Homo sapiens
  misc_RNA (1)...(19): siRNA sense strand
ccgaauggaucaguauuuc

SEQ ID NO: 1799226 - RNA, 19 nt, Homo sapiens
  misc_RNA (1)...(19): siRNA sense strand
uagcaaaccgguuccagaa

SEQ ID NO: 1799227 - RNA, 19 nt, Homo sapiens
  misc_RNA (1)...(19): siRNA sense strand
gagcuguucagggagauua

SEQ ID NO: 1799228 - RNA, 19 nt, Homo sapiens
  misc_RNA (1)...(19): siRNA sense strand
gaucaguggaagccucuaa

SEQ ID NO: 1799229 - RNA, 19 nt, Homo sapiens
  misc_RNA (1)...(19): siRNA sense strand
caggagaagcugagaguga

SEQ ID NO: 1799230 - RNA, 19 nt, Homo sapiens
  misc_RNA (1)...(19): siRNA sense strand
agaagaagaagaagaggaa

SEQ ID NO: 1799231 - RNA, 19 nt, Homo sapiens
  misc_RNA (1)...(19): siRNA sense strand
ggacguugcagugcugaaa

SEQ ID NO: 1799232 - RNA, 19 nt, Homo sapiens
  misc_RNA (1)...(19): siRNA sense strand
aacagaagguggaguauac

SEQ ID NO: 1799233 - RNA, 19 nt, Homo sapiens
  misc_RNA (1)...(19): siRNA sense strand
ccaucucaaugacaugaaa

SEQ ID NO: 1799234 - RNA, 19 nt, Homo sapiens
  misc_RNA (1)...(19): siRNA sense strand
ugaaggcggcucucucuga

SEQ ID NO: 1799235 - RNA, 19 nt, Homo sapiens
  misc_RNA (1)...(19): siRNA sense strand
uuaagaaccaugaugaaga

SEQ ID NO: 1799236 - RNA, 19 nt, Homo sapiens
  misc_RNA (1)...(19): siRNA sense strand
ggacaaggccaauaaaaca

SEQ ID NO: 1799237 - RNA, 19 nt, Homo sapiens
  misc_RNA (1)...(19): siRNA sense strand
gcagaagccagagggauug

SEQ ID NO: 1799238 - RNA, 19 nt, Homo sapiens
  misc_RNA (1)...(19): siRNA sense strand
ugagaaaggaggagaggaa

SEQ ID NO: 1799239 - RNA, 19 nt, Homo sapiens
  misc_RNA (1)...(19): siRNA sense strand
cagaggagcaggccaagga

SEQ ID NO: 1799240 - RNA, 19 nt, Homo sapiens
  misc_RNA (1)...(19): siRNA sense strand
cugcuauucugcaauuauu

SEQ ID NO: 1799241 - RNA, 19 nt, Homo sapiens
  misc_RNA (1)...(19): siRNA sense strand
ccucacgacucaccaagau

SEQ ID NO: 1799242 - RNA, 19 nt, Homo sapiens
  misc_RNA (1)...(19): siRNA sense strand
agaaagacaaagaugauga

SEQ ID NO: 1799243 - RNA, 19 nt, Homo sapiens
  misc_RNA (1)...(19): siRNA sense strand
cagagggauugccacauau

SEQ ID NO: 1799244 - RNA, 19 nt, Homo sapiens
  misc_RNA (1)...(19): siRNA sense strand
ccaacuugucucagaauuu

SEQ ID NO: 1799245 - RNA, 19 nt, Homo sapiens
  misc_RNA (1)...(19): siRNA sense strand
ggaggaugccuucuacagu

SEQ ID NO: 1799246 - RNA, 19 nt, Homo sapiens
  misc_RNA (1)...(19): siRNA sense strand
ggaagaggcucgggacaua

SEQ ID NO: 1799247 - RNA, 19 nt, Homo sapiens
  misc_RNA (1)...(19): siRNA sense strand
ccagagggauugccacaua

SEQ ID NO: 1799248 - RNA, 19 nt, Homo sapiens
  misc_RNA (1)...(19): siRNA sense strand
acaaaugucuguagaagaa

SEQ ID NO: 1799249 - RNA, 19 nt, Homo sapiens
  misc_RNA (1)...(19): siRNA sense strand
gagcauagcccuucagaau

SEQ ID NO: 1799250 - RNA, 19 nt, Homo sapiens
  misc_RNA (1)...(19): siRNA sense strand
gaucauugccacaguguua

SEQ ID NO: 1799251 - RNA, 19 nt, Homo sapiens
  misc_RNA (1)...(19): siRNA sense strand
ggaauuggcugaggacaug

SEQ ID NO: 1799252 - RNA, 19 nt, Homo sapiens
  misc_RNA (1)...(19): siRNA sense strand
ggaaauggaagaagaagaa

SEQ ID NO: 1799253 - RNA, 19 nt, Homo sapiens
  misc_RNA (1)...(19): siRNA sense strand
caacuugucucagaauuug

SEQ ID NO: 1799254 - RNA, 19 nt, Homo sapiens
  misc_RNA (1)...(19): siRNA sense strand
gaaggaauuucuaccugaa

SEQ ID NO: 1799255 - RNA, 19 nt, Homo sapiens
  misc_RNA (1)...(19): siRNA sense strand
gaggaugccuucuacaguu

SEQ ID NO: 1799256 - RNA, 19 nt, Homo sapiens
  misc_RNA (1)...(19): siRNA sense strand
gggcuuagcuggaaggaau

SEQ ID NO: 1799257 - RNA, 19 nt, Homo sapiens
  misc_RNA (1)...(19): siRNA sense strand
gaacagaagguggaguaua

SEQ ID NO: 1799258 - RNA, 19 nt, Homo sapiens
  misc_RNA (1)...(19): siRNA sense strand
gcaaaccgguuccagaauc

SEQ ID NO: 1799259 - RNA, 19 nt, Homo sapiens
  misc_RNA (1)...(19): siRNA sense strand
guuaaugaccgaagauaua

SEQ ID NO: 1799260 - RNA, 19 nt, Homo sapiens
  misc_RNA (1)...(19): siRNA sense strand
caaagaugaugaugagguu

SEQ ID NO: 1799261 - RNA, 19 nt, Homo sapiens
  misc_RNA (1)...(19): siRNA sense strand
agaaggaguuugagaaaga

SEQ ID NO: 1799262 - RNA, 19 nt, Homo sapiens
  misc_RNA (1)...(19): siRNA sense strand
gggaacagaaguaugaaua

SEQ ID NO: 1799263 - RNA, 19 nt, Homo sapiens
  misc_RNA (1)...(19): siRNA sense strand
gaauauaagucagaucagu

SEQ ID NO: 1799264 - RNA, 19 nt, Homo sapiens
  misc_RNA (1)...(19): siRNA sense strand
ccacagaaagcacagauaa

SEQ ID NO: 1799265 - RNA, 19 nt, Homo sapiens
  misc_RNA (1)...(19): siRNA sense strand
agacuucacuccauccuuu

SEQ ID NO: 1799266 - RNA, 19 nt, Homo sapiens
  misc_RNA (1)...(19): siRNA sense strand
acagaaagcacagauaaua

SEQ ID NO: 1799267 - RNA, 19 nt, Homo sapiens
  misc_RNA (1)...(19): siRNA sense strand
cgaaagcuguuguugaauc

SEQ ID NO: 1799268 - RNA, 19 nt, Homo sapiens
  misc_RNA (1)...(19): siRNA sense strand
agacaaagaugaugaugag

SEQ ID NO: 1799269 - RNA, 19 nt, Homo sapiens
  misc_RNA (1)...(19): siRNA sense strand
uggagaagcugcugaagga

SEQ ID NO: 1799270 - RNA, 19 nt, Homo sapiens
  misc_RNA (1)...(19): siRNA sense strand
uaccaaggguuguaugaaa

SEQ ID NO: 1799271 - RNA, 19 nt, Homo sapiens
  misc_RNA (1)...(19): siRNA sense strand
gaaccacgcaagaucauug

SEQ ID NO: 1799272 - RNA, 19 nt, Homo sapiens
  misc_RNA (1)...(19): siRNA sense strand
gaacaucgagagcacauca

SEQ ID NO: 1799273 - RNA, 19 nt, Homo sapiens
  misc_RNA (1)...(19): siRNA sense strand
caacuucucuguggccuau

SEQ ID NO: 1799274 - RNA, 19 nt, Homo sapiens
  misc_RNA (1)...(19): siRNA sense strand
guggaagccucuaaaccua

SEQ ID NO: 1799275 - RNA, 19 nt, Homo sapiens
  misc_RNA (1)...(19): siRNA sense strand
gaauaucuccaucucaaug

SEQ ID NO: 1799276 - RNA, 19 nt, Homo sapiens
  misc_RNA (1)...(19): siRNA sense strand
gaggacgccugaaggaaga

SEQ ID NO: 1799277 - RNA, 19 nt, Homo sapiens
  misc_RNA (1)...(19): siRNA sense strand
gaggaaaggauaucacaga

SEQ ID NO: 1799278 - RNA, 19 nt, Homo sapiens
  misc_RNA (1)...(19): siRNA sense strand
uaaggaggcugagauggaa

SEQ ID NO: 1799279 - RNA, 19 nt, Homo sapiens
  misc_RNA (1)...(19): siRNA sense strand
gaauggaucaguauuucaa

SEQ ID NO: 1799280 - RNA, 19 nt, Homo sapiens
  misc_RNA (1)...(19): siRNA sense strand
ggaagaagaagaagaagag

SEQ ID NO: 1799281 - RNA, 19 nt, Homo sapiens
  misc_RNA (1)...(19): siRNA sense strand
gauguuaacagaggcaaua

SEQ ID NO: 1799282 - RNA, 19 nt, Homo sapiens
  misc_RNA (1)...(19): siRNA sense strand
ggacucaaaggaagacaaa

SEQ ID NO: 1799283 - RNA, 19 nt, Homo sapiens
  misc_RNA (1)...(19): siRNA sense strand
gaaauccaaggcuaucauu

SEQ ID NO: 1799284 - RNA, 19 nt, Homo sapiens
  misc_RNA (1)...(19): siRNA sense strand
uccgaaagcuguuguugaa

SEQ ID NO: 1799285 - RNA, 19 nt, Homo sapiens
  misc_RNA (1)...(19): siRNA sense strand
uaagaaccaugaugaagag

SEQ ID NO: 1799286 - RNA, 19 nt, Homo sapiens
  misc_RNA (1)...(19): siRNA sense strand
ggaacagaaguaugaauau

SEQ ID NO: 1799287 - RNA, 19 nt, Homo sapiens
  misc_RNA (1)...(19): siRNA sense strand
gaugaagagucccuugagu

SEQ ID NO: 1799288 - RNA, 19 nt, Homo sapiens
  misc_RNA (1)...(19): siRNA sense strand
ggaggagucugaccacaac

SEQ ID NO: 1799289 - RNA, 19 nt, Homo sapiens
  misc_RNA (1)...(19): siRNA sense strand
gaacugguaacacccauuc

SEQ ID NO: 1799290 - RNA, 19 nt, Homo sapiens
  misc_RNA (1)...(19): siRNA sense strand
gcauagcccuucagaaucc

SEQ ID NO: 1799291 - RNA, 19 nt, Homo sapiens
  misc_RNA (1)...(19): siRNA sense strand
caugacggcugucugcuau

SEQ ID NO: 1799292 - RNA, 19 nt, Homo sapiens
  misc_RNA (1)...(19): siRNA sense strand
gggacacuaugacaacuau

SEQ ID NO: 1799293 - RNA, 19 nt, Homo sapiens
  misc_RNA (1)...(19): siRNA sense strand
gaaagacaaagaugaugau

SEQ ID NO: 1799294 - RNA, 19 nt, Homo sapiens
  misc_RNA (1)...(19): siRNA sense strand
ggaaauucaugagccuaau

SEQ ID NO: 1799295 - RNA, 19 nt, Homo sapiens
  misc_RNA (1)...(19): siRNA sense strand
ucacagccuucuucaagug

SEQ ID NO: 1799296 - RNA, 19 nt, Homo sapiens
  misc_RNA (1)...(19): siRNA sense strand
gaggaggaguuagagaaga

SEQ ID NO: 1799297 - RNA, 19 nt, Homo sapiens
  misc_RNA (1)...(19): siRNA sense strand
ccauugaccagauccauaa

SEQ ID NO: 1799298 - RNA, 19 nt, Homo sapiens
  misc_RNA (1)...(19): siRNA sense strand
caaguuuauuggagaguug

SEQ ID NO: 1799299 - RNA, 19 nt, Homo sapiens
  misc_RNA (1)...(19): siRNA sense strand
gaaagcuguuguugaaucg

SEQ ID NO: 1799300 - RNA, 19 nt, Homo sapiens
  misc_RNA (1)...(19): siRNA sense strand
gugaguuccugcuugguuu

SEQ ID NO: 1799301 - RNA, 19 nt, Homo sapiens
  misc_RNA (1)...(19): siRNA sense strand
ggaggaaauggaagaagaa

SEQ ID NO: 1799302 - RNA, 19 nt, Homo sapiens
  misc_RNA (1)...(19): siRNA sense strand
cugaggacauggaaauuga

SEQ ID NO: 1799303 - RNA, 19 nt, Homo sapiens
  misc_RNA (1)...(19): siRNA sense strand
aggaauaucuccaucucaa

SEQ ID NO: 1799304 - RNA, 19 nt, Homo sapiens
  misc_RNA (1)...(19): siRNA sense strand
cagaggcaauaaugcauga

SEQ ID NO: 1799305 - RNA, 19 nt, Homo sapiens
  misc_RNA (1)...(19): siRNA sense strand
ugacgcagcuggccaucga

SEQ ID NO: 1799306 - RNA, 19 nt, Homo sapiens
  misc_RNA (1)...(19): siRNA sense strand
ucacaaugcugagaacauc

SEQ ID NO: 1799307 - RNA, 19 nt, Homo sapiens
  misc_RNA (1)...(19): siRNA sense strand
ccagccaacuugucucaga

SEQ ID NO: 1799308 - RNA, 19 nt, Homo sapiens
  misc_RNA (1)...(19): siRNA sense strand
gaaaggaggagaggaacug

SEQ ID NO: 1799309 - RNA, 19 nt, Homo sapiens
  misc_RNA (1)...(19): siRNA sense strand
ggacauggaaauugacauc

SEQ ID NO: 1799310 - RNA, 19 nt, Homo sapiens
  misc_RNA (1)...(19): siRNA sense strand
gaagaaauccaaggcuauc

SEQ ID NO: 1799311 - RNA, 19 nt, Homo sapiens
  misc_RNA (1)...(19): siRNA sense strand
ccaagaccauugaccagau

SEQ ID NO: 1799312 - RNA, 19 nt, Homo sapiens
  misc_RNA (1)...(19): siRNA sense strand
gaucugcgagggagcaauu

SEQ ID NO: 1799313 - RNA, 19 nt, Homo sapiens
  misc_RNA (1)...(19): siRNA sense strand
ucaaacugcuuaagaacca

SEQ ID NO: 1799314 - RNA, 19 nt, Homo sapiens
  misc_RNA (1)...(19): siRNA sense strand
uaacagaggcaauaaugca

SEQ ID NO: 1799315 - RNA, 19 nt, Homo sapiens
  misc_RNA (1)...(19): siRNA sense strand
gaaauucaugagccuaaug

SEQ ID NO: 1799316 - RNA, 19 nt, Homo sapiens
  misc_RNA (1)...(19): siRNA sense strand
uaugaaaucuuggaauugg

SEQ ID NO: 1799317 - RNA, 19 nt, Homo sapiens
  misc_RNA (1)...(19): siRNA sense strand
gaugucagaaggaguuuga

SEQ ID NO: 1799318 - RNA, 19 nt, Homo sapiens
  misc_RNA (1)...(19): siRNA sense strand
gagauuacaaagccucuga

SEQ ID NO: 1799319 - RNA, 19 nt, Homo sapiens
  misc_RNA (1)...(19): siRNA sense strand
guuaacagaggcaauaaug

SEQ ID NO: 1799320 - RNA, 19 nt, Homo sapiens
  misc_RNA (1)...(19): siRNA sense strand
ucagaaggaguuugagaaa

SEQ ID NO: 1799321 - RNA, 19 nt, Homo sapiens
  misc_RNA (1)...(19): siRNA sense strand
ggaggugacagcaucaaug

SEQ ID NO: 1799322 - RNA, 19 nt, Homo sapiens
  misc_RNA (1)...(19): siRNA sense strand
ugucugcuauucugcaauu

SEQ ID NO: 1799323 - RNA, 19 nt, Homo sapiens
  misc_RNA (1)...(19): siRNA sense strand
gcaaaagcauggguccuaa

SEQ ID NO: 1799324 - RNA, 19 nt, Homo sapiens
  misc_RNA (1)...(19): siRNA sense strand
agaaagcacagauaauaga

SEQ ID NO: 1799325 - RNA, 19 nt, Homo sapiens
  misc_RNA (1)...(19): siRNA sense strand
ccgaauggaucaguauuuc

SEQ ID NO: 1799326 - RNA, 19 nt, Homo sapiens
  misc_RNA (1)...(19): siRNA sense strand
uagcaaaccgguuccagaa

SEQ ID NO: 1799327 - RNA, 19 nt, Homo sapiens
  misc_RNA (1)...(19): siRNA sense strand
gagcuguucagggagauua

SEQ ID NO: 1799328 - RNA, 19 nt, Homo sapiens
  misc_RNA (1)...(19): siRNA sense strand
gaucaguggaagccucuaa

SEQ ID NO: 1799329 - RNA, 19 nt, Homo sapiens
  misc_RNA (1)...(19): siRNA sense strand
caggagaagcugagaguga

SEQ ID NO: 1799330 - RNA, 19 nt, Homo sapiens
  misc_RNA (1)...(19): siRNA sense strand
agaagaagaagaagaggaa

SEQ ID NO: 1799331 - RNA, 19 nt, Homo sapiens
  misc_RNA (1)...(19): siRNA sense strand
ggacguugcagugcugaaa

SEQ ID NO: 1799332 - RNA, 19 nt, Homo sapiens
  misc_RNA (1)...(19): siRNA sense strand
aacagaagguggaguauac

SEQ ID NO: 1799333 - RNA, 19 nt, Homo sapiens
  misc_RNA (1)...(19): siRNA sense strand
ccaucucaaugacaugaaa

SEQ ID NO: 1799334 - RNA, 19 nt, Homo sapiens
  misc_RNA (1)...(19): siRNA sense strand
ugaaggcggcucucucuga

SEQ ID NO: 1799335 - RNA, 19 nt, Homo sapiens
  misc_RNA (1)...(19): siRNA sense strand
uuaagaaccaugaugaaga

SEQ ID NO: 1799336 - RNA, 19 nt, Homo sapiens
  misc_RNA (1)...(19): siRNA sense strand
ggacaaggccaauaaaaca

SEQ ID NO: 1799337 - RNA, 19 nt, Homo sapiens
  misc_RNA (1)...(19): siRNA sense strand
gcagaagccagagggauug

SEQ ID NO: 1799338 - RNA, 19 nt, Homo sapiens
  misc_RNA (1)...(19): siRNA sense strand
ugagaaaggaggagaggaa

SEQ ID NO: 1799339 - RNA, 19 nt, Homo sapiens
  misc_RNA (1)...(19): siRNA sense strand
cagaggagcaggccaagga

SEQ ID NO: 1799340 - RNA, 19 nt, Homo sapiens
  misc_RNA (1)...(19): siRNA sense strand
cugcuauucugcaauuauu

SEQ ID NO: 1799341 - RNA, 19 nt, Homo sapiens
  misc_RNA (1)...(19): siRNA sense strand
ccucacgacucaccaagau

SEQ ID NO: 1799342 - RNA, 19 nt, Homo sapiens
  misc_RNA (1)...(19): siRNA sense strand
agaaagacaaagaugauga

SEQ ID NO: 1799343 - RNA, 19 nt, Homo sapiens
  misc_RNA (1)...(19): siRNA sense strand
cagagggauugccacauau

SEQ ID NO: 1799344 - RNA, 19 nt, Homo sapiens
  misc_RNA (1)...(19): siRNA sense strand
ccaacuugucucagaauuu

SEQ ID NO: 1799345 - RNA, 19 nt, Homo sapiens
  misc_RNA (1)...(19): siRNA sense strand
ggaggaugccuucuacagu

SEQ ID NO: 1799346 - RNA, 19 nt, Homo sapiens
  misc_RNA (1)...(19): siRNA sense strand
ggaagaggcucgggacaua

SEQ ID NO: 1799347 - RNA, 19 nt, Homo sapiens
  misc_RNA (1)...(19): siRNA sense strand
ccagagggauugccacaua

SEQ ID NO: 1799348 - RNA, 19 nt, Homo sapiens
  misc_RNA (1)...(19): siRNA sense strand
acaaaugucuguagaagaa

SEQ ID NO: 1799349 - RNA, 19 nt, Homo sapiens
  misc_RNA (1)...(19): siRNA sense strand
gagcauagcccuucagaau

SEQ ID NO: 1799350 - RNA, 19 nt, Homo sapiens
  misc_RNA (1)...(19): siRNA sense strand
gaucauugccacaguguua

SEQ ID NO: 1799351 - RNA, 19 nt, Homo sapiens
  misc_RNA (1)...(19): siRNA sense strand
ggaauuggcugaggacaug

SEQ ID NO: 1799352 - RNA, 19 nt, Homo sapiens
  misc_RNA (1)...(19): siRNA sense strand
ggaaauggaagaagaagaa

SEQ ID NO: 1799353 - RNA, 19 nt, Homo sapiens
  misc_RNA (1)...(19): siRNA sense strand
caacuugucucagaauuug

SEQ ID NO: 1799354 - RNA, 19 nt, Homo sapiens
  misc_RNA (1)...(19): siRNA sense strand
gaaggaauuucuaccugaa

SEQ ID NO: 1799355 - RNA, 19 nt, Homo sapiens
  misc_RNA (1)...(19): siRNA sense strand
gaggaugccuucuacaguu

SEQ ID NO: 1799356 - RNA, 19 nt, Homo sapiens
  misc_RNA (1)...(19): siRNA sense strand
gggcuuagcuggaaggaau

SEQ ID NO: 1799357 - RNA, 19 nt, Homo sapiens
  misc_RNA (1)...(19): siRNA sense strand
gaacagaagguggaguaua

SEQ ID NO: 1799358 - RNA, 19 nt, Homo sapiens
  misc_RNA (1)...(19): siRNA sense strand
gcaaaccgguuccagaauc

SEQ ID NO: 1799359 - RNA, 19 nt, Homo sapiens
  misc_RNA (1)...(19): siRNA sense strand
guuaaugaccgaagauaua

SEQ ID NO: 1799360 - RNA, 19 nt, Homo sapiens
  misc_RNA (1)...(19): siRNA sense strand
caaagaugaugaugagguu

SEQ ID NO: 1799361 - RNA, 19 nt, Homo sapiens
  misc_RNA (1)...(19): siRNA sense strand
agaaggaguuugagaaaga

SEQ ID NO: 1799362 - RNA, 19 nt, Homo sapiens
  misc_RNA (1)...(19): siRNA sense strand
gggaacagaaguaugaaua

SEQ ID NO: 1799363 - RNA, 19 nt, Homo sapiens
  misc_RNA (1)...(19): siRNA sense strand
gaauauaagucagaucagu

SEQ ID NO: 1799364 - RNA, 19 nt, Homo sapiens
  misc_RNA (1)...(19): siRNA sense strand
ccacagaaagcacagauaa

SEQ ID NO: 1799365 - RNA, 19 nt, Homo sapiens
  misc_RNA (1)...(19): siRNA sense strand
agacuucacuccauccuuu

SEQ ID NO: 1799366 - RNA, 19 nt, Homo sapiens
  misc_RNA (1)...(19): siRNA sense strand
acagaaagcacagauaaua

SEQ ID NO: 1799367 - RNA, 19 nt, Homo sapiens
  misc_RNA (1)...(19): siRNA sense strand
cgaaagcuguuguugaauc

SEQ ID NO: 1799368 - RNA, 19 nt, Homo sapiens
  misc_RNA (1)...(19): siRNA sense strand
agacaaagaugaugaugag

SEQ ID NO: 1799369 - RNA, 19 nt, Homo sapiens
  misc_RNA (1)...(19): siRNA sense strand
uggagaagcugcugaagga

SEQ ID NO: 1799370 - RNA, 19 nt, Homo sapiens
  misc_RNA (1)...(19): siRNA sense strand
uaccaaggguuguaugaaa

SEQ ID NO: 1799371 - RNA, 19 nt, Homo sapiens
  misc_RNA (1)...(19): siRNA sense strand
gaaccacgcaagaucauug

SEQ ID NO: 1799372 - RNA, 19 nt, Homo sapiens
  misc_RNA (1)...(19): siRNA sense strand
gaacaucgagagcacauca

SEQ ID NO: 1799373 - RNA, 19 nt, Homo sapiens
  misc_RNA (1)...(19): siRNA sense strand
caacuucucuguggccuau

SEQ ID NO: 1799374 - RNA, 19 nt, Homo sapiens
  misc_RNA (1)...(19): siRNA sense strand
guggaagccucuaaaccua

SEQ ID NO: 1799375 - RNA, 19 nt, Homo sapiens
  misc_RNA (1)...(19): siRNA sense strand
gaauaucuccaucucaaug

SEQ ID NO: 1799376 - RNA, 19 nt, Homo sapiens
  misc_RNA (1)...(19): siRNA sense strand
gaggacgccugaaggaaga

SEQ ID NO: 1799377 - RNA, 19 nt, Homo sapiens
  misc_RNA (1)...(19): siRNA sense strand
gaggaaaggauaucacaga

SEQ ID NO: 1799378 - RNA, 19 nt, Homo sapiens
  misc_RNA (1)...(19): siRNA sense strand
uaaggaggcugagauggaa

SEQ ID NO: 1799379 - RNA, 19 nt, Homo sapiens
  misc_RNA (1)...(19): siRNA sense strand
gaauggaucaguauuucaa

SEQ ID NO: 1799380 - RNA, 19 nt, Homo sapiens
  misc_RNA (1)...(19): siRNA sense strand
ggaagaagaagaagaagag

SEQ ID NO: 1799381 - RNA, 19 nt, Homo sapiens
  misc_RNA (1)...(19): siRNA sense strand
gauguuaacagaggcaaua

SEQ ID NO: 1799382 - RNA, 19 nt, Homo sapiens
  misc_RNA (1)...(19): siRNA sense strand
ggacucaaaggaagacaaa

SEQ ID NO: 1799383 - RNA, 19 nt, Homo sapiens
  misc_RNA (1)...(19): siRNA sense strand
gaaauccaaggcuaucauu

SEQ ID NO: 1799384 - RNA, 19 nt, Homo sapiens
  misc_RNA (1)...(19): siRNA sense strand
uccgaaagcuguuguugaa

SEQ ID NO: 1799385 - RNA, 19 nt, Homo sapiens
  misc_RNA (1)...(19): siRNA sense strand
uaagaaccaugaugaagag

SEQ ID NO: 1799386 - RNA, 19 nt, Homo sapiens
  misc_RNA (1)...(19): siRNA sense strand
ggaacagaaguaugaauau

SEQ ID NO: 1799387 - RNA, 19 nt, Homo sapiens
  misc_RNA (1)...(19): siRNA sense strand
gaugaagagucccuugagu

SEQ ID NO: 1799388 - RNA, 19 nt, Homo sapiens
  misc_RNA (1)...(19): siRNA sense strand
ggaggagucugaccacaac

SEQ ID NO: 1799389 - RNA, 19 nt, Homo sapiens
  misc_RNA (1)...(19): siRNA sense strand
gaacugguaacacccauuc

SEQ ID NO: 1799390 - RNA, 19 nt, Homo sapiens
  misc_RNA (1)...(19): siRNA sense strand
gcauagcccuucagaaucc

SEQ ID NO: 1799391 - RNA, 19 nt, Homo sapiens
  misc_RNA (1)...(19): siRNA sense strand
caugacggcugucugcuau

SEQ ID NO: 1799392 - RNA, 19 nt, Homo sapiens
  misc_RNA (1)...(19): siRNA sense strand
gggacacuaugacaacuau

SEQ ID NO: 1799393 - RNA, 19 nt, Homo sapiens
  misc_RNA (1)...(19): siRNA sense strand
gaaagacaaagaugaugau

SEQ ID NO: 1799394 - RNA, 19 nt, Homo sapiens
  misc_RNA (1)...(19): siRNA sense strand
ggaaauucaugagccuaau

SEQ ID NO: 1799395 - RNA, 19 nt, Homo sapiens
  misc_RNA (1)...(19): siRNA sense strand
ucacagccuucuucaagug

SEQ ID NO: 1799396 - RNA, 19 nt, Homo sapiens
  misc_RNA (1)...(19): siRNA sense strand
gaggaggaguuagagaaga

SEQ ID NO: 1799397 - RNA, 19 nt, Homo sapiens
  misc_RNA (1)...(19): siRNA sense strand
ccauugaccagauccauaa

SEQ ID NO: 1799398 - RNA, 19 nt, Homo sapiens
  misc_RNA (1)...(19): siRNA sense strand
caaguuuauuggagaguug

SEQ ID NO: 1799399 - RNA, 19 nt, Homo sapiens
  misc_RNA (1)...(19): siRNA sense strand
gaaagcuguuguugaaucg

SEQ ID NO: 1799400 - RNA, 19 nt, Homo sapiens
  misc_RNA (1)...(19): siRNA sense strand
gugaguuccugcuugguuu

SEQ ID NO: 1799401 - RNA, 19 nt, Homo sapiens
  misc_RNA (1)...(19): siRNA sense strand
ggaggaaauggaagaagaa

SEQ ID NO: 1799402 - RNA, 19 nt, Homo sapiens
  misc_RNA (1)...(19): siRNA sense strand
cugaggacauggaaauuga

SEQ ID NO: 1799403 - RNA, 19 nt, Homo sapiens
  misc_RNA (1)...(19): siRNA sense strand
aggaauaucuccaucucaa

SEQ ID NO: 1799404 - RNA, 19 nt, Homo sapiens
  misc_RNA (1)...(19): siRNA sense strand
cagaggcaauaaugcauga

SEQ ID NO: 1799405 - RNA, 19 nt, Homo sapiens
  misc_RNA (1)...(19): siRNA sense strand
ugacgcagcuggccaucga

SEQ ID NO: 1799406 - RNA, 19 nt, Homo sapiens
  misc_RNA (1)...(19): siRNA sense strand
ucacaaugcugagaacauc

SEQ ID NO: 1799407 - RNA, 19 nt, Homo sapiens
  misc_RNA (1)...(19): siRNA sense strand
ccagccaacuugucucaga

SEQ ID NO: 1799408 - RNA, 19 nt, Homo sapiens
  misc_RNA (1)...(19): siRNA sense strand
gaaaggaggagaggaacug

SEQ ID NO: 1799409 - RNA, 19 nt, Homo sapiens
  misc_RNA (1)...(19): siRNA sense strand
ggacauggaaauugacauc

SEQ ID NO: 1799410 - RNA, 19 nt, Homo sapiens
  misc_RNA (1)...(19): siRNA sense strand
gaagaaauccaaggcuauc

SEQ ID NO: 1799411 - RNA, 19 nt, Homo sapiens
  misc_RNA (1)...(19): siRNA sense strand
ccaagaccauugaccagau

SEQ ID NO: 1799412 - RNA, 19 nt, Homo sapiens
  misc_RNA (1)...(19): siRNA sense strand
gaucugcgagggagcaauu

SEQ ID NO: 1799413 - RNA, 19 nt, Homo sapiens
  misc_RNA (1)...(19): siRNA sense strand
ucaaacugcuuaagaacca

SEQ ID NO: 1799414 - RNA, 19 nt, Homo sapiens
  misc_RNA (1)...(19): siRNA sense strand
uaacagaggcaauaaugca

SEQ ID NO: 1799415 - RNA, 19 nt, Homo sapiens
  misc_RNA (1)...(19): siRNA sense strand
gaaauucaugagccuaaug

SEQ ID NO: 1799416 - RNA, 19 nt, Homo sapiens
  misc_RNA (1)...(19): siRNA sense strand
uaugaaaucuuggaauugg

SEQ ID NO: 1799417 - RNA, 19 nt, Homo sapiens
  misc_RNA (1)...(19): siRNA sense strand
gaugucagaaggaguuuga

SEQ ID NO: 1799418 - RNA, 19 nt, Homo sapiens
  misc_RNA (1)...(19): siRNA sense strand
gagauuacaaagccucuga

SEQ ID NO: 1799419 - RNA, 19 nt, Homo sapiens
  misc_RNA (1)...(19): siRNA sense strand
guuaacagaggcaauaaug

SEQ ID NO: 1799420 - RNA, 19 nt, Homo sapiens
  misc_RNA (1)...(19): siRNA sense strand
ucagaaggaguuugagaaa

SEQ ID NO: 1799421 - RNA, 19 nt, Homo sapiens
  misc_RNA (1)...(19): siRNA sense strand
ggaggugacagcaucaaug

SEQ ID NO: 1799422 - RNA, 19 nt, Homo sapiens
  misc_RNA (1)...(19): siRNA sense strand
ugucugcuauucugcaauu

SEQ ID NO: 1799423 - RNA, 19 nt, Homo sapiens
  misc_RNA (1)...(19): siRNA sense strand
gcaaaagcauggguccuaa

SEQ ID NO: 1799424 - RNA, 19 nt, Homo sapiens
  misc_RNA (1)...(19): siRNA sense strand
agaaagcacagauaauaga

SEQ ID NO: 1799425 - RNA, 19 nt, Homo sapiens
  misc_RNA (1)...(19): siRNA sense strand
ccgaauggaucaguauuuc

SEQ ID NO: 1799426 - RNA, 19 nt, Homo sapiens
  misc_RNA (1)...(19): siRNA sense strand
uagcaaaccgguuccagaa

SEQ ID NO: 1799427 - RNA, 19 nt, Homo sapiens
  misc_RNA (1)...(19): siRNA sense strand
gagcuguucagggagauua

SEQ ID NO: 1799428 - RNA, 19 nt, Homo sapiens
  misc_RNA (1)...(19): siRNA sense strand
gaucaguggaagccucuaa

SEQ ID NO: 1799429 - RNA, 19 nt, Homo sapiens
  misc_RNA (1)...(19): siRNA sense strand
caggagaagcugagaguga

SEQ ID NO: 1799430 - RNA, 19 nt, Homo sapiens
  misc_RNA (1)...(19): siRNA sense strand
agaagaagaagaagaggaa

SEQ ID NO: 1799431 - RNA, 19 nt, Homo sapiens
  misc_RNA (1)...(19): siRNA sense strand
ggacguugcagugcugaaa

SEQ ID NO: 1799432 - RNA, 19 nt, Homo sapiens
  misc_RNA (1)...(19): siRNA sense strand
aacagaagguggaguauac

SEQ ID NO: 1799433 - RNA, 19 nt, Homo sapiens
  misc_RNA (1)...(19): siRNA sense strand
ccaucucaaugacaugaaa

SEQ ID NO: 1799434 - RNA, 19 nt, Homo sapiens
  misc_RNA (1)...(19): siRNA sense strand
ugaaggcggcucucucuga

SEQ ID NO: 1799435 - RNA, 19 nt, Homo sapiens
  misc_RNA (1)...(19): siRNA sense strand
uuaagaaccaugaugaaga

SEQ ID NO: 1799436 - RNA, 19 nt, Homo sapiens
  misc_RNA (1)...(19): siRNA sense strand
ggacaaggccaauaaaaca

SEQ ID NO: 1799437 - RNA, 19 nt, Homo sapiens
  misc_RNA (1)...(19): siRNA sense strand
gcagaagccagagggauug

SEQ ID NO: 1799438 - RNA, 19 nt, Homo sapiens
  misc_RNA (1)...(19): siRNA sense strand
ugagaaaggaggagaggaa

SEQ ID NO: 1799439 - RNA, 19 nt, Homo sapiens
  misc_RNA (1)...(19): siRNA sense strand
cagaggagcaggccaagga

SEQ ID NO: 1799440 - RNA, 19 nt, Homo sapiens
  misc_RNA (1)...(19): siRNA sense strand
cugcuauucugcaauuauu

SEQ ID NO: 1799441 - RNA, 19 nt, Homo sapiens
  misc_RNA (1)...(19): siRNA sense strand
ccucacgacucaccaagau

SEQ ID NO: 1799442 - RNA, 19 nt, Homo sapiens
  misc_RNA (1)...(19): siRNA sense strand
agaaagacaaagaugauga

SEQ ID NO: 1799443 - RNA, 19 nt, Homo sapiens
  misc_RNA (1)...(19): siRNA sense strand
cagagggauugccacauau

SEQ ID NO: 1799444 - RNA, 19 nt, Homo sapiens
  misc_RNA (1)...(19): siRNA sense strand
ccaacuugucucagaauuu

SEQ ID NO: 1799445 - RNA, 19 nt, Homo sapiens
  misc_RNA (1)...(19): siRNA sense strand
ggaggaugccuucuacagu

SEQ ID NO: 1799446 - RNA, 19 nt, Homo sapiens
  misc_RNA (1)...(19): siRNA sense strand
ggaagaggcucgggacaua

SEQ ID NO: 1799447 - RNA, 19 nt, Homo sapiens
  misc_RNA (1)...(19): siRNA sense strand
ccagagggauugccacaua

SEQ ID NO: 1799448 - RNA, 19 nt, Homo sapiens
  misc_RNA (1)...(19): siRNA sense strand
acaaaugucuguagaagaa

SEQ ID NO: 1799449 - RNA, 19 nt, Homo sapiens
  misc_RNA (1)...(19): siRNA sense strand
gagcauagcccuucagaau

SEQ ID NO: 1799450 - RNA, 19 nt, Homo sapiens
  misc_RNA (1)...(19): siRNA sense strand
gaucauugccacaguguua

SEQ ID NO: 1799451 - RNA, 19 nt, Homo sapiens
  misc_RNA (1)...(19): siRNA sense strand
ggaauuggcugaggacaug

SEQ ID NO: 1799452 - RNA, 19 nt, Homo sapiens
  misc_RNA (1)...(19): siRNA sense strand
ggaaauggaagaagaagaa

SEQ ID NO: 1799453 - RNA, 19 nt, Homo sapiens
  misc_RNA (1)...(19): siRNA sense strand
caacuugucucagaauuug

SEQ ID NO: 1799454 - RNA, 19 nt, Homo sapiens
  misc_RNA (1)...(19): siRNA sense strand
gaaggaauuucuaccugaa

SEQ ID NO: 1799455 - RNA, 19 nt, Homo sapiens
  misc_RNA (1)...(19): siRNA sense strand
gaggaugccuucuacaguu

SEQ ID NO: 1799456 - RNA, 19 nt, Homo sapiens
  misc_RNA (1)...(19): siRNA sense strand
gggcuuagcuggaaggaau

SEQ ID NO: 1799457 - RNA, 19 nt, Homo sapiens
  misc_RNA (1)...(19): siRNA sense strand
gaacagaagguggaguaua

SEQ ID NO: 1799458 - RNA, 19 nt, Homo sapiens
  misc_RNA (1)...(19): siRNA sense strand
gcaaaccgguuccagaauc

SEQ ID NO: 1799459 - RNA, 19 nt, Homo sapiens
  misc_RNA (1)...(19): siRNA sense strand
guuaaugaccgaagauaua

SEQ ID NO: 1799460 - RNA, 19 nt, Homo sapiens
  misc_RNA (1)...(19): siRNA sense strand
caaagaugaugaugagguu

SEQ ID NO: 1799461 - RNA, 19 nt, Homo sapiens
  misc_RNA (1)...(19): siRNA sense strand
agaaggaguuugagaaaga

SEQ ID NO: 1799462 - RNA, 19 nt, Homo sapiens
  misc_RNA (1)...(19): siRNA sense strand
gggaacagaaguaugaaua

SEQ ID NO: 1799463 - RNA, 19 nt, Homo sapiens
  misc_RNA (1)...(19): siRNA sense strand
gaauauaagucagaucagu

SEQ ID NO: 1799464 - RNA, 19 nt, Homo sapiens
  misc_RNA (1)...(19): siRNA sense strand
ccacagaaagcacagauaa

SEQ ID NO: 1799465 - RNA, 19 nt, Homo sapiens
  misc_RNA (1)...(19): siRNA sense strand
agacuucacuccauccuuu

SEQ ID NO: 1799466 - RNA, 19 nt, Homo sapiens
  misc_RNA (1)...(19): siRNA sense strand
acagaaagcacagauaaua

SEQ ID NO: 1799467 - RNA, 19 nt, Homo sapiens
  misc_RNA (1)...(19): siRNA sense strand
cgaaagcuguuguugaauc

SEQ ID NO: 1799468 - RNA, 19 nt, Homo sapiens
  misc_RNA (1)...(19): siRNA sense strand
agacaaagaugaugaugag

SEQ ID NO: 1799469 - RNA, 19 nt, Homo sapiens
  misc_RNA (1)...(19): siRNA sense strand
uggagaagcugcugaagga

SEQ ID NO: 1799470 - RNA, 19 nt, Homo sapiens
  misc_RNA (1)...(19): siRNA sense strand
uaccaaggguuguaugaaa

SEQ ID NO: 1799471 - RNA, 19 nt, Homo sapiens
  misc_RNA (1)...(19): siRNA sense strand
gaaccacgcaagaucauug

SEQ ID NO: 1799472 - RNA, 19 nt, Homo sapiens
  misc_RNA (1)...(19): siRNA sense strand
gaacaucgagagcacauca

SEQ ID NO: 1799473 - RNA, 19 nt, Homo sapiens
  misc_RNA (1)...(19): siRNA sense strand
caacuucucuguggccuau

SEQ ID NO: 1799474 - RNA, 19 nt, Homo sapiens
  misc_RNA (1)...(19): siRNA sense strand
guggaagccucuaaaccua

SEQ ID NO: 1799475 - RNA, 19 nt, Homo sapiens
  misc_RNA (1)...(19): siRNA sense strand
gaauaucuccaucucaaug

SEQ ID NO: 1799476 - RNA, 19 nt, Homo sapiens
  misc_RNA (1)...(19): siRNA sense strand
gaggacgccugaaggaaga

SEQ ID NO: 1799477 - RNA, 19 nt, Homo sapiens
  misc_RNA (1)...(19): siRNA sense strand
gaggaaaggauaucacaga

SEQ ID NO: 1799478 - RNA, 19 nt, Homo sapiens
  misc_RNA (1)...(19): siRNA sense strand
uaaggaggcugagauggaa

SEQ ID NO: 1799479 - RNA, 19 nt, Homo sapiens
  misc_RNA (1)...(19): siRNA sense strand
gaauggaucaguauuucaa

SEQ ID NO: 1799480 - RNA, 19 nt, Homo sapiens
  misc_RNA (1)...(19): siRNA sense strand
ggaagaagaagaagaagag

SEQ ID NO: 1799481 - RNA, 19 nt, Homo sapiens
  misc_RNA (1)...(19): siRNA sense strand
gauguuaacagaggcaaua

SEQ ID NO: 1799482 - RNA, 19 nt, Homo sapiens
  misc_RNA (1)...(19): siRNA sense strand
ggacucaaaggaagacaaa

SEQ ID NO: 1799483 - RNA, 19 nt, Homo sapiens
  misc_RNA (1)...(19): siRNA sense strand
gaaauccaaggcuaucauu

SEQ ID NO: 1799484 - RNA, 19 nt, Homo sapiens
  misc_RNA (1)...(19): siRNA sense strand
uccgaaagcuguuguugaa

SEQ ID NO: 1799485 - RNA, 19 nt, Homo sapiens
  misc_RNA (1)...(19): siRNA sense strand
uaagaaccaugaugaagag

SEQ ID NO: 1799486 - RNA, 19 nt, Homo sapiens
  misc_RNA (1)...(19): siRNA sense strand
ggaacagaaguaugaauau

SEQ ID NO: 1799487 - RNA, 19 nt, Homo sapiens
  misc_RNA (1)...(19): siRNA sense strand
gaugaagagucccuugagu

SEQ ID NO: 1799488 - RNA, 19 nt, Homo sapiens
  misc_RNA (1)...(19): siRNA sense strand
ggaggagucugaccacaac

SEQ ID NO: 1799489 - RNA, 19 nt, Homo sapiens
  misc_RNA (1)...(19): siRNA sense strand
gaacugguaacacccauuc

SEQ ID NO: 1799490 - RNA, 19 nt, Homo sapiens
  misc_RNA (1)...(19): siRNA sense strand
gcauagcccuucagaaucc

SEQ ID NO: 1799491 - RNA, 19 nt, Homo sapiens
  misc_RNA (1)...(19): siRNA sense strand
caugacggcugucugcuau

SEQ ID NO: 1799492 - RNA, 19 nt, Homo sapiens
  misc_RNA (1)...(19): siRNA sense strand
gggacacuaugacaacuau

SEQ ID NO: 1799493 - RNA, 19 nt, Homo sapiens
  misc_RNA (1)...(19): siRNA sense strand
gaaagacaaagaugaugau

SEQ ID NO: 1799494 - RNA, 19 nt, Homo sapiens
  misc_RNA (1)...(19): siRNA sense strand
ggaaauucaugagccuaau

SEQ ID NO: 1799495 - RNA, 19 nt, Homo sapiens
  misc_RNA (1)...(19): siRNA sense strand
ucacagccuucuucaagug

SEQ ID NO: 1799496 - RNA, 19 nt, Homo sapiens
  misc_RNA (1)...(19): siRNA sense strand
gaggaggaguuagagaaga

SEQ ID NO: 1799497 - RNA, 19 nt, Homo sapiens
  misc_RNA (1)...(19): siRNA sense strand
ccauugaccagauccauaa

SEQ ID NO: 1799498 - RNA, 19 nt, Homo sapiens
  misc_RNA (1)...(19): siRNA sense strand
caaguuuauuggagaguug

SEQ ID NO: 1799499 - RNA, 19 nt, Homo sapiens
  misc_RNA (1)...(19): siRNA sense strand
gaaagcuguuguugaaucg

SEQ ID NO: 1799500 - RNA, 19 nt, Homo sapiens
  misc_RNA (1)...(19): siRNA sense strand
gugaguuccugcuugguuu

SEQ ID NO: 1799501 - RNA, 19 nt, Homo sapiens
  misc_RNA (1)...(19): siRNA sense strand
ggaggaaauggaagaagaa

SEQ ID NO: 1799502 - RNA, 19 nt, Homo sapiens
  misc_RNA (1)...(19): siRNA sense strand
cugaggacauggaaauuga

SEQ ID NO: 1799503 - RNA, 19 nt, Homo sapiens
  misc_RNA (1)...(19): siRNA sense strand
aggaauaucuccaucucaa

SEQ ID NO: 1799504 - RNA, 19 nt, Homo sapiens
  misc_RNA (1)...(19): siRNA sense strand
cagaggcaauaaugcauga

SEQ ID NO: 1799505 - RNA, 19 nt, Homo sapiens
  misc_RNA (1)...(19): siRNA sense strand
ugacgcagcuggccaucga

SEQ ID NO: 1799506 - RNA, 19 nt, Homo sapiens
  misc_RNA (1)...(19): siRNA sense strand
ucacaaugcugagaacauc

SEQ ID NO: 1799507 - RNA, 19 nt, Homo sapiens
  misc_RNA (1)...(19): siRNA sense strand
ccagccaacuugucucaga

SEQ ID NO: 1799508 - RNA, 19 nt, Homo sapiens
  misc_RNA (1)...(19): siRNA sense strand
gaaaggaggagaggaacug

SEQ ID NO: 1799509 - RNA, 19 nt, Homo sapiens
  misc_RNA (1)...(19): siRNA sense strand
ggacauggaaauugacauc

SEQ ID NO: 1799510 - RNA, 19 nt, Homo sapiens
  misc_RNA (1)...(19): siRNA sense strand
gaagaaauccaaggcuauc

SEQ ID NO: 1799511 - RNA, 19 nt, Homo sapiens
  misc_RNA (1)...(19): siRNA sense strand
ccaagaccauugaccagau

SEQ ID NO: 1799512 - RNA, 19 nt, Homo sapiens
  misc_RNA (1)...(19): siRNA sense strand
gaucugcgagggagcaauu

SEQ ID NO: 1799513 - RNA, 19 nt, Homo sapiens
  misc_RNA (1)...(19): siRNA sense strand
ucaaacugcuuaagaacca

SEQ ID NO: 1799514 - RNA, 19 nt, Homo sapiens
  misc_RNA (1)...(19): siRNA sense strand
uaacagaggcaauaaugca

SEQ ID NO: 1799515 - RNA, 19 nt, Homo sapiens
  misc_RNA (1)...(19): siRNA sense strand
gaaauucaugagccuaaug

SEQ ID NO: 1799516 - RNA, 19 nt, Homo sapiens
  misc_RNA (1)...(19): siRNA sense strand
uaugaaaucuuggaauugg

SEQ ID NO: 1799517 - RNA, 19 nt, Homo sapiens
  misc_RNA (1)...(19): siRNA sense strand
gaugucagaaggaguuuga

SEQ ID NO: 1799518 - RNA, 19 nt, Homo sapiens
  misc_RNA (1)...(19): siRNA sense strand
gagauuacaaagccucuga

SEQ ID NO: 1799519 - RNA, 19 nt, Homo sapiens
  misc_RNA (1)...(19): siRNA sense strand
guuaacagaggcaauaaug

SEQ ID NO: 1799520 - RNA, 19 nt, Homo sapiens
  misc_RNA (1)...(19): siRNA sense strand
ucagaaggaguuugagaaa

SEQ ID NO: 1799521 - RNA, 19 nt, Homo sapiens
  misc_RNA (1)...(19): siRNA sense strand
ggaggugacagcaucaaug

SEQ ID NO: 1799522 - RNA, 19 nt, Homo sapiens
  misc_RNA (1)...(19): siRNA sense strand
ugucugcuauucugcaauu

SEQ ID NO: 1799523 - RNA, 19 nt, Homo sapiens
  misc_RNA (1)...(19): siRNA sense strand
gcaaaagcauggguccuaa

SEQ ID NO: 1799524 - RNA, 19 nt, Homo sapiens
  misc_RNA (1)...(19): siRNA sense strand
agaaagcacagauaauaga

SEQ ID NO: 1799525 - RNA, 19 nt, Homo sapiens
  misc_RNA (1)...(19): siRNA sense strand
ccgaauggaucaguauuuc

SEQ ID NO: 1799526 - RNA, 19 nt, Homo sapiens
  misc_RNA (1)...(19): siRNA sense strand
uagcaaaccgguuccagaa

SEQ ID NO: 1799527 - RNA, 19 nt, Homo sapiens
  misc_RNA (1)...(19): siRNA sense strand
gagcuguucagggagauua

SEQ ID NO: 1799528 - RNA, 19 nt, Homo sapiens
  misc_RNA (1)...(19): siRNA sense strand
gaucaguggaagccucuaa

SEQ ID NO: 1799529 - RNA, 19 nt, Homo sapiens
  misc_RNA (1)...(19): siRNA sense strand
caggagaagcugagaguga

SEQ ID NO: 1799530 - RNA, 19 nt, Homo sapiens
  misc_RNA (1)...(19): siRNA sense strand
agaagaagaagaagaggaa

SEQ ID NO: 1799531 - RNA, 19 nt, Homo sapiens
  misc_RNA (1)...(19): siRNA sense strand
ggacguugcagugcugaaa

SEQ ID NO: 1799532 - RNA, 19 nt, Homo sapiens
  misc_RNA (1)...(19): siRNA sense strand
aacagaagguggaguauac

SEQ ID NO: 1799533 - RNA, 19 nt, Homo sapiens
  misc_RNA (1)...(19): siRNA sense strand
ccaucucaaugacaugaaa

SEQ ID NO: 1799534 - RNA, 19 nt, Homo sapiens
  misc_RNA (1)...(19): siRNA sense strand
ugaaggcggcucucucuga

SEQ ID NO: 1799535 - RNA, 19 nt, Homo sapiens
  misc_RNA (1)...(19): siRNA sense strand
uuaagaaccaugaugaaga

SEQ ID NO: 1799536 - RNA, 19 nt, Homo sapiens
  misc_RNA (1)...(19): siRNA sense strand
ggacaaggccaauaaaaca

SEQ ID NO: 1799537 - RNA, 19 nt, Homo sapiens
  misc_RNA (1)...(19): siRNA sense strand
gcagaagccagagggauug

SEQ ID NO: 1799538 - RNA, 19 nt, Homo sapiens
  misc_RNA (1)...(19): siRNA sense strand
ugagaaaggaggagaggaa

SEQ ID NO: 1799539 - RNA, 19 nt, Homo sapiens
  misc_RNA (1)...(19): siRNA sense strand
cagaggagcaggccaagga

SEQ ID NO: 1799540 - RNA, 19 nt, Homo sapiens
  misc_RNA (1)...(19): siRNA sense strand
cugcuauucugcaauuauu

SEQ ID NO: 1799541 - RNA, 19 nt, Homo sapiens
  misc_RNA (1)...(19): siRNA sense strand
ccucacgacucaccaagau

SEQ ID NO: 1799542 - RNA, 19 nt, Homo sapiens
  misc_RNA (1)...(19): siRNA sense strand
agaaagacaaagaugauga

SEQ ID NO: 1799543 - RNA, 19 nt, Homo sapiens
  misc_RNA (1)...(19): siRNA sense strand
cagagggauugccacauau

SEQ ID NO: 1799544 - RNA, 19 nt, Homo sapiens
  misc_RNA (1)...(19): siRNA sense strand
ccaacuugucucagaauuu

SEQ ID NO: 1799545 - RNA, 19 nt, Homo sapiens
  misc_RNA (1)...(19): siRNA sense strand
ggaggaugccuucuacagu

SEQ ID NO: 1799546 - RNA, 19 nt, Homo sapiens
  misc_RNA (1)...(19): siRNA sense strand
guacuucaauuccacauua

SEQ ID NO: 1799547 - RNA, 19 nt, Homo sapiens
  misc_RNA (1)...(19): siRNA sense strand
ggaauaaucugcgggcuaa

SEQ ID NO: 1799548 - RNA, 19 nt, Homo sapiens
  misc_RNA (1)...(19): siRNA sense strand
gaaugaaagucgaaaguug

SEQ ID NO: 1799549 - RNA, 19 nt, Homo sapiens
  misc_RNA (1)...(19): siRNA sense strand
ugacagaccucaaucaaga

SEQ ID NO: 1799550 - RNA, 19 nt, Homo sapiens
  misc_RNA (1)...(19): siRNA sense strand
gaucugaccucacaguuau

SEQ ID NO: 1799551 - RNA, 19 nt, Homo sapiens
  misc_RNA (1)...(19): siRNA sense strand
gaacaacaggcccaucaua

SEQ ID NO: 1799552 - RNA, 19 nt, Homo sapiens
  misc_RNA (1)...(19): siRNA sense strand
ggacuagagcccaacauua

SEQ ID NO: 1799553 - RNA, 19 nt, Homo sapiens
  misc_RNA (1)...(19): siRNA sense strand
gaagauauuugcucaggau

SEQ ID NO: 1799554 - RNA, 19 nt, Homo sapiens
  misc_RNA (1)...(19): siRNA sense strand
gcaauuccauuccucaugu

SEQ ID NO: 1799555 - RNA, 19 nt, Homo sapiens
  misc_RNA (1)...(19): siRNA sense strand
gaagcaacauugauagcaa

SEQ ID NO: 1799556 - RNA, 19 nt, Homo sapiens
  misc_RNA (1)...(19): siRNA sense strand
uaacacggauaacucagua

SEQ ID NO: 1799557 - RNA, 19 nt, Homo sapiens
  misc_RNA (1)...(19): siRNA sense strand
gaaaguccuucccuucuca

SEQ ID NO: 1799558 - RNA, 19 nt, Homo sapiens
  misc_RNA (1)...(19): siRNA sense strand
gacuagagcccaacauuaa

SEQ ID NO: 1799559 - RNA, 19 nt, Homo sapiens
  misc_RNA (1)...(19): siRNA sense strand
cuacagcucucauuacaga

SEQ ID NO: 1799560 - RNA, 19 nt, Homo sapiens
  misc_RNA (1)...(19): siRNA sense strand
gaugcuagcucucugacaa

SEQ ID NO: 1799561 - RNA, 19 nt, Homo sapiens
  misc_RNA (1)...(19): siRNA sense strand
gaggaggaauugcacugua

SEQ ID NO: 1799562 - RNA, 19 nt, Homo sapiens
  misc_RNA (1)...(19): siRNA sense strand
cagacgagcugucagauuc

SEQ ID NO: 1799563 - RNA, 19 nt, Homo sapiens
  misc_RNA (1)...(19): siRNA sense strand
ccacccagauccauagaaa

SEQ ID NO: 1799564 - RNA, 19 nt, Homo sapiens
  misc_RNA (1)...(19): siRNA sense strand
cagagacgcuguccauuuc

SEQ ID NO: 1799565 - RNA, 19 nt, Homo sapiens
  misc_RNA (1)...(19): siRNA sense strand
gagaaagggcaauaucauu

SEQ ID NO: 1799566 - RNA, 19 nt, Homo sapiens
  misc_RNA (1)...(19): siRNA sense strand
ggaccugcaauuacgauua

SEQ ID NO: 1799567 - RNA, 19 nt, Homo sapiens
  misc_RNA (1)...(19): siRNA sense strand
ggauaacucaguauaagaa

SEQ ID NO: 1799568 - RNA, 19 nt, Homo sapiens
  misc_RNA (1)...(19): siRNA sense strand
gaccugcaauuacgauuau

SEQ ID NO: 1799569 - RNA, 19 nt, Homo sapiens
  misc_RNA (1)...(19): siRNA sense strand
ggaucugaccucacaguua

SEQ ID NO: 1799570 - RNA, 19 nt, Homo sapiens
  misc_RNA (1)...(19): siRNA sense strand
guauuuggauuaugcucua

SEQ ID NO: 1799571 - RNA, 19 nt, Homo sapiens
  misc_RNA (1)...(19): siRNA sense strand
gaaauaucuucuacaaagg

SEQ ID NO: 1799572 - RNA, 19 nt, Homo sapiens
  misc_RNA (1)...(19): siRNA sense strand
uagcagcagugauggaauu

SEQ ID NO: 1799573 - RNA, 19 nt, Homo sapiens
  misc_RNA (1)...(19): siRNA sense strand
acucacagaugucuucaaa

SEQ ID NO: 1799574 - RNA, 19 nt, Homo sapiens
  misc_RNA (1)...(19): siRNA sense strand
agaagacccugucagaaga

SEQ ID NO: 1799575 - RNA, 19 nt, Homo sapiens
  misc_RNA (1)...(19): siRNA sense strand
uaucaucuguggaauaauc

SEQ ID NO: 1799576 - RNA, 19 nt, Homo sapiens
  misc_RNA (1)...(19): siRNA sense strand
uggaauugcucauacagaa

SEQ ID NO: 1799577 - RNA, 19 nt, Homo sapiens
  misc_RNA (1)...(19): siRNA sense strand
gcaagagaagcaacauuga

SEQ ID NO: 1799578 - RNA, 19 nt, Homo sapiens
  misc_RNA (1)...(19): siRNA sense strand
ucagagacgcuguccauuu

SEQ ID NO: 1799579 - RNA, 19 nt, Homo sapiens
  misc_RNA (1)...(19): siRNA sense strand
gaaggaauucucuacuguu

SEQ ID NO: 1799580 - RNA, 19 nt, Homo sapiens
  misc_RNA (1)...(19): siRNA sense strand
guuaaaagcugcugaaaag

SEQ ID NO: 1799581 - RNA, 19 nt, Homo sapiens
  misc_RNA (1)...(19): siRNA sense strand
ggaagaauaagaaugaaag

SEQ ID NO: 1799582 - RNA, 19 nt, Homo sapiens
  misc_RNA (1)...(19): siRNA sense strand
gcuggaggcugcaacuuca

SEQ ID NO: 1799583 - RNA, 19 nt, Homo sapiens
  misc_RNA (1)...(19): siRNA sense strand
aagagaagcaacauugaua

SEQ ID NO: 1799584 - RNA, 19 nt, Homo sapiens
  misc_RNA (1)...(19): siRNA sense strand
gcacaucccugaggagacu

SEQ ID NO: 1799585 - RNA, 19 nt, Homo sapiens
  misc_RNA (1)...(19): siRNA sense strand
ccugugcacucuggauuua

SEQ ID NO: 1799586 - RNA, 19 nt, Homo sapiens
  misc_RNA (1)...(19): siRNA sense strand
ggauuccgcucgaucaaag

SEQ ID NO: 1799587 - RNA, 19 nt, Homo sapiens
  misc_RNA (1)...(19): siRNA sense strand
augguuaccuucagcaaua

SEQ ID NO: 1799588 - RNA, 19 nt, Homo sapiens
  misc_RNA (1)...(19): siRNA sense strand
caagaucccaaccgacuuu

SEQ ID NO: 1799589 - RNA, 19 nt, Homo sapiens
  misc_RNA (1)...(19): siRNA sense strand
caggauaucaagcaccuua

SEQ ID NO: 1799590 - RNA, 19 nt, Homo sapiens
  misc_RNA (1)...(19): siRNA sense strand
ucaagcaccuuacuuucug

SEQ ID NO: 1799591 - RNA, 19 nt, Homo sapiens
  misc_RNA (1)...(19): siRNA sense strand
ccacccaguugaugucuau

SEQ ID NO: 1799592 - RNA, 19 nt, Homo sapiens
  misc_RNA (1)...(19): siRNA sense strand
uauaagaaccacccaguug

SEQ ID NO: 1799593 - RNA, 19 nt, Homo sapiens
  misc_RNA (1)...(19): siRNA sense strand
gagaacaacaggcccauca

SEQ ID NO: 1799594 - RNA, 19 nt, Homo sapiens
  misc_RNA (1)...(19): siRNA sense strand
ggagaaagggcaauaucau

SEQ ID NO: 1799595 - RNA, 19 nt, Homo sapiens
  misc_RNA (1)...(19): siRNA sense strand
guagagggcagcgaaauug

SEQ ID NO: 1799596 - RNA, 19 nt, Homo sapiens
  misc_RNA (1)...(19): siRNA sense strand
ugaaaccucucuuggucuu

SEQ ID NO: 1799597 - RNA, 19 nt, Homo sapiens
  misc_RNA (1)...(19): siRNA sense strand
gcagcgaaauuggcucaga

SEQ ID NO: 1799598 - RNA, 19 nt, Homo sapiens
  misc_RNA (1)...(19): siRNA sense strand
gcagcaggguguccuccaa

SEQ ID NO: 1799599 - RNA, 19 nt, Homo sapiens
  misc_RNA (1)...(19): siRNA sense strand
ggccaagaguguccauuca

SEQ ID NO: 1799600 - RNA, 19 nt, Homo sapiens
  misc_RNA (1)...(19): siRNA sense strand
ccaagaguguccauucagu

SEQ ID NO: 1799601 - RNA, 19 nt, Homo sapiens
  misc_RNA (1)...(19): siRNA sense strand
aaggaauucucuacuguug

SEQ ID NO: 1799602 - RNA, 19 nt, Homo sapiens
  misc_RNA (1)...(19): siRNA sense strand
aaagggcaauaucauucua

SEQ ID NO: 1799603 - RNA, 19 nt, Homo sapiens
  misc_RNA (1)...(19): siRNA sense strand
ggaaggagaacaugguuac

SEQ ID NO: 1799604 - RNA, 19 nt, Homo sapiens
  misc_RNA (1)...(19): siRNA sense strand
caaacuauaccucucugaa

SEQ ID NO: 1799605 - RNA, 19 nt, Homo sapiens
  misc_RNA (1)...(19): siRNA sense strand
gauauuugcucaggaucug

SEQ ID NO: 1799606 - RNA, 19 nt, Homo sapiens
  misc_RNA (1)...(19): siRNA sense strand
gaaagggcaauaucauucu

SEQ ID NO: 1799607 - RNA, 19 nt, Homo sapiens
  misc_RNA (1)...(19): siRNA sense strand
ggcaguggcuccuggaagu

SEQ ID NO: 1799608 - RNA, 19 nt, Homo sapiens
  misc_RNA (1)...(19): siRNA sense strand
aaguuguccuugcaaguua

SEQ ID NO: 1799609 - RNA, 19 nt, Homo sapiens
  misc_RNA (1)...(19): siRNA sense strand
ucacagaugucuucaaacc

SEQ ID NO: 1799610 - RNA, 19 nt, Homo sapiens
  misc_RNA (1)...(19): siRNA sense strand
ugaugucuauuguggcuuu

SEQ ID NO: 1799611 - RNA, 19 nt, Homo sapiens
  misc_RNA (1)...(19): siRNA sense strand
gcacuguacuugggcuugu

SEQ ID NO: 1799612 - RNA, 19 nt, Homo sapiens
  misc_RNA (1)...(19): siRNA sense strand
gagacgcuguccauuucuu

SEQ ID NO: 1799613 - RNA, 19 nt, Homo sapiens
  misc_RNA (1)...(19): siRNA sense strand
gcugugagucucugaaaga

SEQ ID NO: 1799614 - RNA, 19 nt, Homo sapiens
  misc_RNA (1)...(19): siRNA sense strand
ccucuaagcuucugaaacc

SEQ ID NO: 1799615 - RNA, 19 nt, Homo sapiens
  misc_RNA (1)...(19): siRNA sense strand
ccacacgggcuuauaagga

SEQ ID NO: 1799616 - RNA, 19 nt, Homo sapiens
  misc_RNA (1)...(19): siRNA sense strand
caucaccaccacggaauua

SEQ ID NO: 1799617 - RNA, 19 nt, Homo sapiens
  misc_RNA (1)...(19): siRNA sense strand
ggagaucgcaagagaagca

SEQ ID NO: 1799618 - RNA, 19 nt, Homo sapiens
  misc_RNA (1)...(19): siRNA sense strand
caacagggacucagaaagc

SEQ ID NO: 1799619 - RNA, 19 nt, Homo sapiens
  misc_RNA (1)...(19): siRNA sense strand
acacggauaacucaguaua

SEQ ID NO: 1799620 - RNA, 19 nt, Homo sapiens
  misc_RNA (1)...(19): siRNA sense strand
gaaaguuguccuugcaagu

SEQ ID NO: 1799621 - RNA, 19 nt, Homo sapiens
  misc_RNA (1)...(19): siRNA sense strand
gggaaggagaacaugguua

SEQ ID NO: 1799622 - RNA, 19 nt, Homo sapiens
  misc_RNA (1)...(19): siRNA sense strand
aacuauaccucucugaaug

SEQ ID NO: 1799623 - RNA, 19 nt, Homo sapiens
  misc_RNA (1)...(19): siRNA sense strand
caagagaagcaacauugau

SEQ ID NO: 1799624 - RNA, 19 nt, Homo sapiens
  misc_RNA (1)...(19): siRNA sense strand
gaagacccugucagaagaa

SEQ ID NO: 1799625 - RNA, 19 nt, Homo sapiens
  misc_RNA (1)...(19): siRNA sense strand
uaucaacaguggcagaaag

SEQ ID NO: 1799626 - RNA, 19 nt, Homo sapiens
  misc_RNA (1)...(19): siRNA sense strand
cucuuggucuucacauuua

SEQ ID NO: 1799627 - RNA, 19 nt, Homo sapiens
  misc_RNA (1)...(19): siRNA sense strand
agaaagggcaauaucauuc

SEQ ID NO: 1799628 - RNA, 19 nt, Homo sapiens
  misc_RNA (1)...(19): siRNA sense strand
auucaugccucuauggauu

SEQ ID NO: 1799629 - RNA, 19 nt, Homo sapiens
  misc_RNA (1)...(19): siRNA sense strand
uagaagacccugucagaag

SEQ ID NO: 1799630 - RNA, 19 nt, Homo sapiens
  misc_RNA (1)...(19): siRNA sense strand
guagaagacccugucagaa

SEQ ID NO: 1799631 - RNA, 19 nt, Homo sapiens
  misc_RNA (1)...(19): siRNA sense strand
caagcaccuuacuuucuga

SEQ ID NO: 1799632 - RNA, 19 nt, Homo sapiens
  misc_RNA (1)...(19): siRNA sense strand
gcucagagacgcuguccau

SEQ ID NO: 1799633 - RNA, 19 nt, Homo sapiens
  misc_RNA (1)...(19): siRNA sense strand
aaaagacuguggccuguaa

SEQ ID NO: 1799634 - RNA, 19 nt, Homo sapiens
  misc_RNA (1)...(19): siRNA sense strand
caaaugcugauguggaaau

SEQ ID NO: 1799635 - RNA, 19 nt, Homo sapiens
  misc_RNA (1)...(19): siRNA sense strand
gugaugagaguauguuuca

SEQ ID NO: 1799636 - RNA, 19 nt, Homo sapiens
  misc_RNA (1)...(19): siRNA sense strand
cuauaccucucugaaugua

SEQ ID NO: 1799637 - RNA, 19 nt, Homo sapiens
  misc_RNA (1)...(19): siRNA sense strand
gauaucaagcaccuuacuu

SEQ ID NO: 1799638 - RNA, 19 nt, Homo sapiens
  misc_RNA (1)...(19): siRNA sense strand
gagaacaugguuaccuuca

SEQ ID NO: 1799639 - RNA, 19 nt, Homo sapiens
  misc_RNA (1)...(19): siRNA sense strand
cauuaacggauuccucuaa

SEQ ID NO: 1799640 - RNA, 19 nt, Homo sapiens
  misc_RNA (1)...(19): siRNA sense strand
caccuuacuuucugacugu

SEQ ID NO: 1799641 - RNA, 19 nt, Homo sapiens
  misc_RNA (1)...(19): siRNA sense strand
aaacuauaccucucugaau

SEQ ID NO: 1799642 - RNA, 19 nt, Homo sapiens
  misc_RNA (1)...(19): siRNA sense strand
cacacgggcuuauaaggau

SEQ ID NO: 1799643 - RNA, 19 nt, Homo sapiens
  misc_RNA (1)...(19): siRNA sense strand
cgaaaacacuagaaauauc

SEQ ID NO: 1799644 - RNA, 19 nt, Homo sapiens
  misc_RNA (1)...(19): siRNA sense strand
gcagccuucgccaaacuua

SEQ ID NO: 1799645 - RNA, 19 nt, Homo sapiens
  misc_RNA (1)...(19): siRNA sense strand
cuuacgagcucaacgaucu

SEQ ID NO: 1799646 - RNA, 19 nt, Homo sapiens
  misc_RNA (1)...(19): siRNA sense strand
cagauuggauugcuauuua

SEQ ID NO: 1799647 - RNA, 19 nt, Homo sapiens
  misc_RNA (1)...(19): siRNA sense strand
gagcauacuuugaaugaga

SEQ ID NO: 1799648 - RNA, 19 nt, Homo sapiens
  misc_RNA (1)...(19): siRNA sense strand
gaagagucauguugguaaa

SEQ ID NO: 1799649 - RNA, 19 nt, Homo sapiens
  misc_RNA (1)...(19): siRNA sense strand
caacuuugaugacuaugaa

SEQ ID NO: 1799650 - RNA, 19 nt, Homo sapiens
  misc_RNA (1)...(19): siRNA sense strand
gcagaagguuguuaaacug

SEQ ID NO: 1799651 - RNA, 19 nt, Homo sapiens
  misc_RNA (1)...(19): siRNA sense strand
gaagauauccgugucucua

SEQ ID NO: 1799652 - RNA, 19 nt, Homo sapiens
  misc_RNA (1)...(19): siRNA sense strand
aggcagaacuuggacauua

SEQ ID NO: 1799653 - RNA, 19 nt, Homo sapiens
  misc_RNA (1)...(19): siRNA sense strand
ggaagagucauguugguaa

SEQ ID NO: 1799654 - RNA, 19 nt, Homo sapiens
  misc_RNA (1)...(19): siRNA sense strand
gagaauccaacucagaaua

SEQ ID NO: 1799655 - RNA, 19 nt, Homo sapiens
  misc_RNA (1)...(19): siRNA sense strand
ggagauaccagcaacuuug

SEQ ID NO: 1799656 - RNA, 19 nt, Homo sapiens
  misc_RNA (1)...(19): siRNA sense strand
gaauaaugccggacuugaa

SEQ ID NO: 1799657 - RNA, 19 nt, Homo sapiens
  misc_RNA (1)...(19): siRNA sense strand
ggucacagacuuuggguuu

SEQ ID NO: 1799658 - RNA, 19 nt, Homo sapiens
  misc_RNA (1)...(19): siRNA sense strand
gaagcuccauucauaccaa

SEQ ID NO: 1799659 - RNA, 19 nt, Homo sapiens
  misc_RNA (1)...(19): siRNA sense strand
uaggagugcuaaucuauga

SEQ ID NO: 1799660 - RNA, 19 nt, Homo sapiens
  misc_RNA (1)...(19): siRNA sense strand
gaacaguauuaugccauga

SEQ ID NO: 1799661 - RNA, 19 nt, Homo sapiens
  misc_RNA (1)...(19): siRNA sense strand
uaaagaauggugucaguga

SEQ ID NO: 1799662 - RNA, 19 nt, Homo sapiens
  misc_RNA (1)...(19): siRNA sense strand
cagcaacuuugaugacuau

SEQ ID NO: 1799663 - RNA, 19 nt, Homo sapiens
  misc_RNA (1)...(19): siRNA sense strand
gaauccaacucagaauaau

SEQ ID NO: 1799664 - RNA, 19 nt, Homo sapiens
  misc_RNA (1)...(19): siRNA sense strand
uaagaagaauuggaagguu

SEQ ID NO: 1799665 - RNA, 19 nt, Homo sapiens
  misc_RNA (1)...(19): siRNA sense strand
ucacaucuaagaagaauug

SEQ ID NO: 1799666 - RNA, 19 nt, Homo sapiens
  misc_RNA (1)...(19): siRNA sense strand
gaccaaccaauucagauuu

SEQ ID NO: 1799667 - RNA, 19 nt, Homo sapiens
  misc_RNA (1)...(19): siRNA sense strand
gauauccgugucucuauaa

SEQ ID NO: 1799668 - RNA, 19 nt, Homo sapiens
  misc_RNA (1)...(19): siRNA sense strand
ggcagaacuuggacauuau

SEQ ID NO: 1799669 - RNA, 19 nt, Homo sapiens
  misc_RNA (1)...(19): siRNA sense strand
agauauccgugucucuaua

SEQ ID NO: 1799670 - RNA, 19 nt, Homo sapiens
  misc_RNA (1)...(19): siRNA sense strand
ggagugcuaaucuaugaaa

SEQ ID NO: 1799671 - RNA, 19 nt, Homo sapiens
  misc_RNA (1)...(19): siRNA sense strand
gauaagcagaagguuguua

SEQ ID NO: 1799672 - RNA, 19 nt, Homo sapiens
  misc_RNA (1)...(19): siRNA sense strand
ugaugacuaugaagaagaa

SEQ ID NO: 1799673 - RNA, 19 nt, Homo sapiens
  misc_RNA (1)...(19): siRNA sense strand
caucuaagaagaauuggaa

SEQ ID NO: 1799674 - RNA, 19 nt, Homo sapiens
  misc_RNA (1)...(19): siRNA sense strand
ucagcaagggcuacaauaa

SEQ ID NO: 1799675 - RNA, 19 nt, Homo sapiens
  misc_RNA (1)...(19): siRNA sense strand
gggagaauccaacucagaa

SEQ ID NO: 1799676 - RNA, 19 nt, Homo sapiens
  misc_RNA (1)...(19): siRNA sense strand
ccagcaacuuugaugacua

SEQ ID NO: 1799677 - RNA, 19 nt, Homo sapiens
  misc_RNA (1)...(19): siRNA sense strand
gaagguuguuaaacugaag

SEQ ID NO: 1799678 - RNA, 19 nt, Homo sapiens
  misc_RNA (1)...(19): siRNA sense strand
ccauucauaccaaaguuua

SEQ ID NO: 1799679 - RNA, 19 nt, Homo sapiens
  misc_RNA (1)...(19): siRNA sense strand
accaaccaauucagauuua

SEQ ID NO: 1799680 - RNA, 19 nt, Homo sapiens
  misc_RNA (1)...(19): siRNA sense strand
gaauuggaagguucaguga

SEQ ID NO: 1799681 - RNA, 19 nt, Homo sapiens
  misc_RNA (1)...(19): siRNA sense strand
gagauaccagcaacuuuga

SEQ ID NO: 1799682 - RNA, 19 nt, Homo sapiens
  misc_RNA (1)...(19): siRNA sense strand
uagagcauacuuugaauga

SEQ ID NO: 1799683 - RNA, 19 nt, Homo sapiens
  misc_RNA (1)...(19): siRNA sense strand
gcagaccaaccaauucaga

SEQ ID NO: 1799684 - RNA, 19 nt, Homo sapiens
  misc_RNA (1)...(19): siRNA sense strand
agaauccaacucagaauaa

SEQ ID NO: 1799685 - RNA, 19 nt, Homo sapiens
  misc_RNA (1)...(19): siRNA sense strand
guucuaugcagcucagaua

SEQ ID NO: 1799686 - RNA, 19 nt, Homo sapiens
  misc_RNA (1)...(19): siRNA sense strand
gaauggugucagugauaua

SEQ ID NO: 1799687 - RNA, 19 nt, Homo sapiens
  misc_RNA (1)...(19): siRNA sense strand
gugcuaaucuaugaaaugg

SEQ ID NO: 1799688 - RNA, 19 nt, Homo sapiens
  misc_RNA (1)...(19): siRNA sense strand
gcaacuuugaugacuauga

SEQ ID NO: 1799689 - RNA, 19 nt, Homo sapiens
  misc_RNA (1)...(19): siRNA sense strand
gaauauuacaggcagugaa

SEQ ID NO: 1799690 - RNA, 19 nt, Homo sapiens
  misc_RNA (1)...(19): siRNA sense strand
gaagguugaagcuccauuc

SEQ ID NO: 1799691 - RNA, 19 nt, Homo sapiens
  misc_RNA (1)...(19): siRNA sense strand
ggauuugaccaagagauuu

SEQ ID NO: 1799692 - RNA, 19 nt, Homo sapiens
  misc_RNA (1)...(19): siRNA sense strand
guuaaaggcagaacuugga

SEQ ID NO: 1799693 - RNA, 19 nt, Homo sapiens
  misc_RNA (1)...(19): siRNA sense strand
gaauuuuccuuuccuuguu

SEQ ID NO: 1799694 - RNA, 19 nt, Homo sapiens
  misc_RNA (1)...(19): siRNA sense strand
cgacagauuggauugcuau

SEQ ID NO: 1799695 - RNA, 19 nt, Homo sapiens
  misc_RNA (1)...(19): siRNA sense strand
agaauggugucagugauau

SEQ ID NO: 1799696 - RNA, 19 nt, Homo sapiens
  misc_RNA (1)...(19): siRNA sense strand
gauuugaccaagagauuug

SEQ ID NO: 1799697 - RNA, 19 nt, Homo sapiens
  misc_RNA (1)...(19): siRNA sense strand
ucagauagugcuaacauuc

SEQ ID NO: 1799698 - RNA, 19 nt, Homo sapiens
  misc_RNA (1)...(19): siRNA sense strand
uagauaagcagaagguugu

SEQ ID NO: 1799699 - RNA, 19 nt, Homo sapiens
  misc_RNA (1)...(19): siRNA sense strand
aagaauggugucagugaua

SEQ ID NO: 1799700 - RNA, 19 nt, Homo sapiens
  misc_RNA (1)...(19): siRNA sense strand
aaagaauggugucagugau

SEQ ID NO: 1799701 - RNA, 19 nt, Homo sapiens
  misc_RNA (1)...(19): siRNA sense strand
uuggaaaucuaaagaaugg

SEQ ID NO: 1799702 - RNA, 19 nt, Homo sapiens
  misc_RNA (1)...(19): siRNA sense strand
gcagaacuuggacauuaug

SEQ ID NO: 1799703 - RNA, 19 nt, Homo sapiens
  misc_RNA (1)...(19): siRNA sense strand
ggaguaugcuuuuaaggau

SEQ ID NO: 1799704 - RNA, 19 nt, Homo sapiens
  misc_RNA (1)...(19): siRNA sense strand
uauuacaggcagugaauuu

SEQ ID NO: 1799705 - RNA, 19 nt, Homo sapiens
  misc_RNA (1)...(19): siRNA sense strand
gcucagauagugcuaacau

SEQ ID NO: 1799706 - RNA, 19 nt, Homo sapiens
  misc_RNA (1)...(19): siRNA sense strand
gauaccagcaacuuugaug

SEQ ID NO: 1799707 - RNA, 19 nt, Homo sapiens
  misc_RNA (1)...(19): siRNA sense strand
acacaaagccacugaacag

SEQ ID NO: 1799708 - RNA, 19 nt, Homo sapiens
  misc_RNA (1)...(19): siRNA sense strand
ucuaaagaauggugucagu

SEQ ID NO: 1799709 - RNA, 19 nt, Homo sapiens
  misc_RNA (1)...(19): siRNA sense strand
ccacuucaguucagaucuc

SEQ ID NO: 1799710 - RNA, 19 nt, Homo sapiens
  misc_RNA (1)...(19): siRNA sense strand
ugaagcaaauagagcauac

SEQ ID NO: 1799711 - RNA, 19 nt, Homo sapiens
  misc_RNA (1)...(19): siRNA sense strand
guuguuaaacugaagcaaa

SEQ ID NO: 1799712 - RNA, 19 nt, Homo sapiens
  misc_RNA (1)...(19): siRNA sense strand
agaagguuguuaaacugaa

SEQ ID NO: 1799713 - RNA, 19 nt, Homo sapiens
  misc_RNA (1)...(19): siRNA sense strand
caaccaauucagauuuaug

SEQ ID NO: 1799714 - RNA, 19 nt, Homo sapiens
  misc_RNA (1)...(19): siRNA sense strand
ccaaccaauucagauuuau

SEQ ID NO: 1799715 - RNA, 19 nt, Homo sapiens
  misc_RNA (1)...(19): siRNA sense strand
ucgaguaccuccauucacu

SEQ ID NO: 1799716 - RNA, 19 nt, Homo sapiens
  misc_RNA (1)...(19): siRNA sense strand
ucagaauaaugccggacuu

SEQ ID NO: 1799717 - RNA, 19 nt, Homo sapiens
  misc_RNA (1)...(19): siRNA sense strand
gaagaagauauccgugucu

SEQ ID NO: 1799718 - RNA, 19 nt, Homo sapiens
  misc_RNA (1)...(19): siRNA sense strand
cagcaagggcuacaauaag

SEQ ID NO: 1799719 - RNA, 19 nt, Homo sapiens
  misc_RNA (1)...(19): siRNA sense strand
guaccuccauucacuagac

SEQ ID NO: 1799720 - RNA, 19 nt, Homo sapiens
  misc_RNA (1)...(19): siRNA sense strand
cagaagguuguuaaacuga

SEQ ID NO: 1799721 - RNA, 19 nt, Homo sapiens
  misc_RNA (1)...(19): siRNA sense strand
gaguaugcuuuuaaggaua

SEQ ID NO: 1799722 - RNA, 19 nt, Homo sapiens
  misc_RNA (1)...(19): siRNA sense strand
augccggacuugaagauuu

SEQ ID NO: 1799723 - RNA, 19 nt, Homo sapiens
  misc_RNA (1)...(19): siRNA sense strand
ggagaauccaacucagaau

SEQ ID NO: 1799724 - RNA, 19 nt, Homo sapiens
  misc_RNA (1)...(19): siRNA sense strand
cagguggauuugaccaaga

SEQ ID NO: 1799725 - RNA, 19 nt, Homo sapiens
  misc_RNA (1)...(19): siRNA sense strand
auaagcagaagguuguuaa

SEQ ID NO: 1799726 - RNA, 19 nt, Homo sapiens
  misc_RNA (1)...(19): siRNA sense strand
cgacuggaguaugcuuuua

SEQ ID NO: 1799727 - RNA, 19 nt, Homo sapiens
  misc_RNA (1)...(19): siRNA sense strand
agaccaaccaauucagauu

SEQ ID NO: 1799728 - RNA, 19 nt, Homo sapiens
  misc_RNA (1)...(19): siRNA sense strand
uaagcagaagguuguuaaa

SEQ ID NO: 1799729 - RNA, 19 nt, Homo sapiens
  misc_RNA (1)...(19): siRNA sense strand
agcagaagguuguuaaacu

SEQ ID NO: 1799730 - RNA, 19 nt, Homo sapiens
  misc_RNA (1)...(19): siRNA sense strand
ucacagacuuuggguuugc

SEQ ID NO: 1799731 - RNA, 19 nt, Homo sapiens
  misc_RNA (1)...(19): siRNA sense strand
gagugcuaaucuaugaaau

SEQ ID NO: 1799732 - RNA, 19 nt, Homo sapiens
  misc_RNA (1)...(19): siRNA sense strand
acagauuggauugcuauuu

SEQ ID NO: 1799733 - RNA, 19 nt, Homo sapiens
  misc_RNA (1)...(19): siRNA sense strand
gcuauauccaggucacaga

SEQ ID NO: 1799734 - RNA, 19 nt, Homo sapiens
  misc_RNA (1)...(19): siRNA sense strand
ccgugucucuauaacagaa

SEQ ID NO: 1799735 - RNA, 19 nt, Homo sapiens
  misc_RNA (1)...(19): siRNA sense strand
guuaaacugaagcaaauag

SEQ ID NO: 1799736 - RNA, 19 nt, Homo sapiens
  misc_RNA (1)...(19): siRNA sense strand
agaauaaugccggacuuga

SEQ ID NO: 1799737 - RNA, 19 nt, Homo sapiens
  misc_RNA (1)...(19): siRNA sense strand
ggauuggugggcauuagga

SEQ ID NO: 1799738 - RNA, 19 nt, Homo sapiens
  misc_RNA (1)...(19): siRNA sense strand
cgaguaccuccauucacua

SEQ ID NO: 1799739 - RNA, 19 nt, Homo sapiens
  misc_RNA (1)...(19): siRNA sense strand
agauagugcuaacauucga

SEQ ID NO: 1799740 - RNA, 19 nt, Homo sapiens
  misc_RNA (1)...(19): siRNA sense strand
uagccaaagccaaagaaga

SEQ ID NO: 1799741 - RNA, 19 nt, Homo sapiens
  misc_RNA (1)...(19): siRNA sense strand
agcaagggcuacaauaagg

SEQ ID NO: 1799742 - RNA, 19 nt, Homo sapiens
  misc_RNA (1)...(19): siRNA sense strand
ugacuaugaagaagaagau

SEQ ID NO: 1799743 - RNA, 19 nt, Homo sapiens
  misc_RNA (1)...(19): siRNA sense strand
aauggugucagugauauaa

SEQ ID NO: 1799744 - RNA, 19 nt, Homo sapiens
  misc_RNA (1)...(19): siRNA sense strand
aagcaaauagagcauacuu

SEQ ID NO: 1799745 - RNA, 19 nt, Homo sapiens
  misc_RNA (1)...(19): siRNA sense strand
ccaaagccaaagaagacuu

SEQ ID NO: 1799746 - RNA, 19 nt, Homo sapiens
  misc_RNA (1)...(19): siRNA sense strand
cagauuggauugcuauuua

SEQ ID NO: 1799747 - RNA, 19 nt, Homo sapiens
  misc_RNA (1)...(19): siRNA sense strand
gagcauacuuugaaugaga

SEQ ID NO: 1799748 - RNA, 19 nt, Homo sapiens
  misc_RNA (1)...(19): siRNA sense strand
gaagagucauguugguaaa

SEQ ID NO: 1799749 - RNA, 19 nt, Homo sapiens
  misc_RNA (1)...(19): siRNA sense strand
caacuuugaugacuaugaa

SEQ ID NO: 1799750 - RNA, 19 nt, Homo sapiens
  misc_RNA (1)...(19): siRNA sense strand
gcagaagguuguuaaacug

SEQ ID NO: 1799751 - RNA, 19 nt, Homo sapiens
  misc_RNA (1)...(19): siRNA sense strand
gaagauauccgugucucua

SEQ ID NO: 1799752 - RNA, 19 nt, Homo sapiens
  misc_RNA (1)...(19): siRNA sense strand
aggcagaacuuggacauua

SEQ ID NO: 1799753 - RNA, 19 nt, Homo sapiens
  misc_RNA (1)...(19): siRNA sense strand
ggaagagucauguugguaa

SEQ ID NO: 1799754 - RNA, 19 nt, Homo sapiens
  misc_RNA (1)...(19): siRNA sense strand
gagaauccaacucagaaua

SEQ ID NO: 1799755 - RNA, 19 nt, Homo sapiens
  misc_RNA (1)...(19): siRNA sense strand
ggagauaccagcaacuuug

SEQ ID NO: 1799756 - RNA, 19 nt, Homo sapiens
  misc_RNA (1)...(19): siRNA sense strand
gaauaaugccggacuugaa

SEQ ID NO: 1799757 - RNA, 19 nt, Homo sapiens
  misc_RNA (1)...(19): siRNA sense strand
ggucacagacuuuggguuu

SEQ ID NO: 1799758 - RNA, 19 nt, Homo sapiens
  misc_RNA (1)...(19): siRNA sense strand
gaagcuccauucauaccaa

SEQ ID NO: 1799759 - RNA, 19 nt, Homo sapiens
  misc_RNA (1)...(19): siRNA sense strand
uaggagugcuaaucuauga

SEQ ID NO: 1799760 - RNA, 19 nt, Homo sapiens
  misc_RNA (1)...(19): siRNA sense strand
gaacaguauuaugccauga

SEQ ID NO: 1799761 - RNA, 19 nt, Homo sapiens
  misc_RNA (1)...(19): siRNA sense strand
uaaagaauggugucaguga

SEQ ID NO: 1799762 - RNA, 19 nt, Homo sapiens
  misc_RNA (1)...(19): siRNA sense strand
cagcaacuuugaugacuau

SEQ ID NO: 1799763 - RNA, 19 nt, Homo sapiens
  misc_RNA (1)...(19): siRNA sense strand
gaauccaacucagaauaau

SEQ ID NO: 1799764 - RNA, 19 nt, Homo sapiens
  misc_RNA (1)...(19): siRNA sense strand
uaagaagaauuggaagguu

SEQ ID NO: 1799765 - RNA, 19 nt, Homo sapiens
  misc_RNA (1)...(19): siRNA sense strand
ucacaucuaagaagaauug

SEQ ID NO: 1799766 - RNA, 19 nt, Homo sapiens
  misc_RNA (1)...(19): siRNA sense strand
gaccaaccaauucagauuu

SEQ ID NO: 1799767 - RNA, 19 nt, Homo sapiens
  misc_RNA (1)...(19): siRNA sense strand
gauauccgugucucuauaa

SEQ ID NO: 1799768 - RNA, 19 nt, Homo sapiens
  misc_RNA (1)...(19): siRNA sense strand
ggcagaacuuggacauuau

SEQ ID NO: 1799769 - RNA, 19 nt, Homo sapiens
  misc_RNA (1)...(19): siRNA sense strand
agauauccgugucucuaua

SEQ ID NO: 1799770 - RNA, 19 nt, Homo sapiens
  misc_RNA (1)...(19): siRNA sense strand
ggagugcuaaucuaugaaa

SEQ ID NO: 1799771 - RNA, 19 nt, Homo sapiens
  misc_RNA (1)...(19): siRNA sense strand
gauaagcagaagguuguua

SEQ ID NO: 1799772 - RNA, 19 nt, Homo sapiens
  misc_RNA (1)...(19): siRNA sense strand
ugaugacuaugaagaagaa

SEQ ID NO: 1799773 - RNA, 19 nt, Homo sapiens
  misc_RNA (1)...(19): siRNA sense strand
caucuaagaagaauuggaa

SEQ ID NO: 1799774 - RNA, 19 nt, Homo sapiens
  misc_RNA (1)...(19): siRNA sense strand
ucagcaagggcuacaauaa

SEQ ID NO: 1799775 - RNA, 19 nt, Homo sapiens
  misc_RNA (1)...(19): siRNA sense strand
gggagaauccaacucagaa

SEQ ID NO: 1799776 - RNA, 19 nt, Homo sapiens
  misc_RNA (1)...(19): siRNA sense strand
ccagcaacuuugaugacua

SEQ ID NO: 1799777 - RNA, 19 nt, Homo sapiens
  misc_RNA (1)...(19): siRNA sense strand
gaagguuguuaaacugaag

SEQ ID NO: 1799778 - RNA, 19 nt, Homo sapiens
  misc_RNA (1)...(19): siRNA sense strand
ccauucauaccaaaguuua

SEQ ID NO: 1799779 - RNA, 19 nt, Homo sapiens
  misc_RNA (1)...(19): siRNA sense strand
accaaccaauucagauuua

SEQ ID NO: 1799780 - RNA, 19 nt, Homo sapiens
  misc_RNA (1)...(19): siRNA sense strand
gaauuggaagguucaguga

SEQ ID NO: 1799781 - RNA, 19 nt, Homo sapiens
  misc_RNA (1)...(19): siRNA sense strand
gagauaccagcaacuuuga

SEQ ID NO: 1799782 - RNA, 19 nt, Homo sapiens
  misc_RNA (1)...(19): siRNA sense strand
uagagcauacuuugaauga

SEQ ID NO: 1799783 - RNA, 19 nt, Homo sapiens
  misc_RNA (1)...(19): siRNA sense strand
gcagaccaaccaauucaga

SEQ ID NO: 1799784 - RNA, 19 nt, Homo sapiens
  misc_RNA (1)...(19): siRNA sense strand
agaauccaacucagaauaa

SEQ ID NO: 1799785 - RNA, 19 nt, Homo sapiens
  misc_RNA (1)...(19): siRNA sense strand
guucuaugcagcucagaua

SEQ ID NO: 1799786 - RNA, 19 nt, Homo sapiens
  misc_RNA (1)...(19): siRNA sense strand
gaauggugucagugauaua

SEQ ID NO: 1799787 - RNA, 19 nt, Homo sapiens
  misc_RNA (1)...(19): siRNA sense strand
gugcuaaucuaugaaaugg

SEQ ID NO: 1799788 - RNA, 19 nt, Homo sapiens
  misc_RNA (1)...(19): siRNA sense strand
gcaacuuugaugacuauga

SEQ ID NO: 1799789 - RNA, 19 nt, Homo sapiens
  misc_RNA (1)...(19): siRNA sense strand
gaauauuacaggcagugaa

SEQ ID NO: 1799790 - RNA, 19 nt, Homo sapiens
  misc_RNA (1)...(19): siRNA sense strand
gaagguugaagcuccauuc

SEQ ID NO: 1799791 - RNA, 19 nt, Homo sapiens
  misc_RNA (1)...(19): siRNA sense strand
ggauuugaccaagagauuu

SEQ ID NO: 1799792 - RNA, 19 nt, Homo sapiens
  misc_RNA (1)...(19): siRNA sense strand
guuaaaggcagaacuugga

SEQ ID NO: 1799793 - RNA, 19 nt, Homo sapiens
  misc_RNA (1)...(19): siRNA sense strand
gaauuuuccuuuccuuguu

SEQ ID NO: 1799794 - RNA, 19 nt, Homo sapiens
  misc_RNA (1)...(19): siRNA sense strand
cgacagauuggauugcuau

SEQ ID NO: 1799795 - RNA, 19 nt, Homo sapiens
  misc_RNA (1)...(19): siRNA sense strand
agaauggugucagugauau

SEQ ID NO: 1799796 - RNA, 19 nt, Homo sapiens
  misc_RNA (1)...(19): siRNA sense strand
gauuugaccaagagauuug

SEQ ID NO: 1799797 - RNA, 19 nt, Homo sapiens
  misc_RNA (1)...(19): siRNA sense strand
ucagauagugcuaacauuc

SEQ ID NO: 1799798 - RNA, 19 nt, Homo sapiens
  misc_RNA (1)...(19): siRNA sense strand
uagauaagcagaagguugu

SEQ ID NO: 1799799 - RNA, 19 nt, Homo sapiens
  misc_RNA (1)...(19): siRNA sense strand
aagaauggugucagugaua

SEQ ID NO: 1799800 - RNA, 19 nt, Homo sapiens
  misc_RNA (1)...(19): siRNA sense strand
aaagaauggugucagugau

SEQ ID NO: 1799801 - RNA, 19 nt, Homo sapiens
  misc_RNA (1)...(19): siRNA sense strand
uuggaaaucuaaagaaugg

SEQ ID NO: 1799802 - RNA, 19 nt, Homo sapiens
  misc_RNA (1)...(19): siRNA sense strand
gcagaacuuggacauuaug

SEQ ID NO: 1799803 - RNA, 19 nt, Homo sapiens
  misc_RNA (1)...(19): siRNA sense strand
ggaguaugcuuuuaaggau

SEQ ID NO: 1799804 - RNA, 19 nt, Homo sapiens
  misc_RNA (1)...(19): siRNA sense strand
uauuacaggcagugaauuu

SEQ ID NO: 1799805 - RNA, 19 nt, Homo sapiens
  misc_RNA (1)...(19): siRNA sense strand
gcucagauagugcuaacau

SEQ ID NO: 1799806 - RNA, 19 nt, Homo sapiens
  misc_RNA (1)...(19): siRNA sense strand
gauaccagcaacuuugaug

SEQ ID NO: 1799807 - RNA, 19 nt, Homo sapiens
  misc_RNA (1)...(19): siRNA sense strand
acacaaagccacugaacag

SEQ ID NO: 1799808 - RNA, 19 nt, Homo sapiens
  misc_RNA (1)...(19): siRNA sense strand
ucuaaagaauggugucagu

SEQ ID NO: 1799809 - RNA, 19 nt, Homo sapiens
  misc_RNA (1)...(19): siRNA sense strand
ccacuucaguucagaucuc

SEQ ID NO: 1799810 - RNA, 19 nt, Homo sapiens
  misc_RNA (1)...(19): siRNA sense strand
ugaagcaaauagagcauac

SEQ ID NO: 1799811 - RNA, 19 nt, Homo sapiens
  misc_RNA (1)...(19): siRNA sense strand
guuguuaaacugaagcaaa

SEQ ID NO: 1799812 - RNA, 19 nt, Homo sapiens
  misc_RNA (1)...(19): siRNA sense strand
agaagguuguuaaacugaa

SEQ ID NO: 1799813 - RNA, 19 nt, Homo sapiens
  misc_RNA (1)...(19): siRNA sense strand
caaccaauucagauuuaug

SEQ ID NO: 1799814 - RNA, 19 nt, Homo sapiens
  misc_RNA (1)...(19): siRNA sense strand
ccaaccaauucagauuuau

SEQ ID NO: 1799815 - RNA, 19 nt, Homo sapiens
  misc_RNA (1)...(19): siRNA sense strand
ucgaguaccuccauucacu

SEQ ID NO: 1799816 - RNA, 19 nt, Homo sapiens
  misc_RNA (1)...(19): siRNA sense strand
ucagaauaaugccggacuu

SEQ ID NO: 1799817 - RNA, 19 nt, Homo sapiens
  misc_RNA (1)...(19): siRNA sense strand
gaagaagauauccgugucu

SEQ ID NO: 1799818 - RNA, 19 nt, Homo sapiens
  misc_RNA (1)...(19): siRNA sense strand
cagcaagggcuacaauaag

SEQ ID NO: 1799819 - RNA, 19 nt, Homo sapiens
  misc_RNA (1)...(19): siRNA sense strand
guaccuccauucacuagac

SEQ ID NO: 1799820 - RNA, 19 nt, Homo sapiens
  misc_RNA (1)...(19): siRNA sense strand
cagaagguuguuaaacuga

SEQ ID NO: 1799821 - RNA, 19 nt, Homo sapiens
  misc_RNA (1)...(19): siRNA sense strand
gaguaugcuuuuaaggaua

SEQ ID NO: 1799822 - RNA, 19 nt, Homo sapiens
  misc_RNA (1)...(19): siRNA sense strand
augccggacuugaagauuu

SEQ ID NO: 1799823 - RNA, 19 nt, Homo sapiens
  misc_RNA (1)...(19): siRNA sense strand
ggagaauccaacucagaau

SEQ ID NO: 1799824 - RNA, 19 nt, Homo sapiens
  misc_RNA (1)...(19): siRNA sense strand
cagguggauuugaccaaga

SEQ ID NO: 1799825 - RNA, 19 nt, Homo sapiens
  misc_RNA (1)...(19): siRNA sense strand
auaagcagaagguuguuaa

SEQ ID NO: 1799826 - RNA, 19 nt, Homo sapiens
  misc_RNA (1)...(19): siRNA sense strand
cgacuggaguaugcuuuua

SEQ ID NO: 1799827 - RNA, 19 nt, Homo sapiens
  misc_RNA (1)...(19): siRNA sense strand
agaccaaccaauucagauu

SEQ ID NO: 1799828 - RNA, 19 nt, Homo sapiens
  misc_RNA (1)...(19): siRNA sense strand
uaagcagaagguuguuaaa

SEQ ID NO: 1799829 - RNA, 19 nt, Homo sapiens
  misc_RNA (1)...(19): siRNA sense strand
agcagaagguuguuaaacu

SEQ ID NO: 1799830 - RNA, 19 nt, Homo sapiens
  misc_RNA (1)...(19): siRNA sense strand
ucacagacuuuggguuugc

SEQ ID NO: 1799831 - RNA, 19 nt, Homo sapiens
  misc_RNA (1)...(19): siRNA sense strand
gagugcuaaucuaugaaau

SEQ ID NO: 1799832 - RNA, 19 nt, Homo sapiens
  misc_RNA (1)...(19): siRNA sense strand
acagauuggauugcuauuu

SEQ ID NO: 1799833 - RNA, 19 nt, Homo sapiens
  misc_RNA (1)...(19): siRNA sense strand
gcuauauccaggucacaga

SEQ ID NO: 1799834 - RNA, 19 nt, Homo sapiens
  misc_RNA (1)...(19): siRNA sense strand
ccgugucucuauaacagaa

SEQ ID NO: 1799835 - RNA, 19 nt, Homo sapiens
  misc_RNA (1)...(19): siRNA sense strand
guuaaacugaagcaaauag

SEQ ID NO: 1799836 - RNA, 19 nt, Homo sapiens
  misc_RNA (1)...(19): siRNA sense strand
agaauaaugccggacuuga

SEQ ID NO: 1799837 - RNA, 19 nt, Homo sapiens
  misc_RNA (1)...(19): siRNA sense strand
ggauuggugggcauuagga

SEQ ID NO: 1799838 - RNA, 19 nt, Homo sapiens
  misc_RNA (1)...(19): siRNA sense strand
cgaguaccuccauucacua

SEQ ID NO: 1799839 - RNA, 19 nt, Homo sapiens
  misc_RNA (1)...(19): siRNA sense strand
agauagugcuaacauucga

SEQ ID NO: 1799840 - RNA, 19 nt, Homo sapiens
  misc_RNA (1)...(19): siRNA sense strand
uagccaaagccaaagaaga

SEQ ID NO: 1799841 - RNA, 19 nt, Homo sapiens
  misc_RNA (1)...(19): siRNA sense strand
agcaagggcuacaauaagg

SEQ ID NO: 1799842 - RNA, 19 nt, Homo sapiens
  misc_RNA (1)...(19): siRNA sense strand
ugacuaugaagaagaagau

SEQ ID NO: 1799843 - RNA, 19 nt, Homo sapiens
  misc_RNA (1)...(19): siRNA sense strand
aauggugucagugauauaa

SEQ ID NO: 1799844 - RNA, 19 nt, Homo sapiens
  misc_RNA (1)...(19): siRNA sense strand
aagcaaauagagcauacuu

SEQ ID NO: 1799845 - RNA, 19 nt, Homo sapiens
  misc_RNA (1)...(19): siRNA sense strand
ccaaagccaaagaagacuu

SEQ ID NO: 1799846 - RNA, 19 nt, Homo sapiens
  misc_RNA (1)...(19): siRNA sense strand
gcucaaagauucuauugug

SEQ ID NO: 1799847 - RNA, 19 nt, Homo sapiens
  misc_RNA (1)...(19): siRNA sense strand
gaacuugcuuugauuuaug

SEQ ID NO: 1799848 - RNA, 19 nt, Homo sapiens
  misc_RNA (1)...(19): siRNA sense strand
gaagauguaugaggaauuc

SEQ ID NO: 1799849 - RNA, 19 nt, Homo sapiens
  misc_RNA (1)...(19): siRNA sense strand
cgagacagcuauagaagaa

SEQ ID NO: 1799850 - RNA, 19 nt, Homo sapiens
  misc_RNA (1)...(19): siRNA sense strand
gaaauugcacuacugauga

SEQ ID NO: 1799851 - RNA, 19 nt, Homo sapiens
  misc_RNA (1)...(19): siRNA sense strand
ggaccgaccuagauuugaa

SEQ ID NO: 1799852 - RNA, 19 nt, Homo sapiens
  misc_RNA (1)...(19): siRNA sense strand
gauaaugagagaagugaua

SEQ ID NO: 1799853 - RNA, 19 nt, Homo sapiens
  misc_RNA (1)...(19): siRNA sense strand
gaaagcggaagauguauga

SEQ ID NO: 1799854 - RNA, 19 nt, Homo sapiens
  misc_RNA (1)...(19): siRNA sense strand
gaagaugggcagaagauug

SEQ ID NO: 1799855 - RNA, 19 nt, Homo sapiens
  misc_RNA (1)...(19): siRNA sense strand
gggaauacuuugagagguu

SEQ ID NO: 1799856 - RNA, 19 nt, Homo sapiens
  misc_RNA (1)...(19): siRNA sense strand
ugagaaagcggaagaugua

SEQ ID NO: 1799857 - RNA, 19 nt, Homo sapiens
  misc_RNA (1)...(19): siRNA sense strand
gcacgcagccuucgagaau

SEQ ID NO: 1799858 - RNA, 19 nt, Homo sapiens
  misc_RNA (1)...(19): siRNA sense strand
gagaacuugcuuugauuua

SEQ ID NO: 1799859 - RNA, 19 nt, Homo sapiens
  misc_RNA (1)...(19): siRNA sense strand
ggaugucuauguuaacaau

SEQ ID NO: 1799860 - RNA, 19 nt, Homo sapiens
  misc_RNA (1)...(19): siRNA sense strand
uacgguagcugaugcauug

SEQ ID NO: 1799861 - RNA, 19 nt, Homo sapiens
  misc_RNA (1)...(19): siRNA sense strand
ggagggagcuuuggagaac

SEQ ID NO: 1799862 - RNA, 19 nt, Homo sapiens
  misc_RNA (1)...(19): siRNA sense strand
gagagcagccacugucaaa

SEQ ID NO: 1799863 - RNA, 19 nt, Homo sapiens
  misc_RNA (1)...(19): siRNA sense strand
ggggauaacuucuauguga

SEQ ID NO: 1799864 - RNA, 19 nt, Homo sapiens
  misc_RNA (1)...(19): siRNA sense strand
ggagaacuugcuuugauuu

SEQ ID NO: 1799865 - RNA, 19 nt, Homo sapiens
  misc_RNA (1)...(19): siRNA sense strand
ggaauuccuuaguaaaguc

SEQ ID NO: 1799866 - RNA, 19 nt, Homo sapiens
  misc_RNA (1)...(19): siRNA sense strand
acaagacaauggccgcuuu

SEQ ID NO: 1799867 - RNA, 19 nt, Homo sapiens
  misc_RNA (1)...(19): siRNA sense strand
gauaacuucuaugugauug

SEQ ID NO: 1799868 - RNA, 19 nt, Homo sapiens
  misc_RNA (1)...(19): siRNA sense strand
gcucagacauccucaaacg

SEQ ID NO: 1799869 - RNA, 19 nt, Homo sapiens
  misc_RNA (1)...(19): siRNA sense strand
ggauaacuucuaugugauu

SEQ ID NO: 1799870 - RNA, 19 nt, Homo sapiens
  misc_RNA (1)...(19): siRNA sense strand
ccaaagccauugaaaagaa

SEQ ID NO: 1799871 - RNA, 19 nt, Homo sapiens
  misc_RNA (1)...(19): siRNA sense strand
aacgaaacauccagcagua

SEQ ID NO: 1799872 - RNA, 19 nt, Homo sapiens
  misc_RNA (1)...(19): siRNA sense strand
caagggaggaugagauuuc

SEQ ID NO: 1799873 - RNA, 19 nt, Homo sapiens
  misc_RNA (1)...(19): siRNA sense strand
ugaagaguuuguugaagug

SEQ ID NO: 1799874 - RNA, 19 nt, Homo sapiens
  misc_RNA (1)...(19): siRNA sense strand
ccagaagcauaacauucaa

SEQ ID NO: 1799875 - RNA, 19 nt, Homo sapiens
  misc_RNA (1)...(19): siRNA sense strand
ucagacauccucaaacgaa

SEQ ID NO: 1799876 - RNA, 19 nt, Homo sapiens
  misc_RNA (1)...(19): siRNA sense strand
uucaagcgcugcucaaaga

SEQ ID NO: 1799877 - RNA, 19 nt, Homo sapiens
  misc_RNA (1)...(19): siRNA sense strand
caagacaauggccgcuuua

SEQ ID NO: 1799878 - RNA, 19 nt, Homo sapiens
  misc_RNA (1)...(19): siRNA sense strand
caggagagacugugauuca

SEQ ID NO: 1799879 - RNA, 19 nt, Homo sapiens
  misc_RNA (1)...(19): siRNA sense strand
uggagaacuugcuuugauu

SEQ ID NO: 1799880 - RNA, 19 nt, Homo sapiens
  misc_RNA (1)...(19): siRNA sense strand
gaaagguuauaccaaaaga

SEQ ID NO: 1799881 - RNA, 19 nt, Homo sapiens
  misc_RNA (1)...(19): siRNA sense strand
gaaacauccagcaguacaa

SEQ ID NO: 1799882 - RNA, 19 nt, Homo sapiens
  misc_RNA (1)...(19): siRNA sense strand
aaauugcacuacugaugaa

SEQ ID NO: 1799883 - RNA, 19 nt, Homo sapiens
  misc_RNA (1)...(19): siRNA sense strand
ugaaauugcacuacugaug

SEQ ID NO: 1799884 - RNA, 19 nt, Homo sapiens
  misc_RNA (1)...(19): siRNA sense strand
gacaagugggaacgucuua

SEQ ID NO: 1799885 - RNA, 19 nt, Homo sapiens
  misc_RNA (1)...(19): siRNA sense strand
ggaagauguaugaggaauu

SEQ ID NO: 1799886 - RNA, 19 nt, Homo sapiens
  misc_RNA (1)...(19): siRNA sense strand
gggauaacuucuaugugau

SEQ ID NO: 1799887 - RNA, 19 nt, Homo sapiens
  misc_RNA (1)...(19): siRNA sense strand
gcaaagacaaaugugaaau

SEQ ID NO: 1799888 - RNA, 19 nt, Homo sapiens
  misc_RNA (1)...(19): siRNA sense strand
aagauucuauugugcaguu

SEQ ID NO: 1799889 - RNA, 19 nt, Homo sapiens
  misc_RNA (1)...(19): siRNA sense strand
gaaagcaggcacucguaca

SEQ ID NO: 1799890 - RNA, 19 nt, Homo sapiens
  misc_RNA (1)...(19): siRNA sense strand
cuacaacgucggucagaaa

SEQ ID NO: 1799891 - RNA, 19 nt, Homo sapiens
  misc_RNA (1)...(19): siRNA sense strand
gguagcugaugcauuggaa

SEQ ID NO: 1799892 - RNA, 19 nt, Homo sapiens
  misc_RNA (1)...(19): siRNA sense strand
gaccgagacagcuauagaa

SEQ ID NO: 1799893 - RNA, 19 nt, Homo sapiens
  misc_RNA (1)...(19): siRNA sense strand
ucaaagcaaagacaaaugu

SEQ ID NO: 1799894 - RNA, 19 nt, Homo sapiens
  misc_RNA (1)...(19): siRNA sense strand
ggaaggagggagcuuugga

SEQ ID NO: 1799895 - RNA, 19 nt, Homo sapiens
  misc_RNA (1)...(19): siRNA sense strand
agacagcuauagaagaauc

SEQ ID NO: 1799896 - RNA, 19 nt, Homo sapiens
  misc_RNA (1)...(19): siRNA sense strand
cagacauccucaaacgaaa

SEQ ID NO: 1799897 - RNA, 19 nt, Homo sapiens
  misc_RNA (1)...(19): siRNA sense strand
gauuggggccuucugauua

SEQ ID NO: 1799898 - RNA, 19 nt, Homo sapiens
  misc_RNA (1)...(19): siRNA sense strand
ggugaaauugcacuacuga

SEQ ID NO: 1799899 - RNA, 19 nt, Homo sapiens
  misc_RNA (1)...(19): siRNA sense strand
cagccacugucaaagcaaa

SEQ ID NO: 1799900 - RNA, 19 nt, Homo sapiens
  misc_RNA (1)...(19): siRNA sense strand
gcuacaacgucggucagaa

SEQ ID NO: 1799901 - RNA, 19 nt, Homo sapiens
  misc_RNA (1)...(19): siRNA sense strand
uuggagaacuugcuuugau

SEQ ID NO: 1799902 - RNA, 19 nt, Homo sapiens
  misc_RNA (1)...(19): siRNA sense strand
gaaaaugaagaguuuguug

SEQ ID NO: 1799903 - RNA, 19 nt, Homo sapiens
  misc_RNA (1)...(19): siRNA sense strand
uggaaccagugcaguuuga

SEQ ID NO: 1799904 - RNA, 19 nt, Homo sapiens
  misc_RNA (1)...(19): siRNA sense strand
cagaaagcaggcacucgua

SEQ ID NO: 1799905 - RNA, 19 nt, Homo sapiens
  misc_RNA (1)...(19): siRNA sense strand
caacgucggucagaaaaug

SEQ ID NO: 1799906 - RNA, 19 nt, Homo sapiens
  misc_RNA (1)...(19): siRNA sense strand
ggacaagugggaacgucuu

SEQ ID NO: 1799907 - RNA, 19 nt, Homo sapiens
  misc_RNA (1)...(19): siRNA sense strand
ugaaaagaaugugcuguuu

SEQ ID NO: 1799908 - RNA, 19 nt, Homo sapiens
  misc_RNA (1)...(19): siRNA sense strand
aagcaaagacaaaugugaa

SEQ ID NO: 1799909 - RNA, 19 nt, Homo sapiens
  misc_RNA (1)...(19): siRNA sense strand
gucagaaaaugaagaguuu

SEQ ID NO: 1799910 - RNA, 19 nt, Homo sapiens
  misc_RNA (1)...(19): siRNA sense strand
ccagugcaguuugaagaug

SEQ ID NO: 1799911 - RNA, 19 nt, Homo sapiens
  misc_RNA (1)...(19): siRNA sense strand
cgaccgagacagcuauaga

SEQ ID NO: 1799912 - RNA, 19 nt, Homo sapiens
  misc_RNA (1)...(19): siRNA sense strand
caagcgcugcucaaagauu

SEQ ID NO: 1799913 - RNA, 19 nt, Homo sapiens
  misc_RNA (1)...(19): siRNA sense strand
aaagcaaagacaaauguga

SEQ ID NO: 1799914 - RNA, 19 nt, Homo sapiens
  misc_RNA (1)...(19): siRNA sense strand
ggaagcacacugagaaagc

SEQ ID NO: 1799915 - RNA, 19 nt, Homo sapiens
  misc_RNA (1)...(19): siRNA sense strand
gaugauaaugagagaagug

SEQ ID NO: 1799916 - RNA, 19 nt, Homo sapiens
  misc_RNA (1)...(19): siRNA sense strand
cgaaacauccagcaguaca

SEQ ID NO: 1799917 - RNA, 19 nt, Homo sapiens
  misc_RNA (1)...(19): siRNA sense strand
aagcgcugcucaaagauuc

SEQ ID NO: 1799918 - RNA, 19 nt, Homo sapiens
  misc_RNA (1)...(19): siRNA sense strand
augaagaguuuguugaagu

SEQ ID NO: 1799919 - RNA, 19 nt, Homo sapiens
  misc_RNA (1)...(19): siRNA sense strand
gaaccagugcaguuugaag

SEQ ID NO: 1799920 - RNA, 19 nt, Homo sapiens
  misc_RNA (1)...(19): siRNA sense strand
cauccuauguuagaaaggu

SEQ ID NO: 1799921 - RNA, 19 nt, Homo sapiens
  misc_RNA (1)...(19): siRNA sense strand
guuagaaagguuauaccaa

SEQ ID NO: 1799922 - RNA, 19 nt, Homo sapiens
  misc_RNA (1)...(19): siRNA sense strand
uccagaagcauaacauuca

SEQ ID NO: 1799923 - RNA, 19 nt, Homo sapiens
  misc_RNA (1)...(19): siRNA sense strand
gcuggaccgaccuagauuu

SEQ ID NO: 1799924 - RNA, 19 nt, Homo sapiens
  misc_RNA (1)...(19): siRNA sense strand
gagcagccacugucaaagc

SEQ ID NO: 1799925 - RNA, 19 nt, Homo sapiens
  misc_RNA (1)...(19): siRNA sense strand
ggcauccuauguuagaaag

SEQ ID NO: 1799926 - RNA, 19 nt, Homo sapiens
  misc_RNA (1)...(19): siRNA sense strand
caaagcaaagacaaaugug

SEQ ID NO: 1799927 - RNA, 19 nt, Homo sapiens
  misc_RNA (1)...(19): siRNA sense strand
gcaucgaccgagacagcua

SEQ ID NO: 1799928 - RNA, 19 nt, Homo sapiens
  misc_RNA (1)...(19): siRNA sense strand
cggaagauguaugaggaau

SEQ ID NO: 1799929 - RNA, 19 nt, Homo sapiens
  misc_RNA (1)...(19): siRNA sense strand
acacugagaaagcggaaga

SEQ ID NO: 1799930 - RNA, 19 nt, Homo sapiens
  misc_RNA (1)...(19): siRNA sense strand
ugaaugggcaaccaguguu

SEQ ID NO: 1799931 - RNA, 19 nt, Homo sapiens
  misc_RNA (1)...(19): siRNA sense strand
aagaugggcagaagauugu

SEQ ID NO: 1799932 - RNA, 19 nt, Homo sapiens
  misc_RNA (1)...(19): siRNA sense strand
gagaaugugagcucuacgu

SEQ ID NO: 1799933 - RNA, 19 nt, Homo sapiens
  misc_RNA (1)...(19): siRNA sense strand
ugagagacccauggcauuc

SEQ ID NO: 1799934 - RNA, 19 nt, Homo sapiens
  misc_RNA (1)...(19): siRNA sense strand
guccagaagcauaacauuc

SEQ ID NO: 1799935 - RNA, 19 nt, Homo sapiens
  misc_RNA (1)...(19): siRNA sense strand
gagaaagcggaagauguau

SEQ ID NO: 1799936 - RNA, 19 nt, Homo sapiens
  misc_RNA (1)...(19): siRNA sense strand
acgcagccuucgagaaugu

SEQ ID NO: 1799937 - RNA, 19 nt, Homo sapiens
  misc_RNA (1)...(19): siRNA sense strand
ggaggaggcaaaacagauu

SEQ ID NO: 1799938 - RNA, 19 nt, Homo sapiens
  misc_RNA (1)...(19): siRNA sense strand
uugagagguuggagaagga

SEQ ID NO: 1799939 - RNA, 19 nt, Homo sapiens
  misc_RNA (1)...(19): siRNA sense strand
caaagccauugaaaagaau

SEQ ID NO: 1799940 - RNA, 19 nt, Homo sapiens
  misc_RNA (1)...(19): siRNA sense strand
uaagcuggaccgaccuaga

SEQ ID NO: 1799941 - RNA, 19 nt, Homo sapiens
  misc_RNA (1)...(19): siRNA sense strand
uggagaaggaggaggcaaa

SEQ ID NO: 1799942 - RNA, 19 nt, Homo sapiens
  misc_RNA (1)...(19): siRNA sense strand
ggaaccagugcaguuugaa

SEQ ID NO: 1799943 - RNA, 19 nt, Homo sapiens
  misc_RNA (1)...(19): siRNA sense strand
cauuggaaccagugcaguu

SEQ ID NO: 1799944 - RNA, 19 nt, Homo sapiens
  misc_RNA (1)...(19): siRNA sense strand
ccgagacagcuauagaaga

SEQ ID NO: 1799945 - RNA, 19 nt, Homo sapiens
  misc_RNA (1)...(19): siRNA sense strand
gaacacagccuggauaugu

SEQ ID NO: 1799946 - RNA, 19 nt, Homo sapiens
  misc_RNA (1)...(19): siRNA sense strand
ggaugaagaugagcuguaa

SEQ ID NO: 1799947 - RNA, 19 nt, Homo sapiens
  misc_RNA (1)...(19): siRNA sense strand
gaagaaggcucuggaaagg

SEQ ID NO: 1799948 - RNA, 19 nt, Homo sapiens
  misc_RNA (1)...(19): siRNA sense strand
gcaccgagacuauuucuug

SEQ ID NO: 1799949 - RNA, 19 nt, Homo sapiens
  misc_RNA (1)...(19): siRNA sense strand
guauguauguccugaguga

SEQ ID NO: 1799950 - RNA, 19 nt, Homo sapiens
  misc_RNA (1)...(19): siRNA sense strand
gcauguggcucagaucuug

SEQ ID NO: 1799951 - RNA, 19 nt, Homo sapiens
  misc_RNA (1)...(19): siRNA sense strand
gagaggagcugccggaacu

SEQ ID NO: 1799952 - RNA, 19 nt, Homo sapiens
  misc_RNA (1)...(19): siRNA sense strand
cccaagcgcugcaacgaua

SEQ ID NO: 1799953 - RNA, 19 nt, Homo sapiens
  misc_RNA (1)...(19): siRNA sense strand
caauagagcugggauggau

SEQ ID NO: 1799954 - RNA, 19 nt, Homo sapiens
  misc_RNA (1)...(19): siRNA sense strand
gagcaaaucaucaucuuca

SEQ ID NO: 1799955 - RNA, 19 nt, Homo sapiens
  misc_RNA (1)...(19): siRNA sense strand
agaauaagcccaagucaga

SEQ ID NO: 1799956 - RNA, 19 nt, Homo sapiens
  misc_RNA (1)...(19): siRNA sense strand
gaacgaccuccucaucaaa

SEQ ID NO: 1799957 - RNA, 19 nt, Homo sapiens
  misc_RNA (1)...(19): siRNA sense strand
gcauugcagucacccauug

SEQ ID NO: 1799958 - RNA, 19 nt, Homo sapiens
  misc_RNA (1)...(19): siRNA sense strand
gauggauacugcagaccua

SEQ ID NO: 1799959 - RNA, 19 nt, Homo sapiens
  misc_RNA (1)...(19): siRNA sense strand
gaauucggcuuggagauca

SEQ ID NO: 1799960 - RNA, 19 nt, Homo sapiens
  misc_RNA (1)...(19): siRNA sense strand
gaauauccagcaaaucuau

SEQ ID NO: 1799961 - RNA, 19 nt, Homo sapiens
  misc_RNA (1)...(19): siRNA sense strand
ggagggcccuggagauaag

SEQ ID NO: 1799962 - RNA, 19 nt, Homo sapiens
  misc_RNA (1)...(19): siRNA sense strand
gaagaagaaggcucuggaa

SEQ ID NO: 1799963 - RNA, 19 nt, Homo sapiens
  misc_RNA (1)...(19): siRNA sense strand
ugaacgaccuccucaucaa

SEQ ID NO: 1799964 - RNA, 19 nt, Homo sapiens
  misc_RNA (1)...(19): siRNA sense strand
cuacaacggugucugaaag

SEQ ID NO: 1799965 - RNA, 19 nt, Homo sapiens
  misc_RNA (1)...(19): siRNA sense strand
ggauauguauacaagaaca

SEQ ID NO: 1799966 - RNA, 19 nt, Homo sapiens
  misc_RNA (1)...(19): siRNA sense strand
ggaauauccagcaaaucua

SEQ ID NO: 1799967 - RNA, 19 nt, Homo sapiens
  misc_RNA (1)...(19): siRNA sense strand
gggaauauccagcaaaucu

SEQ ID NO: 1799968 - RNA, 19 nt, Homo sapiens
  misc_RNA (1)...(19): siRNA sense strand
ugagugaacugguagaaac

SEQ ID NO: 1799969 - RNA, 19 nt, Homo sapiens
  misc_RNA (1)...(19): siRNA sense strand
gagcuacaacggugucuga

SEQ ID NO: 1799970 - RNA, 19 nt, Homo sapiens
  misc_RNA (1)...(19): siRNA sense strand
gcucagcuauucaucaaac

SEQ ID NO: 1799971 - RNA, 19 nt, Homo sapiens
  misc_RNA (1)...(19): siRNA sense strand
gaacugguagaaacagaga

SEQ ID NO: 1799972 - RNA, 19 nt, Homo sapiens
  misc_RNA (1)...(19): siRNA sense strand
ucaaggauuuucucaagua

SEQ ID NO: 1799973 - RNA, 19 nt, Homo sapiens
  misc_RNA (1)...(19): siRNA sense strand
ugcagcggaucaugaaaua

SEQ ID NO: 1799974 - RNA, 19 nt, Homo sapiens
  misc_RNA (1)...(19): siRNA sense strand
ggcagauuguggaggguua

SEQ ID NO: 1799975 - RNA, 19 nt, Homo sapiens
  misc_RNA (1)...(19): siRNA sense strand
guauacaagaacagcauua

SEQ ID NO: 1799976 - RNA, 19 nt, Homo sapiens
  misc_RNA (1)...(19): siRNA sense strand
ggaaaggaguauguauguc

SEQ ID NO: 1799977 - RNA, 19 nt, Homo sapiens
  misc_RNA (1)...(19): siRNA sense strand
cagagcauguggugucaga

SEQ ID NO: 1799978 - RNA, 19 nt, Homo sapiens
  misc_RNA (1)...(19): siRNA sense strand
gaguauguauguccugagu

SEQ ID NO: 1799979 - RNA, 19 nt, Homo sapiens
  misc_RNA (1)...(19): siRNA sense strand
ucugaaagauccugauugg

SEQ ID NO: 1799980 - RNA, 19 nt, Homo sapiens
  misc_RNA (1)...(19): siRNA sense strand
cuggauauguauacaagaa

SEQ ID NO: 1799981 - RNA, 19 nt, Homo sapiens
  misc_RNA (1)...(19): siRNA sense strand
ggauuguguuugggaauau

SEQ ID NO: 1799982 - RNA, 19 nt, Homo sapiens
  misc_RNA (1)...(19): siRNA sense strand
uugccaagcuggaugaaga

SEQ ID NO: 1799983 - RNA, 19 nt, Homo sapiens
  misc_RNA (1)...(19): siRNA sense strand
gcacacacacacccaucaa

SEQ ID NO: 1799984 - RNA, 19 nt, Homo sapiens
  misc_RNA (1)...(19): siRNA sense strand
aaauguacguggacgacuu

SEQ ID NO: 1799985 - RNA, 19 nt, Homo sapiens
  misc_RNA (1)...(19): siRNA sense strand
gggacuuccucaacgcauu

SEQ ID NO: 1799986 - RNA, 19 nt, Homo sapiens
  misc_RNA (1)...(19): siRNA sense strand
ucaagcauguggcucagau

SEQ ID NO: 1799987 - RNA, 19 nt, Homo sapiens
  misc_RNA (1)...(19): siRNA sense strand
gcauguggugucagaguuu

SEQ ID NO: 1799988 - RNA, 19 nt, Homo sapiens
  misc_RNA (1)...(19): siRNA sense strand
caagcuggaugaagaugag

SEQ ID NO: 1799989 - RNA, 19 nt, Homo sapiens
  misc_RNA (1)...(19): siRNA sense strand
uggcucagcuauucaucaa

SEQ ID NO: 1799990 - RNA, 19 nt, Homo sapiens
  misc_RNA (1)...(19): siRNA sense strand
ggacuuccucaacgcauug

SEQ ID NO: 1799991 - RNA, 19 nt, Homo sapiens
  misc_RNA (1)...(19): siRNA sense strand
aacacagccuggauaugua

SEQ ID NO: 1799992 - RNA, 19 nt, Homo sapiens
  misc_RNA (1)...(19): siRNA sense strand
gcaaaucaucaucuucagu

SEQ ID NO: 1799993 - RNA, 19 nt, Homo sapiens
  misc_RNA (1)...(19): siRNA sense strand
ccgagacuauuucuugcaa

SEQ ID NO: 1799994 - RNA, 19 nt, Homo sapiens
  misc_RNA (1)...(19): siRNA sense strand
aggauuguguuugggaaua

SEQ ID NO: 1799995 - RNA, 19 nt, Homo sapiens
  misc_RNA (1)...(19): siRNA sense strand
ggggagcccuggaagaauu

SEQ ID NO: 1799996 - RNA, 19 nt, Homo sapiens
  misc_RNA (1)...(19): siRNA sense strand
gcuacaacggugucugaaa

SEQ ID NO: 1799997 - RNA, 19 nt, Homo sapiens
  misc_RNA (1)...(19): siRNA sense strand
agaagaaggcucuggaaag

SEQ ID NO: 1799998 - RNA, 19 nt, Homo sapiens
  misc_RNA (1)...(19): siRNA sense strand
gaggaggaacagaagaaga

SEQ ID NO: 1799999 - RNA, 19 nt, Homo sapiens
  misc_RNA (1)...(19): siRNA sense strand
guggaacacagccuggaua

SEQ ID NO: 1800000 - RNA, 19 nt, Homo sapiens
  misc_RNA (1)...(19): siRNA sense strand
gcucaaggauuuucucaag

SEQ ID NO: 1800001 - RNA, 19 nt, Homo sapiens
  misc_RNA (1)...(19): siRNA sense strand
uguccugagugaacuggua

SEQ ID NO: 1800002 - RNA, 19 nt, Homo sapiens
  misc_RNA (1)...(19): siRNA sense strand
acacacacacccaucaaug

SEQ ID NO: 1800003 - RNA, 19 nt, Homo sapiens
  misc_RNA (1)...(19): siRNA sense strand
gcagucacccauugaguac

SEQ ID NO: 1800004 - RNA, 19 nt, Homo sapiens
  misc_RNA (1)...(19): siRNA sense strand
gugaacugguagaaacaga

SEQ ID NO: 1800005 - RNA, 19 nt, Homo sapiens
  misc_RNA (1)...(19): siRNA sense strand
gcgcugcaacgauaugaug

SEQ ID NO: 1800006 - RNA, 19 nt, Homo sapiens
  misc_RNA (1)...(19): siRNA sense strand
caccugaagaggagacuuu

SEQ ID NO: 1800007 - RNA, 19 nt, Homo sapiens
  misc_RNA (1)...(19): siRNA sense strand
gugacaggauuguguuugg

SEQ ID NO: 1800008 - RNA, 19 nt, Homo sapiens
  misc_RNA (1)...(19): siRNA sense strand
gugaggaggaacagaagaa

SEQ ID NO: 1800009 - RNA, 19 nt, Homo sapiens
  misc_RNA (1)...(19): siRNA sense strand
uggaaaggaguauguaugu

SEQ ID NO: 1800010 - RNA, 19 nt, Homo sapiens
  misc_RNA (1)...(19): siRNA sense strand
gcugaacgaccuccucauc

SEQ ID NO: 1800011 - RNA, 19 nt, Homo sapiens
  misc_RNA (1)...(19): siRNA sense strand
gagcauguggugucagagu

SEQ ID NO: 1800012 - RNA, 19 nt, Homo sapiens
  misc_RNA (1)...(19): siRNA sense strand
agacgcagccaccugaaga

SEQ ID NO: 1800013 - RNA, 19 nt, Homo sapiens
  misc_RNA (1)...(19): siRNA sense strand
aagaagaaggcucuggaaa

SEQ ID NO: 1800014 - RNA, 19 nt, Homo sapiens
  misc_RNA (1)...(19): siRNA sense strand
gcucuggaaaggaguaugu

SEQ ID NO: 1800015 - RNA, 19 nt, Homo sapiens
  misc_RNA (1)...(19): siRNA sense strand
aggaggaacagaagaagaa

SEQ ID NO: 1800016 - RNA, 19 nt, Homo sapiens
  misc_RNA (1)...(19): siRNA sense strand
gccuggauauguauacaag

SEQ ID NO: 1800017 - RNA, 19 nt, Homo sapiens
  misc_RNA (1)...(19): siRNA sense strand
aaaucaucaucuucaguga

SEQ ID NO: 1800018 - RNA, 19 nt, Homo sapiens
  misc_RNA (1)...(19): siRNA sense strand
gauuguggaggguuauaug

SEQ ID NO: 1800019 - RNA, 19 nt, Homo sapiens
  misc_RNA (1)...(19): siRNA sense strand
gaggagcugccggaacuga

SEQ ID NO: 1800020 - RNA, 19 nt, Homo sapiens
  misc_RNA (1)...(19): siRNA sense strand
agagugaggaggaacagaa

SEQ ID NO: 1800021 - RNA, 19 nt, Homo sapiens
  misc_RNA (1)...(19): siRNA sense strand
gugcagcggaucaugaaau

SEQ ID NO: 1800022 - RNA, 19 nt, Homo sapiens
  misc_RNA (1)...(19): siRNA sense strand
caacggugucugaaagauc

SEQ ID NO: 1800023 - RNA, 19 nt, Homo sapiens
  misc_RNA (1)...(19): siRNA sense strand
aaacaggcccuuggugaca

SEQ ID NO: 1800024 - RNA, 19 nt, Homo sapiens
  misc_RNA (1)...(19): siRNA sense strand
uacaagaacagcauuaagg

SEQ ID NO: 1800025 - RNA, 19 nt, Homo sapiens
  misc_RNA (1)...(19): siRNA sense strand
ucgaggccgugacaggauu

SEQ ID NO: 1800026 - RNA, 19 nt, Homo sapiens
  misc_RNA (1)...(19): siRNA sense strand
ggugacccuugccgcuuug

SEQ ID NO: 1800027 - RNA, 19 nt, Homo sapiens
  misc_RNA (1)...(19): siRNA sense strand
ugaccuugcugaccacacu

SEQ ID NO: 1800028 - RNA, 19 nt, Homo sapiens
  misc_RNA (1)...(19): siRNA sense strand
uugggaauauccagcaaau

SEQ ID NO: 1800029 - RNA, 19 nt, Homo sapiens
  misc_RNA (1)...(19): siRNA sense strand
ggauaaacaggcccuuggu

SEQ ID NO: 1800030 - RNA, 19 nt, Homo sapiens
  misc_RNA (1)...(19): siRNA sense strand
ugcagucacccauugagua

SEQ ID NO: 1800031 - RNA, 19 nt, Homo sapiens
  misc_RNA (1)...(19): siRNA sense strand
ggaacacagccuggauaug

SEQ ID NO: 1800032 - RNA, 19 nt, Homo sapiens
  misc_RNA (1)...(19): siRNA sense strand
cauguggugucagaguuug

SEQ ID NO: 1800033 - RNA, 19 nt, Homo sapiens
  misc_RNA (1)...(19): siRNA sense strand
ccaagcuggaugaagauga

SEQ ID NO: 1800034 - RNA, 19 nt, Homo sapiens
  misc_RNA (1)...(19): siRNA sense strand
ugaguggcaccgagacuau

SEQ ID NO: 1800035 - RNA, 19 nt, Homo sapiens
  misc_RNA (1)...(19): siRNA sense strand
cgggagagccagaccaaca

SEQ ID NO: 1800036 - RNA, 19 nt, Homo sapiens
  misc_RNA (1)...(19): siRNA sense strand
acaagaacagcauuaaggu

SEQ ID NO: 1800037 - RNA, 19 nt, Homo sapiens
  misc_RNA (1)...(19): siRNA sense strand
guggaggucaugugcuuug

SEQ ID NO: 1800038 - RNA, 19 nt, Homo sapiens
  misc_RNA (1)...(19): siRNA sense strand
uugagcaaaucaucaucuu

SEQ ID NO: 1800039 - RNA, 19 nt, Homo sapiens
  misc_RNA (1)...(19): siRNA sense strand
ggugggauccagcgcuaug

SEQ ID NO: 1800040 - RNA, 19 nt, Homo sapiens
  misc_RNA (1)...(19): siRNA sense strand
acacagccuggauauguau

SEQ ID NO: 1800041 - RNA, 19 nt, Homo sapiens
  misc_RNA (1)...(19): siRNA sense strand
ccucaacgcauugcaguca

SEQ ID NO: 1800042 - RNA, 19 nt, Homo sapiens
  misc_RNA (1)...(19): siRNA sense strand
uggaugaagaugagcugua

SEQ ID NO: 1800043 - RNA, 19 nt, Homo sapiens
  misc_RNA (1)...(19): siRNA sense strand
uggaagaauucggcuugga

SEQ ID NO: 1800044 - RNA, 19 nt, Homo sapiens
  misc_RNA (1)...(19): siRNA sense strand
gacgggagagccagaccaa

SEQ ID NO: 1800045 - RNA, 19 nt, Homo sapiens
  misc_RNA (1)...(19): siRNA sense strand
gaacacagccuggauaugu

SEQ ID NO: 1800046 - RNA, 19 nt, Homo sapiens
  misc_RNA (1)...(19): siRNA sense strand
ggaugaagaugagcuguaa

SEQ ID NO: 1800047 - RNA, 19 nt, Homo sapiens
  misc_RNA (1)...(19): siRNA sense strand
gaaaagugcuggcaaaaug

SEQ ID NO: 1800048 - RNA, 19 nt, Homo sapiens
  misc_RNA (1)...(19): siRNA sense strand
gaagaaggcucuggaaagg

SEQ ID NO: 1800049 - RNA, 19 nt, Homo sapiens
  misc_RNA (1)...(19): siRNA sense strand
ggagaugguuggaucauuc

SEQ ID NO: 1800050 - RNA, 19 nt, Homo sapiens
  misc_RNA (1)...(19): siRNA sense strand
gcaccgagacuauuucuug

SEQ ID NO: 1800051 - RNA, 19 nt, Homo sapiens
  misc_RNA (1)...(19): siRNA sense strand
gagaggagcugccggaacu

SEQ ID NO: 1800052 - RNA, 19 nt, Homo sapiens
  misc_RNA (1)...(19): siRNA sense strand
gcauguggcucagaucuug

SEQ ID NO: 1800053 - RNA, 19 nt, Homo sapiens
  misc_RNA (1)...(19): siRNA sense strand
guauguauguccugaguga

SEQ ID NO: 1800054 - RNA, 19 nt, Homo sapiens
  misc_RNA (1)...(19): siRNA sense strand
cccaagcgcugcaacgaua

SEQ ID NO: 1800055 - RNA, 19 nt, Homo sapiens
  misc_RNA (1)...(19): siRNA sense strand
caauagagcugggauggau

SEQ ID NO: 1800056 - RNA, 19 nt, Homo sapiens
  misc_RNA (1)...(19): siRNA sense strand
gagcaaaucaucaucuuca

SEQ ID NO: 1800057 - RNA, 19 nt, Homo sapiens
  misc_RNA (1)...(19): siRNA sense strand
agaauaagcccaagucaga

SEQ ID NO: 1800058 - RNA, 19 nt, Homo sapiens
  misc_RNA (1)...(19): siRNA sense strand
gaacgaccuccucaucaaa

SEQ ID NO: 1800059 - RNA, 19 nt, Homo sapiens
  misc_RNA (1)...(19): siRNA sense strand
gcauugcagucacccauug

SEQ ID NO: 1800060 - RNA, 19 nt, Homo sapiens
  misc_RNA (1)...(19): siRNA sense strand
gauggauacugcagaccua

SEQ ID NO: 1800061 - RNA, 19 nt, Homo sapiens
  misc_RNA (1)...(19): siRNA sense strand
gaauucggcuuggagauca

SEQ ID NO: 1800062 - RNA, 19 nt, Homo sapiens
  misc_RNA (1)...(19): siRNA sense strand
ggagggcccuggagauaag

SEQ ID NO: 1800063 - RNA, 19 nt, Homo sapiens
  misc_RNA (1)...(19): siRNA sense strand
gaauauccagcaaaucuau

SEQ ID NO: 1800064 - RNA, 19 nt, Homo sapiens
  misc_RNA (1)...(19): siRNA sense strand
gaagaagaaggcucuggaa

SEQ ID NO: 1800065 - RNA, 19 nt, Homo sapiens
  misc_RNA (1)...(19): siRNA sense strand
ugaacgaccuccucaucaa

SEQ ID NO: 1800066 - RNA, 19 nt, Homo sapiens
  misc_RNA (1)...(19): siRNA sense strand
cuacaacggugucugaaag

SEQ ID NO: 1800067 - RNA, 19 nt, Homo sapiens
  misc_RNA (1)...(19): siRNA sense strand
ggauauguauacaagaaca

SEQ ID NO: 1800068 - RNA, 19 nt, Homo sapiens
  misc_RNA (1)...(19): siRNA sense strand
ggaauauccagcaaaucua

SEQ ID NO: 1800069 - RNA, 19 nt, Homo sapiens
  misc_RNA (1)...(19): siRNA sense strand
gggaauauccagcaaaucu

SEQ ID NO: 1800070 - RNA, 19 nt, Homo sapiens
  misc_RNA (1)...(19): siRNA sense strand
ugagugaacugguagaaac

SEQ ID NO: 1800071 - RNA, 19 nt, Homo sapiens
  misc_RNA (1)...(19): siRNA sense strand
gagcuacaacggugucuga

SEQ ID NO: 1800072 - RNA, 19 nt, Homo sapiens
  misc_RNA (1)...(19): siRNA sense strand
gcucagcuauucaucaaac

SEQ ID NO: 1800073 - RNA, 19 nt, Homo sapiens
  misc_RNA (1)...(19): siRNA sense strand
gaacugguagaaacagaga

SEQ ID NO: 1800074 - RNA, 19 nt, Homo sapiens
  misc_RNA (1)...(19): siRNA sense strand
ucaaggauuuucucaagua

SEQ ID NO: 1800075 - RNA, 19 nt, Homo sapiens
  misc_RNA (1)...(19): siRNA sense strand
ugcagcggaucaugaaaua

SEQ ID NO: 1800076 - RNA, 19 nt, Homo sapiens
  misc_RNA (1)...(19): siRNA sense strand
ggcagauuguggaggguua

SEQ ID NO: 1800077 - RNA, 19 nt, Homo sapiens
  misc_RNA (1)...(19): siRNA sense strand
guauacaagaacagcauua

SEQ ID NO: 1800078 - RNA, 19 nt, Homo sapiens
  misc_RNA (1)...(19): siRNA sense strand
ggaaaggaguauguauguc

SEQ ID NO: 1800079 - RNA, 19 nt, Homo sapiens
  misc_RNA (1)...(19): siRNA sense strand
cagagcauguggugucaga

SEQ ID NO: 1800080 - RNA, 19 nt, Homo sapiens
  misc_RNA (1)...(19): siRNA sense strand
gaguauguauguccugagu

SEQ ID NO: 1800081 - RNA, 19 nt, Homo sapiens
  misc_RNA (1)...(19): siRNA sense strand
ucugaaagauccugauugg

SEQ ID NO: 1800082 - RNA, 19 nt, Homo sapiens
  misc_RNA (1)...(19): siRNA sense strand
cuggauauguauacaagaa

SEQ ID NO: 1800083 - RNA, 19 nt, Homo sapiens
  misc_RNA (1)...(19): siRNA sense strand
ggauuguguuugggaauau

SEQ ID NO: 1800084 - RNA, 19 nt, Homo sapiens
  misc_RNA (1)...(19): siRNA sense strand
uugccaagcuggaugaaga

SEQ ID NO: 1800085 - RNA, 19 nt, Homo sapiens
  misc_RNA (1)...(19): siRNA sense strand
gcacacacacacccaucaa

SEQ ID NO: 1800086 - RNA, 19 nt, Homo sapiens
  misc_RNA (1)...(19): siRNA sense strand
aaauguacguggacgacuu

SEQ ID NO: 1800087 - RNA, 19 nt, Homo sapiens
  misc_RNA (1)...(19): siRNA sense strand
gggacuuccucaacgcauu

SEQ ID NO: 1800088 - RNA, 19 nt, Homo sapiens
  misc_RNA (1)...(19): siRNA sense strand
ucaagcauguggcucagau

SEQ ID NO: 1800089 - RNA, 19 nt, Homo sapiens
  misc_RNA (1)...(19): siRNA sense strand
gcauguggugucagaguuu

SEQ ID NO: 1800090 - RNA, 19 nt, Homo sapiens
  misc_RNA (1)...(19): siRNA sense strand
caagcuggaugaagaugag

SEQ ID NO: 1800091 - RNA, 19 nt, Homo sapiens
  misc_RNA (1)...(19): siRNA sense strand
uggcucagcuauucaucaa

SEQ ID NO: 1800092 - RNA, 19 nt, Homo sapiens
  misc_RNA (1)...(19): siRNA sense strand
ggacuuccucaacgcauug

SEQ ID NO: 1800093 - RNA, 19 nt, Homo sapiens
  misc_RNA (1)...(19): siRNA sense strand
aacacagccuggauaugua

SEQ ID NO: 1800094 - RNA, 19 nt, Homo sapiens
  misc_RNA (1)...(19): siRNA sense strand
gcaaaucaucaucuucagu

SEQ ID NO: 1800095 - RNA, 19 nt, Homo sapiens
  misc_RNA (1)...(19): siRNA sense strand
ccgagacuauuucuugcaa

SEQ ID NO: 1800096 - RNA, 19 nt, Homo sapiens
  misc_RNA (1)...(19): siRNA sense strand
aggauuguguuugggaaua

SEQ ID NO: 1800097 - RNA, 19 nt, Homo sapiens
  misc_RNA (1)...(19): siRNA sense strand
ggggagcccuggaagaauu

SEQ ID NO: 1800098 - RNA, 19 nt, Homo sapiens
  misc_RNA (1)...(19): siRNA sense strand
gaccauaugagaacuggau

SEQ ID NO: 1800099 - RNA, 19 nt, Homo sapiens
  misc_RNA (1)...(19): siRNA sense strand
gaggaggaacagaagaaga

SEQ ID NO: 1800100 - RNA, 19 nt, Homo sapiens
  misc_RNA (1)...(19): siRNA sense strand
guggaacacagccuggaua

SEQ ID NO: 1800101 - RNA, 19 nt, Homo sapiens
  misc_RNA (1)...(19): siRNA sense strand
gcucaaggauuuucucaag

SEQ ID NO: 1800102 - RNA, 19 nt, Homo sapiens
  misc_RNA (1)...(19): siRNA sense strand
gcuacaacggugucugaaa

SEQ ID NO: 1800103 - RNA, 19 nt, Homo sapiens
  misc_RNA (1)...(19): siRNA sense strand
agaagaaggcucuggaaag

SEQ ID NO: 1800104 - RNA, 19 nt, Homo sapiens
  misc_RNA (1)...(19): siRNA sense strand
uguccugagugaacuggua

SEQ ID NO: 1800105 - RNA, 19 nt, Homo sapiens
  misc_RNA (1)...(19): siRNA sense strand
acacacacacccaucaaug

SEQ ID NO: 1800106 - RNA, 19 nt, Homo sapiens
  misc_RNA (1)...(19): siRNA sense strand
gcagucacccauugaguac

SEQ ID NO: 1800107 - RNA, 19 nt, Homo sapiens
  misc_RNA (1)...(19): siRNA sense strand
caccugaagaggagacuuu

SEQ ID NO: 1800108 - RNA, 19 nt, Homo sapiens
  misc_RNA (1)...(19): siRNA sense strand
gcgcugcaacgauaugaug

SEQ ID NO: 1800109 - RNA, 19 nt, Homo sapiens
  misc_RNA (1)...(19): siRNA sense strand
gugacaggauuguguuugg

SEQ ID NO: 1800110 - RNA, 19 nt, Homo sapiens
  misc_RNA (1)...(19): siRNA sense strand
gugaacugguagaaacaga

SEQ ID NO: 1800111 - RNA, 19 nt, Homo sapiens
  misc_RNA (1)...(19): siRNA sense strand
gugaggaggaacagaagaa

SEQ ID NO: 1800112 - RNA, 19 nt, Homo sapiens
  misc_RNA (1)...(19): siRNA sense strand
gcugaacgaccuccucauc

SEQ ID NO: 1800113 - RNA, 19 nt, Homo sapiens
  misc_RNA (1)...(19): siRNA sense strand
uggaaaggaguauguaugu

SEQ ID NO: 1800114 - RNA, 19 nt, Homo sapiens
  misc_RNA (1)...(19): siRNA sense strand
agacgcagccaccugaaga

SEQ ID NO: 1800115 - RNA, 19 nt, Homo sapiens
  misc_RNA (1)...(19): siRNA sense strand
gagcauguggugucagagu

SEQ ID NO: 1800116 - RNA, 19 nt, Homo sapiens
  misc_RNA (1)...(19): siRNA sense strand
aggaggaacagaagaagaa

SEQ ID NO: 1800117 - RNA, 19 nt, Homo sapiens
  misc_RNA (1)...(19): siRNA sense strand
gccuggauauguauacaag

SEQ ID NO: 1800118 - RNA, 19 nt, Homo sapiens
  misc_RNA (1)...(19): siRNA sense strand
aaaucaucaucuucaguga

SEQ ID NO: 1800119 - RNA, 19 nt, Homo sapiens
  misc_RNA (1)...(19): siRNA sense strand
ccaaacauugucucagugu

SEQ ID NO: 1800120 - RNA, 19 nt, Homo sapiens
  misc_RNA (1)...(19): siRNA sense strand
cauaugagaacuggauguu

SEQ ID NO: 1800121 - RNA, 19 nt, Homo sapiens
  misc_RNA (1)...(19): siRNA sense strand
gcucuggaaaggaguaugu

SEQ ID NO: 1800122 - RNA, 19 nt, Homo sapiens
  misc_RNA (1)...(19): siRNA sense strand
aagaagaaggcucuggaaa

SEQ ID NO: 1800123 - RNA, 19 nt, Homo sapiens
  misc_RNA (1)...(19): siRNA sense strand
gauuguggaggguuauaug

SEQ ID NO: 1800124 - RNA, 19 nt, Homo sapiens
  misc_RNA (1)...(19): siRNA sense strand
gaggagcugccggaacuga

SEQ ID NO: 1800125 - RNA, 19 nt, Homo sapiens
  misc_RNA (1)...(19): siRNA sense strand
gugcagcggaucaugaaau

SEQ ID NO: 1800126 - RNA, 19 nt, Homo sapiens
  misc_RNA (1)...(19): siRNA sense strand
agagugaggaggaacagaa

SEQ ID NO: 1800127 - RNA, 19 nt, Homo sapiens
  misc_RNA (1)...(19): siRNA sense strand
caacggugucugaaagauc

SEQ ID NO: 1800128 - RNA, 19 nt, Homo sapiens
  misc_RNA (1)...(19): siRNA sense strand
aaacaggcccuuggugaca

SEQ ID NO: 1800129 - RNA, 19 nt, Homo sapiens
  misc_RNA (1)...(19): siRNA sense strand
uacaagaacagcauuaagg

SEQ ID NO: 1800130 - RNA, 19 nt, Homo sapiens
  misc_RNA (1)...(19): siRNA sense strand
ucgaggccgugacaggauu

SEQ ID NO: 1800131 - RNA, 19 nt, Homo sapiens
  misc_RNA (1)...(19): siRNA sense strand
ugaccuugcugaccacacu

SEQ ID NO: 1800132 - RNA, 19 nt, Homo sapiens
  misc_RNA (1)...(19): siRNA sense strand
ggugacccuugccgcuuug

SEQ ID NO: 1800133 - RNA, 19 nt, Homo sapiens
  misc_RNA (1)...(19): siRNA sense strand
uugggaauauccagcaaau

SEQ ID NO: 1800134 - RNA, 19 nt, Homo sapiens
  misc_RNA (1)...(19): siRNA sense strand
ggauaaacaggcccuuggu

SEQ ID NO: 1800135 - RNA, 19 nt, Homo sapiens
  misc_RNA (1)...(19): siRNA sense strand
ugcagucacccauugagua

SEQ ID NO: 1800136 - RNA, 19 nt, Homo sapiens
  misc_RNA (1)...(19): siRNA sense strand
ggaacacagccuggauaug

SEQ ID NO: 1800137 - RNA, 19 nt, Homo sapiens
  misc_RNA (1)...(19): siRNA sense strand
cauguggugucagaguuug

SEQ ID NO: 1800138 - RNA, 19 nt, Homo sapiens
  misc_RNA (1)...(19): siRNA sense strand
uuccaaacauugucucagu

SEQ ID NO: 1800139 - RNA, 19 nt, Homo sapiens
  misc_RNA (1)...(19): siRNA sense strand
ccaagcuggaugaagauga

SEQ ID NO: 1800140 - RNA, 19 nt, Homo sapiens
  misc_RNA (1)...(19): siRNA sense strand
gaucauuccaaacauuguc

SEQ ID NO: 1800141 - RNA, 19 nt, Homo sapiens
  misc_RNA (1)...(19): siRNA sense strand
cgggagagccagaccaaca

SEQ ID NO: 1800142 - RNA, 19 nt, Homo sapiens
  misc_RNA (1)...(19): siRNA sense strand
acaagaacagcauuaaggu

SEQ ID NO: 1800143 - RNA, 19 nt, Homo sapiens
  misc_RNA (1)...(19): siRNA sense strand
guggaggucaugugcuuug

SEQ ID NO: 1800144 - RNA, 19 nt, Homo sapiens
  misc_RNA (1)...(19): siRNA sense strand
ugaguggcaccgagacuau

SEQ ID NO: 1800145 - RNA, 19 nt, Homo sapiens
  misc_RNA (1)...(19): siRNA sense strand
agaugaagaugaaguauga

SEQ ID NO: 1800146 - RNA, 19 nt, Homo sapiens
  misc_RNA (1)...(19): siRNA sense strand
ccagaaggcuagaagaauc

SEQ ID NO: 1800147 - RNA, 19 nt, Homo sapiens
  misc_RNA (1)...(19): siRNA sense strand
gaagaugaaguaugacgaa

SEQ ID NO: 1800148 - RNA, 19 nt, Homo sapiens
  misc_RNA (1)...(19): siRNA sense strand
gacaaggaccgguuucuga

SEQ ID NO: 1800149 - RNA, 19 nt, Homo sapiens
  misc_RNA (1)...(19): siRNA sense strand
caaacaagaauuagccaaa

SEQ ID NO: 1800150 - RNA, 19 nt, Homo sapiens
  misc_RNA (1)...(19): siRNA sense strand
gcuagauaaugucaaacaa

SEQ ID NO: 1800151 - RNA, 19 nt, Homo sapiens
  misc_RNA (1)...(19): siRNA sense strand
gaugaaguaugacgaaagc

SEQ ID NO: 1800152 - RNA, 19 nt, Homo sapiens
  misc_RNA (1)...(19): siRNA sense strand
caaggaggagaaaguguuu

SEQ ID NO: 1800153 - RNA, 19 nt, Homo sapiens
  misc_RNA (1)...(19): siRNA sense strand
cuggagagcuugacauucu

SEQ ID NO: 1800154 - RNA, 19 nt, Homo sapiens
  misc_RNA (1)...(19): siRNA sense strand
gagaugaagaugaaguaug

SEQ ID NO: 1800155 - RNA, 19 nt, Homo sapiens
  misc_RNA (1)...(19): siRNA sense strand
caugauuucuggagagcuu

SEQ ID NO: 1800156 - RNA, 19 nt, Homo sapiens
  misc_RNA (1)...(19): siRNA sense strand
caaagacuggugcuaugaa

SEQ ID NO: 1800157 - RNA, 19 nt, Homo sapiens
  misc_RNA (1)...(19): siRNA sense strand
ggccagaaggcuagaagaa

SEQ ID NO: 1800158 - RNA, 19 nt, Homo sapiens
  misc_RNA (1)...(19): siRNA sense strand
gcgaggugcuacggaagaa

SEQ ID NO: 1800159 - RNA, 19 nt, Homo sapiens
  misc_RNA (1)...(19): siRNA sense strand
ucaaggaggagaaaguguu

SEQ ID NO: 1800160 - RNA, 19 nt, Homo sapiens
  misc_RNA (1)...(19): siRNA sense strand
acaaggacuccaaguggua

SEQ ID NO: 1800161 - RNA, 19 nt, Homo sapiens
  misc_RNA (1)...(19): siRNA sense strand
gagcugccacuguccaaau

SEQ ID NO: 1800162 - RNA, 19 nt, Homo sapiens
  misc_RNA (1)...(19): siRNA sense strand
guuccauucucgcauccua

SEQ ID NO: 1800163 - RNA, 19 nt, Homo sapiens
  misc_RNA (1)...(19): siRNA sense strand
cuugcuagauaaugucaaa

SEQ ID NO: 1800164 - RNA, 19 nt, Homo sapiens
  misc_RNA (1)...(19): siRNA sense strand
ggugcuaugaagcuacuua

SEQ ID NO: 1800165 - RNA, 19 nt, Homo sapiens
  misc_RNA (1)...(19): siRNA sense strand
ucaaagacuggugcuauga

SEQ ID NO: 1800166 - RNA, 19 nt, Homo sapiens
  misc_RNA (1)...(19): siRNA sense strand
cggacaaggucaccgacuu

SEQ ID NO: 1800167 - RNA, 19 nt, Homo sapiens
  misc_RNA (1)...(19): siRNA sense strand
ggccagaaggaaauacaaa

SEQ ID NO: 1800168 - RNA, 19 nt, Homo sapiens
  misc_RNA (1)...(19): siRNA sense strand
ccaggaggccagaaggaaa

SEQ ID NO: 1800169 - RNA, 19 nt, Homo sapiens
  misc_RNA (1)...(19): siRNA sense strand
cagcgacuccggaagagaa

SEQ ID NO: 1800170 - RNA, 19 nt, Homo sapiens
  misc_RNA (1)...(19): siRNA sense strand
ggaagagaacggaguuugc

SEQ ID NO: 1800171 - RNA, 19 nt, Homo sapiens
  misc_RNA (1)...(19): siRNA sense strand
caggacagcggccuucaga

SEQ ID NO: 1800172 - RNA, 19 nt, Homo sapiens
  misc_RNA (1)...(19): siRNA sense strand
aaagacuggugcuaugaag

SEQ ID NO: 1800173 - RNA, 19 nt, Homo sapiens
  misc_RNA (1)...(19): siRNA sense strand
acaaggaccgguuucugaa

SEQ ID NO: 1800174 - RNA, 19 nt, Homo sapiens
  misc_RNA (1)...(19): siRNA sense strand
ggaguuugcgggagauaag

SEQ ID NO: 1800175 - RNA, 19 nt, Homo sapiens
  misc_RNA (1)...(19): siRNA sense strand
aggcacagcuggugauggu

SEQ ID NO: 1800176 - RNA, 19 nt, Homo sapiens
  misc_RNA (1)...(19): siRNA sense strand
gcuaugaagcuacuuacag

SEQ ID NO: 1800177 - RNA, 19 nt, Homo sapiens
  misc_RNA (1)...(19): siRNA sense strand
uggaguccgugaagaagga

SEQ ID NO: 1800178 - RNA, 19 nt, Homo sapiens
  misc_RNA (1)...(19): siRNA sense strand
cucaaagacuggugcuaug

SEQ ID NO: 1800179 - RNA, 19 nt, Homo sapiens
  misc_RNA (1)...(19): siRNA sense strand
aagaugaaguaugacgaaa

SEQ ID NO: 1800180 - RNA, 19 nt, Homo sapiens
  misc_RNA (1)...(19): siRNA sense strand
ccacuguccaaaucauauu

SEQ ID NO: 1800181 - RNA, 19 nt, Homo sapiens
  misc_RNA (1)...(19): siRNA sense strand
ggguggaguccgugaagaa

SEQ ID NO: 1800182 - RNA, 19 nt, Homo sapiens
  misc_RNA (1)...(19): siRNA sense strand
cggaggugcucacggagau

SEQ ID NO: 1800183 - RNA, 19 nt, Homo sapiens
  misc_RNA (1)...(19): siRNA sense strand
uguccggcuugcuagauaa

SEQ ID NO: 1800184 - RNA, 19 nt, Homo sapiens
  misc_RNA (1)...(19): siRNA sense strand
gccagaaggcuagaagaau

SEQ ID NO: 1800185 - RNA, 19 nt, Homo sapiens
  misc_RNA (1)...(19): siRNA sense strand
ucucaaagacuggugcuau

SEQ ID NO: 1800186 - RNA, 19 nt, Homo sapiens
  misc_RNA (1)...(19): siRNA sense strand
acaaaaccaucgagucaga

SEQ ID NO: 1800187 - RNA, 19 nt, Homo sapiens
  misc_RNA (1)...(19): siRNA sense strand
cagaaggcuagaagaauca

SEQ ID NO: 1800188 - RNA, 19 nt, Homo sapiens
  misc_RNA (1)...(19): siRNA sense strand
caaggagggcguggaggaa

SEQ ID NO: 1800189 - RNA, 19 nt, Homo sapiens
  misc_RNA (1)...(19): siRNA sense strand
ugaaacagugcgagaacga

SEQ ID NO: 1800190 - RNA, 19 nt, Homo sapiens
  misc_RNA (1)...(19): siRNA sense strand
guccaaaucauauucuucu

SEQ ID NO: 1800191 - RNA, 19 nt, Homo sapiens
  misc_RNA (1)...(19): siRNA sense strand
cuguccggcuugcuagaua

SEQ ID NO: 1800192 - RNA, 19 nt, Homo sapiens
  misc_RNA (1)...(19): siRNA sense strand
ucgagaugaagaugaagua

SEQ ID NO: 1800193 - RNA, 19 nt, Homo sapiens
  misc_RNA (1)...(19): siRNA sense strand
caggaggccagaaggaaau

SEQ ID NO: 1800194 - RNA, 19 nt, Homo sapiens
  misc_RNA (1)...(19): siRNA sense strand
ccggcuugcuagauaaugu

SEQ ID NO: 1800195 - RNA, 19 nt, Homo sapiens
  misc_RNA (1)...(19): siRNA sense strand
gccacuguccaaaucauau

SEQ ID NO: 1800196 - RNA, 19 nt, Homo sapiens
  misc_RNA (1)...(19): siRNA sense strand
gacuggugcuaugaagcua

SEQ ID NO: 1800197 - RNA, 19 nt, Homo sapiens
  misc_RNA (1)...(19): siRNA sense strand
uaaguucaaggaggagaaa

SEQ ID NO: 1800198 - RNA, 19 nt, Homo sapiens
  misc_RNA (1)...(19): siRNA sense strand
cgggagauaaguucaagga

SEQ ID NO: 1800199 - RNA, 19 nt, Homo sapiens
  misc_RNA (1)...(19): siRNA sense strand
ccgugaagaaggaaauuga

SEQ ID NO: 1800200 - RNA, 19 nt, Homo sapiens
  misc_RNA (1)...(19): siRNA sense strand
cggaagagaacggaguuug

SEQ ID NO: 1800201 - RNA, 19 nt, Homo sapiens
  misc_RNA (1)...(19): siRNA sense strand
guaaagauguuccuuguga

SEQ ID NO: 1800202 - RNA, 19 nt, Homo sapiens
  misc_RNA (1)...(19): siRNA sense strand
gcacagucuugcacaaaua

SEQ ID NO: 1800203 - RNA, 19 nt, Homo sapiens
  misc_RNA (1)...(19): siRNA sense strand
gaacagagaaguaguguca

SEQ ID NO: 1800204 - RNA, 19 nt, Homo sapiens
  misc_RNA (1)...(19): siRNA sense strand
ggagauauccgccugcuuu

SEQ ID NO: 1800205 - RNA, 19 nt, Homo sapiens
  misc_RNA (1)...(19): siRNA sense strand
caacaguucugaugccaaa

SEQ ID NO: 1800206 - RNA, 19 nt, Homo sapiens
  misc_RNA (1)...(19): siRNA sense strand
ucaaaugcuuccugcaaua

SEQ ID NO: 1800207 - RNA, 19 nt, Homo sapiens
  misc_RNA (1)...(19): siRNA sense strand
gaaguagugucaccucauc

SEQ ID NO: 1800208 - RNA, 19 nt, Homo sapiens
  misc_RNA (1)...(19): siRNA sense strand
caagugaccuuauuuaacc

SEQ ID NO: 1800209 - RNA, 19 nt, Homo sapiens
  misc_RNA (1)...(19): siRNA sense strand
gcacacacuugacacugau

SEQ ID NO: 1800210 - RNA, 19 nt, Homo sapiens
  misc_RNA (1)...(19): siRNA sense strand
gggcuucacagcagaaauu

SEQ ID NO: 1800211 - RNA, 19 nt, Homo sapiens
  misc_RNA (1)...(19): siRNA sense strand
caacuuugaggaaucauug

SEQ ID NO: 1800212 - RNA, 19 nt, Homo sapiens
  misc_RNA (1)...(19): siRNA sense strand
gggcaacuuugaggaauca

SEQ ID NO: 1800213 - RNA, 19 nt, Homo sapiens
  misc_RNA (1)...(19): siRNA sense strand
caucaaaugcuuccugcaa

SEQ ID NO: 1800214 - RNA, 19 nt, Homo sapiens
  misc_RNA (1)...(19): siRNA sense strand
guccaagugaccuuauuua

SEQ ID NO: 1800215 - RNA, 19 nt, Homo sapiens
  misc_RNA (1)...(19): siRNA sense strand
gauguuccuugugaccuuu

SEQ ID NO: 1800216 - RNA, 19 nt, Homo sapiens
  misc_RNA (1)...(19): siRNA sense strand
ccaagugaccuuauuuaac

SEQ ID NO: 1800217 - RNA, 19 nt, Homo sapiens
  misc_RNA (1)...(19): siRNA sense strand
ugguaaagauguuccuugu

SEQ ID NO: 1800218 - RNA, 19 nt, Homo sapiens
  misc_RNA (1)...(19): siRNA sense strand
caccguggccucuguguug

SEQ ID NO: 1800219 - RNA, 19 nt, Homo sapiens
  misc_RNA (1)...(19): siRNA sense strand
agacugugguaaagauguu

SEQ ID NO: 1800220 - RNA, 19 nt, Homo sapiens
  misc_RNA (1)...(19): siRNA sense strand
gcaacuuugaggaaucauu

SEQ ID NO: 1800221 - RNA, 19 nt, Homo sapiens
  misc_RNA (1)...(19): siRNA sense strand
gccugucacugucacauuc

SEQ ID NO: 1800222 - RNA, 19 nt, Homo sapiens
  misc_RNA (1)...(19): siRNA sense strand
gugaggagggaaaugcuaa

SEQ ID NO: 1800223 - RNA, 19 nt, Homo sapiens
  misc_RNA (1)...(19): siRNA sense strand
gcagaaauuggagcuagug

SEQ ID NO: 1800224 - RNA, 19 nt, Homo sapiens
  misc_RNA (1)...(19): siRNA sense strand
ugcacacacuugacacuga

SEQ ID NO: 1800225 - RNA, 19 nt, Homo sapiens
  misc_RNA (1)...(19): siRNA sense strand
gcugcuuccugcuggagaa

SEQ ID NO: 1800226 - RNA, 19 nt, Homo sapiens
  misc_RNA (1)...(19): siRNA sense strand
uccaagugaccuuauuuaa

SEQ ID NO: 1800227 - RNA, 19 nt, Homo sapiens
  misc_RNA (1)...(19): siRNA sense strand
guagugucaccucaucuug

SEQ ID NO: 1800228 - RNA, 19 nt, Homo sapiens
  misc_RNA (1)...(19): siRNA sense strand
gcacagucccgagcacaca

SEQ ID NO: 1800229 - RNA, 19 nt, Homo sapiens
  misc_RNA (1)...(19): siRNA sense strand
guacccugcugggcaacuu

SEQ ID NO: 1800230 - RNA, 19 nt, Homo sapiens
  misc_RNA (1)...(19): siRNA sense strand
ggugaggagggaaaugcua

SEQ ID NO: 1800231 - RNA, 19 nt, Homo sapiens
  misc_RNA (1)...(19): siRNA sense strand
cugaagaaccaucuacugu

SEQ ID NO: 1800232 - RNA, 19 nt, Homo sapiens
  misc_RNA (1)...(19): siRNA sense strand
caccucaucuuggacuuca

SEQ ID NO: 1800233 - RNA, 19 nt, Homo sapiens
  misc_RNA (1)...(19): siRNA sense strand
ugcaccaucuggccacauu

SEQ ID NO: 1800234 - RNA, 19 nt, Homo sapiens
  misc_RNA (1)...(19): siRNA sense strand
guuguggaacagagaagua

SEQ ID NO: 1800235 - RNA, 19 nt, Homo sapiens
  misc_RNA (1)...(19): siRNA sense strand
gcugggcaacuuugaggaa

SEQ ID NO: 1800236 - RNA, 19 nt, Homo sapiens
  misc_RNA (1)...(19): siRNA sense strand
ccugcgccaucgccucuuu

SEQ ID NO: 1800237 - RNA, 19 nt, Homo sapiens
  misc_RNA (1)...(19): siRNA sense strand
gagcuagugggucauacug

SEQ ID NO: 1800238 - RNA, 19 nt, Homo sapiens
  misc_RNA (1)...(19): siRNA sense strand
cuucacagcagaaauugga

SEQ ID NO: 1800239 - RNA, 19 nt, Homo sapiens
  misc_RNA (1)...(19): siRNA sense strand
ccacauugagggcuucaca

SEQ ID NO: 1800240 - RNA, 19 nt, Homo sapiens
  misc_RNA (1)...(19): siRNA sense strand
cguccaagugaccuuauuu

SEQ ID NO: 1800241 - RNA, 19 nt, Homo sapiens
  misc_RNA (1)...(19): siRNA sense strand
acugucacauucuuugaug

SEQ ID NO: 1800242 - RNA, 19 nt, Homo sapiens
  misc_RNA (1)...(19): siRNA sense strand
agugucaccucaucuugga

SEQ ID NO: 1800243 - RNA, 19 nt, Homo sapiens
  misc_RNA (1)...(19): siRNA sense strand
caaaugcuuccugcaauac

SEQ ID NO: 1800244 - RNA, 19 nt, Homo sapiens
  misc_RNA (1)...(19): siRNA sense strand
gguaaagauguuccuugug

SEQ ID NO: 1800245 - RNA, 19 nt, Homo sapiens
  misc_RNA (1)...(19): siRNA sense strand
ucacugucacauucuuuga

SEQ ID NO: 1800246 - RNA, 19 nt, Homo sapiens
  misc_RNA (1)...(19): siRNA sense strand
caccaucuggccacauuga

SEQ ID NO: 1800247 - RNA, 19 nt, Homo sapiens
  misc_RNA (1)...(19): siRNA sense strand
caggccagcugcacacacu

SEQ ID NO: 1800248 - RNA, 19 nt, Homo sapiens
  misc_RNA (1)...(19): siRNA sense strand
agauguuccuugugaccuu

SEQ ID NO: 1800249 - RNA, 19 nt, Homo sapiens
  misc_RNA (1)...(19): siRNA sense strand
acacacuugacacugauuu

SEQ ID NO: 1800250 - RNA, 19 nt, Homo sapiens
  misc_RNA (1)...(19): siRNA sense strand
ggccagcugcacacacuug

SEQ ID NO: 1800251 - RNA, 19 nt, Homo sapiens
  misc_RNA (1)...(19): siRNA sense strand
gauaauggcugcacucuuu

SEQ ID NO: 1800252 - RNA, 19 nt, Homo sapiens
  misc_RNA (1)...(19): siRNA sense strand
gaucauugcuccucuugua

SEQ ID NO: 1800253 - RNA, 19 nt, Homo sapiens
  misc_RNA (1)...(19): siRNA sense strand
ggaaagcugugguccaauu

SEQ ID NO: 1800254 - RNA, 19 nt, Homo sapiens
  misc_RNA (1)...(19): siRNA sense strand
gaucagagaugaaugaaag

SEQ ID NO: 1800255 - RNA, 19 nt, Homo sapiens
  misc_RNA (1)...(19): siRNA sense strand
gaaacuauguacccaauuc

SEQ ID NO: 1800256 - RNA, 19 nt, Homo sapiens
  misc_RNA (1)...(19): siRNA sense strand
gggaaacgcuaucugaauu

SEQ ID NO: 1800257 - RNA, 19 nt, Homo sapiens
  misc_RNA (1)...(19): siRNA sense strand
gaaagacacuccgaucaga

SEQ ID NO: 1800258 - RNA, 19 nt, Homo sapiens
  misc_RNA (1)...(19): siRNA sense strand
gauuugcacuacugaauuu

SEQ ID NO: 1800259 - RNA, 19 nt, Homo sapiens
  misc_RNA (1)...(19): siRNA sense strand
ccauaaacauugcacuuaa

SEQ ID NO: 1800260 - RNA, 19 nt, Homo sapiens
  misc_RNA (1)...(19): siRNA sense strand
aaauggagcuguagaugaa

SEQ ID NO: 1800261 - RNA, 19 nt, Homo sapiens
  misc_RNA (1)...(19): siRNA sense strand
gggaggugguugcaaauuu

SEQ ID NO: 1800262 - RNA, 19 nt, Homo sapiens
  misc_RNA (1)...(19): siRNA sense strand
caugaugcuucuacauuua

SEQ ID NO: 1800263 - RNA, 19 nt, Homo sapiens
  misc_RNA (1)...(19): siRNA sense strand
gcagacaaguauccuguug

SEQ ID NO: 1800264 - RNA, 19 nt, Homo sapiens
  misc_RNA (1)...(19): siRNA sense strand
gaccuuaaauggagcugua

SEQ ID NO: 1800265 - RNA, 19 nt, Homo sapiens
  misc_RNA (1)...(19): siRNA sense strand
ggaaauggacccaccaaga

SEQ ID NO: 1800266 - RNA, 19 nt, Homo sapiens
  misc_RNA (1)...(19): siRNA sense strand
gaaauggacccaccaagau

SEQ ID NO: 1800267 - RNA, 19 nt, Homo sapiens
  misc_RNA (1)...(19): siRNA sense strand
ugaaugcuuugaugucaua

SEQ ID NO: 1800268 - RNA, 19 nt, Homo sapiens
  misc_RNA (1)...(19): siRNA sense strand
ugaaagaagucauggaaca

SEQ ID NO: 1800269 - RNA, 19 nt, Homo sapiens
  misc_RNA (1)...(19): siRNA sense strand
gaagggauuugcacuacug

SEQ ID NO: 1800270 - RNA, 19 nt, Homo sapiens
  misc_RNA (1)...(19): siRNA sense strand
gagagguggugauggaauu

SEQ ID NO: 1800271 - RNA, 19 nt, Homo sapiens
  misc_RNA (1)...(19): siRNA sense strand
cgacuugucugcaguagau

SEQ ID NO: 1800272 - RNA, 19 nt, Homo sapiens
  misc_RNA (1)...(19): siRNA sense strand
gcaaauuucuaagguacaa

SEQ ID NO: 1800273 - RNA, 19 nt, Homo sapiens
  misc_RNA (1)...(19): siRNA sense strand
ggaggugguugcaaauuuc

SEQ ID NO: 1800274 - RNA, 19 nt, Homo sapiens
  misc_RNA (1)...(19): siRNA sense strand
uaaacuggauccugauaug

SEQ ID NO: 1800275 - RNA, 19 nt, Homo sapiens
  misc_RNA (1)...(19): siRNA sense strand
ucaugaugcuucuacauuu

SEQ ID NO: 1800276 - RNA, 19 nt, Homo sapiens
  misc_RNA (1)...(19): siRNA sense strand
ggugauggaauuaauagua

SEQ ID NO: 1800277 - RNA, 19 nt, Homo sapiens
  misc_RNA (1)...(19): siRNA sense strand
gaucagcucuuuuacacua

SEQ ID NO: 1800278 - RNA, 19 nt, Homo sapiens
  misc_RNA (1)...(19): siRNA sense strand
gaaacgcuaucugaauuca

SEQ ID NO: 1800279 - RNA, 19 nt, Homo sapiens
  misc_RNA (1)...(19): siRNA sense strand
gaaggucuuugcaggcuau

SEQ ID NO: 1800280 - RNA, 19 nt, Homo sapiens
  misc_RNA (1)...(19): siRNA sense strand
ccaccaagauucuccugaa

SEQ ID NO: 1800281 - RNA, 19 nt, Homo sapiens
  misc_RNA (1)...(19): siRNA sense strand
uuacauugauccacugaaa

SEQ ID NO: 1800282 - RNA, 19 nt, Homo sapiens
  misc_RNA (1)...(19): siRNA sense strand
gaacaaaacagaaagauca

SEQ ID NO: 1800283 - RNA, 19 nt, Homo sapiens
  misc_RNA (1)...(19): siRNA sense strand
ucagggaggugguugcaaa

SEQ ID NO: 1800284 - RNA, 19 nt, Homo sapiens
  misc_RNA (1)...(19): siRNA sense strand
gcuucuacauuuaccauaa

SEQ ID NO: 1800285 - RNA, 19 nt, Homo sapiens
  misc_RNA (1)...(19): siRNA sense strand
ggaacacuaugcugaucaa

SEQ ID NO: 1800286 - RNA, 19 nt, Homo sapiens
  misc_RNA (1)...(19): siRNA sense strand
gcagucagccaaauauuuc

SEQ ID NO: 1800287 - RNA, 19 nt, Homo sapiens
  misc_RNA (1)...(19): siRNA sense strand
gaauucaggaggauuuauu

SEQ ID NO: 1800288 - RNA, 19 nt, Homo sapiens
  misc_RNA (1)...(19): siRNA sense strand
gauaaacuggauccugaua

SEQ ID NO: 1800289 - RNA, 19 nt, Homo sapiens
  misc_RNA (1)...(19): siRNA sense strand
ugauaaagcuaagcaugaa

SEQ ID NO: 1800290 - RNA, 19 nt, Homo sapiens
  misc_RNA (1)...(19): siRNA sense strand
uaacgugggagaagacuuu

SEQ ID NO: 1800291 - RNA, 19 nt, Homo sapiens
  misc_RNA (1)...(19): siRNA sense strand
ggaguucauugcaccaguu

SEQ ID NO: 1800292 - RNA, 19 nt, Homo sapiens
  misc_RNA (1)...(19): siRNA sense strand
ugacaaauccaaggacuuu

SEQ ID NO: 1800293 - RNA, 19 nt, Homo sapiens
  misc_RNA (1)...(19): siRNA sense strand
acacuaugcugaucaagau

SEQ ID NO: 1800294 - RNA, 19 nt, Homo sapiens
  misc_RNA (1)...(19): siRNA sense strand
gcaaguugaucuggagaau

SEQ ID NO: 1800295 - RNA, 19 nt, Homo sapiens
  misc_RNA (1)...(19): siRNA sense strand
gaauuuggaaggcuauuau

SEQ ID NO: 1800296 - RNA, 19 nt, Homo sapiens
  misc_RNA (1)...(19): siRNA sense strand
ccgaaaugcuagagaaaug

SEQ ID NO: 1800297 - RNA, 19 nt, Homo sapiens
  misc_RNA (1)...(19): siRNA sense strand
cauguuuacugaaugcuuu

SEQ ID NO: 1800298 - RNA, 19 nt, Homo sapiens
  misc_RNA (1)...(19): siRNA sense strand
agucauaacuguagcaaca

SEQ ID NO: 1800299 - RNA, 19 nt, Homo sapiens
  misc_RNA (1)...(19): siRNA sense strand
gaaaaugucccaacugaug

SEQ ID NO: 1800300 - RNA, 19 nt, Homo sapiens
  misc_RNA (1)...(19): siRNA sense strand
gaaagcugugguccaauuu

SEQ ID NO: 1800301 - RNA, 19 nt, Homo sapiens
  misc_RNA (1)...(19): siRNA sense strand
uaaauggagcuguagauga

SEQ ID NO: 1800302 - RNA, 19 nt, Homo sapiens
  misc_RNA (1)...(19): siRNA sense strand
gaauagaguaggaguaugg

SEQ ID NO: 1800303 - RNA, 19 nt, Homo sapiens
  misc_RNA (1)...(19): siRNA sense strand
ggccagaaagugagauuaa

SEQ ID NO: 1800304 - RNA, 19 nt, Homo sapiens
  misc_RNA (1)...(19): siRNA sense strand
gcagugucauuuauagauc

SEQ ID NO: 1800305 - RNA, 19 nt, Homo sapiens
  misc_RNA (1)...(19): siRNA sense strand
gcuauuauacgaagggauu

SEQ ID NO: 1800306 - RNA, 19 nt, Homo sapiens
  misc_RNA (1)...(19): siRNA sense strand
gugaugaauugguagaaga

SEQ ID NO: 1800307 - RNA, 19 nt, Homo sapiens
  misc_RNA (1)...(19): siRNA sense strand
cagaaagugagauuaauga

SEQ ID NO: 1800308 - RNA, 19 nt, Homo sapiens
  misc_RNA (1)...(19): siRNA sense strand
gcaaagccagagcuaagaa

SEQ ID NO: 1800309 - RNA, 19 nt, Homo sapiens
  misc_RNA (1)...(19): siRNA sense strand
ggaaucuccaggauaauga

SEQ ID NO: 1800310 - RNA, 19 nt, Homo sapiens
  misc_RNA (1)...(19): siRNA sense strand
ggaauuuuguggccagaua

SEQ ID NO: 1800311 - RNA, 19 nt, Homo sapiens
  misc_RNA (1)...(19): siRNA sense strand
gaucugguugucauguuua

SEQ ID NO: 1800312 - RNA, 19 nt, Homo sapiens
  misc_RNA (1)...(19): siRNA sense strand
ccguauaucuggugguuau

SEQ ID NO: 1800313 - RNA, 19 nt, Homo sapiens
  misc_RNA (1)...(19): siRNA sense strand
ccagaaacaugggaaugga

SEQ ID NO: 1800314 - RNA, 19 nt, Homo sapiens
  misc_RNA (1)...(19): siRNA sense strand
ggauuugcacuacugaauu

SEQ ID NO: 1800315 - RNA, 19 nt, Homo sapiens
  misc_RNA (1)...(19): siRNA sense strand
gcucuuugccgaaaugcua

SEQ ID NO: 1800316 - RNA, 19 nt, Homo sapiens
  misc_RNA (1)...(19): siRNA sense strand
cauuaccaguggcaauuaa

SEQ ID NO: 1800317 - RNA, 19 nt, Homo sapiens
  misc_RNA (1)...(19): siRNA sense strand
guugcaaauuucuaaggua

SEQ ID NO: 1800318 - RNA, 19 nt, Homo sapiens
  misc_RNA (1)...(19): siRNA sense strand
aaguugaucuggagaaugu

SEQ ID NO: 1800319 - RNA, 19 nt, Homo sapiens
  misc_RNA (1)...(19): siRNA sense strand
uggcuaauguguacuuaau

SEQ ID NO: 1800320 - RNA, 19 nt, Homo sapiens
  misc_RNA (1)...(19): siRNA sense strand
gggaauagaguaggaguau

SEQ ID NO: 1800321 - RNA, 19 nt, Homo sapiens
  misc_RNA (1)...(19): siRNA sense strand
ggauauuguucaagggaau

SEQ ID NO: 1800322 - RNA, 19 nt, Homo sapiens
  misc_RNA (1)...(19): siRNA sense strand
acaaauccaaggacuuuaa

SEQ ID NO: 1800323 - RNA, 19 nt, Homo sapiens
  misc_RNA (1)...(19): siRNA sense strand
ucauaacuguagcaacaaa

SEQ ID NO: 1800324 - RNA, 19 nt, Homo sapiens
  misc_RNA (1)...(19): siRNA sense strand
aagggaagcuauuaacauc

SEQ ID NO: 1800325 - RNA, 19 nt, Homo sapiens
  misc_RNA (1)...(19): siRNA sense strand
gaaaaggacaucaagguau

SEQ ID NO: 1800326 - RNA, 19 nt, Homo sapiens
  misc_RNA (1)...(19): siRNA sense strand
cugggagacucacacauuu

SEQ ID NO: 1800327 - RNA, 19 nt, Homo sapiens
  misc_RNA (1)...(19): siRNA sense strand
cgaaaaggcuggagcuuca

SEQ ID NO: 1800328 - RNA, 19 nt, Homo sapiens
  misc_RNA (1)...(19): siRNA sense strand
cugaugauauccacaugaa

SEQ ID NO: 1800329 - RNA, 19 nt, Homo sapiens
  misc_RNA (1)...(19): siRNA sense strand
ggaaagacacuccgaucag

SEQ ID NO: 1800330 - RNA, 19 nt, Homo sapiens
  misc_RNA (1)...(19): siRNA sense strand
ggaauagaguaggaguaug

SEQ ID NO: 1800331 - RNA, 19 nt, Homo sapiens
  misc_RNA (1)...(19): siRNA sense strand
ucaagggaauagaguagga

SEQ ID NO: 1800332 - RNA, 19 nt, Homo sapiens
  misc_RNA (1)...(19): siRNA sense strand
gcuauuaacaucacauugg

SEQ ID NO: 1800333 - RNA, 19 nt, Homo sapiens
  misc_RNA (1)...(19): siRNA sense strand
caaauccaaggacuuuaaa

SEQ ID NO: 1800334 - RNA, 19 nt, Homo sapiens
  misc_RNA (1)...(19): siRNA sense strand
ggaaacgcuaucugaauuc

SEQ ID NO: 1800335 - RNA, 19 nt, Homo sapiens
  misc_RNA (1)...(19): siRNA sense strand
uuaauaacgugggagaaga

SEQ ID NO: 1800336 - RNA, 19 nt, Homo sapiens
  misc_RNA (1)...(19): siRNA sense strand
ccagaaagugagauuaaug

SEQ ID NO: 1800337 - RNA, 19 nt, Homo sapiens
  misc_RNA (1)...(19): siRNA sense strand
ggaugcagauguuguuuug

SEQ ID NO: 1800338 - RNA, 19 nt, Homo sapiens
  misc_RNA (1)...(19): siRNA sense strand
gcugcacucuuugugaauu

SEQ ID NO: 1800339 - RNA, 19 nt, Homo sapiens
  misc_RNA (1)...(19): siRNA sense strand
ugaucugguugucauguuu

SEQ ID NO: 1800340 - RNA, 19 nt, Homo sapiens
  misc_RNA (1)...(19): siRNA sense strand
gccagaaagugagauuaau

SEQ ID NO: 1800341 - RNA, 19 nt, Homo sapiens
  misc_RNA (1)...(19): siRNA sense strand
ccagagcuaagaauacauu

SEQ ID NO: 1800342 - RNA, 19 nt, Homo sapiens
  misc_RNA (1)...(19): siRNA sense strand
cuauuaacaucacauugga

SEQ ID NO: 1800343 - RNA, 19 nt, Homo sapiens
  misc_RNA (1)...(19): siRNA sense strand
aaaagaaagugauggauuc

SEQ ID NO: 1800344 - RNA, 19 nt, Homo sapiens
  misc_RNA (1)...(19): siRNA sense strand
aagaagucauggaacacua

SEQ ID NO: 1800345 - RNA, 19 nt, Homo sapiens
  misc_RNA (1)...(19): siRNA sense strand
ccuguggacuggaaggaaa

SEQ ID NO: 1800346 - RNA, 19 nt, Homo sapiens
  misc_RNA (1)...(19): siRNA sense strand
gaagauuauguggauauug

SEQ ID NO: 1800347 - RNA, 19 nt, Homo sapiens
  misc_RNA (1)...(19): siRNA sense strand
guugucauguuuacugaau

SEQ ID NO: 1800348 - RNA, 19 nt, Homo sapiens
  misc_RNA (1)...(19): siRNA sense strand
aaaaggacaucaagguauu

SEQ ID NO: 1800349 - RNA, 19 nt, Homo sapiens
  misc_RNA (1)...(19): siRNA sense strand
cauccaaacguaucaauag

SEQ ID NO: 1800350 - RNA, 19 nt, Homo sapiens
  misc_RNA (1)...(19): siRNA sense strand
ggcaauuaauggaaaugga

SEQ ID NO: 1800351 - RNA, 19 nt, Homo sapiens
  misc_RNA (1)...(19): siRNA sense strand
gauaauggcugcacucuuu

SEQ ID NO: 1800352 - RNA, 19 nt, Homo sapiens
  misc_RNA (1)...(19): siRNA sense strand
gaucauugcuccucuugua

SEQ ID NO: 1800353 - RNA, 19 nt, Homo sapiens
  misc_RNA (1)...(19): siRNA sense strand
ggaaagcugugguccaauu

SEQ ID NO: 1800354 - RNA, 19 nt, Homo sapiens
  misc_RNA (1)...(19): siRNA sense strand
gaucagagaugaaugaaag

SEQ ID NO: 1800355 - RNA, 19 nt, Homo sapiens
  misc_RNA (1)...(19): siRNA sense strand
gaaacuauguacccaauuc

SEQ ID NO: 1800356 - RNA, 19 nt, Homo sapiens
  misc_RNA (1)...(19): siRNA sense strand
gggaaacgcuaucugaauu

SEQ ID NO: 1800357 - RNA, 19 nt, Homo sapiens
  misc_RNA (1)...(19): siRNA sense strand
gaaagacacuccgaucaga

SEQ ID NO: 1800358 - RNA, 19 nt, Homo sapiens
  misc_RNA (1)...(19): siRNA sense strand
gauuugcacuacugaauuu

SEQ ID NO: 1800359 - RNA, 19 nt, Homo sapiens
  misc_RNA (1)...(19): siRNA sense strand
ccauaaacauugcacuuaa

SEQ ID NO: 1800360 - RNA, 19 nt, Homo sapiens
  misc_RNA (1)...(19): siRNA sense strand
aaauggagcuguagaugaa

SEQ ID NO: 1800361 - RNA, 19 nt, Homo sapiens
  misc_RNA (1)...(19): siRNA sense strand
gggaggugguugcaaauuu

SEQ ID NO: 1800362 - RNA, 19 nt, Homo sapiens
  misc_RNA (1)...(19): siRNA sense strand
caugaugcuucuacauuua

SEQ ID NO: 1800363 - RNA, 19 nt, Homo sapiens
  misc_RNA (1)...(19): siRNA sense strand
gcagacaaguauccuguug

SEQ ID NO: 1800364 - RNA, 19 nt, Homo sapiens
  misc_RNA (1)...(19): siRNA sense strand
gaccuuaaauggagcugua

SEQ ID NO: 1800365 - RNA, 19 nt, Homo sapiens
  misc_RNA (1)...(19): siRNA sense strand
ggaaauggacccaccaaga

SEQ ID NO: 1800366 - RNA, 19 nt, Homo sapiens
  misc_RNA (1)...(19): siRNA sense strand
gaaauggacccaccaagau

SEQ ID NO: 1800367 - RNA, 19 nt, Homo sapiens
  misc_RNA (1)...(19): siRNA sense strand
ugaaugcuuugaugucaua

SEQ ID NO: 1800368 - RNA, 19 nt, Homo sapiens
  misc_RNA (1)...(19): siRNA sense strand
ugaaagaagucauggaaca

SEQ ID NO: 1800369 - RNA, 19 nt, Homo sapiens
  misc_RNA (1)...(19): siRNA sense strand
gaagggauuugcacuacug

SEQ ID NO: 1800370 - RNA, 19 nt, Homo sapiens
  misc_RNA (1)...(19): siRNA sense strand
gagagguggugauggaauu

SEQ ID NO: 1800371 - RNA, 19 nt, Homo sapiens
  misc_RNA (1)...(19): siRNA sense strand
cgacuugucugcaguagau

SEQ ID NO: 1800372 - RNA, 19 nt, Homo sapiens
  misc_RNA (1)...(19): siRNA sense strand
gcaaauuucuaagguacaa

SEQ ID NO: 1800373 - RNA, 19 nt, Homo sapiens
  misc_RNA (1)...(19): siRNA sense strand
ggaggugguugcaaauuuc

SEQ ID NO: 1800374 - RNA, 19 nt, Homo sapiens
  misc_RNA (1)...(19): siRNA sense strand
uaaacuggauccugauaug

SEQ ID NO: 1800375 - RNA, 19 nt, Homo sapiens
  misc_RNA (1)...(19): siRNA sense strand
ucaugaugcuucuacauuu

SEQ ID NO: 1800376 - RNA, 19 nt, Homo sapiens
  misc_RNA (1)...(19): siRNA sense strand
ggugauggaauuaauagua

SEQ ID NO: 1800377 - RNA, 19 nt, Homo sapiens
  misc_RNA (1)...(19): siRNA sense strand
gaucagcucuuuuacacua

SEQ ID NO: 1800378 - RNA, 19 nt, Homo sapiens
  misc_RNA (1)...(19): siRNA sense strand
gaaacgcuaucugaauuca

SEQ ID NO: 1800379 - RNA, 19 nt, Homo sapiens
  misc_RNA (1)...(19): siRNA sense strand
gaaggucuuugcaggcuau

SEQ ID NO: 1800380 - RNA, 19 nt, Homo sapiens
  misc_RNA (1)...(19): siRNA sense strand
ccaccaagauucuccugaa

SEQ ID NO: 1800381 - RNA, 19 nt, Homo sapiens
  misc_RNA (1)...(19): siRNA sense strand
uuacauugauccacugaaa

SEQ ID NO: 1800382 - RNA, 19 nt, Homo sapiens
  misc_RNA (1)...(19): siRNA sense strand
gaacaaaacagaaagauca

SEQ ID NO: 1800383 - RNA, 19 nt, Homo sapiens
  misc_RNA (1)...(19): siRNA sense strand
ucagggaggugguugcaaa

SEQ ID NO: 1800384 - RNA, 19 nt, Homo sapiens
  misc_RNA (1)...(19): siRNA sense strand
gcuucuacauuuaccauaa

SEQ ID NO: 1800385 - RNA, 19 nt, Homo sapiens
  misc_RNA (1)...(19): siRNA sense strand
ggaacacuaugcugaucaa

SEQ ID NO: 1800386 - RNA, 19 nt, Homo sapiens
  misc_RNA (1)...(19): siRNA sense strand
gcagucagccaaauauuuc

SEQ ID NO: 1800387 - RNA, 19 nt, Homo sapiens
  misc_RNA (1)...(19): siRNA sense strand
gaauucaggaggauuuauu

SEQ ID NO: 1800388 - RNA, 19 nt, Homo sapiens
  misc_RNA (1)...(19): siRNA sense strand
gauaaacuggauccugaua

SEQ ID NO: 1800389 - RNA, 19 nt, Homo sapiens
  misc_RNA (1)...(19): siRNA sense strand
ugauaaagcuaagcaugaa

SEQ ID NO: 1800390 - RNA, 19 nt, Homo sapiens
  misc_RNA (1)...(19): siRNA sense strand
uaacgugggagaagacuuu

SEQ ID NO: 1800391 - RNA, 19 nt, Homo sapiens
  misc_RNA (1)...(19): siRNA sense strand
ggaguucauugcaccaguu

SEQ ID NO: 1800392 - RNA, 19 nt, Homo sapiens
  misc_RNA (1)...(19): siRNA sense strand
ugacaaauccaaggacuuu

SEQ ID NO: 1800393 - RNA, 19 nt, Homo sapiens
  misc_RNA (1)...(19): siRNA sense strand
acacuaugcugaucaagau

SEQ ID NO: 1800394 - RNA, 19 nt, Homo sapiens
  misc_RNA (1)...(19): siRNA sense strand
gcaaguugaucuggagaau

SEQ ID NO: 1800395 - RNA, 19 nt, Homo sapiens
  misc_RNA (1)...(19): siRNA sense strand
gaauuuggaaggcuauuau

SEQ ID NO: 1800396 - RNA, 19 nt, Homo sapiens
  misc_RNA (1)...(19): siRNA sense strand
ccgaaaugcuagagaaaug

SEQ ID NO: 1800397 - RNA, 19 nt, Homo sapiens
  misc_RNA (1)...(19): siRNA sense strand
cauguuuacugaaugcuuu

SEQ ID NO: 1800398 - RNA, 19 nt, Homo sapiens
  misc_RNA (1)...(19): siRNA sense strand
agucauaacuguagcaaca

SEQ ID NO: 1800399 - RNA, 19 nt, Homo sapiens
  misc_RNA (1)...(19): siRNA sense strand
gaaaaugucccaacugaug

SEQ ID NO: 1800400 - RNA, 19 nt, Homo sapiens
  misc_RNA (1)...(19): siRNA sense strand
gaaagcugugguccaauuu

SEQ ID NO: 1800401 - RNA, 19 nt, Homo sapiens
  misc_RNA (1)...(19): siRNA sense strand
uaaauggagcuguagauga

SEQ ID NO: 1800402 - RNA, 19 nt, Homo sapiens
  misc_RNA (1)...(19): siRNA sense strand
gaauagaguaggaguaugg

SEQ ID NO: 1800403 - RNA, 19 nt, Homo sapiens
  misc_RNA (1)...(19): siRNA sense strand
ggccagaaagugagauuaa

SEQ ID NO: 1800404 - RNA, 19 nt, Homo sapiens
  misc_RNA (1)...(19): siRNA sense strand
gcagugucauuuauagauc

SEQ ID NO: 1800405 - RNA, 19 nt, Homo sapiens
  misc_RNA (1)...(19): siRNA sense strand
gcuauuauacgaagggauu

SEQ ID NO: 1800406 - RNA, 19 nt, Homo sapiens
  misc_RNA (1)...(19): siRNA sense strand
gugaugaauugguagaaga

SEQ ID NO: 1800407 - RNA, 19 nt, Homo sapiens
  misc_RNA (1)...(19): siRNA sense strand
cagaaagugagauuaauga

SEQ ID NO: 1800408 - RNA, 19 nt, Homo sapiens
  misc_RNA (1)...(19): siRNA sense strand
gcaaagccagagcuaagaa

SEQ ID NO: 1800409 - RNA, 19 nt, Homo sapiens
  misc_RNA (1)...(19): siRNA sense strand
ggaaucuccaggauaauga

SEQ ID NO: 1800410 - RNA, 19 nt, Homo sapiens
  misc_RNA (1)...(19): siRNA sense strand
ggaauuuuguggccagaua

SEQ ID NO: 1800411 - RNA, 19 nt, Homo sapiens
  misc_RNA (1)...(19): siRNA sense strand
gaucugguugucauguuua

SEQ ID NO: 1800412 - RNA, 19 nt, Homo sapiens
  misc_RNA (1)...(19): siRNA sense strand
ccguauaucuggugguuau

SEQ ID NO: 1800413 - RNA, 19 nt, Homo sapiens
  misc_RNA (1)...(19): siRNA sense strand
ccagaaacaugggaaugga

SEQ ID NO: 1800414 - RNA, 19 nt, Homo sapiens
  misc_RNA (1)...(19): siRNA sense strand
ggauuugcacuacugaauu

SEQ ID NO: 1800415 - RNA, 19 nt, Homo sapiens
  misc_RNA (1)...(19): siRNA sense strand
gcucuuugccgaaaugcua

SEQ ID NO: 1800416 - RNA, 19 nt, Homo sapiens
  misc_RNA (1)...(19): siRNA sense strand
cauuaccaguggcaauuaa

SEQ ID NO: 1800417 - RNA, 19 nt, Homo sapiens
  misc_RNA (1)...(19): siRNA sense strand
guugcaaauuucuaaggua

SEQ ID NO: 1800418 - RNA, 19 nt, Homo sapiens
  misc_RNA (1)...(19): siRNA sense strand
aaguugaucuggagaaugu

SEQ ID NO: 1800419 - RNA, 19 nt, Homo sapiens
  misc_RNA (1)...(19): siRNA sense strand
uggcuaauguguacuuaau

SEQ ID NO: 1800420 - RNA, 19 nt, Homo sapiens
  misc_RNA (1)...(19): siRNA sense strand
gggaauagaguaggaguau

SEQ ID NO: 1800421 - RNA, 19 nt, Homo sapiens
  misc_RNA (1)...(19): siRNA sense strand
ggauauuguucaagggaau

SEQ ID NO: 1800422 - RNA, 19 nt, Homo sapiens
  misc_RNA (1)...(19): siRNA sense strand
acaaauccaaggacuuuaa

SEQ ID NO: 1800423 - RNA, 19 nt, Homo sapiens
  misc_RNA (1)...(19): siRNA sense strand
ucauaacuguagcaacaaa

SEQ ID NO: 1800424 - RNA, 19 nt, Homo sapiens
  misc_RNA (1)...(19): siRNA sense strand
aagggaagcuauuaacauc

SEQ ID NO: 1800425 - RNA, 19 nt, Homo sapiens
  misc_RNA (1)...(19): siRNA sense strand
gaaaaggacaucaagguau

SEQ ID NO: 1800426 - RNA, 19 nt, Homo sapiens
  misc_RNA (1)...(19): siRNA sense strand
cugggagacucacacauuu

SEQ ID NO: 1800427 - RNA, 19 nt, Homo sapiens
  misc_RNA (1)...(19): siRNA sense strand
cgaaaaggcuggagcuuca

SEQ ID NO: 1800428 - RNA, 19 nt, Homo sapiens
  misc_RNA (1)...(19): siRNA sense strand
cugaugauauccacaugaa

SEQ ID NO: 1800429 - RNA, 19 nt, Homo sapiens
  misc_RNA (1)...(19): siRNA sense strand
ggaaagacacuccgaucag

SEQ ID NO: 1800430 - RNA, 19 nt, Homo sapiens
  misc_RNA (1)...(19): siRNA sense strand
ggaauagaguaggaguaug

SEQ ID NO: 1800431 - RNA, 19 nt, Homo sapiens
  misc_RNA (1)...(19): siRNA sense strand
ucaagggaauagaguagga

SEQ ID NO: 1800432 - RNA, 19 nt, Homo sapiens
  misc_RNA (1)...(19): siRNA sense strand
gcuauuaacaucacauugg

SEQ ID NO: 1800433 - RNA, 19 nt, Homo sapiens
  misc_RNA (1)...(19): siRNA sense strand
caaauccaaggacuuuaaa

SEQ ID NO: 1800434 - RNA, 19 nt, Homo sapiens
  misc_RNA (1)...(19): siRNA sense strand
ggaaacgcuaucugaauuc

SEQ ID NO: 1800435 - RNA, 19 nt, Homo sapiens
  misc_RNA (1)...(19): siRNA sense strand
uuaauaacgugggagaaga

SEQ ID NO: 1800436 - RNA, 19 nt, Homo sapiens
  misc_RNA (1)...(19): siRNA sense strand
ccagaaagugagauuaaug

SEQ ID NO: 1800437 - RNA, 19 nt, Homo sapiens
  misc_RNA (1)...(19): siRNA sense strand
ggaugcagauguuguuuug

SEQ ID NO: 1800438 - RNA, 19 nt, Homo sapiens
  misc_RNA (1)...(19): siRNA sense strand
gcugcacucuuugugaauu

SEQ ID NO: 1800439 - RNA, 19 nt, Homo sapiens
  misc_RNA (1)...(19): siRNA sense strand
ugaucugguugucauguuu

SEQ ID NO: 1800440 - RNA, 19 nt, Homo sapiens
  misc_RNA (1)...(19): siRNA sense strand
gccagaaagugagauuaau

SEQ ID NO: 1800441 - RNA, 19 nt, Homo sapiens
  misc_RNA (1)...(19): siRNA sense strand
ccagagcuaagaauacauu

SEQ ID NO: 1800442 - RNA, 19 nt, Homo sapiens
  misc_RNA (1)...(19): siRNA sense strand
cuauuaacaucacauugga

SEQ ID NO: 1800443 - RNA, 19 nt, Homo sapiens
  misc_RNA (1)...(19): siRNA sense strand
aaaagaaagugauggauuc

SEQ ID NO: 1800444 - RNA, 19 nt, Homo sapiens
  misc_RNA (1)...(19): siRNA sense strand
aagaagucauggaacacua

SEQ ID NO: 1800445 - RNA, 19 nt, Homo sapiens
  misc_RNA (1)...(19): siRNA sense strand
ccuguggacuggaaggaaa

SEQ ID NO: 1800446 - RNA, 19 nt, Homo sapiens
  misc_RNA (1)...(19): siRNA sense strand
gaagauuauguggauauug

SEQ ID NO: 1800447 - RNA, 19 nt, Homo sapiens
  misc_RNA (1)...(19): siRNA sense strand
guugucauguuuacugaau

SEQ ID NO: 1800448 - RNA, 19 nt, Homo sapiens
  misc_RNA (1)...(19): siRNA sense strand
aaaaggacaucaagguauu

SEQ ID NO: 1800449 - RNA, 19 nt, Homo sapiens
  misc_RNA (1)...(19): siRNA sense strand
cauccaaacguaucaauag

SEQ ID NO: 1800450 - RNA, 19 nt, Homo sapiens
  misc_RNA (1)...(19): siRNA sense strand
ggcaauuaauggaaaugga

SEQ ID NO: 1800451 - RNA, 19 nt, Homo sapiens
  misc_RNA (1)...(19): siRNA sense strand
ggacagacuuccaagauga

SEQ ID NO: 1800452 - RNA, 19 nt, Homo sapiens
  misc_RNA (1)...(19): siRNA sense strand
gaacaucgaugggaaggaa

SEQ ID NO: 1800453 - RNA, 19 nt, Homo sapiens
  misc_RNA (1)...(19): siRNA sense strand
ggaaggaacugugcaagau

SEQ ID NO: 1800454 - RNA, 19 nt, Homo sapiens
  misc_RNA (1)...(19): siRNA sense strand
gaaagaauauggccuucca

SEQ ID NO: 1800455 - RNA, 19 nt, Homo sapiens
  misc_RNA (1)...(19): siRNA sense strand
agucaucucuguacaagua

SEQ ID NO: 1800456 - RNA, 19 nt, Homo sapiens
  misc_RNA (1)...(19): siRNA sense strand
gaaagcugcucaaccaucu

SEQ ID NO: 1800457 - RNA, 19 nt, Homo sapiens
  misc_RNA (1)...(19): siRNA sense strand
gcagcuacauggaggagaa

SEQ ID NO: 1800458 - RNA, 19 nt, Homo sapiens
  misc_RNA (1)...(19): siRNA sense strand
agacuccucuuccacauuu

SEQ ID NO: 1800459 - RNA, 19 nt, Homo sapiens
  misc_RNA (1)...(19): siRNA sense strand
gaacucuccugaugaaugc

SEQ ID NO: 1800460 - RNA, 19 nt, Homo sapiens
  misc_RNA (1)...(19): siRNA sense strand
cacagaagaugaacuuugu

SEQ ID NO: 1800461 - RNA, 19 nt, Homo sapiens
  misc_RNA (1)...(19): siRNA sense strand
gaacuacggcagcuacaug

SEQ ID NO: 1800462 - RNA, 19 nt, Homo sapiens
  misc_RNA (1)...(19): siRNA sense strand
guuagauccuuaucagauu

SEQ ID NO: 1800463 - RNA, 19 nt, Homo sapiens
  misc_RNA (1)...(19): siRNA sense strand
agaccagcguccucaguua

SEQ ID NO: 1800464 - RNA, 19 nt, Homo sapiens
  misc_RNA (1)...(19): siRNA sense strand
gcaaacccaacaugaacua

SEQ ID NO: 1800465 - RNA, 19 nt, Homo sapiens
  misc_RNA (1)...(19): siRNA sense strand
ggaacucuccugaugaaug

SEQ ID NO: 1800466 - RNA, 19 nt, Homo sapiens
  misc_RNA (1)...(19): siRNA sense strand
ccaaacccauacuggaauu

SEQ ID NO: 1800467 - RNA, 19 nt, Homo sapiens
  misc_RNA (1)...(19): siRNA sense strand
acaagaacaucaugaccaa

SEQ ID NO: 1800468 - RNA, 19 nt, Homo sapiens
  misc_RNA (1)...(19): siRNA sense strand
acaaaacucuccacgguua

SEQ ID NO: 1800469 - RNA, 19 nt, Homo sapiens
  misc_RNA (1)...(19): siRNA sense strand
gauccuacgcuauggagua

SEQ ID NO: 1800470 - RNA, 19 nt, Homo sapiens
  misc_RNA (1)...(19): siRNA sense strand
gugaauggcucaaggaacu

SEQ ID NO: 1800471 - RNA, 19 nt, Homo sapiens
  misc_RNA (1)...(19): siRNA sense strand
ucugggcacuuacuacuaa

SEQ ID NO: 1800472 - RNA, 19 nt, Homo sapiens
  misc_RNA (1)...(19): siRNA sense strand
gaagagcaaacccaacaug

SEQ ID NO: 1800473 - RNA, 19 nt, Homo sapiens
  misc_RNA (1)...(19): siRNA sense strand
ggagucaucucuguacaag

SEQ ID NO: 1800474 - RNA, 19 nt, Homo sapiens
  misc_RNA (1)...(19): siRNA sense strand
ccucagaccucccguacau

SEQ ID NO: 1800475 - RNA, 19 nt, Homo sapiens
  misc_RNA (1)...(19): siRNA sense strand
ccacagaagaugaacuuug

SEQ ID NO: 1800476 - RNA, 19 nt, Homo sapiens
  misc_RNA (1)...(19): siRNA sense strand
caacaugaacuacgauaag

SEQ ID NO: 1800477 - RNA, 19 nt, Homo sapiens
  misc_RNA (1)...(19): siRNA sense strand
cuucucaucugggcacuua

SEQ ID NO: 1800478 - RNA, 19 nt, Homo sapiens
  misc_RNA (1)...(19): siRNA sense strand
gaggaccagucguuguuug

SEQ ID NO: 1800479 - RNA, 19 nt, Homo sapiens
  misc_RNA (1)...(19): siRNA sense strand
gcgcuacgccuacaaguuc

SEQ ID NO: 1800480 - RNA, 19 nt, Homo sapiens
  misc_RNA (1)...(19): siRNA sense strand
cagcagauccuacgcuaug

SEQ ID NO: 1800481 - RNA, 19 nt, Homo sapiens
  misc_RNA (1)...(19): siRNA sense strand
gauaaagccuuacaaaacu

SEQ ID NO: 1800482 - RNA, 19 nt, Homo sapiens
  misc_RNA (1)...(19): siRNA sense strand
gaaggaacugugcaagaug

SEQ ID NO: 1800483 - RNA, 19 nt, Homo sapiens
  misc_RNA (1)...(19): siRNA sense strand
ugauguugauaaagccuua

SEQ ID NO: 1800484 - RNA, 19 nt, Homo sapiens
  misc_RNA (1)...(19): siRNA sense strand
cagaugauguugauaaagc

SEQ ID NO: 1800485 - RNA, 19 nt, Homo sapiens
  misc_RNA (1)...(19): siRNA sense strand
aaggaacugugcaagauga

SEQ ID NO: 1800486 - RNA, 19 nt, Homo sapiens
  misc_RNA (1)...(19): siRNA sense strand
gagcaaacccaacaugaac

SEQ ID NO: 1800487 - RNA, 19 nt, Homo sapiens
  misc_RNA (1)...(19): siRNA sense strand
gucgaaagcugcucaacca

SEQ ID NO: 1800488 - RNA, 19 nt, Homo sapiens
  misc_RNA (1)...(19): siRNA sense strand
ggagugggcggugaaagaa

SEQ ID NO: 1800489 - RNA, 19 nt, Homo sapiens
  misc_RNA (1)...(19): siRNA sense strand
ccauaugccuucucaucug

SEQ ID NO: 1800490 - RNA, 19 nt, Homo sapiens
  misc_RNA (1)...(19): siRNA sense strand
guccucaguuagauccuua

SEQ ID NO: 1800491 - RNA, 19 nt, Homo sapiens
  misc_RNA (1)...(19): siRNA sense strand
agugggcggugaaagaaua

SEQ ID NO: 1800492 - RNA, 19 nt, Homo sapiens
  misc_RNA (1)...(19): siRNA sense strand
ucaguuagauccuuaucag

SEQ ID NO: 1800493 - RNA, 19 nt, Homo sapiens
  misc_RNA (1)...(19): siRNA sense strand
guugauaaagccuuacaaa

SEQ ID NO: 1800494 - RNA, 19 nt, Homo sapiens
  misc_RNA (1)...(19): siRNA sense strand
gggaaggaacugugcaaga

SEQ ID NO: 1800495 - RNA, 19 nt, Homo sapiens
  misc_RNA (1)...(19): siRNA sense strand
cuucagaugauguugauaa

SEQ ID NO: 1800496 - RNA, 19 nt, Homo sapiens
  misc_RNA (1)...(19): siRNA sense strand
gaacgagcgcagaguuauc

SEQ ID NO: 1800497 - RNA, 19 nt, Homo sapiens
  misc_RNA (1)...(19): siRNA sense strand
ccuuaucaguugugaguga

SEQ ID NO: 1800498 - RNA, 19 nt, Homo sapiens
  misc_RNA (1)...(19): siRNA sense strand
guuaaugcaugcuagaaac

SEQ ID NO: 1800499 - RNA, 19 nt, Homo sapiens
  misc_RNA (1)...(19): siRNA sense strand
cgacauccuucucucacau

SEQ ID NO: 1800500 - RNA, 19 nt, Homo sapiens
  misc_RNA (1)...(19): siRNA sense strand
gacuucagaugauguugau

SEQ ID NO: 1800501 - RNA, 19 nt, Homo sapiens
  misc_RNA (1)...(19): siRNA sense strand
gaccagucguuguuugagu

SEQ ID NO: 1800502 - RNA, 19 nt, Homo sapiens
  misc_RNA (1)...(19): siRNA sense strand
ugaaugcaguguggccaaa

SEQ ID NO: 1800503 - RNA, 19 nt, Homo sapiens
  misc_RNA (1)...(19): siRNA sense strand
gcucaaccaucuccuucca

SEQ ID NO: 1800504 - RNA, 19 nt, Homo sapiens
  misc_RNA (1)...(19): siRNA sense strand
gguuaaugcaugcuagaaa

SEQ ID NO: 1800505 - RNA, 19 nt, Homo sapiens
  misc_RNA (1)...(19): siRNA sense strand
gaagccuuaucaguuguga

SEQ ID NO: 1800506 - RNA, 19 nt, Homo sapiens
  misc_RNA (1)...(19): siRNA sense strand
ccaacaugaacuacgauaa

SEQ ID NO: 1800507 - RNA, 19 nt, Homo sapiens
  misc_RNA (1)...(19): siRNA sense strand
acauuugacuucagaugau

SEQ ID NO: 1800508 - RNA, 19 nt, Homo sapiens
  misc_RNA (1)...(19): siRNA sense strand
ccagccauaugccuucuca

SEQ ID NO: 1800509 - RNA, 19 nt, Homo sapiens
  misc_RNA (1)...(19): siRNA sense strand
gaagaccagcguccucagu

SEQ ID NO: 1800510 - RNA, 19 nt, Homo sapiens
  misc_RNA (1)...(19): siRNA sense strand
ugugcaagaugaccaagga

SEQ ID NO: 1800511 - RNA, 19 nt, Homo sapiens
  misc_RNA (1)...(19): siRNA sense strand
gggaagcgcuacgccuaca

SEQ ID NO: 1800512 - RNA, 19 nt, Homo sapiens
  misc_RNA (1)...(19): siRNA sense strand
cagccagggucaccaucaa

SEQ ID NO: 1800513 - RNA, 19 nt, Homo sapiens
  misc_RNA (1)...(19): siRNA sense strand
gugaggaccagucguuguu

SEQ ID NO: 1800514 - RNA, 19 nt, Homo sapiens
  misc_RNA (1)...(19): siRNA sense strand
agagcaaacccaacaugaa

SEQ ID NO: 1800515 - RNA, 19 nt, Homo sapiens
  misc_RNA (1)...(19): siRNA sense strand
uuacuacuaugacaagaac

SEQ ID NO: 1800516 - RNA, 19 nt, Homo sapiens
  misc_RNA (1)...(19): siRNA sense strand
gagacuccucuuccacauu

SEQ ID NO: 1800517 - RNA, 19 nt, Homo sapiens
  misc_RNA (1)...(19): siRNA sense strand
ugagugaggaccagucguu

SEQ ID NO: 1800518 - RNA, 19 nt, Homo sapiens
  misc_RNA (1)...(19): siRNA sense strand
cgaacgagcgcagaguuau

SEQ ID NO: 1800519 - RNA, 19 nt, Homo sapiens
  misc_RNA (1)...(19): siRNA sense strand
cgugacaucuuccaguuuu

SEQ ID NO: 1800520 - RNA, 19 nt, Homo sapiens
  misc_RNA (1)...(19): siRNA sense strand
ccagacaccguugggauga

SEQ ID NO: 1800521 - RNA, 19 nt, Homo sapiens
  misc_RNA (1)...(19): siRNA sense strand
uuagauccuuaucagauuc

SEQ ID NO: 1800522 - RNA, 19 nt, Homo sapiens
  misc_RNA (1)...(19): siRNA sense strand
ugacuucagaugauguuga

SEQ ID NO: 1800523 - RNA, 19 nt, Homo sapiens
  misc_RNA (1)...(19): siRNA sense strand
cacauuugacuucagauga

SEQ ID NO: 1800524 - RNA, 19 nt, Homo sapiens
  misc_RNA (1)...(19): siRNA sense strand
ggccaaaggcgggaagaug

SEQ ID NO: 1800525 - RNA, 19 nt, Homo sapiens
  misc_RNA (1)...(19): siRNA sense strand
ccacauuugacuucagaug

SEQ ID NO: 1800526 - RNA, 19 nt, Homo sapiens
  misc_RNA (1)...(19): siRNA sense strand
cccgugacaucuuccaguu

SEQ ID NO: 1800527 - RNA, 19 nt, Homo sapiens
  misc_RNA (1)...(19): siRNA sense strand
cggaagagcaaacccaaca

SEQ ID NO: 1800528 - RNA, 19 nt, Homo sapiens
  misc_RNA (1)...(19): siRNA sense strand
guggccagauccagcuuug

SEQ ID NO: 1800529 - RNA, 19 nt, Homo sapiens
  misc_RNA (1)...(19): siRNA sense strand
caaacaugaccacgaacga

SEQ ID NO: 1800530 - RNA, 19 nt, Homo sapiens
  misc_RNA (1)...(19): siRNA sense strand
gaagcgcuacgccuacaag

SEQ ID NO: 1800531 - RNA, 19 nt, Homo sapiens
  misc_RNA (1)...(19): siRNA sense strand
acgaacgagcgcagaguua

SEQ ID NO: 1800532 - RNA, 19 nt, Homo sapiens
  misc_RNA (1)...(19): siRNA sense strand
aagagcaaacccaacauga

SEQ ID NO: 1800533 - RNA, 19 nt, Homo sapiens
  misc_RNA (1)...(19): siRNA sense strand
gauccagcuuuggcaguuc

SEQ ID NO: 1800534 - RNA, 19 nt, Homo sapiens
  misc_RNA (1)...(19): siRNA sense strand
gcagauccuacgcuaugga

SEQ ID NO: 1800535 - RNA, 19 nt, Homo sapiens
  misc_RNA (1)...(19): siRNA sense strand
ucucacaucuccacuaccu

SEQ ID NO: 1800536 - RNA, 19 nt, Homo sapiens
  misc_RNA (1)...(19): siRNA sense strand
cagcgacuauggacagacu

SEQ ID NO: 1800537 - RNA, 19 nt, Homo sapiens
  misc_RNA (1)...(19): siRNA sense strand
guacaugggcuccuaucac

SEQ ID NO: 1800538 - RNA, 19 nt, Homo sapiens
  misc_RNA (1)...(19): siRNA sense strand
gaccagcguccucaguuag

SEQ ID NO: 1800539 - RNA, 19 nt, Homo sapiens
  misc_RNA (1)...(19): siRNA sense strand
uuccagacgucaacaucuu

SEQ ID NO: 1800540 - RNA, 19 nt, Homo sapiens
  misc_RNA (1)...(19): siRNA sense strand
uggagugggcggugaaaga

SEQ ID NO: 1800541 - RNA, 19 nt, Homo sapiens
  misc_RNA (1)...(19): siRNA sense strand
guauauaccccaacacuag

SEQ ID NO: 1800542 - RNA, 19 nt, Homo sapiens
  misc_RNA (1)...(19): siRNA sense strand
ggaagagcaaacccaacau

SEQ ID NO: 1800543 - RNA, 19 nt, Homo sapiens
  misc_RNA (1)...(19): siRNA sense strand
gaugaccaaggacgacuuc

SEQ ID NO: 1800544 - RNA, 19 nt, Homo sapiens
  misc_RNA (1)...(19): siRNA sense strand
guuacuacuaugacaagaa

SEQ ID NO: 1800545 - RNA, 19 nt, Homo sapiens
  misc_RNA (1)...(19): siRNA sense strand
agauccagcuuuggcaguu

SEQ ID NO: 1800546 - RNA, 19 nt, Homo sapiens
  misc_RNA (1)...(19): siRNA sense strand
cauuugacuucagaugaug

SEQ ID NO: 1800547 - RNA, 19 nt, Homo sapiens
  misc_RNA (1)...(19): siRNA sense strand
ucucucacaucuccacuac

SEQ ID NO: 1800548 - RNA, 19 nt, Homo sapiens
  misc_RNA (1)...(19): siRNA sense strand
ccacgguuaaugcaugcua

SEQ ID NO: 1800549 - RNA, 19 nt, Homo sapiens
  misc_RNA (1)...(19): siRNA sense strand
gccauaugccuucucaucu

SEQ ID NO: 1800550 - RNA, 19 nt, Homo sapiens
  misc_RNA (1)...(19): siRNA sense strand
aacccaacaugaacuacga

SEQ ID NO: 1800551 - RNA, 19 nt, Homo sapiens
  misc_RNA (1)...(19): siRNA sense strand
ggacagacuuccaagauga

SEQ ID NO: 1800552 - RNA, 19 nt, Homo sapiens
  misc_RNA (1)...(19): siRNA sense strand
gaacaucgaugggaaggaa

SEQ ID NO: 1800553 - RNA, 19 nt, Homo sapiens
  misc_RNA (1)...(19): siRNA sense strand
ggaaggaacugugcaagau

SEQ ID NO: 1800554 - RNA, 19 nt, Homo sapiens
  misc_RNA (1)...(19): siRNA sense strand
gaaagaauauggccuucca

SEQ ID NO: 1800555 - RNA, 19 nt, Homo sapiens
  misc_RNA (1)...(19): siRNA sense strand
agucaucucuguacaagua

SEQ ID NO: 1800556 - RNA, 19 nt, Homo sapiens
  misc_RNA (1)...(19): siRNA sense strand
gaaagcugcucaaccaucu

SEQ ID NO: 1800557 - RNA, 19 nt, Homo sapiens
  misc_RNA (1)...(19): siRNA sense strand
gcagcuacauggaggagaa

SEQ ID NO: 1800558 - RNA, 19 nt, Homo sapiens
  misc_RNA (1)...(19): siRNA sense strand
agacuccucuuccacauuu

SEQ ID NO: 1800559 - RNA, 19 nt, Homo sapiens
  misc_RNA (1)...(19): siRNA sense strand
gaacucuccugaugaaugc

SEQ ID NO: 1800560 - RNA, 19 nt, Homo sapiens
  misc_RNA (1)...(19): siRNA sense strand
cacagaagaugaacuuugu

SEQ ID NO: 1800561 - RNA, 19 nt, Homo sapiens
  misc_RNA (1)...(19): siRNA sense strand
gaacuacggcagcuacaug

SEQ ID NO: 1800562 - RNA, 19 nt, Homo sapiens
  misc_RNA (1)...(19): siRNA sense strand
guuagauccuuaucagauu

SEQ ID NO: 1800563 - RNA, 19 nt, Homo sapiens
  misc_RNA (1)...(19): siRNA sense strand
agaccagcguccucaguua

SEQ ID NO: 1800564 - RNA, 19 nt, Homo sapiens
  misc_RNA (1)...(19): siRNA sense strand
gcaaacccaacaugaacua

SEQ ID NO: 1800565 - RNA, 19 nt, Homo sapiens
  misc_RNA (1)...(19): siRNA sense strand
ggaacucuccugaugaaug

SEQ ID NO: 1800566 - RNA, 19 nt, Homo sapiens
  misc_RNA (1)...(19): siRNA sense strand
ccaaacccauacuggaauu

SEQ ID NO: 1800567 - RNA, 19 nt, Homo sapiens
  misc_RNA (1)...(19): siRNA sense strand
acaagaacaucaugaccaa

SEQ ID NO: 1800568 - RNA, 19 nt, Homo sapiens
  misc_RNA (1)...(19): siRNA sense strand
acaaaacucuccacgguua

SEQ ID NO: 1800569 - RNA, 19 nt, Homo sapiens
  misc_RNA (1)...(19): siRNA sense strand
gauccuacgcuauggagua

SEQ ID NO: 1800570 - RNA, 19 nt, Homo sapiens
  misc_RNA (1)...(19): siRNA sense strand
gugaauggcucaaggaacu

SEQ ID NO: 1800571 - RNA, 19 nt, Homo sapiens
  misc_RNA (1)...(19): siRNA sense strand
ucugggcacuuacuacuaa

SEQ ID NO: 1800572 - RNA, 19 nt, Homo sapiens
  misc_RNA (1)...(19): siRNA sense strand
gaagagcaaacccaacaug

SEQ ID NO: 1800573 - RNA, 19 nt, Homo sapiens
  misc_RNA (1)...(19): siRNA sense strand
ggagucaucucuguacaag

SEQ ID NO: 1800574 - RNA, 19 nt, Homo sapiens
  misc_RNA (1)...(19): siRNA sense strand
ccucagaccucccguacau

SEQ ID NO: 1800575 - RNA, 19 nt, Homo sapiens
  misc_RNA (1)...(19): siRNA sense strand
ccacagaagaugaacuuug

SEQ ID NO: 1800576 - RNA, 19 nt, Homo sapiens
  misc_RNA (1)...(19): siRNA sense strand
caacaugaacuacgauaag

SEQ ID NO: 1800577 - RNA, 19 nt, Homo sapiens
  misc_RNA (1)...(19): siRNA sense strand
cuucucaucugggcacuua

SEQ ID NO: 1800578 - RNA, 19 nt, Homo sapiens
  misc_RNA (1)...(19): siRNA sense strand
gaggaccagucguuguuug

SEQ ID NO: 1800579 - RNA, 19 nt, Homo sapiens
  misc_RNA (1)...(19): siRNA sense strand
gcgcuacgccuacaaguuc

SEQ ID NO: 1800580 - RNA, 19 nt, Homo sapiens
  misc_RNA (1)...(19): siRNA sense strand
cagcagauccuacgcuaug

SEQ ID NO: 1800581 - RNA, 19 nt, Homo sapiens
  misc_RNA (1)...(19): siRNA sense strand
gauaaagccuuacaaaacu

SEQ ID NO: 1800582 - RNA, 19 nt, Homo sapiens
  misc_RNA (1)...(19): siRNA sense strand
gaaggaacugugcaagaug

SEQ ID NO: 1800583 - RNA, 19 nt, Homo sapiens
  misc_RNA (1)...(19): siRNA sense strand
ugauguugauaaagccuua

SEQ ID NO: 1800584 - RNA, 19 nt, Homo sapiens
  misc_RNA (1)...(19): siRNA sense strand
cagaugauguugauaaagc

SEQ ID NO: 1800585 - RNA, 19 nt, Homo sapiens
  misc_RNA (1)...(19): siRNA sense strand
aaggaacugugcaagauga

SEQ ID NO: 1800586 - RNA, 19 nt, Homo sapiens
  misc_RNA (1)...(19): siRNA sense strand
gagcaaacccaacaugaac

SEQ ID NO: 1800587 - RNA, 19 nt, Homo sapiens
  misc_RNA (1)...(19): siRNA sense strand
gucgaaagcugcucaacca

SEQ ID NO: 1800588 - RNA, 19 nt, Homo sapiens
  misc_RNA (1)...(19): siRNA sense strand
ggagugggcggugaaagaa

SEQ ID NO: 1800589 - RNA, 19 nt, Homo sapiens
  misc_RNA (1)...(19): siRNA sense strand
ccauaugccuucucaucug

SEQ ID NO: 1800590 - RNA, 19 nt, Homo sapiens
  misc_RNA (1)...(19): siRNA sense strand
guccucaguuagauccuua

SEQ ID NO: 1800591 - RNA, 19 nt, Homo sapiens
  misc_RNA (1)...(19): siRNA sense strand
agugggcggugaaagaaua

SEQ ID NO: 1800592 - RNA, 19 nt, Homo sapiens
  misc_RNA (1)...(19): siRNA sense strand
ucaguuagauccuuaucag

SEQ ID NO: 1800593 - RNA, 19 nt, Homo sapiens
  misc_RNA (1)...(19): siRNA sense strand
guugauaaagccuuacaaa

SEQ ID NO: 1800594 - RNA, 19 nt, Homo sapiens
  misc_RNA (1)...(19): siRNA sense strand
gggaaggaacugugcaaga

SEQ ID NO: 1800595 - RNA, 19 nt, Homo sapiens
  misc_RNA (1)...(19): siRNA sense strand
cuucagaugauguugauaa

SEQ ID NO: 1800596 - RNA, 19 nt, Homo sapiens
  misc_RNA (1)...(19): siRNA sense strand
gaacgagcgcagaguuauc

SEQ ID NO: 1800597 - RNA, 19 nt, Homo sapiens
  misc_RNA (1)...(19): siRNA sense strand
ccuuaucaguugugaguga

SEQ ID NO: 1800598 - RNA, 19 nt, Homo sapiens
  misc_RNA (1)...(19): siRNA sense strand
guuaaugcaugcuagaaac

SEQ ID NO: 1800599 - RNA, 19 nt, Homo sapiens
  misc_RNA (1)...(19): siRNA sense strand
cgacauccuucucucacau

SEQ ID NO: 1800600 - RNA, 19 nt, Homo sapiens
  misc_RNA (1)...(19): siRNA sense strand
gacuucagaugauguugau

SEQ ID NO: 1800601 - RNA, 19 nt, Homo sapiens
  misc_RNA (1)...(19): siRNA sense strand
gaccagucguuguuugagu

SEQ ID NO: 1800602 - RNA, 19 nt, Homo sapiens
  misc_RNA (1)...(19): siRNA sense strand
ugaaugcaguguggccaaa

SEQ ID NO: 1800603 - RNA, 19 nt, Homo sapiens
  misc_RNA (1)...(19): siRNA sense strand
gcucaaccaucuccuucca

SEQ ID NO: 1800604 - RNA, 19 nt, Homo sapiens
  misc_RNA (1)...(19): siRNA sense strand
gguuaaugcaugcuagaaa

SEQ ID NO: 1800605 - RNA, 19 nt, Homo sapiens
  misc_RNA (1)...(19): siRNA sense strand
gaagccuuaucaguuguga

SEQ ID NO: 1800606 - RNA, 19 nt, Homo sapiens
  misc_RNA (1)...(19): siRNA sense strand
ccaacaugaacuacgauaa

SEQ ID NO: 1800607 - RNA, 19 nt, Homo sapiens
  misc_RNA (1)...(19): siRNA sense strand
acauuugacuucagaugau

SEQ ID NO: 1800608 - RNA, 19 nt, Homo sapiens
  misc_RNA (1)...(19): siRNA sense strand
ccagccauaugccuucuca

SEQ ID NO: 1800609 - RNA, 19 nt, Homo sapiens
  misc_RNA (1)...(19): siRNA sense strand
gaagaccagcguccucagu

SEQ ID NO: 1800610 - RNA, 19 nt, Homo sapiens
  misc_RNA (1)...(19): siRNA sense strand
ugugcaagaugaccaagga

SEQ ID NO: 1800611 - RNA, 19 nt, Homo sapiens
  misc_RNA (1)...(19): siRNA sense strand
gggaagcgcuacgccuaca

SEQ ID NO: 1800612 - RNA, 19 nt, Homo sapiens
  misc_RNA (1)...(19): siRNA sense strand
cagccagggucaccaucaa

SEQ ID NO: 1800613 - RNA, 19 nt, Homo sapiens
  misc_RNA (1)...(19): siRNA sense strand
gugaggaccagucguuguu

SEQ ID NO: 1800614 - RNA, 19 nt, Homo sapiens
  misc_RNA (1)...(19): siRNA sense strand
agagcaaacccaacaugaa

SEQ ID NO: 1800615 - RNA, 19 nt, Homo sapiens
  misc_RNA (1)...(19): siRNA sense strand
uuacuacuaugacaagaac

SEQ ID NO: 1800616 - RNA, 19 nt, Homo sapiens
  misc_RNA (1)...(19): siRNA sense strand
gagacuccucuuccacauu

SEQ ID NO: 1800617 - RNA, 19 nt, Homo sapiens
  misc_RNA (1)...(19): siRNA sense strand
ugagugaggaccagucguu

SEQ ID NO: 1800618 - RNA, 19 nt, Homo sapiens
  misc_RNA (1)...(19): siRNA sense strand
cgaacgagcgcagaguuau

SEQ ID NO: 1800619 - RNA, 19 nt, Homo sapiens
  misc_RNA (1)...(19): siRNA sense strand
cgugacaucuuccaguuuu

SEQ ID NO: 1800620 - RNA, 19 nt, Homo sapiens
  misc_RNA (1)...(19): siRNA sense strand
ccagacaccguugggauga

SEQ ID NO: 1800621 - RNA, 19 nt, Homo sapiens
  misc_RNA (1)...(19): siRNA sense strand
uuagauccuuaucagauuc

SEQ ID NO: 1800622 - RNA, 19 nt, Homo sapiens
  misc_RNA (1)...(19): siRNA sense strand
ugacuucagaugauguuga

SEQ ID NO: 1800623 - RNA, 19 nt, Homo sapiens
  misc_RNA (1)...(19): siRNA sense strand
cacauuugacuucagauga

SEQ ID NO: 1800624 - RNA, 19 nt, Homo sapiens
  misc_RNA (1)...(19): siRNA sense strand
ggccaaaggcgggaagaug

SEQ ID NO: 1800625 - RNA, 19 nt, Homo sapiens
  misc_RNA (1)...(19): siRNA sense strand
ccacauuugacuucagaug

SEQ ID NO: 1800626 - RNA, 19 nt, Homo sapiens
  misc_RNA (1)...(19): siRNA sense strand
cccgugacaucuuccaguu

SEQ ID NO: 1800627 - RNA, 19 nt, Homo sapiens
  misc_RNA (1)...(19): siRNA sense strand
cggaagagcaaacccaaca

SEQ ID NO: 1800628 - RNA, 19 nt, Homo sapiens
  misc_RNA (1)...(19): siRNA sense strand
guggccagauccagcuuug

SEQ ID NO: 1800629 - RNA, 19 nt, Homo sapiens
  misc_RNA (1)...(19): siRNA sense strand
caaacaugaccacgaacga

SEQ ID NO: 1800630 - RNA, 19 nt, Homo sapiens
  misc_RNA (1)...(19): siRNA sense strand
gaagcgcuacgccuacaag

SEQ ID NO: 1800631 - RNA, 19 nt, Homo sapiens
  misc_RNA (1)...(19): siRNA sense strand
acgaacgagcgcagaguua

SEQ ID NO: 1800632 - RNA, 19 nt, Homo sapiens
  misc_RNA (1)...(19): siRNA sense strand
aagagcaaacccaacauga

SEQ ID NO: 1800633 - RNA, 19 nt, Homo sapiens
  misc_RNA (1)...(19): siRNA sense strand
gauccagcuuuggcaguuc

SEQ ID NO: 1800634 - RNA, 19 nt, Homo sapiens
  misc_RNA (1)...(19): siRNA sense strand
gcagauccuacgcuaugga

SEQ ID NO: 1800635 - RNA, 19 nt, Homo sapiens
  misc_RNA (1)...(19): siRNA sense strand
ucucacaucuccacuaccu

SEQ ID NO: 1800636 - RNA, 19 nt, Homo sapiens
  misc_RNA (1)...(19): siRNA sense strand
cagcgacuauggacagacu

SEQ ID NO: 1800637 - RNA, 19 nt, Homo sapiens
  misc_RNA (1)...(19): siRNA sense strand
guacaugggcuccuaucac

SEQ ID NO: 1800638 - RNA, 19 nt, Homo sapiens
  misc_RNA (1)...(19): siRNA sense strand
gaccagcguccucaguuag

SEQ ID NO: 1800639 - RNA, 19 nt, Homo sapiens
  misc_RNA (1)...(19): siRNA sense strand
uuccagacgucaacaucuu

SEQ ID NO: 1800640 - RNA, 19 nt, Homo sapiens
  misc_RNA (1)...(19): siRNA sense strand
uggagugggcggugaaaga

SEQ ID NO: 1800641 - RNA, 19 nt, Homo sapiens
  misc_RNA (1)...(19): siRNA sense strand
guauauaccccaacacuag

SEQ ID NO: 1800642 - RNA, 19 nt, Homo sapiens
  misc_RNA (1)...(19): siRNA sense strand
ggaagagcaaacccaacau

SEQ ID NO: 1800643 - RNA, 19 nt, Homo sapiens
  misc_RNA (1)...(19): siRNA sense strand
gaugaccaaggacgacuuc

SEQ ID NO: 1800644 - RNA, 19 nt, Homo sapiens
  misc_RNA (1)...(19): siRNA sense strand
guuacuacuaugacaagaa

SEQ ID NO: 1800645 - RNA, 19 nt, Homo sapiens
  misc_RNA (1)...(19): siRNA sense strand
agauccagcuuuggcaguu

SEQ ID NO: 1800646 - RNA, 19 nt, Homo sapiens
  misc_RNA (1)...(19): siRNA sense strand
cauuugacuucagaugaug

SEQ ID NO: 1800647 - RNA, 19 nt, Homo sapiens
  misc_RNA (1)...(19): siRNA sense strand
ucucucacaucuccacuac

SEQ ID NO: 1800648 - RNA, 19 nt, Homo sapiens
  misc_RNA (1)...(19): siRNA sense strand
ccacgguuaaugcaugcua

SEQ ID NO: 1800649 - RNA, 19 nt, Homo sapiens
  misc_RNA (1)...(19): siRNA sense strand
gccauaugccuucucaucu

SEQ ID NO: 1800650 - RNA, 19 nt, Homo sapiens
  misc_RNA (1)...(19): siRNA sense strand
aacccaacaugaacuacga

SEQ ID NO: 1800651 - RNA, 19 nt, Homo sapiens
  misc_RNA (1)...(19): siRNA sense strand
ggacgugucuguugauuug

SEQ ID NO: 1800652 - RNA, 19 nt, Homo sapiens
  misc_RNA (1)...(19): siRNA sense strand
aaaucgggaucgaauauua

SEQ ID NO: 1800653 - RNA, 19 nt, Homo sapiens
  misc_RNA (1)...(19): siRNA sense strand
cgacaugccuggaauucuu

SEQ ID NO: 1800654 - RNA, 19 nt, Homo sapiens
  misc_RNA (1)...(19): siRNA sense strand
ggaccaauccugagacuug

SEQ ID NO: 1800655 - RNA, 19 nt, Homo sapiens
  misc_RNA (1)...(19): siRNA sense strand
uaccagagguuaaagaaga

SEQ ID NO: 1800656 - RNA, 19 nt, Homo sapiens
  misc_RNA (1)...(19): siRNA sense strand
uaacggagccuguguccaa

SEQ ID NO: 1800657 - RNA, 19 nt, Homo sapiens
  misc_RNA (1)...(19): siRNA sense strand
uggaauaccuggaagcaau

SEQ ID NO: 1800658 - RNA, 19 nt, Homo sapiens
  misc_RNA (1)...(19): siRNA sense strand
gaagacgacaugccuggaa

SEQ ID NO: 1800659 - RNA, 19 nt, Homo sapiens
  misc_RNA (1)...(19): siRNA sense strand
guauagaagugggaagaug

SEQ ID NO: 1800660 - RNA, 19 nt, Homo sapiens
  misc_RNA (1)...(19): siRNA sense strand
ucacagcgcaagauacauu

SEQ ID NO: 1800661 - RNA, 19 nt, Homo sapiens
  misc_RNA (1)...(19): siRNA sense strand
gaauauuaacuccagagaa

SEQ ID NO: 1800662 - RNA, 19 nt, Homo sapiens
  misc_RNA (1)...(19): siRNA sense strand
guagaaaaccuguauagaa

SEQ ID NO: 1800663 - RNA, 19 nt, Homo sapiens
  misc_RNA (1)...(19): siRNA sense strand
cagagaaucggaagcauug

SEQ ID NO: 1800664 - RNA, 19 nt, Homo sapiens
  misc_RNA (1)...(19): siRNA sense strand
gacuggaucuugaggaaca

SEQ ID NO: 1800665 - RNA, 19 nt, Homo sapiens
  misc_RNA (1)...(19): siRNA sense strand
ccaauccugagacuuguua

SEQ ID NO: 1800666 - RNA, 19 nt, Homo sapiens
  misc_RNA (1)...(19): siRNA sense strand
ggaauaccuggaagcaauu

SEQ ID NO: 1800667 - RNA, 19 nt, Homo sapiens
  misc_RNA (1)...(19): siRNA sense strand
gauguuacaacucuuugaa

SEQ ID NO: 1800668 - RNA, 19 nt, Homo sapiens
  misc_RNA (1)...(19): siRNA sense strand
gaaaaccuguauagaagug

SEQ ID NO: 1800669 - RNA, 19 nt, Homo sapiens
  misc_RNA (1)...(19): siRNA sense strand
gaggauguuacaacucuuu

SEQ ID NO: 1800670 - RNA, 19 nt, Homo sapiens
  misc_RNA (1)...(19): siRNA sense strand
ugccagaaguggacuaugu

SEQ ID NO: 1800671 - RNA, 19 nt, Homo sapiens
  misc_RNA (1)...(19): siRNA sense strand
ggaagcaauucaccaucuc

SEQ ID NO: 1800672 - RNA, 19 nt, Homo sapiens
  misc_RNA (1)...(19): siRNA sense strand
gugggaagaugccagaagu

SEQ ID NO: 1800673 - RNA, 19 nt, Homo sapiens
  misc_RNA (1)...(19): siRNA sense strand
caauucaccaucuccauga

SEQ ID NO: 1800674 - RNA, 19 nt, Homo sapiens
  misc_RNA (1)...(19): siRNA sense strand
gacagacgucgagguguua

SEQ ID NO: 1800675 - RNA, 19 nt, Homo sapiens
  misc_RNA (1)...(19): siRNA sense strand
ccagagaaucggaagcauu

SEQ ID NO: 1800676 - RNA, 19 nt, Homo sapiens
  misc_RNA (1)...(19): siRNA sense strand
uagaaaaccuguauagaag

SEQ ID NO: 1800677 - RNA, 19 nt, Homo sapiens
  misc_RNA (1)...(19): siRNA sense strand
gccagaaguggacuaugua

SEQ ID NO: 1800678 - RNA, 19 nt, Homo sapiens
  misc_RNA (1)...(19): siRNA sense strand
acauggacgugucuguuga

SEQ ID NO: 1800679 - RNA, 19 nt, Homo sapiens
  misc_RNA (1)...(19): siRNA sense strand
cggaaugguuugacuggau

SEQ ID NO: 1800680 - RNA, 19 nt, Homo sapiens
  misc_RNA (1)...(19): siRNA sense strand
guccucaggugucaucugu

SEQ ID NO: 1800681 - RNA, 19 nt, Homo sapiens
  misc_RNA (1)...(19): siRNA sense strand
ggaagaggagaaggucauu

SEQ ID NO: 1800682 - RNA, 19 nt, Homo sapiens
  misc_RNA (1)...(19): siRNA sense strand
gaccaauccugagacuugu

SEQ ID NO: 1800683 - RNA, 19 nt, Homo sapiens
  misc_RNA (1)...(19): siRNA sense strand
caagugggaagacgacaug

SEQ ID NO: 1800684 - RNA, 19 nt, Homo sapiens
  misc_RNA (1)...(19): siRNA sense strand
ccucaggugucaucuguac

SEQ ID NO: 1800685 - RNA, 19 nt, Homo sapiens
  misc_RNA (1)...(19): siRNA sense strand
gaagagaugcagggaagag

SEQ ID NO: 1800686 - RNA, 19 nt, Homo sapiens
  misc_RNA (1)...(19): siRNA sense strand
aggaguggcucaucaaagg

SEQ ID NO: 1800687 - RNA, 19 nt, Homo sapiens
  misc_RNA (1)...(19): siRNA sense strand
cgugucuguugauuugaua

SEQ ID NO: 1800688 - RNA, 19 nt, Homo sapiens
  misc_RNA (1)...(19): siRNA sense strand
uggaagcaauucaccaucu

SEQ ID NO: 1800689 - RNA, 19 nt, Homo sapiens
  misc_RNA (1)...(19): siRNA sense strand
cccaacggcuggacuagca

SEQ ID NO: 1800690 - RNA, 19 nt, Homo sapiens
  misc_RNA (1)...(19): siRNA sense strand
caaaaucgggaucgaauau

SEQ ID NO: 1800691 - RNA, 19 nt, Homo sapiens
  misc_RNA (1)...(19): siRNA sense strand
gaacaaaaucgggaucgaa

SEQ ID NO: 1800692 - RNA, 19 nt, Homo sapiens
  misc_RNA (1)...(19): siRNA sense strand
gcagggaagaggagaaggu

SEQ ID NO: 1800693 - RNA, 19 nt, Homo sapiens
  misc_RNA (1)...(19): siRNA sense strand
aaauguccguggccacaau

SEQ ID NO: 1800694 - RNA, 19 nt, Homo sapiens
  misc_RNA (1)...(19): siRNA sense strand
cgauucacagcgcaagaua

SEQ ID NO: 1800695 - RNA, 19 nt, Homo sapiens
  misc_RNA (1)...(19): siRNA sense strand
gaaauguccguggccacaa

SEQ ID NO: 1800696 - RNA, 19 nt, Homo sapiens
  misc_RNA (1)...(19): siRNA sense strand
ugguuugacuggaucuuga

SEQ ID NO: 1800697 - RNA, 19 nt, Homo sapiens
  misc_RNA (1)...(19): siRNA sense strand
guuaccagagguuaaagaa

SEQ ID NO: 1800698 - RNA, 19 nt, Homo sapiens
  misc_RNA (1)...(19): siRNA sense strand
aaucgggaucgaauauuaa

SEQ ID NO: 1800699 - RNA, 19 nt, Homo sapiens
  misc_RNA (1)...(19): siRNA sense strand
ggauguuacaacucuuuga

SEQ ID NO: 1800700 - RNA, 19 nt, Homo sapiens
  misc_RNA (1)...(19): siRNA sense strand
gaagaggagaaggucauuc

SEQ ID NO: 1800701 - RNA, 19 nt, Homo sapiens
  misc_RNA (1)...(19): siRNA sense strand
gaggaguggcucaucaaag

SEQ ID NO: 1800702 - RNA, 19 nt, Homo sapiens
  misc_RNA (1)...(19): siRNA sense strand
auggagaggucgauucaca

SEQ ID NO: 1800703 - RNA, 19 nt, Homo sapiens
  misc_RNA (1)...(19): siRNA sense strand
ucggaagcauugcccauag

SEQ ID NO: 1800704 - RNA, 19 nt, Homo sapiens
  misc_RNA (1)...(19): siRNA sense strand
gggaagaggagaaggucau

SEQ ID NO: 1800705 - RNA, 19 nt, Homo sapiens
  misc_RNA (1)...(19): siRNA sense strand
uaguuuaccuucggaccaa

SEQ ID NO: 1800706 - RNA, 19 nt, Homo sapiens
  misc_RNA (1)...(19): siRNA sense strand
ggaacauggacgugucugu

SEQ ID NO: 1800707 - RNA, 19 nt, Homo sapiens
  misc_RNA (1)...(19): siRNA sense strand
uggagaggauguuacaacu

SEQ ID NO: 1800708 - RNA, 19 nt, Homo sapiens
  misc_RNA (1)...(19): siRNA sense strand
aagacgacaugccuggaau

SEQ ID NO: 1800709 - RNA, 19 nt, Homo sapiens
  misc_RNA (1)...(19): siRNA sense strand
cgaauauuaacuccagaga

SEQ ID NO: 1800710 - RNA, 19 nt, Homo sapiens
  misc_RNA (1)...(19): siRNA sense strand
guuacaacucuuugaacaa

SEQ ID NO: 1800711 - RNA, 19 nt, Homo sapiens
  misc_RNA (1)...(19): siRNA sense strand
uugacuggaucuugaggaa

SEQ ID NO: 1800712 - RNA, 19 nt, Homo sapiens
  misc_RNA (1)...(19): siRNA sense strand
gcaagugggaagacgacau

SEQ ID NO: 1800713 - RNA, 19 nt, Homo sapiens
  misc_RNA (1)...(19): siRNA sense strand
ugauggagaggucgauuca

SEQ ID NO: 1800714 - RNA, 19 nt, Homo sapiens
  misc_RNA (1)...(19): siRNA sense strand
gacgacaugccuggaauuc

SEQ ID NO: 1800715 - RNA, 19 nt, Homo sapiens
  misc_RNA (1)...(19): siRNA sense strand
ggagaggauguuacaacuc

SEQ ID NO: 1800716 - RNA, 19 nt, Homo sapiens
  misc_RNA (1)...(19): siRNA sense strand
guaguucugucggaauggu

SEQ ID NO: 1800717 - RNA, 19 nt, Homo sapiens
  misc_RNA (1)...(19): siRNA sense strand
ggagauaguggaucggaaa

SEQ ID NO: 1800718 - RNA, 19 nt, Homo sapiens
  misc_RNA (1)...(19): siRNA sense strand
gauaguggaucggaaauac

SEQ ID NO: 1800719 - RNA, 19 nt, Homo sapiens
  misc_RNA (1)...(19): siRNA sense strand
gaucggaaauacagcaucu

SEQ ID NO: 1800720 - RNA, 19 nt, Homo sapiens
  misc_RNA (1)...(19): siRNA sense strand
ccguucaccuuccucaauu

SEQ ID NO: 1800721 - RNA, 19 nt, Homo sapiens
  misc_RNA (1)...(19): siRNA sense strand
ucaccuuccucaauuccaa

SEQ ID NO: 1800722 - RNA, 19 nt, Homo sapiens
  misc_RNA (1)...(19): siRNA sense strand
uaagagcggcugcuucuac

SEQ ID NO: 1800723 - RNA, 19 nt, Homo sapiens
  misc_RNA (1)...(19): siRNA sense strand
gaacacuucagcauacacu

SEQ ID NO: 1800724 - RNA, 19 nt, Homo sapiens
  misc_RNA (1)...(19): siRNA sense strand
agaaagaggaggacuggau

SEQ ID NO: 1800725 - RNA, 19 nt, Homo sapiens
  misc_RNA (1)...(19): siRNA sense strand
caagaaggagauaguggau

SEQ ID NO: 1800726 - RNA, 19 nt, Homo sapiens
  misc_RNA (1)...(19): siRNA sense strand
gucagaaaccggccaagga

SEQ ID NO: 1800727 - RNA, 19 nt, Homo sapiens
  misc_RNA (1)...(19): siRNA sense strand
gagauaguggaucggaaau

SEQ ID NO: 1800728 - RNA, 19 nt, Homo sapiens
  misc_RNA (1)...(19): siRNA sense strand
uccgaacacuucagcauac

SEQ ID NO: 1800729 - RNA, 19 nt, Homo sapiens
  misc_RNA (1)...(19): siRNA sense strand
gccguucaccuuccucaau

SEQ ID NO: 1800730 - RNA, 19 nt, Homo sapiens
  misc_RNA (1)...(19): siRNA sense strand
uguaagagcggcugcuucu

SEQ ID NO: 1800731 - RNA, 19 nt, Homo sapiens
  misc_RNA (1)...(19): siRNA sense strand
cagaaguacuccgaacacu

SEQ ID NO: 1800732 - RNA, 19 nt, Homo sapiens
  misc_RNA (1)...(19): siRNA sense strand
ccaaggagggucccagacu

SEQ ID NO: 1800733 - RNA, 19 nt, Homo sapiens
  misc_RNA (1)...(19): siRNA sense strand
ggagauaguggaucggaaa

SEQ ID NO: 1800734 - RNA, 19 nt, Homo sapiens
  misc_RNA (1)...(19): siRNA sense strand
gauaguggaucggaaauac

SEQ ID NO: 1800735 - RNA, 19 nt, Homo sapiens
  misc_RNA (1)...(19): siRNA sense strand
gaucggaaauacagcaucu

SEQ ID NO: 1800736 - RNA, 19 nt, Homo sapiens
  misc_RNA (1)...(19): siRNA sense strand
ccguucaccuuccucaauu

SEQ ID NO: 1800737 - RNA, 19 nt, Homo sapiens
  misc_RNA (1)...(19): siRNA sense strand
ucaccuuccucaauuccaa

SEQ ID NO: 1800738 - RNA, 19 nt, Homo sapiens
  misc_RNA (1)...(19): siRNA sense strand
uaagagcggcugcuucuac

SEQ ID NO: 1800739 - RNA, 19 nt, Homo sapiens
  misc_RNA (1)...(19): siRNA sense strand
gaacacuucagcauacacu

SEQ ID NO: 1800740 - RNA, 19 nt, Homo sapiens
  misc_RNA (1)...(19): siRNA sense strand
agaaagaggaggacuggau

SEQ ID NO: 1800741 - RNA, 19 nt, Homo sapiens
  misc_RNA (1)...(19): siRNA sense strand
caagaaggagauaguggau

SEQ ID NO: 1800742 - RNA, 19 nt, Homo sapiens
  misc_RNA (1)...(19): siRNA sense strand
gucagaaaccggccaagga

SEQ ID NO: 1800743 - RNA, 19 nt, Homo sapiens
  misc_RNA (1)...(19): siRNA sense strand
gagauaguggaucggaaau

SEQ ID NO: 1800744 - RNA, 19 nt, Homo sapiens
  misc_RNA (1)...(19): siRNA sense strand
uccgaacacuucagcauac

SEQ ID NO: 1800745 - RNA, 19 nt, Homo sapiens
  misc_RNA (1)...(19): siRNA sense strand
gccguucaccuuccucaau

SEQ ID NO: 1800746 - RNA, 19 nt, Homo sapiens
  misc_RNA (1)...(19): siRNA sense strand
uguaagagcggcugcuucu

SEQ ID NO: 1800747 - RNA, 19 nt, Homo sapiens
  misc_RNA (1)...(19): siRNA sense strand
cagaaguacuccgaacacu

SEQ ID NO: 1800748 - RNA, 19 nt, Homo sapiens
  misc_RNA (1)...(19): siRNA sense strand
ccaaggagggucccagacu

SEQ ID NO: 1800749 - RNA, 19 nt, Homo sapiens
  misc_RNA (1)...(19): siRNA sense strand
ggagauaguggaucggaaa

SEQ ID NO: 1800750 - RNA, 19 nt, Homo sapiens
  misc_RNA (1)...(19): siRNA sense strand
gauaguggaucggaaauac

SEQ ID NO: 1800751 - RNA, 19 nt, Homo sapiens
  misc_RNA (1)...(19): siRNA sense strand
gaucggaaauacagcaucu

SEQ ID NO: 1800752 - RNA, 19 nt, Homo sapiens
  misc_RNA (1)...(19): siRNA sense strand
ccguucaccuuccucaauu

SEQ ID NO: 1800753 - RNA, 19 nt, Homo sapiens
  misc_RNA (1)...(19): siRNA sense strand
ucaccuuccucaauuccaa

SEQ ID NO: 1800754 - RNA, 19 nt, Homo sapiens
  misc_RNA (1)...(19): siRNA sense strand
uaagagcggcugcuucuac

SEQ ID NO: 1800755 - RNA, 19 nt, Homo sapiens
  misc_RNA (1)...(19): siRNA sense strand
gaacacuucagcauacacu

SEQ ID NO: 1800756 - RNA, 19 nt, Homo sapiens
  misc_RNA (1)...(19): siRNA sense strand
agaaagaggaggacuggau

SEQ ID NO: 1800757 - RNA, 19 nt, Homo sapiens
  misc_RNA (1)...(19): siRNA sense strand
caagaaggagauaguggau

SEQ ID NO: 1800758 - RNA, 19 nt, Homo sapiens
  misc_RNA (1)...(19): siRNA sense strand
gucagaaaccggccaagga

SEQ ID NO: 1800759 - RNA, 19 nt, Homo sapiens
  misc_RNA (1)...(19): siRNA sense strand
gagauaguggaucggaaau

SEQ ID NO: 1800760 - RNA, 19 nt, Homo sapiens
  misc_RNA (1)...(19): siRNA sense strand
uccgaacacuucagcauac

SEQ ID NO: 1800761 - RNA, 19 nt, Homo sapiens
  misc_RNA (1)...(19): siRNA sense strand
gccguucaccuuccucaau

SEQ ID NO: 1800762 - RNA, 19 nt, Homo sapiens
  misc_RNA (1)...(19): siRNA sense strand
uguaagagcggcugcuucu

SEQ ID NO: 1800763 - RNA, 19 nt, Homo sapiens
  misc_RNA (1)...(19): siRNA sense strand
cagaaguacuccgaacacu

SEQ ID NO: 1800764 - RNA, 19 nt, Homo sapiens
  misc_RNA (1)...(19): siRNA sense strand
ccaaggagggucccagacu

SEQ ID NO: 1800765 - RNA, 19 nt, Homo sapiens
  misc_RNA (1)...(19): siRNA sense strand
ggagauaguggaucggaaa

SEQ ID NO: 1800766 - RNA, 19 nt, Homo sapiens
  misc_RNA (1)...(19): siRNA sense strand
gauaguggaucggaaauac

SEQ ID NO: 1800767 - RNA, 19 nt, Homo sapiens
  misc_RNA (1)...(19): siRNA sense strand
gaucggaaauacagcaucu

SEQ ID NO: 1800768 - RNA, 19 nt, Homo sapiens
  misc_RNA (1)...(19): siRNA sense strand
ccguucaccuuccucaauu

SEQ ID NO: 1800769 - RNA, 19 nt, Homo sapiens
  misc_RNA (1)...(19): siRNA sense strand
ucaccuuccucaauuccaa

SEQ ID NO: 1800770 - RNA, 19 nt, Homo sapiens
  misc_RNA (1)...(19): siRNA sense strand
uaagagcggcugcuucuac

SEQ ID NO: 1800771 - RNA, 19 nt, Homo sapiens
  misc_RNA (1)...(19): siRNA sense strand
gaacacuucagcauacacu

SEQ ID NO: 1800772 - RNA, 19 nt, Homo sapiens
  misc_RNA (1)...(19): siRNA sense strand
agaaagaggaggacuggau

SEQ ID NO: 1800773 - RNA, 19 nt, Homo sapiens
  misc_RNA (1)...(19): siRNA sense strand
caagaaggagauaguggau

SEQ ID NO: 1800774 - RNA, 19 nt, Homo sapiens
  misc_RNA (1)...(19): siRNA sense strand
gucagaaaccggccaagga

SEQ ID NO: 1800775 - RNA, 19 nt, Homo sapiens
  misc_RNA (1)...(19): siRNA sense strand
gagauaguggaucggaaau

SEQ ID NO: 1800776 - RNA, 19 nt, Homo sapiens
  misc_RNA (1)...(19): siRNA sense strand
uccgaacacuucagcauac

SEQ ID NO: 1800777 - RNA, 19 nt, Homo sapiens
  misc_RNA (1)...(19): siRNA sense strand
gccguucaccuuccucaau

SEQ ID NO: 1800778 - RNA, 19 nt, Homo sapiens
  misc_RNA (1)...(19): siRNA sense strand
uguaagagcggcugcuucu

SEQ ID NO: 1800779 - RNA, 19 nt, Homo sapiens
  misc_RNA (1)...(19): siRNA sense strand
cagaaguacuccgaacacu

SEQ ID NO: 1800780 - RNA, 19 nt, Homo sapiens
  misc_RNA (1)...(19): siRNA sense strand
ccaaggagggucccagacu

SEQ ID NO: 1800781 - RNA, 19 nt, Homo sapiens
  misc_RNA (1)...(19): siRNA sense strand
ggagauaguggaucggaaa

SEQ ID NO: 1800782 - RNA, 19 nt, Homo sapiens
  misc_RNA (1)...(19): siRNA sense strand
gauaguggaucggaaauac

SEQ ID NO: 1800783 - RNA, 19 nt, Homo sapiens
  misc_RNA (1)...(19): siRNA sense strand
gaucggaaauacagcaucu

SEQ ID NO: 1800784 - RNA, 19 nt, Homo sapiens
  misc_RNA (1)...(19): siRNA sense strand
ccguucaccuuccucaauu

SEQ ID NO: 1800785 - RNA, 19 nt, Homo sapiens
  misc_RNA (1)...(19): siRNA sense strand
ucaccuuccucaauuccaa

SEQ ID NO: 1800786 - RNA, 19 nt, Homo sapiens
  misc_RNA (1)...(19): siRNA sense strand
uaagagcggcugcuucuac

SEQ ID NO: 1800787 - RNA, 19 nt, Homo sapiens
  misc_RNA (1)...(19): siRNA sense strand
gaacacuucagcauacacu

SEQ ID NO: 1800788 - RNA, 19 nt, Homo sapiens
  misc_RNA (1)...(19): siRNA sense strand
agaaagaggaggacuggau

SEQ ID NO: 1800789 - RNA, 19 nt, Homo sapiens
  misc_RNA (1)...(19): siRNA sense strand
caagaaggagauaguggau

SEQ ID NO: 1800790 - RNA, 19 nt, Homo sapiens
  misc_RNA (1)...(19): siRNA sense strand
gucagaaaccggccaagga

SEQ ID NO: 1800791 - RNA, 19 nt, Homo sapiens
  misc_RNA (1)...(19): siRNA sense strand
gagauaguggaucggaaau

SEQ ID NO: 1800792 - RNA, 19 nt, Homo sapiens
  misc_RNA (1)...(19): siRNA sense strand
uccgaacacuucagcauac

SEQ ID NO: 1800793 - RNA, 19 nt, Homo sapiens
  misc_RNA (1)...(19): siRNA sense strand
gccguucaccuuccucaau

SEQ ID NO: 1800794 - RNA, 19 nt, Homo sapiens
  misc_RNA (1)...(19): siRNA sense strand
uguaagagcggcugcuucu

SEQ ID NO: 1800795 - RNA, 19 nt, Homo sapiens
  misc_RNA (1)...(19): siRNA sense strand
cagaaguacuccgaacacu

SEQ ID NO: 1800796 - RNA, 19 nt, Homo sapiens
  misc_RNA (1)...(19): siRNA sense strand
ccaaggagggucccagacu

SEQ ID NO: 1800797 - RNA, 19 nt, Homo sapiens
  misc_RNA (1)...(19): siRNA sense strand
ggagauaguggaucggaaa

SEQ ID NO: 1800798 - RNA, 19 nt, Homo sapiens
  misc_RNA (1)...(19): siRNA sense strand
gauaguggaucggaaauac

SEQ ID NO: 1800799 - RNA, 19 nt, Homo sapiens
  misc_RNA (1)...(19): siRNA sense strand
gaucggaaauacagcaucu

SEQ ID NO: 1800800 - RNA, 19 nt, Homo sapiens
  misc_RNA (1)...(19): siRNA sense strand
ccguucaccuuccucaauu

SEQ ID NO: 1800801 - RNA, 19 nt, Homo sapiens
  misc_RNA (1)...(19): siRNA sense strand
ucaccuuccucaauuccaa

SEQ ID NO: 1800802 - RNA, 19 nt, Homo sapiens
  misc_RNA (1)...(19): siRNA sense strand
uaagagcggcugcuucuac

SEQ ID NO: 1800803 - RNA, 19 nt, Homo sapiens
  misc_RNA (1)...(19): siRNA sense strand
gaacacuucagcauacacu

SEQ ID NO: 1800804 - RNA, 19 nt, Homo sapiens
  misc_RNA (1)...(19): siRNA sense strand
agaaagaggaggacuggau

SEQ ID NO: 1800805 - RNA, 19 nt, Homo sapiens
  misc_RNA (1)...(19): siRNA sense strand
caagaaggagauaguggau

SEQ ID NO: 1800806 - RNA, 19 nt, Homo sapiens
  misc_RNA (1)...(19): siRNA sense strand
gucagaaaccggccaagga

SEQ ID NO: 1800807 - RNA, 19 nt, Homo sapiens
  misc_RNA (1)...(19): siRNA sense strand
gagauaguggaucggaaau

SEQ ID NO: 1800808 - RNA, 19 nt, Homo sapiens
  misc_RNA (1)...(19): siRNA sense strand
uccgaacacuucagcauac

SEQ ID NO: 1800809 - RNA, 19 nt, Homo sapiens
  misc_RNA (1)...(19): siRNA sense strand
gccguucaccuuccucaau

SEQ ID NO: 1800810 - RNA, 19 nt, Homo sapiens
  misc_RNA (1)...(19): siRNA sense strand
uguaagagcggcugcuucu

SEQ ID NO: 1800811 - RNA, 19 nt, Homo sapiens
  misc_RNA (1)...(19): siRNA sense strand
cagaaguacuccgaacacu

SEQ ID NO: 1800812 - RNA, 19 nt, Homo sapiens
  misc_RNA (1)...(19): siRNA sense strand
ccaaggagggucccagacu

SEQ ID NO: 1800813 - RNA, 19 nt, Homo sapiens
  misc_RNA (1)...(19): siRNA sense strand
gcaaauagaugaacaacaa

SEQ ID NO: 1800814 - RNA, 19 nt, Homo sapiens
  misc_RNA (1)...(19): siRNA sense strand
gcuaaagccucaacaaaua

SEQ ID NO: 1800815 - RNA, 19 nt, Homo sapiens
  misc_RNA (1)...(19): siRNA sense strand
gaaauuagcagcauuagaa

SEQ ID NO: 1800816 - RNA, 19 nt, Homo sapiens
  misc_RNA (1)...(19): siRNA sense strand
gaaagaagcucggucuauu

SEQ ID NO: 1800817 - RNA, 19 nt, Homo sapiens
  misc_RNA (1)...(19): siRNA sense strand
gaagcucggucuauuguaa

SEQ ID NO: 1800818 - RNA, 19 nt, Homo sapiens
  misc_RNA (1)...(19): siRNA sense strand
gaagauaauucacaguuca

SEQ ID NO: 1800819 - RNA, 19 nt, Homo sapiens
  misc_RNA (1)...(19): siRNA sense strand
gcaaugacuuggauuucua

SEQ ID NO: 1800820 - RNA, 19 nt, Homo sapiens
  misc_RNA (1)...(19): siRNA sense strand
gaagauacaucagcuuaau

SEQ ID NO: 1800821 - RNA, 19 nt, Homo sapiens
  misc_RNA (1)...(19): siRNA sense strand
gaaguccaguucccuguaa

SEQ ID NO: 1800822 - RNA, 19 nt, Homo sapiens
  misc_RNA (1)...(19): siRNA sense strand
gagaaugaucccuuuguua

SEQ ID NO: 1800823 - RNA, 19 nt, Homo sapiens
  misc_RNA (1)...(19): siRNA sense strand
agacauggcgcuucauuua

SEQ ID NO: 1800824 - RNA, 19 nt, Homo sapiens
  misc_RNA (1)...(19): siRNA sense strand
gauuauuucuccuuggaua

SEQ ID NO: 1800825 - RNA, 19 nt, Homo sapiens
  misc_RNA (1)...(19): siRNA sense strand
agucagaaaucuucacaua

SEQ ID NO: 1800826 - RNA, 19 nt, Homo sapiens
  misc_RNA (1)...(19): siRNA sense strand
caccaaagauuuccaacaa

SEQ ID NO: 1800827 - RNA, 19 nt, Homo sapiens
  misc_RNA (1)...(19): siRNA sense strand
gcaauccguucuccucaaa

SEQ ID NO: 1800828 - RNA, 19 nt, Homo sapiens
  misc_RNA (1)...(19): siRNA sense strand
gaacuugaacguuuggaaa

SEQ ID NO: 1800829 - RNA, 19 nt, Homo sapiens
  misc_RNA (1)...(19): siRNA sense strand
gaugauagcuaugguguag

SEQ ID NO: 1800830 - RNA, 19 nt, Homo sapiens
  misc_RNA (1)...(19): siRNA sense strand
gcaaagggaagauauugaa

SEQ ID NO: 1800831 - RNA, 19 nt, Homo sapiens
  misc_RNA (1)...(19): siRNA sense strand
gcaaaccucccacagcuaa

SEQ ID NO: 1800832 - RNA, 19 nt, Homo sapiens
  misc_RNA (1)...(19): siRNA sense strand
aggcagaacuugaacguuu

SEQ ID NO: 1800833 - RNA, 19 nt, Homo sapiens
  misc_RNA (1)...(19): siRNA sense strand
ggagagaugagaagaaaga

SEQ ID NO: 1800834 - RNA, 19 nt, Homo sapiens
  misc_RNA (1)...(19): siRNA sense strand
guauuuaccuccugagugu

SEQ ID NO: 1800835 - RNA, 19 nt, Homo sapiens
  misc_RNA (1)...(19): siRNA sense strand
gagcuaaagccucaacaaa

SEQ ID NO: 1800836 - RNA, 19 nt, Homo sapiens
  misc_RNA (1)...(19): siRNA sense strand
ggaccacccuauuguacaa

SEQ ID NO: 1800837 - RNA, 19 nt, Homo sapiens
  misc_RNA (1)...(19): siRNA sense strand
ggacguggccacaaaauua

SEQ ID NO: 1800838 - RNA, 19 nt, Homo sapiens
  misc_RNA (1)...(19): siRNA sense strand
caaaguagcaguggaaguu

SEQ ID NO: 1800839 - RNA, 19 nt, Homo sapiens
  misc_RNA (1)...(19): siRNA sense strand
gaucaaauucuucaggaaa

SEQ ID NO: 1800840 - RNA, 19 nt, Homo sapiens
  misc_RNA (1)...(19): siRNA sense strand
aaacaaagcagucaaugga

SEQ ID NO: 1800841 - RNA, 19 nt, Homo sapiens
  misc_RNA (1)...(19): siRNA sense strand
gcauaucaaugagcaagaa

SEQ ID NO: 1800842 - RNA, 19 nt, Homo sapiens
  misc_RNA (1)...(19): siRNA sense strand
gaagccaaggcauuuauaa

SEQ ID NO: 1800843 - RNA, 19 nt, Homo sapiens
  misc_RNA (1)...(19): siRNA sense strand
aaacaugccugcagagagu

SEQ ID NO: 1800844 - RNA, 19 nt, Homo sapiens
  misc_RNA (1)...(19): siRNA sense strand
cgaaagcucuaaucacagu

SEQ ID NO: 1800845 - RNA, 19 nt, Homo sapiens
  misc_RNA (1)...(19): siRNA sense strand
ccaagauuauggaugauga

SEQ ID NO: 1800846 - RNA, 19 nt, Homo sapiens
  misc_RNA (1)...(19): siRNA sense strand
ccgaauagcccuucuccua

SEQ ID NO: 1800847 - RNA, 19 nt, Homo sapiens
  misc_RNA (1)...(19): siRNA sense strand
gaagaaacaaucggaauca

SEQ ID NO: 1800848 - RNA, 19 nt, Homo sapiens
  misc_RNA (1)...(19): siRNA sense strand
caagaaggcaagaguuauu

SEQ ID NO: 1800849 - RNA, 19 nt, Homo sapiens
  misc_RNA (1)...(19): siRNA sense strand
gaaaagagccaccaaagau

SEQ ID NO: 1800850 - RNA, 19 nt, Homo sapiens
  misc_RNA (1)...(19): siRNA sense strand
gagagaagaguaugcaaga

SEQ ID NO: 1800851 - RNA, 19 nt, Homo sapiens
  misc_RNA (1)...(19): siRNA sense strand
gaaagaaaacuaccacaaa

SEQ ID NO: 1800852 - RNA, 19 nt, Homo sapiens
  misc_RNA (1)...(19): siRNA sense strand
gaaaagaguacacaagaaa

SEQ ID NO: 1800853 - RNA, 19 nt, Homo sapiens
  misc_RNA (1)...(19): siRNA sense strand
gugaagauacaucagcuua

SEQ ID NO: 1800854 - RNA, 19 nt, Homo sapiens
  misc_RNA (1)...(19): siRNA sense strand
gaauagcccuucuccuacu

SEQ ID NO: 1800855 - RNA, 19 nt, Homo sapiens
  misc_RNA (1)...(19): siRNA sense strand
ggaacagcauguggugaaa

SEQ ID NO: 1800856 - RNA, 19 nt, Homo sapiens
  misc_RNA (1)...(19): siRNA sense strand
gaaaggcaaaggaaacuuc

SEQ ID NO: 1800857 - RNA, 19 nt, Homo sapiens
  misc_RNA (1)...(19): siRNA sense strand
caacaagaaugggugaauc

SEQ ID NO: 1800858 - RNA, 19 nt, Homo sapiens
  misc_RNA (1)...(19): siRNA sense strand
gaucucagacggcaaauag

SEQ ID NO: 1800859 - RNA, 19 nt, Homo sapiens
  misc_RNA (1)...(19): siRNA sense strand
gaguaugcaagaucgauua

SEQ ID NO: 1800860 - RNA, 19 nt, Homo sapiens
  misc_RNA (1)...(19): siRNA sense strand
gaagauauugaaaggcaaa

SEQ ID NO: 1800861 - RNA, 19 nt, Homo sapiens
  misc_RNA (1)...(19): siRNA sense strand
ggagggacguauagaugau

SEQ ID NO: 1800862 - RNA, 19 nt, Homo sapiens
  misc_RNA (1)...(19): siRNA sense strand
aacgaaagcucuaaucaca

SEQ ID NO: 1800863 - RNA, 19 nt, Homo sapiens
  misc_RNA (1)...(19): siRNA sense strand
gcagugaagccaaggcauu

SEQ ID NO: 1800864 - RNA, 19 nt, Homo sapiens
  misc_RNA (1)...(19): siRNA sense strand
aaagagccaccaaagauuu

SEQ ID NO: 1800865 - RNA, 19 nt, Homo sapiens
  misc_RNA (1)...(19): siRNA sense strand
uagcagcauuagaaaguaa

SEQ ID NO: 1800866 - RNA, 19 nt, Homo sapiens
  misc_RNA (1)...(19): siRNA sense strand
ucagaaaucuucacauacg

SEQ ID NO: 1800867 - RNA, 19 nt, Homo sapiens
  misc_RNA (1)...(19): siRNA sense strand
ugacuuggauuucuaucug

SEQ ID NO: 1800868 - RNA, 19 nt, Homo sapiens
  misc_RNA (1)...(19): siRNA sense strand
cugcagagaguauagaaua

SEQ ID NO: 1800869 - RNA, 19 nt, Homo sapiens
  misc_RNA (1)...(19): siRNA sense strand
gaaggagggacguauagau

SEQ ID NO: 1800870 - RNA, 19 nt, Homo sapiens
  misc_RNA (1)...(19): siRNA sense strand
ggcaggcacuuacugguau

SEQ ID NO: 1800871 - RNA, 19 nt, Homo sapiens
  misc_RNA (1)...(19): siRNA sense strand
caagaguuauuggaagcua

SEQ ID NO: 1800872 - RNA, 19 nt, Homo sapiens
  misc_RNA (1)...(19): siRNA sense strand
ucaaugagcaagaaacuuc

SEQ ID NO: 1800873 - RNA, 19 nt, Homo sapiens
  misc_RNA (1)...(19): siRNA sense strand
gggcaggcacuuacuggua

SEQ ID NO: 1800874 - RNA, 19 nt, Homo sapiens
  misc_RNA (1)...(19): siRNA sense strand
uaaugcagauuguaaaugc

SEQ ID NO: 1800875 - RNA, 19 nt, Homo sapiens
  misc_RNA (1)...(19): siRNA sense strand
aauaaaagcuggagagaug

SEQ ID NO: 1800876 - RNA, 19 nt, Homo sapiens
  misc_RNA (1)...(19): siRNA sense strand
gaaugaucccuuuguuaga

SEQ ID NO: 1800877 - RNA, 19 nt, Homo sapiens
  misc_RNA (1)...(19): siRNA sense strand
gagaagaguaugcaagauc

SEQ ID NO: 1800878 - RNA, 19 nt, Homo sapiens
  misc_RNA (1)...(19): siRNA sense strand
ugacaaagaaucagagaca

SEQ ID NO: 1800879 - RNA, 19 nt, Homo sapiens
  misc_RNA (1)...(19): siRNA sense strand
caaucaaucucaacaagac

SEQ ID NO: 1800880 - RNA, 19 nt, Homo sapiens
  misc_RNA (1)...(19): siRNA sense strand
caaguuaaugucagagaaa

SEQ ID NO: 1800881 - RNA, 19 nt, Homo sapiens
  misc_RNA (1)...(19): siRNA sense strand
aaagaaggagggacguaua

SEQ ID NO: 1800882 - RNA, 19 nt, Homo sapiens
  misc_RNA (1)...(19): siRNA sense strand
gcagaaaaccagaaugaaa

SEQ ID NO: 1800883 - RNA, 19 nt, Homo sapiens
  misc_RNA (1)...(19): siRNA sense strand
gagaagaaacaaucggaau

SEQ ID NO: 1800884 - RNA, 19 nt, Homo sapiens
  misc_RNA (1)...(19): siRNA sense strand
caaauaacgaaagcucuaa

SEQ ID NO: 1800885 - RNA, 19 nt, Homo sapiens
  misc_RNA (1)...(19): siRNA sense strand
agagguggcuuuagugaag

SEQ ID NO: 1800886 - RNA, 19 nt, Homo sapiens
  misc_RNA (1)...(19): siRNA sense strand
agagaaugaucccuuuguu

SEQ ID NO: 1800887 - RNA, 19 nt, Homo sapiens
  misc_RNA (1)...(19): siRNA sense strand
gaacaauggacagaugguu

SEQ ID NO: 1800888 - RNA, 19 nt, Homo sapiens
  misc_RNA (1)...(19): siRNA sense strand
guuauuggaagcuagauuu

SEQ ID NO: 1800889 - RNA, 19 nt, Homo sapiens
  misc_RNA (1)...(19): siRNA sense strand
cuaaagccucaacaaauaa

SEQ ID NO: 1800890 - RNA, 19 nt, Homo sapiens
  misc_RNA (1)...(19): siRNA sense strand
cagggaaggugcaauggau

SEQ ID NO: 1800891 - RNA, 19 nt, Homo sapiens
  misc_RNA (1)...(19): siRNA sense strand
ggcagaacuugaacguuug

SEQ ID NO: 1800892 - RNA, 19 nt, Homo sapiens
  misc_RNA (1)...(19): siRNA sense strand
aggcauaccuccugcaauc

SEQ ID NO: 1800893 - RNA, 19 nt, Homo sapiens
  misc_RNA (1)...(19): siRNA sense strand
caaagggaagauauugaaa

SEQ ID NO: 1800894 - RNA, 19 nt, Homo sapiens
  misc_RNA (1)...(19): siRNA sense strand
acacauggcugggcugaca

SEQ ID NO: 1800895 - RNA, 19 nt, Homo sapiens
  misc_RNA (1)...(19): siRNA sense strand
gaaagccauuuggucacaa

SEQ ID NO: 1800896 - RNA, 19 nt, Homo sapiens
  misc_RNA (1)...(19): siRNA sense strand
gcaggcacuuacugguauu

SEQ ID NO: 1800897 - RNA, 19 nt, Homo sapiens
  misc_RNA (1)...(19): siRNA sense strand
cagagacaccggagaagaa

SEQ ID NO: 1800898 - RNA, 19 nt, Homo sapiens
  misc_RNA (1)...(19): siRNA sense strand
gauuauggaugaugauagc

SEQ ID NO: 1800899 - RNA, 19 nt, Homo sapiens
  misc_RNA (1)...(19): siRNA sense strand
ugaaggcaaugacuuggau

SEQ ID NO: 1800900 - RNA, 19 nt, Homo sapiens
  misc_RNA (1)...(19): siRNA sense strand
cuggagagaugagaagaaa

SEQ ID NO: 1800901 - RNA, 19 nt, Homo sapiens
  misc_RNA (1)...(19): siRNA sense strand
aaagauaugcugcugugaa

SEQ ID NO: 1800902 - RNA, 19 nt, Homo sapiens
  misc_RNA (1)...(19): siRNA sense strand
caggcacccucuaccaauu

SEQ ID NO: 1800903 - RNA, 19 nt, Homo sapiens
  misc_RNA (1)...(19): siRNA sense strand
guacaaccaaagcaauuau

SEQ ID NO: 1800904 - RNA, 19 nt, Homo sapiens
  misc_RNA (1)...(19): siRNA sense strand
gaaaagaagaucgauuuga

SEQ ID NO: 1800905 - RNA, 19 nt, Homo sapiens
  misc_RNA (1)...(19): siRNA sense strand
ugauagcuaugguguagau

SEQ ID NO: 1800906 - RNA, 19 nt, Homo sapiens
  misc_RNA (1)...(19): siRNA sense strand
acaaguuaaugucagagaa

SEQ ID NO: 1800907 - RNA, 19 nt, Homo sapiens
  misc_RNA (1)...(19): siRNA sense strand
gauaugcugcugugaagau

SEQ ID NO: 1800908 - RNA, 19 nt, Homo sapiens
  misc_RNA (1)...(19): siRNA sense strand
guagagguggcuuuaguga

SEQ ID NO: 1800909 - RNA, 19 nt, Homo sapiens
  misc_RNA (1)...(19): siRNA sense strand
agaauaucaugaacaggaa

SEQ ID NO: 1800910 - RNA, 19 nt, Homo sapiens
  misc_RNA (1)...(19): siRNA sense strand
agaaugaucccuuuguuag

SEQ ID NO: 1800911 - RNA, 19 nt, Homo sapiens
  misc_RNA (1)...(19): siRNA sense strand
ccacagcuaauaauucuca

SEQ ID NO: 1800912 - RNA, 19 nt, Homo sapiens
  misc_RNA (1)...(19): siRNA sense strand
aaggaaacuucuagccaaa

SEQ ID NO: 1800913 - RNA, 19 nt, Homo sapiens
  misc_RNA (1)...(19): siRNA sense strand
ggaaagagaugauaaagau

SEQ ID NO: 1800914 - RNA, 19 nt, Homo sapiens
  misc_RNA (1)...(19): siRNA sense strand
ggagguggcuugucuauca

SEQ ID NO: 1800915 - RNA, 19 nt, Homo sapiens
  misc_RNA (1)...(19): siRNA sense strand
guaggacucugguuaauuc

SEQ ID NO: 1800916 - RNA, 19 nt, Homo sapiens
  misc_RNA (1)...(19): siRNA sense strand
gcuaacacuuaccuacuua

SEQ ID NO: 1800917 - RNA, 19 nt, Homo sapiens
  misc_RNA (1)...(19): siRNA sense strand
agaaugcuaugccagaaua

SEQ ID NO: 1800918 - RNA, 19 nt, Homo sapiens
  misc_RNA (1)...(19): siRNA sense strand
caacugcgaagaauaauga

SEQ ID NO: 1800919 - RNA, 19 nt, Homo sapiens
  misc_RNA (1)...(19): siRNA sense strand
guaccucgaucuuaccauu

SEQ ID NO: 1800920 - RNA, 19 nt, Homo sapiens
  misc_RNA (1)...(19): siRNA sense strand
gcuggugaaugacacauaa

SEQ ID NO: 1800921 - RNA, 19 nt, Homo sapiens
  misc_RNA (1)...(19): siRNA sense strand
gaauuguaccucgaucuua

SEQ ID NO: 1800922 - RNA, 19 nt, Homo sapiens
  misc_RNA (1)...(19): siRNA sense strand
ggagaaugcuaugccagaa

SEQ ID NO: 1800923 - RNA, 19 nt, Homo sapiens
  misc_RNA (1)...(19): siRNA sense strand
cagcguaguuggaaucuuc

SEQ ID NO: 1800924 - RNA, 19 nt, Homo sapiens
  misc_RNA (1)...(19): siRNA sense strand
ccaaauggguauaggaaag

SEQ ID NO: 1800925 - RNA, 19 nt, Homo sapiens
  misc_RNA (1)...(19): siRNA sense strand
gacggcagcuucagcauca

SEQ ID NO: 1800926 - RNA, 19 nt, Homo sapiens
  misc_RNA (1)...(19): siRNA sense strand
ucaguaggcaaguuaaaua

SEQ ID NO: 1800927 - RNA, 19 nt, Homo sapiens
  misc_RNA (1)...(19): siRNA sense strand
gugagccucuggagcauuu

SEQ ID NO: 1800928 - RNA, 19 nt, Homo sapiens
  misc_RNA (1)...(19): siRNA sense strand
uuuaugcacuuuccuguuu

SEQ ID NO: 1800929 - RNA, 19 nt, Homo sapiens
  misc_RNA (1)...(19): siRNA sense strand
gcccaacugcgaagaauaa

SEQ ID NO: 1800930 - RNA, 19 nt, Homo sapiens
  misc_RNA (1)...(19): siRNA sense strand
cagacuggcugcuggagaa

SEQ ID NO: 1800931 - RNA, 19 nt, Homo sapiens
  misc_RNA (1)...(19): siRNA sense strand
ggacucugguuaauucagu

SEQ ID NO: 1800932 - RNA, 19 nt, Homo sapiens
  misc_RNA (1)...(19): siRNA sense strand
gaucuuaccauuggccuuu

SEQ ID NO: 1800933 - RNA, 19 nt, Homo sapiens
  misc_RNA (1)...(19): siRNA sense strand
gaauguccaaggaauugua

SEQ ID NO: 1800934 - RNA, 19 nt, Homo sapiens
  misc_RNA (1)...(19): siRNA sense strand
gaaggaagugguuuauugg

SEQ ID NO: 1800935 - RNA, 19 nt, Homo sapiens
  misc_RNA (1)...(19): siRNA sense strand
ggaauuguaccucgaucuu

SEQ ID NO: 1800936 - RNA, 19 nt, Homo sapiens
  misc_RNA (1)...(19): siRNA sense strand
ugaaauuaauggcaugauc

SEQ ID NO: 1800937 - RNA, 19 nt, Homo sapiens
  misc_RNA (1)...(19): siRNA sense strand
gaacgaguaccuccuaagg

SEQ ID NO: 1800938 - RNA, 19 nt, Homo sapiens
  misc_RNA (1)...(19): siRNA sense strand
caaccuaacccaagaggau

SEQ ID NO: 1800939 - RNA, 19 nt, Homo sapiens
  misc_RNA (1)...(19): siRNA sense strand
ccaacgggaugccaaaugg

SEQ ID NO: 1800940 - RNA, 19 nt, Homo sapiens
  misc_RNA (1)...(19): siRNA sense strand
gguacaggccauuucagua

SEQ ID NO: 1800941 - RNA, 19 nt, Homo sapiens
  misc_RNA (1)...(19): siRNA sense strand
gcuucagcaucaagauuaa

SEQ ID NO: 1800942 - RNA, 19 nt, Homo sapiens
  misc_RNA (1)...(19): siRNA sense strand
caacauuggcguagacauc

SEQ ID NO: 1800943 - RNA, 19 nt, Homo sapiens
  misc_RNA (1)...(19): siRNA sense strand
guaguuggaaucuucugua

SEQ ID NO: 1800944 - RNA, 19 nt, Homo sapiens
  misc_RNA (1)...(19): siRNA sense strand
gguaugcauuucaacuguu

SEQ ID NO: 1800945 - RNA, 19 nt, Homo sapiens
  misc_RNA (1)...(19): siRNA sense strand
caacuguucuccgaagcuu

SEQ ID NO: 1800946 - RNA, 19 nt, Homo sapiens
  misc_RNA (1)...(19): siRNA sense strand
caagaacggccaugccaau

SEQ ID NO: 1800947 - RNA, 19 nt, Homo sapiens
  misc_RNA (1)...(19): siRNA sense strand
guaggcaaguuaaauacag

SEQ ID NO: 1800948 - RNA, 19 nt, Homo sapiens
  misc_RNA (1)...(19): siRNA sense strand
caugauagaaacccugaaa

SEQ ID NO: 1800949 - RNA, 19 nt, Homo sapiens
  misc_RNA (1)...(19): siRNA sense strand
uucaguggcugcucuuaaa

SEQ ID NO: 1800950 - RNA, 19 nt, Homo sapiens
  misc_RNA (1)...(19): siRNA sense strand
guaugcauuucaacuguuc

SEQ ID NO: 1800951 - RNA, 19 nt, Homo sapiens
  misc_RNA (1)...(19): siRNA sense strand
guaccuguaucgguguauu

SEQ ID NO: 1800952 - RNA, 19 nt, Homo sapiens
  misc_RNA (1)...(19): siRNA sense strand
ccaguaguccaccucagua

SEQ ID NO: 1800953 - RNA, 19 nt, Homo sapiens
  misc_RNA (1)...(19): siRNA sense strand
gaaaagaauguccaaggaa

SEQ ID NO: 1800954 - RNA, 19 nt, Homo sapiens
  misc_RNA (1)...(19): siRNA sense strand
uggauuugcuggcuucuca

SEQ ID NO: 1800955 - RNA, 19 nt, Homo sapiens
  misc_RNA (1)...(19): siRNA sense strand
uuucuggccuuucuuuaug

SEQ ID NO: 1800956 - RNA, 19 nt, Homo sapiens
  misc_RNA (1)...(19): siRNA sense strand
ugaucaaccuaacccaaga

SEQ ID NO: 1800957 - RNA, 19 nt, Homo sapiens
  misc_RNA (1)...(19): siRNA sense strand
gaagcccaacugcgaagaa

SEQ ID NO: 1800958 - RNA, 19 nt, Homo sapiens
  misc_RNA (1)...(19): siRNA sense strand
caaauggguauaggaaaga

SEQ ID NO: 1800959 - RNA, 19 nt, Homo sapiens
  misc_RNA (1)...(19): siRNA sense strand
aaagaauguccaaggaauu

SEQ ID NO: 1800960 - RNA, 19 nt, Homo sapiens
  misc_RNA (1)...(19): siRNA sense strand
gaaagagaugauaaagauc

SEQ ID NO: 1800961 - RNA, 19 nt, Homo sapiens
  misc_RNA (1)...(19): siRNA sense strand
ccaaugggcaccucaacau

SEQ ID NO: 1800962 - RNA, 19 nt, Homo sapiens
  misc_RNA (1)...(19): siRNA sense strand
ugaaaagaauguccaagga

SEQ ID NO: 1800963 - RNA, 19 nt, Homo sapiens
  misc_RNA (1)...(19): siRNA sense strand
acguggugguggcauauua

SEQ ID NO: 1800964 - RNA, 19 nt, Homo sapiens
  misc_RNA (1)...(19): siRNA sense strand
uuaauggcaugauccuugu

SEQ ID NO: 1800965 - RNA, 19 nt, Homo sapiens
  misc_RNA (1)...(19): siRNA sense strand
guauaggaaagagaugaua

SEQ ID NO: 1800966 - RNA, 19 nt, Homo sapiens
  misc_RNA (1)...(19): siRNA sense strand
gcagugggccuuuucuauu

SEQ ID NO: 1800967 - RNA, 19 nt, Homo sapiens
  misc_RNA (1)...(19): siRNA sense strand
uaguuggaaucuucuguau

SEQ ID NO: 1800968 - RNA, 19 nt, Homo sapiens
  misc_RNA (1)...(19): siRNA sense strand
ggccauuucaguacuuuga

SEQ ID NO: 1800969 - RNA, 19 nt, Homo sapiens
  misc_RNA (1)...(19): siRNA sense strand
caccucaguaggcaaguua

SEQ ID NO: 1800970 - RNA, 19 nt, Homo sapiens
  misc_RNA (1)...(19): siRNA sense strand
gauagaaacccugaaaaug

SEQ ID NO: 1800971 - RNA, 19 nt, Homo sapiens
  misc_RNA (1)...(19): siRNA sense strand
gagaaugcuaugccagaau

SEQ ID NO: 1800972 - RNA, 19 nt, Homo sapiens
  misc_RNA (1)...(19): siRNA sense strand
caacauguguggggacuau

SEQ ID NO: 1800973 - RNA, 19 nt, Homo sapiens
  misc_RNA (1)...(19): siRNA sense strand
guaacuacacucccaguac

SEQ ID NO: 1800974 - RNA, 19 nt, Homo sapiens
  misc_RNA (1)...(19): siRNA sense strand
cagugggccuuuucuauuu

SEQ ID NO: 1800975 - RNA, 19 nt, Homo sapiens
  misc_RNA (1)...(19): siRNA sense strand
ggugguaucacuggauuug

SEQ ID NO: 1800976 - RNA, 19 nt, Homo sapiens
  misc_RNA (1)...(19): siRNA sense strand
aaaagaauguccaaggaau

SEQ ID NO: 1800977 - RNA, 19 nt, Homo sapiens
  misc_RNA (1)...(19): siRNA sense strand
ggugguggcauauuacauc

SEQ ID NO: 1800978 - RNA, 19 nt, Homo sapiens
  misc_RNA (1)...(19): siRNA sense strand
ccuuguaggacucugguua

SEQ ID NO: 1800979 - RNA, 19 nt, Homo sapiens
  misc_RNA (1)...(19): siRNA sense strand
uagaaacccugaaaaugga

SEQ ID NO: 1800980 - RNA, 19 nt, Homo sapiens
  misc_RNA (1)...(19): siRNA sense strand
aagaauguccaaggaauug

SEQ ID NO: 1800981 - RNA, 19 nt, Homo sapiens
  misc_RNA (1)...(19): siRNA sense strand
ggagcaccauuuggaagca

SEQ ID NO: 1800982 - RNA, 19 nt, Homo sapiens
  misc_RNA (1)...(19): siRNA sense strand
ugcuaacacuuaccuacuu

SEQ ID NO: 1800983 - RNA, 19 nt, Homo sapiens
  misc_RNA (1)...(19): siRNA sense strand
ggacguggugguggcauau

SEQ ID NO: 1800984 - RNA, 19 nt, Homo sapiens
  misc_RNA (1)...(19): siRNA sense strand
cagcuucagcaucaagauu

SEQ ID NO: 1800985 - RNA, 19 nt, Homo sapiens
  misc_RNA (1)...(19): siRNA sense strand
gugguggcauauuacauca

SEQ ID NO: 1800986 - RNA, 19 nt, Homo sapiens
  misc_RNA (1)...(19): siRNA sense strand
cggcgacucuggugguauc

SEQ ID NO: 1800987 - RNA, 19 nt, Homo sapiens
  misc_RNA (1)...(19): siRNA sense strand
ggccacacggucaugcuaa

SEQ ID NO: 1800988 - RNA, 19 nt, Homo sapiens
  misc_RNA (1)...(19): siRNA sense strand
cacuggcucucacaacaug

SEQ ID NO: 1800989 - RNA, 19 nt, Homo sapiens
  misc_RNA (1)...(19): siRNA sense strand
ucacaggccaggacuugau

SEQ ID NO: 1800990 - RNA, 19 nt, Homo sapiens
  misc_RNA (1)...(19): siRNA sense strand
gccaaauggguauaggaaa

SEQ ID NO: 1800991 - RNA, 19 nt, Homo sapiens
  misc_RNA (1)...(19): siRNA sense strand
ccaccucaguaggcaaguu

SEQ ID NO: 1800992 - RNA, 19 nt, Homo sapiens
  misc_RNA (1)...(19): siRNA sense strand
aauuguaccucgaucuuac

SEQ ID NO: 1800993 - RNA, 19 nt, Homo sapiens
  misc_RNA (1)...(19): siRNA sense strand
acggucaugcuaacacuua

SEQ ID NO: 1800994 - RNA, 19 nt, Homo sapiens
  misc_RNA (1)...(19): siRNA sense strand
uaccuguaucgguguauua

SEQ ID NO: 1800995 - RNA, 19 nt, Homo sapiens
  misc_RNA (1)...(19): siRNA sense strand
ugguaugcauuucaacugu

SEQ ID NO: 1800996 - RNA, 19 nt, Homo sapiens
  misc_RNA (1)...(19): siRNA sense strand
cagcggcuccuggacauga

SEQ ID NO: 1800997 - RNA, 19 nt, Homo sapiens
  misc_RNA (1)...(19): siRNA sense strand
caaggaauuguaccucgau

SEQ ID NO: 1800998 - RNA, 19 nt, Homo sapiens
  misc_RNA (1)...(19): siRNA sense strand
ggugguacaggccauuuca

SEQ ID NO: 1800999 - RNA, 19 nt, Homo sapiens
  misc_RNA (1)...(19): siRNA sense strand
uggacguggugguggcaua

SEQ ID NO: 1801000 - RNA, 19 nt, Homo sapiens
  misc_RNA (1)...(19): siRNA sense strand
uuggcacgcuguaccugua

SEQ ID NO: 1801001 - RNA, 19 nt, Homo sapiens
  misc_RNA (1)...(19): siRNA sense strand
gcauaguuggcacgcugua

SEQ ID NO: 1801002 - RNA, 19 nt, Homo sapiens
  misc_RNA (1)...(19): siRNA sense strand
ggguauaggaaagagauga

SEQ ID NO: 1801003 - RNA, 19 nt, Homo sapiens
  misc_RNA (1)...(19): siRNA sense strand
caggccauuucaguacuuu

SEQ ID NO: 1801004 - RNA, 19 nt, Homo sapiens
  misc_RNA (1)...(19): siRNA sense strand
cgacucuggugguaucacu

SEQ ID NO: 1801005 - RNA, 19 nt, Homo sapiens
  misc_RNA (1)...(19): siRNA sense strand
acgaacgaguaccuccuaa

SEQ ID NO: 1801006 - RNA, 19 nt, Homo sapiens
  misc_RNA (1)...(19): siRNA sense strand
aggaaagagaugauaaaga

SEQ ID NO: 1801007 - RNA, 19 nt, Homo sapiens
  misc_RNA (1)...(19): siRNA sense strand
gaaacaagcucuggaagaa

SEQ ID NO: 1801008 - RNA, 19 nt, Homo sapiens
  misc_RNA (1)...(19): siRNA sense strand
ggaguuaacuucucaguga

SEQ ID NO: 1801009 - RNA, 19 nt, Homo sapiens
  misc_RNA (1)...(19): siRNA sense strand
gaaauaccaugcacuuuga

SEQ ID NO: 1801010 - RNA, 19 nt, Homo sapiens
  misc_RNA (1)...(19): siRNA sense strand
aagaauagcucugagauua

SEQ ID NO: 1801011 - RNA, 19 nt, Homo sapiens
  misc_RNA (1)...(19): siRNA sense strand
ggaaauggcugcagguuca

SEQ ID NO: 1801012 - RNA, 19 nt, Homo sapiens
  misc_RNA (1)...(19): siRNA sense strand
cuacacaacucaauucuuu

SEQ ID NO: 1801013 - RNA, 19 nt, Homo sapiens
  misc_RNA (1)...(19): siRNA sense strand
gaacugaaauuacuauugc

SEQ ID NO: 1801014 - RNA, 19 nt, Homo sapiens
  misc_RNA (1)...(19): siRNA sense strand
caaugggacuccacaguua

SEQ ID NO: 1801015 - RNA, 19 nt, Homo sapiens
  misc_RNA (1)...(19): siRNA sense strand
caaagaagcacuugguuaa

SEQ ID NO: 1801016 - RNA, 19 nt, Homo sapiens
  misc_RNA (1)...(19): siRNA sense strand
caagaaagauccagaaguc

SEQ ID NO: 1801017 - RNA, 19 nt, Homo sapiens
  misc_RNA (1)...(19): siRNA sense strand
gaugaaacuuguagaaaug

SEQ ID NO: 1801018 - RNA, 19 nt, Homo sapiens
  misc_RNA (1)...(19): siRNA sense strand
caacauacagucaguuuaa

SEQ ID NO: 1801019 - RNA, 19 nt, Homo sapiens
  misc_RNA (1)...(19): siRNA sense strand
gaaaagaaccuacugaaaa

SEQ ID NO: 1801020 - RNA, 19 nt, Homo sapiens
  misc_RNA (1)...(19): siRNA sense strand
cugcaaacuuucagaauua

SEQ ID NO: 1801021 - RNA, 19 nt, Homo sapiens
  misc_RNA (1)...(19): siRNA sense strand
ggaaauaccaugcacuuug

SEQ ID NO: 1801022 - RNA, 19 nt, Homo sapiens
  misc_RNA (1)...(19): siRNA sense strand
ggagaaagaacaacacauu

SEQ ID NO: 1801023 - RNA, 19 nt, Homo sapiens
  misc_RNA (1)...(19): siRNA sense strand
cacaucagcucaagccuua

SEQ ID NO: 1801024 - RNA, 19 nt, Homo sapiens
  misc_RNA (1)...(19): siRNA sense strand
ucagaaaccuccacaccua

SEQ ID NO: 1801025 - RNA, 19 nt, Homo sapiens
  misc_RNA (1)...(19): siRNA sense strand
gaauacagagggaaguuua

SEQ ID NO: 1801026 - RNA, 19 nt, Homo sapiens
  misc_RNA (1)...(19): siRNA sense strand
guagagagccauauacaaa

SEQ ID NO: 1801027 - RNA, 19 nt, Homo sapiens
  misc_RNA (1)...(19): siRNA sense strand
ucaagaguuuccaaaguua

SEQ ID NO: 1801028 - RNA, 19 nt, Homo sapiens
  misc_RNA (1)...(19): siRNA sense strand
ggaagacccugauccugaa

SEQ ID NO: 1801029 - RNA, 19 nt, Homo sapiens
  misc_RNA (1)...(19): siRNA sense strand
agaaaggccucuacgcaua

SEQ ID NO: 1801030 - RNA, 19 nt, Homo sapiens
  misc_RNA (1)...(19): siRNA sense strand
gcacuagcagaaauaauua

SEQ ID NO: 1801031 - RNA, 19 nt, Homo sapiens
  misc_RNA (1)...(19): siRNA sense strand
aaacagagcuccaacaaaa

SEQ ID NO: 1801032 - RNA, 19 nt, Homo sapiens
  misc_RNA (1)...(19): siRNA sense strand
gagcuuuacuucucaguga

SEQ ID NO: 1801033 - RNA, 19 nt, Homo sapiens
  misc_RNA (1)...(19): siRNA sense strand
gaugaaacuuccagugcua

SEQ ID NO: 1801034 - RNA, 19 nt, Homo sapiens
  misc_RNA (1)...(19): siRNA sense strand
ucagugaacuuauggaaga

SEQ ID NO: 1801035 - RNA, 19 nt, Homo sapiens
  misc_RNA (1)...(19): siRNA sense strand
gcuguucccuuccagauuu

SEQ ID NO: 1801036 - RNA, 19 nt, Homo sapiens
  misc_RNA (1)...(19): siRNA sense strand
aaaggaagaugacaagaga

SEQ ID NO: 1801037 - RNA, 19 nt, Homo sapiens
  misc_RNA (1)...(19): siRNA sense strand
gcacaaagaauagcucuga

SEQ ID NO: 1801038 - RNA, 19 nt, Homo sapiens
  misc_RNA (1)...(19): siRNA sense strand
ggcaacuucuggaacauua

SEQ ID NO: 1801039 - RNA, 19 nt, Homo sapiens
  misc_RNA (1)...(19): siRNA sense strand
gaacugggucugcaagaaa

SEQ ID NO: 1801040 - RNA, 19 nt, Homo sapiens
  misc_RNA (1)...(19): siRNA sense strand
ccaaagggaacugaaauua

SEQ ID NO: 1801041 - RNA, 19 nt, Homo sapiens
  misc_RNA (1)...(19): siRNA sense strand
ucagugaacuccaacuuga

SEQ ID NO: 1801042 - RNA, 19 nt, Homo sapiens
  misc_RNA (1)...(19): siRNA sense strand
acagagaacuuuccacuca

SEQ ID NO: 1801043 - RNA, 19 nt, Homo sapiens
  misc_RNA (1)...(19): siRNA sense strand
gaagagcccagaaacuaaa

SEQ ID NO: 1801044 - RNA, 19 nt, Homo sapiens
  misc_RNA (1)...(19): siRNA sense strand
gaaaggccucuacgcauaa

SEQ ID NO: 1801045 - RNA, 19 nt, Homo sapiens
  misc_RNA (1)...(19): siRNA sense strand
gaagaugacaagagaagaa

SEQ ID NO: 1801046 - RNA, 19 nt, Homo sapiens
  misc_RNA (1)...(19): siRNA sense strand
aagcauggauggaucgaua

SEQ ID NO: 1801047 - RNA, 19 nt, Homo sapiens
  misc_RNA (1)...(19): siRNA sense strand
ggaaguuuaugcugagaga

SEQ ID NO: 1801048 - RNA, 19 nt, Homo sapiens
  misc_RNA (1)...(19): siRNA sense strand
gcaggcaacuucuggaaca

SEQ ID NO: 1801049 - RNA, 19 nt, Homo sapiens
  misc_RNA (1)...(19): siRNA sense strand
caacaccagcuacaguuua

SEQ ID NO: 1801050 - RNA, 19 nt, Homo sapiens
  misc_RNA (1)...(19): siRNA sense strand
auacacagauugucaguga

SEQ ID NO: 1801051 - RNA, 19 nt, Homo sapiens
  misc_RNA (1)...(19): siRNA sense strand
guaaugaaguagaaaugga

SEQ ID NO: 1801052 - RNA, 19 nt, Homo sapiens
  misc_RNA (1)...(19): siRNA sense strand
gagaaagaacaacacauuu

SEQ ID NO: 1801053 - RNA, 19 nt, Homo sapiens
  misc_RNA (1)...(19): siRNA sense strand
cuacaggccucaucauuca

SEQ ID NO: 1801054 - RNA, 19 nt, Homo sapiens
  misc_RNA (1)...(19): siRNA sense strand
gagggaggcacaaagaaua

SEQ ID NO: 1801055 - RNA, 19 nt, Homo sapiens
  misc_RNA (1)...(19): siRNA sense strand
gcacuugguuaaugaaugg

SEQ ID NO: 1801056 - RNA, 19 nt, Homo sapiens
  misc_RNA (1)...(19): siRNA sense strand
caauagaaccagaaacuga

SEQ ID NO: 1801057 - RNA, 19 nt, Homo sapiens
  misc_RNA (1)...(19): siRNA sense strand
gaacaagucagagaaagga

SEQ ID NO: 1801058 - RNA, 19 nt, Homo sapiens
  misc_RNA (1)...(19): siRNA sense strand
gaagaaugaaccagaaguu

SEQ ID NO: 1801059 - RNA, 19 nt, Homo sapiens
  misc_RNA (1)...(19): siRNA sense strand
gaaauaaagagacgcacuu

SEQ ID NO: 1801060 - RNA, 19 nt, Homo sapiens
  misc_RNA (1)...(19): siRNA sense strand
gaagagaacaagcuuugga

SEQ ID NO: 1801061 - RNA, 19 nt, Homo sapiens
  misc_RNA (1)...(19): siRNA sense strand
ggaacauuauuuacacaga

SEQ ID NO: 1801062 - RNA, 19 nt, Homo sapiens
  misc_RNA (1)...(19): siRNA sense strand
ccagauacuucucaaaaua

SEQ ID NO: 1801063 - RNA, 19 nt, Homo sapiens
  misc_RNA (1)...(19): siRNA sense strand
ggacuguuaaugacaauuu

SEQ ID NO: 1801064 - RNA, 19 nt, Homo sapiens
  misc_RNA (1)...(19): siRNA sense strand
ggguucagcuccagagauu

SEQ ID NO: 1801065 - RNA, 19 nt, Homo sapiens
  misc_RNA (1)...(19): siRNA sense strand
agaaaggaguuaucagaga

SEQ ID NO: 1801066 - RNA, 19 nt, Homo sapiens
  misc_RNA (1)...(19): siRNA sense strand
uacagauccugaaguguua

SEQ ID NO: 1801067 - RNA, 19 nt, Homo sapiens
  misc_RNA (1)...(19): siRNA sense strand
auaaauguccuaccaagua

SEQ ID NO: 1801068 - RNA, 19 nt, Homo sapiens
  misc_RNA (1)...(19): siRNA sense strand
gcucugagauuaggcaaug

SEQ ID NO: 1801069 - RNA, 19 nt, Homo sapiens
  misc_RNA (1)...(19): siRNA sense strand
gaaguuaugguacugaugu

SEQ ID NO: 1801070 - RNA, 19 nt, Homo sapiens
  misc_RNA (1)...(19): siRNA sense strand
caucaaggaccuccacuuu

SEQ ID NO: 1801071 - RNA, 19 nt, Homo sapiens
  misc_RNA (1)...(19): siRNA sense strand
gguagucuuucucaacaaa

SEQ ID NO: 1801072 - RNA, 19 nt, Homo sapiens
  misc_RNA (1)...(19): siRNA sense strand
ccacuacuauuaaaugaca

SEQ ID NO: 1801073 - RNA, 19 nt, Homo sapiens
  misc_RNA (1)...(19): siRNA sense strand
ggaaccauacaucuuuaua

SEQ ID NO: 1801074 - RNA, 19 nt, Homo sapiens
  misc_RNA (1)...(19): siRNA sense strand
gaggauggaaguuauggua

SEQ ID NO: 1801075 - RNA, 19 nt, Homo sapiens
  misc_RNA (1)...(19): siRNA sense strand
ggacagauuccaauucaca

SEQ ID NO: 1801076 - RNA, 19 nt, Homo sapiens
  misc_RNA (1)...(19): siRNA sense strand
ugagaagaaugaaccagaa

SEQ ID NO: 1801077 - RNA, 19 nt, Homo sapiens
  misc_RNA (1)...(19): siRNA sense strand
acaaagaagcacuugguua

SEQ ID NO: 1801078 - RNA, 19 nt, Homo sapiens
  misc_RNA (1)...(19): siRNA sense strand
ggaacugaaauuacuauug

SEQ ID NO: 1801079 - RNA, 19 nt, Homo sapiens
  misc_RNA (1)...(19): siRNA sense strand
cuacacaucauaccacuuu

SEQ ID NO: 1801080 - RNA, 19 nt, Homo sapiens
  misc_RNA (1)...(19): siRNA sense strand
ggucgcauauucauucuca

SEQ ID NO: 1801081 - RNA, 19 nt, Homo sapiens
  misc_RNA (1)...(19): siRNA sense strand
gcaacacucuguagcacau

SEQ ID NO: 1801082 - RNA, 19 nt, Homo sapiens
  misc_RNA (1)...(19): siRNA sense strand
gcaacauacagucaguuua

SEQ ID NO: 1801083 - RNA, 19 nt, Homo sapiens
  misc_RNA (1)...(19): siRNA sense strand
uagauucgguuuacucaga

SEQ ID NO: 1801084 - RNA, 19 nt, Homo sapiens
  misc_RNA (1)...(19): siRNA sense strand
gaaaagagagagaaaagaa

SEQ ID NO: 1801085 - RNA, 19 nt, Homo sapiens
  misc_RNA (1)...(19): siRNA sense strand
gcagauugcagaaaggaaa

SEQ ID NO: 1801086 - RNA, 19 nt, Homo sapiens
  misc_RNA (1)...(19): siRNA sense strand
ggacugugcaugccucaaa

SEQ ID NO: 1801087 - RNA, 19 nt, Homo sapiens
  misc_RNA (1)...(19): siRNA sense strand
gaaguaggcauauuuacca

SEQ ID NO: 1801088 - RNA, 19 nt, Homo sapiens
  misc_RNA (1)...(19): siRNA sense strand
ucacaucauucacacaguu

SEQ ID NO: 1801089 - RNA, 19 nt, Homo sapiens
  misc_RNA (1)...(19): siRNA sense strand
agaagcacuugguuaauga

SEQ ID NO: 1801090 - RNA, 19 nt, Homo sapiens
  misc_RNA (1)...(19): siRNA sense strand
guaaagauacacagauugu

SEQ ID NO: 1801091 - RNA, 19 nt, Homo sapiens
  misc_RNA (1)...(19): siRNA sense strand
cuaggaauuuggauaaaga

SEQ ID NO: 1801092 - RNA, 19 nt, Homo sapiens
  misc_RNA (1)...(19): siRNA sense strand
gaugauggauacaugaucu

SEQ ID NO: 1801093 - RNA, 19 nt, Homo sapiens
  misc_RNA (1)...(19): siRNA sense strand
caucaguccuuauuagcaa

SEQ ID NO: 1801094 - RNA, 19 nt, Homo sapiens
  misc_RNA (1)...(19): siRNA sense strand
ucacacaguuacauugguu

SEQ ID NO: 1801095 - RNA, 19 nt, Homo sapiens
  misc_RNA (1)...(19): siRNA sense strand
caacuggacucgacucacu

SEQ ID NO: 1801096 - RNA, 19 nt, Homo sapiens
  misc_RNA (1)...(19): siRNA sense strand
cagcagagacgucauacuu

SEQ ID NO: 1801097 - RNA, 19 nt, Homo sapiens
  misc_RNA (1)...(19): siRNA sense strand
aaagggaacugaaauuacu

SEQ ID NO: 1801098 - RNA, 19 nt, Homo sapiens
  misc_RNA (1)...(19): siRNA sense strand
gagauuaggcaauggaaau

SEQ ID NO: 1801099 - RNA, 19 nt, Homo sapiens
  misc_RNA (1)...(19): siRNA sense strand
gauguaaccaggugcauau

SEQ ID NO: 1801100 - RNA, 19 nt, Homo sapiens
  misc_RNA (1)...(19): siRNA sense strand
ccacccaccucaucaagga

SEQ ID NO: 1801101 - RNA, 19 nt, Homo sapiens
  misc_RNA (1)...(19): siRNA sense strand
ggaguuaucagagagcuuu

SEQ ID NO: 1801102 - RNA, 19 nt, Homo sapiens
  misc_RNA (1)...(19): siRNA sense strand
gagacgcacuuauagucaa

SEQ ID NO: 1801103 - RNA, 19 nt, Homo sapiens
  misc_RNA (1)...(19): siRNA sense strand
gucagcauguguucagaua

SEQ ID NO: 1801104 - RNA, 19 nt, Homo sapiens
  misc_RNA (1)...(19): siRNA sense strand
cccagaaacuaaacaaaga

SEQ ID NO: 1801105 - RNA, 19 nt, Homo sapiens
  misc_RNA (1)...(19): siRNA sense strand
gaauagcucugagauuagg

SEQ ID NO: 1801106 - RNA, 19 nt, Homo sapiens
  misc_RNA (1)...(19): siRNA sense strand
guaaccaggugcauaugug

SEQ ID NO: 1801107 - RNA, 19 nt, Homo sapiens
  misc_RNA (1)...(19): siRNA sense strand
gaaacaagcucuggaagaa

SEQ ID NO: 1801108 - RNA, 19 nt, Homo sapiens
  misc_RNA (1)...(19): siRNA sense strand
ggaguuaacuucucaguga

SEQ ID NO: 1801109 - RNA, 19 nt, Homo sapiens
  misc_RNA (1)...(19): siRNA sense strand
gaaauaccaugcacuuuga

SEQ ID NO: 1801110 - RNA, 19 nt, Homo sapiens
  misc_RNA (1)...(19): siRNA sense strand
aagaauagcucugagauua

SEQ ID NO: 1801111 - RNA, 19 nt, Homo sapiens
  misc_RNA (1)...(19): siRNA sense strand
ggaaauggcugcagguuca

SEQ ID NO: 1801112 - RNA, 19 nt, Homo sapiens
  misc_RNA (1)...(19): siRNA sense strand
cuacacaacucaauucuuu

SEQ ID NO: 1801113 - RNA, 19 nt, Homo sapiens
  misc_RNA (1)...(19): siRNA sense strand
gaacugaaauuacuauugc

SEQ ID NO: 1801114 - RNA, 19 nt, Homo sapiens
  misc_RNA (1)...(19): siRNA sense strand
caaugggacuccacaguua

SEQ ID NO: 1801115 - RNA, 19 nt, Homo sapiens
  misc_RNA (1)...(19): siRNA sense strand
caaagaagcacuugguuaa

SEQ ID NO: 1801116 - RNA, 19 nt, Homo sapiens
  misc_RNA (1)...(19): siRNA sense strand
caagaaagauccagaaguc

SEQ ID NO: 1801117 - RNA, 19 nt, Homo sapiens
  misc_RNA (1)...(19): siRNA sense strand
gaugaaacuuguagaaaug

SEQ ID NO: 1801118 - RNA, 19 nt, Homo sapiens
  misc_RNA (1)...(19): siRNA sense strand
caacauacagucaguuuaa

SEQ ID NO: 1801119 - RNA, 19 nt, Homo sapiens
  misc_RNA (1)...(19): siRNA sense strand
gaaaagaaccuacugaaaa

SEQ ID NO: 1801120 - RNA, 19 nt, Homo sapiens
  misc_RNA (1)...(19): siRNA sense strand
cugcaaacuuucagaauua

SEQ ID NO: 1801121 - RNA, 19 nt, Homo sapiens
  misc_RNA (1)...(19): siRNA sense strand
ggaaauaccaugcacuuug

SEQ ID NO: 1801122 - RNA, 19 nt, Homo sapiens
  misc_RNA (1)...(19): siRNA sense strand
ggagaaagaacaacacauu

SEQ ID NO: 1801123 - RNA, 19 nt, Homo sapiens
  misc_RNA (1)...(19): siRNA sense strand
cacaucagcucaagccuua

SEQ ID NO: 1801124 - RNA, 19 nt, Homo sapiens
  misc_RNA (1)...(19): siRNA sense strand
ucagaaaccuccacaccua

SEQ ID NO: 1801125 - RNA, 19 nt, Homo sapiens
  misc_RNA (1)...(19): siRNA sense strand
gaauacagagggaaguuua

SEQ ID NO: 1801126 - RNA, 19 nt, Homo sapiens
  misc_RNA (1)...(19): siRNA sense strand
guagagagccauauacaaa

SEQ ID NO: 1801127 - RNA, 19 nt, Homo sapiens
  misc_RNA (1)...(19): siRNA sense strand
ucaagaguuuccaaaguua

SEQ ID NO: 1801128 - RNA, 19 nt, Homo sapiens
  misc_RNA (1)...(19): siRNA sense strand
ggaagacccugauccugaa

SEQ ID NO: 1801129 - RNA, 19 nt, Homo sapiens
  misc_RNA (1)...(19): siRNA sense strand
agaaaggccucuacgcaua

SEQ ID NO: 1801130 - RNA, 19 nt, Homo sapiens
  misc_RNA (1)...(19): siRNA sense strand
gcacuagcagaaauaauua

SEQ ID NO: 1801131 - RNA, 19 nt, Homo sapiens
  misc_RNA (1)...(19): siRNA sense strand
aaacagagcuccaacaaaa

SEQ ID NO: 1801132 - RNA, 19 nt, Homo sapiens
  misc_RNA (1)...(19): siRNA sense strand
gagcuuuacuucucaguga

SEQ ID NO: 1801133 - RNA, 19 nt, Homo sapiens
  misc_RNA (1)...(19): siRNA sense strand
gaugaaacuuccagugcua

SEQ ID NO: 1801134 - RNA, 19 nt, Homo sapiens
  misc_RNA (1)...(19): siRNA sense strand
ucagugaacuuauggaaga

SEQ ID NO: 1801135 - RNA, 19 nt, Homo sapiens
  misc_RNA (1)...(19): siRNA sense strand
gcuguucccuuccagauuu

SEQ ID NO: 1801136 - RNA, 19 nt, Homo sapiens
  misc_RNA (1)...(19): siRNA sense strand
aaaggaagaugacaagaga

SEQ ID NO: 1801137 - RNA, 19 nt, Homo sapiens
  misc_RNA (1)...(19): siRNA sense strand
gcacaaagaauagcucuga

SEQ ID NO: 1801138 - RNA, 19 nt, Homo sapiens
  misc_RNA (1)...(19): siRNA sense strand
ggcaacuucuggaacauua

SEQ ID NO: 1801139 - RNA, 19 nt, Homo sapiens
  misc_RNA (1)...(19): siRNA sense strand
gaacugggucugcaagaaa

SEQ ID NO: 1801140 - RNA, 19 nt, Homo sapiens
  misc_RNA (1)...(19): siRNA sense strand
ccaaagggaacugaaauua

SEQ ID NO: 1801141 - RNA, 19 nt, Homo sapiens
  misc_RNA (1)...(19): siRNA sense strand
ucagugaacuccaacuuga

SEQ ID NO: 1801142 - RNA, 19 nt, Homo sapiens
  misc_RNA (1)...(19): siRNA sense strand
acagagaacuuuccacuca

SEQ ID NO: 1801143 - RNA, 19 nt, Homo sapiens
  misc_RNA (1)...(19): siRNA sense strand
gaagagcccagaaacuaaa

SEQ ID NO: 1801144 - RNA, 19 nt, Homo sapiens
  misc_RNA (1)...(19): siRNA sense strand
gaaaggccucuacgcauaa

SEQ ID NO: 1801145 - RNA, 19 nt, Homo sapiens
  misc_RNA (1)...(19): siRNA sense strand
gaagaugacaagagaagaa

SEQ ID NO: 1801146 - RNA, 19 nt, Homo sapiens
  misc_RNA (1)...(19): siRNA sense strand
aagcauggauggaucgaua

SEQ ID NO: 1801147 - RNA, 19 nt, Homo sapiens
  misc_RNA (1)...(19): siRNA sense strand
ggaaguuuaugcugagaga

SEQ ID NO: 1801148 - RNA, 19 nt, Homo sapiens
  misc_RNA (1)...(19): siRNA sense strand
gcaggcaacuucuggaaca

SEQ ID NO: 1801149 - RNA, 19 nt, Homo sapiens
  misc_RNA (1)...(19): siRNA sense strand
caacaccagcuacaguuua

SEQ ID NO: 1801150 - RNA, 19 nt, Homo sapiens
  misc_RNA (1)...(19): siRNA sense strand
auacacagauugucaguga

SEQ ID NO: 1801151 - RNA, 19 nt, Homo sapiens
  misc_RNA (1)...(19): siRNA sense strand
guaaugaaguagaaaugga

SEQ ID NO: 1801152 - RNA, 19 nt, Homo sapiens
  misc_RNA (1)...(19): siRNA sense strand
gagaaagaacaacacauuu

SEQ ID NO: 1801153 - RNA, 19 nt, Homo sapiens
  misc_RNA (1)...(19): siRNA sense strand
cuacaggccucaucauuca

SEQ ID NO: 1801154 - RNA, 19 nt, Homo sapiens
  misc_RNA (1)...(19): siRNA sense strand
gagggaggcacaaagaaua

SEQ ID NO: 1801155 - RNA, 19 nt, Homo sapiens
  misc_RNA (1)...(19): siRNA sense strand
gcacuugguuaaugaaugg

SEQ ID NO: 1801156 - RNA, 19 nt, Homo sapiens
  misc_RNA (1)...(19): siRNA sense strand
caauagaaccagaaacuga

SEQ ID NO: 1801157 - RNA, 19 nt, Homo sapiens
  misc_RNA (1)...(19): siRNA sense strand
gaacaagucagagaaagga

SEQ ID NO: 1801158 - RNA, 19 nt, Homo sapiens
  misc_RNA (1)...(19): siRNA sense strand
gaagaaugaaccagaaguu

SEQ ID NO: 1801159 - RNA, 19 nt, Homo sapiens
  misc_RNA (1)...(19): siRNA sense strand
gaaauaaagagacgcacuu

SEQ ID NO: 1801160 - RNA, 19 nt, Homo sapiens
  misc_RNA (1)...(19): siRNA sense strand
gaagagaacaagcuuugga

SEQ ID NO: 1801161 - RNA, 19 nt, Homo sapiens
  misc_RNA (1)...(19): siRNA sense strand
ggaacauuauuuacacaga

SEQ ID NO: 1801162 - RNA, 19 nt, Homo sapiens
  misc_RNA (1)...(19): siRNA sense strand
ccagauacuucucaaaaua

SEQ ID NO: 1801163 - RNA, 19 nt, Homo sapiens
  misc_RNA (1)...(19): siRNA sense strand
ggacuguuaaugacaauuu

SEQ ID NO: 1801164 - RNA, 19 nt, Homo sapiens
  misc_RNA (1)...(19): siRNA sense strand
ggguucagcuccagagauu

SEQ ID NO: 1801165 - RNA, 19 nt, Homo sapiens
  misc_RNA (1)...(19): siRNA sense strand
agaaaggaguuaucagaga

SEQ ID NO: 1801166 - RNA, 19 nt, Homo sapiens
  misc_RNA (1)...(19): siRNA sense strand
uacagauccugaaguguua

SEQ ID NO: 1801167 - RNA, 19 nt, Homo sapiens
  misc_RNA (1)...(19): siRNA sense strand
auaaauguccuaccaagua

SEQ ID NO: 1801168 - RNA, 19 nt, Homo sapiens
  misc_RNA (1)...(19): siRNA sense strand
gcucugagauuaggcaaug

SEQ ID NO: 1801169 - RNA, 19 nt, Homo sapiens
  misc_RNA (1)...(19): siRNA sense strand
gaaguuaugguacugaugu

SEQ ID NO: 1801170 - RNA, 19 nt, Homo sapiens
  misc_RNA (1)...(19): siRNA sense strand
caucaaggaccuccacuuu

SEQ ID NO: 1801171 - RNA, 19 nt, Homo sapiens
  misc_RNA (1)...(19): siRNA sense strand
gguagucuuucucaacaaa

SEQ ID NO: 1801172 - RNA, 19 nt, Homo sapiens
  misc_RNA (1)...(19): siRNA sense strand
ccacuacuauuaaaugaca

SEQ ID NO: 1801173 - RNA, 19 nt, Homo sapiens
  misc_RNA (1)...(19): siRNA sense strand
ggaaccauacaucuuuaua

SEQ ID NO: 1801174 - RNA, 19 nt, Homo sapiens
  misc_RNA (1)...(19): siRNA sense strand
gaggauggaaguuauggua

SEQ ID NO: 1801175 - RNA, 19 nt, Homo sapiens
  misc_RNA (1)...(19): siRNA sense strand
ggacagauuccaauucaca

SEQ ID NO: 1801176 - RNA, 19 nt, Homo sapiens
  misc_RNA (1)...(19): siRNA sense strand
ugagaagaaugaaccagaa

SEQ ID NO: 1801177 - RNA, 19 nt, Homo sapiens
  misc_RNA (1)...(19): siRNA sense strand
acaaagaagcacuugguua

SEQ ID NO: 1801178 - RNA, 19 nt, Homo sapiens
  misc_RNA (1)...(19): siRNA sense strand
ggaacugaaauuacuauug

SEQ ID NO: 1801179 - RNA, 19 nt, Homo sapiens
  misc_RNA (1)...(19): siRNA sense strand
cuacacaucauaccacuuu

SEQ ID NO: 1801180 - RNA, 19 nt, Homo sapiens
  misc_RNA (1)...(19): siRNA sense strand
ggucgcauauucauucuca

SEQ ID NO: 1801181 - RNA, 19 nt, Homo sapiens
  misc_RNA (1)...(19): siRNA sense strand
gcaacacucuguagcacau

SEQ ID NO: 1801182 - RNA, 19 nt, Homo sapiens
  misc_RNA (1)...(19): siRNA sense strand
gcaacauacagucaguuua

SEQ ID NO: 1801183 - RNA, 19 nt, Homo sapiens
  misc_RNA (1)...(19): siRNA sense strand
uagauucgguuuacucaga

SEQ ID NO: 1801184 - RNA, 19 nt, Homo sapiens
  misc_RNA (1)...(19): siRNA sense strand
gaaaagagagagaaaagaa

SEQ ID NO: 1801185 - RNA, 19 nt, Homo sapiens
  misc_RNA (1)...(19): siRNA sense strand
gcagauugcagaaaggaaa

SEQ ID NO: 1801186 - RNA, 19 nt, Homo sapiens
  misc_RNA (1)...(19): siRNA sense strand
ggacugugcaugccucaaa

SEQ ID NO: 1801187 - RNA, 19 nt, Homo sapiens
  misc_RNA (1)...(19): siRNA sense strand
gaaguaggcauauuuacca

SEQ ID NO: 1801188 - RNA, 19 nt, Homo sapiens
  misc_RNA (1)...(19): siRNA sense strand
ucacaucauucacacaguu

SEQ ID NO: 1801189 - RNA, 19 nt, Homo sapiens
  misc_RNA (1)...(19): siRNA sense strand
agaagcacuugguuaauga

SEQ ID NO: 1801190 - RNA, 19 nt, Homo sapiens
  misc_RNA (1)...(19): siRNA sense strand
guaaagauacacagauugu

SEQ ID NO: 1801191 - RNA, 19 nt, Homo sapiens
  misc_RNA (1)...(19): siRNA sense strand
cuaggaauuuggauaaaga

SEQ ID NO: 1801192 - RNA, 19 nt, Homo sapiens
  misc_RNA (1)...(19): siRNA sense strand
gaugauggauacaugaucu

SEQ ID NO: 1801193 - RNA, 19 nt, Homo sapiens
  misc_RNA (1)...(19): siRNA sense strand
caucaguccuuauuagcaa

SEQ ID NO: 1801194 - RNA, 19 nt, Homo sapiens
  misc_RNA (1)...(19): siRNA sense strand
ucacacaguuacauugguu

SEQ ID NO: 1801195 - RNA, 19 nt, Homo sapiens
  misc_RNA (1)...(19): siRNA sense strand
caacuggacucgacucacu

SEQ ID NO: 1801196 - RNA, 19 nt, Homo sapiens
  misc_RNA (1)...(19): siRNA sense strand
cagcagagacgucauacuu

SEQ ID NO: 1801197 - RNA, 19 nt, Homo sapiens
  misc_RNA (1)...(19): siRNA sense strand
aaagggaacugaaauuacu

SEQ ID NO: 1801198 - RNA, 19 nt, Homo sapiens
  misc_RNA (1)...(19): siRNA sense strand
gagauuaggcaauggaaau

SEQ ID NO: 1801199 - RNA, 19 nt, Homo sapiens
  misc_RNA (1)...(19): siRNA sense strand
gauguaaccaggugcauau

SEQ ID NO: 1801200 - RNA, 19 nt, Homo sapiens
  misc_RNA (1)...(19): siRNA sense strand
ccacccaccucaucaagga

SEQ ID NO: 1801201 - RNA, 19 nt, Homo sapiens
  misc_RNA (1)...(19): siRNA sense strand
ggaguuaucagagagcuuu

SEQ ID NO: 1801202 - RNA, 19 nt, Homo sapiens
  misc_RNA (1)...(19): siRNA sense strand
gagacgcacuuauagucaa

SEQ ID NO: 1801203 - RNA, 19 nt, Homo sapiens
  misc_RNA (1)...(19): siRNA sense strand
gucagcauguguucagaua

SEQ ID NO: 1801204 - RNA, 19 nt, Homo sapiens
  misc_RNA (1)...(19): siRNA sense strand
cccagaaacuaaacaaaga

SEQ ID NO: 1801205 - RNA, 19 nt, Homo sapiens
  misc_RNA (1)...(19): siRNA sense strand
gaauagcucugagauuagg

SEQ ID NO: 1801206 - RNA, 19 nt, Homo sapiens
  misc_RNA (1)...(19): siRNA sense strand
guaaccaggugcauaugug

SEQ ID NO: 1801207 - RNA, 19 nt, Homo sapiens
  misc_RNA (1)...(19): siRNA sense strand
ggaaggagaucaaauguuu

SEQ ID NO: 1801208 - RNA, 19 nt, Homo sapiens
  misc_RNA (1)...(19): siRNA sense strand
ggaagagacuugcucagua

SEQ ID NO: 1801209 - RNA, 19 nt, Homo sapiens
  misc_RNA (1)...(19): siRNA sense strand
ggagaaaccucaacaaagu

SEQ ID NO: 1801210 - RNA, 19 nt, Homo sapiens
  misc_RNA (1)...(19): siRNA sense strand
caaauggugucaaauauga

SEQ ID NO: 1801211 - RNA, 19 nt, Homo sapiens
  misc_RNA (1)...(19): siRNA sense strand
gaagagacuugcucaguau

SEQ ID NO: 1801212 - RNA, 19 nt, Homo sapiens
  misc_RNA (1)...(19): siRNA sense strand
caagaagacuggagaugaa

SEQ ID NO: 1801213 - RNA, 19 nt, Homo sapiens
  misc_RNA (1)...(19): siRNA sense strand
gaaagaaacuucggucaac

SEQ ID NO: 1801214 - RNA, 19 nt, Homo sapiens
  misc_RNA (1)...(19): siRNA sense strand
ggacaaacuccacaucaaa

SEQ ID NO: 1801215 - RNA, 19 nt, Homo sapiens
  misc_RNA (1)...(19): siRNA sense strand
ggaaagcaaugagagauuc

SEQ ID NO: 1801216 - RNA, 19 nt, Homo sapiens
  misc_RNA (1)...(19): siRNA sense strand
aaacuucggucaacuuuca

SEQ ID NO: 1801217 - RNA, 19 nt, Homo sapiens
  misc_RNA (1)...(19): siRNA sense strand
gaacauggaaggagaucaa

SEQ ID NO: 1801218 - RNA, 19 nt, Homo sapiens
  misc_RNA (1)...(19): siRNA sense strand
gaaaauaugcgacagauga

SEQ ID NO: 1801219 - RNA, 19 nt, Homo sapiens
  misc_RNA (1)...(19): siRNA sense strand
gagaaacuauaugcagaaa

SEQ ID NO: 1801220 - RNA, 19 nt, Homo sapiens
  misc_RNA (1)...(19): siRNA sense strand
cgacagaugauaagaaguu

SEQ ID NO: 1801221 - RNA, 19 nt, Homo sapiens
  misc_RNA (1)...(19): siRNA sense strand
aaagugagguuuugaagua

SEQ ID NO: 1801222 - RNA, 19 nt, Homo sapiens
  misc_RNA (1)...(19): siRNA sense strand
gaugaggaguggcaaagug

SEQ ID NO: 1801223 - RNA, 19 nt, Homo sapiens
  misc_RNA (1)...(19): siRNA sense strand
gaauaaaggaaaccaggaa

SEQ ID NO: 1801224 - RNA, 19 nt, Homo sapiens
  misc_RNA (1)...(19): siRNA sense strand
caaaggcucaucugugaaa

SEQ ID NO: 1801225 - RNA, 19 nt, Homo sapiens
  misc_RNA (1)...(19): siRNA sense strand
gggacaaacuccacaucaa

SEQ ID NO: 1801226 - RNA, 19 nt, Homo sapiens
  misc_RNA (1)...(19): siRNA sense strand
caacaaaguccagccauug

SEQ ID NO: 1801227 - RNA, 19 nt, Homo sapiens
  misc_RNA (1)...(19): siRNA sense strand
auacagaugucagcucuuu

SEQ ID NO: 1801228 - RNA, 19 nt, Homo sapiens
  misc_RNA (1)...(19): siRNA sense strand
aaccaggaguucaucaaua

SEQ ID NO: 1801229 - RNA, 19 nt, Homo sapiens
  misc_RNA (1)...(19): siRNA sense strand
ucaacaaaguccagccauu

SEQ ID NO: 1801230 - RNA, 19 nt, Homo sapiens
  misc_RNA (1)...(19): siRNA sense strand
gagaugaaccgccaaaggu

SEQ ID NO: 1801231 - RNA, 19 nt, Homo sapiens
  misc_RNA (1)...(19): siRNA sense strand
gaacagcaguuuugaggau

SEQ ID NO: 1801232 - RNA, 19 nt, Homo sapiens
  misc_RNA (1)...(19): siRNA sense strand
uuucaggccucaacucaaa

SEQ ID NO: 1801233 - RNA, 19 nt, Homo sapiens
  misc_RNA (1)...(19): siRNA sense strand
ggaaacacuagaaugagaa

SEQ ID NO: 1801234 - RNA, 19 nt, Homo sapiens
  misc_RNA (1)...(19): siRNA sense strand
gcaaugagagauucugaca

SEQ ID NO: 1801235 - RNA, 19 nt, Homo sapiens
  misc_RNA (1)...(19): siRNA sense strand
aaugagagauucugacagu

SEQ ID NO: 1801236 - RNA, 19 nt, Homo sapiens
  misc_RNA (1)...(19): siRNA sense strand
cuuccucaguuaugacuua

SEQ ID NO: 1801237 - RNA, 19 nt, Homo sapiens
  misc_RNA (1)...(19): siRNA sense strand
gacagaugauaagaaguuu

SEQ ID NO: 1801238 - RNA, 19 nt, Homo sapiens
  misc_RNA (1)...(19): siRNA sense strand
ccucaguuaugacuuauuc

SEQ ID NO: 1801239 - RNA, 19 nt, Homo sapiens
  misc_RNA (1)...(19): siRNA sense strand
guagagggagagcucauaa

SEQ ID NO: 1801240 - RNA, 19 nt, Homo sapiens
  misc_RNA (1)...(19): siRNA sense strand
ggacgacacaaucuaggaa

SEQ ID NO: 1801241 - RNA, 19 nt, Homo sapiens
  misc_RNA (1)...(19): siRNA sense strand
gggagaaaccucaacaaag

SEQ ID NO: 1801242 - RNA, 19 nt, Homo sapiens
  misc_RNA (1)...(19): siRNA sense strand
caguaucucugaugguaga

SEQ ID NO: 1801243 - RNA, 19 nt, Homo sapiens
  misc_RNA (1)...(19): siRNA sense strand
gaagggagaaaccucaaca

SEQ ID NO: 1801244 - RNA, 19 nt, Homo sapiens
  misc_RNA (1)...(19): siRNA sense strand
gaaaccaggaaagcaauga

SEQ ID NO: 1801245 - RNA, 19 nt, Homo sapiens
  misc_RNA (1)...(19): siRNA sense strand
aucaaaggcucaucuguga

SEQ ID NO: 1801246 - RNA, 19 nt, Homo sapiens
  misc_RNA (1)...(19): siRNA sense strand
ugagaaguguuggccauga

SEQ ID NO: 1801247 - RNA, 19 nt, Homo sapiens
  misc_RNA (1)...(19): siRNA sense strand
gaacaagaagacuggagau

SEQ ID NO: 1801248 - RNA, 19 nt, Homo sapiens
  misc_RNA (1)...(19): siRNA sense strand
ccaaauggugucaaauaug

SEQ ID NO: 1801249 - RNA, 19 nt, Homo sapiens
  misc_RNA (1)...(19): siRNA sense strand
aggaaacacuagaaugaga

SEQ ID NO: 1801250 - RNA, 19 nt, Homo sapiens
  misc_RNA (1)...(19): siRNA sense strand
acaagaagacuggagauga

SEQ ID NO: 1801251 - RNA, 19 nt, Homo sapiens
  misc_RNA (1)...(19): siRNA sense strand
accaggaguucaucaauau

SEQ ID NO: 1801252 - RNA, 19 nt, Homo sapiens
  misc_RNA (1)...(19): siRNA sense strand
gaaagugaugcucaugcuu

SEQ ID NO: 1801253 - RNA, 19 nt, Homo sapiens
  misc_RNA (1)...(19): siRNA sense strand
ggacauucauuuuguucuu

SEQ ID NO: 1801254 - RNA, 19 nt, Homo sapiens
  misc_RNA (1)...(19): siRNA sense strand
cauggaaggagaucaaaug

SEQ ID NO: 1801255 - RNA, 19 nt, Homo sapiens
  misc_RNA (1)...(19): siRNA sense strand
aaucguagaggacauaaug

SEQ ID NO: 1801256 - RNA, 19 nt, Homo sapiens
  misc_RNA (1)...(19): siRNA sense strand
gagaaguguuggccaugag

SEQ ID NO: 1801257 - RNA, 19 nt, Homo sapiens
  misc_RNA (1)...(19): siRNA sense strand
gcagaaauuagaaagaaac

SEQ ID NO: 1801258 - RNA, 19 nt, Homo sapiens
  misc_RNA (1)...(19): siRNA sense strand
ggagaugaaccgccaaagg

SEQ ID NO: 1801259 - RNA, 19 nt, Homo sapiens
  misc_RNA (1)...(19): siRNA sense strand
aauaugcgacagaugauaa

SEQ ID NO: 1801260 - RNA, 19 nt, Homo sapiens
  misc_RNA (1)...(19): siRNA sense strand
cauaaucguagaggacaua

SEQ ID NO: 1801261 - RNA, 19 nt, Homo sapiens
  misc_RNA (1)...(19): siRNA sense strand
caaccaggaguucaucaau

SEQ ID NO: 1801262 - RNA, 19 nt, Homo sapiens
  misc_RNA (1)...(19): siRNA sense strand
agaaagaaacuucggucaa

SEQ ID NO: 1801263 - RNA, 19 nt, Homo sapiens
  misc_RNA (1)...(19): siRNA sense strand
acauaaugauggugaagau

SEQ ID NO: 1801264 - RNA, 19 nt, Homo sapiens
  misc_RNA (1)...(19): siRNA sense strand
gguagagggagagcucaua

SEQ ID NO: 1801265 - RNA, 19 nt, Homo sapiens
  misc_RNA (1)...(19): siRNA sense strand
gacaaacuccacaucaaag

SEQ ID NO: 1801266 - RNA, 19 nt, Homo sapiens
  misc_RNA (1)...(19): siRNA sense strand
ccaggaggaauaaaggaaa

SEQ ID NO: 1801267 - RNA, 19 nt, Homo sapiens
  misc_RNA (1)...(19): siRNA sense strand
gaaguguuggccaugagaa

SEQ ID NO: 1801268 - RNA, 19 nt, Homo sapiens
  misc_RNA (1)...(19): siRNA sense strand
uaaugauggugaagauucu

SEQ ID NO: 1801269 - RNA, 19 nt, Homo sapiens
  misc_RNA (1)...(19): siRNA sense strand
ggaaaccaggaaagcaaug

SEQ ID NO: 1801270 - RNA, 19 nt, Homo sapiens
  misc_RNA (1)...(19): siRNA sense strand
agaaacuucggucaacuuu

SEQ ID NO: 1801271 - RNA, 19 nt, Homo sapiens
  misc_RNA (1)...(19): siRNA sense strand
ugagaaacuauaugcagaa

SEQ ID NO: 1801272 - RNA, 19 nt, Homo sapiens
  misc_RNA (1)...(19): siRNA sense strand
gagaaaauaugcgacagau

SEQ ID NO: 1801273 - RNA, 19 nt, Homo sapiens
  misc_RNA (1)...(19): siRNA sense strand
caaaccaggacgacacaau

SEQ ID NO: 1801274 - RNA, 19 nt, Homo sapiens
  misc_RNA (1)...(19): siRNA sense strand
ugaaagugaugcucaugcu

SEQ ID NO: 1801275 - RNA, 19 nt, Homo sapiens
  misc_RNA (1)...(19): siRNA sense strand
agggagagcucauaaucgu

SEQ ID NO: 1801276 - RNA, 19 nt, Homo sapiens
  misc_RNA (1)...(19): siRNA sense strand
ccaggaaagcaaugagaga

SEQ ID NO: 1801277 - RNA, 19 nt, Homo sapiens
  misc_RNA (1)...(19): siRNA sense strand
gaagacuggagaugaagag

SEQ ID NO: 1801278 - RNA, 19 nt, Homo sapiens
  misc_RNA (1)...(19): siRNA sense strand
gcucaucugugaaaagcaa

SEQ ID NO: 1801279 - RNA, 19 nt, Homo sapiens
  misc_RNA (1)...(19): siRNA sense strand
uagaggacauaaugauggu

SEQ ID NO: 1801280 - RNA, 19 nt, Homo sapiens
  misc_RNA (1)...(19): siRNA sense strand
gaaacacuagaaugagaag

SEQ ID NO: 1801281 - RNA, 19 nt, Homo sapiens
  misc_RNA (1)...(19): siRNA sense strand
gagaugaagaggucaacca

SEQ ID NO: 1801282 - RNA, 19 nt, Homo sapiens
  misc_RNA (1)...(19): siRNA sense strand
cuucuucucugaguccauu

SEQ ID NO: 1801283 - RNA, 19 nt, Homo sapiens
  misc_RNA (1)...(19): siRNA sense strand
gagaaaccucaacaaaguc

SEQ ID NO: 1801284 - RNA, 19 nt, Homo sapiens
  misc_RNA (1)...(19): siRNA sense strand
cacaaucuaggaaacacua

SEQ ID NO: 1801285 - RNA, 19 nt, Homo sapiens
  misc_RNA (1)...(19): siRNA sense strand
gacgacacaaucuaggaaa

SEQ ID NO: 1801286 - RNA, 19 nt, Homo sapiens
  misc_RNA (1)...(19): siRNA sense strand
ccagacaauggaccaaaug

SEQ ID NO: 1801287 - RNA, 19 nt, Homo sapiens
  misc_RNA (1)...(19): siRNA sense strand
agggagaaaccucaacaaa

SEQ ID NO: 1801288 - RNA, 19 nt, Homo sapiens
  misc_RNA (1)...(19): siRNA sense strand
gggagagcucauaaucgua

SEQ ID NO: 1801289 - RNA, 19 nt, Homo sapiens
  misc_RNA (1)...(19): siRNA sense strand
gacauaaugauggugaaga

SEQ ID NO: 1801290 - RNA, 19 nt, Homo sapiens
  misc_RNA (1)...(19): siRNA sense strand
gaaagcaaugagagauucu

SEQ ID NO: 1801291 - RNA, 19 nt, Homo sapiens
  misc_RNA (1)...(19): siRNA sense strand
gagagcucauaaucguaga

SEQ ID NO: 1801292 - RNA, 19 nt, Homo sapiens
  misc_RNA (1)...(19): siRNA sense strand
agagggagagcucauaauc

SEQ ID NO: 1801293 - RNA, 19 nt, Homo sapiens
  misc_RNA (1)...(19): siRNA sense strand
aaagaaacuucggucaacu

SEQ ID NO: 1801294 - RNA, 19 nt, Homo sapiens
  misc_RNA (1)...(19): siRNA sense strand
acaaaguccagccauugaa

SEQ ID NO: 1801295 - RNA, 19 nt, Homo sapiens
  misc_RNA (1)...(19): siRNA sense strand
ccgagcucaugucauuaaa

SEQ ID NO: 1801296 - RNA, 19 nt, Homo sapiens
  misc_RNA (1)...(19): siRNA sense strand
ggcuauuggucaucauauc

SEQ ID NO: 1801297 - RNA, 19 nt, Homo sapiens
  misc_RNA (1)...(19): siRNA sense strand
aaauaugcgacagaugaua

SEQ ID NO: 1801298 - RNA, 19 nt, Homo sapiens
  misc_RNA (1)...(19): siRNA sense strand
aaauggcuauuggucauca

SEQ ID NO: 1801299 - RNA, 19 nt, Homo sapiens
  misc_RNA (1)...(19): siRNA sense strand
ccacaucaaaggcucaucu

SEQ ID NO: 1801300 - RNA, 19 nt, Homo sapiens
  misc_RNA (1)...(19): siRNA sense strand
auaaugauggugaagauuc

SEQ ID NO: 1801301 - RNA, 19 nt, Homo sapiens
  misc_RNA (1)...(19): siRNA sense strand
aaaccaggacgacacaauc

SEQ ID NO: 1801302 - RNA, 19 nt, Homo sapiens
  misc_RNA (1)...(19): siRNA sense strand
aaggaaaccaggaaagcaa

SEQ ID NO: 1801303 - RNA, 19 nt, Homo sapiens
  misc_RNA (1)...(19): siRNA sense strand
aacaaaguccagccauuga

SEQ ID NO: 1801304 - RNA, 19 nt, Homo sapiens
  misc_RNA (1)...(19): siRNA sense strand
ugcgacagaugauaagaag

SEQ ID NO: 1801305 - RNA, 19 nt, Homo sapiens
  misc_RNA (1)...(19): siRNA sense strand
cgacacaaucuaggaaaca

SEQ ID NO: 1801306 - RNA, 19 nt, Homo sapiens
  misc_RNA (1)...(19): siRNA sense strand
gaccgagcucaugucauua

SEQ ID NO: 1801307 - RNA, 19 nt, Homo sapiens
  misc_RNA (1)...(19): siRNA sense strand
gaaaggaccucagaagaaa

SEQ ID NO: 1801308 - RNA, 19 nt, Homo sapiens
  misc_RNA (1)...(19): siRNA sense strand
gagcagaucuggaggaaga

SEQ ID NO: 1801309 - RNA, 19 nt, Homo sapiens
  misc_RNA (1)...(19): siRNA sense strand
gaagaaacaauacgcauuu

SEQ ID NO: 1801310 - RNA, 19 nt, Homo sapiens
  misc_RNA (1)...(19): siRNA sense strand
gccauucucuucgaaauua

SEQ ID NO: 1801311 - RNA, 19 nt, Homo sapiens
  misc_RNA (1)...(19): siRNA sense strand
ucaaagacauggauaaaca

SEQ ID NO: 1801312 - RNA, 19 nt, Homo sapiens
  misc_RNA (1)...(19): siRNA sense strand
ugaaguaucucuccgaaug

SEQ ID NO: 1801313 - RNA, 19 nt, Homo sapiens
  misc_RNA (1)...(19): siRNA sense strand
gaggagcacuuucagaguu

SEQ ID NO: 1801314 - RNA, 19 nt, Homo sapiens
  misc_RNA (1)...(19): siRNA sense strand
gagaaccucuucauauugu

SEQ ID NO: 1801315 - RNA, 19 nt, Homo sapiens
  misc_RNA (1)...(19): siRNA sense strand
gaaagcuccuggugaccua

SEQ ID NO: 1801316 - RNA, 19 nt, Homo sapiens
  misc_RNA (1)...(19): siRNA sense strand
gaacuuccuccaagaauug

SEQ ID NO: 1801317 - RNA, 19 nt, Homo sapiens
  misc_RNA (1)...(19): siRNA sense strand
gagcagcuaucccuggaaa

SEQ ID NO: 1801318 - RNA, 19 nt, Homo sapiens
  misc_RNA (1)...(19): siRNA sense strand
gauaaacaauguacagucu

SEQ ID NO: 1801319 - RNA, 19 nt, Homo sapiens
  misc_RNA (1)...(19): siRNA sense strand
caauacgcauuuacucuuu

SEQ ID NO: 1801320 - RNA, 19 nt, Homo sapiens
  misc_RNA (1)...(19): siRNA sense strand
gcaguuccuuucuucauga

SEQ ID NO: 1801321 - RNA, 19 nt, Homo sapiens
  misc_RNA (1)...(19): siRNA sense strand
guuccuuucuucaugauua

SEQ ID NO: 1801322 - RNA, 19 nt, Homo sapiens
  misc_RNA (1)...(19): siRNA sense strand
ggauuauucuccaggcuuu

SEQ ID NO: 1801323 - RNA, 19 nt, Homo sapiens
  misc_RNA (1)...(19): siRNA sense strand
gcaauaauaccucugacaa

SEQ ID NO: 1801324 - RNA, 19 nt, Homo sapiens
  misc_RNA (1)...(19): siRNA sense strand
agagaaggcucgagagaug

SEQ ID NO: 1801325 - RNA, 19 nt, Homo sapiens
  misc_RNA (1)...(19): siRNA sense strand
ugaucacgcuggccaauuu

SEQ ID NO: 1801326 - RNA, 19 nt, Homo sapiens
  misc_RNA (1)...(19): siRNA sense strand
gaacuucaccuaugaucug

SEQ ID NO: 1801327 - RNA, 19 nt, Homo sapiens
  misc_RNA (1)...(19): siRNA sense strand
ggagaacgacuguccauuc

SEQ ID NO: 1801328 - RNA, 19 nt, Homo sapiens
  misc_RNA (1)...(19): siRNA sense strand
guucuggacucauuuacuu

SEQ ID NO: 1801329 - RNA, 19 nt, Homo sapiens
  misc_RNA (1)...(19): siRNA sense strand
gaaauuaugcacugaacau

SEQ ID NO: 1801330 - RNA, 19 nt, Homo sapiens
  misc_RNA (1)...(19): siRNA sense strand
caauauacguagcaacugu

SEQ ID NO: 1801331 - RNA, 19 nt, Homo sapiens
  misc_RNA (1)...(19): siRNA sense strand
gaugacacaugugaccuuu

SEQ ID NO: 1801332 - RNA, 19 nt, Homo sapiens
  misc_RNA (1)...(19): siRNA sense strand
cagcauagaagggaaauuu

SEQ ID NO: 1801333 - RNA, 19 nt, Homo sapiens
  misc_RNA (1)...(19): siRNA sense strand
gacauuacaccauugauga

SEQ ID NO: 1801334 - RNA, 19 nt, Homo sapiens
  misc_RNA (1)...(19): siRNA sense strand
uaaagccaaccgacucuua

SEQ ID NO: 1801335 - RNA, 19 nt, Homo sapiens
  misc_RNA (1)...(19): siRNA sense strand
gaaaucgacaagaugguuu

SEQ ID NO: 1801336 - RNA, 19 nt, Homo sapiens
  misc_RNA (1)...(19): siRNA sense strand
gaccucagaagaaacaaua

SEQ ID NO: 1801337 - RNA, 19 nt, Homo sapiens
  misc_RNA (1)...(19): siRNA sense strand
agacacaaaugaaguaucu

SEQ ID NO: 1801338 - RNA, 19 nt, Homo sapiens
  misc_RNA (1)...(19): siRNA sense strand
gaaauguacaagcugauga

SEQ ID NO: 1801339 - RNA, 19 nt, Homo sapiens
  misc_RNA (1)...(19): siRNA sense strand
uuacggacauuacaccauu

SEQ ID NO: 1801340 - RNA, 19 nt, Homo sapiens
  misc_RNA (1)...(19): siRNA sense strand
ggacauccgcagcauagaa

SEQ ID NO: 1801341 - RNA, 19 nt, Homo sapiens
  misc_RNA (1)...(19): siRNA sense strand
ggacauuacaccauugaug

SEQ ID NO: 1801342 - RNA, 19 nt, Homo sapiens
  misc_RNA (1)...(19): siRNA sense strand
uaucuaccgucuauuguga

SEQ ID NO: 1801343 - RNA, 19 nt, Homo sapiens
  misc_RNA (1)...(19): siRNA sense strand
agaaaggaccucagaagaa

SEQ ID NO: 1801344 - RNA, 19 nt, Homo sapiens
  misc_RNA (1)...(19): siRNA sense strand
gcaguucuggacucauuua

SEQ ID NO: 1801345 - RNA, 19 nt, Homo sapiens
  misc_RNA (1)...(19): siRNA sense strand
aaagggacaugaggaacua

SEQ ID NO: 1801346 - RNA, 19 nt, Homo sapiens
  misc_RNA (1)...(19): siRNA sense strand
aaaggucgguggaaggauu

SEQ ID NO: 1801347 - RNA, 19 nt, Homo sapiens
  misc_RNA (1)...(19): siRNA sense strand
ugaacuuccuccaagaauu

SEQ ID NO: 1801348 - RNA, 19 nt, Homo sapiens
  misc_RNA (1)...(19): siRNA sense strand
aauaauaccucugacaauc

SEQ ID NO: 1801349 - RNA, 19 nt, Homo sapiens
  misc_RNA (1)...(19): siRNA sense strand
gaaagaaugcggcagaaaa

SEQ ID NO: 1801350 - RNA, 19 nt, Homo sapiens
  misc_RNA (1)...(19): siRNA sense strand
gaaauuuggcacugggauu

SEQ ID NO: 1801351 - RNA, 19 nt, Homo sapiens
  misc_RNA (1)...(19): siRNA sense strand
aagcaguucuggacucauu

SEQ ID NO: 1801352 - RNA, 19 nt, Homo sapiens
  misc_RNA (1)...(19): siRNA sense strand
uguacaagcugaugaucuu

SEQ ID NO: 1801353 - RNA, 19 nt, Homo sapiens
  misc_RNA (1)...(19): siRNA sense strand
gaaacaauacgcauuuacu

SEQ ID NO: 1801354 - RNA, 19 nt, Homo sapiens
  misc_RNA (1)...(19): siRNA sense strand
gcagaaaggaccucagaag

SEQ ID NO: 1801355 - RNA, 19 nt, Homo sapiens
  misc_RNA (1)...(19): siRNA sense strand
cagaguuacugcaacaaga

SEQ ID NO: 1801356 - RNA, 19 nt, Homo sapiens
  misc_RNA (1)...(19): siRNA sense strand
uuucagaacuucaccuaug

SEQ ID NO: 1801357 - RNA, 19 nt, Homo sapiens
  misc_RNA (1)...(19): siRNA sense strand
ggaaaucgacaagaugguu

SEQ ID NO: 1801358 - RNA, 19 nt, Homo sapiens
  misc_RNA (1)...(19): siRNA sense strand
gaucuucgacuucaucauc

SEQ ID NO: 1801359 - RNA, 19 nt, Homo sapiens
  misc_RNA (1)...(19): siRNA sense strand
gggcuguguuuggcaauaa

SEQ ID NO: 1801360 - RNA, 19 nt, Homo sapiens
  misc_RNA (1)...(19): siRNA sense strand
cagucuuacucacgaaaua

SEQ ID NO: 1801361 - RNA, 19 nt, Homo sapiens
  misc_RNA (1)...(19): siRNA sense strand
cgugacaagugcuaccuaa

SEQ ID NO: 1801362 - RNA, 19 nt, Homo sapiens
  misc_RNA (1)...(19): siRNA sense strand
gaguuugccauuccugaua

SEQ ID NO: 1801363 - RNA, 19 nt, Homo sapiens
  misc_RNA (1)...(19): siRNA sense strand
cgaaauacaagaucaccaa

SEQ ID NO: 1801364 - RNA, 19 nt, Homo sapiens
  misc_RNA (1)...(19): siRNA sense strand
guaagcaguucuggacuca

SEQ ID NO: 1801365 - RNA, 19 nt, Homo sapiens
  misc_RNA (1)...(19): siRNA sense strand
cagaaaggaccucagaaga

SEQ ID NO: 1801366 - RNA, 19 nt, Homo sapiens
  misc_RNA (1)...(19): siRNA sense strand
gaggacauccgcagcauag

SEQ ID NO: 1801367 - RNA, 19 nt, Homo sapiens
  misc_RNA (1)...(19): siRNA sense strand
uaccuaauccagaaacuaa

SEQ ID NO: 1801368 - RNA, 19 nt, Homo sapiens
  misc_RNA (1)...(19): siRNA sense strand
uauuguaucuaccgucuau

SEQ ID NO: 1801369 - RNA, 19 nt, Homo sapiens
  misc_RNA (1)...(19): siRNA sense strand
gggauucaguccuauuucu

SEQ ID NO: 1801370 - RNA, 19 nt, Homo sapiens
  misc_RNA (1)...(19): siRNA sense strand
gaaccucuucauauuguau

SEQ ID NO: 1801371 - RNA, 19 nt, Homo sapiens
  misc_RNA (1)...(19): siRNA sense strand
aggagcacuuucagaguua

SEQ ID NO: 1801372 - RNA, 19 nt, Homo sapiens
  misc_RNA (1)...(19): siRNA sense strand
gaucaucuuuaugcugguu

SEQ ID NO: 1801373 - RNA, 19 nt, Homo sapiens
  misc_RNA (1)...(19): siRNA sense strand
acgcaucccuuccucgaaa

SEQ ID NO: 1801374 - RNA, 19 nt, Homo sapiens
  misc_RNA (1)...(19): siRNA sense strand
guucagagcauccaauucu

SEQ ID NO: 1801375 - RNA, 19 nt, Homo sapiens
  misc_RNA (1)...(19): siRNA sense strand
gcaauugcaacccugaaau

SEQ ID NO: 1801376 - RNA, 19 nt, Homo sapiens
  misc_RNA (1)...(19): siRNA sense strand
ugacacucuucguggauuu

SEQ ID NO: 1801377 - RNA, 19 nt, Homo sapiens
  misc_RNA (1)...(19): siRNA sense strand
ugacaauccuuaggugugu

SEQ ID NO: 1801378 - RNA, 19 nt, Homo sapiens
  misc_RNA (1)...(19): siRNA sense strand
gcccugagccuucuuugga

SEQ ID NO: 1801379 - RNA, 19 nt, Homo sapiens
  misc_RNA (1)...(19): siRNA sense strand
uguacagucuauccaguaa

SEQ ID NO: 1801380 - RNA, 19 nt, Homo sapiens
  misc_RNA (1)...(19): siRNA sense strand
caagagacacaaaugaagu

SEQ ID NO: 1801381 - RNA, 19 nt, Homo sapiens
  misc_RNA (1)...(19): siRNA sense strand
ucagagcauccaauucuaa

SEQ ID NO: 1801382 - RNA, 19 nt, Homo sapiens
  misc_RNA (1)...(19): siRNA sense strand
gagaacgacuguccauucc

SEQ ID NO: 1801383 - RNA, 19 nt, Homo sapiens
  misc_RNA (1)...(19): siRNA sense strand
gaagagguuccuagagaag

SEQ ID NO: 1801384 - RNA, 19 nt, Homo sapiens
  misc_RNA (1)...(19): siRNA sense strand
ggaggacauccgcagcaua

SEQ ID NO: 1801385 - RNA, 19 nt, Homo sapiens
  misc_RNA (1)...(19): siRNA sense strand
ugacaagugcuaccuaauc

SEQ ID NO: 1801386 - RNA, 19 nt, Homo sapiens
  misc_RNA (1)...(19): siRNA sense strand
ugacacaugugaccuuugc

SEQ ID NO: 1801387 - RNA, 19 nt, Homo sapiens
  misc_RNA (1)...(19): siRNA sense strand
ccugagccuucuuuggaua

SEQ ID NO: 1801388 - RNA, 19 nt, Homo sapiens
  misc_RNA (1)...(19): siRNA sense strand
gcuucgugcucauuccuuu

SEQ ID NO: 1801389 - RNA, 19 nt, Homo sapiens
  misc_RNA (1)...(19): siRNA sense strand
ccauauguguccugguguu

SEQ ID NO: 1801390 - RNA, 19 nt, Homo sapiens
  misc_RNA (1)...(19): siRNA sense strand
uuauuugccucaucauguu

SEQ ID NO: 1801391 - RNA, 19 nt, Homo sapiens
  misc_RNA (1)...(19): siRNA sense strand
caauaauaccucugacaau

SEQ ID NO: 1801392 - RNA, 19 nt, Homo sapiens
  misc_RNA (1)...(19): siRNA sense strand
ggaaauguacaagcugaug

SEQ ID NO: 1801393 - RNA, 19 nt, Homo sapiens
  misc_RNA (1)...(19): siRNA sense strand
cagcagccauucucuucga

SEQ ID NO: 1801394 - RNA, 19 nt, Homo sapiens
  misc_RNA (1)...(19): siRNA sense strand
gacaagugcuaccuaaucc

SEQ ID NO: 1801395 - RNA, 19 nt, Homo sapiens
  misc_RNA (1)...(19): siRNA sense strand
ugucacauccgaagccuuu

SEQ ID NO: 1801396 - RNA, 19 nt, Homo sapiens
  misc_RNA (1)...(19): siRNA sense strand
acgcugggcuccaagauca

SEQ ID NO: 1801397 - RNA, 19 nt, Homo sapiens
  misc_RNA (1)...(19): siRNA sense strand
ccauugaugaggugaaauu

SEQ ID NO: 1801398 - RNA, 19 nt, Homo sapiens
  misc_RNA (1)...(19): siRNA sense strand
gcauagaagggaaauuugg

SEQ ID NO: 1801399 - RNA, 19 nt, Homo sapiens
  misc_RNA (1)...(19): siRNA sense strand
cagcaggaguuugccauuc

SEQ ID NO: 1801400 - RNA, 19 nt, Homo sapiens
  misc_RNA (1)...(19): siRNA sense strand
uccaagaauugccaagcua

SEQ ID NO: 1801401 - RNA, 19 nt, Homo sapiens
  misc_RNA (1)...(19): siRNA sense strand
gaguuacugcaacaagaua

SEQ ID NO: 1801402 - RNA, 19 nt, Homo sapiens
  misc_RNA (1)...(19): siRNA sense strand
caaagacauggauaaacaa

SEQ ID NO: 1801403 - RNA, 19 nt, Homo sapiens
  misc_RNA (1)...(19): siRNA sense strand
ucugagaagcggagacuaa

SEQ ID NO: 1801404 - RNA, 19 nt, Homo sapiens
  misc_RNA (1)...(19): siRNA sense strand
gcuacaaccagaaacucua

SEQ ID NO: 1801405 - RNA, 19 nt, Homo sapiens
  misc_RNA (1)...(19): siRNA sense strand
aaaaggaaaucgacaagau

SEQ ID NO: 1801406 - RNA, 19 nt, Homo sapiens
  misc_RNA (1)...(19): siRNA sense strand
aagaguggagucugcuuua

SEQ ID NO: 1801407 - RNA, 19 nt, Homo sapiens
  misc_RNA (1)...(19): siRNA sense strand
gagaauagaugacucaaag

SEQ ID NO: 1801408 - RNA, 19 nt, Homo sapiens
  misc_RNA (1)...(19): siRNA sense strand
ugacagauaugaagacuau

SEQ ID NO: 1801409 - RNA, 19 nt, Homo sapiens
  misc_RNA (1)...(19): siRNA sense strand
gaagaauucggguggauua

SEQ ID NO: 1801410 - RNA, 19 nt, Homo sapiens
  misc_RNA (1)...(19): siRNA sense strand
gaucauauacaccagaaua

SEQ ID NO: 1801411 - RNA, 19 nt, Homo sapiens
  misc_RNA (1)...(19): siRNA sense strand
gaucaccuucuccuuauua

SEQ ID NO: 1801412 - RNA, 19 nt, Homo sapiens
  misc_RNA (1)...(19): siRNA sense strand
cgaaggagccgaagccauu

SEQ ID NO: 1801413 - RNA, 19 nt, Homo sapiens
  misc_RNA (1)...(19): siRNA sense strand
gacgaucaccuucuccuua

SEQ ID NO: 1801414 - RNA, 19 nt, Homo sapiens
  misc_RNA (1)...(19): siRNA sense strand
ggaaagggcaaauggaaug

SEQ ID NO: 1801415 - RNA, 19 nt, Homo sapiens
  misc_RNA (1)...(19): siRNA sense strand
ggagcuggaugguagaaga

SEQ ID NO: 1801416 - RNA, 19 nt, Homo sapiens
  misc_RNA (1)...(19): siRNA sense strand
gcagacgucgagauucuua

SEQ ID NO: 1801417 - RNA, 19 nt, Homo sapiens
  misc_RNA (1)...(19): siRNA sense strand
gaauagaugacucaaagga

SEQ ID NO: 1801418 - RNA, 19 nt, Homo sapiens
  misc_RNA (1)...(19): siRNA sense strand
gauaugaucguggguauga

SEQ ID NO: 1801419 - RNA, 19 nt, Homo sapiens
  misc_RNA (1)...(19): siRNA sense strand
cgaaguagaucauauacac

SEQ ID NO: 1801420 - RNA, 19 nt, Homo sapiens
  misc_RNA (1)...(19): siRNA sense strand
ucaaugugguuuaugauca

SEQ ID NO: 1801421 - RNA, 19 nt, Homo sapiens
  misc_RNA (1)...(19): siRNA sense strand
caaaggaggcuauggaaag

SEQ ID NO: 1801422 - RNA, 19 nt, Homo sapiens
  misc_RNA (1)...(19): siRNA sense strand
cgagauucuuacuaugaua

SEQ ID NO: 1801423 - RNA, 19 nt, Homo sapiens
  misc_RNA (1)...(19): siRNA sense strand
ucggguggauuauucuaua

SEQ ID NO: 1801424 - RNA, 19 nt, Homo sapiens
  misc_RNA (1)...(19): siRNA sense strand
agagagggaucuucgugaa

SEQ ID NO: 1801425 - RNA, 19 nt, Homo sapiens
  misc_RNA (1)...(19): siRNA sense strand
ggaauggagcuggauggua

SEQ ID NO: 1801426 - RNA, 19 nt, Homo sapiens
  misc_RNA (1)...(19): siRNA sense strand
cguaguccaucaaggguuu

SEQ ID NO: 1801427 - RNA, 19 nt, Homo sapiens
  misc_RNA (1)...(19): siRNA sense strand
gacauucucauagacguua

SEQ ID NO: 1801428 - RNA, 19 nt, Homo sapiens
  misc_RNA (1)...(19): siRNA sense strand
ugggcgaucucgaggauuu

SEQ ID NO: 1801429 - RNA, 19 nt, Homo sapiens
  misc_RNA (1)...(19): siRNA sense strand
gugucaaugugguuuauga

SEQ ID NO: 1801430 - RNA, 19 nt, Homo sapiens
  misc_RNA (1)...(19): siRNA sense strand
gcuggaugguagaagaauu

SEQ ID NO: 1801431 - RNA, 19 nt, Homo sapiens
  misc_RNA (1)...(19): siRNA sense strand
uagaucauauacaccagaa

SEQ ID NO: 1801432 - RNA, 19 nt, Homo sapiens
  misc_RNA (1)...(19): siRNA sense strand
ucucgaaguagaucauaua

SEQ ID NO: 1801433 - RNA, 19 nt, Homo sapiens
  misc_RNA (1)...(19): siRNA sense strand
acagauaugaagacuauga

SEQ ID NO: 1801434 - RNA, 19 nt, Homo sapiens
  misc_RNA (1)...(19): siRNA sense strand
gagucucgcucucagucaa

SEQ ID NO: 1801435 - RNA, 19 nt, Homo sapiens
  misc_RNA (1)...(19): siRNA sense strand
caccuucuccuuauuauag

SEQ ID NO: 1801436 - RNA, 19 nt, Homo sapiens
  misc_RNA (1)...(19): siRNA sense strand
gaacuccugcucguguaaa

SEQ ID NO: 1801437 - RNA, 19 nt, Homo sapiens
  misc_RNA (1)...(19): siRNA sense strand
agacuaugauuaccgauac

SEQ ID NO: 1801438 - RNA, 19 nt, Homo sapiens
  misc_RNA (1)...(19): siRNA sense strand
gaucguggguaugacagau

SEQ ID NO: 1801439 - RNA, 19 nt, Homo sapiens
  misc_RNA (1)...(19): siRNA sense strand
gguggcagacgucgagauu

SEQ ID NO: 1801440 - RNA, 19 nt, Homo sapiens
  misc_RNA (1)...(19): siRNA sense strand
acgaucaccuucuccuuau

SEQ ID NO: 1801441 - RNA, 19 nt, Homo sapiens
  misc_RNA (1)...(19): siRNA sense strand
gcaaauccagaucccaaca

SEQ ID NO: 1801442 - RNA, 19 nt, Homo sapiens
  misc_RNA (1)...(19): siRNA sense strand
gucgagauucuuacuauga

SEQ ID NO: 1801443 - RNA, 19 nt, Homo sapiens
  misc_RNA (1)...(19): siRNA sense strand
ucaaaggaggcuauggaaa

SEQ ID NO: 1801444 - RNA, 19 nt, Homo sapiens
  misc_RNA (1)...(19): siRNA sense strand
uggcagacgucgagauucu

SEQ ID NO: 1801445 - RNA, 19 nt, Homo sapiens
  misc_RNA (1)...(19): siRNA sense strand
gguaugacagauaugaaga

SEQ ID NO: 1801446 - RNA, 19 nt, Homo sapiens
  misc_RNA (1)...(19): siRNA sense strand
uaugauagaggauaugauc

SEQ ID NO: 1801447 - RNA, 19 nt, Homo sapiens
  misc_RNA (1)...(19): siRNA sense strand
gagcuggaugguagaagaa

SEQ ID NO: 1801448 - RNA, 19 nt, Homo sapiens
  misc_RNA (1)...(19): siRNA sense strand
caagaucucguuccuacag

SEQ ID NO: 1801449 - RNA, 19 nt, Homo sapiens
  misc_RNA (1)...(19): siRNA sense strand
ucuaaccggagaagacaua

SEQ ID NO: 1801450 - RNA, 19 nt, Homo sapiens
  misc_RNA (1)...(19): siRNA sense strand
gggcagaccaacucauagu

SEQ ID NO: 1801451 - RNA, 19 nt, Homo sapiens
  misc_RNA (1)...(19): siRNA sense strand
cauagacguuacacucgau

SEQ ID NO: 1801452 - RNA, 19 nt, Homo sapiens
  misc_RNA (1)...(19): siRNA sense strand
uaugauuaccgauacagaa

SEQ ID NO: 1801453 - RNA, 19 nt, Homo sapiens
  misc_RNA (1)...(19): siRNA sense strand
aaaggaggcuauggaaagg

SEQ ID NO: 1801454 - RNA, 19 nt, Homo sapiens
  misc_RNA (1)...(19): siRNA sense strand
gaaguauuuucucgauaug

SEQ ID NO: 1801455 - RNA, 19 nt, Homo sapiens
  misc_RNA (1)...(19): siRNA sense strand
ucgagauucuuacuaugau

SEQ ID NO: 1801456 - RNA, 19 nt, Homo sapiens
  misc_RNA (1)...(19): siRNA sense strand
caaugugguuuaugaucag

SEQ ID NO: 1801457 - RNA, 19 nt, Homo sapiens
  misc_RNA (1)...(19): siRNA sense strand
uagaagaauucggguggau

SEQ ID NO: 1801458 - RNA, 19 nt, Homo sapiens
  misc_RNA (1)...(19): siRNA sense strand
cgaucaccuucuccuuauu

SEQ ID NO: 1801459 - RNA, 19 nt, Homo sapiens
  misc_RNA (1)...(19): siRNA sense strand
ggagagcaggucaggaucu

SEQ ID NO: 1801460 - RNA, 19 nt, Homo sapiens
  misc_RNA (1)...(19): siRNA sense strand
gauuaccgauacagaagac

SEQ ID NO: 1801461 - RNA, 19 nt, Homo sapiens
  misc_RNA (1)...(19): siRNA sense strand
gaaggagccgaagccauuc

SEQ ID NO: 1801462 - RNA, 19 nt, Homo sapiens
  misc_RNA (1)...(19): siRNA sense strand
uacagaagacgaucaccuu

SEQ ID NO: 1801463 - RNA, 19 nt, Homo sapiens
  misc_RNA (1)...(19): siRNA sense strand
aagacuaugauuaccgaua

SEQ ID NO: 1801464 - RNA, 19 nt, Homo sapiens
  misc_RNA (1)...(19): siRNA sense strand
cgucgagauucuuacuaug

SEQ ID NO: 1801465 - RNA, 19 nt, Homo sapiens
  misc_RNA (1)...(19): siRNA sense strand
acgucgagauucuuacuau

SEQ ID NO: 1801466 - RNA, 19 nt, Homo sapiens
  misc_RNA (1)...(19): siRNA sense strand
gaucucgaggauuugcuuu

SEQ ID NO: 1801467 - RNA, 19 nt, Homo sapiens
  misc_RNA (1)...(19): siRNA sense strand
ucaccuucuccuuauuaua

SEQ ID NO: 1801468 - RNA, 19 nt, Homo sapiens
  misc_RNA (1)...(19): siRNA sense strand
caacaccaggcaucuacau

SEQ ID NO: 1801469 - RNA, 19 nt, Homo sapiens
  misc_RNA (1)...(19): siRNA sense strand
gaaagggcaaauggaaugg

SEQ ID NO: 1801470 - RNA, 19 nt, Homo sapiens
  misc_RNA (1)...(19): siRNA sense strand
cagcagggcaaauccagau

SEQ ID NO: 1801471 - RNA, 19 nt, Homo sapiens
  misc_RNA (1)...(19): siRNA sense strand
uguuuggccucaguuugua

SEQ ID NO: 1801472 - RNA, 19 nt, Homo sapiens
  misc_RNA (1)...(19): siRNA sense strand
agaauucggguggauuauu

SEQ ID NO: 1801473 - RNA, 19 nt, Homo sapiens
  misc_RNA (1)...(19): siRNA sense strand
aggauaugaucguggguau

SEQ ID NO: 1801474 - RNA, 19 nt, Homo sapiens
  misc_RNA (1)...(19): siRNA sense strand
auccagaucccaacacuug

SEQ ID NO: 1801475 - RNA, 19 nt, Homo sapiens
  misc_RNA (1)...(19): siRNA sense strand
guguuuggccucaguuugu

SEQ ID NO: 1801476 - RNA, 19 nt, Homo sapiens
  misc_RNA (1)...(19): siRNA sense strand
ucagcgaacugggcgaucu

SEQ ID NO: 1801477 - RNA, 19 nt, Homo sapiens
  misc_RNA (1)...(19): siRNA sense strand
cuacagcccaagacgcuau

SEQ ID NO: 1801478 - RNA, 19 nt, Homo sapiens
  misc_RNA (1)...(19): siRNA sense strand
cacucucacucucauagga

SEQ ID NO: 1801479 - RNA, 19 nt, Homo sapiens
  misc_RNA (1)...(19): siRNA sense strand
ggacaucucugaucaagaa

SEQ ID NO: 1801480 - RNA, 19 nt, Homo sapiens
  misc_RNA (1)...(19): siRNA sense strand
uaacaaggauucccaguaa

SEQ ID NO: 1801481 - RNA, 19 nt, Homo sapiens
  misc_RNA (1)...(19): siRNA sense strand
gauagucgcugguuugauu

SEQ ID NO: 1801482 - RNA, 19 nt, Homo sapiens
  misc_RNA (1)...(19): siRNA sense strand
gaacaacaaugccuugaau

SEQ ID NO: 1801483 - RNA, 19 nt, Homo sapiens
  misc_RNA (1)...(19): siRNA sense strand
gaacagugccucccaauga

SEQ ID NO: 1801484 - RNA, 19 nt, Homo sapiens
  misc_RNA (1)...(19): siRNA sense strand
gaacugggaaucaacaaua

SEQ ID NO: 1801485 - RNA, 19 nt, Homo sapiens
  misc_RNA (1)...(19): siRNA sense strand
gaaauucgucccugguuua

SEQ ID NO: 1801486 - RNA, 19 nt, Homo sapiens
  misc_RNA (1)...(19): siRNA sense strand
ccaguaaccucucuaguga

SEQ ID NO: 1801487 - RNA, 19 nt, Homo sapiens
  misc_RNA (1)...(19): siRNA sense strand
uuaccgagaugacugauua

SEQ ID NO: 1801488 - RNA, 19 nt, Homo sapiens
  misc_RNA (1)...(19): siRNA sense strand
gaacuagauuucucccaaa

SEQ ID NO: 1801489 - RNA, 19 nt, Homo sapiens
  misc_RNA (1)...(19): siRNA sense strand
caacuugacugaacuagau

SEQ ID NO: 1801490 - RNA, 19 nt, Homo sapiens
  misc_RNA (1)...(19): siRNA sense strand
uauagcagcuugccaauug

SEQ ID NO: 1801491 - RNA, 19 nt, Homo sapiens
  misc_RNA (1)...(19): siRNA sense strand
ucacaacgcugcauuugga

SEQ ID NO: 1801492 - RNA, 19 nt, Homo sapiens
  misc_RNA (1)...(19): siRNA sense strand
cgagaugacugauuacugu

SEQ ID NO: 1801493 - RNA, 19 nt, Homo sapiens
  misc_RNA (1)...(19): siRNA sense strand
gcuaugcccuggauaacuu

SEQ ID NO: 1801494 - RNA, 19 nt, Homo sapiens
  misc_RNA (1)...(19): siRNA sense strand
uaacuugccugaacucaca

SEQ ID NO: 1801495 - RNA, 19 nt, Homo sapiens
  misc_RNA (1)...(19): siRNA sense strand
gcuaggaugagcuuuguua

SEQ ID NO: 1801496 - RNA, 19 nt, Homo sapiens
  misc_RNA (1)...(19): siRNA sense strand
aaacuaccaccacucauua

SEQ ID NO: 1801497 - RNA, 19 nt, Homo sapiens
  misc_RNA (1)...(19): siRNA sense strand
gaaaguuaauuccaauguc

SEQ ID NO: 1801498 - RNA, 19 nt, Homo sapiens
  misc_RNA (1)...(19): siRNA sense strand
gaccuccgcuuaacaagga

SEQ ID NO: 1801499 - RNA, 19 nt, Homo sapiens
  misc_RNA (1)...(19): siRNA sense strand
uuaguguccuggaaaguua

SEQ ID NO: 1801500 - RNA, 19 nt, Homo sapiens
  misc_RNA (1)...(19): siRNA sense strand
caacuuugcguaugugaaa

SEQ ID NO: 1801501 - RNA, 19 nt, Homo sapiens
  misc_RNA (1)...(19): siRNA sense strand
gcaaugaccuccgcuuaac

SEQ ID NO: 1801502 - RNA, 19 nt, Homo sapiens
  misc_RNA (1)...(19): siRNA sense strand
caccugaacuccaacaaau

SEQ ID NO: 1801503 - RNA, 19 nt, Homo sapiens
  misc_RNA (1)...(19): siRNA sense strand
gccagaaccugaaauuuac

SEQ ID NO: 1801504 - RNA, 19 nt, Homo sapiens
  misc_RNA (1)...(19): siRNA sense strand
gaacuccaacaaauugaaa

SEQ ID NO: 1801505 - RNA, 19 nt, Homo sapiens
  misc_RNA (1)...(19): siRNA sense strand
ugaaauucgucccugguuu

SEQ ID NO: 1801506 - RNA, 19 nt, Homo sapiens
  misc_RNA (1)...(19): siRNA sense strand
gucaugacgucaaacuuaa

SEQ ID NO: 1801507 - RNA, 19 nt, Homo sapiens
  misc_RNA (1)...(19): siRNA sense strand
agccagaaccugaaauuua

SEQ ID NO: 1801508 - RNA, 19 nt, Homo sapiens
  misc_RNA (1)...(19): siRNA sense strand
ugauaacccucacauaaca

SEQ ID NO: 1801509 - RNA, 19 nt, Homo sapiens
  misc_RNA (1)...(19): siRNA sense strand
ccaaugucaugacgucaaa

SEQ ID NO: 1801510 - RNA, 19 nt, Homo sapiens
  misc_RNA (1)...(19): siRNA sense strand
gugcugggccuacuaauga

SEQ ID NO: 1801511 - RNA, 19 nt, Homo sapiens
  misc_RNA (1)...(19): siRNA sense strand
acagucaacuuacagagaa

SEQ ID NO: 1801512 - RNA, 19 nt, Homo sapiens
  misc_RNA (1)...(19): siRNA sense strand
ugucaugacgucaaacuua

SEQ ID NO: 1801513 - RNA, 19 nt, Homo sapiens
  misc_RNA (1)...(19): siRNA sense strand
caaccaaauuagcacuauu

SEQ ID NO: 1801514 - RNA, 19 nt, Homo sapiens
  misc_RNA (1)...(19): siRNA sense strand
cacgacagcuucccaaauc

SEQ ID NO: 1801515 - RNA, 19 nt, Homo sapiens
  misc_RNA (1)...(19): siRNA sense strand
gaugacugauuacugucua

SEQ ID NO: 1801516 - RNA, 19 nt, Homo sapiens
  misc_RNA (1)...(19): siRNA sense strand
gaagcuauuacauguggua

SEQ ID NO: 1801517 - RNA, 19 nt, Homo sapiens
  misc_RNA (1)...(19): siRNA sense strand
ucacucccauuggaaauaa

SEQ ID NO: 1801518 - RNA, 19 nt, Homo sapiens
  misc_RNA (1)...(19): siRNA sense strand
gaugagcuuuguuauagca

SEQ ID NO: 1801519 - RNA, 19 nt, Homo sapiens
  misc_RNA (1)...(19): siRNA sense strand
caacccaggucgacacauc

SEQ ID NO: 1801520 - RNA, 19 nt, Homo sapiens
  misc_RNA (1)...(19): siRNA sense strand
gccaaaagauuuaagagaa

SEQ ID NO: 1801521 - RNA, 19 nt, Homo sapiens
  misc_RNA (1)...(19): siRNA sense strand
guccauugcuguguacuuu

SEQ ID NO: 1801522 - RNA, 19 nt, Homo sapiens
  misc_RNA (1)...(19): siRNA sense strand
gcguaaaugucacaaccaa

SEQ ID NO: 1801523 - RNA, 19 nt, Homo sapiens
  misc_RNA (1)...(19): siRNA sense strand
aggaugagcuuuguuauag

SEQ ID NO: 1801524 - RNA, 19 nt, Homo sapiens
  misc_RNA (1)...(19): siRNA sense strand
ucaaaccccucgcaaauuu

SEQ ID NO: 1801525 - RNA, 19 nt, Homo sapiens
  misc_RNA (1)...(19): siRNA sense strand
caauaacccuaaacucucu

SEQ ID NO: 1801526 - RNA, 19 nt, Homo sapiens
  misc_RNA (1)...(19): siRNA sense strand
gagaagccaccacuguuga

SEQ ID NO: 1801527 - RNA, 19 nt, Homo sapiens
  misc_RNA (1)...(19): siRNA sense strand
cagucgauguccaugaaua

SEQ ID NO: 1801528 - RNA, 19 nt, Homo sapiens
  misc_RNA (1)...(19): siRNA sense strand
gauaucggcacgacgguuu

SEQ ID NO: 1801529 - RNA, 19 nt, Homo sapiens
  misc_RNA (1)...(19): siRNA sense strand
cacaagugcuucucuuaca

SEQ ID NO: 1801530 - RNA, 19 nt, Homo sapiens
  misc_RNA (1)...(19): siRNA sense strand
gcuugaugcugaacaacaa

SEQ ID NO: 1801531 - RNA, 19 nt, Homo sapiens
  misc_RNA (1)...(19): siRNA sense strand
uauuaaggcuccaccugaa

SEQ ID NO: 1801532 - RNA, 19 nt, Homo sapiens
  misc_RNA (1)...(19): siRNA sense strand
ugacugaacuagauuucuc

SEQ ID NO: 1801533 - RNA, 19 nt, Homo sapiens
  misc_RNA (1)...(19): siRNA sense strand
cauacaaauugaagacuca

SEQ ID NO: 1801534 - RNA, 19 nt, Homo sapiens
  misc_RNA (1)...(19): siRNA sense strand
cgugagaucaguauccaua

SEQ ID NO: 1801535 - RNA, 19 nt, Homo sapiens
  misc_RNA (1)...(19): siRNA sense strand
uaggaugagcuuuguuaua

SEQ ID NO: 1801536 - RNA, 19 nt, Homo sapiens
  misc_RNA (1)...(19): siRNA sense strand
uaaaagaacugggaaucaa

SEQ ID NO: 1801537 - RNA, 19 nt, Homo sapiens
  misc_RNA (1)...(19): siRNA sense strand
uccagaagcuauuacaugu

SEQ ID NO: 1801538 - RNA, 19 nt, Homo sapiens
  misc_RNA (1)...(19): siRNA sense strand
guccaugaauacaaccuaa

SEQ ID NO: 1801539 - RNA, 19 nt, Homo sapiens
  misc_RNA (1)...(19): siRNA sense strand
uaagauaacuguggaaacc

SEQ ID NO: 1801540 - RNA, 19 nt, Homo sapiens
  misc_RNA (1)...(19): siRNA sense strand
uaaccucucuagugacaca

SEQ ID NO: 1801541 - RNA, 19 nt, Homo sapiens
  misc_RNA (1)...(19): siRNA sense strand
cgacacauccagaagcuau

SEQ ID NO: 1801542 - RNA, 19 nt, Homo sapiens
  misc_RNA (1)...(19): siRNA sense strand
ggaaggugacagcgagaaa

SEQ ID NO: 1801543 - RNA, 19 nt, Homo sapiens
  misc_RNA (1)...(19): siRNA sense strand
ugauuggaauucuggauau

SEQ ID NO: 1801544 - RNA, 19 nt, Homo sapiens
  misc_RNA (1)...(19): siRNA sense strand
caucaaccacaaccaaauu

SEQ ID NO: 1801545 - RNA, 19 nt, Homo sapiens
  misc_RNA (1)...(19): siRNA sense strand
ccgcuuggcuuuccgaagu

SEQ ID NO: 1801546 - RNA, 19 nt, Homo sapiens
  misc_RNA (1)...(19): siRNA sense strand
guaauggggucuauguuug

SEQ ID NO: 1801547 - RNA, 19 nt, Homo sapiens
  misc_RNA (1)...(19): siRNA sense strand
uucaagaacucuacaucaa

SEQ ID NO: 1801548 - RNA, 19 nt, Homo sapiens
  misc_RNA (1)...(19): siRNA sense strand
ccucuucaaucccacuaaa

SEQ ID NO: 1801549 - RNA, 19 nt, Homo sapiens
  misc_RNA (1)...(19): siRNA sense strand
gcacgacgguuuuccuaga

SEQ ID NO: 1801550 - RNA, 19 nt, Homo sapiens
  misc_RNA (1)...(19): siRNA sense strand
ccaccacuguugauugcaa

SEQ ID NO: 1801551 - RNA, 19 nt, Homo sapiens
  misc_RNA (1)...(19): siRNA sense strand
gagccagaaccugaaauuu

SEQ ID NO: 1801552 - RNA, 19 nt, Homo sapiens
  misc_RNA (1)...(19): siRNA sense strand
gugauuggaauucuggaua

SEQ ID NO: 1801553 - RNA, 19 nt, Homo sapiens
  misc_RNA (1)...(19): siRNA sense strand
acacacaagugcuucucuu

SEQ ID NO: 1801554 - RNA, 19 nt, Homo sapiens
  misc_RNA (1)...(19): siRNA sense strand
cagcuucccaaaucguuua

SEQ ID NO: 1801555 - RNA, 19 nt, Homo sapiens
  misc_RNA (1)...(19): siRNA sense strand
ugacagcgagaaagacaaa

SEQ ID NO: 1801556 - RNA, 19 nt, Homo sapiens
  misc_RNA (1)...(19): siRNA sense strand
auugauaacccucacauaa

SEQ ID NO: 1801557 - RNA, 19 nt, Homo sapiens
  misc_RNA (1)...(19): siRNA sense strand
guuccaaguuugaaauucu

SEQ ID NO: 1801558 - RNA, 19 nt, Homo sapiens
  misc_RNA (1)...(19): siRNA sense strand
gaaagacaaagaugguucu

SEQ ID NO: 1801559 - RNA, 19 nt, Homo sapiens
  misc_RNA (1)...(19): siRNA sense strand
cagagaagccaccacuguu

SEQ ID NO: 1801560 - RNA, 19 nt, Homo sapiens
  misc_RNA (1)...(19): siRNA sense strand
caguggacaucucugauca

SEQ ID NO: 1801561 - RNA, 19 nt, Homo sapiens
  misc_RNA (1)...(19): siRNA sense strand
guaaaugucacaaccaaaa

SEQ ID NO: 1801562 - RNA, 19 nt, Homo sapiens
  misc_RNA (1)...(19): siRNA sense strand
uuaacaaggauucccagua

SEQ ID NO: 1801563 - RNA, 19 nt, Homo sapiens
  misc_RNA (1)...(19): siRNA sense strand
acacauccagaagcuauua

SEQ ID NO: 1801564 - RNA, 19 nt, Homo sapiens
  misc_RNA (1)...(19): siRNA sense strand
gaauagugaguguccacaa

SEQ ID NO: 1801565 - RNA, 19 nt, Homo sapiens
  misc_RNA (1)...(19): siRNA sense strand
gcaguggacaucucugauc

SEQ ID NO: 1801566 - RNA, 19 nt, Homo sapiens
  misc_RNA (1)...(19): siRNA sense strand
gaagccaccacuguugauu

SEQ ID NO: 1801567 - RNA, 19 nt, Homo sapiens
  misc_RNA (1)...(19): siRNA sense strand
gaugguacccaggugcuaa

SEQ ID NO: 1801568 - RNA, 19 nt, Homo sapiens
  misc_RNA (1)...(19): siRNA sense strand
aaagcuugaugcugaacaa

SEQ ID NO: 1801569 - RNA, 19 nt, Homo sapiens
  misc_RNA (1)...(19): siRNA sense strand
ggagaaaacccugugauug

SEQ ID NO: 1801570 - RNA, 19 nt, Homo sapiens
  misc_RNA (1)...(19): siRNA sense strand
ccugaacuccaacaaauug

SEQ ID NO: 1801571 - RNA, 19 nt, Homo sapiens
  misc_RNA (1)...(19): siRNA sense strand
ucagcaaccuucaagaacu

SEQ ID NO: 1801572 - RNA, 19 nt, Homo sapiens
  misc_RNA (1)...(19): siRNA sense strand
cacacaagugcuucucuua

SEQ ID NO: 1801573 - RNA, 19 nt, Homo sapiens
  misc_RNA (1)...(19): siRNA sense strand
gauuggaauucuggauaug

SEQ ID NO: 1801574 - RNA, 19 nt, Homo sapiens
  misc_RNA (1)...(19): siRNA sense strand
gauugauaacccucacaua

SEQ ID NO: 1801575 - RNA, 19 nt, Homo sapiens
  misc_RNA (1)...(19): siRNA sense strand
ccaccaugaagauugauaa

SEQ ID NO: 1801576 - RNA, 19 nt, Homo sapiens
  misc_RNA (1)...(19): siRNA sense strand
acacucggguggcaacaau

SEQ ID NO: 1801577 - RNA, 19 nt, Homo sapiens
  misc_RNA (1)...(19): siRNA sense strand
gcaaauuugagaagcuuag

SEQ ID NO: 1801578 - RNA, 19 nt, Homo sapiens
  misc_RNA (1)...(19): siRNA sense strand
gagaaagacaaagaugguu

SEQ ID NO: 1801579 - RNA, 19 nt, Homo sapiens
  misc_RNA (1)...(19): siRNA sense strand
gaaagaagcugaugaaaug

SEQ ID NO: 1801580 - RNA, 19 nt, Homo sapiens
  misc_RNA (1)...(19): siRNA sense strand
ggagaagucugguguaaua

SEQ ID NO: 1801581 - RNA, 19 nt, Homo sapiens
  misc_RNA (1)...(19): siRNA sense strand
gaagguagcuggugauuug

SEQ ID NO: 1801582 - RNA, 19 nt, Homo sapiens
  misc_RNA (1)...(19): siRNA sense strand
gcaagcagcuacucaguug

SEQ ID NO: 1801583 - RNA, 19 nt, Homo sapiens
  misc_RNA (1)...(19): siRNA sense strand
agagagagguuauugauuu

SEQ ID NO: 1801584 - RNA, 19 nt, Homo sapiens
  misc_RNA (1)...(19): siRNA sense strand
gcuuaaaccugaccaagua

SEQ ID NO: 1801585 - RNA, 19 nt, Homo sapiens
  misc_RNA (1)...(19): siRNA sense strand
ugaaugagcugacugagaa

SEQ ID NO: 1801586 - RNA, 19 nt, Homo sapiens
  misc_RNA (1)...(19): siRNA sense strand
gaccgaaacugacaaagaa

SEQ ID NO: 1801587 - RNA, 19 nt, Homo sapiens
  misc_RNA (1)...(19): siRNA sense strand
gaagagaacgagaacauuu

SEQ ID NO: 1801588 - RNA, 19 nt, Homo sapiens
  misc_RNA (1)...(19): siRNA sense strand
gaaagaagcaaugugguua

SEQ ID NO: 1801589 - RNA, 19 nt, Homo sapiens
  misc_RNA (1)...(19): siRNA sense strand
gcaguuccauucccagaua

SEQ ID NO: 1801590 - RNA, 19 nt, Homo sapiens
  misc_RNA (1)...(19): siRNA sense strand
gcauaaggcucaacaguca

SEQ ID NO: 1801591 - RNA, 19 nt, Homo sapiens
  misc_RNA (1)...(19): siRNA sense strand
gguggaagcuguugaguug

SEQ ID NO: 1801592 - RNA, 19 nt, Homo sapiens
  misc_RNA (1)...(19): siRNA sense strand
gaguguaccucgagacuuu

SEQ ID NO: 1801593 - RNA, 19 nt, Homo sapiens
  misc_RNA (1)...(19): siRNA sense strand
gagauuguguugaaagaaa

SEQ ID NO: 1801594 - RNA, 19 nt, Homo sapiens
  misc_RNA (1)...(19): siRNA sense strand
ugaaaaggcucaacaguua

SEQ ID NO: 1801595 - RNA, 19 nt, Homo sapiens
  misc_RNA (1)...(19): siRNA sense strand
gaagaggaacuuaaggaua

SEQ ID NO: 1801596 - RNA, 19 nt, Homo sapiens
  misc_RNA (1)...(19): siRNA sense strand
gguggaaacucucauggua

SEQ ID NO: 1801597 - RNA, 19 nt, Homo sapiens
  misc_RNA (1)...(19): siRNA sense strand
caaagaaagugacgcauca

SEQ ID NO: 1801598 - RNA, 19 nt, Homo sapiens
  misc_RNA (1)...(19): siRNA sense strand
gcagaagaauuacauaaag

SEQ ID NO: 1801599 - RNA, 19 nt, Homo sapiens
  misc_RNA (1)...(19): siRNA sense strand
gaaaguggaucagggaaga

SEQ ID NO: 1801600 - RNA, 19 nt, Homo sapiens
  misc_RNA (1)...(19): siRNA sense strand
gggaagaaguucagagcua

SEQ ID NO: 1801601 - RNA, 19 nt, Homo sapiens
  misc_RNA (1)...(19): siRNA sense strand
caaaucaacuggaaagcaa

SEQ ID NO: 1801602 - RNA, 19 nt, Homo sapiens
  misc_RNA (1)...(19): siRNA sense strand
ugacuacgcuuauacauca

SEQ ID NO: 1801603 - RNA, 19 nt, Homo sapiens
  misc_RNA (1)...(19): siRNA sense strand
ggaacgaucuaccuauguu

SEQ ID NO: 1801604 - RNA, 19 nt, Homo sapiens
  misc_RNA (1)...(19): siRNA sense strand
gaaagugacgcaucaaaga

SEQ ID NO: 1801605 - RNA, 19 nt, Homo sapiens
  misc_RNA (1)...(19): siRNA sense strand
gaacagaugaauaccauga

SEQ ID NO: 1801606 - RNA, 19 nt, Homo sapiens
  misc_RNA (1)...(19): siRNA sense strand
gaucaagucuguagaagag

SEQ ID NO: 1801607 - RNA, 19 nt, Homo sapiens
  misc_RNA (1)...(19): siRNA sense strand
uaaagacuguggaagaauu

SEQ ID NO: 1801608 - RNA, 19 nt, Homo sapiens
  misc_RNA (1)...(19): siRNA sense strand
gcucaacaguuaucuauca

SEQ ID NO: 1801609 - RNA, 19 nt, Homo sapiens
  misc_RNA (1)...(19): siRNA sense strand
ggaaauguccagcuugaaa

SEQ ID NO: 1801610 - RNA, 19 nt, Homo sapiens
  misc_RNA (1)...(19): siRNA sense strand
ccaagagacuaaacaagaa

SEQ ID NO: 1801611 - RNA, 19 nt, Homo sapiens
  misc_RNA (1)...(19): siRNA sense strand
gaaacggagucuucugaga

SEQ ID NO: 1801612 - RNA, 19 nt, Homo sapiens
  misc_RNA (1)...(19): siRNA sense strand
gcacaugaauuggagaaga

SEQ ID NO: 1801613 - RNA, 19 nt, Homo sapiens
  misc_RNA (1)...(19): siRNA sense strand
gcagauggaggcagagaua

SEQ ID NO: 1801614 - RNA, 19 nt, Homo sapiens
  misc_RNA (1)...(19): siRNA sense strand
gagaaagaccuagccaaua

SEQ ID NO: 1801615 - RNA, 19 nt, Homo sapiens
  misc_RNA (1)...(19): siRNA sense strand
ugagaaagauggaaagauc

SEQ ID NO: 1801616 - RNA, 19 nt, Homo sapiens
  misc_RNA (1)...(19): siRNA sense strand
caggaaagcuacagcaaga

SEQ ID NO: 1801617 - RNA, 19 nt, Homo sapiens
  misc_RNA (1)...(19): siRNA sense strand
agagauagcucacuugaag

SEQ ID NO: 1801618 - RNA, 19 nt, Homo sapiens
  misc_RNA (1)...(19): siRNA sense strand
uaauaaggauguuguggaa

SEQ ID NO: 1801619 - RNA, 19 nt, Homo sapiens
  misc_RNA (1)...(19): siRNA sense strand
aagaggaacuuaaggauau

SEQ ID NO: 1801620 - RNA, 19 nt, Homo sapiens
  misc_RNA (1)...(19): siRNA sense strand
guaaagaagaggaacuuaa

SEQ ID NO: 1801621 - RNA, 19 nt, Homo sapiens
  misc_RNA (1)...(19): siRNA sense strand
uuaagaaagugauccauga

SEQ ID NO: 1801622 - RNA, 19 nt, Homo sapiens
  misc_RNA (1)...(19): siRNA sense strand
agaaagaaauccagaaugg

SEQ ID NO: 1801623 - RNA, 19 nt, Homo sapiens
  misc_RNA (1)...(19): siRNA sense strand
gaaagugauccaugagaaa

SEQ ID NO: 1801624 - RNA, 19 nt, Homo sapiens
  misc_RNA (1)...(19): siRNA sense strand
gcaacuacaacaugaaauu

SEQ ID NO: 1801625 - RNA, 19 nt, Homo sapiens
  misc_RNA (1)...(19): siRNA sense strand
gcaaugugguuauaacaag

SEQ ID NO: 1801626 - RNA, 19 nt, Homo sapiens
  misc_RNA (1)...(19): siRNA sense strand
caaguccugugguagauaa

SEQ ID NO: 1801627 - RNA, 19 nt, Homo sapiens
  misc_RNA (1)...(19): siRNA sense strand
gaaucacacaagacuauua

SEQ ID NO: 1801628 - RNA, 19 nt, Homo sapiens
  misc_RNA (1)...(19): siRNA sense strand
uaaguggucucuggaauga

SEQ ID NO: 1801629 - RNA, 19 nt, Homo sapiens
  misc_RNA (1)...(19): siRNA sense strand
ggagcugaaugcaauaaga

SEQ ID NO: 1801630 - RNA, 19 nt, Homo sapiens
  misc_RNA (1)...(19): siRNA sense strand
gaagagcaacuacaacaug

SEQ ID NO: 1801631 - RNA, 19 nt, Homo sapiens
  misc_RNA (1)...(19): siRNA sense strand
ucaagagacucaacagaug

SEQ ID NO: 1801632 - RNA, 19 nt, Homo sapiens
  misc_RNA (1)...(19): siRNA sense strand
gagagagguuauugauuug

SEQ ID NO: 1801633 - RNA, 19 nt, Homo sapiens
  misc_RNA (1)...(19): siRNA sense strand
gagcaggucaucaaagaaa

SEQ ID NO: 1801634 - RNA, 19 nt, Homo sapiens
  misc_RNA (1)...(19): siRNA sense strand
gagcacaaguugaaagaag

SEQ ID NO: 1801635 - RNA, 19 nt, Homo sapiens
  misc_RNA (1)...(19): siRNA sense strand
caacaguuaucuaucacuu

SEQ ID NO: 1801636 - RNA, 19 nt, Homo sapiens
  misc_RNA (1)...(19): siRNA sense strand
ggaaagaucaagucuguag

SEQ ID NO: 1801637 - RNA, 19 nt, Homo sapiens
  misc_RNA (1)...(19): siRNA sense strand
gaacuuaaggauauacaga

SEQ ID NO: 1801638 - RNA, 19 nt, Homo sapiens
  misc_RNA (1)...(19): siRNA sense strand
cagcaagauuuacagagua

SEQ ID NO: 1801639 - RNA, 19 nt, Homo sapiens
  misc_RNA (1)...(19): siRNA sense strand
ggauaaugcugacucaagu

SEQ ID NO: 1801640 - RNA, 19 nt, Homo sapiens
  misc_RNA (1)...(19): siRNA sense strand
ggaagaugcugcugcuaca

SEQ ID NO: 1801641 - RNA, 19 nt, Homo sapiens
  misc_RNA (1)...(19): siRNA sense strand
agaaagaccuagccaauac

SEQ ID NO: 1801642 - RNA, 19 nt, Homo sapiens
  misc_RNA (1)...(19): siRNA sense strand
aagcugaagugcagaaauu

SEQ ID NO: 1801643 - RNA, 19 nt, Homo sapiens
  misc_RNA (1)...(19): siRNA sense strand
cgugaucguuuaacaagua

SEQ ID NO: 1801644 - RNA, 19 nt, Homo sapiens
  misc_RNA (1)...(19): siRNA sense strand
gaccuccgcuucaguucua

SEQ ID NO: 1801645 - RNA, 19 nt, Homo sapiens
  misc_RNA (1)...(19): siRNA sense strand
gaacaaaagcuuauuccua

SEQ ID NO: 1801646 - RNA, 19 nt, Homo sapiens
  misc_RNA (1)...(19): siRNA sense strand
gaaaaugucuucguagaug

SEQ ID NO: 1801647 - RNA, 19 nt, Homo sapiens
  misc_RNA (1)...(19): siRNA sense strand
gaacgaucuaccuauguua

SEQ ID NO: 1801648 - RNA, 19 nt, Homo sapiens
  misc_RNA (1)...(19): siRNA sense strand
guuaaagacuguggaagaa

SEQ ID NO: 1801649 - RNA, 19 nt, Homo sapiens
  misc_RNA (1)...(19): siRNA sense strand
ccucgagacuuuaaauuau

SEQ ID NO: 1801650 - RNA, 19 nt, Homo sapiens
  misc_RNA (1)...(19): siRNA sense strand
aguagaagaugaucaaguu

SEQ ID NO: 1801651 - RNA, 19 nt, Homo sapiens
  misc_RNA (1)...(19): siRNA sense strand
ugaguuagauucuuugaag

SEQ ID NO: 1801652 - RNA, 19 nt, Homo sapiens
  misc_RNA (1)...(19): siRNA sense strand
gaagcaaugugguuauaac

SEQ ID NO: 1801653 - RNA, 19 nt, Homo sapiens
  misc_RNA (1)...(19): siRNA sense strand
gcagcugccucgaagaaga

SEQ ID NO: 1801654 - RNA, 19 nt, Homo sapiens
  misc_RNA (1)...(19): siRNA sense strand
uagaagggauccagaaauc

SEQ ID NO: 1801655 - RNA, 19 nt, Homo sapiens
  misc_RNA (1)...(19): siRNA sense strand
ggaaguagcacaacauaac

SEQ ID NO: 1801656 - RNA, 19 nt, Homo sapiens
  misc_RNA (1)...(19): siRNA sense strand
guggaagaauuacuugaaa

SEQ ID NO: 1801657 - RNA, 19 nt, Homo sapiens
  misc_RNA (1)...(19): siRNA sense strand
gcaaagacuaaugcaguua

SEQ ID NO: 1801658 - RNA, 19 nt, Homo sapiens
  misc_RNA (1)...(19): siRNA sense strand
gaaccugucccaguuacua

SEQ ID NO: 1801659 - RNA, 19 nt, Homo sapiens
  misc_RNA (1)...(19): siRNA sense strand
gaacgagaacauuuggaaa

SEQ ID NO: 1801660 - RNA, 19 nt, Homo sapiens
  misc_RNA (1)...(19): siRNA sense strand
gcaguuaacccaggaaaug

SEQ ID NO: 1801661 - RNA, 19 nt, Homo sapiens
  misc_RNA (1)...(19): siRNA sense strand
gaagcgaugaccaggauaa

SEQ ID NO: 1801662 - RNA, 19 nt, Homo sapiens
  misc_RNA (1)...(19): siRNA sense strand
gaaagcuucaucaaagaaa

SEQ ID NO: 1801663 - RNA, 19 nt, Homo sapiens
  misc_RNA (1)...(19): siRNA sense strand
agagugaucuuucuagcaa

SEQ ID NO: 1801664 - RNA, 19 nt, Homo sapiens
  misc_RNA (1)...(19): siRNA sense strand
aagaggagcugaaugcaau

SEQ ID NO: 1801665 - RNA, 19 nt, Homo sapiens
  misc_RNA (1)...(19): siRNA sense strand
uuaaagaagucaaguaagg

SEQ ID NO: 1801666 - RNA, 19 nt, Homo sapiens
  misc_RNA (1)...(19): siRNA sense strand
gaaacacucacaaaacuua

SEQ ID NO: 1801667 - RNA, 19 nt, Homo sapiens
  misc_RNA (1)...(19): siRNA sense strand
gcagaaacagaaggaauuu

SEQ ID NO: 1801668 - RNA, 19 nt, Homo sapiens
  misc_RNA (1)...(19): siRNA sense strand
ggagaaaacuguucaggau

SEQ ID NO: 1801669 - RNA, 19 nt, Homo sapiens
  misc_RNA (1)...(19): siRNA sense strand
agaaagugauccaugagaa

SEQ ID NO: 1801670 - RNA, 19 nt, Homo sapiens
  misc_RNA (1)...(19): siRNA sense strand
gcagagauagcucacuuga

SEQ ID NO: 1801671 - RNA, 19 nt, Homo sapiens
  misc_RNA (1)...(19): siRNA sense strand
agaauugacuacgcuuaua

SEQ ID NO: 1801672 - RNA, 19 nt, Homo sapiens
  misc_RNA (1)...(19): siRNA sense strand
gcaacuacuuauauuccuu

SEQ ID NO: 1801673 - RNA, 19 nt, Homo sapiens
  misc_RNA (1)...(19): siRNA sense strand
aacaagagcuagagcgauu

SEQ ID NO: 1801674 - RNA, 19 nt, Homo sapiens
  misc_RNA (1)...(19): siRNA sense strand
uugaagaacuugagauugu

SEQ ID NO: 1801675 - RNA, 19 nt, Homo sapiens
  misc_RNA (1)...(19): siRNA sense strand
ggaaauaaaggcucuaaaa

SEQ ID NO: 1801676 - RNA, 19 nt, Homo sapiens
  misc_RNA (1)...(19): siRNA sense strand
gaagaggagcugaaugcaa

SEQ ID NO: 1801677 - RNA, 19 nt, Homo sapiens
  misc_RNA (1)...(19): siRNA sense strand
cagcaacacuacaaaucaa

SEQ ID NO: 1801678 - RNA, 19 nt, Homo sapiens
  misc_RNA (1)...(19): siRNA sense strand
caagaugcuuuaaagaagu

SEQ ID NO: 1801679 - RNA, 19 nt, Homo sapiens
  misc_RNA (1)...(19): siRNA sense strand
gaaagaagcugaugaaaug

SEQ ID NO: 1801680 - RNA, 19 nt, Homo sapiens
  misc_RNA (1)...(19): siRNA sense strand
ggagaagucugguguaaua

SEQ ID NO: 1801681 - RNA, 19 nt, Homo sapiens
  misc_RNA (1)...(19): siRNA sense strand
gaagguagcuggugauuug

SEQ ID NO: 1801682 - RNA, 19 nt, Homo sapiens
  misc_RNA (1)...(19): siRNA sense strand
gcaagcagcuacucaguug

SEQ ID NO: 1801683 - RNA, 19 nt, Homo sapiens
  misc_RNA (1)...(19): siRNA sense strand
agagagagguuauugauuu

SEQ ID NO: 1801684 - RNA, 19 nt, Homo sapiens
  misc_RNA (1)...(19): siRNA sense strand
gcuuaaaccugaccaagua

SEQ ID NO: 1801685 - RNA, 19 nt, Homo sapiens
  misc_RNA (1)...(19): siRNA sense strand
ugaaugagcugacugagaa

SEQ ID NO: 1801686 - RNA, 19 nt, Homo sapiens
  misc_RNA (1)...(19): siRNA sense strand
gaccgaaacugacaaagaa

SEQ ID NO: 1801687 - RNA, 19 nt, Homo sapiens
  misc_RNA (1)...(19): siRNA sense strand
gaagagaacgagaacauuu

SEQ ID NO: 1801688 - RNA, 19 nt, Homo sapiens
  misc_RNA (1)...(19): siRNA sense strand
gaaagaagcaaugugguua

SEQ ID NO: 1801689 - RNA, 19 nt, Homo sapiens
  misc_RNA (1)...(19): siRNA sense strand
gcaguuccauucccagaua

SEQ ID NO: 1801690 - RNA, 19 nt, Homo sapiens
  misc_RNA (1)...(19): siRNA sense strand
gcauaaggcucaacaguca

SEQ ID NO: 1801691 - RNA, 19 nt, Homo sapiens
  misc_RNA (1)...(19): siRNA sense strand
gguggaagcuguugaguug

SEQ ID NO: 1801692 - RNA, 19 nt, Homo sapiens
  misc_RNA (1)...(19): siRNA sense strand
gaguguaccucgagacuuu

SEQ ID NO: 1801693 - RNA, 19 nt, Homo sapiens
  misc_RNA (1)...(19): siRNA sense strand
gagauuguguugaaagaaa

SEQ ID NO: 1801694 - RNA, 19 nt, Homo sapiens
  misc_RNA (1)...(19): siRNA sense strand
ugaaaaggcucaacaguua

SEQ ID NO: 1801695 - RNA, 19 nt, Homo sapiens
  misc_RNA (1)...(19): siRNA sense strand
gaagaggaacuuaaggaua

SEQ ID NO: 1801696 - RNA, 19 nt, Homo sapiens
  misc_RNA (1)...(19): siRNA sense strand
gguggaaacucucauggua

SEQ ID NO: 1801697 - RNA, 19 nt, Homo sapiens
  misc_RNA (1)...(19): siRNA sense strand
caaagaaagugacgcauca

SEQ ID NO: 1801698 - RNA, 19 nt, Homo sapiens
  misc_RNA (1)...(19): siRNA sense strand
gcagaagaauuacauaaag

SEQ ID NO: 1801699 - RNA, 19 nt, Homo sapiens
  misc_RNA (1)...(19): siRNA sense strand
gaaaguggaucagggaaga

SEQ ID NO: 1801700 - RNA, 19 nt, Homo sapiens
  misc_RNA (1)...(19): siRNA sense strand
gggaagaaguucagagcua

SEQ ID NO: 1801701 - RNA, 19 nt, Homo sapiens
  misc_RNA (1)...(19): siRNA sense strand
caaaucaacuggaaagcaa

SEQ ID NO: 1801702 - RNA, 19 nt, Homo sapiens
  misc_RNA (1)...(19): siRNA sense strand
ugacuacgcuuauacauca

SEQ ID NO: 1801703 - RNA, 19 nt, Homo sapiens
  misc_RNA (1)...(19): siRNA sense strand
ggaacgaucuaccuauguu

SEQ ID NO: 1801704 - RNA, 19 nt, Homo sapiens
  misc_RNA (1)...(19): siRNA sense strand
gaaagugacgcaucaaaga

SEQ ID NO: 1801705 - RNA, 19 nt, Homo sapiens
  misc_RNA (1)...(19): siRNA sense strand
gaacagaugaauaccauga

SEQ ID NO: 1801706 - RNA, 19 nt, Homo sapiens
  misc_RNA (1)...(19): siRNA sense strand
gaucaagucuguagaagag

SEQ ID NO: 1801707 - RNA, 19 nt, Homo sapiens
  misc_RNA (1)...(19): siRNA sense strand
uaaagacuguggaagaauu

SEQ ID NO: 1801708 - RNA, 19 nt, Homo sapiens
  misc_RNA (1)...(19): siRNA sense strand
gcucaacaguuaucuauca

SEQ ID NO: 1801709 - RNA, 19 nt, Homo sapiens
  misc_RNA (1)...(19): siRNA sense strand
ggaaauguccagcuugaaa

SEQ ID NO: 1801710 - RNA, 19 nt, Homo sapiens
  misc_RNA (1)...(19): siRNA sense strand
ccaagagacuaaacaagaa

SEQ ID NO: 1801711 - RNA, 19 nt, Homo sapiens
  misc_RNA (1)...(19): siRNA sense strand
gaaacggagucuucugaga

SEQ ID NO: 1801712 - RNA, 19 nt, Homo sapiens
  misc_RNA (1)...(19): siRNA sense strand
gcacaugaauuggagaaga

SEQ ID NO: 1801713 - RNA, 19 nt, Homo sapiens
  misc_RNA (1)...(19): siRNA sense strand
gcagauggaggcagagaua

SEQ ID NO: 1801714 - RNA, 19 nt, Homo sapiens
  misc_RNA (1)...(19): siRNA sense strand
gagaaagaccuagccaaua

SEQ ID NO: 1801715 - RNA, 19 nt, Homo sapiens
  misc_RNA (1)...(19): siRNA sense strand
ugagaaagauggaaagauc

SEQ ID NO: 1801716 - RNA, 19 nt, Homo sapiens
  misc_RNA (1)...(19): siRNA sense strand
caggaaagcuacagcaaga

SEQ ID NO: 1801717 - RNA, 19 nt, Homo sapiens
  misc_RNA (1)...(19): siRNA sense strand
agagauagcucacuugaag

SEQ ID NO: 1801718 - RNA, 19 nt, Homo sapiens
  misc_RNA (1)...(19): siRNA sense strand
uaauaaggauguuguggaa

SEQ ID NO: 1801719 - RNA, 19 nt, Homo sapiens
  misc_RNA (1)...(19): siRNA sense strand
aagaggaacuuaaggauau

SEQ ID NO: 1801720 - RNA, 19 nt, Homo sapiens
  misc_RNA (1)...(19): siRNA sense strand
guaaagaagaggaacuuaa

SEQ ID NO: 1801721 - RNA, 19 nt, Homo sapiens
  misc_RNA (1)...(19): siRNA sense strand
uuaagaaagugauccauga

SEQ ID NO: 1801722 - RNA, 19 nt, Homo sapiens
  misc_RNA (1)...(19): siRNA sense strand
agaaagaaauccagaaugg

SEQ ID NO: 1801723 - RNA, 19 nt, Homo sapiens
  misc_RNA (1)...(19): siRNA sense strand
gaaagugauccaugagaaa

SEQ ID NO: 1801724 - RNA, 19 nt, Homo sapiens
  misc_RNA (1)...(19): siRNA sense strand
gcaacuacaacaugaaauu

SEQ ID NO: 1801725 - RNA, 19 nt, Homo sapiens
  misc_RNA (1)...(19): siRNA sense strand
gcaaugugguuauaacaag

SEQ ID NO: 1801726 - RNA, 19 nt, Homo sapiens
  misc_RNA (1)...(19): siRNA sense strand
caaguccugugguagauaa

SEQ ID NO: 1801727 - RNA, 19 nt, Homo sapiens
  misc_RNA (1)...(19): siRNA sense strand
gaaucacacaagacuauua

SEQ ID NO: 1801728 - RNA, 19 nt, Homo sapiens
  misc_RNA (1)...(19): siRNA sense strand
uaaguggucucuggaauga

SEQ ID NO: 1801729 - RNA, 19 nt, Homo sapiens
  misc_RNA (1)...(19): siRNA sense strand
ggagcugaaugcaauaaga

SEQ ID NO: 1801730 - RNA, 19 nt, Homo sapiens
  misc_RNA (1)...(19): siRNA sense strand
gaagagcaacuacaacaug

SEQ ID NO: 1801731 - RNA, 19 nt, Homo sapiens
  misc_RNA (1)...(19): siRNA sense strand
ucaagagacucaacagaug

SEQ ID NO: 1801732 - RNA, 19 nt, Homo sapiens
  misc_RNA (1)...(19): siRNA sense strand
gagagagguuauugauuug

SEQ ID NO: 1801733 - RNA, 19 nt, Homo sapiens
  misc_RNA (1)...(19): siRNA sense strand
gagcaggucaucaaagaaa

SEQ ID NO: 1801734 - RNA, 19 nt, Homo sapiens
  misc_RNA (1)...(19): siRNA sense strand
gagcacaaguugaaagaag

SEQ ID NO: 1801735 - RNA, 19 nt, Homo sapiens
  misc_RNA (1)...(19): siRNA sense strand
caacaguuaucuaucacuu

SEQ ID NO: 1801736 - RNA, 19 nt, Homo sapiens
  misc_RNA (1)...(19): siRNA sense strand
ggaaagaucaagucuguag

SEQ ID NO: 1801737 - RNA, 19 nt, Homo sapiens
  misc_RNA (1)...(19): siRNA sense strand
gaacuuaaggauauacaga

SEQ ID NO: 1801738 - RNA, 19 nt, Homo sapiens
  misc_RNA (1)...(19): siRNA sense strand
cagcaagauuuacagagua

SEQ ID NO: 1801739 - RNA, 19 nt, Homo sapiens
  misc_RNA (1)...(19): siRNA sense strand
ggauaaugcugacucaagu

SEQ ID NO: 1801740 - RNA, 19 nt, Homo sapiens
  misc_RNA (1)...(19): siRNA sense strand
ggaagaugcugcugcuaca

SEQ ID NO: 1801741 - RNA, 19 nt, Homo sapiens
  misc_RNA (1)...(19): siRNA sense strand
agaaagaccuagccaauac

SEQ ID NO: 1801742 - RNA, 19 nt, Homo sapiens
  misc_RNA (1)...(19): siRNA sense strand
aagcugaagugcagaaauu

SEQ ID NO: 1801743 - RNA, 19 nt, Homo sapiens
  misc_RNA (1)...(19): siRNA sense strand
cgugaucguuuaacaagua

SEQ ID NO: 1801744 - RNA, 19 nt, Homo sapiens
  misc_RNA (1)...(19): siRNA sense strand
gaccuccgcuucaguucua

SEQ ID NO: 1801745 - RNA, 19 nt, Homo sapiens
  misc_RNA (1)...(19): siRNA sense strand
gaacaaaagcuuauuccua

SEQ ID NO: 1801746 - RNA, 19 nt, Homo sapiens
  misc_RNA (1)...(19): siRNA sense strand
gaaaaugucuucguagaug

SEQ ID NO: 1801747 - RNA, 19 nt, Homo sapiens
  misc_RNA (1)...(19): siRNA sense strand
gaacgaucuaccuauguua

SEQ ID NO: 1801748 - RNA, 19 nt, Homo sapiens
  misc_RNA (1)...(19): siRNA sense strand
guuaaagacuguggaagaa

SEQ ID NO: 1801749 - RNA, 19 nt, Homo sapiens
  misc_RNA (1)...(19): siRNA sense strand
ccucgagacuuuaaauuau

SEQ ID NO: 1801750 - RNA, 19 nt, Homo sapiens
  misc_RNA (1)...(19): siRNA sense strand
aguagaagaugaucaaguu

SEQ ID NO: 1801751 - RNA, 19 nt, Homo sapiens
  misc_RNA (1)...(19): siRNA sense strand
ugaguuagauucuuugaag

SEQ ID NO: 1801752 - RNA, 19 nt, Homo sapiens
  misc_RNA (1)...(19): siRNA sense strand
gaagcaaugugguuauaac

SEQ ID NO: 1801753 - RNA, 19 nt, Homo sapiens
  misc_RNA (1)...(19): siRNA sense strand
gcagcugccucgaagaaga

SEQ ID NO: 1801754 - RNA, 19 nt, Homo sapiens
  misc_RNA (1)...(19): siRNA sense strand
uagaagggauccagaaauc

SEQ ID NO: 1801755 - RNA, 19 nt, Homo sapiens
  misc_RNA (1)...(19): siRNA sense strand
ggaaguagcacaacauaac

SEQ ID NO: 1801756 - RNA, 19 nt, Homo sapiens
  misc_RNA (1)...(19): siRNA sense strand
guggaagaauuacuugaaa

SEQ ID NO: 1801757 - RNA, 19 nt, Homo sapiens
  misc_RNA (1)...(19): siRNA sense strand
gcaaagacuaaugcaguua

SEQ ID NO: 1801758 - RNA, 19 nt, Homo sapiens
  misc_RNA (1)...(19): siRNA sense strand
gaaccugucccaguuacua

SEQ ID NO: 1801759 - RNA, 19 nt, Homo sapiens
  misc_RNA (1)...(19): siRNA sense strand
gaacgagaacauuuggaaa

SEQ ID NO: 1801760 - RNA, 19 nt, Homo sapiens
  misc_RNA (1)...(19): siRNA sense strand
gcaguuaacccaggaaaug

SEQ ID NO: 1801761 - RNA, 19 nt, Homo sapiens
  misc_RNA (1)...(19): siRNA sense strand
gaagcgaugaccaggauaa

SEQ ID NO: 1801762 - RNA, 19 nt, Homo sapiens
  misc_RNA (1)...(19): siRNA sense strand
gaaagcuucaucaaagaaa

SEQ ID NO: 1801763 - RNA, 19 nt, Homo sapiens
  misc_RNA (1)...(19): siRNA sense strand
agagugaucuuucuagcaa

SEQ ID NO: 1801764 - RNA, 19 nt, Homo sapiens
  misc_RNA (1)...(19): siRNA sense strand
aagaggagcugaaugcaau

SEQ ID NO: 1801765 - RNA, 19 nt, Homo sapiens
  misc_RNA (1)...(19): siRNA sense strand
uuaaagaagucaaguaagg

SEQ ID NO: 1801766 - RNA, 19 nt, Homo sapiens
  misc_RNA (1)...(19): siRNA sense strand
gaaacacucacaaaacuua

SEQ ID NO: 1801767 - RNA, 19 nt, Homo sapiens
  misc_RNA (1)...(19): siRNA sense strand
gcagaaacagaaggaauuu

SEQ ID NO: 1801768 - RNA, 19 nt, Homo sapiens
  misc_RNA (1)...(19): siRNA sense strand
ggagaaaacuguucaggau

SEQ ID NO: 1801769 - RNA, 19 nt, Homo sapiens
  misc_RNA (1)...(19): siRNA sense strand
agaaagugauccaugagaa

SEQ ID NO: 1801770 - RNA, 19 nt, Homo sapiens
  misc_RNA (1)...(19): siRNA sense strand
gcagagauagcucacuuga

SEQ ID NO: 1801771 - RNA, 19 nt, Homo sapiens
  misc_RNA (1)...(19): siRNA sense strand
agaauugacuacgcuuaua

SEQ ID NO: 1801772 - RNA, 19 nt, Homo sapiens
  misc_RNA (1)...(19): siRNA sense strand
gcaacuacuuauauuccuu

SEQ ID NO: 1801773 - RNA, 19 nt, Homo sapiens
  misc_RNA (1)...(19): siRNA sense strand
aacaagagcuagagcgauu

SEQ ID NO: 1801774 - RNA, 19 nt, Homo sapiens
  misc_RNA (1)...(19): siRNA sense strand
uugaagaacuugagauugu

SEQ ID NO: 1801775 - RNA, 19 nt, Homo sapiens
  misc_RNA (1)...(19): siRNA sense strand
ggaaauaaaggcucuaaaa

SEQ ID NO: 1801776 - RNA, 19 nt, Homo sapiens
  misc_RNA (1)...(19): siRNA sense strand
gaagaggagcugaaugcaa

SEQ ID NO: 1801777 - RNA, 19 nt, Homo sapiens
  misc_RNA (1)...(19): siRNA sense strand
cagcaacacuacaaaucaa

SEQ ID NO: 1801778 - RNA, 19 nt, Homo sapiens
  misc_RNA (1)...(19): siRNA sense strand
caagaugcuuuaaagaagu

SEQ ID NO: 1801779 - RNA, 19 nt, Homo sapiens
  misc_RNA (1)...(19): siRNA sense strand
agaaggagcuggccaacuu

SEQ ID NO: 1801780 - RNA, 19 nt, Homo sapiens
  misc_RNA (1)...(19): siRNA sense strand
gcaggucucccacgaguaa

SEQ ID NO: 1801781 - RNA, 19 nt, Homo sapiens
  misc_RNA (1)...(19): siRNA sense strand
gcugagcucuuaccugguu

SEQ ID NO: 1801782 - RNA, 19 nt, Homo sapiens
  misc_RNA (1)...(19): siRNA sense strand
ggccaaggcuccuauguac

SEQ ID NO: 1801783 - RNA, 19 nt, Homo sapiens
  misc_RNA (1)...(19): siRNA sense strand
ggauuaccaucaccggaaa

SEQ ID NO: 1801784 - RNA, 19 nt, Homo sapiens
  misc_RNA (1)...(19): siRNA sense strand
ggacagugguguguauuac

SEQ ID NO: 1801785 - RNA, 19 nt, Homo sapiens
  misc_RNA (1)...(19): siRNA sense strand
gggacagugguguguauua

SEQ ID NO: 1801786 - RNA, 19 nt, Homo sapiens
  misc_RNA (1)...(19): siRNA sense strand
gaaaugcugaccugaccuu

SEQ ID NO: 1801787 - RNA, 19 nt, Homo sapiens
  misc_RNA (1)...(19): siRNA sense strand
ggaaguacaagucuuucug

SEQ ID NO: 1801788 - RNA, 19 nt, Homo sapiens
  misc_RNA (1)...(19): siRNA sense strand
augcugaccugaccuuuga

SEQ ID NO: 1801789 - RNA, 19 nt, Homo sapiens
  misc_RNA (1)...(19): siRNA sense strand
ccaugcggguccuguacua

SEQ ID NO: 1801790 - RNA, 19 nt, Homo sapiens
  misc_RNA (1)...(19): siRNA sense strand
ggaaaguuuagucgucuga

SEQ ID NO: 1801791 - RNA, 19 nt, Homo sapiens
  misc_RNA (1)...(19): siRNA sense strand
ggaggaagaggccuacuac

SEQ ID NO: 1801792 - RNA, 19 nt, Homo sapiens
  misc_RNA (1)...(19): siRNA sense strand
gcucuucgugguuguggua

SEQ ID NO: 1801793 - RNA, 19 nt, Homo sapiens
  misc_RNA (1)...(19): siRNA sense strand
ggacgaccucuaugaccaa

SEQ ID NO: 1801794 - RNA, 19 nt, Homo sapiens
  misc_RNA (1)...(19): siRNA sense strand
gcugugacccugggagauu

SEQ ID NO: 1801795 - RNA, 19 nt, Homo sapiens
  misc_RNA (1)...(19): siRNA sense strand
aggauacccuggagacguu

SEQ ID NO: 1801796 - RNA, 19 nt, Homo sapiens
  misc_RNA (1)...(19): siRNA sense strand
cgcaguggcuacaggauuc

SEQ ID NO: 1801797 - RNA, 19 nt, Homo sapiens
  misc_RNA (1)...(19): siRNA sense strand
acaaggaggaggaggaaga

SEQ ID NO: 1801798 - RNA, 19 nt, Homo sapiens
  misc_RNA (1)...(19): siRNA sense strand
gaggacgacuggcgaucuc

SEQ ID NO: 1801799 - RNA, 19 nt, Homo sapiens
  misc_RNA (1)...(19): siRNA sense strand
gaagaacuuggcccugagu

SEQ ID NO: 1801800 - RNA, 19 nt, Homo sapiens
  misc_RNA (1)...(19): siRNA sense strand
uggccaaggcuccuaugua

SEQ ID NO: 1801801 - RNA, 19 nt, Homo sapiens
  misc_RNA (1)...(19): siRNA sense strand
cugugacccugggagauua

SEQ ID NO: 1801802 - RNA, 19 nt, Homo sapiens
  misc_RNA (1)...(19): siRNA sense strand
ccacaaggaggaggaggaa

SEQ ID NO: 1801803 - RNA, 19 nt, Homo sapiens
  misc_RNA (1)...(19): siRNA sense strand
ccugugacccugcccugua

SEQ ID NO: 1801804 - RNA, 19 nt, Homo sapiens
  misc_RNA (1)...(19): siRNA sense strand
acagcaguguggccucuga

SEQ ID NO: 1801805 - RNA, 19 nt, Homo sapiens
  misc_RNA (1)...(19): siRNA sense strand
gguguucccagcauuuaug

SEQ ID NO: 1801806 - RNA, 19 nt, Homo sapiens
  misc_RNA (1)...(19): siRNA sense strand
cagguguucccagcauuua

SEQ ID NO: 1801807 - RNA, 19 nt, Homo sapiens
  misc_RNA (1)...(19): siRNA sense strand
ggccggaggauuaccauca

SEQ ID NO: 1801808 - RNA, 19 nt, Homo sapiens
  misc_RNA (1)...(19): siRNA sense strand
ucagguguucccagcauuu

SEQ ID NO: 1801809 - RNA, 19 nt, Homo sapiens
  misc_RNA (1)...(19): siRNA sense strand
uggaggaggcugugaggaa

SEQ ID NO: 1801810 - RNA, 19 nt, Homo sapiens
  misc_RNA (1)...(19): siRNA sense strand
cgaccucuaugaccaagac

SEQ ID NO: 1801811 - RNA, 19 nt, Homo sapiens
  misc_RNA (1)...(19): siRNA sense strand
cccuguaccuaccagauga

SEQ ID NO: 1801812 - RNA, 19 nt, Homo sapiens
  misc_RNA (1)...(19): siRNA sense strand
gcaguguggccucugaagu

SEQ ID NO: 1801813 - RNA, 19 nt, Homo sapiens
  misc_RNA (1)...(19): siRNA sense strand
ucuggaaguacaagucuuu

SEQ ID NO: 1801814 - RNA, 19 nt, Homo sapiens
  misc_RNA (1)...(19): siRNA sense strand
ccucagguguucccagcau

SEQ ID NO: 1801815 - RNA, 19 nt, Homo sapiens
  misc_RNA (1)...(19): siRNA sense strand
ggagacguugacaggagua

SEQ ID NO: 1801816 - RNA, 19 nt, Homo sapiens
  misc_RNA (1)...(19): siRNA sense strand
caugggcccugccuacaac

SEQ ID NO: 1801817 - RNA, 19 nt, Homo sapiens
  misc_RNA (1)...(19): siRNA sense strand
cggguacccuggaggauac

SEQ ID NO: 1801818 - RNA, 19 nt, Homo sapiens
  misc_RNA (1)...(19): siRNA sense strand
gccgggacgaccucuauga

SEQ ID NO: 1801819 - RNA, 19 nt, Homo sapiens
  misc_RNA (1)...(19): siRNA sense strand
ccaugggcccugccuacaa

SEQ ID NO: 1801820 - RNA, 19 nt, Homo sapiens
  misc_RNA (1)...(19): siRNA sense strand
agcgcaggcucaagaagaa

SEQ ID NO: 1801821 - RNA, 19 nt, Homo sapiens
  misc_RNA (1)...(19): siRNA sense strand
ucguguggcuucugcuuag

SEQ ID NO: 1801822 - RNA, 19 nt, Homo sapiens
  misc_RNA (1)...(19): siRNA sense strand
gcccugagucgggaaaguu

SEQ ID NO: 1801823 - RNA, 19 nt, Homo sapiens
  misc_RNA (1)...(19): siRNA sense strand
gaggaggcugugaggaaga

SEQ ID NO: 1801824 - RNA, 19 nt, Homo sapiens
  misc_RNA (1)...(19): siRNA sense strand
cagccgggacgaccucuau

SEQ ID NO: 1801825 - RNA, 19 nt, Homo sapiens
  misc_RNA (1)...(19): siRNA sense strand
gcucuuaccugguuuucag

SEQ ID NO: 1801826 - RNA, 19 nt, Homo sapiens
  misc_RNA (1)...(19): siRNA sense strand
gaagaaagaugaugaaagu

SEQ ID NO: 1801827 - RNA, 19 nt, Homo sapiens
  misc_RNA (1)...(19): siRNA sense strand
guacaaagccugcaaaguu

SEQ ID NO: 1801828 - RNA, 19 nt, Homo sapiens
  misc_RNA (1)...(19): siRNA sense strand
gaggagaaaucaaacauga

SEQ ID NO: 1801829 - RNA, 19 nt, Homo sapiens
  misc_RNA (1)...(19): siRNA sense strand
ggaagucacuggagauguu

SEQ ID NO: 1801830 - RNA, 19 nt, Homo sapiens
  misc_RNA (1)...(19): siRNA sense strand
gggcaaguaugaagaagua

SEQ ID NO: 1801831 - RNA, 19 nt, Homo sapiens
  misc_RNA (1)...(19): siRNA sense strand
gaagaagcaucuggaguuu

SEQ ID NO: 1801832 - RNA, 19 nt, Homo sapiens
  misc_RNA (1)...(19): siRNA sense strand
cagaaacacuguacaaaga

SEQ ID NO: 1801833 - RNA, 19 nt, Homo sapiens
  misc_RNA (1)...(19): siRNA sense strand
guacagggaucagaauaaa

SEQ ID NO: 1801834 - RNA, 19 nt, Homo sapiens
  misc_RNA (1)...(19): siRNA sense strand
cagcuaaccuacugaauga

SEQ ID NO: 1801835 - RNA, 19 nt, Homo sapiens
  misc_RNA (1)...(19): siRNA sense strand
ccacaaugguguacauaaa

SEQ ID NO: 1801836 - RNA, 19 nt, Homo sapiens
  misc_RNA (1)...(19): siRNA sense strand
aagcagagccguuguguaa

SEQ ID NO: 1801837 - RNA, 19 nt, Homo sapiens
  misc_RNA (1)...(19): siRNA sense strand
gaaacacuguacaaagaga

SEQ ID NO: 1801838 - RNA, 19 nt, Homo sapiens
  misc_RNA (1)...(19): siRNA sense strand
aaagagcccucgagaucua

SEQ ID NO: 1801839 - RNA, 19 nt, Homo sapiens
  misc_RNA (1)...(19): siRNA sense strand
uggcagaagugcucaauga

SEQ ID NO: 1801840 - RNA, 19 nt, Homo sapiens
  misc_RNA (1)...(19): siRNA sense strand
agaagcaucuggaguuuau

SEQ ID NO: 1801841 - RNA, 19 nt, Homo sapiens
  misc_RNA (1)...(19): siRNA sense strand
guaauuugguggaggagaa

SEQ ID NO: 1801842 - RNA, 19 nt, Homo sapiens
  misc_RNA (1)...(19): siRNA sense strand
gcuaugaggucucguaaac

SEQ ID NO: 1801843 - RNA, 19 nt, Homo sapiens
  misc_RNA (1)...(19): siRNA sense strand
gaugcaugcugaagaaaga

SEQ ID NO: 1801844 - RNA, 19 nt, Homo sapiens
  misc_RNA (1)...(19): siRNA sense strand
caacguggcuaagacgaaa

SEQ ID NO: 1801845 - RNA, 19 nt, Homo sapiens
  misc_RNA (1)...(19): siRNA sense strand
gcuggaagcuuugaagaau

SEQ ID NO: 1801846 - RNA, 19 nt, Homo sapiens
  misc_RNA (1)...(19): siRNA sense strand
gcagaaacguuagaagaag

SEQ ID NO: 1801847 - RNA, 19 nt, Homo sapiens
  misc_RNA (1)...(19): siRNA sense strand
uuacagacgucaaggcaaa

SEQ ID NO: 1801848 - RNA, 19 nt, Homo sapiens
  misc_RNA (1)...(19): siRNA sense strand
acagggaucagaauaaaua

SEQ ID NO: 1801849 - RNA, 19 nt, Homo sapiens
  misc_RNA (1)...(19): siRNA sense strand
ggacaaagacacugauucu

SEQ ID NO: 1801850 - RNA, 19 nt, Homo sapiens
  misc_RNA (1)...(19): siRNA sense strand
ggaguuugguucuguagau

SEQ ID NO: 1801851 - RNA, 19 nt, Homo sapiens
  misc_RNA (1)...(19): siRNA sense strand
ucaaagagcccucgagauc

SEQ ID NO: 1801852 - RNA, 19 nt, Homo sapiens
  misc_RNA (1)...(19): siRNA sense strand
uaaacagggucuugacaau

SEQ ID NO: 1801853 - RNA, 19 nt, Homo sapiens
  misc_RNA (1)...(19): siRNA sense strand
uacaaagccugcaaaguug

SEQ ID NO: 1801854 - RNA, 19 nt, Homo sapiens
  misc_RNA (1)...(19): siRNA sense strand
ugaaguguuugaagaaaga

SEQ ID NO: 1801855 - RNA, 19 nt, Homo sapiens
  misc_RNA (1)...(19): siRNA sense strand
uaaaagagcucuggaaauc

SEQ ID NO: 1801856 - RNA, 19 nt, Homo sapiens
  misc_RNA (1)...(19): siRNA sense strand
gaauaaccuugcaguccuu

SEQ ID NO: 1801857 - RNA, 19 nt, Homo sapiens
  misc_RNA (1)...(19): siRNA sense strand
gcagcuaaccuacugaaug

SEQ ID NO: 1801858 - RNA, 19 nt, Homo sapiens
  misc_RNA (1)...(19): siRNA sense strand
gcagaaacacuguacaaag

SEQ ID NO: 1801859 - RNA, 19 nt, Homo sapiens
  misc_RNA (1)...(19): siRNA sense strand
gcagagccguuguguaaaa

SEQ ID NO: 1801860 - RNA, 19 nt, Homo sapiens
  misc_RNA (1)...(19): siRNA sense strand
agaaagagaagaaugcaaa

SEQ ID NO: 1801861 - RNA, 19 nt, Homo sapiens
  misc_RNA (1)...(19): siRNA sense strand
caaagaugcagcuaaccua

SEQ ID NO: 1801862 - RNA, 19 nt, Homo sapiens
  misc_RNA (1)...(19): siRNA sense strand
gaaagggaguuugguucug

SEQ ID NO: 1801863 - RNA, 19 nt, Homo sapiens
  misc_RNA (1)...(19): siRNA sense strand
agacaaagcaaguaauuca

SEQ ID NO: 1801864 - RNA, 19 nt, Homo sapiens
  misc_RNA (1)...(19): siRNA sense strand
gagaagaaugcaaaggaaa

SEQ ID NO: 1801865 - RNA, 19 nt, Homo sapiens
  misc_RNA (1)...(19): siRNA sense strand
agagaagaaugcaaaggaa

SEQ ID NO: 1801866 - RNA, 19 nt, Homo sapiens
  misc_RNA (1)...(19): siRNA sense strand
uggaagcuuugaagaauga

SEQ ID NO: 1801867 - RNA, 19 nt, Homo sapiens
  misc_RNA (1)...(19): siRNA sense strand
agaagaagcaucuggaguu

SEQ ID NO: 1801868 - RNA, 19 nt, Homo sapiens
  misc_RNA (1)...(19): siRNA sense strand
cauaaaggaagacaaguug

SEQ ID NO: 1801869 - RNA, 19 nt, Homo sapiens
  misc_RNA (1)...(19): siRNA sense strand
guacauaaaggaagacaag

SEQ ID NO: 1801870 - RNA, 19 nt, Homo sapiens
  misc_RNA (1)...(19): siRNA sense strand
guaaacagggucuugacaa

SEQ ID NO: 1801871 - RNA, 19 nt, Homo sapiens
  misc_RNA (1)...(19): siRNA sense strand
uaaauaacuuggccuuacu

SEQ ID NO: 1801872 - RNA, 19 nt, Homo sapiens
  misc_RNA (1)...(19): siRNA sense strand
caucuggaguuuaugaauc

SEQ ID NO: 1801873 - RNA, 19 nt, Homo sapiens
  misc_RNA (1)...(19): siRNA sense strand
uuaaauaacuuggccuuac

SEQ ID NO: 1801874 - RNA, 19 nt, Homo sapiens
  misc_RNA (1)...(19): siRNA sense strand
aaagagggaaguacaaaga

SEQ ID NO: 1801875 - RNA, 19 nt, Homo sapiens
  misc_RNA (1)...(19): siRNA sense strand
agacacugauucuaccaaa

SEQ ID NO: 1801876 - RNA, 19 nt, Homo sapiens
  misc_RNA (1)...(19): siRNA sense strand
gggaugaacuggccaacac

SEQ ID NO: 1801877 - RNA, 19 nt, Homo sapiens
  misc_RNA (1)...(19): siRNA sense strand
gggaucagaauaaauacaa

SEQ ID NO: 1801878 - RNA, 19 nt, Homo sapiens
  misc_RNA (1)...(19): siRNA sense strand
caaugacccugagaacaug

SEQ ID NO: 1801879 - RNA, 19 nt, Homo sapiens
  misc_RNA (1)...(19): siRNA sense strand
ucaaugacccugagaacau

SEQ ID NO: 1801880 - RNA, 19 nt, Homo sapiens
  misc_RNA (1)...(19): siRNA sense strand
gcaaguaugaagaaguaga

SEQ ID NO: 1801881 - RNA, 19 nt, Homo sapiens
  misc_RNA (1)...(19): siRNA sense strand
gaagcagagccguugugua

SEQ ID NO: 1801882 - RNA, 19 nt, Homo sapiens
  misc_RNA (1)...(19): siRNA sense strand
gcagaagagugagcagucu

SEQ ID NO: 1801883 - RNA, 19 nt, Homo sapiens
  misc_RNA (1)...(19): siRNA sense strand
ggagaagcuuacacaggau

SEQ ID NO: 1801884 - RNA, 19 nt, Homo sapiens
  misc_RNA (1)...(19): siRNA sense strand
auacaaagaugcagcuaac

SEQ ID NO: 1801885 - RNA, 19 nt, Homo sapiens
  misc_RNA (1)...(19): siRNA sense strand
gaaugcaaaggaaagcaaa

SEQ ID NO: 1801886 - RNA, 19 nt, Homo sapiens
  misc_RNA (1)...(19): siRNA sense strand
caaguaugaagaaguagaa

SEQ ID NO: 1801887 - RNA, 19 nt, Homo sapiens
  misc_RNA (1)...(19): siRNA sense strand
uugccaagcaguuaaauaa

SEQ ID NO: 1801888 - RNA, 19 nt, Homo sapiens
  misc_RNA (1)...(19): siRNA sense strand
uugcaguccuuuaugguaa

SEQ ID NO: 1801889 - RNA, 19 nt, Homo sapiens
  misc_RNA (1)...(19): siRNA sense strand
ugaaugaugccuuggcuau

SEQ ID NO: 1801890 - RNA, 19 nt, Homo sapiens
  misc_RNA (1)...(19): siRNA sense strand
aacagggucuugacaaugu

SEQ ID NO: 1801891 - RNA, 19 nt, Homo sapiens
  misc_RNA (1)...(19): siRNA sense strand
ugaagcugcagaaacguua

SEQ ID NO: 1801892 - RNA, 19 nt, Homo sapiens
  misc_RNA (1)...(19): siRNA sense strand
caaauuugaagcugcagaa

SEQ ID NO: 1801893 - RNA, 19 nt, Homo sapiens
  misc_RNA (1)...(19): siRNA sense strand
ggacaucuuuuggagagua

SEQ ID NO: 1801894 - RNA, 19 nt, Homo sapiens
  misc_RNA (1)...(19): siRNA sense strand
uaaaggaagacaaguugga

SEQ ID NO: 1801895 - RNA, 19 nt, Homo sapiens
  misc_RNA (1)...(19): siRNA sense strand
aaagggaguuugguucugu

SEQ ID NO: 1801896 - RNA, 19 nt, Homo sapiens
  misc_RNA (1)...(19): siRNA sense strand
aaugaugccuuggcuauuc

SEQ ID NO: 1801897 - RNA, 19 nt, Homo sapiens
  misc_RNA (1)...(19): siRNA sense strand
ggaggagaaaucaaacaug

SEQ ID NO: 1801898 - RNA, 19 nt, Homo sapiens
  misc_RNA (1)...(19): siRNA sense strand
gaaagagaagaaugcaaag

SEQ ID NO: 1801899 - RNA, 19 nt, Homo sapiens
  misc_RNA (1)...(19): siRNA sense strand
gaagaaagagaagaaugca

SEQ ID NO: 1801900 - RNA, 19 nt, Homo sapiens
  misc_RNA (1)...(19): siRNA sense strand
gaaugaugccuuggcuauu

SEQ ID NO: 1801901 - RNA, 19 nt, Homo sapiens
  misc_RNA (1)...(19): siRNA sense strand
acacugauucuaccaaaga

SEQ ID NO: 1801902 - RNA, 19 nt, Homo sapiens
  misc_RNA (1)...(19): siRNA sense strand
acaaagacacugauucuac

SEQ ID NO: 1801903 - RNA, 19 nt, Homo sapiens
  misc_RNA (1)...(19): siRNA sense strand
gacaaagacacugauucua

SEQ ID NO: 1801904 - RNA, 19 nt, Homo sapiens
  misc_RNA (1)...(19): siRNA sense strand
gcacaugaaagggaguuug

SEQ ID NO: 1801905 - RNA, 19 nt, Homo sapiens
  misc_RNA (1)...(19): siRNA sense strand
gauguugccaagcaguuaa

SEQ ID NO: 1801906 - RNA, 19 nt, Homo sapiens
  misc_RNA (1)...(19): siRNA sense strand
uaugaggucucguaaacag

SEQ ID NO: 1801907 - RNA, 19 nt, Homo sapiens
  misc_RNA (1)...(19): siRNA sense strand
uaaccuggcauccugcuau

SEQ ID NO: 1801908 - RNA, 19 nt, Homo sapiens
  misc_RNA (1)...(19): siRNA sense strand
gcuaaccuacugaaugaug

SEQ ID NO: 1801909 - RNA, 19 nt, Homo sapiens
  misc_RNA (1)...(19): siRNA sense strand
aaaguuugcuggagacacu

SEQ ID NO: 1801910 - RNA, 19 nt, Homo sapiens
  misc_RNA (1)...(19): siRNA sense strand
gagaguauggcggcuggua

SEQ ID NO: 1801911 - RNA, 19 nt, Homo sapiens
  misc_RNA (1)...(19): siRNA sense strand
gaaccagggcaaguaugaa

SEQ ID NO: 1801912 - RNA, 19 nt, Homo sapiens
  misc_RNA (1)...(19): siRNA sense strand
uaaccuugcaguccuuuau

SEQ ID NO: 1801913 - RNA, 19 nt, Homo sapiens
  misc_RNA (1)...(19): siRNA sense strand
cacagguuaugauggcuuu

SEQ ID NO: 1801914 - RNA, 19 nt, Homo sapiens
  misc_RNA (1)...(19): siRNA sense strand
ucuaagacaaagcaaguaa

SEQ ID NO: 1801915 - RNA, 19 nt, Homo sapiens
  misc_RNA (1)...(19): siRNA sense strand
cuggaugcaugcugaagaa

SEQ ID NO: 1801916 - RNA, 19 nt, Homo sapiens
  misc_RNA (1)...(19): siRNA sense strand
gcuuacacaggaugaaauu

SEQ ID NO: 1801917 - RNA, 19 nt, Homo sapiens
  misc_RNA (1)...(19): siRNA sense strand
gaggacaaagacacugauu

SEQ ID NO: 1801918 - RNA, 19 nt, Homo sapiens
  misc_RNA (1)...(19): siRNA sense strand
guaugagcguagaguggaa

SEQ ID NO: 1801919 - RNA, 19 nt, Homo sapiens
  misc_RNA (1)...(19): siRNA sense strand
gccagaaccagggcaagua

SEQ ID NO: 1801920 - RNA, 19 nt, Homo sapiens
  misc_RNA (1)...(19): siRNA sense strand
ugagcacaauuccauuuua

SEQ ID NO: 1801921 - RNA, 19 nt, Homo sapiens
  misc_RNA (1)...(19): siRNA sense strand
gaugaugaaaguaauuugg

SEQ ID NO: 1801922 - RNA, 19 nt, Homo sapiens
  misc_RNA (1)...(19): siRNA sense strand
gcacuuuacagacgucaag

SEQ ID NO: 1801923 - RNA, 19 nt, Homo sapiens
  misc_RNA (1)...(19): siRNA sense strand
gaguuugguucuguagaug

SEQ ID NO: 1801924 - RNA, 19 nt, Homo sapiens
  misc_RNA (1)...(19): siRNA sense strand
gcaagcagaaacacuguac

SEQ ID NO: 1801925 - RNA, 19 nt, Homo sapiens
  misc_RNA (1)...(19): siRNA sense strand
gaaacaaggaaaguucaag

SEQ ID NO: 1801926 - RNA, 19 nt, Homo sapiens
  misc_RNA (1)...(19): siRNA sense strand
gaagaaagaugaugaaagu

SEQ ID NO: 1801927 - RNA, 19 nt, Homo sapiens
  misc_RNA (1)...(19): siRNA sense strand
guacaaagccugcaaaguu

SEQ ID NO: 1801928 - RNA, 19 nt, Homo sapiens
  misc_RNA (1)...(19): siRNA sense strand
gaggagaaaucaaacauga

SEQ ID NO: 1801929 - RNA, 19 nt, Homo sapiens
  misc_RNA (1)...(19): siRNA sense strand
ggaagucacuggagauguu

SEQ ID NO: 1801930 - RNA, 19 nt, Homo sapiens
  misc_RNA (1)...(19): siRNA sense strand
gggcaaguaugaagaagua

SEQ ID NO: 1801931 - RNA, 19 nt, Homo sapiens
  misc_RNA (1)...(19): siRNA sense strand
gaagaagcaucuggaguuu

SEQ ID NO: 1801932 - RNA, 19 nt, Homo sapiens
  misc_RNA (1)...(19): siRNA sense strand
cagaaacacuguacaaaga

SEQ ID NO: 1801933 - RNA, 19 nt, Homo sapiens
  misc_RNA (1)...(19): siRNA sense strand
guacagggaucagaauaaa

SEQ ID NO: 1801934 - RNA, 19 nt, Homo sapiens
  misc_RNA (1)...(19): siRNA sense strand
cagcuaaccuacugaauga

SEQ ID NO: 1801935 - RNA, 19 nt, Homo sapiens
  misc_RNA (1)...(19): siRNA sense strand
ccacaaugguguacauaaa

SEQ ID NO: 1801936 - RNA, 19 nt, Homo sapiens
  misc_RNA (1)...(19): siRNA sense strand
aagcagagccguuguguaa

SEQ ID NO: 1801937 - RNA, 19 nt, Homo sapiens
  misc_RNA (1)...(19): siRNA sense strand
gaaacacuguacaaagaga

SEQ ID NO: 1801938 - RNA, 19 nt, Homo sapiens
  misc_RNA (1)...(19): siRNA sense strand
aaagagcccucgagaucua

SEQ ID NO: 1801939 - RNA, 19 nt, Homo sapiens
  misc_RNA (1)...(19): siRNA sense strand
uggcagaagugcucaauga

SEQ ID NO: 1801940 - RNA, 19 nt, Homo sapiens
  misc_RNA (1)...(19): siRNA sense strand
agaagcaucuggaguuuau

SEQ ID NO: 1801941 - RNA, 19 nt, Homo sapiens
  misc_RNA (1)...(19): siRNA sense strand
guaauuugguggaggagaa

SEQ ID NO: 1801942 - RNA, 19 nt, Homo sapiens
  misc_RNA (1)...(19): siRNA sense strand
gcuaugaggucucguaaac

SEQ ID NO: 1801943 - RNA, 19 nt, Homo sapiens
  misc_RNA (1)...(19): siRNA sense strand
gaugcaugcugaagaaaga

SEQ ID NO: 1801944 - RNA, 19 nt, Homo sapiens
  misc_RNA (1)...(19): siRNA sense strand
caacguggcuaagacgaaa

SEQ ID NO: 1801945 - RNA, 19 nt, Homo sapiens
  misc_RNA (1)...(19): siRNA sense strand
gcuggaagcuuugaagaau

SEQ ID NO: 1801946 - RNA, 19 nt, Homo sapiens
  misc_RNA (1)...(19): siRNA sense strand
gcagaaacguuagaagaag

SEQ ID NO: 1801947 - RNA, 19 nt, Homo sapiens
  misc_RNA (1)...(19): siRNA sense strand
uuacagacgucaaggcaaa

SEQ ID NO: 1801948 - RNA, 19 nt, Homo sapiens
  misc_RNA (1)...(19): siRNA sense strand
acagggaucagaauaaaua

SEQ ID NO: 1801949 - RNA, 19 nt, Homo sapiens
  misc_RNA (1)...(19): siRNA sense strand
ggacaaagacacugauucu

SEQ ID NO: 1801950 - RNA, 19 nt, Homo sapiens
  misc_RNA (1)...(19): siRNA sense strand
ggaguuugguucuguagau

SEQ ID NO: 1801951 - RNA, 19 nt, Homo sapiens
  misc_RNA (1)...(19): siRNA sense strand
ucaaagagcccucgagauc

SEQ ID NO: 1801952 - RNA, 19 nt, Homo sapiens
  misc_RNA (1)...(19): siRNA sense strand
uaaacagggucuugacaau

SEQ ID NO: 1801953 - RNA, 19 nt, Homo sapiens
  misc_RNA (1)...(19): siRNA sense strand
uacaaagccugcaaaguug

SEQ ID NO: 1801954 - RNA, 19 nt, Homo sapiens
  misc_RNA (1)...(19): siRNA sense strand
ugaaguguuugaagaaaga

SEQ ID NO: 1801955 - RNA, 19 nt, Homo sapiens
  misc_RNA (1)...(19): siRNA sense strand
uaaaagagcucuggaaauc

SEQ ID NO: 1801956 - RNA, 19 nt, Homo sapiens
  misc_RNA (1)...(19): siRNA sense strand
gaauaaccuugcaguccuu

SEQ ID NO: 1801957 - RNA, 19 nt, Homo sapiens
  misc_RNA (1)...(19): siRNA sense strand
gcagcuaaccuacugaaug

SEQ ID NO: 1801958 - RNA, 19 nt, Homo sapiens
  misc_RNA (1)...(19): siRNA sense strand
gcagaaacacuguacaaag

SEQ ID NO: 1801959 - RNA, 19 nt, Homo sapiens
  misc_RNA (1)...(19): siRNA sense strand
gcagagccguuguguaaaa

SEQ ID NO: 1801960 - RNA, 19 nt, Homo sapiens
  misc_RNA (1)...(19): siRNA sense strand
agaaagagaagaaugcaaa

SEQ ID NO: 1801961 - RNA, 19 nt, Homo sapiens
  misc_RNA (1)...(19): siRNA sense strand
caaagaugcagcuaaccua

SEQ ID NO: 1801962 - RNA, 19 nt, Homo sapiens
  misc_RNA (1)...(19): siRNA sense strand
gaaagggaguuugguucug

SEQ ID NO: 1801963 - RNA, 19 nt, Homo sapiens
  misc_RNA (1)...(19): siRNA sense strand
agacaaagcaaguaauuca

SEQ ID NO: 1801964 - RNA, 19 nt, Homo sapiens
  misc_RNA (1)...(19): siRNA sense strand
gagaagaaugcaaaggaaa

SEQ ID NO: 1801965 - RNA, 19 nt, Homo sapiens
  misc_RNA (1)...(19): siRNA sense strand
agagaagaaugcaaaggaa

SEQ ID NO: 1801966 - RNA, 19 nt, Homo sapiens
  misc_RNA (1)...(19): siRNA sense strand
uggaagcuuugaagaauga

SEQ ID NO: 1801967 - RNA, 19 nt, Homo sapiens
  misc_RNA (1)...(19): siRNA sense strand
agaagaagcaucuggaguu

SEQ ID NO: 1801968 - RNA, 19 nt, Homo sapiens
  misc_RNA (1)...(19): siRNA sense strand
cauaaaggaagacaaguug

SEQ ID NO: 1801969 - RNA, 19 nt, Homo sapiens
  misc_RNA (1)...(19): siRNA sense strand
guacauaaaggaagacaag

SEQ ID NO: 1801970 - RNA, 19 nt, Homo sapiens
  misc_RNA (1)...(19): siRNA sense strand
guaaacagggucuugacaa

SEQ ID NO: 1801971 - RNA, 19 nt, Homo sapiens
  misc_RNA (1)...(19): siRNA sense strand
uaaauaacuuggccuuacu

SEQ ID NO: 1801972 - RNA, 19 nt, Homo sapiens
  misc_RNA (1)...(19): siRNA sense strand
caucuggaguuuaugaauc

SEQ ID NO: 1801973 - RNA, 19 nt, Homo sapiens
  misc_RNA (1)...(19): siRNA sense strand
uuaaauaacuuggccuuac

SEQ ID NO: 1801974 - RNA, 19 nt, Homo sapiens
  misc_RNA (1)...(19): siRNA sense strand
aaagagggaaguacaaaga

SEQ ID NO: 1801975 - RNA, 19 nt, Homo sapiens
  misc_RNA (1)...(19): siRNA sense strand
agacacugauucuaccaaa

SEQ ID NO: 1801976 - RNA, 19 nt, Homo sapiens
  misc_RNA (1)...(19): siRNA sense strand
gggaugaacuggccaacac

SEQ ID NO: 1801977 - RNA, 19 nt, Homo sapiens
  misc_RNA (1)...(19): siRNA sense strand
gggaucagaauaaauacaa

SEQ ID NO: 1801978 - RNA, 19 nt, Homo sapiens
  misc_RNA (1)...(19): siRNA sense strand
caaugacccugagaacaug

SEQ ID NO: 1801979 - RNA, 19 nt, Homo sapiens
  misc_RNA (1)...(19): siRNA sense strand
ucaaugacccugagaacau

SEQ ID NO: 1801980 - RNA, 19 nt, Homo sapiens
  misc_RNA (1)...(19): siRNA sense strand
gcaaguaugaagaaguaga

SEQ ID NO: 1801981 - RNA, 19 nt, Homo sapiens
  misc_RNA (1)...(19): siRNA sense strand
gaagcagagccguugugua

SEQ ID NO: 1801982 - RNA, 19 nt, Homo sapiens
  misc_RNA (1)...(19): siRNA sense strand
gcagaagagugagcagucu

SEQ ID NO: 1801983 - RNA, 19 nt, Homo sapiens
  misc_RNA (1)...(19): siRNA sense strand
ggagaagcuuacacaggau

SEQ ID NO: 1801984 - RNA, 19 nt, Homo sapiens
  misc_RNA (1)...(19): siRNA sense strand
auacaaagaugcagcuaac

SEQ ID NO: 1801985 - RNA, 19 nt, Homo sapiens
  misc_RNA (1)...(19): siRNA sense strand
gaaugcaaaggaaagcaaa

SEQ ID NO: 1801986 - RNA, 19 nt, Homo sapiens
  misc_RNA (1)...(19): siRNA sense strand
caaguaugaagaaguagaa

SEQ ID NO: 1801987 - RNA, 19 nt, Homo sapiens
  misc_RNA (1)...(19): siRNA sense strand
uugccaagcaguuaaauaa

SEQ ID NO: 1801988 - RNA, 19 nt, Homo sapiens
  misc_RNA (1)...(19): siRNA sense strand
uugcaguccuuuaugguaa

SEQ ID NO: 1801989 - RNA, 19 nt, Homo sapiens
  misc_RNA (1)...(19): siRNA sense strand
ugaaugaugccuuggcuau

SEQ ID NO: 1801990 - RNA, 19 nt, Homo sapiens
  misc_RNA (1)...(19): siRNA sense strand
aacagggucuugacaaugu

SEQ ID NO: 1801991 - RNA, 19 nt, Homo sapiens
  misc_RNA (1)...(19): siRNA sense strand
ugaagcugcagaaacguua

SEQ ID NO: 1801992 - RNA, 19 nt, Homo sapiens
  misc_RNA (1)...(19): siRNA sense strand
caaauuugaagcugcagaa

SEQ ID NO: 1801993 - RNA, 19 nt, Homo sapiens
  misc_RNA (1)...(19): siRNA sense strand
ggacaucuuuuggagagua

SEQ ID NO: 1801994 - RNA, 19 nt, Homo sapiens
  misc_RNA (1)...(19): siRNA sense strand
uaaaggaagacaaguugga

SEQ ID NO: 1801995 - RNA, 19 nt, Homo sapiens
  misc_RNA (1)...(19): siRNA sense strand
aaagggaguuugguucugu

SEQ ID NO: 1801996 - RNA, 19 nt, Homo sapiens
  misc_RNA (1)...(19): siRNA sense strand
aaugaugccuuggcuauuc

SEQ ID NO: 1801997 - RNA, 19 nt, Homo sapiens
  misc_RNA (1)...(19): siRNA sense strand
ggaggagaaaucaaacaug

SEQ ID NO: 1801998 - RNA, 19 nt, Homo sapiens
  misc_RNA (1)...(19): siRNA sense strand
gaaagagaagaaugcaaag

SEQ ID NO: 1801999 - RNA, 19 nt, Homo sapiens
  misc_RNA (1)...(19): siRNA sense strand
gaagaaagagaagaaugca

SEQ ID NO: 1802000 - RNA, 19 nt, Homo sapiens
  misc_RNA (1)...(19): siRNA sense strand
gaaugaugccuuggcuauu

SEQ ID NO: 1802001 - RNA, 19 nt, Homo sapiens
  misc_RNA (1)...(19): siRNA sense strand
acacugauucuaccaaaga

SEQ ID NO: 1802002 - RNA, 19 nt, Homo sapiens
  misc_RNA (1)...(19): siRNA sense strand
acaaagacacugauucuac

SEQ ID NO: 1802003 - RNA, 19 nt, Homo sapiens
  misc_RNA (1)...(19): siRNA sense strand
gacaaagacacugauucua

SEQ ID NO: 1802004 - RNA, 19 nt, Homo sapiens
  misc_RNA (1)...(19): siRNA sense strand
gcacaugaaagggaguuug

SEQ ID NO: 1802005 - RNA, 19 nt, Homo sapiens
  misc_RNA (1)...(19): siRNA sense strand
gauguugccaagcaguuaa

SEQ ID NO: 1802006 - RNA, 19 nt, Homo sapiens
  misc_RNA (1)...(19): siRNA sense strand
uaugaggucucguaaacag

SEQ ID NO: 1802007 - RNA, 19 nt, Homo sapiens
  misc_RNA (1)...(19): siRNA sense strand
uaaccuggcauccugcuau

SEQ ID NO: 1802008 - RNA, 19 nt, Homo sapiens
  misc_RNA (1)...(19): siRNA sense strand
gcuaaccuacugaaugaug

SEQ ID NO: 1802009 - RNA, 19 nt, Homo sapiens
  misc_RNA (1)...(19): siRNA sense strand
aaaguuugcuggagacacu

SEQ ID NO: 1802010 - RNA, 19 nt, Homo sapiens
  misc_RNA (1)...(19): siRNA sense strand
gagaguauggcggcuggua

SEQ ID NO: 1802011 - RNA, 19 nt, Homo sapiens
  misc_RNA (1)...(19): siRNA sense strand
gaaccagggcaaguaugaa

SEQ ID NO: 1802012 - RNA, 19 nt, Homo sapiens
  misc_RNA (1)...(19): siRNA sense strand
uaaccuugcaguccuuuau

SEQ ID NO: 1802013 - RNA, 19 nt, Homo sapiens
  misc_RNA (1)...(19): siRNA sense strand
cacagguuaugauggcuuu

SEQ ID NO: 1802014 - RNA, 19 nt, Homo sapiens
  misc_RNA (1)...(19): siRNA sense strand
ucuaagacaaagcaaguaa

SEQ ID NO: 1802015 - RNA, 19 nt, Homo sapiens
  misc_RNA (1)...(19): siRNA sense strand
cuggaugcaugcugaagaa

SEQ ID NO: 1802016 - RNA, 19 nt, Homo sapiens
  misc_RNA (1)...(19): siRNA sense strand
gcuuacacaggaugaaauu

SEQ ID NO: 1802017 - RNA, 19 nt, Homo sapiens
  misc_RNA (1)...(19): siRNA sense strand
gaggacaaagacacugauu

SEQ ID NO: 1802018 - RNA, 19 nt, Homo sapiens
  misc_RNA (1)...(19): siRNA sense strand
guaugagcguagaguggaa

SEQ ID NO: 1802019 - RNA, 19 nt, Homo sapiens
  misc_RNA (1)...(19): siRNA sense strand
gccagaaccagggcaagua

SEQ ID NO: 1802020 - RNA, 19 nt, Homo sapiens
  misc_RNA (1)...(19): siRNA sense strand
ugagcacaauuccauuuua

SEQ ID NO: 1802021 - RNA, 19 nt, Homo sapiens
  misc_RNA (1)...(19): siRNA sense strand
gaugaugaaaguaauuugg

SEQ ID NO: 1802022 - RNA, 19 nt, Homo sapiens
  misc_RNA (1)...(19): siRNA sense strand
gcacuuuacagacgucaag

SEQ ID NO: 1802023 - RNA, 19 nt, Homo sapiens
  misc_RNA (1)...(19): siRNA sense strand
gaguuugguucuguagaug

SEQ ID NO: 1802024 - RNA, 19 nt, Homo sapiens
  misc_RNA (1)...(19): siRNA sense strand
gcaagcagaaacacuguac

SEQ ID NO: 1802025 - RNA, 19 nt, Homo sapiens
  misc_RNA (1)...(19): siRNA sense strand
gaaacaaggaaaguucaag

SEQ ID NO: 1802026 - RNA, 19 nt, Homo sapiens
  misc_RNA (1)...(19): siRNA sense strand
gaaagugcauccacagaga

SEQ ID NO: 1802027 - RNA, 19 nt, Homo sapiens
  misc_RNA (1)...(19): siRNA sense strand
gcaacgagcucuaugacau

SEQ ID NO: 1802028 - RNA, 19 nt, Homo sapiens
  misc_RNA (1)...(19): siRNA sense strand
gcaagaacgugcaucuguu

SEQ ID NO: 1802029 - RNA, 19 nt, Homo sapiens
  misc_RNA (1)...(19): siRNA sense strand
gcgaauaccuguccuacga

SEQ ID NO: 1802030 - RNA, 19 nt, Homo sapiens
  misc_RNA (1)...(19): siRNA sense strand
gacaagcacugccacaaga

SEQ ID NO: 1802031 - RNA, 19 nt, Homo sapiens
  misc_RNA (1)...(19): siRNA sense strand
gaagacauuugaggaauuc

SEQ ID NO: 1802032 - RNA, 19 nt, Homo sapiens
  misc_RNA (1)...(19): siRNA sense strand
uggaagaucuugucugcua

SEQ ID NO: 1802033 - RNA, 19 nt, Homo sapiens
  misc_RNA (1)...(19): siRNA sense strand
gagcaggcauagacaagaa

SEQ ID NO: 1802034 - RNA, 19 nt, Homo sapiens
  misc_RNA (1)...(19): siRNA sense strand
cgucaucgcugucuucuuc

SEQ ID NO: 1802035 - RNA, 19 nt, Homo sapiens
  misc_RNA (1)...(19): siRNA sense strand
gaccugggcucguaugugu

SEQ ID NO: 1802036 - RNA, 19 nt, Homo sapiens
  misc_RNA (1)...(19): siRNA sense strand
caacgugucugccauguac

SEQ ID NO: 1802037 - RNA, 19 nt, Homo sapiens
  misc_RNA (1)...(19): siRNA sense strand
gagcagccauucaucaaca

SEQ ID NO: 1802038 - RNA, 19 nt, Homo sapiens
  misc_RNA (1)...(19): siRNA sense strand
gugaagaucugugacuuug

SEQ ID NO: 1802039 - RNA, 19 nt, Homo sapiens
  misc_RNA (1)...(19): siRNA sense strand
gcagaucaaugaggaguuc

SEQ ID NO: 1802040 - RNA, 19 nt, Homo sapiens
  misc_RNA (1)...(19): siRNA sense strand
ggaggaguuugagcagaua

SEQ ID NO: 1802041 - RNA, 19 nt, Homo sapiens
  misc_RNA (1)...(19): siRNA sense strand
ggaaagaauaagacuguga

SEQ ID NO: 1802042 - RNA, 19 nt, Homo sapiens
  misc_RNA (1)...(19): siRNA sense strand
acacagaacucuccagcau

SEQ ID NO: 1802043 - RNA, 19 nt, Homo sapiens
  misc_RNA (1)...(19): siRNA sense strand
ugaagacauuugaggaauu

SEQ ID NO: 1802044 - RNA, 19 nt, Homo sapiens
  misc_RNA (1)...(19): siRNA sense strand
gaacaucacggaggaguca

SEQ ID NO: 1802045 - RNA, 19 nt, Homo sapiens
  misc_RNA (1)...(19): siRNA sense strand
guggaaggcuccgaggaua

SEQ ID NO: 1802046 - RNA, 19 nt, Homo sapiens
  misc_RNA (1)...(19): siRNA sense strand
gaugaagacauuugaggaa

SEQ ID NO: 1802047 - RNA, 19 nt, Homo sapiens
  misc_RNA (1)...(19): siRNA sense strand
ggagagcaccgaggucauu

SEQ ID NO: 1802048 - RNA, 19 nt, Homo sapiens
  misc_RNA (1)...(19): siRNA sense strand
ugaccgaccuccuggugaa

SEQ ID NO: 1802049 - RNA, 19 nt, Homo sapiens
  misc_RNA (1)...(19): siRNA sense strand
gcacgagggccacuaugug

SEQ ID NO: 1802050 - RNA, 19 nt, Homo sapiens
  misc_RNA (1)...(19): siRNA sense strand
agaauaagacugugagcaa

SEQ ID NO: 1802051 - RNA, 19 nt, Homo sapiens
  misc_RNA (1)...(19): siRNA sense strand
ccuccaggaugaagacauu

SEQ ID NO: 1802052 - RNA, 19 nt, Homo sapiens
  misc_RNA (1)...(19): siRNA sense strand
ggugaagaucugugacuuu

SEQ ID NO: 1802053 - RNA, 19 nt, Homo sapiens
  misc_RNA (1)...(19): siRNA sense strand
caaaggcucuguggacaac

SEQ ID NO: 1802054 - RNA, 19 nt, Homo sapiens
  misc_RNA (1)...(19): siRNA sense strand
gccuggagcugguggugaa

SEQ ID NO: 1802055 - RNA, 19 nt, Homo sapiens
  misc_RNA (1)...(19): siRNA sense strand
ggacaccuggaccgaguuu

SEQ ID NO: 1802056 - RNA, 19 nt, Homo sapiens
  misc_RNA (1)...(19): siRNA sense strand
aaagcgacguggugaagau

SEQ ID NO: 1802057 - RNA, 19 nt, Homo sapiens
  misc_RNA (1)...(19): siRNA sense strand
ggaaagcgacguggugaag

SEQ ID NO: 1802058 - RNA, 19 nt, Homo sapiens
  misc_RNA (1)...(19): siRNA sense strand
gcucaucuacuucuaugug

SEQ ID NO: 1802059 - RNA, 19 nt, Homo sapiens
  misc_RNA (1)...(19): siRNA sense strand
ucuaugacauccagcuguu

SEQ ID NO: 1802060 - RNA, 19 nt, Homo sapiens
  misc_RNA (1)...(19): siRNA sense strand
gaaagcgacguggugaaga

SEQ ID NO: 1802061 - RNA, 19 nt, Homo sapiens
  misc_RNA (1)...(19): siRNA sense strand
ucaagauccucauucacau

SEQ ID NO: 1802062 - RNA, 19 nt, Homo sapiens
  misc_RNA (1)...(19): siRNA sense strand
acaaguguguggucuccaa

SEQ ID NO: 1802063 - RNA, 19 nt, Homo sapiens
  misc_RNA (1)...(19): siRNA sense strand
ugagcaagcuggugaucca

SEQ ID NO: 1802064 - RNA, 19 nt, Homo sapiens
  misc_RNA (1)...(19): siRNA sense strand
guuccuggcuucccgaaag

SEQ ID NO: 1802065 - RNA, 19 nt, Homo sapiens
  misc_RNA (1)...(19): siRNA sense strand
cggaggaguuugagcagau

SEQ ID NO: 1802066 - RNA, 19 nt, Homo sapiens
  misc_RNA (1)...(19): siRNA sense strand
cccgggacaucuacaaaga

SEQ ID NO: 1802067 - RNA, 19 nt, Homo sapiens
  misc_RNA (1)...(19): siRNA sense strand
gagcucaagauccucauuc

SEQ ID NO: 1802068 - RNA, 19 nt, Homo sapiens
  misc_RNA (1)...(19): siRNA sense strand
ggaggagucacacgucauc

SEQ ID NO: 1802069 - RNA, 19 nt, Homo sapiens
  misc_RNA (1)...(19): siRNA sense strand
caacggcauccagcgauuu

SEQ ID NO: 1802070 - RNA, 19 nt, Homo sapiens
  misc_RNA (1)...(19): siRNA sense strand
caccauggcccuacacauc

SEQ ID NO: 1802071 - RNA, 19 nt, Homo sapiens
  misc_RNA (1)...(19): siRNA sense strand
cugaaagcaucuucgacaa

SEQ ID NO: 1802072 - RNA, 19 nt, Homo sapiens
  misc_RNA (1)...(19): siRNA sense strand
ggaaggcuccgaggauaag

SEQ ID NO: 1802073 - RNA, 19 nt, Homo sapiens
  misc_RNA (1)...(19): siRNA sense strand
ggaggaugcgggaccguau

SEQ ID NO: 1802074 - RNA, 19 nt, Homo sapiens
  misc_RNA (1)...(19): siRNA sense strand
cggcucaucuacuucuaug

SEQ ID NO: 1802075 - RNA, 19 nt, Homo sapiens
  misc_RNA (1)...(19): siRNA sense strand
uggugaagcugcccgugaa

SEQ ID NO: 1802076 - RNA, 19 nt, Homo sapiens
  misc_RNA (1)...(19): siRNA sense strand
gaagaucuugucugcuaca

SEQ ID NO: 1802077 - RNA, 19 nt, Homo sapiens
  misc_RNA (1)...(19): siRNA sense strand
ugucugccauguacaagug

SEQ ID NO: 1802078 - RNA, 19 nt, Homo sapiens
  misc_RNA (1)...(19): siRNA sense strand
acaacggcauccagcgauu

SEQ ID NO: 1802079 - RNA, 19 nt, Homo sapiens
  misc_RNA (1)...(19): siRNA sense strand
agagacggcacaaggauga

SEQ ID NO: 1802080 - RNA, 19 nt, Homo sapiens
  misc_RNA (1)...(19): siRNA sense strand
gggcuucuccagaccaaga

SEQ ID NO: 1802081 - RNA, 19 nt, Homo sapiens
  misc_RNA (1)...(19): siRNA sense strand
cgcccgaguuccaguggua

SEQ ID NO: 1802082 - RNA, 19 nt, Homo sapiens
  misc_RNA (1)...(19): siRNA sense strand
caacgagcucuaugacauc

SEQ ID NO: 1802083 - RNA, 19 nt, Homo sapiens
  misc_RNA (1)...(19): siRNA sense strand
cagauagagagcaggcaua

SEQ ID NO: 1802084 - RNA, 19 nt, Homo sapiens
  misc_RNA (1)...(19): siRNA sense strand
ggacaaccagacagacagu

SEQ ID NO: 1802085 - RNA, 19 nt, Homo sapiens
  misc_RNA (1)...(19): siRNA sense strand
cuccucaucuucuguaaca

SEQ ID NO: 1802086 - RNA, 19 nt, Homo sapiens
  misc_RNA (1)...(19): siRNA sense strand
caacaaggugggccaggau

SEQ ID NO: 1802087 - RNA, 19 nt, Homo sapiens
  misc_RNA (1)...(19): siRNA sense strand
ggacacccugcaagauguu

SEQ ID NO: 1802088 - RNA, 19 nt, Homo sapiens
  misc_RNA (1)...(19): siRNA sense strand
gagcaccgaggucauugug

SEQ ID NO: 1802089 - RNA, 19 nt, Homo sapiens
  misc_RNA (1)...(19): siRNA sense strand
gagagcaggcauagacaag

SEQ ID NO: 1802090 - RNA, 19 nt, Homo sapiens
  misc_RNA (1)...(19): siRNA sense strand
ucauggugaucguggaguu

SEQ ID NO: 1802091 - RNA, 19 nt, Homo sapiens
  misc_RNA (1)...(19): siRNA sense strand
ggaggagcaaugcgaauac

SEQ ID NO: 1802092 - RNA, 19 nt, Homo sapiens
  misc_RNA (1)...(19): siRNA sense strand
cacaugcccuggugcucaa

SEQ ID NO: 1802093 - RNA, 19 nt, Homo sapiens
  misc_RNA (1)...(19): siRNA sense strand
gacacgcucuuggucaaca

SEQ ID NO: 1802094 - RNA, 19 nt, Homo sapiens
  misc_RNA (1)...(19): siRNA sense strand
ccaggaugaagacauuuga

SEQ ID NO: 1802095 - RNA, 19 nt, Homo sapiens
  misc_RNA (1)...(19): siRNA sense strand
acgagcaucugcgcuggua

SEQ ID NO: 1802096 - RNA, 19 nt, Homo sapiens
  misc_RNA (1)...(19): siRNA sense strand
uggacacccugcaagaugu

SEQ ID NO: 1802097 - RNA, 19 nt, Homo sapiens
  misc_RNA (1)...(19): siRNA sense strand
ccaugugggugcccugucu

SEQ ID NO: 1802098 - RNA, 19 nt, Homo sapiens
  misc_RNA (1)...(19): siRNA sense strand
ccagagggauggaguuccu

SEQ ID NO: 1802099 - RNA, 19 nt, Homo sapiens
  misc_RNA (1)...(19): siRNA sense strand
gaccauggaagaucuuguc

SEQ ID NO: 1802100 - RNA, 19 nt, Homo sapiens
  misc_RNA (1)...(19): siRNA sense strand
ugagcccgcugaccaugga

SEQ ID NO: 1802101 - RNA, 19 nt, Homo sapiens
  misc_RNA (1)...(19): siRNA sense strand
ucguggaguucugcaagua

SEQ ID NO: 1802102 - RNA, 19 nt, Homo sapiens
  misc_RNA (1)...(19): siRNA sense strand
uggaggagcaaugcgaaua

SEQ ID NO: 1802103 - RNA, 19 nt, Homo sapiens
  misc_RNA (1)...(19): siRNA sense strand
ugacaagcacugccacaag

SEQ ID NO: 1802104 - RNA, 19 nt, Homo sapiens
  misc_RNA (1)...(19): siRNA sense strand
gcugcacgaugcccuguac

SEQ ID NO: 1802105 - RNA, 19 nt, Homo sapiens
  misc_RNA (1)...(19): siRNA sense strand
ugucggagcucaagauccu

SEQ ID NO: 1802106 - RNA, 19 nt, Homo sapiens
  misc_RNA (1)...(19): siRNA sense strand
caagaccucaugccacagu

SEQ ID NO: 1802107 - RNA, 19 nt, Homo sapiens
  misc_RNA (1)...(19): siRNA sense strand
acggcaaccucuccaacuu

SEQ ID NO: 1802108 - RNA, 19 nt, Homo sapiens
  misc_RNA (1)...(19): siRNA sense strand
gaugcgggaccguaucugu

SEQ ID NO: 1802109 - RNA, 19 nt, Homo sapiens
  misc_RNA (1)...(19): siRNA sense strand
ccgaguuuguggagggaaa

SEQ ID NO: 1802110 - RNA, 19 nt, Homo sapiens
  misc_RNA (1)...(19): siRNA sense strand
guggagggaaagaauaaga

SEQ ID NO: 1802111 - RNA, 19 nt, Homo sapiens
  misc_RNA (1)...(19): siRNA sense strand
ucacaggcaacgagcucua

SEQ ID NO: 1802112 - RNA, 19 nt, Homo sapiens
  misc_RNA (1)...(19): siRNA sense strand
gagaggcugcuggaggaaa

SEQ ID NO: 1802113 - RNA, 19 nt, Homo sapiens
  misc_RNA (1)...(19): siRNA sense strand
aagccgacagcuacaagua

SEQ ID NO: 1802114 - RNA, 19 nt, Homo sapiens
  misc_RNA (1)...(19): siRNA sense strand
gagagcaccgaggucauug

SEQ ID NO: 1802115 - RNA, 19 nt, Homo sapiens
  misc_RNA (1)...(19): siRNA sense strand
ccaaggcgagaccugcauu

SEQ ID NO: 1802116 - RNA, 19 nt, Homo sapiens
  misc_RNA (1)...(19): siRNA sense strand
ugaaagcaucuucgacaag

SEQ ID NO: 1802117 - RNA, 19 nt, Homo sapiens
  misc_RNA (1)...(19): siRNA sense strand
caagauccucauucacauc

SEQ ID NO: 1802118 - RNA, 19 nt, Homo sapiens
  misc_RNA (1)...(19): siRNA sense strand
cucaagauccucauucaca

SEQ ID NO: 1802119 - RNA, 19 nt, Homo sapiens
  misc_RNA (1)...(19): siRNA sense strand
ggagcucaagauccucauu

SEQ ID NO: 1802120 - RNA, 19 nt, Homo sapiens
  misc_RNA (1)...(19): siRNA sense strand
uggaaggcuccgaggauaa

SEQ ID NO: 1802121 - RNA, 19 nt, Homo sapiens
  misc_RNA (1)...(19): siRNA sense strand
caagccauccgaggagcua

SEQ ID NO: 1802122 - RNA, 19 nt, Homo sapiens
  misc_RNA (1)...(19): siRNA sense strand
ccaacgugucugccaugua

SEQ ID NO: 1802123 - RNA, 19 nt, Homo sapiens
  misc_RNA (1)...(19): siRNA sense strand
ugacaccguggccgugaaa

SEQ ID NO: 1802124 - RNA, 19 nt, Homo sapiens
  misc_RNA (1)...(19): siRNA sense strand
gugagagacggcacaagga

SEQ ID NO: 1802125 - RNA, 19 nt, Homo sapiens
  misc_RNA (1)...(19): siRNA sense strand
agagugacgugugguccuu

SEQ ID NO: 1802126 - RNA, 19 nt, Homo sapiens
  misc_RNA (1)...(19): siRNA sense strand
gaaagugcauccacagaga

SEQ ID NO: 1802127 - RNA, 19 nt, Homo sapiens
  misc_RNA (1)...(19): siRNA sense strand
gcaacgagcucuaugacau

SEQ ID NO: 1802128 - RNA, 19 nt, Homo sapiens
  misc_RNA (1)...(19): siRNA sense strand
gcaagaacgugcaucuguu

SEQ ID NO: 1802129 - RNA, 19 nt, Homo sapiens
  misc_RNA (1)...(19): siRNA sense strand
gcgaauaccuguccuacga

SEQ ID NO: 1802130 - RNA, 19 nt, Homo sapiens
  misc_RNA (1)...(19): siRNA sense strand
gacaagcacugccacaaga

SEQ ID NO: 1802131 - RNA, 19 nt, Homo sapiens
  misc_RNA (1)...(19): siRNA sense strand
gaagacauuugaggaauuc

SEQ ID NO: 1802132 - RNA, 19 nt, Homo sapiens
  misc_RNA (1)...(19): siRNA sense strand
uggaagaucuugucugcua

SEQ ID NO: 1802133 - RNA, 19 nt, Homo sapiens
  misc_RNA (1)...(19): siRNA sense strand
gagcaggcauagacaagaa

SEQ ID NO: 1802134 - RNA, 19 nt, Homo sapiens
  misc_RNA (1)...(19): siRNA sense strand
cgucaucgcugucuucuuc

SEQ ID NO: 1802135 - RNA, 19 nt, Homo sapiens
  misc_RNA (1)...(19): siRNA sense strand
gaccugggcucguaugugu

SEQ ID NO: 1802136 - RNA, 19 nt, Homo sapiens
  misc_RNA (1)...(19): siRNA sense strand
caacgugucugccauguac

SEQ ID NO: 1802137 - RNA, 19 nt, Homo sapiens
  misc_RNA (1)...(19): siRNA sense strand
gagcagccauucaucaaca

SEQ ID NO: 1802138 - RNA, 19 nt, Homo sapiens
  misc_RNA (1)...(19): siRNA sense strand
gugaagaucugugacuuug

SEQ ID NO: 1802139 - RNA, 19 nt, Homo sapiens
  misc_RNA (1)...(19): siRNA sense strand
gcagaucaaugaggaguuc

SEQ ID NO: 1802140 - RNA, 19 nt, Homo sapiens
  misc_RNA (1)...(19): siRNA sense strand
ggaggaguuugagcagaua

SEQ ID NO: 1802141 - RNA, 19 nt, Homo sapiens
  misc_RNA (1)...(19): siRNA sense strand
ggaaagaauaagacuguga

SEQ ID NO: 1802142 - RNA, 19 nt, Homo sapiens
  misc_RNA (1)...(19): siRNA sense strand
acacagaacucuccagcau

SEQ ID NO: 1802143 - RNA, 19 nt, Homo sapiens
  misc_RNA (1)...(19): siRNA sense strand
ugaagacauuugaggaauu

SEQ ID NO: 1802144 - RNA, 19 nt, Homo sapiens
  misc_RNA (1)...(19): siRNA sense strand
gaacaucacggaggaguca

SEQ ID NO: 1802145 - RNA, 19 nt, Homo sapiens
  misc_RNA (1)...(19): siRNA sense strand
guggaaggcuccgaggaua

SEQ ID NO: 1802146 - RNA, 19 nt, Homo sapiens
  misc_RNA (1)...(19): siRNA sense strand
gaugaagacauuugaggaa

SEQ ID NO: 1802147 - RNA, 19 nt, Homo sapiens
  misc_RNA (1)...(19): siRNA sense strand
ggagagcaccgaggucauu

SEQ ID NO: 1802148 - RNA, 19 nt, Homo sapiens
  misc_RNA (1)...(19): siRNA sense strand
ugaccgaccuccuggugaa

SEQ ID NO: 1802149 - RNA, 19 nt, Homo sapiens
  misc_RNA (1)...(19): siRNA sense strand
gcacgagggccacuaugug

SEQ ID NO: 1802150 - RNA, 19 nt, Homo sapiens
  misc_RNA (1)...(19): siRNA sense strand
agaauaagacugugagcaa

SEQ ID NO: 1802151 - RNA, 19 nt, Homo sapiens
  misc_RNA (1)...(19): siRNA sense strand
ccuccaggaugaagacauu

SEQ ID NO: 1802152 - RNA, 19 nt, Homo sapiens
  misc_RNA (1)...(19): siRNA sense strand
ggugaagaucugugacuuu

SEQ ID NO: 1802153 - RNA, 19 nt, Homo sapiens
  misc_RNA (1)...(19): siRNA sense strand
caaaggcucuguggacaac

SEQ ID NO: 1802154 - RNA, 19 nt, Homo sapiens
  misc_RNA (1)...(19): siRNA sense strand
gccuggagcugguggugaa

SEQ ID NO: 1802155 - RNA, 19 nt, Homo sapiens
  misc_RNA (1)...(19): siRNA sense strand
ggacaccuggaccgaguuu

SEQ ID NO: 1802156 - RNA, 19 nt, Homo sapiens
  misc_RNA (1)...(19): siRNA sense strand
aaagcgacguggugaagau

SEQ ID NO: 1802157 - RNA, 19 nt, Homo sapiens
  misc_RNA (1)...(19): siRNA sense strand
ggaaagcgacguggugaag

SEQ ID NO: 1802158 - RNA, 19 nt, Homo sapiens
  misc_RNA (1)...(19): siRNA sense strand
gcucaucuacuucuaugug

SEQ ID NO: 1802159 - RNA, 19 nt, Homo sapiens
  misc_RNA (1)...(19): siRNA sense strand
ucuaugacauccagcuguu

SEQ ID NO: 1802160 - RNA, 19 nt, Homo sapiens
  misc_RNA (1)...(19): siRNA sense strand
gaaagcgacguggugaaga

SEQ ID NO: 1802161 - RNA, 19 nt, Homo sapiens
  misc_RNA (1)...(19): siRNA sense strand
ucaagauccucauucacau

SEQ ID NO: 1802162 - RNA, 19 nt, Homo sapiens
  misc_RNA (1)...(19): siRNA sense strand
acaaguguguggucuccaa

SEQ ID NO: 1802163 - RNA, 19 nt, Homo sapiens
  misc_RNA (1)...(19): siRNA sense strand
ugagcaagcuggugaucca

SEQ ID NO: 1802164 - RNA, 19 nt, Homo sapiens
  misc_RNA (1)...(19): siRNA sense strand
guuccuggcuucccgaaag

SEQ ID NO: 1802165 - RNA, 19 nt, Homo sapiens
  misc_RNA (1)...(19): siRNA sense strand
cggaggaguuugagcagau

SEQ ID NO: 1802166 - RNA, 19 nt, Homo sapiens
  misc_RNA (1)...(19): siRNA sense strand
cccgggacaucuacaaaga

SEQ ID NO: 1802167 - RNA, 19 nt, Homo sapiens
  misc_RNA (1)...(19): siRNA sense strand
gagcucaagauccucauuc

SEQ ID NO: 1802168 - RNA, 19 nt, Homo sapiens
  misc_RNA (1)...(19): siRNA sense strand
ggaggagucacacgucauc

SEQ ID NO: 1802169 - RNA, 19 nt, Homo sapiens
  misc_RNA (1)...(19): siRNA sense strand
caacggcauccagcgauuu

SEQ ID NO: 1802170 - RNA, 19 nt, Homo sapiens
  misc_RNA (1)...(19): siRNA sense strand
caccauggcccuacacauc

SEQ ID NO: 1802171 - RNA, 19 nt, Homo sapiens
  misc_RNA (1)...(19): siRNA sense strand
cugaaagcaucuucgacaa

SEQ ID NO: 1802172 - RNA, 19 nt, Homo sapiens
  misc_RNA (1)...(19): siRNA sense strand
ggaaggcuccgaggauaag

SEQ ID NO: 1802173 - RNA, 19 nt, Homo sapiens
  misc_RNA (1)...(19): siRNA sense strand
ggaggaugcgggaccguau

SEQ ID NO: 1802174 - RNA, 19 nt, Homo sapiens
  misc_RNA (1)...(19): siRNA sense strand
cggcucaucuacuucuaug

SEQ ID NO: 1802175 - RNA, 19 nt, Homo sapiens
  misc_RNA (1)...(19): siRNA sense strand
uggugaagcugcccgugaa

SEQ ID NO: 1802176 - RNA, 19 nt, Homo sapiens
  misc_RNA (1)...(19): siRNA sense strand
gaagaucuugucugcuaca

SEQ ID NO: 1802177 - RNA, 19 nt, Homo sapiens
  misc_RNA (1)...(19): siRNA sense strand
ugucugccauguacaagug

SEQ ID NO: 1802178 - RNA, 19 nt, Homo sapiens
  misc_RNA (1)...(19): siRNA sense strand
acaacggcauccagcgauu

SEQ ID NO: 1802179 - RNA, 19 nt, Homo sapiens
  misc_RNA (1)...(19): siRNA sense strand
agagacggcacaaggauga

SEQ ID NO: 1802180 - RNA, 19 nt, Homo sapiens
  misc_RNA (1)...(19): siRNA sense strand
gggcuucuccagaccaaga

SEQ ID NO: 1802181 - RNA, 19 nt, Homo sapiens
  misc_RNA (1)...(19): siRNA sense strand
cgcccgaguuccaguggua

SEQ ID NO: 1802182 - RNA, 19 nt, Homo sapiens
  misc_RNA (1)...(19): siRNA sense strand
caacgagcucuaugacauc

SEQ ID NO: 1802183 - RNA, 19 nt, Homo sapiens
  misc_RNA (1)...(19): siRNA sense strand
cagauagagagcaggcaua

SEQ ID NO: 1802184 - RNA, 19 nt, Homo sapiens
  misc_RNA (1)...(19): siRNA sense strand
ggacaaccagacagacagu

SEQ ID NO: 1802185 - RNA, 19 nt, Homo sapiens
  misc_RNA (1)...(19): siRNA sense strand
cuccucaucuucuguaaca

SEQ ID NO: 1802186 - RNA, 19 nt, Homo sapiens
  misc_RNA (1)...(19): siRNA sense strand
caacaaggugggccaggau

SEQ ID NO: 1802187 - RNA, 19 nt, Homo sapiens
  misc_RNA (1)...(19): siRNA sense strand
ggacacccugcaagauguu

SEQ ID NO: 1802188 - RNA, 19 nt, Homo sapiens
  misc_RNA (1)...(19): siRNA sense strand
gagcaccgaggucauugug

SEQ ID NO: 1802189 - RNA, 19 nt, Homo sapiens
  misc_RNA (1)...(19): siRNA sense strand
gagagcaggcauagacaag

SEQ ID NO: 1802190 - RNA, 19 nt, Homo sapiens
  misc_RNA (1)...(19): siRNA sense strand
ucauggugaucguggaguu

SEQ ID NO: 1802191 - RNA, 19 nt, Homo sapiens
  misc_RNA (1)...(19): siRNA sense strand
ggaggagcaaugcgaauac

SEQ ID NO: 1802192 - RNA, 19 nt, Homo sapiens
  misc_RNA (1)...(19): siRNA sense strand
cacaugcccuggugcucaa

SEQ ID NO: 1802193 - RNA, 19 nt, Homo sapiens
  misc_RNA (1)...(19): siRNA sense strand
gacacgcucuuggucaaca

SEQ ID NO: 1802194 - RNA, 19 nt, Homo sapiens
  misc_RNA (1)...(19): siRNA sense strand
ccaggaugaagacauuuga

SEQ ID NO: 1802195 - RNA, 19 nt, Homo sapiens
  misc_RNA (1)...(19): siRNA sense strand
acgagcaucugcgcuggua

SEQ ID NO: 1802196 - RNA, 19 nt, Homo sapiens
  misc_RNA (1)...(19): siRNA sense strand
uggacacccugcaagaugu

SEQ ID NO: 1802197 - RNA, 19 nt, Homo sapiens
  misc_RNA (1)...(19): siRNA sense strand
ccaugugggugcccugucu

SEQ ID NO: 1802198 - RNA, 19 nt, Homo sapiens
  misc_RNA (1)...(19): siRNA sense strand
ccagagggauggaguuccu

SEQ ID NO: 1802199 - RNA, 19 nt, Homo sapiens
  misc_RNA (1)...(19): siRNA sense strand
gaccauggaagaucuuguc

SEQ ID NO: 1802200 - RNA, 19 nt, Homo sapiens
  misc_RNA (1)...(19): siRNA sense strand
ugagcccgcugaccaugga

SEQ ID NO: 1802201 - RNA, 19 nt, Homo sapiens
  misc_RNA (1)...(19): siRNA sense strand
ucguggaguucugcaagua

SEQ ID NO: 1802202 - RNA, 19 nt, Homo sapiens
  misc_RNA (1)...(19): siRNA sense strand
uggaggagcaaugcgaaua

SEQ ID NO: 1802203 - RNA, 19 nt, Homo sapiens
  misc_RNA (1)...(19): siRNA sense strand
ugacaagcacugccacaag

SEQ ID NO: 1802204 - RNA, 19 nt, Homo sapiens
  misc_RNA (1)...(19): siRNA sense strand
gcugcacgaugcccuguac

SEQ ID NO: 1802205 - RNA, 19 nt, Homo sapiens
  misc_RNA (1)...(19): siRNA sense strand
ugucggagcucaagauccu

SEQ ID NO: 1802206 - RNA, 19 nt, Homo sapiens
  misc_RNA (1)...(19): siRNA sense strand
caagaccucaugccacagu

SEQ ID NO: 1802207 - RNA, 19 nt, Homo sapiens
  misc_RNA (1)...(19): siRNA sense strand
acggcaaccucuccaacuu

SEQ ID NO: 1802208 - RNA, 19 nt, Homo sapiens
  misc_RNA (1)...(19): siRNA sense strand
gaugcgggaccguaucugu

SEQ ID NO: 1802209 - RNA, 19 nt, Homo sapiens
  misc_RNA (1)...(19): siRNA sense strand
ccgaguuuguggagggaaa

SEQ ID NO: 1802210 - RNA, 19 nt, Homo sapiens
  misc_RNA (1)...(19): siRNA sense strand
guggagggaaagaauaaga

SEQ ID NO: 1802211 - RNA, 19 nt, Homo sapiens
  misc_RNA (1)...(19): siRNA sense strand
ucacaggcaacgagcucua

SEQ ID NO: 1802212 - RNA, 19 nt, Homo sapiens
  misc_RNA (1)...(19): siRNA sense strand
gagaggcugcuggaggaaa

SEQ ID NO: 1802213 - RNA, 19 nt, Homo sapiens
  misc_RNA (1)...(19): siRNA sense strand
aagccgacagcuacaagua

SEQ ID NO: 1802214 - RNA, 19 nt, Homo sapiens
  misc_RNA (1)...(19): siRNA sense strand
gagagcaccgaggucauug

SEQ ID NO: 1802215 - RNA, 19 nt, Homo sapiens
  misc_RNA (1)...(19): siRNA sense strand
ccaaggcgagaccugcauu

SEQ ID NO: 1802216 - RNA, 19 nt, Homo sapiens
  misc_RNA (1)...(19): siRNA sense strand
ugaaagcaucuucgacaag

SEQ ID NO: 1802217 - RNA, 19 nt, Homo sapiens
  misc_RNA (1)...(19): siRNA sense strand
caagauccucauucacauc

SEQ ID NO: 1802218 - RNA, 19 nt, Homo sapiens
  misc_RNA (1)...(19): siRNA sense strand
cucaagauccucauucaca

SEQ ID NO: 1802219 - RNA, 19 nt, Homo sapiens
  misc_RNA (1)...(19): siRNA sense strand
ggagcucaagauccucauu

SEQ ID NO: 1802220 - RNA, 19 nt, Homo sapiens
  misc_RNA (1)...(19): siRNA sense strand
uggaaggcuccgaggauaa

SEQ ID NO: 1802221 - RNA, 19 nt, Homo sapiens
  misc_RNA (1)...(19): siRNA sense strand
caagccauccgaggagcua

SEQ ID NO: 1802222 - RNA, 19 nt, Homo sapiens
  misc_RNA (1)...(19): siRNA sense strand
ccaacgugucugccaugua

SEQ ID NO: 1802223 - RNA, 19 nt, Homo sapiens
  misc_RNA (1)...(19): siRNA sense strand
ugacaccguggccgugaaa

SEQ ID NO: 1802224 - RNA, 19 nt, Homo sapiens
  misc_RNA (1)...(19): siRNA sense strand
gugagagacggcacaagga

SEQ ID NO: 1802225 - RNA, 19 nt, Homo sapiens
  misc_RNA (1)...(19): siRNA sense strand
agagugacgugugguccuu

SEQ ID NO: 1802226 - RNA, 19 nt, Homo sapiens
  misc_RNA (1)...(19): siRNA sense strand
gaagaaagaugaugaaagu

SEQ ID NO: 1802227 - RNA, 19 nt, Homo sapiens
  misc_RNA (1)...(19): siRNA sense strand
guacaaagccugcaaaguu

SEQ ID NO: 1802228 - RNA, 19 nt, Homo sapiens
  misc_RNA (1)...(19): siRNA sense strand
gaggagaaaucaaacauga

SEQ ID NO: 1802229 - RNA, 19 nt, Homo sapiens
  misc_RNA (1)...(19): siRNA sense strand
ggaagucacuggagauguu

SEQ ID NO: 1802230 - RNA, 19 nt, Homo sapiens
  misc_RNA (1)...(19): siRNA sense strand
gggcaaguaugaagaagua

SEQ ID NO: 1802231 - RNA, 19 nt, Homo sapiens
  misc_RNA (1)...(19): siRNA sense strand
gaagaagcaucuggaguuu

SEQ ID NO: 1802232 - RNA, 19 nt, Homo sapiens
  misc_RNA (1)...(19): siRNA sense strand
cagaaacacuguacaaaga

SEQ ID NO: 1802233 - RNA, 19 nt, Homo sapiens
  misc_RNA (1)...(19): siRNA sense strand
guacagggaucagaauaaa

SEQ ID NO: 1802234 - RNA, 19 nt, Homo sapiens
  misc_RNA (1)...(19): siRNA sense strand
cagcuaaccuacugaauga

SEQ ID NO: 1802235 - RNA, 19 nt, Homo sapiens
  misc_RNA (1)...(19): siRNA sense strand
ccacaaugguguacauaaa

SEQ ID NO: 1802236 - RNA, 19 nt, Homo sapiens
  misc_RNA (1)...(19): siRNA sense strand
aagcagagccguuguguaa

SEQ ID NO: 1802237 - RNA, 19 nt, Homo sapiens
  misc_RNA (1)...(19): siRNA sense strand
gaaacacuguacaaagaga

SEQ ID NO: 1802238 - RNA, 19 nt, Homo sapiens
  misc_RNA (1)...(19): siRNA sense strand
aaagagcccucgagaucua

SEQ ID NO: 1802239 - RNA, 19 nt, Homo sapiens
  misc_RNA (1)...(19): siRNA sense strand
uggcagaagugcucaauga

SEQ ID NO: 1802240 - RNA, 19 nt, Homo sapiens
  misc_RNA (1)...(19): siRNA sense strand
agaagcaucuggaguuuau

SEQ ID NO: 1802241 - RNA, 19 nt, Homo sapiens
  misc_RNA (1)...(19): siRNA sense strand
guaauuugguggaggagaa

SEQ ID NO: 1802242 - RNA, 19 nt, Homo sapiens
  misc_RNA (1)...(19): siRNA sense strand
gcuaugaggucucguaaac

SEQ ID NO: 1802243 - RNA, 19 nt, Homo sapiens
  misc_RNA (1)...(19): siRNA sense strand
gaugcaugcugaagaaaga

SEQ ID NO: 1802244 - RNA, 19 nt, Homo sapiens
  misc_RNA (1)...(19): siRNA sense strand
caacguggcuaagacgaaa

SEQ ID NO: 1802245 - RNA, 19 nt, Homo sapiens
  misc_RNA (1)...(19): siRNA sense strand
gcuggaagcuuugaagaau

SEQ ID NO: 1802246 - RNA, 19 nt, Homo sapiens
  misc_RNA (1)...(19): siRNA sense strand
gcagaaacguuagaagaag

SEQ ID NO: 1802247 - RNA, 19 nt, Homo sapiens
  misc_RNA (1)...(19): siRNA sense strand
uuacagacgucaaggcaaa

SEQ ID NO: 1802248 - RNA, 19 nt, Homo sapiens
  misc_RNA (1)...(19): siRNA sense strand
acagggaucagaauaaaua

SEQ ID NO: 1802249 - RNA, 19 nt, Homo sapiens
  misc_RNA (1)...(19): siRNA sense strand
ggacaaagacacugauucu

SEQ ID NO: 1802250 - RNA, 19 nt, Homo sapiens
  misc_RNA (1)...(19): siRNA sense strand
ggaguuugguucuguagau

SEQ ID NO: 1802251 - RNA, 19 nt, Homo sapiens
  misc_RNA (1)...(19): siRNA sense strand
ucaaagagcccucgagauc

SEQ ID NO: 1802252 - RNA, 19 nt, Homo sapiens
  misc_RNA (1)...(19): siRNA sense strand
uaaacagggucuugacaau

SEQ ID NO: 1802253 - RNA, 19 nt, Homo sapiens
  misc_RNA (1)...(19): siRNA sense strand
uacaaagccugcaaaguug

SEQ ID NO: 1802254 - RNA, 19 nt, Homo sapiens
  misc_RNA (1)...(19): siRNA sense strand
ugaaguguuugaagaaaga

SEQ ID NO: 1802255 - RNA, 19 nt, Homo sapiens
  misc_RNA (1)...(19): siRNA sense strand
uaaaagagcucuggaaauc

SEQ ID NO: 1802256 - RNA, 19 nt, Homo sapiens
  misc_RNA (1)...(19): siRNA sense strand
gaauaaccuugcaguccuu

SEQ ID NO: 1802257 - RNA, 19 nt, Homo sapiens
  misc_RNA (1)...(19): siRNA sense strand
gcagcuaaccuacugaaug

SEQ ID NO: 1802258 - RNA, 19 nt, Homo sapiens
  misc_RNA (1)...(19): siRNA sense strand
gcagaaacacuguacaaag

SEQ ID NO: 1802259 - RNA, 19 nt, Homo sapiens
  misc_RNA (1)...(19): siRNA sense strand
gcagagccguuguguaaaa

SEQ ID NO: 1802260 - RNA, 19 nt, Homo sapiens
  misc_RNA (1)...(19): siRNA sense strand
agaaagagaagaaugcaaa

SEQ ID NO: 1802261 - RNA, 19 nt, Homo sapiens
  misc_RNA (1)...(19): siRNA sense strand
caaagaugcagcuaaccua

SEQ ID NO: 1802262 - RNA, 19 nt, Homo sapiens
  misc_RNA (1)...(19): siRNA sense strand
gaaagggaguuugguucug

SEQ ID NO: 1802263 - RNA, 19 nt, Homo sapiens
  misc_RNA (1)...(19): siRNA sense strand
agacaaagcaaguaauuca

SEQ ID NO: 1802264 - RNA, 19 nt, Homo sapiens
  misc_RNA (1)...(19): siRNA sense strand
gagaagaaugcaaaggaaa

SEQ ID NO: 1802265 - RNA, 19 nt, Homo sapiens
  misc_RNA (1)...(19): siRNA sense strand
agagaagaaugcaaaggaa

SEQ ID NO: 1802266 - RNA, 19 nt, Homo sapiens
  misc_RNA (1)...(19): siRNA sense strand
uggaagcuuugaagaauga

SEQ ID NO: 1802267 - RNA, 19 nt, Homo sapiens
  misc_RNA (1)...(19): siRNA sense strand
agaagaagcaucuggaguu

SEQ ID NO: 1802268 - RNA, 19 nt, Homo sapiens
  misc_RNA (1)...(19): siRNA sense strand
cauaaaggaagacaaguug

SEQ ID NO: 1802269 - RNA, 19 nt, Homo sapiens
  misc_RNA (1)...(19): siRNA sense strand
guacauaaaggaagacaag

SEQ ID NO: 1802270 - RNA, 19 nt, Homo sapiens
  misc_RNA (1)...(19): siRNA sense strand
guaaacagggucuugacaa

SEQ ID NO: 1802271 - RNA, 19 nt, Homo sapiens
  misc_RNA (1)...(19): siRNA sense strand
uaaauaacuuggccuuacu

SEQ ID NO: 1802272 - RNA, 19 nt, Homo sapiens
  misc_RNA (1)...(19): siRNA sense strand
caucuggaguuuaugaauc

SEQ ID NO: 1802273 - RNA, 19 nt, Homo sapiens
  misc_RNA (1)...(19): siRNA sense strand
uuaaauaacuuggccuuac

SEQ ID NO: 1802274 - RNA, 19 nt, Homo sapiens
  misc_RNA (1)...(19): siRNA sense strand
aaagagggaaguacaaaga

SEQ ID NO: 1802275 - RNA, 19 nt, Homo sapiens
  misc_RNA (1)...(19): siRNA sense strand
agacacugauucuaccaaa

SEQ ID NO: 1802276 - RNA, 19 nt, Homo sapiens
  misc_RNA (1)...(19): siRNA sense strand
gggaugaacuggccaacac

SEQ ID NO: 1802277 - RNA, 19 nt, Homo sapiens
  misc_RNA (1)...(19): siRNA sense strand
gggaucagaauaaauacaa

SEQ ID NO: 1802278 - RNA, 19 nt, Homo sapiens
  misc_RNA (1)...(19): siRNA sense strand
caaugacccugagaacaug

SEQ ID NO: 1802279 - RNA, 19 nt, Homo sapiens
  misc_RNA (1)...(19): siRNA sense strand
ucaaugacccugagaacau

SEQ ID NO: 1802280 - RNA, 19 nt, Homo sapiens
  misc_RNA (1)...(19): siRNA sense strand
gcaaguaugaagaaguaga

SEQ ID NO: 1802281 - RNA, 19 nt, Homo sapiens
  misc_RNA (1)...(19): siRNA sense strand
gaagcagagccguugugua

SEQ ID NO: 1802282 - RNA, 19 nt, Homo sapiens
  misc_RNA (1)...(19): siRNA sense strand
gcagaagagugagcagucu

SEQ ID NO: 1802283 - RNA, 19 nt, Homo sapiens
  misc_RNA (1)...(19): siRNA sense strand
ggagaagcuuacacaggau

SEQ ID NO: 1802284 - RNA, 19 nt, Homo sapiens
  misc_RNA (1)...(19): siRNA sense strand
auacaaagaugcagcuaac

SEQ ID NO: 1802285 - RNA, 19 nt, Homo sapiens
  misc_RNA (1)...(19): siRNA sense strand
gaaugcaaaggaaagcaaa

SEQ ID NO: 1802286 - RNA, 19 nt, Homo sapiens
  misc_RNA (1)...(19): siRNA sense strand
caaguaugaagaaguagaa

SEQ ID NO: 1802287 - RNA, 19 nt, Homo sapiens
  misc_RNA (1)...(19): siRNA sense strand
uugccaagcaguuaaauaa

SEQ ID NO: 1802288 - RNA, 19 nt, Homo sapiens
  misc_RNA (1)...(19): siRNA sense strand
uugcaguccuuuaugguaa

SEQ ID NO: 1802289 - RNA, 19 nt, Homo sapiens
  misc_RNA (1)...(19): siRNA sense strand
ugaaugaugccuuggcuau

SEQ ID NO: 1802290 - RNA, 19 nt, Homo sapiens
  misc_RNA (1)...(19): siRNA sense strand
aacagggucuugacaaugu

SEQ ID NO: 1802291 - RNA, 19 nt, Homo sapiens
  misc_RNA (1)...(19): siRNA sense strand
ugaagcugcagaaacguua

SEQ ID NO: 1802292 - RNA, 19 nt, Homo sapiens
  misc_RNA (1)...(19): siRNA sense strand
caaauuugaagcugcagaa

SEQ ID NO: 1802293 - RNA, 19 nt, Homo sapiens
  misc_RNA (1)...(19): siRNA sense strand
ggacaucuuuuggagagua

SEQ ID NO: 1802294 - RNA, 19 nt, Homo sapiens
  misc_RNA (1)...(19): siRNA sense strand
uaaaggaagacaaguugga

SEQ ID NO: 1802295 - RNA, 19 nt, Homo sapiens
  misc_RNA (1)...(19): siRNA sense strand
aaagggaguuugguucugu

SEQ ID NO: 1802296 - RNA, 19 nt, Homo sapiens
  misc_RNA (1)...(19): siRNA sense strand
aaugaugccuuggcuauuc

SEQ ID NO: 1802297 - RNA, 19 nt, Homo sapiens
  misc_RNA (1)...(19): siRNA sense strand
ggaggagaaaucaaacaug

SEQ ID NO: 1802298 - RNA, 19 nt, Homo sapiens
  misc_RNA (1)...(19): siRNA sense strand
gaaagagaagaaugcaaag

SEQ ID NO: 1802299 - RNA, 19 nt, Homo sapiens
  misc_RNA (1)...(19): siRNA sense strand
gaagaaagagaagaaugca

SEQ ID NO: 1802300 - RNA, 19 nt, Homo sapiens
  misc_RNA (1)...(19): siRNA sense strand
gaaugaugccuuggcuauu

SEQ ID NO: 1802301 - RNA, 19 nt, Homo sapiens
  misc_RNA (1)...(19): siRNA sense strand
acacugauucuaccaaaga

SEQ ID NO: 1802302 - RNA, 19 nt, Homo sapiens
  misc_RNA (1)...(19): siRNA sense strand
acaaagacacugauucuac

SEQ ID NO: 1802303 - RNA, 19 nt, Homo sapiens
  misc_RNA (1)...(19): siRNA sense strand
gacaaagacacugauucua

SEQ ID NO: 1802304 - RNA, 19 nt, Homo sapiens
  misc_RNA (1)...(19): siRNA sense strand
gcacaugaaagggaguuug

SEQ ID NO: 1802305 - RNA, 19 nt, Homo sapiens
  misc_RNA (1)...(19): siRNA sense strand
gauguugccaagcaguuaa

SEQ ID NO: 1802306 - RNA, 19 nt, Homo sapiens
  misc_RNA (1)...(19): siRNA sense strand
uaugaggucucguaaacag

SEQ ID NO: 1802307 - RNA, 19 nt, Homo sapiens
  misc_RNA (1)...(19): siRNA sense strand
uaaccuggcauccugcuau

SEQ ID NO: 1802308 - RNA, 19 nt, Homo sapiens
  misc_RNA (1)...(19): siRNA sense strand
gcuaaccuacugaaugaug

SEQ ID NO: 1802309 - RNA, 19 nt, Homo sapiens
  misc_RNA (1)...(19): siRNA sense strand
aaaguuugcuggagacacu

SEQ ID NO: 1802310 - RNA, 19 nt, Homo sapiens
  misc_RNA (1)...(19): siRNA sense strand
gagaguauggcggcuggua

SEQ ID NO: 1802311 - RNA, 19 nt, Homo sapiens
  misc_RNA (1)...(19): siRNA sense strand
gaaccagggcaaguaugaa

SEQ ID NO: 1802312 - RNA, 19 nt, Homo sapiens
  misc_RNA (1)...(19): siRNA sense strand
uaaccuugcaguccuuuau

SEQ ID NO: 1802313 - RNA, 19 nt, Homo sapiens
  misc_RNA (1)...(19): siRNA sense strand
cacagguuaugauggcuuu

SEQ ID NO: 1802314 - RNA, 19 nt, Homo sapiens
  misc_RNA (1)...(19): siRNA sense strand
ucuaagacaaagcaaguaa

SEQ ID NO: 1802315 - RNA, 19 nt, Homo sapiens
  misc_RNA (1)...(19): siRNA sense strand
cuggaugcaugcugaagaa

SEQ ID NO: 1802316 - RNA, 19 nt, Homo sapiens
  misc_RNA (1)...(19): siRNA sense strand
gcuuacacaggaugaaauu

SEQ ID NO: 1802317 - RNA, 19 nt, Homo sapiens
  misc_RNA (1)...(19): siRNA sense strand
gaggacaaagacacugauu

SEQ ID NO: 1802318 - RNA, 19 nt, Homo sapiens
  misc_RNA (1)...(19): siRNA sense strand
guaugagcguagaguggaa

SEQ ID NO: 1802319 - RNA, 19 nt, Homo sapiens
  misc_RNA (1)...(19): siRNA sense strand
gccagaaccagggcaagua

SEQ ID NO: 1802320 - RNA, 19 nt, Homo sapiens
  misc_RNA (1)...(19): siRNA sense strand
ugagcacaauuccauuuua

SEQ ID NO: 1802321 - RNA, 19 nt, Homo sapiens
  misc_RNA (1)...(19): siRNA sense strand
gaugaugaaaguaauuugg

SEQ ID NO: 1802322 - RNA, 19 nt, Homo sapiens
  misc_RNA (1)...(19): siRNA sense strand
gcacuuuacagacgucaag

SEQ ID NO: 1802323 - RNA, 19 nt, Homo sapiens
  misc_RNA (1)...(19): siRNA sense strand
gaguuugguucuguagaug

SEQ ID NO: 1802324 - RNA, 19 nt, Homo sapiens
  misc_RNA (1)...(19): siRNA sense strand
gcaagcagaaacacuguac

SEQ ID NO: 1802325 - RNA, 19 nt, Homo sapiens
  misc_RNA (1)...(19): siRNA sense strand
gaaacaaggaaaguucaag

SEQ ID NO: 1802326 - RNA, 19 nt, Homo sapiens
  misc_RNA (1)...(19): siRNA sense strand
gaagaaagaugaugaaagu

SEQ ID NO: 1802327 - RNA, 19 nt, Homo sapiens
  misc_RNA (1)...(19): siRNA sense strand
guacaaagccugcaaaguu

SEQ ID NO: 1802328 - RNA, 19 nt, Homo sapiens
  misc_RNA (1)...(19): siRNA sense strand
gaggagaaaucaaacauga

SEQ ID NO: 1802329 - RNA, 19 nt, Homo sapiens
  misc_RNA (1)...(19): siRNA sense strand
ggaagucacuggagauguu

SEQ ID NO: 1802330 - RNA, 19 nt, Homo sapiens
  misc_RNA (1)...(19): siRNA sense strand
gggcaaguaugaagaagua

SEQ ID NO: 1802331 - RNA, 19 nt, Homo sapiens
  misc_RNA (1)...(19): siRNA sense strand
gaagaagcaucuggaguuu

SEQ ID NO: 1802332 - RNA, 19 nt, Homo sapiens
  misc_RNA (1)...(19): siRNA sense strand
cagaaacacuguacaaaga

SEQ ID NO: 1802333 - RNA, 19 nt, Homo sapiens
  misc_RNA (1)...(19): siRNA sense strand
guacagggaucagaauaaa

SEQ ID NO: 1802334 - RNA, 19 nt, Homo sapiens
  misc_RNA (1)...(19): siRNA sense strand
cagcuaaccuacugaauga

SEQ ID NO: 1802335 - RNA, 19 nt, Homo sapiens
  misc_RNA (1)...(19): siRNA sense strand
ccacaaugguguacauaaa

SEQ ID NO: 1802336 - RNA, 19 nt, Homo sapiens
  misc_RNA (1)...(19): siRNA sense strand
aagcagagccguuguguaa

SEQ ID NO: 1802337 - RNA, 19 nt, Homo sapiens
  misc_RNA (1)...(19): siRNA sense strand
gaaacacuguacaaagaga

SEQ ID NO: 1802338 - RNA, 19 nt, Homo sapiens
  misc_RNA (1)...(19): siRNA sense strand
aaagagcccucgagaucua

SEQ ID NO: 1802339 - RNA, 19 nt, Homo sapiens
  misc_RNA (1)...(19): siRNA sense strand
uggcagaagugcucaauga

SEQ ID NO: 1802340 - RNA, 19 nt, Homo sapiens
  misc_RNA (1)...(19): siRNA sense strand
agaagcaucuggaguuuau

SEQ ID NO: 1802341 - RNA, 19 nt, Homo sapiens
  misc_RNA (1)...(19): siRNA sense strand
guaauuugguggaggagaa

SEQ ID NO: 1802342 - RNA, 19 nt, Homo sapiens
  misc_RNA (1)...(19): siRNA sense strand
gcuaugaggucucguaaac

SEQ ID NO: 1802343 - RNA, 19 nt, Homo sapiens
  misc_RNA (1)...(19): siRNA sense strand
gaugcaugcugaagaaaga

SEQ ID NO: 1802344 - RNA, 19 nt, Homo sapiens
  misc_RNA (1)...(19): siRNA sense strand
caacguggcuaagacgaaa

SEQ ID NO: 1802345 - RNA, 19 nt, Homo sapiens
  misc_RNA (1)...(19): siRNA sense strand
gcuggaagcuuugaagaau

SEQ ID NO: 1802346 - RNA, 19 nt, Homo sapiens
  misc_RNA (1)...(19): siRNA sense strand
gcagaaacguuagaagaag

SEQ ID NO: 1802347 - RNA, 19 nt, Homo sapiens
  misc_RNA (1)...(19): siRNA sense strand
uuacagacgucaaggcaaa

SEQ ID NO: 1802348 - RNA, 19 nt, Homo sapiens
  misc_RNA (1)...(19): siRNA sense strand
acagggaucagaauaaaua

SEQ ID NO: 1802349 - RNA, 19 nt, Homo sapiens
  misc_RNA (1)...(19): siRNA sense strand
ggacaaagacacugauucu

SEQ ID NO: 1802350 - RNA, 19 nt, Homo sapiens
  misc_RNA (1)...(19): siRNA sense strand
ggaguuugguucuguagau

SEQ ID NO: 1802351 - RNA, 19 nt, Homo sapiens
  misc_RNA (1)...(19): siRNA sense strand
ucaaagagcccucgagauc

SEQ ID NO: 1802352 - RNA, 19 nt, Homo sapiens
  misc_RNA (1)...(19): siRNA sense strand
uaaacagggucuugacaau

SEQ ID NO: 1802353 - RNA, 19 nt, Homo sapiens
  misc_RNA (1)...(19): siRNA sense strand
uacaaagccugcaaaguug

SEQ ID NO: 1802354 - RNA, 19 nt, Homo sapiens
  misc_RNA (1)...(19): siRNA sense strand
ugaaguguuugaagaaaga

SEQ ID NO: 1802355 - RNA, 19 nt, Homo sapiens
  misc_RNA (1)...(19): siRNA sense strand
uaaaagagcucuggaaauc

SEQ ID NO: 1802356 - RNA, 19 nt, Homo sapiens
  misc_RNA (1)...(19): siRNA sense strand
gaauaaccuugcaguccuu

SEQ ID NO: 1802357 - RNA, 19 nt, Homo sapiens
  misc_RNA (1)...(19): siRNA sense strand
gcagcuaaccuacugaaug

SEQ ID NO: 1802358 - RNA, 19 nt, Homo sapiens
  misc_RNA (1)...(19): siRNA sense strand
gcagaaacacuguacaaag

SEQ ID NO: 1802359 - RNA, 19 nt, Homo sapiens
  misc_RNA (1)...(19): siRNA sense strand
gcagagccguuguguaaaa

SEQ ID NO: 1802360 - RNA, 19 nt, Homo sapiens
  misc_RNA (1)...(19): siRNA sense strand
agaaagagaagaaugcaaa

SEQ ID NO: 1802361 - RNA, 19 nt, Homo sapiens
  misc_RNA (1)...(19): siRNA sense strand
caaagaugcagcuaaccua

SEQ ID NO: 1802362 - RNA, 19 nt, Homo sapiens
  misc_RNA (1)...(19): siRNA sense strand
gaaagggaguuugguucug

SEQ ID NO: 1802363 - RNA, 19 nt, Homo sapiens
  misc_RNA (1)...(19): siRNA sense strand
agacaaagcaaguaauuca

SEQ ID NO: 1802364 - RNA, 19 nt, Homo sapiens
  misc_RNA (1)...(19): siRNA sense strand
gagaagaaugcaaaggaaa

SEQ ID NO: 1802365 - RNA, 19 nt, Homo sapiens
  misc_RNA (1)...(19): siRNA sense strand
agagaagaaugcaaaggaa

SEQ ID NO: 1802366 - RNA, 19 nt, Homo sapiens
  misc_RNA (1)...(19): siRNA sense strand
uggaagcuuugaagaauga

SEQ ID NO: 1802367 - RNA, 19 nt, Homo sapiens
  misc_RNA (1)...(19): siRNA sense strand
agaagaagcaucuggaguu

SEQ ID NO: 1802368 - RNA, 19 nt, Homo sapiens
  misc_RNA (1)...(19): siRNA sense strand
cauaaaggaagacaaguug

SEQ ID NO: 1802369 - RNA, 19 nt, Homo sapiens
  misc_RNA (1)...(19): siRNA sense strand
guacauaaaggaagacaag

SEQ ID NO: 1802370 - RNA, 19 nt, Homo sapiens
  misc_RNA (1)...(19): siRNA sense strand
guaaacagggucuugacaa

SEQ ID NO: 1802371 - RNA, 19 nt, Homo sapiens
  misc_RNA (1)...(19): siRNA sense strand
uaaauaacuuggccuuacu

SEQ ID NO: 1802372 - RNA, 19 nt, Homo sapiens
  misc_RNA (1)...(19): siRNA sense strand
caucuggaguuuaugaauc

SEQ ID NO: 1802373 - RNA, 19 nt, Homo sapiens
  misc_RNA (1)...(19): siRNA sense strand
uuaaauaacuuggccuuac

SEQ ID NO: 1802374 - RNA, 19 nt, Homo sapiens
  misc_RNA (1)...(19): siRNA sense strand
aaagagggaaguacaaaga

SEQ ID NO: 1802375 - RNA, 19 nt, Homo sapiens
  misc_RNA (1)...(19): siRNA sense strand
agacacugauucuaccaaa

SEQ ID NO: 1802376 - RNA, 19 nt, Homo sapiens
  misc_RNA (1)...(19): siRNA sense strand
gggaugaacuggccaacac

SEQ ID NO: 1802377 - RNA, 19 nt, Homo sapiens
  misc_RNA (1)...(19): siRNA sense strand
gggaucagaauaaauacaa

SEQ ID NO: 1802378 - RNA, 19 nt, Homo sapiens
  misc_RNA (1)...(19): siRNA sense strand
caaugacccugagaacaug

SEQ ID NO: 1802379 - RNA, 19 nt, Homo sapiens
  misc_RNA (1)...(19): siRNA sense strand
ucaaugacccugagaacau

SEQ ID NO: 1802380 - RNA, 19 nt, Homo sapiens
  misc_RNA (1)...(19): siRNA sense strand
gcaaguaugaagaaguaga

SEQ ID NO: 1802381 - RNA, 19 nt, Homo sapiens
  misc_RNA (1)...(19): siRNA sense strand
gaagcagagccguugugua

SEQ ID NO: 1802382 - RNA, 19 nt, Homo sapiens
  misc_RNA (1)...(19): siRNA sense strand
gcagaagagugagcagucu

SEQ ID NO: 1802383 - RNA, 19 nt, Homo sapiens
  misc_RNA (1)...(19): siRNA sense strand
ggagaagcuuacacaggau

SEQ ID NO: 1802384 - RNA, 19 nt, Homo sapiens
  misc_RNA (1)...(19): siRNA sense strand
auacaaagaugcagcuaac

SEQ ID NO: 1802385 - RNA, 19 nt, Homo sapiens
  misc_RNA (1)...(19): siRNA sense strand
gaaugcaaaggaaagcaaa

SEQ ID NO: 1802386 - RNA, 19 nt, Homo sapiens
  misc_RNA (1)...(19): siRNA sense strand
caaguaugaagaaguagaa

SEQ ID NO: 1802387 - RNA, 19 nt, Homo sapiens
  misc_RNA (1)...(19): siRNA sense strand
uugccaagcaguuaaauaa

SEQ ID NO: 1802388 - RNA, 19 nt, Homo sapiens
  misc_RNA (1)...(19): siRNA sense strand
uugcaguccuuuaugguaa

SEQ ID NO: 1802389 - RNA, 19 nt, Homo sapiens
  misc_RNA (1)...(19): siRNA sense strand
ugaaugaugccuuggcuau

SEQ ID NO: 1802390 - RNA, 19 nt, Homo sapiens
  misc_RNA (1)...(19): siRNA sense strand
aacagggucuugacaaugu

SEQ ID NO: 1802391 - RNA, 19 nt, Homo sapiens
  misc_RNA (1)...(19): siRNA sense strand
ugaagcugcagaaacguua

SEQ ID NO: 1802392 - RNA, 19 nt, Homo sapiens
  misc_RNA (1)...(19): siRNA sense strand
caaauuugaagcugcagaa

SEQ ID NO: 1802393 - RNA, 19 nt, Homo sapiens
  misc_RNA (1)...(19): siRNA sense strand
ggacaucuuuuggagagua

SEQ ID NO: 1802394 - RNA, 19 nt, Homo sapiens
  misc_RNA (1)...(19): siRNA sense strand
uaaaggaagacaaguugga

SEQ ID NO: 1802395 - RNA, 19 nt, Homo sapiens
  misc_RNA (1)...(19): siRNA sense strand
aaagggaguuugguucugu

SEQ ID NO: 1802396 - RNA, 19 nt, Homo sapiens
  misc_RNA (1)...(19): siRNA sense strand
aaugaugccuuggcuauuc

SEQ ID NO: 1802397 - RNA, 19 nt, Homo sapiens
  misc_RNA (1)...(19): siRNA sense strand
ggaggagaaaucaaacaug

SEQ ID NO: 1802398 - RNA, 19 nt, Homo sapiens
  misc_RNA (1)...(19): siRNA sense strand
gaaagagaagaaugcaaag

SEQ ID NO: 1802399 - RNA, 19 nt, Homo sapiens
  misc_RNA (1)...(19): siRNA sense strand
gaagaaagagaagaaugca

SEQ ID NO: 1802400 - RNA, 19 nt, Homo sapiens
  misc_RNA (1)...(19): siRNA sense strand
gaaugaugccuuggcuauu

SEQ ID NO: 1802401 - RNA, 19 nt, Homo sapiens
  misc_RNA (1)...(19): siRNA sense strand
acacugauucuaccaaaga

SEQ ID NO: 1802402 - RNA, 19 nt, Homo sapiens
  misc_RNA (1)...(19): siRNA sense strand
acaaagacacugauucuac

SEQ ID NO: 1802403 - RNA, 19 nt, Homo sapiens
  misc_RNA (1)...(19): siRNA sense strand
gacaaagacacugauucua

SEQ ID NO: 1802404 - RNA, 19 nt, Homo sapiens
  misc_RNA (1)...(19): siRNA sense strand
gcacaugaaagggaguuug

SEQ ID NO: 1802405 - RNA, 19 nt, Homo sapiens
  misc_RNA (1)...(19): siRNA sense strand
gauguugccaagcaguuaa

SEQ ID NO: 1802406 - RNA, 19 nt, Homo sapiens
  misc_RNA (1)...(19): siRNA sense strand
uaugaggucucguaaacag

SEQ ID NO: 1802407 - RNA, 19 nt, Homo sapiens
  misc_RNA (1)...(19): siRNA sense strand
uaaccuggcauccugcuau

SEQ ID NO: 1802408 - RNA, 19 nt, Homo sapiens
  misc_RNA (1)...(19): siRNA sense strand
gcuaaccuacugaaugaug

SEQ ID NO: 1802409 - RNA, 19 nt, Homo sapiens
  misc_RNA (1)...(19): siRNA sense strand
aaaguuugcuggagacacu

SEQ ID NO: 1802410 - RNA, 19 nt, Homo sapiens
  misc_RNA (1)...(19): siRNA sense strand
gagaguauggcggcuggua

SEQ ID NO: 1802411 - RNA, 19 nt, Homo sapiens
  misc_RNA (1)...(19): siRNA sense strand
gaaccagggcaaguaugaa

SEQ ID NO: 1802412 - RNA, 19 nt, Homo sapiens
  misc_RNA (1)...(19): siRNA sense strand
uaaccuugcaguccuuuau

SEQ ID NO: 1802413 - RNA, 19 nt, Homo sapiens
  misc_RNA (1)...(19): siRNA sense strand
cacagguuaugauggcuuu

SEQ ID NO: 1802414 - RNA, 19 nt, Homo sapiens
  misc_RNA (1)...(19): siRNA sense strand
ucuaagacaaagcaaguaa

SEQ ID NO: 1802415 - RNA, 19 nt, Homo sapiens
  misc_RNA (1)...(19): siRNA sense strand
cuggaugcaugcugaagaa

SEQ ID NO: 1802416 - RNA, 19 nt, Homo sapiens
  misc_RNA (1)...(19): siRNA sense strand
gcuuacacaggaugaaauu

SEQ ID NO: 1802417 - RNA, 19 nt, Homo sapiens
  misc_RNA (1)...(19): siRNA sense strand
gaggacaaagacacugauu

SEQ ID NO: 1802418 - RNA, 19 nt, Homo sapiens
  misc_RNA (1)...(19): siRNA sense strand
guaugagcguagaguggaa

SEQ ID NO: 1802419 - RNA, 19 nt, Homo sapiens
  misc_RNA (1)...(19): siRNA sense strand
gccagaaccagggcaagua

SEQ ID NO: 1802420 - RNA, 19 nt, Homo sapiens
  misc_RNA (1)...(19): siRNA sense strand
ugagcacaauuccauuuua

SEQ ID NO: 1802421 - RNA, 19 nt, Homo sapiens
  misc_RNA (1)...(19): siRNA sense strand
gaugaugaaaguaauuugg

SEQ ID NO: 1802422 - RNA, 19 nt, Homo sapiens
  misc_RNA (1)...(19): siRNA sense strand
gcacuuuacagacgucaag

SEQ ID NO: 1802423 - RNA, 19 nt, Homo sapiens
  misc_RNA (1)...(19): siRNA sense strand
gaguuugguucuguagaug

SEQ ID NO: 1802424 - RNA, 19 nt, Homo sapiens
  misc_RNA (1)...(19): siRNA sense strand
gcaagcagaaacacuguac

SEQ ID NO: 1802425 - RNA, 19 nt, Homo sapiens
  misc_RNA (1)...(19): siRNA sense strand
gaaacaaggaaaguucaag

SEQ ID NO: 1802426 - RNA, 19 nt, Homo sapiens
  misc_RNA (1)...(19): siRNA sense strand
gugaauaucugcaacauga

SEQ ID NO: 1802427 - RNA, 19 nt, Homo sapiens
  misc_RNA (1)...(19): siRNA sense strand
ggaaggaggaggagaagaa

SEQ ID NO: 1802428 - RNA, 19 nt, Homo sapiens
  misc_RNA (1)...(19): siRNA sense strand
gaaggucucaggcagcuuu

SEQ ID NO: 1802429 - RNA, 19 nt, Homo sapiens
  misc_RNA (1)...(19): siRNA sense strand
ggaggaacuuggcugaauc

SEQ ID NO: 1802430 - RNA, 19 nt, Homo sapiens
  misc_RNA (1)...(19): siRNA sense strand
ggauggagagcgaaucuga

SEQ ID NO: 1802431 - RNA, 19 nt, Homo sapiens
  misc_RNA (1)...(19): siRNA sense strand
ggagaugacgcugaggaua

SEQ ID NO: 1802432 - RNA, 19 nt, Homo sapiens
  misc_RNA (1)...(19): siRNA sense strand
gaaggaggaggagaagaaa

SEQ ID NO: 1802433 - RNA, 19 nt, Homo sapiens
  misc_RNA (1)...(19): siRNA sense strand
gagaugacgcugaggauag

SEQ ID NO: 1802434 - RNA, 19 nt, Homo sapiens
  misc_RNA (1)...(19): siRNA sense strand
gguaaaagcaccaccuuaa

SEQ ID NO: 1802435 - RNA, 19 nt, Homo sapiens
  misc_RNA (1)...(19): siRNA sense strand
ccgcugagcacgagcagua

SEQ ID NO: 1802436 - RNA, 19 nt, Homo sapiens
  misc_RNA (1)...(19): siRNA sense strand
ccucaaaccacacucaguu

SEQ ID NO: 1802437 - RNA, 19 nt, Homo sapiens
  misc_RNA (1)...(19): siRNA sense strand
gcccgaggcucugaaguca

SEQ ID NO: 1802438 - RNA, 19 nt, Homo sapiens
  misc_RNA (1)...(19): siRNA sense strand
gcacgagcaguaccucuca

SEQ ID NO: 1802439 - RNA, 19 nt, Homo sapiens
  misc_RNA (1)...(19): siRNA sense strand
gaacaagaggaggaucaga

SEQ ID NO: 1802440 - RNA, 19 nt, Homo sapiens
  misc_RNA (1)...(19): siRNA sense strand
gaacgaccgcagugacauc

SEQ ID NO: 1802441 - RNA, 19 nt, Homo sapiens
  misc_RNA (1)...(19): siRNA sense strand
aaaguccgcccucguguga

SEQ ID NO: 1802442 - RNA, 19 nt, Homo sapiens
  misc_RNA (1)...(19): siRNA sense strand
ggagaagaaaccucaccuu

SEQ ID NO: 1802443 - RNA, 19 nt, Homo sapiens
  misc_RNA (1)...(19): siRNA sense strand
agaggaagaaguccaaguu

SEQ ID NO: 1802444 - RNA, 19 nt, Homo sapiens
  misc_RNA (1)...(19): siRNA sense strand
gaggaagaaguccaaguuc

SEQ ID NO: 1802445 - RNA, 19 nt, Homo sapiens
  misc_RNA (1)...(19): siRNA sense strand
gagcaccagccuccaggaa

SEQ ID NO: 1802446 - RNA, 19 nt, Homo sapiens
  misc_RNA (1)...(19): siRNA sense strand
ggacugguucuggcucauu

SEQ ID NO: 1802447 - RNA, 19 nt, Homo sapiens
  misc_RNA (1)...(19): siRNA sense strand
agaggcagcugcaggacau

SEQ ID NO: 1802448 - RNA, 19 nt, Homo sapiens
  misc_RNA (1)...(19): siRNA sense strand
caaaccacacucaguucaa

SEQ ID NO: 1802449 - RNA, 19 nt, Homo sapiens
  misc_RNA (1)...(19): siRNA sense strand
gcuggaaggaggaggagaa

SEQ ID NO: 1802450 - RNA, 19 nt, Homo sapiens
  misc_RNA (1)...(19): siRNA sense strand
aaaccacacucaguucaag

SEQ ID NO: 1802451 - RNA, 19 nt, Homo sapiens
  misc_RNA (1)...(19): siRNA sense strand
gcccucgugugaccaauag

SEQ ID NO: 1802452 - RNA, 19 nt, Homo sapiens
  misc_RNA (1)...(19): siRNA sense strand
gacugguucuggcucauuc

SEQ ID NO: 1802453 - RNA, 19 nt, Homo sapiens
  misc_RNA (1)...(19): siRNA sense strand
gggaacaagaggaggauca

SEQ ID NO: 1802454 - RNA, 19 nt, Homo sapiens
  misc_RNA (1)...(19): siRNA sense strand
aggaggaacuuggcugaau

SEQ ID NO: 1802455 - RNA, 19 nt, Homo sapiens
  misc_RNA (1)...(19): siRNA sense strand
gauggagagcgaaucugaa

SEQ ID NO: 1802456 - RNA, 19 nt, Homo sapiens
  misc_RNA (1)...(19): siRNA sense strand
cagagcugauguacaaguc

SEQ ID NO: 1802457 - RNA, 19 nt, Homo sapiens
  misc_RNA (1)...(19): siRNA sense strand
ucaaaccacacucaguuca

SEQ ID NO: 1802458 - RNA, 19 nt, Homo sapiens
  misc_RNA (1)...(19): siRNA sense strand
acaagaggaggaucagaug

SEQ ID NO: 1802459 - RNA, 19 nt, Homo sapiens
  misc_RNA (1)...(19): siRNA sense strand
ggacucugaagcccaagga

SEQ ID NO: 1802460 - RNA, 19 nt, Homo sapiens
  misc_RNA (1)...(19): siRNA sense strand
ccgaggcucugaagucacu

SEQ ID NO: 1802461 - RNA, 19 nt, Homo sapiens
  misc_RNA (1)...(19): siRNA sense strand
ugcgggacaugauugagaa

SEQ ID NO: 1802462 - RNA, 19 nt, Homo sapiens
  misc_RNA (1)...(19): siRNA sense strand
ccacaagcaagucccuuag

SEQ ID NO: 1802463 - RNA, 19 nt, Homo sapiens
  misc_RNA (1)...(19): siRNA sense strand
ucccuuagccaagccguua

SEQ ID NO: 1802464 - RNA, 19 nt, Homo sapiens
  misc_RNA (1)...(19): siRNA sense strand
cgaguggcagcuccucaaa

SEQ ID NO: 1802465 - RNA, 19 nt, Homo sapiens
  misc_RNA (1)...(19): siRNA sense strand
ugaagcaccacaagcaagu

SEQ ID NO: 1802466 - RNA, 19 nt, Homo sapiens
  misc_RNA (1)...(19): siRNA sense strand
cgucacuuguucuauccaa

SEQ ID NO: 1802467 - RNA, 19 nt, Homo sapiens
  misc_RNA (1)...(19): siRNA sense strand
gggacaugauugagaagcu

SEQ ID NO: 1802468 - RNA, 19 nt, Homo sapiens
  misc_RNA (1)...(19): siRNA sense strand
agaaggcccaggaggcaaa

SEQ ID NO: 1802469 - RNA, 19 nt, Homo sapiens
  misc_RNA (1)...(19): siRNA sense strand
gcugggaguguccacauca

SEQ ID NO: 1802470 - RNA, 19 nt, Homo sapiens
  misc_RNA (1)...(19): siRNA sense strand
gggcuaccgcgacgugaau

SEQ ID NO: 1802471 - RNA, 19 nt, Homo sapiens
  misc_RNA (1)...(19): siRNA sense strand
gugcuuggccucccuucga

SEQ ID NO: 1802472 - RNA, 19 nt, Homo sapiens
  misc_RNA (1)...(19): siRNA sense strand
ccaaggacagcagcaagga

SEQ ID NO: 1802473 - RNA, 19 nt, Homo sapiens
  misc_RNA (1)...(19): siRNA sense strand
gugaauaucugcaacauga

SEQ ID NO: 1802474 - RNA, 19 nt, Homo sapiens
  misc_RNA (1)...(19): siRNA sense strand
ggaaggaggaggagaagaa

SEQ ID NO: 1802475 - RNA, 19 nt, Homo sapiens
  misc_RNA (1)...(19): siRNA sense strand
gaaggucucaggcagcuuu

SEQ ID NO: 1802476 - RNA, 19 nt, Homo sapiens
  misc_RNA (1)...(19): siRNA sense strand
ggaggaacuuggcugaauc

SEQ ID NO: 1802477 - RNA, 19 nt, Homo sapiens
  misc_RNA (1)...(19): siRNA sense strand
ggauggagagcgaaucuga

SEQ ID NO: 1802478 - RNA, 19 nt, Homo sapiens
  misc_RNA (1)...(19): siRNA sense strand
ggagaugacgcugaggaua

SEQ ID NO: 1802479 - RNA, 19 nt, Homo sapiens
  misc_RNA (1)...(19): siRNA sense strand
gaaggaggaggagaagaaa

SEQ ID NO: 1802480 - RNA, 19 nt, Homo sapiens
  misc_RNA (1)...(19): siRNA sense strand
gagaugacgcugaggauag

SEQ ID NO: 1802481 - RNA, 19 nt, Homo sapiens
  misc_RNA (1)...(19): siRNA sense strand
gguaaaagcaccaccuuaa

SEQ ID NO: 1802482 - RNA, 19 nt, Homo sapiens
  misc_RNA (1)...(19): siRNA sense strand
ccgcugagcacgagcagua

SEQ ID NO: 1802483 - RNA, 19 nt, Homo sapiens
  misc_RNA (1)...(19): siRNA sense strand
ccucaaaccacacucaguu

SEQ ID NO: 1802484 - RNA, 19 nt, Homo sapiens
  misc_RNA (1)...(19): siRNA sense strand
gcccgaggcucugaaguca

SEQ ID NO: 1802485 - RNA, 19 nt, Homo sapiens
  misc_RNA (1)...(19): siRNA sense strand
gcacgagcaguaccucuca

SEQ ID NO: 1802486 - RNA, 19 nt, Homo sapiens
  misc_RNA (1)...(19): siRNA sense strand
gaacaagaggaggaucaga

SEQ ID NO: 1802487 - RNA, 19 nt, Homo sapiens
  misc_RNA (1)...(19): siRNA sense strand
gaacgaccgcagugacauc

SEQ ID NO: 1802488 - RNA, 19 nt, Homo sapiens
  misc_RNA (1)...(19): siRNA sense strand
aaaguccgcccucguguga

SEQ ID NO: 1802489 - RNA, 19 nt, Homo sapiens
  misc_RNA (1)...(19): siRNA sense strand
ggagaagaaaccucaccuu

SEQ ID NO: 1802490 - RNA, 19 nt, Homo sapiens
  misc_RNA (1)...(19): siRNA sense strand
agaggaagaaguccaaguu

SEQ ID NO: 1802491 - RNA, 19 nt, Homo sapiens
  misc_RNA (1)...(19): siRNA sense strand
gaggaagaaguccaaguuc

SEQ ID NO: 1802492 - RNA, 19 nt, Homo sapiens
  misc_RNA (1)...(19): siRNA sense strand
gagcaccagccuccaggaa

SEQ ID NO: 1802493 - RNA, 19 nt, Homo sapiens
  misc_RNA (1)...(19): siRNA sense strand
ggacugguucuggcucauu

SEQ ID NO: 1802494 - RNA, 19 nt, Homo sapiens
  misc_RNA (1)...(19): siRNA sense strand
agaggcagcugcaggacau

SEQ ID NO: 1802495 - RNA, 19 nt, Homo sapiens
  misc_RNA (1)...(19): siRNA sense strand
caaaccacacucaguucaa

SEQ ID NO: 1802496 - RNA, 19 nt, Homo sapiens
  misc_RNA (1)...(19): siRNA sense strand
gcuggaaggaggaggagaa

SEQ ID NO: 1802497 - RNA, 19 nt, Homo sapiens
  misc_RNA (1)...(19): siRNA sense strand
aaaccacacucaguucaag

SEQ ID NO: 1802498 - RNA, 19 nt, Homo sapiens
  misc_RNA (1)...(19): siRNA sense strand
gcccucgugugaccaauag

SEQ ID NO: 1802499 - RNA, 19 nt, Homo sapiens
  misc_RNA (1)...(19): siRNA sense strand
gacugguucuggcucauuc

SEQ ID NO: 1802500 - RNA, 19 nt, Homo sapiens
  misc_RNA (1)...(19): siRNA sense strand
gggaacaagaggaggauca

SEQ ID NO: 1802501 - RNA, 19 nt, Homo sapiens
  misc_RNA (1)...(19): siRNA sense strand
aggaggaacuuggcugaau

SEQ ID NO: 1802502 - RNA, 19 nt, Homo sapiens
  misc_RNA (1)...(19): siRNA sense strand
gauggagagcgaaucugaa

SEQ ID NO: 1802503 - RNA, 19 nt, Homo sapiens
  misc_RNA (1)...(19): siRNA sense strand
cagagcugauguacaaguc

SEQ ID NO: 1802504 - RNA, 19 nt, Homo sapiens
  misc_RNA (1)...(19): siRNA sense strand
ucaaaccacacucaguuca

SEQ ID NO: 1802505 - RNA, 19 nt, Homo sapiens
  misc_RNA (1)...(19): siRNA sense strand
acaagaggaggaucagaug

SEQ ID NO: 1802506 - RNA, 19 nt, Homo sapiens
  misc_RNA (1)...(19): siRNA sense strand
ggacucugaagcccaagga

SEQ ID NO: 1802507 - RNA, 19 nt, Homo sapiens
  misc_RNA (1)...(19): siRNA sense strand
ccgaggcucugaagucacu

SEQ ID NO: 1802508 - RNA, 19 nt, Homo sapiens
  misc_RNA (1)...(19): siRNA sense strand
ugcgggacaugauugagaa

SEQ ID NO: 1802509 - RNA, 19 nt, Homo sapiens
  misc_RNA (1)...(19): siRNA sense strand
ccacaagcaagucccuuag

SEQ ID NO: 1802510 - RNA, 19 nt, Homo sapiens
  misc_RNA (1)...(19): siRNA sense strand
ucccuuagccaagccguua

SEQ ID NO: 1802511 - RNA, 19 nt, Homo sapiens
  misc_RNA (1)...(19): siRNA sense strand
cgaguggcagcuccucaaa

SEQ ID NO: 1802512 - RNA, 19 nt, Homo sapiens
  misc_RNA (1)...(19): siRNA sense strand
ugaagcaccacaagcaagu

SEQ ID NO: 1802513 - RNA, 19 nt, Homo sapiens
  misc_RNA (1)...(19): siRNA sense strand
cgucacuuguucuauccaa

SEQ ID NO: 1802514 - RNA, 19 nt, Homo sapiens
  misc_RNA (1)...(19): siRNA sense strand
gggacaugauugagaagcu

SEQ ID NO: 1802515 - RNA, 19 nt, Homo sapiens
  misc_RNA (1)...(19): siRNA sense strand
agaaggcccaggaggcaaa

SEQ ID NO: 1802516 - RNA, 19 nt, Homo sapiens
  misc_RNA (1)...(19): siRNA sense strand
gcugggaguguccacauca

SEQ ID NO: 1802517 - RNA, 19 nt, Homo sapiens
  misc_RNA (1)...(19): siRNA sense strand
gggcuaccgcgacgugaau

SEQ ID NO: 1802518 - RNA, 19 nt, Homo sapiens
  misc_RNA (1)...(19): siRNA sense strand
gugcuuggccucccuucga

SEQ ID NO: 1802519 - RNA, 19 nt, Homo sapiens
  misc_RNA (1)...(19): siRNA sense strand
ccaaggacagcagcaagga

SEQ ID NO: 1802520 - RNA, 19 nt, Homo sapiens
  misc_RNA (1)...(19): siRNA sense strand
gaaggaacaugaagauuau

SEQ ID NO: 1802521 - RNA, 19 nt, Homo sapiens
  misc_RNA (1)...(19): siRNA sense strand
ugaaagaucugaagacuca

SEQ ID NO: 1802522 - RNA, 19 nt, Homo sapiens
  misc_RNA (1)...(19): siRNA sense strand
gcaauguccuugugaaaga

SEQ ID NO: 1802523 - RNA, 19 nt, Homo sapiens
  misc_RNA (1)...(19): siRNA sense strand
gagaagaggcuguuaaaga

SEQ ID NO: 1802524 - RNA, 19 nt, Homo sapiens
  misc_RNA (1)...(19): siRNA sense strand
agaagaggcuguuaaagaa

SEQ ID NO: 1802525 - RNA, 19 nt, Homo sapiens
  misc_RNA (1)...(19): siRNA sense strand
ugaaggaacaugaagauua

SEQ ID NO: 1802526 - RNA, 19 nt, Homo sapiens
  misc_RNA (1)...(19): siRNA sense strand
cauguugccuugugaauuu

SEQ ID NO: 1802527 - RNA, 19 nt, Homo sapiens
  misc_RNA (1)...(19): siRNA sense strand
cagaggaacugcugauuga

SEQ ID NO: 1802528 - RNA, 19 nt, Homo sapiens
  misc_RNA (1)...(19): siRNA sense strand
gcacugugauuuagaacuu

SEQ ID NO: 1802529 - RNA, 19 nt, Homo sapiens
  misc_RNA (1)...(19): siRNA sense strand
ggaacuauguggcaacugu

SEQ ID NO: 1802530 - RNA, 19 nt, Homo sapiens
  misc_RNA (1)...(19): siRNA sense strand
gcaaauguaacaagaaguu

SEQ ID NO: 1802531 - RNA, 19 nt, Homo sapiens
  misc_RNA (1)...(19): siRNA sense strand
gaaaugagguugccauacc

SEQ ID NO: 1802532 - RNA, 19 nt, Homo sapiens
  misc_RNA (1)...(19): siRNA sense strand
caauagaacuaccaaccaa

SEQ ID NO: 1802533 - RNA, 19 nt, Homo sapiens
  misc_RNA (1)...(19): siRNA sense strand
gagauccacugucaaagga

SEQ ID NO: 1802534 - RNA, 19 nt, Homo sapiens
  misc_RNA (1)...(19): siRNA sense strand
ccaggaaacucgacugugu

SEQ ID NO: 1802535 - RNA, 19 nt, Homo sapiens
  misc_RNA (1)...(19): siRNA sense strand
gaacaagagaggcaggaaa

SEQ ID NO: 1802536 - RNA, 19 nt, Homo sapiens
  misc_RNA (1)...(19): siRNA sense strand
caaagaggguggugaagag

SEQ ID NO: 1802537 - RNA, 19 nt, Homo sapiens
  misc_RNA (1)...(19): siRNA sense strand
ugaagagagugcaaacuug

SEQ ID NO: 1802538 - RNA, 19 nt, Homo sapiens
  misc_RNA (1)...(19): siRNA sense strand
gaacauuacagcccagguu

SEQ ID NO: 1802539 - RNA, 19 nt, Homo sapiens
  misc_RNA (1)...(19): siRNA sense strand
caaaaucucuacccagaaa

SEQ ID NO: 1802540 - RNA, 19 nt, Homo sapiens
  misc_RNA (1)...(19): siRNA sense strand
gaacuaccaaccaaaggaa

SEQ ID NO: 1802541 - RNA, 19 nt, Homo sapiens
  misc_RNA (1)...(19): siRNA sense strand
ccugagagccuuugaauca

SEQ ID NO: 1802542 - RNA, 19 nt, Homo sapiens
  misc_RNA (1)...(19): siRNA sense strand
gcaacaggcugcaaguaac

SEQ ID NO: 1802543 - RNA, 19 nt, Homo sapiens
  misc_RNA (1)...(19): siRNA sense strand
gagaucauguugccuugug

SEQ ID NO: 1802544 - RNA, 19 nt, Homo sapiens
  misc_RNA (1)...(19): siRNA sense strand
aaacuuggacuucauguug

SEQ ID NO: 1802545 - RNA, 19 nt, Homo sapiens
  misc_RNA (1)...(19): siRNA sense strand
gagaaaugagguugccaua

SEQ ID NO: 1802546 - RNA, 19 nt, Homo sapiens
  misc_RNA (1)...(19): siRNA sense strand
ggcaaagccuuccaagcaa

SEQ ID NO: 1802547 - RNA, 19 nt, Homo sapiens
  misc_RNA (1)...(19): siRNA sense strand
caacuccucagacaaauug

SEQ ID NO: 1802548 - RNA, 19 nt, Homo sapiens
  misc_RNA (1)...(19): siRNA sense strand
gaacaugaagauuauugug

SEQ ID NO: 1802549 - RNA, 19 nt, Homo sapiens
  misc_RNA (1)...(19): siRNA sense strand
guauguguccuaccuguaa

SEQ ID NO: 1802550 - RNA, 19 nt, Homo sapiens
  misc_RNA (1)...(19): siRNA sense strand
ccaguuagacucuuugaug

SEQ ID NO: 1802551 - RNA, 19 nt, Homo sapiens
  misc_RNA (1)...(19): siRNA sense strand
gaaacucgacugugugaca

SEQ ID NO: 1802552 - RNA, 19 nt, Homo sapiens
  misc_RNA (1)...(19): siRNA sense strand
ucacauggcugcagaacac

SEQ ID NO: 1802553 - RNA, 19 nt, Homo sapiens
  misc_RNA (1)...(19): siRNA sense strand
gagcaucauuaucccaugu

SEQ ID NO: 1802554 - RNA, 19 nt, Homo sapiens
  misc_RNA (1)...(19): siRNA sense strand
gagugaagguggcaggaau

SEQ ID NO: 1802555 - RNA, 19 nt, Homo sapiens
  misc_RNA (1)...(19): siRNA sense strand
caugagauccacugucaaa

SEQ ID NO: 1802556 - RNA, 19 nt, Homo sapiens
  misc_RNA (1)...(19): siRNA sense strand
caaccaaccaugugacaga

SEQ ID NO: 1802557 - RNA, 19 nt, Homo sapiens
  misc_RNA (1)...(19): siRNA sense strand
ccagcacugugauuuagaa

SEQ ID NO: 1802558 - RNA, 19 nt, Homo sapiens
  misc_RNA (1)...(19): siRNA sense strand
guaacaagaaguuggagaa

SEQ ID NO: 1802559 - RNA, 19 nt, Homo sapiens
  misc_RNA (1)...(19): siRNA sense strand
gugauucgcccuccucaaa

SEQ ID NO: 1802560 - RNA, 19 nt, Homo sapiens
  misc_RNA (1)...(19): siRNA sense strand
acaagaaguuggagaagag

SEQ ID NO: 1802561 - RNA, 19 nt, Homo sapiens
  misc_RNA (1)...(19): siRNA sense strand
aaucugacauggagacuca

SEQ ID NO: 1802562 - RNA, 19 nt, Homo sapiens
  misc_RNA (1)...(19): siRNA sense strand
gccgacccauuaacaauau

SEQ ID NO: 1802563 - RNA, 19 nt, Homo sapiens
  misc_RNA (1)...(19): siRNA sense strand
caacuguggucgcaauguc

SEQ ID NO: 1802564 - RNA, 19 nt, Homo sapiens
  misc_RNA (1)...(19): siRNA sense strand
ccucccagccgacccauua

SEQ ID NO: 1802565 - RNA, 19 nt, Homo sapiens
  misc_RNA (1)...(19): siRNA sense strand
gaggagagcaucauuaucc

SEQ ID NO: 1802566 - RNA, 19 nt, Homo sapiens
  misc_RNA (1)...(19): siRNA sense strand
gugaagagagugcaaacuu

SEQ ID NO: 1802567 - RNA, 19 nt, Homo sapiens
  misc_RNA (1)...(19): siRNA sense strand
ugagagccuuugaaucaga

SEQ ID NO: 1802568 - RNA, 19 nt, Homo sapiens
  misc_RNA (1)...(19): siRNA sense strand
gcucuggacccacccauga

SEQ ID NO: 1802569 - RNA, 19 nt, Homo sapiens
  misc_RNA (1)...(19): siRNA sense strand
gaagacucacccugaaguu

SEQ ID NO: 1802570 - RNA, 19 nt, Homo sapiens
  misc_RNA (1)...(19): siRNA sense strand
cagcccagguuucaauuca

SEQ ID NO: 1802571 - RNA, 19 nt, Homo sapiens
  misc_RNA (1)...(19): siRNA sense strand
gcccagguuucaauucaga

SEQ ID NO: 1802572 - RNA, 19 nt, Homo sapiens
  misc_RNA (1)...(19): siRNA sense strand
ccauaccuccuaaugcaua

SEQ ID NO: 1802573 - RNA, 19 nt, Homo sapiens
  misc_RNA (1)...(19): siRNA sense strand
gcaucauuaucccauguga

SEQ ID NO: 1802574 - RNA, 19 nt, Homo sapiens
  misc_RNA (1)...(19): siRNA sense strand
gagaggcaggaaaggaaua

SEQ ID NO: 1802575 - RNA, 19 nt, Homo sapiens
  misc_RNA (1)...(19): siRNA sense strand
ugccuuaccuucacucaau

SEQ ID NO: 1802576 - RNA, 19 nt, Homo sapiens
  misc_RNA (1)...(19): siRNA sense strand
gacaagcuguaacccuuca

SEQ ID NO: 1802577 - RNA, 19 nt, Homo sapiens
  misc_RNA (1)...(19): siRNA sense strand
ccagaggaacugcugauug

SEQ ID NO: 1802578 - RNA, 19 nt, Homo sapiens
  misc_RNA (1)...(19): siRNA sense strand
ccaaagaggguggugaaga

SEQ ID NO: 1802579 - RNA, 19 nt, Homo sapiens
  misc_RNA (1)...(19): siRNA sense strand
cagcccagcucuccuugug

SEQ ID NO: 1802580 - RNA, 19 nt, Homo sapiens
  misc_RNA (1)...(19): siRNA sense strand
caauaugacagcuaccuau

SEQ ID NO: 1802581 - RNA, 19 nt, Homo sapiens
  misc_RNA (1)...(19): siRNA sense strand
gaacuuuccauucucaaac

SEQ ID NO: 1802582 - RNA, 19 nt, Homo sapiens
  misc_RNA (1)...(19): siRNA sense strand
gggugcagcugacgagauc

SEQ ID NO: 1802583 - RNA, 19 nt, Homo sapiens
  misc_RNA (1)...(19): siRNA sense strand
gaaauuccuguguuuaacu

SEQ ID NO: 1802584 - RNA, 19 nt, Homo sapiens
  misc_RNA (1)...(19): siRNA sense strand
uccaugagauccacuguca

SEQ ID NO: 1802585 - RNA, 19 nt, Homo sapiens
  misc_RNA (1)...(19): siRNA sense strand
caagagaggcaggaaagga

SEQ ID NO: 1802586 - RNA, 19 nt, Homo sapiens
  misc_RNA (1)...(19): siRNA sense strand
guggaggagagcaucauua

SEQ ID NO: 1802587 - RNA, 19 nt, Homo sapiens
  misc_RNA (1)...(19): siRNA sense strand
ugucaaaggaacauuggua

SEQ ID NO: 1802588 - RNA, 19 nt, Homo sapiens
  misc_RNA (1)...(19): siRNA sense strand
ucagggagauacggagcua

SEQ ID NO: 1802589 - RNA, 19 nt, Homo sapiens
  misc_RNA (1)...(19): siRNA sense strand
gaaucgagacagccagaau

SEQ ID NO: 1802590 - RNA, 19 nt, Homo sapiens
  misc_RNA (1)...(19): siRNA sense strand
uaugacagcuaccuauaac

SEQ ID NO: 1802591 - RNA, 19 nt, Homo sapiens
  misc_RNA (1)...(19): siRNA sense strand
gaagaggcuguuaaagaag

SEQ ID NO: 1802592 - RNA, 19 nt, Homo sapiens
  misc_RNA (1)...(19): siRNA sense strand
gccuuaccuucacucaaua

SEQ ID NO: 1802593 - RNA, 19 nt, Homo sapiens
  misc_RNA (1)...(19): siRNA sense strand
gugcaaacuuggacuucau

SEQ ID NO: 1802594 - RNA, 19 nt, Homo sapiens
  misc_RNA (1)...(19): siRNA sense strand
ucagauguuuuccacaaua

SEQ ID NO: 1802595 - RNA, 19 nt, Homo sapiens
  misc_RNA (1)...(19): siRNA sense strand
caucccaacuccucagaca

SEQ ID NO: 1802596 - RNA, 19 nt, Homo sapiens
  misc_RNA (1)...(19): siRNA sense strand
ucugaagacucacccugaa

SEQ ID NO: 1802597 - RNA, 19 nt, Homo sapiens
  misc_RNA (1)...(19): siRNA sense strand
ggaacaugaagauuauugu

SEQ ID NO: 1802598 - RNA, 19 nt, Homo sapiens
  misc_RNA (1)...(19): siRNA sense strand
aauaugacagcuaccuaua

SEQ ID NO: 1802599 - RNA, 19 nt, Homo sapiens
  misc_RNA (1)...(19): siRNA sense strand
gaccaucagacaagcugua

SEQ ID NO: 1802600 - RNA, 19 nt, Homo sapiens
  misc_RNA (1)...(19): siRNA sense strand
gagagccuuugaaucagau

SEQ ID NO: 1802601 - RNA, 19 nt, Homo sapiens
  misc_RNA (1)...(19): siRNA sense strand
ugccauaccuccuaaugca

SEQ ID NO: 1802602 - RNA, 19 nt, Homo sapiens
  misc_RNA (1)...(19): siRNA sense strand
agacucacccugaaguuug

SEQ ID NO: 1802603 - RNA, 19 nt, Homo sapiens
  misc_RNA (1)...(19): siRNA sense strand
aaacucgacugugugacaa

SEQ ID NO: 1802604 - RNA, 19 nt, Homo sapiens
  misc_RNA (1)...(19): siRNA sense strand
aacaagaaguuggagaaga

SEQ ID NO: 1802605 - RNA, 19 nt, Homo sapiens
  misc_RNA (1)...(19): siRNA sense strand
gauuuagaacuuuccauuc

SEQ ID NO: 1802606 - RNA, 19 nt, Homo sapiens
  misc_RNA (1)...(19): siRNA sense strand
ggaagaggaggugcuguuc

SEQ ID NO: 1802607 - RNA, 19 nt, Homo sapiens
  misc_RNA (1)...(19): siRNA sense strand
caaacugaaggaacaugaa

SEQ ID NO: 1802608 - RNA, 19 nt, Homo sapiens
  misc_RNA (1)...(19): siRNA sense strand
uggagaagaggcuguuaaa

SEQ ID NO: 1802609 - RNA, 19 nt, Homo sapiens
  misc_RNA (1)...(19): siRNA sense strand
ggaugauacuaagcaggaa

SEQ ID NO: 1802610 - RNA, 19 nt, Homo sapiens
  misc_RNA (1)...(19): siRNA sense strand
uaucccaugugaauucugu

SEQ ID NO: 1802611 - RNA, 19 nt, Homo sapiens
  misc_RNA (1)...(19): siRNA sense strand
cugcaaauguaacaagaag

SEQ ID NO: 1802612 - RNA, 19 nt, Homo sapiens
  misc_RNA (1)...(19): siRNA sense strand
gaugauacuaagcaggaaa

SEQ ID NO: 1802613 - RNA, 19 nt, Homo sapiens
  misc_RNA (1)...(19): siRNA sense strand
ccacugcaaccaaccaugu

SEQ ID NO: 1802614 - RNA, 19 nt, Homo sapiens
  misc_RNA (1)...(19): siRNA sense strand
cauuaucccaugugaauuc

SEQ ID NO: 1802615 - RNA, 19 nt, Homo sapiens
  misc_RNA (1)...(19): siRNA sense strand
ugaugggccugagcaauuc

SEQ ID NO: 1802616 - RNA, 19 nt, Homo sapiens
  misc_RNA (1)...(19): siRNA sense strand
gacucacccugaaguuugu

SEQ ID NO: 1802617 - RNA, 19 nt, Homo sapiens
  misc_RNA (1)...(19): siRNA sense strand
cugguuaccuggaugauac

SEQ ID NO: 1802618 - RNA, 19 nt, Homo sapiens
  misc_RNA (1)...(19): siRNA sense strand
gaucauguugccuugugaa

SEQ ID NO: 1802619 - RNA, 19 nt, Homo sapiens
  misc_RNA (1)...(19): siRNA sense strand
gccuuugaaucagauguuu

SEQ ID NO: 1802620 - RNA, 19 nt, Homo sapiens
  misc_RNA (1)...(19): siRNA sense strand
gaagagggauggauugaaa

SEQ ID NO: 1802621 - RNA, 19 nt, Homo sapiens
  misc_RNA (1)...(19): siRNA sense strand
gaaagaggagcaucagaua

SEQ ID NO: 1802622 - RNA, 19 nt, Homo sapiens
  misc_RNA (1)...(19): siRNA sense strand
aagaauagauguugggaua

SEQ ID NO: 1802623 - RNA, 19 nt, Homo sapiens
  misc_RNA (1)...(19): siRNA sense strand
gcaguuaacuauaaugcaa

SEQ ID NO: 1802624 - RNA, 19 nt, Homo sapiens
  misc_RNA (1)...(19): siRNA sense strand
gcaagaagaagacauuaaa

SEQ ID NO: 1802625 - RNA, 19 nt, Homo sapiens
  misc_RNA (1)...(19): siRNA sense strand
gcaaagagaagaacaugaa

SEQ ID NO: 1802626 - RNA, 19 nt, Homo sapiens
  misc_RNA (1)...(19): siRNA sense strand
ggcaugaucuaccugaaua

SEQ ID NO: 1802627 - RNA, 19 nt, Homo sapiens
  misc_RNA (1)...(19): siRNA sense strand
ucaacagagugauacuuua

SEQ ID NO: 1802628 - RNA, 19 nt, Homo sapiens
  misc_RNA (1)...(19): siRNA sense strand
gaagcaagaagaagacauu

SEQ ID NO: 1802629 - RNA, 19 nt, Homo sapiens
  misc_RNA (1)...(19): siRNA sense strand
gaauagauguugggauauc

SEQ ID NO: 1802630 - RNA, 19 nt, Homo sapiens
  misc_RNA (1)...(19): siRNA sense strand
caaagaauaugccaaacag

SEQ ID NO: 1802631 - RNA, 19 nt, Homo sapiens
  misc_RNA (1)...(19): siRNA sense strand
ccaagaaaguuauggagau

SEQ ID NO: 1802632 - RNA, 19 nt, Homo sapiens
  misc_RNA (1)...(19): siRNA sense strand
ucgaagaacacacuaauaa

SEQ ID NO: 1802633 - RNA, 19 nt, Homo sapiens
  misc_RNA (1)...(19): siRNA sense strand
gagccaaccaagaaaguua

SEQ ID NO: 1802634 - RNA, 19 nt, Homo sapiens
  misc_RNA (1)...(19): siRNA sense strand
gaagaacacacuaauaaac

SEQ ID NO: 1802635 - RNA, 19 nt, Homo sapiens
  misc_RNA (1)...(19): siRNA sense strand
gauuguauguucaggagaa

SEQ ID NO: 1802636 - RNA, 19 nt, Homo sapiens
  misc_RNA (1)...(19): siRNA sense strand
gagaagaacaugaauuagu

SEQ ID NO: 1802637 - RNA, 19 nt, Homo sapiens
  misc_RNA (1)...(19): siRNA sense strand
gcucaaagaauaugccaaa

SEQ ID NO: 1802638 - RNA, 19 nt, Homo sapiens
  misc_RNA (1)...(19): siRNA sense strand
ucacuuuccucuguugaua

SEQ ID NO: 1802639 - RNA, 19 nt, Homo sapiens
  misc_RNA (1)...(19): siRNA sense strand
gaagagcuacuaagagcaa

SEQ ID NO: 1802640 - RNA, 19 nt, Homo sapiens
  misc_RNA (1)...(19): siRNA sense strand
caagaaaguuauggagaug

SEQ ID NO: 1802641 - RNA, 19 nt, Homo sapiens
  misc_RNA (1)...(19): siRNA sense strand
uggagaagcugaaagcaau

SEQ ID NO: 1802642 - RNA, 19 nt, Homo sapiens
  misc_RNA (1)...(19): siRNA sense strand
gacaggaaccacauacaaa

SEQ ID NO: 1802643 - RNA, 19 nt, Homo sapiens
  misc_RNA (1)...(19): siRNA sense strand
cgaagaacacacuaauaaa

SEQ ID NO: 1802644 - RNA, 19 nt, Homo sapiens
  misc_RNA (1)...(19): siRNA sense strand
ccucagauccugcaaaugu

SEQ ID NO: 1802645 - RNA, 19 nt, Homo sapiens
  misc_RNA (1)...(19): siRNA sense strand
ggccuacgcacccuuuaua

SEQ ID NO: 1802646 - RNA, 19 nt, Homo sapiens
  misc_RNA (1)...(19): siRNA sense strand
ggcagcagcuagaggaaga

SEQ ID NO: 1802647 - RNA, 19 nt, Homo sapiens
  misc_RNA (1)...(19): siRNA sense strand
ggagaagagggauggauug

SEQ ID NO: 1802648 - RNA, 19 nt, Homo sapiens
  misc_RNA (1)...(19): siRNA sense strand
gaggagcaucagauaauuu

SEQ ID NO: 1802649 - RNA, 19 nt, Homo sapiens
  misc_RNA (1)...(19): siRNA sense strand
uaaauucucaacagaguga

SEQ ID NO: 1802650 - RNA, 19 nt, Homo sapiens
  misc_RNA (1)...(19): siRNA sense strand
caacagagugauacuuuag

SEQ ID NO: 1802651 - RNA, 19 nt, Homo sapiens
  misc_RNA (1)...(19): siRNA sense strand
aaggcuagaucuuccaauu

SEQ ID NO: 1802652 - RNA, 19 nt, Homo sapiens
  misc_RNA (1)...(19): siRNA sense strand
caguggaggugaagcaaga

SEQ ID NO: 1802653 - RNA, 19 nt, Homo sapiens
  misc_RNA (1)...(19): siRNA sense strand
gggauaucauagcaguuaa

SEQ ID NO: 1802654 - RNA, 19 nt, Homo sapiens
  misc_RNA (1)...(19): siRNA sense strand
gagaagagggauggauuga

SEQ ID NO: 1802655 - RNA, 19 nt, Homo sapiens
  misc_RNA (1)...(19): siRNA sense strand
guagaccgcccuccucgaa

SEQ ID NO: 1802656 - RNA, 19 nt, Homo sapiens
  misc_RNA (1)...(19): siRNA sense strand
ggaggugaagcaagaagaa

SEQ ID NO: 1802657 - RNA, 19 nt, Homo sapiens
  misc_RNA (1)...(19): siRNA sense strand
ggcuagaucuuccaauuuu

SEQ ID NO: 1802658 - RNA, 19 nt, Homo sapiens
  misc_RNA (1)...(19): siRNA sense strand
aaagaggagcaucagauaa

SEQ ID NO: 1802659 - RNA, 19 nt, Homo sapiens
  misc_RNA (1)...(19): siRNA sense strand
gagugauacuuuagagcaa

SEQ ID NO: 1802660 - RNA, 19 nt, Homo sapiens
  misc_RNA (1)...(19): siRNA sense strand
ccaguucacuacagguaau

SEQ ID NO: 1802661 - RNA, 19 nt, Homo sapiens
  misc_RNA (1)...(19): siRNA sense strand
ugaaagaggagcaucagau

SEQ ID NO: 1802662 - RNA, 19 nt, Homo sapiens
  misc_RNA (1)...(19): siRNA sense strand
ugggauaucauagcaguua

SEQ ID NO: 1802663 - RNA, 19 nt, Homo sapiens
  misc_RNA (1)...(19): siRNA sense strand
gagcaaagagaagaacaug

SEQ ID NO: 1802664 - RNA, 19 nt, Homo sapiens
  misc_RNA (1)...(19): siRNA sense strand
ucaccauccuguugcuauu

SEQ ID NO: 1802665 - RNA, 19 nt, Homo sapiens
  misc_RNA (1)...(19): siRNA sense strand
gaaaggcuagaucuuccaa

SEQ ID NO: 1802666 - RNA, 19 nt, Homo sapiens
  misc_RNA (1)...(19): siRNA sense strand
agaggagcaucagauaauu

SEQ ID NO: 1802667 - RNA, 19 nt, Homo sapiens
  misc_RNA (1)...(19): siRNA sense strand
agaaugacaucgucuccau

SEQ ID NO: 1802668 - RNA, 19 nt, Homo sapiens
  misc_RNA (1)...(19): siRNA sense strand
ggagaugauuccccagauu

SEQ ID NO: 1802669 - RNA, 19 nt, Homo sapiens
  misc_RNA (1)...(19): siRNA sense strand
caugaucuaccugaauaua

SEQ ID NO: 1802670 - RNA, 19 nt, Homo sapiens
  misc_RNA (1)...(19): siRNA sense strand
ugacaucgucuccaucuuc

SEQ ID NO: 1802671 - RNA, 19 nt, Homo sapiens
  misc_RNA (1)...(19): siRNA sense strand
gaagccauaugugaaaauu

SEQ ID NO: 1802672 - RNA, 19 nt, Homo sapiens
  misc_RNA (1)...(19): siRNA sense strand
ucaaagaauaugccaaaca

SEQ ID NO: 1802673 - RNA, 19 nt, Homo sapiens
  misc_RNA (1)...(19): siRNA sense strand
agaggaagagcuacuaaga

SEQ ID NO: 1802674 - RNA, 19 nt, Homo sapiens
  misc_RNA (1)...(19): siRNA sense strand
aaagaaggcagcagcuaga

SEQ ID NO: 1802675 - RNA, 19 nt, Homo sapiens
  misc_RNA (1)...(19): siRNA sense strand
agaaaguuauggagaugau

SEQ ID NO: 1802676 - RNA, 19 nt, Homo sapiens
  misc_RNA (1)...(19): siRNA sense strand
aagaggagcaucagauaau

SEQ ID NO: 1802677 - RNA, 19 nt, Homo sapiens
  misc_RNA (1)...(19): siRNA sense strand
caaccaagaaaguuaugga

SEQ ID NO: 1802678 - RNA, 19 nt, Homo sapiens
  misc_RNA (1)...(19): siRNA sense strand
cgaaaagcuugauuugcua

SEQ ID NO: 1802679 - RNA, 19 nt, Homo sapiens
  misc_RNA (1)...(19): siRNA sense strand
agacaggaaccacauacaa

SEQ ID NO: 1802680 - RNA, 19 nt, Homo sapiens
  misc_RNA (1)...(19): siRNA sense strand
gcuagaucuuccaauuuua

SEQ ID NO: 1802681 - RNA, 19 nt, Homo sapiens
  misc_RNA (1)...(19): siRNA sense strand
ggagaagcugaaagcaauu

SEQ ID NO: 1802682 - RNA, 19 nt, Homo sapiens
  misc_RNA (1)...(19): siRNA sense strand
caucgucuccaucuucuau

SEQ ID NO: 1802683 - RNA, 19 nt, Homo sapiens
  misc_RNA (1)...(19): siRNA sense strand
gauaugagaaugacaucgu

SEQ ID NO: 1802684 - RNA, 19 nt, Homo sapiens
  misc_RNA (1)...(19): siRNA sense strand
cgccuucacuuuccucugu

SEQ ID NO: 1802685 - RNA, 19 nt, Homo sapiens
  misc_RNA (1)...(19): siRNA sense strand
ugaucuaccugaauauaac

SEQ ID NO: 1802686 - RNA, 19 nt, Homo sapiens
  misc_RNA (1)...(19): siRNA sense strand
gacaucgucuccaucuucu

SEQ ID NO: 1802687 - RNA, 19 nt, Homo sapiens
  misc_RNA (1)...(19): siRNA sense strand
gaaaguuauggagaugauu

SEQ ID NO: 1802688 - RNA, 19 nt, Homo sapiens
  misc_RNA (1)...(19): siRNA sense strand
gaggaagagcuacuaagag

SEQ ID NO: 1802689 - RNA, 19 nt, Homo sapiens
  misc_RNA (1)...(19): siRNA sense strand
gaagaacaugaauuaguac

SEQ ID NO: 1802690 - RNA, 19 nt, Homo sapiens
  misc_RNA (1)...(19): siRNA sense strand
caaagagaagaacaugaau

SEQ ID NO: 1802691 - RNA, 19 nt, Homo sapiens
  misc_RNA (1)...(19): siRNA sense strand
ccaaacaggagcuauugca

SEQ ID NO: 1802692 - RNA, 19 nt, Homo sapiens
  misc_RNA (1)...(19): siRNA sense strand
aaauugaaguggagaagcu

SEQ ID NO: 1802693 - RNA, 19 nt, Homo sapiens
  misc_RNA (1)...(19): siRNA sense strand
gcuagaggaagagcuacua

SEQ ID NO: 1802694 - RNA, 19 nt, Homo sapiens
  misc_RNA (1)...(19): siRNA sense strand
gaaaagaaggcagcagcua

SEQ ID NO: 1802695 - RNA, 19 nt, Homo sapiens
  misc_RNA (1)...(19): siRNA sense strand
guaggaaaggcuagaucuu

SEQ ID NO: 1802696 - RNA, 19 nt, Homo sapiens
  misc_RNA (1)...(19): siRNA sense strand
ccuacgcacccuuuauaaa

SEQ ID NO: 1802697 - RNA, 19 nt, Homo sapiens
  misc_RNA (1)...(19): siRNA sense strand
gagaugauuccccagauuu

SEQ ID NO: 1802698 - RNA, 19 nt, Homo sapiens
  misc_RNA (1)...(19): siRNA sense strand
uaguacauguuauggaaag

SEQ ID NO: 1802699 - RNA, 19 nt, Homo sapiens
  misc_RNA (1)...(19): siRNA sense strand
gaaaagcuugauuugcuaa

SEQ ID NO: 1802700 - RNA, 19 nt, Homo sapiens
  misc_RNA (1)...(19): siRNA sense strand
uaggaaaggcuagaucuuc

SEQ ID NO: 1802701 - RNA, 19 nt, Homo sapiens
  misc_RNA (1)...(19): siRNA sense strand
caccauccuguugcuauua

SEQ ID NO: 1802702 - RNA, 19 nt, Homo sapiens
  misc_RNA (1)...(19): siRNA sense strand
guggagaagcugaaagcaa

SEQ ID NO: 1802703 - RNA, 19 nt, Homo sapiens
  misc_RNA (1)...(19): siRNA sense strand
agaccgcccuccucgaaca

SEQ ID NO: 1802704 - RNA, 19 nt, Homo sapiens
  misc_RNA (1)...(19): siRNA sense strand
agaagaagacauuaaacca

SEQ ID NO: 1802705 - RNA, 19 nt, Homo sapiens
  misc_RNA (1)...(19): siRNA sense strand
ugugaagccauaugugaaa

SEQ ID NO: 1802706 - RNA, 19 nt, Homo sapiens
  misc_RNA (1)...(19): siRNA sense strand
uagauguugggauaucaua

SEQ ID NO: 1802707 - RNA, 19 nt, Homo sapiens
  misc_RNA (1)...(19): siRNA sense strand
gagaagcugaaagcaauuc

SEQ ID NO: 1802708 - RNA, 19 nt, Homo sapiens
  misc_RNA (1)...(19): siRNA sense strand
gcaugagaguggugaacac

SEQ ID NO: 1802709 - RNA, 19 nt, Homo sapiens
  misc_RNA (1)...(19): siRNA sense strand
acagagugauacuuuagag

SEQ ID NO: 1802710 - RNA, 19 nt, Homo sapiens
  misc_RNA (1)...(19): siRNA sense strand
cucaacagagugauacuuu

SEQ ID NO: 1802711 - RNA, 19 nt, Homo sapiens
  misc_RNA (1)...(19): siRNA sense strand
uaagagacaggaaccacau

SEQ ID NO: 1802712 - RNA, 19 nt, Homo sapiens
  misc_RNA (1)...(19): siRNA sense strand
cuacgcacccuuuauaaaa

SEQ ID NO: 1802713 - RNA, 19 nt, Homo sapiens
  misc_RNA (1)...(19): siRNA sense strand
aaaguuauggagaugauuc

SEQ ID NO: 1802714 - RNA, 19 nt, Homo sapiens
  misc_RNA (1)...(19): siRNA sense strand
cuagaggaagagcuacuaa

SEQ ID NO: 1802715 - RNA, 19 nt, Homo sapiens
  misc_RNA (1)...(19): siRNA sense strand
cuauaaugcaauuggagua

SEQ ID NO: 1802716 - RNA, 19 nt, Homo sapiens
  misc_RNA (1)...(19): siRNA sense strand
caagaagaagacauuaaac

SEQ ID NO: 1802717 - RNA, 19 nt, Homo sapiens
  misc_RNA (1)...(19): siRNA sense strand
gaauuaguacauguuaugg

SEQ ID NO: 1802718 - RNA, 19 nt, Homo sapiens
  misc_RNA (1)...(19): siRNA sense strand
gguaggaaaggcuagaucu

SEQ ID NO: 1802719 - RNA, 19 nt, Homo sapiens
  misc_RNA (1)...(19): siRNA sense strand
gccuacgcacccuuuauaa

SEQ ID NO: 1802720 - RNA, 19 nt, Homo sapiens
  misc_RNA (1)...(19): siRNA sense strand
caacugaggugguucugaa

SEQ ID NO: 1802721 - RNA, 19 nt, Homo sapiens
  misc_RNA (1)...(19): siRNA sense strand
caucgaaucuccuggguuu

SEQ ID NO: 1802722 - RNA, 19 nt, Homo sapiens
  misc_RNA (1)...(19): siRNA sense strand
caaagaugcuggcuauauc

SEQ ID NO: 1802723 - RNA, 19 nt, Homo sapiens
  misc_RNA (1)...(19): siRNA sense strand
caacuucaacccucacuuu

SEQ ID NO: 1802724 - RNA, 19 nt, Homo sapiens
  misc_RNA (1)...(19): siRNA sense strand
ccggagagauugccauuga

SEQ ID NO: 1802725 - RNA, 19 nt, Homo sapiens
  misc_RNA (1)...(19): siRNA sense strand
caacuuggacugcaccuuu

SEQ ID NO: 1802726 - RNA, 19 nt, Homo sapiens
  misc_RNA (1)...(19): siRNA sense strand
gcuacuacgucaaauccua

SEQ ID NO: 1802727 - RNA, 19 nt, Homo sapiens
  misc_RNA (1)...(19): siRNA sense strand
gaacccaaccagaagauug

SEQ ID NO: 1802728 - RNA, 19 nt, Homo sapiens
  misc_RNA (1)...(19): siRNA sense strand
gaagggaacaugcacuaug

SEQ ID NO: 1802729 - RNA, 19 nt, Homo sapiens
  misc_RNA (1)...(19): siRNA sense strand
gggauucaauugcaacuuc

SEQ ID NO: 1802730 - RNA, 19 nt, Homo sapiens
  misc_RNA (1)...(19): siRNA sense strand
gaccggacguuuccagaug

SEQ ID NO: 1802731 - RNA, 19 nt, Homo sapiens
  misc_RNA (1)...(19): siRNA sense strand
gugcggaggucguuugaau

SEQ ID NO: 1802732 - RNA, 19 nt, Homo sapiens
  misc_RNA (1)...(19): siRNA sense strand
gaagcacgacugcaaguau

SEQ ID NO: 1802733 - RNA, 19 nt, Homo sapiens
  misc_RNA (1)...(19): siRNA sense strand
ccaaagaugcuggcuauau

SEQ ID NO: 1802734 - RNA, 19 nt, Homo sapiens
  misc_RNA (1)...(19): siRNA sense strand
gaauggcuacuacgucaaa

SEQ ID NO: 1802735 - RNA, 19 nt, Homo sapiens
  misc_RNA (1)...(19): siRNA sense strand
cgacauggaguaccagauu

SEQ ID NO: 1802736 - RNA, 19 nt, Homo sapiens
  misc_RNA (1)...(19): siRNA sense strand
aagggaacaugcacuauga

SEQ ID NO: 1802737 - RNA, 19 nt, Homo sapiens
  misc_RNA (1)...(19): siRNA sense strand
uuucuuagcccucuacuuu

SEQ ID NO: 1802738 - RNA, 19 nt, Homo sapiens
  misc_RNA (1)...(19): siRNA sense strand
gaacugcagcuuugaggau

SEQ ID NO: 1802739 - RNA, 19 nt, Homo sapiens
  misc_RNA (1)...(19): siRNA sense strand
caagacaggcucugaagau

SEQ ID NO: 1802740 - RNA, 19 nt, Homo sapiens
  misc_RNA (1)...(19): siRNA sense strand
gagcauuugugcgcaaguu

SEQ ID NO: 1802741 - RNA, 19 nt, Homo sapiens
  misc_RNA (1)...(19): siRNA sense strand
gacauggaguaccagauug

SEQ ID NO: 1802742 - RNA, 19 nt, Homo sapiens
  misc_RNA (1)...(19): siRNA sense strand
gggauggcauuccacaugu

SEQ ID NO: 1802743 - RNA, 19 nt, Homo sapiens
  misc_RNA (1)...(19): siRNA sense strand
gaacugcgaguggauuguu

SEQ ID NO: 1802744 - RNA, 19 nt, Homo sapiens
  misc_RNA (1)...(19): siRNA sense strand
gaacuuucagugcaauguu

SEQ ID NO: 1802745 - RNA, 19 nt, Homo sapiens
  misc_RNA (1)...(19): siRNA sense strand
ggagagauugccauugaug

SEQ ID NO: 1802746 - RNA, 19 nt, Homo sapiens
  misc_RNA (1)...(19): siRNA sense strand
ccagagagagggccaguau

SEQ ID NO: 1802747 - RNA, 19 nt, Homo sapiens
  misc_RNA (1)...(19): siRNA sense strand
gcuccaugcucuacaucaa

SEQ ID NO: 1802748 - RNA, 19 nt, Homo sapiens
  misc_RNA (1)...(19): siRNA sense strand
ggauggcauuccacauguu

SEQ ID NO: 1802749 - RNA, 19 nt, Homo sapiens
  misc_RNA (1)...(19): siRNA sense strand
gaggagcccugugguugga

SEQ ID NO: 1802750 - RNA, 19 nt, Homo sapiens
  misc_RNA (1)...(19): siRNA sense strand
ucaauugcaacuucgauuu

SEQ ID NO: 1802751 - RNA, 19 nt, Homo sapiens
  misc_RNA (1)...(19): siRNA sense strand
gaacacccaagacagugaa

SEQ ID NO: 1802752 - RNA, 19 nt, Homo sapiens
  misc_RNA (1)...(19): siRNA sense strand
cauggagucuggccggauu

SEQ ID NO: 1802753 - RNA, 19 nt, Homo sapiens
  misc_RNA (1)...(19): siRNA sense strand
caaguacugugggaccaaa

SEQ ID NO: 1802754 - RNA, 19 nt, Homo sapiens
  misc_RNA (1)...(19): siRNA sense strand
gacaggcucugaagauugc

SEQ ID NO: 1802755 - RNA, 19 nt, Homo sapiens
  misc_RNA (1)...(19): siRNA sense strand
guuagaauccgcccucaga

SEQ ID NO: 1802756 - RNA, 19 nt, Homo sapiens
  misc_RNA (1)...(19): siRNA sense strand
aaacacagaauggcuacua

SEQ ID NO: 1802757 - RNA, 19 nt, Homo sapiens
  misc_RNA (1)...(19): siRNA sense strand
gaacagaucagugccucau

SEQ ID NO: 1802758 - RNA, 19 nt, Homo sapiens
  misc_RNA (1)...(19): siRNA sense strand
ucuuugaccuggagcauga

SEQ ID NO: 1802759 - RNA, 19 nt, Homo sapiens
  misc_RNA (1)...(19): siRNA sense strand
ggaggucguuugaauucca

SEQ ID NO: 1802760 - RNA, 19 nt, Homo sapiens
  misc_RNA (1)...(19): siRNA sense strand
gagagauugccauugauga

SEQ ID NO: 1802761 - RNA, 19 nt, Homo sapiens
  misc_RNA (1)...(19): siRNA sense strand
gcggaggucguuugaauuc

SEQ ID NO: 1802762 - RNA, 19 nt, Homo sapiens
  misc_RNA (1)...(19): siRNA sense strand
agugaaaggugucaucauc

SEQ ID NO: 1802763 - RNA, 19 nt, Homo sapiens
  misc_RNA (1)...(19): siRNA sense strand
gaugcucccugcuccaaca

SEQ ID NO: 1802764 - RNA, 19 nt, Homo sapiens
  misc_RNA (1)...(19): siRNA sense strand
caacacagggagcgauuuc

SEQ ID NO: 1802765 - RNA, 19 nt, Homo sapiens
  misc_RNA (1)...(19): siRNA sense strand
uagagaacuuucagugcaa

SEQ ID NO: 1802766 - RNA, 19 nt, Homo sapiens
  misc_RNA (1)...(19): siRNA sense strand
ggaacacccaagacaguga

SEQ ID NO: 1802767 - RNA, 19 nt, Homo sapiens
  misc_RNA (1)...(19): siRNA sense strand
gaacccaucucggcuuuug

SEQ ID NO: 1802768 - RNA, 19 nt, Homo sapiens
  misc_RNA (1)...(19): siRNA sense strand
guaugacuuuaucgagauu

SEQ ID NO: 1802769 - RNA, 19 nt, Homo sapiens
  misc_RNA (1)...(19): siRNA sense strand
ggggagaacugcagcuuug

SEQ ID NO: 1802770 - RNA, 19 nt, Homo sapiens
  misc_RNA (1)...(19): siRNA sense strand
caaggacugggaauacauu

SEQ ID NO: 1802771 - RNA, 19 nt, Homo sapiens
  misc_RNA (1)...(19): siRNA sense strand
ugaaaggugucaucaucca

SEQ ID NO: 1802772 - RNA, 19 nt, Homo sapiens
  misc_RNA (1)...(19): siRNA sense strand
ucagguagaucugggaaca

SEQ ID NO: 1802773 - RNA, 19 nt, Homo sapiens
  misc_RNA (1)...(19): siRNA sense strand
aagacaggcucugaagauu

SEQ ID NO: 1802774 - RNA, 19 nt, Homo sapiens
  misc_RNA (1)...(19): siRNA sense strand
ggcaaacacugugggaaca

SEQ ID NO: 1802775 - RNA, 19 nt, Homo sapiens
  misc_RNA (1)...(19): siRNA sense strand
uguggaagccagagcauuu

SEQ ID NO: 1802776 - RNA, 19 nt, Homo sapiens
  misc_RNA (1)...(19): siRNA sense strand
uuccaaagaugcuggcuau

SEQ ID NO: 1802777 - RNA, 19 nt, Homo sapiens
  misc_RNA (1)...(19): siRNA sense strand
caacgggaccaucgaaucu

SEQ ID NO: 1802778 - RNA, 19 nt, Homo sapiens
  misc_RNA (1)...(19): siRNA sense strand
aacuuggacugcaccuuua

SEQ ID NO: 1802779 - RNA, 19 nt, Homo sapiens
  misc_RNA (1)...(19): siRNA sense strand
gauugccauugaugacauu

SEQ ID NO: 1802780 - RNA, 19 nt, Homo sapiens
  misc_RNA (1)...(19): siRNA sense strand
gaagaggaggccacagagu

SEQ ID NO: 1802781 - RNA, 19 nt, Homo sapiens
  misc_RNA (1)...(19): siRNA sense strand
ggcaaggacugggaauaca

SEQ ID NO: 1802782 - RNA, 19 nt, Homo sapiens
  misc_RNA (1)...(19): siRNA sense strand
aggaguggcuucagguaga

SEQ ID NO: 1802783 - RNA, 19 nt, Homo sapiens
  misc_RNA (1)...(19): siRNA sense strand
ccaacaacgaugcaacuga

SEQ ID NO: 1802784 - RNA, 19 nt, Homo sapiens
  misc_RNA (1)...(19): siRNA sense strand
gagaggacuggauggugua

SEQ ID NO: 1802785 - RNA, 19 nt, Homo sapiens
  misc_RNA (1)...(19): siRNA sense strand
ggaagucagcacuaaugga

SEQ ID NO: 1802786 - RNA, 19 nt, Homo sapiens
  misc_RNA (1)...(19): siRNA sense strand
gcuccauggugaugacaau

SEQ ID NO: 1802787 - RNA, 19 nt, Homo sapiens
  misc_RNA (1)...(19): siRNA sense strand
agaagauuguccucaacuu

SEQ ID NO: 1802788 - RNA, 19 nt, Homo sapiens
  misc_RNA (1)...(19): siRNA sense strand
caaaacacccucugaacuu

SEQ ID NO: 1802789 - RNA, 19 nt, Homo sapiens
  misc_RNA (1)...(19): siRNA sense strand
aagcacgacugcaaguaug

SEQ ID NO: 1802790 - RNA, 19 nt, Homo sapiens
  misc_RNA (1)...(19): siRNA sense strand
gcuacgacauggaguacca

SEQ ID NO: 1802791 - RNA, 19 nt, Homo sapiens
  misc_RNA (1)...(19): siRNA sense strand
ucacggccaucgcaacaca

SEQ ID NO: 1802792 - RNA, 19 nt, Homo sapiens
  misc_RNA (1)...(19): siRNA sense strand
ccucaucuaccuacucuga

SEQ ID NO: 1802793 - RNA, 19 nt, Homo sapiens
  misc_RNA (1)...(19): siRNA sense strand
ugagaaguauccacacaac

SEQ ID NO: 1802794 - RNA, 19 nt, Homo sapiens
  misc_RNA (1)...(19): siRNA sense strand
caaguucaccuccgacuac

SEQ ID NO: 1802795 - RNA, 19 nt, Homo sapiens
  misc_RNA (1)...(19): siRNA sense strand
gcaaggacugggaauacau

SEQ ID NO: 1802796 - RNA, 19 nt, Homo sapiens
  misc_RNA (1)...(19): siRNA sense strand
gcagagugacagccagaga

SEQ ID NO: 1802797 - RNA, 19 nt, Homo sapiens
  misc_RNA (1)...(19): siRNA sense strand
caaacacugugggaacauc

SEQ ID NO: 1802798 - RNA, 19 nt, Homo sapiens
  misc_RNA (1)...(19): siRNA sense strand
uggaacccaucucggcuuu

SEQ ID NO: 1802799 - RNA, 19 nt, Homo sapiens
  misc_RNA (1)...(19): siRNA sense strand
aaagucuccuacagccuaa

SEQ ID NO: 1802800 - RNA, 19 nt, Homo sapiens
  misc_RNA (1)...(19): siRNA sense strand
ggaguggcuucagguagau

SEQ ID NO: 1802801 - RNA, 19 nt, Homo sapiens
  misc_RNA (1)...(19): siRNA sense strand
gauccucucccugaccuuu

SEQ ID NO: 1802802 - RNA, 19 nt, Homo sapiens
  misc_RNA (1)...(19): siRNA sense strand
gauggcauuccacauguug

SEQ ID NO: 1802803 - RNA, 19 nt, Homo sapiens
  misc_RNA (1)...(19): siRNA sense strand
caauugcaacuucgauuuc

SEQ ID NO: 1802804 - RNA, 19 nt, Homo sapiens
  misc_RNA (1)...(19): siRNA sense strand
cgaugcaacugaggugguu

SEQ ID NO: 1802805 - RNA, 19 nt, Homo sapiens
  misc_RNA (1)...(19): siRNA sense strand
gagucuggccggauugcua

SEQ ID NO: 1802806 - RNA, 19 nt, Homo sapiens
  misc_RNA (1)...(19): siRNA sense strand
gcucugaagauugcucaaa

SEQ ID NO: 1802807 - RNA, 19 nt, Homo sapiens
  misc_RNA (1)...(19): siRNA sense strand
gaagcccggugugcaugga

SEQ ID NO: 1802808 - RNA, 19 nt, Homo sapiens
  misc_RNA (1)...(19): siRNA sense strand
gaggucguuugaauuccaa

SEQ ID NO: 1802809 - RNA, 19 nt, Homo sapiens
  misc_RNA (1)...(19): siRNA sense strand
ggacugcaaguacgauugg

SEQ ID NO: 1802810 - RNA, 19 nt, Homo sapiens
  misc_RNA (1)...(19): siRNA sense strand
agacaggcucugaagauug

SEQ ID NO: 1802811 - RNA, 19 nt, Homo sapiens
  misc_RNA (1)...(19): siRNA sense strand
ggacguuccggagagauug

SEQ ID NO: 1802812 - RNA, 19 nt, Homo sapiens
  misc_RNA (1)...(19): siRNA sense strand
gugcgcaaguucaaagucu

SEQ ID NO: 1802813 - RNA, 19 nt, Homo sapiens
  misc_RNA (1)...(19): siRNA sense strand
ccagaagauuguccucaac

SEQ ID NO: 1802814 - RNA, 19 nt, Homo sapiens
  misc_RNA (1)...(19): siRNA sense strand
gcaacacagggagcgauuu

SEQ ID NO: 1802815 - RNA, 19 nt, Homo sapiens
  misc_RNA (1)...(19): siRNA sense strand
gagaagcacgacugcaagu

SEQ ID NO: 1802816 - RNA, 19 nt, Homo sapiens
  misc_RNA (1)...(19): siRNA sense strand
ugcaguuccugaucuuuga

SEQ ID NO: 1802817 - RNA, 19 nt, Homo sapiens
  misc_RNA (1)...(19): siRNA sense strand
ccugagaaguauccacaca

SEQ ID NO: 1802818 - RNA, 19 nt, Homo sapiens
  misc_RNA (1)...(19): siRNA sense strand
ccgaagaggaggccacaga

SEQ ID NO: 1802819 - RNA, 19 nt, Homo sapiens
  misc_RNA (1)...(19): siRNA sense strand
ccagaugacaggaauuucu

SEQ ID NO: 1802820 - RNA, 19 nt, Homo sapiens
  misc_RNA (1)...(19): siRNA sense strand
caacugaggugguucugaa

SEQ ID NO: 1802821 - RNA, 19 nt, Homo sapiens
  misc_RNA (1)...(19): siRNA sense strand
caucgaaucuccuggguuu

SEQ ID NO: 1802822 - RNA, 19 nt, Homo sapiens
  misc_RNA (1)...(19): siRNA sense strand
caaagaugcuggcuauauc

SEQ ID NO: 1802823 - RNA, 19 nt, Homo sapiens
  misc_RNA (1)...(19): siRNA sense strand
caacuucaacccucacuuu

SEQ ID NO: 1802824 - RNA, 19 nt, Homo sapiens
  misc_RNA (1)...(19): siRNA sense strand
ccggagagauugccauuga

SEQ ID NO: 1802825 - RNA, 19 nt, Homo sapiens
  misc_RNA (1)...(19): siRNA sense strand
caacuuggacugcaccuuu

SEQ ID NO: 1802826 - RNA, 19 nt, Homo sapiens
  misc_RNA (1)...(19): siRNA sense strand
gcuacuacgucaaauccua

SEQ ID NO: 1802827 - RNA, 19 nt, Homo sapiens
  misc_RNA (1)...(19): siRNA sense strand
gaacccaaccagaagauug

SEQ ID NO: 1802828 - RNA, 19 nt, Homo sapiens
  misc_RNA (1)...(19): siRNA sense strand
gaagggaacaugcacuaug

SEQ ID NO: 1802829 - RNA, 19 nt, Homo sapiens
  misc_RNA (1)...(19): siRNA sense strand
gggauucaauugcaacuuc

SEQ ID NO: 1802830 - RNA, 19 nt, Homo sapiens
  misc_RNA (1)...(19): siRNA sense strand
gaccggacguuuccagaug

SEQ ID NO: 1802831 - RNA, 19 nt, Homo sapiens
  misc_RNA (1)...(19): siRNA sense strand
gugcggaggucguuugaau

SEQ ID NO: 1802832 - RNA, 19 nt, Homo sapiens
  misc_RNA (1)...(19): siRNA sense strand
gaagcacgacugcaaguau

SEQ ID NO: 1802833 - RNA, 19 nt, Homo sapiens
  misc_RNA (1)...(19): siRNA sense strand
ccaaagaugcuggcuauau

SEQ ID NO: 1802834 - RNA, 19 nt, Homo sapiens
  misc_RNA (1)...(19): siRNA sense strand
gaauggcuacuacgucaaa

SEQ ID NO: 1802835 - RNA, 19 nt, Homo sapiens
  misc_RNA (1)...(19): siRNA sense strand
cgacauggaguaccagauu

SEQ ID NO: 1802836 - RNA, 19 nt, Homo sapiens
  misc_RNA (1)...(19): siRNA sense strand
aagggaacaugcacuauga

SEQ ID NO: 1802837 - RNA, 19 nt, Homo sapiens
  misc_RNA (1)...(19): siRNA sense strand
uuucuuagcccucuacuuu

SEQ ID NO: 1802838 - RNA, 19 nt, Homo sapiens
  misc_RNA (1)...(19): siRNA sense strand
gaacugcagcuuugaggau

SEQ ID NO: 1802839 - RNA, 19 nt, Homo sapiens
  misc_RNA (1)...(19): siRNA sense strand
caagacaggcucugaagau

SEQ ID NO: 1802840 - RNA, 19 nt, Homo sapiens
  misc_RNA (1)...(19): siRNA sense strand
gagcauuugugcgcaaguu

SEQ ID NO: 1802841 - RNA, 19 nt, Homo sapiens
  misc_RNA (1)...(19): siRNA sense strand
gacauggaguaccagauug

SEQ ID NO: 1802842 - RNA, 19 nt, Homo sapiens
  misc_RNA (1)...(19): siRNA sense strand
gggauggcauuccacaugu

SEQ ID NO: 1802843 - RNA, 19 nt, Homo sapiens
  misc_RNA (1)...(19): siRNA sense strand
gaacugcgaguggauuguu

SEQ ID NO: 1802844 - RNA, 19 nt, Homo sapiens
  misc_RNA (1)...(19): siRNA sense strand
gaacuuucagugcaauguu

SEQ ID NO: 1802845 - RNA, 19 nt, Homo sapiens
  misc_RNA (1)...(19): siRNA sense strand
ggagagauugccauugaug

SEQ ID NO: 1802846 - RNA, 19 nt, Homo sapiens
  misc_RNA (1)...(19): siRNA sense strand
ccagagagagggccaguau

SEQ ID NO: 1802847 - RNA, 19 nt, Homo sapiens
  misc_RNA (1)...(19): siRNA sense strand
gcuccaugcucuacaucaa

SEQ ID NO: 1802848 - RNA, 19 nt, Homo sapiens
  misc_RNA (1)...(19): siRNA sense strand
ggauggcauuccacauguu

SEQ ID NO: 1802849 - RNA, 19 nt, Homo sapiens
  misc_RNA (1)...(19): siRNA sense strand
gaggagcccugugguugga

SEQ ID NO: 1802850 - RNA, 19 nt, Homo sapiens
  misc_RNA (1)...(19): siRNA sense strand
ucaauugcaacuucgauuu

SEQ ID NO: 1802851 - RNA, 19 nt, Homo sapiens
  misc_RNA (1)...(19): siRNA sense strand
gaacacccaagacagugaa

SEQ ID NO: 1802852 - RNA, 19 nt, Homo sapiens
  misc_RNA (1)...(19): siRNA sense strand
cauggagucuggccggauu

SEQ ID NO: 1802853 - RNA, 19 nt, Homo sapiens
  misc_RNA (1)...(19): siRNA sense strand
caaguacugugggaccaaa

SEQ ID NO: 1802854 - RNA, 19 nt, Homo sapiens
  misc_RNA (1)...(19): siRNA sense strand
gacaggcucugaagauugc

SEQ ID NO: 1802855 - RNA, 19 nt, Homo sapiens
  misc_RNA (1)...(19): siRNA sense strand
guuagaauccgcccucaga

SEQ ID NO: 1802856 - RNA, 19 nt, Homo sapiens
  misc_RNA (1)...(19): siRNA sense strand
aaacacagaauggcuacua

SEQ ID NO: 1802857 - RNA, 19 nt, Homo sapiens
  misc_RNA (1)...(19): siRNA sense strand
gaacagaucagugccucau

SEQ ID NO: 1802858 - RNA, 19 nt, Homo sapiens
  misc_RNA (1)...(19): siRNA sense strand
ucuuugaccuggagcauga

SEQ ID NO: 1802859 - RNA, 19 nt, Homo sapiens
  misc_RNA (1)...(19): siRNA sense strand
ggaggucguuugaauucca

SEQ ID NO: 1802860 - RNA, 19 nt, Homo sapiens
  misc_RNA (1)...(19): siRNA sense strand
gagagauugccauugauga

SEQ ID NO: 1802861 - RNA, 19 nt, Homo sapiens
  misc_RNA (1)...(19): siRNA sense strand
gcggaggucguuugaauuc

SEQ ID NO: 1802862 - RNA, 19 nt, Homo sapiens
  misc_RNA (1)...(19): siRNA sense strand
agugaaaggugucaucauc

SEQ ID NO: 1802863 - RNA, 19 nt, Homo sapiens
  misc_RNA (1)...(19): siRNA sense strand
gaugcucccugcuccaaca

SEQ ID NO: 1802864 - RNA, 19 nt, Homo sapiens
  misc_RNA (1)...(19): siRNA sense strand
caacacagggagcgauuuc

SEQ ID NO: 1802865 - RNA, 19 nt, Homo sapiens
  misc_RNA (1)...(19): siRNA sense strand
uagagaacuuucagugcaa

SEQ ID NO: 1802866 - RNA, 19 nt, Homo sapiens
  misc_RNA (1)...(19): siRNA sense strand
ggaacacccaagacaguga

SEQ ID NO: 1802867 - RNA, 19 nt, Homo sapiens
  misc_RNA (1)...(19): siRNA sense strand
gaacccaucucggcuuuug

SEQ ID NO: 1802868 - RNA, 19 nt, Homo sapiens
  misc_RNA (1)...(19): siRNA sense strand
guaugacuuuaucgagauu

SEQ ID NO: 1802869 - RNA, 19 nt, Homo sapiens
  misc_RNA (1)...(19): siRNA sense strand
ggggagaacugcagcuuug

SEQ ID NO: 1802870 - RNA, 19 nt, Homo sapiens
  misc_RNA (1)...(19): siRNA sense strand
caaggacugggaauacauu

SEQ ID NO: 1802871 - RNA, 19 nt, Homo sapiens
  misc_RNA (1)...(19): siRNA sense strand
ugaaaggugucaucaucca

SEQ ID NO: 1802872 - RNA, 19 nt, Homo sapiens
  misc_RNA (1)...(19): siRNA sense strand
ucagguagaucugggaaca

SEQ ID NO: 1802873 - RNA, 19 nt, Homo sapiens
  misc_RNA (1)...(19): siRNA sense strand
aagacaggcucugaagauu

SEQ ID NO: 1802874 - RNA, 19 nt, Homo sapiens
  misc_RNA (1)...(19): siRNA sense strand
ggcaaacacugugggaaca

SEQ ID NO: 1802875 - RNA, 19 nt, Homo sapiens
  misc_RNA (1)...(19): siRNA sense strand
uguggaagccagagcauuu

SEQ ID NO: 1802876 - RNA, 19 nt, Homo sapiens
  misc_RNA (1)...(19): siRNA sense strand
uuccaaagaugcuggcuau

SEQ ID NO: 1802877 - RNA, 19 nt, Homo sapiens
  misc_RNA (1)...(19): siRNA sense strand
caacgggaccaucgaaucu

SEQ ID NO: 1802878 - RNA, 19 nt, Homo sapiens
  misc_RNA (1)...(19): siRNA sense strand
aacuuggacugcaccuuua

SEQ ID NO: 1802879 - RNA, 19 nt, Homo sapiens
  misc_RNA (1)...(19): siRNA sense strand
gauugccauugaugacauu

SEQ ID NO: 1802880 - RNA, 19 nt, Homo sapiens
  misc_RNA (1)...(19): siRNA sense strand
gaagaggaggccacagagu

SEQ ID NO: 1802881 - RNA, 19 nt, Homo sapiens
  misc_RNA (1)...(19): siRNA sense strand
ggcaaggacugggaauaca

SEQ ID NO: 1802882 - RNA, 19 nt, Homo sapiens
  misc_RNA (1)...(19): siRNA sense strand
aggaguggcuucagguaga

SEQ ID NO: 1802883 - RNA, 19 nt, Homo sapiens
  misc_RNA (1)...(19): siRNA sense strand
ccaacaacgaugcaacuga

SEQ ID NO: 1802884 - RNA, 19 nt, Homo sapiens
  misc_RNA (1)...(19): siRNA sense strand
gagaggacuggauggugua

SEQ ID NO: 1802885 - RNA, 19 nt, Homo sapiens
  misc_RNA (1)...(19): siRNA sense strand
ggaagucagcacuaaugga

SEQ ID NO: 1802886 - RNA, 19 nt, Homo sapiens
  misc_RNA (1)...(19): siRNA sense strand
gcuccauggugaugacaau

SEQ ID NO: 1802887 - RNA, 19 nt, Homo sapiens
  misc_RNA (1)...(19): siRNA sense strand
agaagauuguccucaacuu

SEQ ID NO: 1802888 - RNA, 19 nt, Homo sapiens
  misc_RNA (1)...(19): siRNA sense strand
caaaacacccucugaacuu

SEQ ID NO: 1802889 - RNA, 19 nt, Homo sapiens
  misc_RNA (1)...(19): siRNA sense strand
aagcacgacugcaaguaug

SEQ ID NO: 1802890 - RNA, 19 nt, Homo sapiens
  misc_RNA (1)...(19): siRNA sense strand
gcuacgacauggaguacca

SEQ ID NO: 1802891 - RNA, 19 nt, Homo sapiens
  misc_RNA (1)...(19): siRNA sense strand
ucacggccaucgcaacaca

SEQ ID NO: 1802892 - RNA, 19 nt, Homo sapiens
  misc_RNA (1)...(19): siRNA sense strand
ccucaucuaccuacucuga

SEQ ID NO: 1802893 - RNA, 19 nt, Homo sapiens
  misc_RNA (1)...(19): siRNA sense strand
ugagaaguauccacacaac

SEQ ID NO: 1802894 - RNA, 19 nt, Homo sapiens
  misc_RNA (1)...(19): siRNA sense strand
caaguucaccuccgacuac

SEQ ID NO: 1802895 - RNA, 19 nt, Homo sapiens
  misc_RNA (1)...(19): siRNA sense strand
gcaaggacugggaauacau

SEQ ID NO: 1802896 - RNA, 19 nt, Homo sapiens
  misc_RNA (1)...(19): siRNA sense strand
gcagagugacagccagaga

SEQ ID NO: 1802897 - RNA, 19 nt, Homo sapiens
  misc_RNA (1)...(19): siRNA sense strand
caaacacugugggaacauc

SEQ ID NO: 1802898 - RNA, 19 nt, Homo sapiens
  misc_RNA (1)...(19): siRNA sense strand
uggaacccaucucggcuuu

SEQ ID NO: 1802899 - RNA, 19 nt, Homo sapiens
  misc_RNA (1)...(19): siRNA sense strand
aaagucuccuacagccuaa

SEQ ID NO: 1802900 - RNA, 19 nt, Homo sapiens
  misc_RNA (1)...(19): siRNA sense strand
ggaguggcuucagguagau

SEQ ID NO: 1802901 - RNA, 19 nt, Homo sapiens
  misc_RNA (1)...(19): siRNA sense strand
gauccucucccugaccuuu

SEQ ID NO: 1802902 - RNA, 19 nt, Homo sapiens
  misc_RNA (1)...(19): siRNA sense strand
gauggcauuccacauguug

SEQ ID NO: 1802903 - RNA, 19 nt, Homo sapiens
  misc_RNA (1)...(19): siRNA sense strand
caauugcaacuucgauuuc

SEQ ID NO: 1802904 - RNA, 19 nt, Homo sapiens
  misc_RNA (1)...(19): siRNA sense strand
cgaugcaacugaggugguu

SEQ ID NO: 1802905 - RNA, 19 nt, Homo sapiens
  misc_RNA (1)...(19): siRNA sense strand
gagucuggccggauugcua

SEQ ID NO: 1802906 - RNA, 19 nt, Homo sapiens
  misc_RNA (1)...(19): siRNA sense strand
gcucugaagauugcucaaa

SEQ ID NO: 1802907 - RNA, 19 nt, Homo sapiens
  misc_RNA (1)...(19): siRNA sense strand
gaagcccggugugcaugga

SEQ ID NO: 1802908 - RNA, 19 nt, Homo sapiens
  misc_RNA (1)...(19): siRNA sense strand
gaggucguuugaauuccaa

SEQ ID NO: 1802909 - RNA, 19 nt, Homo sapiens
  misc_RNA (1)...(19): siRNA sense strand
ggacugcaaguacgauugg

SEQ ID NO: 1802910 - RNA, 19 nt, Homo sapiens
  misc_RNA (1)...(19): siRNA sense strand
agacaggcucugaagauug

SEQ ID NO: 1802911 - RNA, 19 nt, Homo sapiens
  misc_RNA (1)...(19): siRNA sense strand
ggacguuccggagagauug

SEQ ID NO: 1802912 - RNA, 19 nt, Homo sapiens
  misc_RNA (1)...(19): siRNA sense strand
gugcgcaaguucaaagucu

SEQ ID NO: 1802913 - RNA, 19 nt, Homo sapiens
  misc_RNA (1)...(19): siRNA sense strand
ccagaagauuguccucaac

SEQ ID NO: 1802914 - RNA, 19 nt, Homo sapiens
  misc_RNA (1)...(19): siRNA sense strand
gcaacacagggagcgauuu

SEQ ID NO: 1802915 - RNA, 19 nt, Homo sapiens
  misc_RNA (1)...(19): siRNA sense strand
gagaagcacgacugcaagu

SEQ ID NO: 1802916 - RNA, 19 nt, Homo sapiens
  misc_RNA (1)...(19): siRNA sense strand
ugcaguuccugaucuuuga

SEQ ID NO: 1802917 - RNA, 19 nt, Homo sapiens
  misc_RNA (1)...(19): siRNA sense strand
ccugagaaguauccacaca

SEQ ID NO: 1802918 - RNA, 19 nt, Homo sapiens
  misc_RNA (1)...(19): siRNA sense strand
ccgaagaggaggccacaga

SEQ ID NO: 1802919 - RNA, 19 nt, Homo sapiens
  misc_RNA (1)...(19): siRNA sense strand
ccagaugacaggaauuucu

SEQ ID NO: 1802920 - RNA, 19 nt, Homo sapiens
  misc_RNA (1)...(19): siRNA sense strand
ccaaagaugucagagauua

SEQ ID NO: 1802921 - RNA, 19 nt, Homo sapiens
  misc_RNA (1)...(19): siRNA sense strand
caagagagguccugaaugu

SEQ ID NO: 1802922 - RNA, 19 nt, Homo sapiens
  misc_RNA (1)...(19): siRNA sense strand
ggacagagacugcaaguau

SEQ ID NO: 1802923 - RNA, 19 nt, Homo sapiens
  misc_RNA (1)...(19): siRNA sense strand
aaucagaguuuccaacaua

SEQ ID NO: 1802924 - RNA, 19 nt, Homo sapiens
  misc_RNA (1)...(19): siRNA sense strand
ggaaaguucuguggaaaga

SEQ ID NO: 1802925 - RNA, 19 nt, Homo sapiens
  misc_RNA (1)...(19): siRNA sense strand
gcacuuauauugucuuugc

SEQ ID NO: 1802926 - RNA, 19 nt, Homo sapiens
  misc_RNA (1)...(19): siRNA sense strand
ggagaacuauaacuuugaa

SEQ ID NO: 1802927 - RNA, 19 nt, Homo sapiens
  misc_RNA (1)...(19): siRNA sense strand
aaaguucuguggaaagaua

SEQ ID NO: 1802928 - RNA, 19 nt, Homo sapiens
  misc_RNA (1)...(19): siRNA sense strand
gcagagcagugucucagaa

SEQ ID NO: 1802929 - RNA, 19 nt, Homo sapiens
  misc_RNA (1)...(19): siRNA sense strand
guugcaagauaacagauua

SEQ ID NO: 1802930 - RNA, 19 nt, Homo sapiens
  misc_RNA (1)...(19): siRNA sense strand
gaaggaagggcgugucuug

SEQ ID NO: 1802931 - RNA, 19 nt, Homo sapiens
  misc_RNA (1)...(19): siRNA sense strand
guggaugacauuaguauua

SEQ ID NO: 1802932 - RNA, 19 nt, Homo sapiens
  misc_RNA (1)...(19): siRNA sense strand
gguauggugucuggacuua

SEQ ID NO: 1802933 - RNA, 19 nt, Homo sapiens
  misc_RNA (1)...(19): siRNA sense strand
ggucauagacagcaccaua

SEQ ID NO: 1802934 - RNA, 19 nt, Homo sapiens
  misc_RNA (1)...(19): siRNA sense strand
gagauuauccuggaauuug

SEQ ID NO: 1802935 - RNA, 19 nt, Homo sapiens
  misc_RNA (1)...(19): siRNA sense strand
ggcauucucuccaugguuu

SEQ ID NO: 1802936 - RNA, 19 nt, Homo sapiens
  misc_RNA (1)...(19): siRNA sense strand
guauacgguugcaagauaa

SEQ ID NO: 1802937 - RNA, 19 nt, Homo sapiens
  misc_RNA (1)...(19): siRNA sense strand
caccugagcugcggacuuu

SEQ ID NO: 1802938 - RNA, 19 nt, Homo sapiens
  misc_RNA (1)...(19): siRNA sense strand
ucaaauuugucucugacua

SEQ ID NO: 1802939 - RNA, 19 nt, Homo sapiens
  misc_RNA (1)...(19): siRNA sense strand
gaacuugguggaugaaugu

SEQ ID NO: 1802940 - RNA, 19 nt, Homo sapiens
  misc_RNA (1)...(19): siRNA sense strand
ggaacuugguggaugaaug

SEQ ID NO: 1802941 - RNA, 19 nt, Homo sapiens
  misc_RNA (1)...(19): siRNA sense strand
gaaacuggaugccugaaaa

SEQ ID NO: 1802942 - RNA, 19 nt, Homo sapiens
  misc_RNA (1)...(19): siRNA sense strand
aguauacgguugcaagaua

SEQ ID NO: 1802943 - RNA, 19 nt, Homo sapiens
  misc_RNA (1)...(19): siRNA sense strand
acaagaacaucuccaggaa

SEQ ID NO: 1802944 - RNA, 19 nt, Homo sapiens
  misc_RNA (1)...(19): siRNA sense strand
gaaaacauccgccugguaa

SEQ ID NO: 1802945 - RNA, 19 nt, Homo sapiens
  misc_RNA (1)...(19): siRNA sense strand
caccaaagaugucagagau

SEQ ID NO: 1802946 - RNA, 19 nt, Homo sapiens
  misc_RNA (1)...(19): siRNA sense strand
ugucuggacuuauuucuga

SEQ ID NO: 1802947 - RNA, 19 nt, Homo sapiens
  misc_RNA (1)...(19): siRNA sense strand
gacagagacugcaaguaug

SEQ ID NO: 1802948 - RNA, 19 nt, Homo sapiens
  misc_RNA (1)...(19): siRNA sense strand
gcaauguguugaagaccuu

SEQ ID NO: 1802949 - RNA, 19 nt, Homo sapiens
  misc_RNA (1)...(19): siRNA sense strand
auacgaaggugaaggagaa

SEQ ID NO: 1802950 - RNA, 19 nt, Homo sapiens
  misc_RNA (1)...(19): siRNA sense strand
gaagacuggaucaccauaa

SEQ ID NO: 1802951 - RNA, 19 nt, Homo sapiens
  misc_RNA (1)...(19): siRNA sense strand
ugaaugcacuuauauuguc

SEQ ID NO: 1802952 - RNA, 19 nt, Homo sapiens
  misc_RNA (1)...(19): siRNA sense strand
gagaguggauacagguaga

SEQ ID NO: 1802953 - RNA, 19 nt, Homo sapiens
  misc_RNA (1)...(19): siRNA sense strand
uaaccacauuucacaagaa

SEQ ID NO: 1802954 - RNA, 19 nt, Homo sapiens
  misc_RNA (1)...(19): siRNA sense strand
uaaauguggcgauacuaua

SEQ ID NO: 1802955 - RNA, 19 nt, Homo sapiens
  misc_RNA (1)...(19): siRNA sense strand
uauggugucuggacuuauu

SEQ ID NO: 1802956 - RNA, 19 nt, Homo sapiens
  misc_RNA (1)...(19): siRNA sense strand
caacaacaacuaugauaca

SEQ ID NO: 1802957 - RNA, 19 nt, Homo sapiens
  misc_RNA (1)...(19): siRNA sense strand
cacaggagauggcaacuuc

SEQ ID NO: 1802958 - RNA, 19 nt, Homo sapiens
  misc_RNA (1)...(19): siRNA sense strand
cugguuauccucauucuua

SEQ ID NO: 1802959 - RNA, 19 nt, Homo sapiens
  misc_RNA (1)...(19): siRNA sense strand
ugaauacacagaguacuua

SEQ ID NO: 1802960 - RNA, 19 nt, Homo sapiens
  misc_RNA (1)...(19): siRNA sense strand
gcaccucauuccuacauca

SEQ ID NO: 1802961 - RNA, 19 nt, Homo sapiens
  misc_RNA (1)...(19): siRNA sense strand
gcucuggaauguuggguau

SEQ ID NO: 1802962 - RNA, 19 nt, Homo sapiens
  misc_RNA (1)...(19): siRNA sense strand
cauggaaucaggagaaauu

SEQ ID NO: 1802963 - RNA, 19 nt, Homo sapiens
  misc_RNA (1)...(19): siRNA sense strand
ugucugcccuggagaacua

SEQ ID NO: 1802964 - RNA, 19 nt, Homo sapiens
  misc_RNA (1)...(19): siRNA sense strand
ggugagcccugugguuuau

SEQ ID NO: 1802965 - RNA, 19 nt, Homo sapiens
  misc_RNA (1)...(19): siRNA sense strand
gaucacaucauccaaccaa

SEQ ID NO: 1802966 - RNA, 19 nt, Homo sapiens
  misc_RNA (1)...(19): siRNA sense strand
ugucaagacuuacaagauc

SEQ ID NO: 1802967 - RNA, 19 nt, Homo sapiens
  misc_RNA (1)...(19): siRNA sense strand
caaaagaaaccaagaagaa

SEQ ID NO: 1802968 - RNA, 19 nt, Homo sapiens
  misc_RNA (1)...(19): siRNA sense strand
uggaacaggugaugacuuc

SEQ ID NO: 1802969 - RNA, 19 nt, Homo sapiens
  misc_RNA (1)...(19): siRNA sense strand
cauaaugggaugucagaaa

SEQ ID NO: 1802970 - RNA, 19 nt, Homo sapiens
  misc_RNA (1)...(19): siRNA sense strand
gguguuggcccucacauug

SEQ ID NO: 1802971 - RNA, 19 nt, Homo sapiens
  misc_RNA (1)...(19): siRNA sense strand
ggcaacaacaacuaugaua

SEQ ID NO: 1802972 - RNA, 19 nt, Homo sapiens
  misc_RNA (1)...(19): siRNA sense strand
gaaguauacgguugcaaga

SEQ ID NO: 1802973 - RNA, 19 nt, Homo sapiens
  misc_RNA (1)...(19): siRNA sense strand
ccacugauaacucgauuug

SEQ ID NO: 1802974 - RNA, 19 nt, Homo sapiens
  misc_RNA (1)...(19): siRNA sense strand
cagagauuauccuggaauu

SEQ ID NO: 1802975 - RNA, 19 nt, Homo sapiens
  misc_RNA (1)...(19): siRNA sense strand
gauuauccuugcucuggaa

SEQ ID NO: 1802976 - RNA, 19 nt, Homo sapiens
  misc_RNA (1)...(19): siRNA sense strand
cuagaaaucugggauggau

SEQ ID NO: 1802977 - RNA, 19 nt, Homo sapiens
  misc_RNA (1)...(19): siRNA sense strand
aagacaaacugaauacaca

SEQ ID NO: 1802978 - RNA, 19 nt, Homo sapiens
  misc_RNA (1)...(19): siRNA sense strand
gaagccaggcaauguguug

SEQ ID NO: 1802979 - RNA, 19 nt, Homo sapiens
  misc_RNA (1)...(19): siRNA sense strand
caccauacaaucagaguuu

SEQ ID NO: 1802980 - RNA, 19 nt, Homo sapiens
  misc_RNA (1)...(19): siRNA sense strand
caaugaguggcuccaaaua

SEQ ID NO: 1802981 - RNA, 19 nt, Homo sapiens
  misc_RNA (1)...(19): siRNA sense strand
caacuucaacccucacuuc

SEQ ID NO: 1802982 - RNA, 19 nt, Homo sapiens
  misc_RNA (1)...(19): siRNA sense strand
acaaaccuguucucuuuca

SEQ ID NO: 1802983 - RNA, 19 nt, Homo sapiens
  misc_RNA (1)...(19): siRNA sense strand
ggaagacuggaucaccaua

SEQ ID NO: 1802984 - RNA, 19 nt, Homo sapiens
  misc_RNA (1)...(19): siRNA sense strand
aaauguggcgauacuauaa

SEQ ID NO: 1802985 - RNA, 19 nt, Homo sapiens
  misc_RNA (1)...(19): siRNA sense strand
gcaccaaagaugucagaga

SEQ ID NO: 1802986 - RNA, 19 nt, Homo sapiens
  misc_RNA (1)...(19): siRNA sense strand
aaacugaauacacagagua

SEQ ID NO: 1802987 - RNA, 19 nt, Homo sapiens
  misc_RNA (1)...(19): siRNA sense strand
cuggagaacuauaacuuug

SEQ ID NO: 1802988 - RNA, 19 nt, Homo sapiens
  misc_RNA (1)...(19): siRNA sense strand
gacccauaccagagaauua

SEQ ID NO: 1802989 - RNA, 19 nt, Homo sapiens
  misc_RNA (1)...(19): siRNA sense strand
aagacuggaucaccauaaa

SEQ ID NO: 1802990 - RNA, 19 nt, Homo sapiens
  misc_RNA (1)...(19): siRNA sense strand
ccuggaauuugaaagcuuu

SEQ ID NO: 1802991 - RNA, 19 nt, Homo sapiens
  misc_RNA (1)...(19): siRNA sense strand
ggaagcaccgagagaacaa

SEQ ID NO: 1802992 - RNA, 19 nt, Homo sapiens
  misc_RNA (1)...(19): siRNA sense strand
ggaguguguugaccagcaa

SEQ ID NO: 1802993 - RNA, 19 nt, Homo sapiens
  misc_RNA (1)...(19): siRNA sense strand
uaccuuacaucuccugguu

SEQ ID NO: 1802994 - RNA, 19 nt, Homo sapiens
  misc_RNA (1)...(19): siRNA sense strand
agacagcaccauacaauca

SEQ ID NO: 1802995 - RNA, 19 nt, Homo sapiens
  misc_RNA (1)...(19): siRNA sense strand
agauuauccuggaauuuga

SEQ ID NO: 1802996 - RNA, 19 nt, Homo sapiens
  misc_RNA (1)...(19): siRNA sense strand
caaacugaauacacagagu

SEQ ID NO: 1802997 - RNA, 19 nt, Homo sapiens
  misc_RNA (1)...(19): siRNA sense strand
cagcucaaguggagugugu

SEQ ID NO: 1802998 - RNA, 19 nt, Homo sapiens
  misc_RNA (1)...(19): siRNA sense strand
gcugggcugugaaguggaa

SEQ ID NO: 1802999 - RNA, 19 nt, Homo sapiens
  misc_RNA (1)...(19): siRNA sense strand
gggaaacuggcauaucuau

SEQ ID NO: 1803000 - RNA, 19 nt, Homo sapiens
  misc_RNA (1)...(19): siRNA sense strand
ucacagcuucuucccagua

SEQ ID NO: 1803001 - RNA, 19 nt, Homo sapiens
  misc_RNA (1)...(19): siRNA sense strand
gggcauggaaucaggagaa

SEQ ID NO: 1803002 - RNA, 19 nt, Homo sapiens
  misc_RNA (1)...(19): siRNA sense strand
gaaugcacuuauauugucu

SEQ ID NO: 1803003 - RNA, 19 nt, Homo sapiens
  misc_RNA (1)...(19): siRNA sense strand
cgauaaauguggcgauacu

SEQ ID NO: 1803004 - RNA, 19 nt, Homo sapiens
  misc_RNA (1)...(19): siRNA sense strand
gcaacaacaacuaugauac

SEQ ID NO: 1803005 - RNA, 19 nt, Homo sapiens
  misc_RNA (1)...(19): siRNA sense strand
uauauugucuuugcaccaa

SEQ ID NO: 1803006 - RNA, 19 nt, Homo sapiens
  misc_RNA (1)...(19): siRNA sense strand
ugaacuacccugagaaugg

SEQ ID NO: 1803007 - RNA, 19 nt, Homo sapiens
  misc_RNA (1)...(19): siRNA sense strand
caaguaugacuacguggaa

SEQ ID NO: 1803008 - RNA, 19 nt, Homo sapiens
  misc_RNA (1)...(19): siRNA sense strand
ccuuacaucuccugguuau

SEQ ID NO: 1803009 - RNA, 19 nt, Homo sapiens
  misc_RNA (1)...(19): siRNA sense strand
acugauaacucgauuuguc

SEQ ID NO: 1803010 - RNA, 19 nt, Homo sapiens
  misc_RNA (1)...(19): siRNA sense strand
agccuugaaugcacuuaua

SEQ ID NO: 1803011 - RNA, 19 nt, Homo sapiens
  misc_RNA (1)...(19): siRNA sense strand
auacacagaguacuuauuc

SEQ ID NO: 1803012 - RNA, 19 nt, Homo sapiens
  misc_RNA (1)...(19): siRNA sense strand
gaauacacagaguacuuau

SEQ ID NO: 1803013 - RNA, 19 nt, Homo sapiens
  misc_RNA (1)...(19): siRNA sense strand
gaugucagaaagaaacuug

SEQ ID NO: 1803014 - RNA, 19 nt, Homo sapiens
  misc_RNA (1)...(19): siRNA sense strand
auaaugggaugucagaaag

SEQ ID NO: 1803015 - RNA, 19 nt, Homo sapiens
  misc_RNA (1)...(19): siRNA sense strand
gagcacgccaggauacgaa

SEQ ID NO: 1803016 - RNA, 19 nt, Homo sapiens
  misc_RNA (1)...(19): siRNA sense strand
ccacauuucacaagaagau

SEQ ID NO: 1803017 - RNA, 19 nt, Homo sapiens
  misc_RNA (1)...(19): siRNA sense strand
gaacaggugaugacuucca

SEQ ID NO: 1803018 - RNA, 19 nt, Homo sapiens
  misc_RNA (1)...(19): siRNA sense strand
augaguggcuccaaauaga

SEQ ID NO: 1803019 - RNA, 19 nt, Homo sapiens
  misc_RNA (1)...(19): siRNA sense strand
cuucaacccucacuucgau

SEQ ID NO: 1803020 - RNA, 19 nt, Homo sapiens
  misc_RNA (1)...(19): siRNA sense strand
ggaaggagcugaguaaucu

SEQ ID NO: 1803021 - RNA, 19 nt, Homo sapiens
  misc_RNA (1)...(19): siRNA sense strand
caagacaguucgcaaagaa

SEQ ID NO: 1803022 - RNA, 19 nt, Homo sapiens
  misc_RNA (1)...(19): siRNA sense strand
gcaaagcccucaucaccau

SEQ ID NO: 1803023 - RNA, 19 nt, Homo sapiens
  misc_RNA (1)...(19): siRNA sense strand
gaauggaucuuugguguag

SEQ ID NO: 1803024 - RNA, 19 nt, Homo sapiens
  misc_RNA (1)...(19): siRNA sense strand
gcaggaaggagcugaguaa

SEQ ID NO: 1803025 - RNA, 19 nt, Homo sapiens
  misc_RNA (1)...(19): siRNA sense strand
ggucauccguggaguuuga

SEQ ID NO: 1803026 - RNA, 19 nt, Homo sapiens
  misc_RNA (1)...(19): siRNA sense strand
ccacauggcuguccuuugc

SEQ ID NO: 1803027 - RNA, 19 nt, Homo sapiens
  misc_RNA (1)...(19): siRNA sense strand
gaucuggugugcccucuuc

SEQ ID NO: 1803028 - RNA, 19 nt, Homo sapiens
  misc_RNA (1)...(19): siRNA sense strand
ggaauggaucuuuggugua

SEQ ID NO: 1803029 - RNA, 19 nt, Homo sapiens
  misc_RNA (1)...(19): siRNA sense strand
gguauuaucgggaaccauu

SEQ ID NO: 1803030 - RNA, 19 nt, Homo sapiens
  misc_RNA (1)...(19): siRNA sense strand
gcaacaaguucgucuucag

SEQ ID NO: 1803031 - RNA, 19 nt, Homo sapiens
  misc_RNA (1)...(19): siRNA sense strand
uauggacucuggaacaaga

SEQ ID NO: 1803032 - RNA, 19 nt, Homo sapiens
  misc_RNA (1)...(19): siRNA sense strand
uccaggcucuucagcauuu

SEQ ID NO: 1803033 - RNA, 19 nt, Homo sapiens
  misc_RNA (1)...(19): siRNA sense strand
cuacuaugcuguccuguac

SEQ ID NO: 1803034 - RNA, 19 nt, Homo sapiens
  misc_RNA (1)...(19): siRNA sense strand
gguccucggugccuucaug

SEQ ID NO: 1803035 - RNA, 19 nt, Homo sapiens
  misc_RNA (1)...(19): siRNA sense strand
gcaggaggaaugccuuuca

SEQ ID NO: 1803036 - RNA, 19 nt, Homo sapiens
  misc_RNA (1)...(19): siRNA sense strand
acaagacaguucgcaaaga

SEQ ID NO: 1803037 - RNA, 19 nt, Homo sapiens
  misc_RNA (1)...(19): siRNA sense strand
gcuacuaugcuguccugua

SEQ ID NO: 1803038 - RNA, 19 nt, Homo sapiens
  misc_RNA (1)...(19): siRNA sense strand
ggugugcuauggcuucauc

SEQ ID NO: 1803039 - RNA, 19 nt, Homo sapiens
  misc_RNA (1)...(19): siRNA sense strand
gggcugugauggcacuugu

SEQ ID NO: 1803040 - RNA, 19 nt, Homo sapiens
  misc_RNA (1)...(19): siRNA sense strand
cuacugggcaugugcuuug

SEQ ID NO: 1803041 - RNA, 19 nt, Homo sapiens
  misc_RNA (1)...(19): siRNA sense strand
ugauggcacuugucuacau

SEQ ID NO: 1803042 - RNA, 19 nt, Homo sapiens
  misc_RNA (1)...(19): siRNA sense strand
gcaccuccaccuccucuuc

SEQ ID NO: 1803043 - RNA, 19 nt, Homo sapiens
  misc_RNA (1)...(19): siRNA sense strand
gccugacucuguccaacuu

SEQ ID NO: 1803044 - RNA, 19 nt, Homo sapiens
  misc_RNA (1)...(19): siRNA sense strand
ggaaccauuugugcaacga

SEQ ID NO: 1803045 - RNA, 19 nt, Homo sapiens
  misc_RNA (1)...(19): siRNA sense strand
cagaggaccgggaggaaga

SEQ ID NO: 1803046 - RNA, 19 nt, Homo sapiens
  misc_RNA (1)...(19): siRNA sense strand
ucuauggacucuggaacaa

SEQ ID NO: 1803047 - RNA, 19 nt, Homo sapiens
  misc_RNA (1)...(19): siRNA sense strand
guaguguggugcaacuucu

SEQ ID NO: 1803048 - RNA, 19 nt, Homo sapiens
  misc_RNA (1)...(19): siRNA sense strand
ucaucguggucaccuugua

SEQ ID NO: 1803049 - RNA, 19 nt, Homo sapiens
  misc_RNA (1)...(19): siRNA sense strand
cagcaacaaguucgucuuc

SEQ ID NO: 1803050 - RNA, 19 nt, Homo sapiens
  misc_RNA (1)...(19): siRNA sense strand
guucaucgccaucauuguc

SEQ ID NO: 1803051 - RNA, 19 nt, Homo sapiens
  misc_RNA (1)...(19): siRNA sense strand
ucaggcagcaggaggaaug

SEQ ID NO: 1803052 - RNA, 19 nt, Homo sapiens
  misc_RNA (1)...(19): siRNA sense strand
ccguggaguuugacgaguu

SEQ ID NO: 1803053 - RNA, 19 nt, Homo sapiens
  misc_RNA (1)...(19): siRNA sense strand
ccaguucaucgccaucauu

SEQ ID NO: 1803054 - RNA, 19 nt, Homo sapiens
  misc_RNA (1)...(19): siRNA sense strand
cgcagggaauggaucuuug

SEQ ID NO: 1803055 - RNA, 19 nt, Homo sapiens
  misc_RNA (1)...(19): siRNA sense strand
caucaucacccaguucauc

SEQ ID NO: 1803056 - RNA, 19 nt, Homo sapiens
  misc_RNA (1)...(19): siRNA sense strand
ugggaaaccuggucaucgu

SEQ ID NO: 1803057 - RNA, 19 nt, Homo sapiens
  misc_RNA (1)...(19): siRNA sense strand
gcagggaauggaucuuugg

SEQ ID NO: 1803058 - RNA, 19 nt, Homo sapiens
  misc_RNA (1)...(19): siRNA sense strand
acaccucacugcgcucaug

SEQ ID NO: 1803059 - RNA, 19 nt, Homo sapiens
  misc_RNA (1)...(19): siRNA sense strand
ccgcagggaauggaucuuu

SEQ ID NO: 1803060 - RNA, 19 nt, Homo sapiens
  misc_RNA (1)...(19): siRNA sense strand
gguguaguguggugcaacu

SEQ ID NO: 1803061 - RNA, 19 nt, Homo sapiens
  misc_RNA (1)...(19): siRNA sense strand
guauuaucgggaaccauuu

SEQ ID NO: 1803062 - RNA, 19 nt, Homo sapiens
  misc_RNA (1)...(19): siRNA sense strand
cagcaggaggaaugccuuu

SEQ ID NO: 1803063 - RNA, 19 nt, Homo sapiens
  misc_RNA (1)...(19): siRNA sense strand
gugcuauggcuucaucuuc

SEQ ID NO: 1803064 - RNA, 19 nt, Homo sapiens
  misc_RNA (1)...(19): siRNA sense strand
gugcaacgacagaggacuu

SEQ ID NO: 1803065 - RNA, 19 nt, Homo sapiens
  misc_RNA (1)...(19): siRNA sense strand
ggaccgggaggaagaacuc

SEQ ID NO: 1803066 - RNA, 19 nt, Homo sapiens
  misc_RNA (1)...(19): siRNA sense strand
ggaaggagcugaguaaucu

SEQ ID NO: 1803067 - RNA, 19 nt, Homo sapiens
  misc_RNA (1)...(19): siRNA sense strand
caagacaguucgcaaagaa

SEQ ID NO: 1803068 - RNA, 19 nt, Homo sapiens
  misc_RNA (1)...(19): siRNA sense strand
gcaaagcccucaucaccau

SEQ ID NO: 1803069 - RNA, 19 nt, Homo sapiens
  misc_RNA (1)...(19): siRNA sense strand
gaauggaucuuugguguag

SEQ ID NO: 1803070 - RNA, 19 nt, Homo sapiens
  misc_RNA (1)...(19): siRNA sense strand
gcaggaaggagcugaguaa

SEQ ID NO: 1803071 - RNA, 19 nt, Homo sapiens
  misc_RNA (1)...(19): siRNA sense strand
ggucauccguggaguuuga

SEQ ID NO: 1803072 - RNA, 19 nt, Homo sapiens
  misc_RNA (1)...(19): siRNA sense strand
ccacauggcuguccuuugc

SEQ ID NO: 1803073 - RNA, 19 nt, Homo sapiens
  misc_RNA (1)...(19): siRNA sense strand
gaucuggugugcccucuuc

SEQ ID NO: 1803074 - RNA, 19 nt, Homo sapiens
  misc_RNA (1)...(19): siRNA sense strand
ggaauggaucuuuggugua

SEQ ID NO: 1803075 - RNA, 19 nt, Homo sapiens
  misc_RNA (1)...(19): siRNA sense strand
gguauuaucgggaaccauu

SEQ ID NO: 1803076 - RNA, 19 nt, Homo sapiens
  misc_RNA (1)...(19): siRNA sense strand
gcaacaaguucgucuucag

SEQ ID NO: 1803077 - RNA, 19 nt, Homo sapiens
  misc_RNA (1)...(19): siRNA sense strand
uauggacucuggaacaaga

SEQ ID NO: 1803078 - RNA, 19 nt, Homo sapiens
  misc_RNA (1)...(19): siRNA sense strand
uccaggcucuucagcauuu

SEQ ID NO: 1803079 - RNA, 19 nt, Homo sapiens
  misc_RNA (1)...(19): siRNA sense strand
cuacuaugcuguccuguac

SEQ ID NO: 1803080 - RNA, 19 nt, Homo sapiens
  misc_RNA (1)...(19): siRNA sense strand
gguccucggugccuucaug

SEQ ID NO: 1803081 - RNA, 19 nt, Homo sapiens
  misc_RNA (1)...(19): siRNA sense strand
gcaggaggaaugccuuuca

SEQ ID NO: 1803082 - RNA, 19 nt, Homo sapiens
  misc_RNA (1)...(19): siRNA sense strand
acaagacaguucgcaaaga

SEQ ID NO: 1803083 - RNA, 19 nt, Homo sapiens
  misc_RNA (1)...(19): siRNA sense strand
gcuacuaugcuguccugua

SEQ ID NO: 1803084 - RNA, 19 nt, Homo sapiens
  misc_RNA (1)...(19): siRNA sense strand
ggugugcuauggcuucauc

SEQ ID NO: 1803085 - RNA, 19 nt, Homo sapiens
  misc_RNA (1)...(19): siRNA sense strand
gggcugugauggcacuugu

SEQ ID NO: 1803086 - RNA, 19 nt, Homo sapiens
  misc_RNA (1)...(19): siRNA sense strand
cuacugggcaugugcuuug

SEQ ID NO: 1803087 - RNA, 19 nt, Homo sapiens
  misc_RNA (1)...(19): siRNA sense strand
ugauggcacuugucuacau

SEQ ID NO: 1803088 - RNA, 19 nt, Homo sapiens
  misc_RNA (1)...(19): siRNA sense strand
gcaccuccaccuccucuuc

SEQ ID NO: 1803089 - RNA, 19 nt, Homo sapiens
  misc_RNA (1)...(19): siRNA sense strand
gccugacucuguccaacuu

SEQ ID NO: 1803090 - RNA, 19 nt, Homo sapiens
  misc_RNA (1)...(19): siRNA sense strand
ggaaccauuugugcaacga

SEQ ID NO: 1803091 - RNA, 19 nt, Homo sapiens
  misc_RNA (1)...(19): siRNA sense strand
cagaggaccgggaggaaga

SEQ ID NO: 1803092 - RNA, 19 nt, Homo sapiens
  misc_RNA (1)...(19): siRNA sense strand
ucuauggacucuggaacaa

SEQ ID NO: 1803093 - RNA, 19 nt, Homo sapiens
  misc_RNA (1)...(19): siRNA sense strand
guaguguggugcaacuucu

SEQ ID NO: 1803094 - RNA, 19 nt, Homo sapiens
  misc_RNA (1)...(19): siRNA sense strand
ucaucguggucaccuugua

SEQ ID NO: 1803095 - RNA, 19 nt, Homo sapiens
  misc_RNA (1)...(19): siRNA sense strand
cagcaacaaguucgucuuc

SEQ ID NO: 1803096 - RNA, 19 nt, Homo sapiens
  misc_RNA (1)...(19): siRNA sense strand
guucaucgccaucauuguc

SEQ ID NO: 1803097 - RNA, 19 nt, Homo sapiens
  misc_RNA (1)...(19): siRNA sense strand
ucaggcagcaggaggaaug

SEQ ID NO: 1803098 - RNA, 19 nt, Homo sapiens
  misc_RNA (1)...(19): siRNA sense strand
ccguggaguuugacgaguu

SEQ ID NO: 1803099 - RNA, 19 nt, Homo sapiens
  misc_RNA (1)...(19): siRNA sense strand
ccaguucaucgccaucauu

SEQ ID NO: 1803100 - RNA, 19 nt, Homo sapiens
  misc_RNA (1)...(19): siRNA sense strand
cgcagggaauggaucuuug

SEQ ID NO: 1803101 - RNA, 19 nt, Homo sapiens
  misc_RNA (1)...(19): siRNA sense strand
caucaucacccaguucauc

SEQ ID NO: 1803102 - RNA, 19 nt, Homo sapiens
  misc_RNA (1)...(19): siRNA sense strand
ugggaaaccuggucaucgu

SEQ ID NO: 1803103 - RNA, 19 nt, Homo sapiens
  misc_RNA (1)...(19): siRNA sense strand
gcagggaauggaucuuugg

SEQ ID NO: 1803104 - RNA, 19 nt, Homo sapiens
  misc_RNA (1)...(19): siRNA sense strand
acaccucacugcgcucaug

SEQ ID NO: 1803105 - RNA, 19 nt, Homo sapiens
  misc_RNA (1)...(19): siRNA sense strand
ccgcagggaauggaucuuu

SEQ ID NO: 1803106 - RNA, 19 nt, Homo sapiens
  misc_RNA (1)...(19): siRNA sense strand
gguguaguguggugcaacu

SEQ ID NO: 1803107 - RNA, 19 nt, Homo sapiens
  misc_RNA (1)...(19): siRNA sense strand
guauuaucgggaaccauuu

SEQ ID NO: 1803108 - RNA, 19 nt, Homo sapiens
  misc_RNA (1)...(19): siRNA sense strand
cagcaggaggaaugccuuu

SEQ ID NO: 1803109 - RNA, 19 nt, Homo sapiens
  misc_RNA (1)...(19): siRNA sense strand
gugcuauggcuucaucuuc

SEQ ID NO: 1803110 - RNA, 19 nt, Homo sapiens
  misc_RNA (1)...(19): siRNA sense strand
gugcaacgacagaggacuu

SEQ ID NO: 1803111 - RNA, 19 nt, Homo sapiens
  misc_RNA (1)...(19): siRNA sense strand
ggaccgggaggaagaacuc

SEQ ID NO: 1803112 - RNA, 19 nt, Homo sapiens
  misc_RNA (1)...(19): siRNA sense strand
gaacuucacugucacugua

SEQ ID NO: 1803113 - RNA, 19 nt, Homo sapiens
  misc_RNA (1)...(19): siRNA sense strand
gaacuucacugucacugua

SEQ ID NO: 1803114 - RNA, 19 nt, Homo sapiens
  misc_RNA (1)...(19): siRNA sense strand
gaacuucacugucacugua

SEQ ID NO: 1803115 - RNA, 19 nt, Homo sapiens
  misc_RNA (1)...(19): siRNA sense strand
ccacaaagcugaccuacaa

SEQ ID NO: 1803116 - RNA, 19 nt, Homo sapiens
  misc_RNA (1)...(19): siRNA sense strand
gcaaggcucuggcuuccua

SEQ ID NO: 1803117 - RNA, 19 nt, Homo sapiens
  misc_RNA (1)...(19): siRNA sense strand
gcaaggcucuggcuuccua

SEQ ID NO: 1803118 - RNA, 19 nt, Homo sapiens
  misc_RNA (1)...(19): siRNA sense strand
gcaaggcucuggcuuccua

SEQ ID NO: 1803119 - RNA, 19 nt, Homo sapiens
  misc_RNA (1)...(19): siRNA sense strand
gaagaacuuugcccacuga

SEQ ID NO: 1803120 - RNA, 19 nt, Homo sapiens
  misc_RNA (1)...(19): siRNA sense strand
caacuggagugacgacuuu

SEQ ID NO: 1803121 - RNA, 19 nt, Homo sapiens
  misc_RNA (1)...(19): siRNA sense strand
gagaucaccugcccagaaa

SEQ ID NO: 1803122 - RNA, 19 nt, Homo sapiens
  misc_RNA (1)...(19): siRNA sense strand
gagaucaccugcccagaaa

SEQ ID NO: 1803123 - RNA, 19 nt, Homo sapiens
  misc_RNA (1)...(19): siRNA sense strand
gagaucaccugcccagaaa

SEQ ID NO: 1803124 - RNA, 19 nt, Homo sapiens
  misc_RNA (1)...(19): siRNA sense strand
guucagauguugugauuga

SEQ ID NO: 1803125 - RNA, 19 nt, Homo sapiens
  misc_RNA (1)...(19): siRNA sense strand
gcugagaacuucacuguca

SEQ ID NO: 1803126 - RNA, 19 nt, Homo sapiens
  misc_RNA (1)...(19): siRNA sense strand
cgacgcggguuucguguua

SEQ ID NO: 1803127 - RNA, 19 nt, Homo sapiens
  misc_RNA (1)...(19): siRNA sense strand
guucagauguugugauuga

SEQ ID NO: 1803128 - RNA, 19 nt, Homo sapiens
  misc_RNA (1)...(19): siRNA sense strand
gcugagaacuucacuguca

SEQ ID NO: 1803129 - RNA, 19 nt, Homo sapiens
  misc_RNA (1)...(19): siRNA sense strand
cgacgcggguuucguguua

SEQ ID NO: 1803130 - RNA, 19 nt, Homo sapiens
  misc_RNA (1)...(19): siRNA sense strand
guucagauguugugauuga

SEQ ID NO: 1803131 - RNA, 19 nt, Homo sapiens
  misc_RNA (1)...(19): siRNA sense strand
gcugagaacuucacuguca

SEQ ID NO: 1803132 - RNA, 19 nt, Homo sapiens
  misc_RNA (1)...(19): siRNA sense strand
cgacgcggguuucguguua

SEQ ID NO: 1803133 - RNA, 19 nt, Homo sapiens
  misc_RNA (1)...(19): siRNA sense strand
gauuguggcugcacccaua

SEQ ID NO: 1803134 - RNA, 19 nt, Homo sapiens
  misc_RNA (1)...(19): siRNA sense strand
ccacaauggugucuacuau

SEQ ID NO: 1803135 - RNA, 19 nt, Homo sapiens
  misc_RNA (1)...(19): siRNA sense strand
ccacaauggugucuacuau

SEQ ID NO: 1803136 - RNA, 19 nt, Homo sapiens
  misc_RNA (1)...(19): siRNA sense strand
gggaacagcuggcaagaag

SEQ ID NO: 1803137 - RNA, 19 nt, Homo sapiens
  misc_RNA (1)...(19): siRNA sense strand
ccacaauggugccuacuau

SEQ ID NO: 1803138 - RNA, 19 nt, Homo sapiens
  misc_RNA (1)...(19): siRNA sense strand
acaauggugucuacuauga

SEQ ID NO: 1803139 - RNA, 19 nt, Homo sapiens
  misc_RNA (1)...(19): siRNA sense strand
acaauggugucuacuauga

SEQ ID NO: 1803140 - RNA, 19 nt, Homo sapiens
  misc_RNA (1)...(19): siRNA sense strand
gcggugagguguccuguga

SEQ ID NO: 1803141 - RNA, 19 nt, Homo sapiens
  misc_RNA (1)...(19): siRNA sense strand
gcggugagguguccuguga

SEQ ID NO: 1803142 - RNA, 19 nt, Homo sapiens
  misc_RNA (1)...(19): siRNA sense strand
ccaggcaggugauguggua

SEQ ID NO: 1803143 - RNA, 19 nt, Homo sapiens
  misc_RNA (1)...(19): siRNA sense strand
gcagauguguggccugugu

SEQ ID NO: 1803144 - RNA, 19 nt, Homo sapiens
  misc_RNA (1)...(19): siRNA sense strand
gcagacaacaccucaaaga

SEQ ID NO: 1803145 - RNA, 19 nt, Homo sapiens
  misc_RNA (1)...(19): siRNA sense strand
ggcaagugcugguggauga

SEQ ID NO: 1803146 - RNA, 19 nt, Homo sapiens
  misc_RNA (1)...(19): siRNA sense strand
gcagugaguucucguaugc

SEQ ID NO: 1803147 - RNA, 19 nt, Homo sapiens
  misc_RNA (1)...(19): siRNA sense strand
gaagguggcugugauuguc

SEQ ID NO: 1803148 - RNA, 19 nt, Homo sapiens
  misc_RNA (1)...(19): siRNA sense strand
ggugauccauucugacuau

SEQ ID NO: 1803149 - RNA, 19 nt, Homo sapiens
  misc_RNA (1)...(19): siRNA sense strand
ccuacgaccuuguguacua

SEQ ID NO: 1803150 - RNA, 19 nt, Homo sapiens
  misc_RNA (1)...(19): siRNA sense strand
ccuacgaccuuguguacua

SEQ ID NO: 1803151 - RNA, 19 nt, Homo sapiens
  misc_RNA (1)...(19): siRNA sense strand
ccuacgaccuuguguacua

SEQ ID NO: 1803152 - RNA, 19 nt, Homo sapiens
  misc_RNA (1)...(19): siRNA sense strand
ccaggaaugucaaggaguu

SEQ ID NO: 1803153 - RNA, 19 nt, Homo sapiens
  misc_RNA (1)...(19): siRNA sense strand
gaaugaguguggaauccuu

SEQ ID NO: 1803154 - RNA, 19 nt, Homo sapiens
  misc_RNA (1)...(19): siRNA sense strand
gaaugcagcuggacaucuc

SEQ ID NO: 1803155 - RNA, 19 nt, Homo sapiens
  misc_RNA (1)...(19): siRNA sense strand
gagcagacaguccucauug

SEQ ID NO: 1803156 - RNA, 19 nt, Homo sapiens
  misc_RNA (1)...(19): siRNA sense strand
gagcagacaguccucauug

SEQ ID NO: 1803157 - RNA, 19 nt, Homo sapiens
  misc_RNA (1)...(19): siRNA sense strand
gagcagacaguccucauug

SEQ ID NO: 1803158 - RNA, 19 nt, Homo sapiens
  misc_RNA (1)...(19): siRNA sense strand
ggaaugcccucagaacagu

SEQ ID NO: 1803159 - RNA, 19 nt, Homo sapiens
  misc_RNA (1)...(19): siRNA sense strand
ggaaugcccucagaacagu

SEQ ID NO: 1803160 - RNA, 19 nt, Homo sapiens
  misc_RNA (1)...(19): siRNA sense strand
gcacuggccuuugggaaca

SEQ ID NO: 1803161 - RNA, 19 nt, Homo sapiens
  misc_RNA (1)...(19): siRNA sense strand
cggcacagcugacaugauc

SEQ ID NO: 1803162 - RNA, 19 nt, Homo sapiens
  misc_RNA (1)...(19): siRNA sense strand
gcugguggcugacuuugga

SEQ ID NO: 1803163 - RNA, 19 nt, Homo sapiens
  misc_RNA (1)...(19): siRNA sense strand
gcugguggcugacuuugga

SEQ ID NO: 1803164 - RNA, 19 nt, Homo sapiens
  misc_RNA (1)...(19): siRNA sense strand
gcugguggcugacuuugga

SEQ ID NO: 1803165 - RNA, 19 nt, Homo sapiens
  misc_RNA (1)...(19): siRNA sense strand
ugccaaggcugagaugaua

SEQ ID NO: 1803166 - RNA, 19 nt, Homo sapiens
  misc_RNA (1)...(19): siRNA sense strand
uggaugacguccuucagua

SEQ ID NO: 1803167 - RNA, 19 nt, Homo sapiens
  misc_RNA (1)...(19): siRNA sense strand
cacacuggcucccuccaua

SEQ ID NO: 1803168 - RNA, 19 nt, Homo sapiens
  misc_RNA (1)...(19): siRNA sense strand
cacacuggcucccuccaua

SEQ ID NO: 1803169 - RNA, 19 nt, Homo sapiens
  misc_RNA (1)...(19): siRNA sense strand
cacacuggcucccuccaua

SEQ ID NO: 1803170 - RNA, 19 nt, Homo sapiens
  misc_RNA (1)...(19): siRNA sense strand
gaugggcaccgauucaauu

SEQ ID NO: 1803171 - RNA, 19 nt, Homo sapiens
  misc_RNA (1)...(19): siRNA sense strand
caggugaugugguagaguu

SEQ ID NO: 1803172 - RNA, 19 nt, Homo sapiens
  misc_RNA (1)...(19): siRNA sense strand
gaacagcuggcaagaagag

SEQ ID NO: 1803173 - RNA, 19 nt, Homo sapiens
  misc_RNA (1)...(19): siRNA sense strand
caaugaccaugcugggaaa

SEQ ID NO: 1803174 - RNA, 19 nt, Homo sapiens
  misc_RNA (1)...(19): siRNA sense strand
agacaguccucauugacaa

SEQ ID NO: 1803175 - RNA, 19 nt, Homo sapiens
  misc_RNA (1)...(19): siRNA sense strand
cagcaugguucagauguug

SEQ ID NO: 1803176 - RNA, 19 nt, Homo sapiens
  misc_RNA (1)...(19): siRNA sense strand
agacaguccucauugacaa

SEQ ID NO: 1803177 - RNA, 19 nt, Homo sapiens
  misc_RNA (1)...(19): siRNA sense strand
cagcaugguucagauguug

SEQ ID NO: 1803178 - RNA, 19 nt, Homo sapiens
  misc_RNA (1)...(19): siRNA sense strand
gcgugugccugcccaacua

SEQ ID NO: 1803179 - RNA, 19 nt, Homo sapiens
  misc_RNA (1)...(19): siRNA sense strand
agacaguccucauugacaa

SEQ ID NO: 1803180 - RNA, 19 nt, Homo sapiens
  misc_RNA (1)...(19): siRNA sense strand
cagcaugguucagauguug

SEQ ID NO: 1803181 - RNA, 19 nt, Homo sapiens
  misc_RNA (1)...(19): siRNA sense strand
ucaaaggucacagcuagua

SEQ ID NO: 1803182 - RNA, 19 nt, Homo sapiens
  misc_RNA (1)...(19): siRNA sense strand
gcaccaacaucuccaucca

SEQ ID NO: 1803183 - RNA, 19 nt, Homo sapiens
  misc_RNA (1)...(19): siRNA sense strand
gcaccaacaucuccaucca

SEQ ID NO: 1803184 - RNA, 19 nt, Homo sapiens
  misc_RNA (1)...(19): siRNA sense strand
ucacagccuuccugcagaa

SEQ ID NO: 1803185 - RNA, 19 nt, Homo sapiens
  misc_RNA (1)...(19): siRNA sense strand
gcaccaacaucuccaucca

SEQ ID NO: 1803186 - RNA, 19 nt, Homo sapiens
  misc_RNA (1)...(19): siRNA sense strand
gcuguggaguucgcaagua

SEQ ID NO: 1803187 - RNA, 19 nt, Homo sapiens
  misc_RNA (1)...(19): siRNA sense strand
gcccaggacuacagaauac

SEQ ID NO: 1803188 - RNA, 19 nt, Homo sapiens
  misc_RNA (1)...(19): siRNA sense strand
gaugcuggcuucguacuca

SEQ ID NO: 1803189 - RNA, 19 nt, Homo sapiens
  misc_RNA (1)...(19): siRNA sense strand
gagaugauaggcagcaaga

SEQ ID NO: 1803190 - RNA, 19 nt, Homo sapiens
  misc_RNA (1)...(19): siRNA sense strand
caacaucuccauccacaag

SEQ ID NO: 1803191 - RNA, 19 nt, Homo sapiens
  misc_RNA (1)...(19): siRNA sense strand
gacguugacuccaaacaag

SEQ ID NO: 1803192 - RNA, 19 nt, Homo sapiens
  misc_RNA (1)...(19): siRNA sense strand
ggccgauacuugccgguaa

SEQ ID NO: 1803193 - RNA, 19 nt, Homo sapiens
  misc_RNA (1)...(19): siRNA sense strand
caacaucuccauccacaag

SEQ ID NO: 1803194 - RNA, 19 nt, Homo sapiens
  misc_RNA (1)...(19): siRNA sense strand
gggcaacccugcuguaucc

SEQ ID NO: 1803195 - RNA, 19 nt, Homo sapiens
  misc_RNA (1)...(19): siRNA sense strand
guggagcccuggaggaaug

SEQ ID NO: 1803196 - RNA, 19 nt, Homo sapiens
  misc_RNA (1)...(19): siRNA sense strand
gcugauguguggccugugu

SEQ ID NO: 1803197 - RNA, 19 nt, Homo sapiens
  misc_RNA (1)...(19): siRNA sense strand
caacaucuccauccacaag

SEQ ID NO: 1803198 - RNA, 19 nt, Homo sapiens
  misc_RNA (1)...(19): siRNA sense strand
gggcaacccugcuguaucc

SEQ ID NO: 1803199 - RNA, 19 nt, Homo sapiens
  misc_RNA (1)...(19): siRNA sense strand
guggagcccuggaggaaug

SEQ ID NO: 1803200 - RNA, 19 nt, Homo sapiens
  misc_RNA (1)...(19): siRNA sense strand
gcugauguguggccugugu

SEQ ID NO: 1803201 - RNA, 19 nt, Homo sapiens
  misc_RNA (1)...(19): siRNA sense strand
gaugauaggcagcaagauc

SEQ ID NO: 1803202 - RNA, 19 nt, Homo sapiens
  misc_RNA (1)...(19): siRNA sense strand
cuauggagcugguggauac

SEQ ID NO: 1803203 - RNA, 19 nt, Homo sapiens
  misc_RNA (1)...(19): siRNA sense strand
gggagucggucauggucaa

SEQ ID NO: 1803204 - RNA, 19 nt, Homo sapiens
  misc_RNA (1)...(19): siRNA sense strand
ccaucgugcuugagaagaa

SEQ ID NO: 1803205 - RNA, 19 nt, Homo sapiens
  misc_RNA (1)...(19): siRNA sense strand
gcuggacgccugccaaguu

SEQ ID NO: 1803206 - RNA, 19 nt, Homo sapiens
  misc_RNA (1)...(19): siRNA sense strand
gaacacuggcagagaggaa

SEQ ID NO: 1803207 - RNA, 19 nt, Homo sapiens
  misc_RNA (1)...(19): siRNA sense strand
gcuggacgccugccaaguu

SEQ ID NO: 1803208 - RNA, 19 nt, Homo sapiens
  misc_RNA (1)...(19): siRNA sense strand
gcuggacgccugccaaguu

SEQ ID NO: 1803209 - RNA, 19 nt, Homo sapiens
  misc_RNA (1)...(19): siRNA sense strand
gaugggcaccgauucgauu

SEQ ID NO: 1803210 - RNA, 19 nt, Homo sapiens
  misc_RNA (1)...(19): siRNA sense strand
ggaagguggcugugauugu

SEQ ID NO: 1803211 - RNA, 19 nt, Homo sapiens
  misc_RNA (1)...(19): siRNA sense strand
gaagaaugcagcuggacau

SEQ ID NO: 1803212 - RNA, 19 nt, Homo sapiens
  misc_RNA (1)...(19): siRNA sense strand
gaagaaaucugugucuaug

SEQ ID NO: 1803213 - RNA, 19 nt, Homo sapiens
  misc_RNA (1)...(19): siRNA sense strand
ucaccaaggucuccaggua

SEQ ID NO: 1803214 - RNA, 19 nt, Homo sapiens
  misc_RNA (1)...(19): siRNA sense strand
agaaaucugugucuaugaa

SEQ ID NO: 1803215 - RNA, 19 nt, Homo sapiens
  misc_RNA (1)...(19): siRNA sense strand
caagagaaguguuugaaaa

SEQ ID NO: 1803216 - RNA, 19 nt, Homo sapiens
  misc_RNA (1)...(19): siRNA sense strand
gcaagagaaguguuugaaa

SEQ ID NO: 1803217 - RNA, 19 nt, Homo sapiens
  misc_RNA (1)...(19): siRNA sense strand
guuaacaaauuccgaagga

SEQ ID NO: 1803218 - RNA, 19 nt, Homo sapiens
  misc_RNA (1)...(19): siRNA sense strand
gguacucacucugguuuaa

SEQ ID NO: 1803219 - RNA, 19 nt, Homo sapiens
  misc_RNA (1)...(19): siRNA sense strand
gcacugaccugggcaacuc

SEQ ID NO: 1803220 - RNA, 19 nt, Homo sapiens
  misc_RNA (1)...(19): siRNA sense strand
acacagaggcuccugguuu

SEQ ID NO: 1803221 - RNA, 19 nt, Homo sapiens
  misc_RNA (1)...(19): siRNA sense strand
gaugaauucuggagacgau

SEQ ID NO: 1803222 - RNA, 19 nt, Homo sapiens
  misc_RNA (1)...(19): siRNA sense strand
gcagguaaaguuaacaaau

SEQ ID NO: 1803223 - RNA, 19 nt, Homo sapiens
  misc_RNA (1)...(19): siRNA sense strand
gagaaguguuugaaaauga

SEQ ID NO: 1803224 - RNA, 19 nt, Homo sapiens
  misc_RNA (1)...(19): siRNA sense strand
aguagucacugaugaauuc

SEQ ID NO: 1803225 - RNA, 19 nt, Homo sapiens
  misc_RNA (1)...(19): siRNA sense strand
ugaagaagcaagagaagug

SEQ ID NO: 1803226 - RNA, 19 nt, Homo sapiens
  misc_RNA (1)...(19): siRNA sense strand
ugaagaaaucugugucuau

SEQ ID NO: 1803227 - RNA, 19 nt, Homo sapiens
  misc_RNA (1)...(19): siRNA sense strand
cacagaggcuccugguuuc

SEQ ID NO: 1803228 - RNA, 19 nt, Homo sapiens
  misc_RNA (1)...(19): siRNA sense strand
cuucuguggugguguuaua

SEQ ID NO: 1803229 - RNA, 19 nt, Homo sapiens
  misc_RNA (1)...(19): siRNA sense strand
gaaguagucacugaugaau

SEQ ID NO: 1803230 - RNA, 19 nt, Homo sapiens
  misc_RNA (1)...(19): siRNA sense strand
gaauucuggagacgauaua

SEQ ID NO: 1803231 - RNA, 19 nt, Homo sapiens
  misc_RNA (1)...(19): siRNA sense strand
gggcuccuaucuucuggaa

SEQ ID NO: 1803232 - RNA, 19 nt, Homo sapiens
  misc_RNA (1)...(19): siRNA sense strand
caagauaacgcacguccau

SEQ ID NO: 1803233 - RNA, 19 nt, Homo sapiens
  misc_RNA (1)...(19): siRNA sense strand
aaaaugaaguagucacuga

SEQ ID NO: 1803234 - RNA, 19 nt, Homo sapiens
  misc_RNA (1)...(19): siRNA sense strand
ccaccaggaccuacuguga

SEQ ID NO: 1803235 - RNA, 19 nt, Homo sapiens
  misc_RNA (1)...(19): siRNA sense strand
gaagaagcaagagaagugu

SEQ ID NO: 1803236 - RNA, 19 nt, Homo sapiens
  misc_RNA (1)...(19): siRNA sense strand
gguuuaaacagaucaugaa

SEQ ID NO: 1803237 - RNA, 19 nt, Homo sapiens
  misc_RNA (1)...(19): siRNA sense strand
ugaaguagucacugaugaa

SEQ ID NO: 1803238 - RNA, 19 nt, Homo sapiens
  misc_RNA (1)...(19): siRNA sense strand
gccaagacccgcugaugau

SEQ ID NO: 1803239 - RNA, 19 nt, Homo sapiens
  misc_RNA (1)...(19): siRNA sense strand
agcaaaauguucacuguua

SEQ ID NO: 1803240 - RNA, 19 nt, Homo sapiens
  misc_RNA (1)...(19): siRNA sense strand
agacuucuguggugguguu

SEQ ID NO: 1803241 - RNA, 19 nt, Homo sapiens
  misc_RNA (1)...(19): siRNA sense strand
guggagcccucaguauuuc

SEQ ID NO: 1803242 - RNA, 19 nt, Homo sapiens
  misc_RNA (1)...(19): siRNA sense strand
cuguggugguguuauaaua

SEQ ID NO: 1803243 - RNA, 19 nt, Homo sapiens
  misc_RNA (1)...(19): siRNA sense strand
gcaacugcgagcuggcuaa

SEQ ID NO: 1803244 - RNA, 19 nt, Homo sapiens
  misc_RNA (1)...(19): siRNA sense strand
agaagcaagagaaguguuu

SEQ ID NO: 1803245 - RNA, 19 nt, Homo sapiens
  misc_RNA (1)...(19): siRNA sense strand
gguguuauaauacgggaaa

SEQ ID NO: 1803246 - RNA, 19 nt, Homo sapiens
  misc_RNA (1)...(19): siRNA sense strand
uguggagcccucaguauuu

SEQ ID NO: 1803247 - RNA, 19 nt, Homo sapiens
  misc_RNA (1)...(19): siRNA sense strand
aaaucugugucuaugaaga

SEQ ID NO: 1803248 - RNA, 19 nt, Homo sapiens
  misc_RNA (1)...(19): siRNA sense strand
gaagcaagagaaguguuug

SEQ ID NO: 1803249 - RNA, 19 nt, Homo sapiens
  misc_RNA (1)...(19): siRNA sense strand
uaacagaacgagccaagac

SEQ ID NO: 1803250 - RNA, 19 nt, Homo sapiens
  misc_RNA (1)...(19): siRNA sense strand
guguggagcccucaguauu

SEQ ID NO: 1803251 - RNA, 19 nt, Homo sapiens
  misc_RNA (1)...(19): siRNA sense strand
cgugcgggcuccuaucuuc

SEQ ID NO: 1803252 - RNA, 19 nt, Homo sapiens
  misc_RNA (1)...(19): siRNA sense strand
gaagcgugcgggcuccuau

SEQ ID NO: 1803253 - RNA, 19 nt, Homo sapiens
  misc_RNA (1)...(19): siRNA sense strand
guacucacucugguuuaaa

SEQ ID NO: 1803254 - RNA, 19 nt, Homo sapiens
  misc_RNA (1)...(19): siRNA sense strand
gcucacaugguccuuguca

SEQ ID NO: 1803255 - RNA, 19 nt, Homo sapiens
  misc_RNA (1)...(19): siRNA sense strand
gauaacgcacguccaugug

SEQ ID NO: 1803256 - RNA, 19 nt, Homo sapiens
  misc_RNA (1)...(19): siRNA sense strand
caacugcgagcuggcuaaa

SEQ ID NO: 1803257 - RNA, 19 nt, Homo sapiens
  misc_RNA (1)...(19): siRNA sense strand
ggaaaauuuuguacugaca

SEQ ID NO: 1803258 - RNA, 19 nt, Homo sapiens
  misc_RNA (1)...(19): siRNA sense strand
ggacugaugggugucaaca

SEQ ID NO: 1803259 - RNA, 19 nt, Homo sapiens
  misc_RNA (1)...(19): siRNA sense strand
gagccaagacccgcugaug

SEQ ID NO: 1803260 - RNA, 19 nt, Homo sapiens
  misc_RNA (1)...(19): siRNA sense strand
cagguacucacucugguuu

SEQ ID NO: 1803261 - RNA, 19 nt, Homo sapiens
  misc_RNA (1)...(19): siRNA sense strand
gaaaucugugucuaugaag

SEQ ID NO: 1803262 - RNA, 19 nt, Homo sapiens
  misc_RNA (1)...(19): siRNA sense strand
gcaaaauguucacuguuac

SEQ ID NO: 1803263 - RNA, 19 nt, Homo sapiens
  misc_RNA (1)...(19): siRNA sense strand
cuaugaagaagcaagagaa

SEQ ID NO: 1803264 - RNA, 19 nt, Homo sapiens
  misc_RNA (1)...(19): siRNA sense strand
augaaguagucacugauga

SEQ ID NO: 1803265 - RNA, 19 nt, Homo sapiens
  misc_RNA (1)...(19): siRNA sense strand
accaggaccuacugugaga

SEQ ID NO: 1803266 - RNA, 19 nt, Homo sapiens
  misc_RNA (1)...(19): siRNA sense strand
augaagaaaucugugucua

SEQ ID NO: 1803267 - RNA, 19 nt, Homo sapiens
  misc_RNA (1)...(19): siRNA sense strand
gaagcgugcaccggaucua

SEQ ID NO: 1803268 - RNA, 19 nt, Homo sapiens
  misc_RNA (1)...(19): siRNA sense strand
ggugaggaccacaaacagu

SEQ ID NO: 1803269 - RNA, 19 nt, Homo sapiens
  misc_RNA (1)...(19): siRNA sense strand
gcacuggauggauggaagu

SEQ ID NO: 1803270 - RNA, 19 nt, Homo sapiens
  misc_RNA (1)...(19): siRNA sense strand
ggaccuacugugagagaag

SEQ ID NO: 1803271 - RNA, 19 nt, Homo sapiens
  misc_RNA (1)...(19): siRNA sense strand
agauaacgcacguccaugu

SEQ ID NO: 1803272 - RNA, 19 nt, Homo sapiens
  misc_RNA (1)...(19): siRNA sense strand
ugaauucuggagacgauau

SEQ ID NO: 1803273 - RNA, 19 nt, Homo sapiens
  misc_RNA (1)...(19): siRNA sense strand
ggucaccagagaacacaga

SEQ ID NO: 1803274 - RNA, 19 nt, Homo sapiens
  misc_RNA (1)...(19): siRNA sense strand
guuaugaagaaaucugugu

SEQ ID NO: 1803275 - RNA, 19 nt, Homo sapiens
  misc_RNA (1)...(19): siRNA sense strand
caaggucuccagguacuca

SEQ ID NO: 1803276 - RNA, 19 nt, Homo sapiens
  misc_RNA (1)...(19): siRNA sense strand
agaggcuccugguuucuca

SEQ ID NO: 1803277 - RNA, 19 nt, Homo sapiens
  misc_RNA (1)...(19): siRNA sense strand
ugaagaaccuuguggagaa

SEQ ID NO: 1803278 - RNA, 19 nt, Homo sapiens
  misc_RNA (1)...(19): siRNA sense strand
cuaaaggacuucccuguga

SEQ ID NO: 1803279 - RNA, 19 nt, Homo sapiens
  misc_RNA (1)...(19): siRNA sense strand
gauacgagauaguucugua

SEQ ID NO: 1803280 - RNA, 19 nt, Homo sapiens
  misc_RNA (1)...(19): siRNA sense strand
caacuacuaugacgaggaa

SEQ ID NO: 1803281 - RNA, 19 nt, Homo sapiens
  misc_RNA (1)...(19): siRNA sense strand
gaagaaccuuguggagaaa

SEQ ID NO: 1803282 - RNA, 19 nt, Homo sapiens
  misc_RNA (1)...(19): siRNA sense strand
gaaggauaauuaccuguuc

SEQ ID NO: 1803283 - RNA, 19 nt, Homo sapiens
  misc_RNA (1)...(19): siRNA sense strand
cgagauaguucuguacauu

SEQ ID NO: 1803284 - RNA, 19 nt, Homo sapiens
  misc_RNA (1)...(19): siRNA sense strand
gggagcagcuuuccucugu

SEQ ID NO: 1803285 - RNA, 19 nt, Homo sapiens
  misc_RNA (1)...(19): siRNA sense strand
gagaagaacaacccaaaga

SEQ ID NO: 1803286 - RNA, 19 nt, Homo sapiens
  misc_RNA (1)...(19): siRNA sense strand
guacauggcccaggacauu

SEQ ID NO: 1803287 - RNA, 19 nt, Homo sapiens
  misc_RNA (1)...(19): siRNA sense strand
ucaacaagauucuguccaa

SEQ ID NO: 1803288 - RNA, 19 nt, Homo sapiens
  misc_RNA (1)...(19): siRNA sense strand
ggcggaagcucuaccaugu

SEQ ID NO: 1803289 - RNA, 19 nt, Homo sapiens
  misc_RNA (1)...(19): siRNA sense strand
ucaccagccuugacucauu

SEQ ID NO: 1803290 - RNA, 19 nt, Homo sapiens
  misc_RNA (1)...(19): siRNA sense strand
gaaauugaguuuggcuaca

SEQ ID NO: 1803291 - RNA, 19 nt, Homo sapiens
  misc_RNA (1)...(19): siRNA sense strand
auaauuaccuguuccugaa

SEQ ID NO: 1803292 - RNA, 19 nt, Homo sapiens
  misc_RNA (1)...(19): siRNA sense strand
ggacugccgugaugagaag

SEQ ID NO: 1803293 - RNA, 19 nt, Homo sapiens
  misc_RNA (1)...(19): siRNA sense strand
uaaaggacuucccugugaa

SEQ ID NO: 1803294 - RNA, 19 nt, Homo sapiens
  misc_RNA (1)...(19): siRNA sense strand
gagauaguucuguacauuu

SEQ ID NO: 1803295 - RNA, 19 nt, Homo sapiens
  misc_RNA (1)...(19): siRNA sense strand
gcaaggaagaucucaagga

SEQ ID NO: 1803296 - RNA, 19 nt, Homo sapiens
  misc_RNA (1)...(19): siRNA sense strand
gcaagcgaaucaccaucaa

SEQ ID NO: 1803297 - RNA, 19 nt, Homo sapiens
  misc_RNA (1)...(19): siRNA sense strand
gagaggccaucauguucaa

SEQ ID NO: 1803298 - RNA, 19 nt, Homo sapiens
  misc_RNA (1)...(19): siRNA sense strand
gaagaacaacccaaagaag

SEQ ID NO: 1803299 - RNA, 19 nt, Homo sapiens
  misc_RNA (1)...(19): siRNA sense strand
gaaucaccaucaacaagau

SEQ ID NO: 1803300 - RNA, 19 nt, Homo sapiens
  misc_RNA (1)...(19): siRNA sense strand
ccgcggagcugcuguucuu

SEQ ID NO: 1803301 - RNA, 19 nt, Homo sapiens
  misc_RNA (1)...(19): siRNA sense strand
gcaccaacguccgcaggaa

SEQ ID NO: 1803302 - RNA, 19 nt, Homo sapiens
  misc_RNA (1)...(19): siRNA sense strand
gggauggugugguggagaa

SEQ ID NO: 1803303 - RNA, 19 nt, Homo sapiens
  misc_RNA (1)...(19): siRNA sense strand
caccagccuugacucauuu

SEQ ID NO: 1803304 - RNA, 19 nt, Homo sapiens
  misc_RNA (1)...(19): siRNA sense strand
gaacugugaccgagagaca

SEQ ID NO: 1803305 - RNA, 19 nt, Homo sapiens
  misc_RNA (1)...(19): siRNA sense strand
gcagaaggacggccaugga

SEQ ID NO: 1803306 - RNA, 19 nt, Homo sapiens
  misc_RNA (1)...(19): siRNA sense strand
gaaauuccugcuacucaug

SEQ ID NO: 1803307 - RNA, 19 nt, Homo sapiens
  misc_RNA (1)...(19): siRNA sense strand
gagcagcuuuccucugucu

SEQ ID NO: 1803308 - RNA, 19 nt, Homo sapiens
  misc_RNA (1)...(19): siRNA sense strand
ccagagccuucuucccaaa

SEQ ID NO: 1803309 - RNA, 19 nt, Homo sapiens
  misc_RNA (1)...(19): siRNA sense strand
caaagaaauuccugcuacu

SEQ ID NO: 1803310 - RNA, 19 nt, Homo sapiens
  misc_RNA (1)...(19): siRNA sense strand
ccguggagcucuacucaga

SEQ ID NO: 1803311 - RNA, 19 nt, Homo sapiens
  misc_RNA (1)...(19): siRNA sense strand
gaaggucuacagcaaggaa

SEQ ID NO: 1803312 - RNA, 19 nt, Homo sapiens
  misc_RNA (1)...(19): siRNA sense strand
cgaaucaccaucaacaaga

SEQ ID NO: 1803313 - RNA, 19 nt, Homo sapiens
  misc_RNA (1)...(19): siRNA sense strand
ggagaggccaucauguuca

SEQ ID NO: 1803314 - RNA, 19 nt, Homo sapiens
  misc_RNA (1)...(19): siRNA sense strand
ugacagagcaggacaucau

SEQ ID NO: 1803315 - RNA, 19 nt, Homo sapiens
  misc_RNA (1)...(19): siRNA sense strand
aggaagaucucaaggacau

SEQ ID NO: 1803316 - RNA, 19 nt, Homo sapiens
  misc_RNA (1)...(19): siRNA sense strand
gcugcaugaaggauaauua

SEQ ID NO: 1803317 - RNA, 19 nt, Homo sapiens
  misc_RNA (1)...(19): siRNA sense strand
agauaguucuguacauuuc

SEQ ID NO: 1803318 - RNA, 19 nt, Homo sapiens
  misc_RNA (1)...(19): siRNA sense strand
acaagauucuguccaacga

SEQ ID NO: 1803319 - RNA, 19 nt, Homo sapiens
  misc_RNA (1)...(19): siRNA sense strand
ggacuggaaccgugacauc

SEQ ID NO: 1803320 - RNA, 19 nt, Homo sapiens
  misc_RNA (1)...(19): siRNA sense strand
agaagaacaacccaaagaa

SEQ ID NO: 1803321 - RNA, 19 nt, Homo sapiens
  misc_RNA (1)...(19): siRNA sense strand
gaagaucucaaggacaugu

SEQ ID NO: 1803322 - RNA, 19 nt, Homo sapiens
  misc_RNA (1)...(19): siRNA sense strand
aaggaggacugccgugaug

SEQ ID NO: 1803323 - RNA, 19 nt, Homo sapiens
  misc_RNA (1)...(19): siRNA sense strand
gagauggaaaccuaaagga

SEQ ID NO: 1803324 - RNA, 19 nt, Homo sapiens
  misc_RNA (1)...(19): siRNA sense strand
ucacagccauugagaucuc

SEQ ID NO: 1803325 - RNA, 19 nt, Homo sapiens
  misc_RNA (1)...(19): siRNA sense strand
caaggucaccgucaacuac

SEQ ID NO: 1803326 - RNA, 19 nt, Homo sapiens
  misc_RNA (1)...(19): siRNA sense strand
cagagcaggacaucauuga

SEQ ID NO: 1803327 - RNA, 19 nt, Homo sapiens
  misc_RNA (1)...(19): siRNA sense strand
ugaaggauaauuaccuguu

SEQ ID NO: 1803328 - RNA, 19 nt, Homo sapiens
  misc_RNA (1)...(19): siRNA sense strand
gcgaaucaccaucaacaag

SEQ ID NO: 1803329 - RNA, 19 nt, Homo sapiens
  misc_RNA (1)...(19): siRNA sense strand
ggagaagaacaacccaaag

SEQ ID NO: 1803330 - RNA, 19 nt, Homo sapiens
  misc_RNA (1)...(19): siRNA sense strand
ucaagugguugcacauggu

SEQ ID NO: 1803331 - RNA, 19 nt, Homo sapiens
  misc_RNA (1)...(19): siRNA sense strand
ggaaugcugccuggagaug

SEQ ID NO: 1803332 - RNA, 19 nt, Homo sapiens
  misc_RNA (1)...(19): siRNA sense strand
agaaauuccugcuacucau

SEQ ID NO: 1803333 - RNA, 19 nt, Homo sapiens
  misc_RNA (1)...(19): siRNA sense strand
guguuugugugcugcauga

SEQ ID NO: 1803334 - RNA, 19 nt, Homo sapiens
  misc_RNA (1)...(19): siRNA sense strand
agacaaagugggcguguuc

SEQ ID NO: 1803335 - RNA, 19 nt, Homo sapiens
  misc_RNA (1)...(19): siRNA sense strand
ucccaaacauggugaacau

SEQ ID NO: 1803336 - RNA, 19 nt, Homo sapiens
  misc_RNA (1)...(19): siRNA sense strand
aggaugaaauugaguuugg

SEQ ID NO: 1803337 - RNA, 19 nt, Homo sapiens
  misc_RNA (1)...(19): siRNA sense strand
augagaaggucuacagcaa

SEQ ID NO: 1803338 - RNA, 19 nt, Homo sapiens
  misc_RNA (1)...(19): siRNA sense strand
gacagagcaggacaucauu

SEQ ID NO: 1803339 - RNA, 19 nt, Homo sapiens
  misc_RNA (1)...(19): siRNA sense strand
agccuugacucauuuggaa

SEQ ID NO: 1803340 - RNA, 19 nt, Homo sapiens
  misc_RNA (1)...(19): siRNA sense strand
ugugcugcaugaaggauaa

SEQ ID NO: 1803341 - RNA, 19 nt, Homo sapiens
  misc_RNA (1)...(19): siRNA sense strand
ccaacgcuauauccacauc

SEQ ID NO: 1803342 - RNA, 19 nt, Homo sapiens
  misc_RNA (1)...(19): siRNA sense strand
gcaccuucaucgacgacau

SEQ ID NO: 1803343 - RNA, 19 nt, Homo sapiens
  misc_RNA (1)...(19): siRNA sense strand
gcaccucggccugcuacaa

SEQ ID NO: 1803344 - RNA, 19 nt, Homo sapiens
  misc_RNA (1)...(19): siRNA sense strand
caaagugggcguguucuac

SEQ ID NO: 1803345 - RNA, 19 nt, Homo sapiens
  misc_RNA (1)...(19): siRNA sense strand
gggccauccugcuggugaa

SEQ ID NO: 1803346 - RNA, 19 nt, Homo sapiens
  misc_RNA (1)...(19): siRNA sense strand
ugaucgugcuggacaagga

SEQ ID NO: 1803347 - RNA, 19 nt, Homo sapiens
  misc_RNA (1)...(19): siRNA sense strand
aaauugaguuuggcuacau

SEQ ID NO: 1803348 - RNA, 19 nt, Homo sapiens
  misc_RNA (1)...(19): siRNA sense strand
ucucaggccuggucuccau

SEQ ID NO: 1803349 - RNA, 19 nt, Homo sapiens
  misc_RNA (1)...(19): siRNA sense strand
guucuucggccaacgcuau

SEQ ID NO: 1803350 - RNA, 19 nt, Homo sapiens
  misc_RNA (1)...(19): siRNA sense strand
uggagaagaacaacccaaa

SEQ ID NO: 1803351 - RNA, 19 nt, Homo sapiens
  misc_RNA (1)...(19): siRNA sense strand
gcagcaagcgaaucaccau

SEQ ID NO: 1803352 - RNA, 19 nt, Homo sapiens
  misc_RNA (1)...(19): siRNA sense strand
aagaaauuccugcuacuca

SEQ ID NO: 1803353 - RNA, 19 nt, Homo sapiens
  misc_RNA (1)...(19): siRNA sense strand
cacaaagaaauuccugcua

SEQ ID NO: 1803354 - RNA, 19 nt, Homo sapiens
  misc_RNA (1)...(19): siRNA sense strand
ccaagguggugcgugacuu

SEQ ID NO: 1803355 - RNA, 19 nt, Homo sapiens
  misc_RNA (1)...(19): siRNA sense strand
ccaggaugaaauugaguuu

SEQ ID NO: 1803356 - RNA, 19 nt, Homo sapiens
  misc_RNA (1)...(19): siRNA sense strand
cagcaaggaagaucucaag

SEQ ID NO: 1803357 - RNA, 19 nt, Homo sapiens
  misc_RNA (1)...(19): siRNA sense strand
ggucaccgucaacuacuau

SEQ ID NO: 1803358 - RNA, 19 nt, Homo sapiens
  misc_RNA (1)...(19): siRNA sense strand
acaaagugggcguguucua

SEQ ID NO: 1803359 - RNA, 19 nt, Homo sapiens
  misc_RNA (1)...(19): siRNA sense strand
accgugacauccucaagaa

SEQ ID NO: 1803360 - RNA, 19 nt, Homo sapiens
  misc_RNA (1)...(19): siRNA sense strand
gaaccgugacauccucaag

SEQ ID NO: 1803361 - RNA, 19 nt, Homo sapiens
  misc_RNA (1)...(19): siRNA sense strand
aggagaaccuguacuucca

SEQ ID NO: 1803362 - RNA, 19 nt, Homo sapiens
  misc_RNA (1)...(19): siRNA sense strand
auggaaaccuaaaggacuu

SEQ ID NO: 1803363 - RNA, 19 nt, Homo sapiens
  misc_RNA (1)...(19): siRNA sense strand
gcaugaaggauaauuaccu

SEQ ID NO: 1803364 - RNA, 19 nt, Homo sapiens
  misc_RNA (1)...(19): siRNA sense strand
accgugauauuccggauug

SEQ ID NO: 1803365 - RNA, 19 nt, Homo sapiens
  misc_RNA (1)...(19): siRNA sense strand
caaggaggacugccgugau

SEQ ID NO: 1803366 - RNA, 19 nt, Homo sapiens
  misc_RNA (1)...(19): siRNA sense strand
caagguggugcgugacuuc

SEQ ID NO: 1803367 - RNA, 19 nt, Homo sapiens
  misc_RNA (1)...(19): siRNA sense strand
acaaggucaccgucaacua

SEQ ID NO: 1803368 - RNA, 19 nt, Homo sapiens
  misc_RNA (1)...(19): siRNA sense strand
ugaccugcccgcucuguuc

SEQ ID NO: 1803369 - RNA, 19 nt, Homo sapiens
  misc_RNA (1)...(19): siRNA sense strand
cagacaaagugggcguguu

SEQ ID NO: 1803370 - RNA, 19 nt, Homo sapiens
  misc_RNA (1)...(19): siRNA sense strand
gaggacugccgugaugaga

SEQ ID NO: 1803371 - RNA, 19 nt, Homo sapiens
  misc_RNA (1)...(19): siRNA sense strand
gaaggagcugggacugaca

SEQ ID NO: 1803372 - RNA, 19 nt, Homo sapiens
  misc_RNA (1)...(19): siRNA sense strand
aagcgaaucaccaucaaca

SEQ ID NO: 1803373 - RNA, 19 nt, Homo sapiens
  misc_RNA (1)...(19): siRNA sense strand
guggagcucuacucagacu

SEQ ID NO: 1803374 - RNA, 19 nt, Homo sapiens
  misc_RNA (1)...(19): siRNA sense strand
gaaauacucugaauaguga

SEQ ID NO: 1803375 - RNA, 19 nt, Homo sapiens
  misc_RNA (1)...(19): siRNA sense strand
gcacagaguucuccuauug

SEQ ID NO: 1803376 - RNA, 19 nt, Homo sapiens
  misc_RNA (1)...(19): siRNA sense strand
gaacuuauaugguagacaa

SEQ ID NO: 1803377 - RNA, 19 nt, Homo sapiens
  misc_RNA (1)...(19): siRNA sense strand
ggacaaauccuuucaguga

SEQ ID NO: 1803378 - RNA, 19 nt, Homo sapiens
  misc_RNA (1)...(19): siRNA sense strand
gaacagacaacugauaaua

SEQ ID NO: 1803379 - RNA, 19 nt, Homo sapiens
  misc_RNA (1)...(19): siRNA sense strand
gaagaucugucauuuaauc

SEQ ID NO: 1803380 - RNA, 19 nt, Homo sapiens
  misc_RNA (1)...(19): siRNA sense strand
gagaucaacuuaucaauca

SEQ ID NO: 1803381 - RNA, 19 nt, Homo sapiens
  misc_RNA (1)...(19): siRNA sense strand
guacuuagaugacucaguu

SEQ ID NO: 1803382 - RNA, 19 nt, Homo sapiens
  misc_RNA (1)...(19): siRNA sense strand
ggaagaaugucucauguuc

SEQ ID NO: 1803383 - RNA, 19 nt, Homo sapiens
  misc_RNA (1)...(19): siRNA sense strand
guuggaagcucuugguuua

SEQ ID NO: 1803384 - RNA, 19 nt, Homo sapiens
  misc_RNA (1)...(19): siRNA sense strand
gaacauaugcuaaguaaag

SEQ ID NO: 1803385 - RNA, 19 nt, Homo sapiens
  misc_RNA (1)...(19): siRNA sense strand
gaacaacaaggaaagauaa

SEQ ID NO: 1803386 - RNA, 19 nt, Homo sapiens
  misc_RNA (1)...(19): siRNA sense strand
gaauugugaugacugguua

SEQ ID NO: 1803387 - RNA, 19 nt, Homo sapiens
  misc_RNA (1)...(19): siRNA sense strand
gaaguaagccaacugauau

SEQ ID NO: 1803388 - RNA, 19 nt, Homo sapiens
  misc_RNA (1)...(19): siRNA sense strand
ggaugcauauggacucuua

SEQ ID NO: 1803389 - RNA, 19 nt, Homo sapiens
  misc_RNA (1)...(19): siRNA sense strand
ugacaaagcucgagcacuu

SEQ ID NO: 1803390 - RNA, 19 nt, Homo sapiens
  misc_RNA (1)...(19): siRNA sense strand
ccaaaguacuggaugcaua

SEQ ID NO: 1803391 - RNA, 19 nt, Homo sapiens
  misc_RNA (1)...(19): siRNA sense strand
uuaaagagcucauaagaca

SEQ ID NO: 1803392 - RNA, 19 nt, Homo sapiens
  misc_RNA (1)...(19): siRNA sense strand
gaagcaauuucgcagcaua

SEQ ID NO: 1803393 - RNA, 19 nt, Homo sapiens
  misc_RNA (1)...(19): siRNA sense strand
ccaaagagguugauucagu

SEQ ID NO: 1803394 - RNA, 19 nt, Homo sapiens
  misc_RNA (1)...(19): siRNA sense strand
gaugaugccuugauugaug

SEQ ID NO: 1803395 - RNA, 19 nt, Homo sapiens
  misc_RNA (1)...(19): siRNA sense strand
uaaggaaggugaacauaug

SEQ ID NO: 1803396 - RNA, 19 nt, Homo sapiens
  misc_RNA (1)...(19): siRNA sense strand
cgaagcaggucaucccaua

SEQ ID NO: 1803397 - RNA, 19 nt, Homo sapiens
  misc_RNA (1)...(19): siRNA sense strand
gcacuuugcugcacuaugg

SEQ ID NO: 1803398 - RNA, 19 nt, Homo sapiens
  misc_RNA (1)...(19): siRNA sense strand
gaugcuagcuaaacaguug

SEQ ID NO: 1803399 - RNA, 19 nt, Homo sapiens
  misc_RNA (1)...(19): siRNA sense strand
gugaacauaugcuaaguaa

SEQ ID NO: 1803400 - RNA, 19 nt, Homo sapiens
  misc_RNA (1)...(19): siRNA sense strand
gcaggcauuucuuggcuua

SEQ ID NO: 1803401 - RNA, 19 nt, Homo sapiens
  misc_RNA (1)...(19): siRNA sense strand
ggaaucagucuuugcauuu

SEQ ID NO: 1803402 - RNA, 19 nt, Homo sapiens
  misc_RNA (1)...(19): siRNA sense strand
gaagaaaugaguuuagaga

SEQ ID NO: 1803403 - RNA, 19 nt, Homo sapiens
  misc_RNA (1)...(19): siRNA sense strand
gaacaaacugcuuggauug

SEQ ID NO: 1803404 - RNA, 19 nt, Homo sapiens
  misc_RNA (1)...(19): siRNA sense strand
cgaacaaacugcuuggauu

SEQ ID NO: 1803405 - RNA, 19 nt, Homo sapiens
  misc_RNA (1)...(19): siRNA sense strand
caaagagguugauucaguu

SEQ ID NO: 1803406 - RNA, 19 nt, Homo sapiens
  misc_RNA (1)...(19): siRNA sense strand
cgaaugcucuuccauacaa

SEQ ID NO: 1803407 - RNA, 19 nt, Homo sapiens
  misc_RNA (1)...(19): siRNA sense strand
gcucugggcuguagaacuu

SEQ ID NO: 1803408 - RNA, 19 nt, Homo sapiens
  misc_RNA (1)...(19): siRNA sense strand
gaaaggaauuuggagguau

SEQ ID NO: 1803409 - RNA, 19 nt, Homo sapiens
  misc_RNA (1)...(19): siRNA sense strand
gaagagcccguuacuauca

SEQ ID NO: 1803410 - RNA, 19 nt, Homo sapiens
  misc_RNA (1)...(19): siRNA sense strand
caaauagugugcaggcauu

SEQ ID NO: 1803411 - RNA, 19 nt, Homo sapiens
  misc_RNA (1)...(19): siRNA sense strand
acacuggacuuuacagaaa

SEQ ID NO: 1803412 - RNA, 19 nt, Homo sapiens
  misc_RNA (1)...(19): siRNA sense strand
guucugagccuaaauggua

SEQ ID NO: 1803413 - RNA, 19 nt, Homo sapiens
  misc_RNA (1)...(19): siRNA sense strand
gaaguuaaagagcucauaa

SEQ ID NO: 1803414 - RNA, 19 nt, Homo sapiens
  misc_RNA (1)...(19): siRNA sense strand
ggaaauacucugaauagug

SEQ ID NO: 1803415 - RNA, 19 nt, Homo sapiens
  misc_RNA (1)...(19): siRNA sense strand
gucagcaucuucuaaagua

SEQ ID NO: 1803416 - RNA, 19 nt, Homo sapiens
  misc_RNA (1)...(19): siRNA sense strand
caaaagagaaucaccauua

SEQ ID NO: 1803417 - RNA, 19 nt, Homo sapiens
  misc_RNA (1)...(19): siRNA sense strand
ggaacaacaaggaaagaua

SEQ ID NO: 1803418 - RNA, 19 nt, Homo sapiens
  misc_RNA (1)...(19): siRNA sense strand
ccuaaaugguaaagaguua

SEQ ID NO: 1803419 - RNA, 19 nt, Homo sapiens
  misc_RNA (1)...(19): siRNA sense strand
gaaauggccuuuugauaga

SEQ ID NO: 1803420 - RNA, 19 nt, Homo sapiens
  misc_RNA (1)...(19): siRNA sense strand
gaaucgaucucccuaacga

SEQ ID NO: 1803421 - RNA, 19 nt, Homo sapiens
  misc_RNA (1)...(19): siRNA sense strand
cagaacagguuguguacuu

SEQ ID NO: 1803422 - RNA, 19 nt, Homo sapiens
  misc_RNA (1)...(19): siRNA sense strand
guaaagaguuauugaaucg

SEQ ID NO: 1803423 - RNA, 19 nt, Homo sapiens
  misc_RNA (1)...(19): siRNA sense strand
gggaagcucugccuugaau

SEQ ID NO: 1803424 - RNA, 19 nt, Homo sapiens
  misc_RNA (1)...(19): siRNA sense strand
gaagggaaagcgaaguuaa

SEQ ID NO: 1803425 - RNA, 19 nt, Homo sapiens
  misc_RNA (1)...(19): siRNA sense strand
gcuccaaccugacauugaa

SEQ ID NO: 1803426 - RNA, 19 nt, Homo sapiens
  misc_RNA (1)...(19): siRNA sense strand
cauuaaagauugacccauu

SEQ ID NO: 1803427 - RNA, 19 nt, Homo sapiens
  misc_RNA (1)...(19): siRNA sense strand
ggaagaagaaaugaguuua

SEQ ID NO: 1803428 - RNA, 19 nt, Homo sapiens
  misc_RNA (1)...(19): siRNA sense strand
gagggaagcucugccuuga

SEQ ID NO: 1803429 - RNA, 19 nt, Homo sapiens
  misc_RNA (1)...(19): siRNA sense strand
gaagaaaugguagaauuga

SEQ ID NO: 1803430 - RNA, 19 nt, Homo sapiens
  misc_RNA (1)...(19): siRNA sense strand
acagacaacugauaauaga

SEQ ID NO: 1803431 - RNA, 19 nt, Homo sapiens
  misc_RNA (1)...(19): siRNA sense strand
gcaacgcaaaguaauguua

SEQ ID NO: 1803432 - RNA, 19 nt, Homo sapiens
  misc_RNA (1)...(19): siRNA sense strand
gguaaagaguuauugaauc

SEQ ID NO: 1803433 - RNA, 19 nt, Homo sapiens
  misc_RNA (1)...(19): siRNA sense strand
gaaguuugcguguuucuga

SEQ ID NO: 1803434 - RNA, 19 nt, Homo sapiens
  misc_RNA (1)...(19): siRNA sense strand
gaggaucuguuccauuguu

SEQ ID NO: 1803435 - RNA, 19 nt, Homo sapiens
  misc_RNA (1)...(19): siRNA sense strand
ccgaggaucuguuccauug

SEQ ID NO: 1803436 - RNA, 19 nt, Homo sapiens
  misc_RNA (1)...(19): siRNA sense strand
aaacagaacagguugugua

SEQ ID NO: 1803437 - RNA, 19 nt, Homo sapiens
  misc_RNA (1)...(19): siRNA sense strand
ucuccaaacccauuuauua

SEQ ID NO: 1803438 - RNA, 19 nt, Homo sapiens
  misc_RNA (1)...(19): siRNA sense strand
ucagaaacgucgaaagguu

SEQ ID NO: 1803439 - RNA, 19 nt, Homo sapiens
  misc_RNA (1)...(19): siRNA sense strand
guucugcgguuaaaucuug

SEQ ID NO: 1803440 - RNA, 19 nt, Homo sapiens
  misc_RNA (1)...(19): siRNA sense strand
gcaagaggccauugauguu

SEQ ID NO: 1803441 - RNA, 19 nt, Homo sapiens
  misc_RNA (1)...(19): siRNA sense strand
guaaagcuuuccagaguca

SEQ ID NO: 1803442 - RNA, 19 nt, Homo sapiens
  misc_RNA (1)...(19): siRNA sense strand
gaaucagucuuugcauuug

SEQ ID NO: 1803443 - RNA, 19 nt, Homo sapiens
  misc_RNA (1)...(19): siRNA sense strand
guucaaacgucaccuguuc

SEQ ID NO: 1803444 - RNA, 19 nt, Homo sapiens
  misc_RNA (1)...(19): siRNA sense strand
gaaucggacuauaacuauu

SEQ ID NO: 1803445 - RNA, 19 nt, Homo sapiens
  misc_RNA (1)...(19): siRNA sense strand
caagaacagacaacugaua

SEQ ID NO: 1803446 - RNA, 19 nt, Homo sapiens
  misc_RNA (1)...(19): siRNA sense strand
uaucagggauguugcaguu

SEQ ID NO: 1803447 - RNA, 19 nt, Homo sapiens
  misc_RNA (1)...(19): siRNA sense strand
cagcauagcuuuuaagaau

SEQ ID NO: 1803448 - RNA, 19 nt, Homo sapiens
  misc_RNA (1)...(19): siRNA sense strand
cuaaagagcaugugugaga

SEQ ID NO: 1803449 - RNA, 19 nt, Homo sapiens
  misc_RNA (1)...(19): siRNA sense strand
guuauuacgucuuaugugu

SEQ ID NO: 1803450 - RNA, 19 nt, Homo sapiens
  misc_RNA (1)...(19): siRNA sense strand
aagaagagcccguuacuau

SEQ ID NO: 1803451 - RNA, 19 nt, Homo sapiens
  misc_RNA (1)...(19): siRNA sense strand
gaagauaaaauguggguua

SEQ ID NO: 1803452 - RNA, 19 nt, Homo sapiens
  misc_RNA (1)...(19): siRNA sense strand
gaagagaggcaaaacauuu

SEQ ID NO: 1803453 - RNA, 19 nt, Homo sapiens
  misc_RNA (1)...(19): siRNA sense strand
uaagauauaugcaggaacu

SEQ ID NO: 1803454 - RNA, 19 nt, Homo sapiens
  misc_RNA (1)...(19): siRNA sense strand
gcucagcuaucuguucaaa

SEQ ID NO: 1803455 - RNA, 19 nt, Homo sapiens
  misc_RNA (1)...(19): siRNA sense strand
ccagucaccuacaauauca

SEQ ID NO: 1803456 - RNA, 19 nt, Homo sapiens
  misc_RNA (1)...(19): siRNA sense strand
agaaguaagccaacugaua

SEQ ID NO: 1803457 - RNA, 19 nt, Homo sapiens
  misc_RNA (1)...(19): siRNA sense strand
gagcaugugugagaauuuc

SEQ ID NO: 1803458 - RNA, 19 nt, Homo sapiens
  misc_RNA (1)...(19): siRNA sense strand
gaaggugaacauaugcuaa

SEQ ID NO: 1803459 - RNA, 19 nt, Homo sapiens
  misc_RNA (1)...(19): siRNA sense strand
gaaguucuccaaacccauu

SEQ ID NO: 1803460 - RNA, 19 nt, Homo sapiens
  misc_RNA (1)...(19): siRNA sense strand
gagaaucaccauuaaagau

SEQ ID NO: 1803461 - RNA, 19 nt, Homo sapiens
  misc_RNA (1)...(19): siRNA sense strand
gcauugccaucaucaacaa

SEQ ID NO: 1803462 - RNA, 19 nt, Homo sapiens
  misc_RNA (1)...(19): siRNA sense strand
gaagaagaaaugaguuuag

SEQ ID NO: 1803463 - RNA, 19 nt, Homo sapiens
  misc_RNA (1)...(19): siRNA sense strand
ggacuauaacuauugcuuu

SEQ ID NO: 1803464 - RNA, 19 nt, Homo sapiens
  misc_RNA (1)...(19): siRNA sense strand
gcagggcagucacaaguca

SEQ ID NO: 1803465 - RNA, 19 nt, Homo sapiens
  misc_RNA (1)...(19): siRNA sense strand
gaccacagcaugcuccuuu

SEQ ID NO: 1803466 - RNA, 19 nt, Homo sapiens
  misc_RNA (1)...(19): siRNA sense strand
ggaaauaagggagcaguug

SEQ ID NO: 1803467 - RNA, 19 nt, Homo sapiens
  misc_RNA (1)...(19): siRNA sense strand
caaagaugccagaguggua

SEQ ID NO: 1803468 - RNA, 19 nt, Homo sapiens
  misc_RNA (1)...(19): siRNA sense strand
gaaagggaagucaaaguca

SEQ ID NO: 1803469 - RNA, 19 nt, Homo sapiens
  misc_RNA (1)...(19): siRNA sense strand
uggaaucucugauggcaaa

SEQ ID NO: 1803470 - RNA, 19 nt, Homo sapiens
  misc_RNA (1)...(19): siRNA sense strand
agaaaggaauuuggaggua

SEQ ID NO: 1803471 - RNA, 19 nt, Homo sapiens
  misc_RNA (1)...(19): siRNA sense strand
gagccuaaaugguaaagag

SEQ ID NO: 1803472 - RNA, 19 nt, Homo sapiens
  misc_RNA (1)...(19): siRNA sense strand
ccggaucuaucacaaauug

SEQ ID NO: 1803473 - RNA, 19 nt, Homo sapiens
  misc_RNA (1)...(19): siRNA sense strand
ccaaacccauuuauuacug

SEQ ID NO: 1803474 - RNA, 19 nt, Homo sapiens
  misc_RNA (1)...(19): siRNA sense strand
guacaaaucccucacuuua

SEQ ID NO: 1803475 - RNA, 19 nt, Homo sapiens
  misc_RNA (1)...(19): siRNA sense strand
gaaaugaagugcuccaguu

SEQ ID NO: 1803476 - RNA, 19 nt, Homo sapiens
  misc_RNA (1)...(19): siRNA sense strand
gagaaguggugaagacuga

SEQ ID NO: 1803477 - RNA, 19 nt, Homo sapiens
  misc_RNA (1)...(19): siRNA sense strand
ugaaagaauugaugaguuc

SEQ ID NO: 1803478 - RNA, 19 nt, Homo sapiens
  misc_RNA (1)...(19): siRNA sense strand
ucaaugacaugaagacaga

SEQ ID NO: 1803479 - RNA, 19 nt, Homo sapiens
  misc_RNA (1)...(19): siRNA sense strand
ccagagaccuccucaaguc

SEQ ID NO: 1803480 - RNA, 19 nt, Homo sapiens
  misc_RNA (1)...(19): siRNA sense strand
uggaagggcugcugaaaga

SEQ ID NO: 1803481 - RNA, 19 nt, Homo sapiens
  misc_RNA (1)...(19): siRNA sense strand
ugaaggagcuaaagcaagu

SEQ ID NO: 1803482 - RNA, 19 nt, Homo sapiens
  misc_RNA (1)...(19): siRNA sense strand
agaugaagguggagcguua

SEQ ID NO: 1803483 - RNA, 19 nt, Homo sapiens
  misc_RNA (1)...(19): siRNA sense strand
aggaagaucucagaaauga

SEQ ID NO: 1803484 - RNA, 19 nt, Homo sapiens
  misc_RNA (1)...(19): siRNA sense strand
caaagaugcuacagcugaa

SEQ ID NO: 1803485 - RNA, 19 nt, Homo sapiens
  misc_RNA (1)...(19): siRNA sense strand
ucccagagcuagaauuuga

SEQ ID NO: 1803486 - RNA, 19 nt, Homo sapiens
  misc_RNA (1)...(19): siRNA sense strand
gaagaucucagaaaugaag

SEQ ID NO: 1803487 - RNA, 19 nt, Homo sapiens
  misc_RNA (1)...(19): siRNA sense strand
acaaaucccucacuuuaag

SEQ ID NO: 1803488 - RNA, 19 nt, Homo sapiens
  misc_RNA (1)...(19): siRNA sense strand
ccucagauaugaccagaga

SEQ ID NO: 1803489 - RNA, 19 nt, Homo sapiens
  misc_RNA (1)...(19): siRNA sense strand
acagaugccucagauauga

SEQ ID NO: 1803490 - RNA, 19 nt, Homo sapiens
  misc_RNA (1)...(19): siRNA sense strand
agaggaagaucucagaaau

SEQ ID NO: 1803491 - RNA, 19 nt, Homo sapiens
  misc_RNA (1)...(19): siRNA sense strand
ggaaaucccagagcuagaa

SEQ ID NO: 1803492 - RNA, 19 nt, Homo sapiens
  misc_RNA (1)...(19): siRNA sense strand
caugaaggcccacuuuauu

SEQ ID NO: 1803493 - RNA, 19 nt, Homo sapiens
  misc_RNA (1)...(19): siRNA sense strand
gaacagagaaguggugaag

SEQ ID NO: 1803494 - RNA, 19 nt, Homo sapiens
  misc_RNA (1)...(19): siRNA sense strand
uaacaugaaggcccacuuu

SEQ ID NO: 1803495 - RNA, 19 nt, Homo sapiens
  misc_RNA (1)...(19): siRNA sense strand
ucacagaugccucagauau

SEQ ID NO: 1803496 - RNA, 19 nt, Homo sapiens
  misc_RNA (1)...(19): siRNA sense strand
gaucaucgaagguaacaug

SEQ ID NO: 1803497 - RNA, 19 nt, Homo sapiens
  misc_RNA (1)...(19): siRNA sense strand
caacaugaagcuaguacaa

SEQ ID NO: 1803498 - RNA, 19 nt, Homo sapiens
  misc_RNA (1)...(19): siRNA sense strand
ggacaugaacagagaagug

SEQ ID NO: 1803499 - RNA, 19 nt, Homo sapiens
  misc_RNA (1)...(19): siRNA sense strand
acaugaagcuaguacaaau

SEQ ID NO: 1803500 - RNA, 19 nt, Homo sapiens
  misc_RNA (1)...(19): siRNA sense strand
gcacaaacugcccagaaug

SEQ ID NO: 1803501 - RNA, 19 nt, Homo sapiens
  misc_RNA (1)...(19): siRNA sense strand
gcacgaagggcaaacaaag

SEQ ID NO: 1803502 - RNA, 19 nt, Homo sapiens
  misc_RNA (1)...(19): siRNA sense strand
gaaaucuggaggagcagua

SEQ ID NO: 1803503 - RNA, 19 nt, Homo sapiens
  misc_RNA (1)...(19): siRNA sense strand
ugaagaugauccugagaug

SEQ ID NO: 1803504 - RNA, 19 nt, Homo sapiens
  misc_RNA (1)...(19): siRNA sense strand
gaccagaucaucgaaggua

SEQ ID NO: 1803505 - RNA, 19 nt, Homo sapiens
  misc_RNA (1)...(19): siRNA sense strand
gccagaagauggaccagau

SEQ ID NO: 1803506 - RNA, 19 nt, Homo sapiens
  misc_RNA (1)...(19): siRNA sense strand
uuaaggagguuaucaucau

SEQ ID NO: 1803507 - RNA, 19 nt, Homo sapiens
  misc_RNA (1)...(19): siRNA sense strand
gaagaugauccugagauga

SEQ ID NO: 1803508 - RNA, 19 nt, Homo sapiens
  misc_RNA (1)...(19): siRNA sense strand
caucgaagguaacaugaag

SEQ ID NO: 1803509 - RNA, 19 nt, Homo sapiens
  misc_RNA (1)...(19): siRNA sense strand
ggauugaucacccgugcua

SEQ ID NO: 1803510 - RNA, 19 nt, Homo sapiens
  misc_RNA (1)...(19): siRNA sense strand
gaagaggaagaucucagaa

SEQ ID NO: 1803511 - RNA, 19 nt, Homo sapiens
  misc_RNA (1)...(19): siRNA sense strand
cgcuaugcaugaacuguua

SEQ ID NO: 1803512 - RNA, 19 nt, Homo sapiens
  misc_RNA (1)...(19): siRNA sense strand
acaguuacuugcagaaugu

SEQ ID NO: 1803513 - RNA, 19 nt, Homo sapiens
  misc_RNA (1)...(19): siRNA sense strand
uaaggagguuaucaucaug

SEQ ID NO: 1803514 - RNA, 19 nt, Homo sapiens
  misc_RNA (1)...(19): siRNA sense strand
gaccacuguugaaggauug

SEQ ID NO: 1803515 - RNA, 19 nt, Homo sapiens
  misc_RNA (1)...(19): siRNA sense strand
gaaggcccacuuuauuaug

SEQ ID NO: 1803516 - RNA, 19 nt, Homo sapiens
  misc_RNA (1)...(19): siRNA sense strand
gaagaagcaccagcagaga

SEQ ID NO: 1803517 - RNA, 19 nt, Homo sapiens
  misc_RNA (1)...(19): siRNA sense strand
cugaaagaauugaugaguu

SEQ ID NO: 1803518 - RNA, 19 nt, Homo sapiens
  misc_RNA (1)...(19): siRNA sense strand
gaucacccgugcuaucucu

SEQ ID NO: 1803519 - RNA, 19 nt, Homo sapiens
  misc_RNA (1)...(19): siRNA sense strand
ugcuacagcugaaagaauu

SEQ ID NO: 1803520 - RNA, 19 nt, Homo sapiens
  misc_RNA (1)...(19): siRNA sense strand
ggagagacuacaggaguuu

SEQ ID NO: 1803521 - RNA, 19 nt, Homo sapiens
  misc_RNA (1)...(19): siRNA sense strand
gaccagagaccuccucaag

SEQ ID NO: 1803522 - RNA, 19 nt, Homo sapiens
  misc_RNA (1)...(19): siRNA sense strand
cagcagagaagccagaaga

SEQ ID NO: 1803523 - RNA, 19 nt, Homo sapiens
  misc_RNA (1)...(19): siRNA sense strand
uggaggacaugaacagaga

SEQ ID NO: 1803524 - RNA, 19 nt, Homo sapiens
  misc_RNA (1)...(19): siRNA sense strand
guuacaagcgcaccuuuga

SEQ ID NO: 1803525 - RNA, 19 nt, Homo sapiens
  misc_RNA (1)...(19): siRNA sense strand
ggaccaaugaggugaaauc

SEQ ID NO: 1803526 - RNA, 19 nt, Homo sapiens
  misc_RNA (1)...(19): siRNA sense strand
gaggaagaucucagaaaug

SEQ ID NO: 1803527 - RNA, 19 nt, Homo sapiens
  misc_RNA (1)...(19): siRNA sense strand
ugaccacuguugaaggauu

SEQ ID NO: 1803528 - RNA, 19 nt, Homo sapiens
  misc_RNA (1)...(19): siRNA sense strand
caugaacuguuacugcaau

SEQ ID NO: 1803529 - RNA, 19 nt, Homo sapiens
  misc_RNA (1)...(19): siRNA sense strand
gaagggcugcugaaagaca

SEQ ID NO: 1803530 - RNA, 19 nt, Homo sapiens
  misc_RNA (1)...(19): siRNA sense strand
gaagacagagggcuaugag

SEQ ID NO: 1803531 - RNA, 19 nt, Homo sapiens
  misc_RNA (1)...(19): siRNA sense strand
aagaugauccugagaugaa

SEQ ID NO: 1803532 - RNA, 19 nt, Homo sapiens
  misc_RNA (1)...(19): siRNA sense strand
gaauguguaugcgccugaa

SEQ ID NO: 1803533 - RNA, 19 nt, Homo sapiens
  misc_RNA (1)...(19): siRNA sense strand
augaaggcccacuuuauua

SEQ ID NO: 1803534 - RNA, 19 nt, Homo sapiens
  misc_RNA (1)...(19): siRNA sense strand
gaagguggagcguuacaag

SEQ ID NO: 1803535 - RNA, 19 nt, Homo sapiens
  misc_RNA (1)...(19): siRNA sense strand
uguaugcgccugaagauga

SEQ ID NO: 1803536 - RNA, 19 nt, Homo sapiens
  misc_RNA (1)...(19): siRNA sense strand
ugaaggcccacuuuauuau

SEQ ID NO: 1803537 - RNA, 19 nt, Homo sapiens
  misc_RNA (1)...(19): siRNA sense strand
gcaaguagccuccccuuuc

SEQ ID NO: 1803538 - RNA, 19 nt, Homo sapiens
  misc_RNA (1)...(19): siRNA sense strand
gaaacaguuacuugcagaa

SEQ ID NO: 1803539 - RNA, 19 nt, Homo sapiens
  misc_RNA (1)...(19): siRNA sense strand
caaguucaccacacuggaa

SEQ ID NO: 1803540 - RNA, 19 nt, Homo sapiens
  misc_RNA (1)...(19): siRNA sense strand
uacaaaucccucacuuuaa

SEQ ID NO: 1803541 - RNA, 19 nt, Homo sapiens
  misc_RNA (1)...(19): siRNA sense strand
aaggagcucugaccacugu

SEQ ID NO: 1803542 - RNA, 19 nt, Homo sapiens
  misc_RNA (1)...(19): siRNA sense strand
gagagacuacaggaguuua

SEQ ID NO: 1803543 - RNA, 19 nt, Homo sapiens
  misc_RNA (1)...(19): siRNA sense strand
acagagaaguggugaagac

SEQ ID NO: 1803544 - RNA, 19 nt, Homo sapiens
  misc_RNA (1)...(19): siRNA sense strand
cggagagacuacaggaguu

SEQ ID NO: 1803545 - RNA, 19 nt, Homo sapiens
  misc_RNA (1)...(19): siRNA sense strand
ggacagacggagagacuac

SEQ ID NO: 1803546 - RNA, 19 nt, Homo sapiens
  misc_RNA (1)...(19): siRNA sense strand
ugaaauuccugccuuuagc

SEQ ID NO: 1803547 - RNA, 19 nt, Homo sapiens
  misc_RNA (1)...(19): siRNA sense strand
cacaugcuccucagaaaga

SEQ ID NO: 1803548 - RNA, 19 nt, Homo sapiens
  misc_RNA (1)...(19): siRNA sense strand
ugaaagacauccgggaacu

SEQ ID NO: 1803549 - RNA, 19 nt, Homo sapiens
  misc_RNA (1)...(19): siRNA sense strand
ucugaccacuguugaagga

SEQ ID NO: 1803550 - RNA, 19 nt, Homo sapiens
  misc_RNA (1)...(19): siRNA sense strand
gagaucgagucgcuaugca

SEQ ID NO: 1803551 - RNA, 19 nt, Homo sapiens
  misc_RNA (1)...(19): siRNA sense strand
cagcacaaacugcccagaa

SEQ ID NO: 1803552 - RNA, 19 nt, Homo sapiens
  misc_RNA (1)...(19): siRNA sense strand
cagcugaaagaauugauga

SEQ ID NO: 1803553 - RNA, 19 nt, Homo sapiens
  misc_RNA (1)...(19): siRNA sense strand
caaguagccuccccuuuca

SEQ ID NO: 1803554 - RNA, 19 nt, Homo sapiens
  misc_RNA (1)...(19): siRNA sense strand
guaugcgccugaagaugau

SEQ ID NO: 1803555 - RNA, 19 nt, Homo sapiens
  misc_RNA (1)...(19): siRNA sense strand
ggauuccugagcuagauuu

SEQ ID NO: 1803556 - RNA, 19 nt, Homo sapiens
  misc_RNA (1)...(19): siRNA sense strand
gaaaucccagagcuagaau

SEQ ID NO: 1803557 - RNA, 19 nt, Homo sapiens
  misc_RNA (1)...(19): siRNA sense strand
aauaauagugagcuccuuu

SEQ ID NO: 1803558 - RNA, 19 nt, Homo sapiens
  misc_RNA (1)...(19): siRNA sense strand
acaugaaggcccacuuuau

SEQ ID NO: 1803559 - RNA, 19 nt, Homo sapiens
  misc_RNA (1)...(19): siRNA sense strand
aaucccagagcuagaauuu

SEQ ID NO: 1803560 - RNA, 19 nt, Homo sapiens
  misc_RNA (1)...(19): siRNA sense strand
caaacugcccagaaugcaa

SEQ ID NO: 1803561 - RNA, 19 nt, Homo sapiens
  misc_RNA (1)...(19): siRNA sense strand
cccacaugcuccucagaaa

SEQ ID NO: 1803562 - RNA, 19 nt, Homo sapiens
  misc_RNA (1)...(19): siRNA sense strand
gaaggagcuaaagcaagua

SEQ ID NO: 1803563 - RNA, 19 nt, Homo sapiens
  misc_RNA (1)...(19): siRNA sense strand
gaaagaauugaugaguuca

SEQ ID NO: 1803564 - RNA, 19 nt, Homo sapiens
  misc_RNA (1)...(19): siRNA sense strand
agaccaacaugaagcuagu

SEQ ID NO: 1803565 - RNA, 19 nt, Homo sapiens
  misc_RNA (1)...(19): siRNA sense strand
caagcgcaccuuugaccaa

SEQ ID NO: 1803566 - RNA, 19 nt, Homo sapiens
  misc_RNA (1)...(19): siRNA sense strand
ucagggcucuggaggacau

SEQ ID NO: 1803567 - RNA, 19 nt, Homo sapiens
  misc_RNA (1)...(19): siRNA sense strand
uacaggaguuuagccagaa

SEQ ID NO: 1803568 - RNA, 19 nt, Homo sapiens
  misc_RNA (1)...(19): siRNA sense strand
agaagaggaagaucucaga

SEQ ID NO: 1803569 - RNA, 19 nt, Homo sapiens
  misc_RNA (1)...(19): siRNA sense strand
aacaguuacuugcagaaug

SEQ ID NO: 1803570 - RNA, 19 nt, Homo sapiens
  misc_RNA (1)...(19): siRNA sense strand
gaauuugaacugggaaugg

SEQ ID NO: 1803571 - RNA, 19 nt, Homo sapiens
  misc_RNA (1)...(19): siRNA sense strand
uaguacaaaucccucacuu

SEQ ID NO: 1803572 - RNA, 19 nt, Homo sapiens
  misc_RNA (1)...(19): siRNA sense strand
aagaggaagaucucagaaa

SEQ ID NO: 1803573 - RNA, 19 nt, Homo sapiens
  misc_RNA (1)...(19): siRNA sense strand
ggaacaacacggagaucca

SEQ ID NO: 1803574 - RNA, 19 nt, Homo sapiens
  misc_RNA (1)...(19): siRNA sense strand
gcacucagcucguguaugu

SEQ ID NO: 1803575 - RNA, 19 nt, Homo sapiens
  misc_RNA (1)...(19): siRNA sense strand
gaacgaaugucuaaacaag

SEQ ID NO: 1803576 - RNA, 19 nt, Homo sapiens
  misc_RNA (1)...(19): siRNA sense strand
gcaauacuguuccuggaua

SEQ ID NO: 1803577 - RNA, 19 nt, Homo sapiens
  misc_RNA (1)...(19): siRNA sense strand
uaucacagcuucaauaaga

SEQ ID NO: 1803578 - RNA, 19 nt, Homo sapiens
  misc_RNA (1)...(19): siRNA sense strand
gaacuugccuguuuauuuu

SEQ ID NO: 1803579 - RNA, 19 nt, Homo sapiens
  misc_RNA (1)...(19): siRNA sense strand
gaaggaagauuucgauguc

SEQ ID NO: 1803580 - RNA, 19 nt, Homo sapiens
  misc_RNA (1)...(19): siRNA sense strand
ccagaacucuuggaaauaa

SEQ ID NO: 1803581 - RNA, 19 nt, Homo sapiens
  misc_RNA (1)...(19): siRNA sense strand
guacaaggauuagaagaaa

SEQ ID NO: 1803582 - RNA, 19 nt, Homo sapiens
  misc_RNA (1)...(19): siRNA sense strand
caacaaggauuaugcagau

SEQ ID NO: 1803583 - RNA, 19 nt, Homo sapiens
  misc_RNA (1)...(19): siRNA sense strand
gagaugaccuggagcucua

SEQ ID NO: 1803584 - RNA, 19 nt, Homo sapiens
  misc_RNA (1)...(19): siRNA sense strand
ggaacuugccuguuuauuu

SEQ ID NO: 1803585 - RNA, 19 nt, Homo sapiens
  misc_RNA (1)...(19): siRNA sense strand
agaaauagcgggauccuua

SEQ ID NO: 1803586 - RNA, 19 nt, Homo sapiens
  misc_RNA (1)...(19): siRNA sense strand
ccacagaauuuaaucaguu

SEQ ID NO: 1803587 - RNA, 19 nt, Homo sapiens
  misc_RNA (1)...(19): siRNA sense strand
ggagagaauugccacagaa

SEQ ID NO: 1803588 - RNA, 19 nt, Homo sapiens
  misc_RNA (1)...(19): siRNA sense strand
gaagagguucugagccuua

SEQ ID NO: 1803589 - RNA, 19 nt, Homo sapiens
  misc_RNA (1)...(19): siRNA sense strand
gaaaugauuggcuuuaaga

SEQ ID NO: 1803590 - RNA, 19 nt, Homo sapiens
  misc_RNA (1)...(19): siRNA sense strand
acuggaaggucuccuauua

SEQ ID NO: 1803591 - RNA, 19 nt, Homo sapiens
  misc_RNA (1)...(19): siRNA sense strand
uaaagaaaccucugcacua

SEQ ID NO: 1803592 - RNA, 19 nt, Homo sapiens
  misc_RNA (1)...(19): siRNA sense strand
ggacuuacgccacgauuga

SEQ ID NO: 1803593 - RNA, 19 nt, Homo sapiens
  misc_RNA (1)...(19): siRNA sense strand
gcguauagcuggcauuaca

SEQ ID NO: 1803594 - RNA, 19 nt, Homo sapiens
  misc_RNA (1)...(19): siRNA sense strand
ugaaagcacucauaaguac

SEQ ID NO: 1803595 - RNA, 19 nt, Homo sapiens
  misc_RNA (1)...(19): siRNA sense strand
gcucaaacaagcaauaauu

SEQ ID NO: 1803596 - RNA, 19 nt, Homo sapiens
  misc_RNA (1)...(19): siRNA sense strand
caagaaaccuuugguaacu

SEQ ID NO: 1803597 - RNA, 19 nt, Homo sapiens
  misc_RNA (1)...(19): siRNA sense strand
agaaaccucugcacuagaa

SEQ ID NO: 1803598 - RNA, 19 nt, Homo sapiens
  misc_RNA (1)...(19): siRNA sense strand
uuacagauguccuggaaga

SEQ ID NO: 1803599 - RNA, 19 nt, Homo sapiens
  misc_RNA (1)...(19): siRNA sense strand
gcaguuggcccuagauguu

SEQ ID NO: 1803600 - RNA, 19 nt, Homo sapiens
  misc_RNA (1)...(19): siRNA sense strand
guauuaaacucugugaaga

SEQ ID NO: 1803601 - RNA, 19 nt, Homo sapiens
  misc_RNA (1)...(19): siRNA sense strand
caacagcagagcagccuua

SEQ ID NO: 1803602 - RNA, 19 nt, Homo sapiens
  misc_RNA (1)...(19): siRNA sense strand
gaacucaucaacaaggauu

SEQ ID NO: 1803603 - RNA, 19 nt, Homo sapiens
  misc_RNA (1)...(19): siRNA sense strand
gaucaagaaaccuuuggua

SEQ ID NO: 1803604 - RNA, 19 nt, Homo sapiens
  misc_RNA (1)...(19): siRNA sense strand
aaagaaaccucugcacuag

SEQ ID NO: 1803605 - RNA, 19 nt, Homo sapiens
  misc_RNA (1)...(19): siRNA sense strand
uggaagaacugagagauga

SEQ ID NO: 1803606 - RNA, 19 nt, Homo sapiens
  misc_RNA (1)...(19): siRNA sense strand
gccuucaggucauguauaa

SEQ ID NO: 1803607 - RNA, 19 nt, Homo sapiens
  misc_RNA (1)...(19): siRNA sense strand
gaaggucuccuauuagaag

SEQ ID NO: 1803608 - RNA, 19 nt, Homo sapiens
  misc_RNA (1)...(19): siRNA sense strand
gcacgauacucuguguuug

SEQ ID NO: 1803609 - RNA, 19 nt, Homo sapiens
  misc_RNA (1)...(19): siRNA sense strand
gaggugccaucuccaguga

SEQ ID NO: 1803610 - RNA, 19 nt, Homo sapiens
  misc_RNA (1)...(19): siRNA sense strand
uagacgaggugauuauaga

SEQ ID NO: 1803611 - RNA, 19 nt, Homo sapiens
  misc_RNA (1)...(19): siRNA sense strand
gugaaagcacucauaagua

SEQ ID NO: 1803612 - RNA, 19 nt, Homo sapiens
  misc_RNA (1)...(19): siRNA sense strand
gagacucacucugcagauu

SEQ ID NO: 1803613 - RNA, 19 nt, Homo sapiens
  misc_RNA (1)...(19): siRNA sense strand
uggaaggucuccuauuaga

SEQ ID NO: 1803614 - RNA, 19 nt, Homo sapiens
  misc_RNA (1)...(19): siRNA sense strand
aagcagcacuuacagaugu

SEQ ID NO: 1803615 - RNA, 19 nt, Homo sapiens
  misc_RNA (1)...(19): siRNA sense strand
uaaacucugugaagaagau

SEQ ID NO: 1803616 - RNA, 19 nt, Homo sapiens
  misc_RNA (1)...(19): siRNA sense strand
ggaaacaaagccugugguu

SEQ ID NO: 1803617 - RNA, 19 nt, Homo sapiens
  misc_RNA (1)...(19): siRNA sense strand
gagauguucuugccauuac

SEQ ID NO: 1803618 - RNA, 19 nt, Homo sapiens
  misc_RNA (1)...(19): siRNA sense strand
gaaaccgugucagauguau

SEQ ID NO: 1803619 - RNA, 19 nt, Homo sapiens
  misc_RNA (1)...(19): siRNA sense strand
accuggagcucuacuauaa

SEQ ID NO: 1803620 - RNA, 19 nt, Homo sapiens
  misc_RNA (1)...(19): siRNA sense strand
gcaaagaaccuuccaucac

SEQ ID NO: 1803621 - RNA, 19 nt, Homo sapiens
  misc_RNA (1)...(19): siRNA sense strand
ggugccaucuccagugaaa

SEQ ID NO: 1803622 - RNA, 19 nt, Homo sapiens
  misc_RNA (1)...(19): siRNA sense strand
cuucaggucauguauaaua

SEQ ID NO: 1803623 - RNA, 19 nt, Homo sapiens
  misc_RNA (1)...(19): siRNA sense strand
aaaguaagaccgcguauag

SEQ ID NO: 1803624 - RNA, 19 nt, Homo sapiens
  misc_RNA (1)...(19): siRNA sense strand
acacaaggauaagcucaaa

SEQ ID NO: 1803625 - RNA, 19 nt, Homo sapiens
  misc_RNA (1)...(19): siRNA sense strand
ccaaggagaucaagaaacc

SEQ ID NO: 1803626 - RNA, 19 nt, Homo sapiens
  misc_RNA (1)...(19): siRNA sense strand
caaguuauucggucaguug

SEQ ID NO: 1803627 - RNA, 19 nt, Homo sapiens
  misc_RNA (1)...(19): siRNA sense strand
aaccacagcuuccuccuau

SEQ ID NO: 1803628 - RNA, 19 nt, Homo sapiens
  misc_RNA (1)...(19): siRNA sense strand
gguaacugguagcaaagaa

SEQ ID NO: 1803629 - RNA, 19 nt, Homo sapiens
  misc_RNA (1)...(19): siRNA sense strand
gaucacaggcuaguguaaa

SEQ ID NO: 1803630 - RNA, 19 nt, Homo sapiens
  misc_RNA (1)...(19): siRNA sense strand
ggucauguauaauaaacuc

SEQ ID NO: 1803631 - RNA, 19 nt, Homo sapiens
  misc_RNA (1)...(19): siRNA sense strand
ugaaaugauuggcuuuaag

SEQ ID NO: 1803632 - RNA, 19 nt, Homo sapiens
  misc_RNA (1)...(19): siRNA sense strand
gagcucuacuauaaacuuc

SEQ ID NO: 1803633 - RNA, 19 nt, Homo sapiens
  misc_RNA (1)...(19): siRNA sense strand
caaaguaagaccgcguaua

SEQ ID NO: 1803634 - RNA, 19 nt, Homo sapiens
  misc_RNA (1)...(19): siRNA sense strand
gcucuacuauaaacuucuu

SEQ ID NO: 1803635 - RNA, 19 nt, Homo sapiens
  misc_RNA (1)...(19): siRNA sense strand
guacuugggagagcagaua

SEQ ID NO: 1803636 - RNA, 19 nt, Homo sapiens
  misc_RNA (1)...(19): siRNA sense strand
gauacucuguguuugucaa

SEQ ID NO: 1803637 - RNA, 19 nt, Homo sapiens
  misc_RNA (1)...(19): siRNA sense strand
gaaggaauucgggcaguug

SEQ ID NO: 1803638 - RNA, 19 nt, Homo sapiens
  misc_RNA (1)...(19): siRNA sense strand
ccacaaauaguacaaggau

SEQ ID NO: 1803639 - RNA, 19 nt, Homo sapiens
  misc_RNA (1)...(19): siRNA sense strand
gaccuggagcucuacuaua

SEQ ID NO: 1803640 - RNA, 19 nt, Homo sapiens
  misc_RNA (1)...(19): siRNA sense strand
gagagcagauacaaaaguu

SEQ ID NO: 1803641 - RNA, 19 nt, Homo sapiens
  misc_RNA (1)...(19): siRNA sense strand
gauggaagagagccugaaa

SEQ ID NO: 1803642 - RNA, 19 nt, Homo sapiens
  misc_RNA (1)...(19): siRNA sense strand
aaccgugucagauguauua

SEQ ID NO: 1803643 - RNA, 19 nt, Homo sapiens
  misc_RNA (1)...(19): siRNA sense strand
gauaagcucaaacaagcaa

SEQ ID NO: 1803644 - RNA, 19 nt, Homo sapiens
  misc_RNA (1)...(19): siRNA sense strand
ugugugcccuccuugagua

SEQ ID NO: 1803645 - RNA, 19 nt, Homo sapiens
  misc_RNA (1)...(19): siRNA sense strand
ucacucaggcccauuucua

SEQ ID NO: 1803646 - RNA, 19 nt, Homo sapiens
  misc_RNA (1)...(19): siRNA sense strand
cagcugaaaguccguauug

SEQ ID NO: 1803647 - RNA, 19 nt, Homo sapiens
  misc_RNA (1)...(19): siRNA sense strand
gaagcagcacuuacagaug

SEQ ID NO: 1803648 - RNA, 19 nt, Homo sapiens
  misc_RNA (1)...(19): siRNA sense strand
gaaauagcgggauccuuag

SEQ ID NO: 1803649 - RNA, 19 nt, Homo sapiens
  misc_RNA (1)...(19): siRNA sense strand
gagcccauccugccuauca

SEQ ID NO: 1803650 - RNA, 19 nt, Homo sapiens
  misc_RNA (1)...(19): siRNA sense strand
guuauucggucaguugaga

SEQ ID NO: 1803651 - RNA, 19 nt, Homo sapiens
  misc_RNA (1)...(19): siRNA sense strand
aggaaacacugaagaccaa

SEQ ID NO: 1803652 - RNA, 19 nt, Homo sapiens
  misc_RNA (1)...(19): siRNA sense strand
gacaaggacgaguucauga

SEQ ID NO: 1803653 - RNA, 19 nt, Homo sapiens
  misc_RNA (1)...(19): siRNA sense strand
caauacuguuccuggauau

SEQ ID NO: 1803654 - RNA, 19 nt, Homo sapiens
  misc_RNA (1)...(19): siRNA sense strand
ggaaggucuccuauuagaa

SEQ ID NO: 1803655 - RNA, 19 nt, Homo sapiens
  misc_RNA (1)...(19): siRNA sense strand
ggcaguugaugaacgaaug

SEQ ID NO: 1803656 - RNA, 19 nt, Homo sapiens
  misc_RNA (1)...(19): siRNA sense strand
caugagcgacgacgacaaa

SEQ ID NO: 1803657 - RNA, 19 nt, Homo sapiens
  misc_RNA (1)...(19): siRNA sense strand
aaacagccauggucgaacu

SEQ ID NO: 1803658 - RNA, 19 nt, Homo sapiens
  misc_RNA (1)...(19): siRNA sense strand
ccaauggccuucaggucau

SEQ ID NO: 1803659 - RNA, 19 nt, Homo sapiens
  misc_RNA (1)...(19): siRNA sense strand
uuauagagcaguuuguuga

SEQ ID NO: 1803660 - RNA, 19 nt, Homo sapiens
  misc_RNA (1)...(19): siRNA sense strand
ggacgcggaggccuuaguu

SEQ ID NO: 1803661 - RNA, 19 nt, Homo sapiens
  misc_RNA (1)...(19): siRNA sense strand
uauugaggcuuauacaagu

SEQ ID NO: 1803662 - RNA, 19 nt, Homo sapiens
  misc_RNA (1)...(19): siRNA sense strand
gaauucgggcaguugauga

SEQ ID NO: 1803663 - RNA, 19 nt, Homo sapiens
  misc_RNA (1)...(19): siRNA sense strand
ggcccuagauguugaguac

SEQ ID NO: 1803664 - RNA, 19 nt, Homo sapiens
  misc_RNA (1)...(19): siRNA sense strand
ggagcucuacuauaaacuu

SEQ ID NO: 1803665 - RNA, 19 nt, Homo sapiens
  misc_RNA (1)...(19): siRNA sense strand
acaaggauuaugcagauuu

SEQ ID NO: 1803666 - RNA, 19 nt, Homo sapiens
  misc_RNA (1)...(19): siRNA sense strand
ggucagaugagauguucuu

SEQ ID NO: 1803667 - RNA, 19 nt, Homo sapiens
  misc_RNA (1)...(19): siRNA sense strand
aguggaacuugccuguuua

SEQ ID NO: 1803668 - RNA, 19 nt, Homo sapiens
  misc_RNA (1)...(19): siRNA sense strand
uagagcaguuuguugaauc

SEQ ID NO: 1803669 - RNA, 19 nt, Homo sapiens
  misc_RNA (1)...(19): siRNA sense strand
auacauagacgaggugauu

SEQ ID NO: 1803670 - RNA, 19 nt, Homo sapiens
  misc_RNA (1)...(19): siRNA sense strand
caaagccugugguuuccau

SEQ ID NO: 1803671 - RNA, 19 nt, Homo sapiens
  misc_RNA (1)...(19): siRNA sense strand
uaagcucaaacaagcaaua

SEQ ID NO: 1803672 - RNA, 19 nt, Homo sapiens
  misc_RNA (1)...(19): siRNA sense strand
gccaaaacuugaaaugauu

SEQ ID NO: 1803673 - RNA, 19 nt, Homo sapiens
  misc_RNA (1)...(19): siRNA sense strand
uggaaauaaucaagccaaa

SEQ ID NO: 1803674 - RNA, 19 nt, Homo sapiens
  misc_RNA (1)...(19): siRNA sense strand
acgaagagcugcugaagua

SEQ ID NO: 1803675 - RNA, 19 nt, Homo sapiens
  misc_RNA (1)...(19): siRNA sense strand
ggaacaggcuggauuucuu

SEQ ID NO: 1803676 - RNA, 19 nt, Homo sapiens
  misc_RNA (1)...(19): siRNA sense strand
ggaacgggaucaugaagga

SEQ ID NO: 1803677 - RNA, 19 nt, Homo sapiens
  misc_RNA (1)...(19): siRNA sense strand
gcaacuaugugcucuucaa

SEQ ID NO: 1803678 - RNA, 19 nt, Homo sapiens
  misc_RNA (1)...(19): siRNA sense strand
ggagggcgaugccaacaga

SEQ ID NO: 1803679 - RNA, 19 nt, Homo sapiens
  misc_RNA (1)...(19): siRNA sense strand
ggaacgugguccuguacaa

SEQ ID NO: 1803680 - RNA, 19 nt, Homo sapiens
  misc_RNA (1)...(19): siRNA sense strand
ucaaagggaaguucuacua

SEQ ID NO: 1803681 - RNA, 19 nt, Homo sapiens
  misc_RNA (1)...(19): siRNA sense strand
gcaacuacgucuucaccau

SEQ ID NO: 1803682 - RNA, 19 nt, Homo sapiens
  misc_RNA (1)...(19): siRNA sense strand
ccgaggagcugacuaaugc

SEQ ID NO: 1803683 - RNA, 19 nt, Homo sapiens
  misc_RNA (1)...(19): siRNA sense strand
ggagaggccugacauugac

SEQ ID NO: 1803684 - RNA, 19 nt, Homo sapiens
  misc_RNA (1)...(19): siRNA sense strand
gaacaggcuggauuucuuc

SEQ ID NO: 1803685 - RNA, 19 nt, Homo sapiens
  misc_RNA (1)...(19): siRNA sense strand
gccagaaggucaucacaca

SEQ ID NO: 1803686 - RNA, 19 nt, Homo sapiens
  misc_RNA (1)...(19): siRNA sense strand
gaaaguggagacucagaug

SEQ ID NO: 1803687 - RNA, 19 nt, Homo sapiens
  misc_RNA (1)...(19): siRNA sense strand
ccacaacggugccaucaac

SEQ ID NO: 1803688 - RNA, 19 nt, Homo sapiens
  misc_RNA (1)...(19): siRNA sense strand
cacacaagauguuugauca

SEQ ID NO: 1803689 - RNA, 19 nt, Homo sapiens
  misc_RNA (1)...(19): siRNA sense strand
gcacgcugcucaugcucuu

SEQ ID NO: 1803690 - RNA, 19 nt, Homo sapiens
  misc_RNA (1)...(19): siRNA sense strand
ccaggaacaucuccaccaa

SEQ ID NO: 1803691 - RNA, 19 nt, Homo sapiens
  misc_RNA (1)...(19): siRNA sense strand
cacugaagcugguagcauu

SEQ ID NO: 1803692 - RNA, 19 nt, Homo sapiens
  misc_RNA (1)...(19): siRNA sense strand
gcagaaagaagaagaugag

SEQ ID NO: 1803693 - RNA, 19 nt, Homo sapiens
  misc_RNA (1)...(19): siRNA sense strand
gcaucacgcuggaggagau

SEQ ID NO: 1803694 - RNA, 19 nt, Homo sapiens
  misc_RNA (1)...(19): siRNA sense strand
gcacgcaacgccugcauca

SEQ ID NO: 1803695 - RNA, 19 nt, Homo sapiens
  misc_RNA (1)...(19): siRNA sense strand
caacgacagcuacauguuc

SEQ ID NO: 1803696 - RNA, 19 nt, Homo sapiens
  misc_RNA (1)...(19): siRNA sense strand
ggagugcagugaagacaac

SEQ ID NO: 1803697 - RNA, 19 nt, Homo sapiens
  misc_RNA (1)...(19): siRNA sense strand
ucacacacaagauguuuga

SEQ ID NO: 1803698 - RNA, 19 nt, Homo sapiens
  misc_RNA (1)...(19): siRNA sense strand
uggcggagaugauggugaa

SEQ ID NO: 1803699 - RNA, 19 nt, Homo sapiens
  misc_RNA (1)...(19): siRNA sense strand
guacugcaacuacgucuuc

SEQ ID NO: 1803700 - RNA, 19 nt, Homo sapiens
  misc_RNA (1)...(19): siRNA sense strand
caacggugccaucaacuuc

SEQ ID NO: 1803701 - RNA, 19 nt, Homo sapiens
  misc_RNA (1)...(19): siRNA sense strand
gcccugaucccuacgagaa

SEQ ID NO: 1803702 - RNA, 19 nt, Homo sapiens
  misc_RNA (1)...(19): siRNA sense strand
cgaagcagcgggagaguca

SEQ ID NO: 1803703 - RNA, 19 nt, Homo sapiens
  misc_RNA (1)...(19): siRNA sense strand
caacuucaucuauuucauc

SEQ ID NO: 1803704 - RNA, 19 nt, Homo sapiens
  misc_RNA (1)...(19): siRNA sense strand
ggagacaccgugccugaca

SEQ ID NO: 1803705 - RNA, 19 nt, Homo sapiens
  misc_RNA (1)...(19): siRNA sense strand
gccguggcgucuaugaauu

SEQ ID NO: 1803706 - RNA, 19 nt, Homo sapiens
  misc_RNA (1)...(19): siRNA sense strand
ggaaaguggagacucagau

SEQ ID NO: 1803707 - RNA, 19 nt, Homo sapiens
  misc_RNA (1)...(19): siRNA sense strand
acgagaagaucccgcaugu

SEQ ID NO: 1803708 - RNA, 19 nt, Homo sapiens
  misc_RNA (1)...(19): siRNA sense strand
gccacuaucucgaccucuu

SEQ ID NO: 1803709 - RNA, 19 nt, Homo sapiens
  misc_RNA (1)...(19): siRNA sense strand
gaggaggucagccacauca

SEQ ID NO: 1803710 - RNA, 19 nt, Homo sapiens
  misc_RNA (1)...(19): siRNA sense strand
ggaacaacaaccugaccuu

SEQ ID NO: 1803711 - RNA, 19 nt, Homo sapiens
  misc_RNA (1)...(19): siRNA sense strand
uggagaggccugacauuga

SEQ ID NO: 1803712 - RNA, 19 nt, Homo sapiens
  misc_RNA (1)...(19): siRNA sense strand
cacgugagcaugcugguaa

SEQ ID NO: 1803713 - RNA, 19 nt, Homo sapiens
  misc_RNA (1)...(19): siRNA sense strand
guggagacccuuucuugga

SEQ ID NO: 1803714 - RNA, 19 nt, Homo sapiens
  misc_RNA (1)...(19): siRNA sense strand
ucacucugcugcuggauac

SEQ ID NO: 1803715 - RNA, 19 nt, Homo sapiens
  misc_RNA (1)...(19): siRNA sense strand
ccuggaugcugcuguacuu

SEQ ID NO: 1803716 - RNA, 19 nt, Homo sapiens
  misc_RNA (1)...(19): siRNA sense strand
cccaagagcucaccauucc

SEQ ID NO: 1803717 - RNA, 19 nt, Homo sapiens
  misc_RNA (1)...(19): siRNA sense strand
cauggacgcccacucauuc

SEQ ID NO: 1803718 - RNA, 19 nt, Homo sapiens
  misc_RNA (1)...(19): siRNA sense strand
cgucuucaccaucguguuu

SEQ ID NO: 1803719 - RNA, 19 nt, Homo sapiens
  misc_RNA (1)...(19): siRNA sense strand
ggaugcugcuguacuucau

SEQ ID NO: 1803720 - RNA, 19 nt, Homo sapiens
  misc_RNA (1)...(19): siRNA sense strand
aaagggaaguucuacuacu

SEQ ID NO: 1803721 - RNA, 19 nt, Homo sapiens
  misc_RNA (1)...(19): siRNA sense strand
gccaagauccuggguguuc

SEQ ID NO: 1803722 - RNA, 19 nt, Homo sapiens
  misc_RNA (1)...(19): siRNA sense strand
agacgucgguccacuucga

SEQ ID NO: 1803723 - RNA, 19 nt, Homo sapiens
  misc_RNA (1)...(19): siRNA sense strand
gcacgugagcaugcuggua

SEQ ID NO: 1803724 - RNA, 19 nt, Homo sapiens
  misc_RNA (1)...(19): siRNA sense strand
ugacuaaugcucuggagau

SEQ ID NO: 1803725 - RNA, 19 nt, Homo sapiens
  misc_RNA (1)...(19): siRNA sense strand
cugaagagcugcccguacu

SEQ ID NO: 1803726 - RNA, 19 nt, Homo sapiens
  misc_RNA (1)...(19): siRNA sense strand
caccaccacuaccauuuca

SEQ ID NO: 1803727 - RNA, 19 nt, Homo sapiens
  misc_RNA (1)...(19): siRNA sense strand
gagacaacggcaugcagaa

SEQ ID NO: 1803728 - RNA, 19 nt, Homo sapiens
  misc_RNA (1)...(19): siRNA sense strand
caguggagacccuuucuug

SEQ ID NO: 1803729 - RNA, 19 nt, Homo sapiens
  misc_RNA (1)...(19): siRNA sense strand
ggaacaucguccucaucug

SEQ ID NO: 1803730 - RNA, 19 nt, Homo sapiens
  misc_RNA (1)...(19): siRNA sense strand
caagacgucgguccacuuc

SEQ ID NO: 1803731 - RNA, 19 nt, Homo sapiens
  misc_RNA (1)...(19): siRNA sense strand
ugaagaccauggacaacgu

SEQ ID NO: 1803732 - RNA, 19 nt, Homo sapiens
  misc_RNA (1)...(19): siRNA sense strand
cuaaugcucuggagaucag

SEQ ID NO: 1803733 - RNA, 19 nt, Homo sapiens
  misc_RNA (1)...(19): siRNA sense strand
gccaucaacuucgacaaca

SEQ ID NO: 1803734 - RNA, 19 nt, Homo sapiens
  misc_RNA (1)...(19): siRNA sense strand
ccacucauucuacaacuuc

SEQ ID NO: 1803735 - RNA, 19 nt, Homo sapiens
  misc_RNA (1)...(19): siRNA sense strand
gggaaccugggccuucuuu

SEQ ID NO: 1803736 - RNA, 19 nt, Homo sapiens
  misc_RNA (1)...(19): siRNA sense strand
gugcugaagcugcugaaga

SEQ ID NO: 1803737 - RNA, 19 nt, Homo sapiens
  misc_RNA (1)...(19): siRNA sense strand
aagggaaguucuacuacug

SEQ ID NO: 1803738 - RNA, 19 nt, Homo sapiens
  misc_RNA (1)...(19): siRNA sense strand
gugugcagcucuucaaagg

SEQ ID NO: 1803739 - RNA, 19 nt, Homo sapiens
  misc_RNA (1)...(19): siRNA sense strand
cgucuccaauuacaucuuc

SEQ ID NO: 1803740 - RNA, 19 nt, Homo sapiens
  misc_RNA (1)...(19): siRNA sense strand
gagcucaccauuccuggau

SEQ ID NO: 1803741 - RNA, 19 nt, Homo sapiens
  misc_RNA (1)...(19): siRNA sense strand
acaacggcaugcagaagug

SEQ ID NO: 1803742 - RNA, 19 nt, Homo sapiens
  misc_RNA (1)...(19): siRNA sense strand
gcuggacacuguggugcaa

SEQ ID NO: 1803743 - RNA, 19 nt, Homo sapiens
  misc_RNA (1)...(19): siRNA sense strand
caaagggaaguucuacuac

SEQ ID NO: 1803744 - RNA, 19 nt, Homo sapiens
  misc_RNA (1)...(19): siRNA sense strand
gggaacaucguccucaucu

SEQ ID NO: 1803745 - RNA, 19 nt, Homo sapiens
  misc_RNA (1)...(19): siRNA sense strand
gaacccguacaacaucuuc

SEQ ID NO: 1803746 - RNA, 19 nt, Homo sapiens
  misc_RNA (1)...(19): siRNA sense strand
caggcuggauuucuucauc

SEQ ID NO: 1803747 - RNA, 19 nt, Homo sapiens
  misc_RNA (1)...(19): siRNA sense strand
caucgugggcuccuucuuc

SEQ ID NO: 1803748 - RNA, 19 nt, Homo sapiens
  misc_RNA (1)...(19): siRNA sense strand
ccaugccgacugccacaua

SEQ ID NO: 1803749 - RNA, 19 nt, Homo sapiens
  misc_RNA (1)...(19): siRNA sense strand
ugcugaagcugcugaagau

SEQ ID NO: 1803750 - RNA, 19 nt, Homo sapiens
  misc_RNA (1)...(19): siRNA sense strand
gcucaucgucagcuucuuc

SEQ ID NO: 1803751 - RNA, 19 nt, Homo sapiens
  misc_RNA (1)...(19): siRNA sense strand
cagaaggucaucacacaca

SEQ ID NO: 1803752 - RNA, 19 nt, Homo sapiens
  misc_RNA (1)...(19): siRNA sense strand
cggcaacuaugugcucuuc

SEQ ID NO: 1803753 - RNA, 19 nt, Homo sapiens
  misc_RNA (1)...(19): siRNA sense strand
gcaugggcguggaguacca

SEQ ID NO: 1803754 - RNA, 19 nt, Homo sapiens
  misc_RNA (1)...(19): siRNA sense strand
cuucagccguggcaucaug

SEQ ID NO: 1803755 - RNA, 19 nt, Homo sapiens
  misc_RNA (1)...(19): siRNA sense strand
gacaacggcaugcagaagu

SEQ ID NO: 1803756 - RNA, 19 nt, Homo sapiens
  misc_RNA (1)...(19): siRNA sense strand
ugcaggagguggagaugga

SEQ ID NO: 1803757 - RNA, 19 nt, Homo sapiens
  misc_RNA (1)...(19): siRNA sense strand
aacgacagcuacauguuca

SEQ ID NO: 1803758 - RNA, 19 nt, Homo sapiens
  misc_RNA (1)...(19): siRNA sense strand
ccaacgacagcuacauguu

SEQ ID NO: 1803759 - RNA, 19 nt, Homo sapiens
  misc_RNA (1)...(19): siRNA sense strand
caacuggaacgggaucaug

SEQ ID NO: 1803760 - RNA, 19 nt, Homo sapiens
  misc_RNA (1)...(19): siRNA sense strand
gcacugaagcugguagcau

SEQ ID NO: 1803761 - RNA, 19 nt, Homo sapiens
  misc_RNA (1)...(19): siRNA sense strand
agaaggucaucacacacaa

SEQ ID NO: 1803762 - RNA, 19 nt, Homo sapiens
  misc_RNA (1)...(19): siRNA sense strand
gagaacuccagaccacaga

SEQ ID NO: 1803763 - RNA, 19 nt, Homo sapiens
  misc_RNA (1)...(19): siRNA sense strand
acuggaacgugguccugua

SEQ ID NO: 1803764 - RNA, 19 nt, Homo sapiens
  misc_RNA (1)...(19): siRNA sense strand
gacuaaugcucuggagauc

SEQ ID NO: 1803765 - RNA, 19 nt, Homo sapiens
  misc_RNA (1)...(19): siRNA sense strand
gugggcuccuucuucauga

SEQ ID NO: 1803766 - RNA, 19 nt, Homo sapiens
  misc_RNA (1)...(19): siRNA sense strand
acagugccuuugucaggaa

SEQ ID NO: 1803767 - RNA, 19 nt, Homo sapiens
  misc_RNA (1)...(19): siRNA sense strand
ucaccuucaucaucugugu

SEQ ID NO: 1803768 - RNA, 19 nt, Homo sapiens
  misc_RNA (1)...(19): siRNA sense strand
gcccuacuaugccgacuac

SEQ ID NO: 1803769 - RNA, 19 nt, Homo sapiens
  misc_RNA (1)...(19): siRNA sense strand
caucuucacggccaucuuc

SEQ ID NO: 1803770 - RNA, 19 nt, Homo sapiens
  misc_RNA (1)...(19): siRNA sense strand
ggacuuccacaagcucaga

SEQ ID NO: 1803771 - RNA, 19 nt, Homo sapiens
  misc_RNA (1)...(19): siRNA sense strand
gcacucguaagcauaccuu

SEQ ID NO: 1803772 - RNA, 19 nt, Homo sapiens
  misc_RNA (1)...(19): siRNA sense strand
caacauccuggaggccuuu

SEQ ID NO: 1803773 - RNA, 19 nt, Homo sapiens
  misc_RNA (1)...(19): siRNA sense strand
cgacagccaccgugaggau

SEQ ID NO: 1803774 - RNA, 19 nt, Homo sapiens
  misc_RNA (1)...(19): siRNA sense strand
gaagacaacuugcugauug

SEQ ID NO: 1803775 - RNA, 19 nt, Homo sapiens
  misc_RNA (1)...(19): siRNA sense strand
gaaaggaacccauauugua

SEQ ID NO: 1803776 - RNA, 19 nt, Homo sapiens
  misc_RNA (1)...(19): siRNA sense strand
gaacagagcaccagaguug

SEQ ID NO: 1803777 - RNA, 19 nt, Homo sapiens
  misc_RNA (1)...(19): siRNA sense strand
ggaagacgcuguugguaaa

SEQ ID NO: 1803778 - RNA, 19 nt, Homo sapiens
  misc_RNA (1)...(19): siRNA sense strand
caacaggcauucucgauuu

SEQ ID NO: 1803779 - RNA, 19 nt, Homo sapiens
  misc_RNA (1)...(19): siRNA sense strand
gaugagaccuauuauaugu

SEQ ID NO: 1803780 - RNA, 19 nt, Homo sapiens
  misc_RNA (1)...(19): siRNA sense strand
ggacaagccucucuuugau

SEQ ID NO: 1803781 - RNA, 19 nt, Homo sapiens
  misc_RNA (1)...(19): siRNA sense strand
agaagaagauugaugauga

SEQ ID NO: 1803782 - RNA, 19 nt, Homo sapiens
  misc_RNA (1)...(19): siRNA sense strand
gaaggaagaagaagaagaa

SEQ ID NO: 1803783 - RNA, 19 nt, Homo sapiens
  misc_RNA (1)...(19): siRNA sense strand
gaagaaacgauaccagauu

SEQ ID NO: 1803784 - RNA, 19 nt, Homo sapiens
  misc_RNA (1)...(19): siRNA sense strand
gauaccagauugaggauga

SEQ ID NO: 1803785 - RNA, 19 nt, Homo sapiens
  misc_RNA (1)...(19): siRNA sense strand
gaugaacugugaacuucua

SEQ ID NO: 1803786 - RNA, 19 nt, Homo sapiens
  misc_RNA (1)...(19): siRNA sense strand
ggagaaagcucagcagcau

SEQ ID NO: 1803787 - RNA, 19 nt, Homo sapiens
  misc_RNA (1)...(19): siRNA sense strand
gaaggcagcacccaagaaa

SEQ ID NO: 1803788 - RNA, 19 nt, Homo sapiens
  misc_RNA (1)...(19): siRNA sense strand
ugaaugagauggacuuauc

SEQ ID NO: 1803789 - RNA, 19 nt, Homo sapiens
  misc_RNA (1)...(19): siRNA sense strand
ggcgggagcuguacaagaa

SEQ ID NO: 1803790 - RNA, 19 nt, Homo sapiens
  misc_RNA (1)...(19): siRNA sense strand
gaacuucuagccacaugua

SEQ ID NO: 1803791 - RNA, 19 nt, Homo sapiens
  misc_RNA (1)...(19): siRNA sense strand
gaaccagauugcuuagaga

SEQ ID NO: 1803792 - RNA, 19 nt, Homo sapiens
  misc_RNA (1)...(19): siRNA sense strand
gaaaccuucuggcgaauuc

SEQ ID NO: 1803793 - RNA, 19 nt, Homo sapiens
  misc_RNA (1)...(19): siRNA sense strand
cggagucccugaaagauuu

SEQ ID NO: 1803794 - RNA, 19 nt, Homo sapiens
  misc_RNA (1)...(19): siRNA sense strand
uaaagucccuggagagcaa

SEQ ID NO: 1803795 - RNA, 19 nt, Homo sapiens
  misc_RNA (1)...(19): siRNA sense strand
gcuuaguccuuucaaauga

SEQ ID NO: 1803796 - RNA, 19 nt, Homo sapiens
  misc_RNA (1)...(19): siRNA sense strand
gcucugaguuccuggagaa

SEQ ID NO: 1803797 - RNA, 19 nt, Homo sapiens
  misc_RNA (1)...(19): siRNA sense strand
caggguagcuuaguccuuu

SEQ ID NO: 1803798 - RNA, 19 nt, Homo sapiens
  misc_RNA (1)...(19): siRNA sense strand
caaaggaaaggaacccaua

SEQ ID NO: 1803799 - RNA, 19 nt, Homo sapiens
  misc_RNA (1)...(19): siRNA sense strand
ucaaucgucugcuuaguga

SEQ ID NO: 1803800 - RNA, 19 nt, Homo sapiens
  misc_RNA (1)...(19): siRNA sense strand
gaacuauuccuggcacuuu

SEQ ID NO: 1803801 - RNA, 19 nt, Homo sapiens
  misc_RNA (1)...(19): siRNA sense strand
ggaaccagauugcuuagag

SEQ ID NO: 1803802 - RNA, 19 nt, Homo sapiens
  misc_RNA (1)...(19): siRNA sense strand
ggccuuggcuuucuucaug

SEQ ID NO: 1803803 - RNA, 19 nt, Homo sapiens
  misc_RNA (1)...(19): siRNA sense strand
caaaggccuucacaaccua

SEQ ID NO: 1803804 - RNA, 19 nt, Homo sapiens
  misc_RNA (1)...(19): siRNA sense strand
ggaaaggaacccauauugu

SEQ ID NO: 1803805 - RNA, 19 nt, Homo sapiens
  misc_RNA (1)...(19): siRNA sense strand
aggaagaucuggaagaaga

SEQ ID NO: 1803806 - RNA, 19 nt, Homo sapiens
  misc_RNA (1)...(19): siRNA sense strand
gaaccucaccaacuacuau

SEQ ID NO: 1803807 - RNA, 19 nt, Homo sapiens
  misc_RNA (1)...(19): siRNA sense strand
caacuacuaugagaugaug

SEQ ID NO: 1803808 - RNA, 19 nt, Homo sapiens
  misc_RNA (1)...(19): siRNA sense strand
caaccagccuugcucuguu

SEQ ID NO: 1803809 - RNA, 19 nt, Homo sapiens
  misc_RNA (1)...(19): siRNA sense strand
agccagagcugcagccuaa

SEQ ID NO: 1803810 - RNA, 19 nt, Homo sapiens
  misc_RNA (1)...(19): siRNA sense strand
gaaacgcuuugcauguuca

SEQ ID NO: 1803811 - RNA, 19 nt, Homo sapiens
  misc_RNA (1)...(19): siRNA sense strand
ggaagaagaagaagaaggu

SEQ ID NO: 1803812 - RNA, 19 nt, Homo sapiens
  misc_RNA (1)...(19): siRNA sense strand
gagagcagccgcaucauca

SEQ ID NO: 1803813 - RNA, 19 nt, Homo sapiens
  misc_RNA (1)...(19): siRNA sense strand
gauugucucccuuauguuu

SEQ ID NO: 1803814 - RNA, 19 nt, Homo sapiens
  misc_RNA (1)...(19): siRNA sense strand
agacauuucuccagaggaa

SEQ ID NO: 1803815 - RNA, 19 nt, Homo sapiens
  misc_RNA (1)...(19): siRNA sense strand
gcaacaggcauucucgauu

SEQ ID NO: 1803816 - RNA, 19 nt, Homo sapiens
  misc_RNA (1)...(19): siRNA sense strand
aagaaacgauaccagauug

SEQ ID NO: 1803817 - RNA, 19 nt, Homo sapiens
  misc_RNA (1)...(19): siRNA sense strand
gagcggagucccugaaaga

SEQ ID NO: 1803818 - RNA, 19 nt, Homo sapiens
  misc_RNA (1)...(19): siRNA sense strand
ucagugaaaccuuguauga

SEQ ID NO: 1803819 - RNA, 19 nt, Homo sapiens
  misc_RNA (1)...(19): siRNA sense strand
gucaaggacuuccaaagga

SEQ ID NO: 1803820 - RNA, 19 nt, Homo sapiens
  misc_RNA (1)...(19): siRNA sense strand
gaagaagauugaugaugac

SEQ ID NO: 1803821 - RNA, 19 nt, Homo sapiens
  misc_RNA (1)...(19): siRNA sense strand
uugcagaacuggagguauu

SEQ ID NO: 1803822 - RNA, 19 nt, Homo sapiens
  misc_RNA (1)...(19): siRNA sense strand
guugggagcuccaggaauc

SEQ ID NO: 1803823 - RNA, 19 nt, Homo sapiens
  misc_RNA (1)...(19): siRNA sense strand
cccgagagcuguccauuca

SEQ ID NO: 1803824 - RNA, 19 nt, Homo sapiens
  misc_RNA (1)...(19): siRNA sense strand
ggcagcagcuucuuugagu

SEQ ID NO: 1803825 - RNA, 19 nt, Homo sapiens
  misc_RNA (1)...(19): siRNA sense strand
ggaagacagcgaagaggaa

SEQ ID NO: 1803826 - RNA, 19 nt, Homo sapiens
  misc_RNA (1)...(19): siRNA sense strand
gagcuguuguucuggaaga

SEQ ID NO: 1803827 - RNA, 19 nt, Homo sapiens
  misc_RNA (1)...(19): siRNA sense strand
gagcagaaccucaccaacu

SEQ ID NO: 1803828 - RNA, 19 nt, Homo sapiens
  misc_RNA (1)...(19): siRNA sense strand
gcaggaggaagacaacuug

SEQ ID NO: 1803829 - RNA, 19 nt, Homo sapiens
  misc_RNA (1)...(19): siRNA sense strand
aauaguggauaaacucuug

SEQ ID NO: 1803830 - RNA, 19 nt, Homo sapiens
  misc_RNA (1)...(19): siRNA sense strand
gagggagacacuuaccaua

SEQ ID NO: 1803831 - RNA, 19 nt, Homo sapiens
  misc_RNA (1)...(19): siRNA sense strand
gcagccgcaucaucaagaa

SEQ ID NO: 1803832 - RNA, 19 nt, Homo sapiens
  misc_RNA (1)...(19): siRNA sense strand
ggaagacaacuugcugauu

SEQ ID NO: 1803833 - RNA, 19 nt, Homo sapiens
  misc_RNA (1)...(19): siRNA sense strand
agcagaaccucaccaacua

SEQ ID NO: 1803834 - RNA, 19 nt, Homo sapiens
  misc_RNA (1)...(19): siRNA sense strand
ggagcuaccagcagaauag

SEQ ID NO: 1803835 - RNA, 19 nt, Homo sapiens
  misc_RNA (1)...(19): siRNA sense strand
gaaaguuugaugagagaug

SEQ ID NO: 1803836 - RNA, 19 nt, Homo sapiens
  misc_RNA (1)...(19): siRNA sense strand
gauugaggaugaugaggau

SEQ ID NO: 1803837 - RNA, 19 nt, Homo sapiens
  misc_RNA (1)...(19): siRNA sense strand
guagugcccuuggguacuu

SEQ ID NO: 1803838 - RNA, 19 nt, Homo sapiens
  misc_RNA (1)...(19): siRNA sense strand
cagcgaagaggaagaagaa

SEQ ID NO: 1803839 - RNA, 19 nt, Homo sapiens
  misc_RNA (1)...(19): siRNA sense strand
ugcaggugcuaacuuauuu

SEQ ID NO: 1803840 - RNA, 19 nt, Homo sapiens
  misc_RNA (1)...(19): siRNA sense strand
guuuggcucucaagacauu

SEQ ID NO: 1803841 - RNA, 19 nt, Homo sapiens
  misc_RNA (1)...(19): siRNA sense strand
ggagaccacccaccucuuc

SEQ ID NO: 1803842 - RNA, 19 nt, Homo sapiens
  misc_RNA (1)...(19): siRNA sense strand
gauggaguaccgagaacua

SEQ ID NO: 1803843 - RNA, 19 nt, Homo sapiens
  misc_RNA (1)...(19): siRNA sense strand
cuacugcuggucagaaaua

SEQ ID NO: 1803844 - RNA, 19 nt, Homo sapiens
  misc_RNA (1)...(19): siRNA sense strand
gagaagaagauugaugaug

SEQ ID NO: 1803845 - RNA, 19 nt, Homo sapiens
  misc_RNA (1)...(19): siRNA sense strand
guagcuuaguccuuucaaa

SEQ ID NO: 1803846 - RNA, 19 nt, Homo sapiens
  misc_RNA (1)...(19): siRNA sense strand
cugaaacgcuuugcauguu

SEQ ID NO: 1803847 - RNA, 19 nt, Homo sapiens
  misc_RNA (1)...(19): siRNA sense strand
ggaaccugguggugcagaa

SEQ ID NO: 1803848 - RNA, 19 nt, Homo sapiens
  misc_RNA (1)...(19): siRNA sense strand
caugaugagaccuauuaua

SEQ ID NO: 1803849 - RNA, 19 nt, Homo sapiens
  misc_RNA (1)...(19): siRNA sense strand
ggaccucaucuuucacaaa

SEQ ID NO: 1803850 - RNA, 19 nt, Homo sapiens
  misc_RNA (1)...(19): siRNA sense strand
gcaauggagccuacaugug

SEQ ID NO: 1803851 - RNA, 19 nt, Homo sapiens
  misc_RNA (1)...(19): siRNA sense strand
ggaggaagaggaggaguug

SEQ ID NO: 1803852 - RNA, 19 nt, Homo sapiens
  misc_RNA (1)...(19): siRNA sense strand
guccguaccuuccacuuca

SEQ ID NO: 1803853 - RNA, 19 nt, Homo sapiens
  misc_RNA (1)...(19): siRNA sense strand
agaaagcucagcagcauga

SEQ ID NO: 1803854 - RNA, 19 nt, Homo sapiens
  misc_RNA (1)...(19): siRNA sense strand
gaucaggagaagaagauug

SEQ ID NO: 1803855 - RNA, 19 nt, Homo sapiens
  misc_RNA (1)...(19): siRNA sense strand
gaagaugagggcaggaaca

SEQ ID NO: 1803856 - RNA, 19 nt, Homo sapiens
  misc_RNA (1)...(19): siRNA sense strand
ggagggcagcagcuucuuu

SEQ ID NO: 1803857 - RNA, 19 nt, Homo sapiens
  misc_RNA (1)...(19): siRNA sense strand
gagcuguaccucgccaaua

SEQ ID NO: 1803858 - RNA, 19 nt, Homo sapiens
  misc_RNA (1)...(19): siRNA sense strand
ugaaacgcuuugcauguuc

SEQ ID NO: 1803859 - RNA, 19 nt, Homo sapiens
  misc_RNA (1)...(19): siRNA sense strand
ggaguaccgagaacuauuc

SEQ ID NO: 1803860 - RNA, 19 nt, Homo sapiens
  misc_RNA (1)...(19): siRNA sense strand
ucacaaaggccuucacaac

SEQ ID NO: 1803861 - RNA, 19 nt, Homo sapiens
  misc_RNA (1)...(19): siRNA sense strand
ggaggaagacgcuguuggu

SEQ ID NO: 1803862 - RNA, 19 nt, Homo sapiens
  misc_RNA (1)...(19): siRNA sense strand
caucuuggcccaccugaau

SEQ ID NO: 1803863 - RNA, 19 nt, Homo sapiens
  misc_RNA (1)...(19): siRNA sense strand
gggcagaggaagaagaaga

SEQ ID NO: 1803864 - RNA, 19 nt, Homo sapiens
  misc_RNA (1)...(19): siRNA sense strand
gguguggccugaaggagau

SEQ ID NO: 1803865 - RNA, 19 nt, Homo sapiens
  misc_RNA (1)...(19): siRNA sense strand
aagaagagaaggaagaaga

SEQ ID NO: 1803866 - RNA, 19 nt, Homo sapiens
  misc_RNA (1)...(19): siRNA sense strand
gaggaagacgcuguuggua

SEQ ID NO: 1803867 - RNA, 19 nt, Homo sapiens
  misc_RNA (1)...(19): siRNA sense strand
gagggcagcagcuucuuug

SEQ ID NO: 1803868 - RNA, 19 nt, Homo sapiens
  misc_RNA (1)...(19): siRNA sense strand
gauccgagcagcugaugau

SEQ ID NO: 1803869 - RNA, 19 nt, Homo sapiens
  misc_RNA (1)...(19): siRNA sense strand
aguaaaggaucaccugcuu

SEQ ID NO: 1803870 - RNA, 19 nt, Homo sapiens
  misc_RNA (1)...(19): siRNA sense strand
agcuguaccucgccaauaa

SEQ ID NO: 1803871 - RNA, 19 nt, Homo sapiens
  misc_RNA (1)...(19): siRNA sense strand
cagcauggacuccgugguu

SEQ ID NO: 1803872 - RNA, 19 nt, Homo sapiens
  misc_RNA (1)...(19): siRNA sense strand
ccacccaccucuuccucaa

SEQ ID NO: 1803873 - RNA, 19 nt, Homo sapiens
  misc_RNA (1)...(19): siRNA sense strand
caacagugaaugagaugga

SEQ ID NO: 1803874 - RNA, 19 nt, Homo sapiens
  misc_RNA (1)...(19): siRNA sense strand
gaugagaaauuccacagaa

SEQ ID NO: 1803875 - RNA, 19 nt, Homo sapiens
  misc_RNA (1)...(19): siRNA sense strand
aaacaucagucaaggagaa

SEQ ID NO: 1803876 - RNA, 19 nt, Homo sapiens
  misc_RNA (1)...(19): siRNA sense strand
gaaauuccacagaagauau

SEQ ID NO: 1803877 - RNA, 19 nt, Homo sapiens
  misc_RNA (1)...(19): siRNA sense strand
gagaacgguuucacagguu

SEQ ID NO: 1803878 - RNA, 19 nt, Homo sapiens
  misc_RNA (1)...(19): siRNA sense strand
caggagcgcuucaccucua

SEQ ID NO: 1803879 - RNA, 19 nt, Homo sapiens
  misc_RNA (1)...(19): siRNA sense strand
ggacagaaacaucagucaa

SEQ ID NO: 1803880 - RNA, 19 nt, Homo sapiens
  misc_RNA (1)...(19): siRNA sense strand
cagauugaccgguucagua

SEQ ID NO: 1803881 - RNA, 19 nt, Homo sapiens
  misc_RNA (1)...(19): siRNA sense strand
gcgaccaccuguucaaagu

SEQ ID NO: 1803882 - RNA, 19 nt, Homo sapiens
  misc_RNA (1)...(19): siRNA sense strand
caggacagcuucagcaaac

SEQ ID NO: 1803883 - RNA, 19 nt, Homo sapiens
  misc_RNA (1)...(19): siRNA sense strand
gccacuaccuucagcaaca

SEQ ID NO: 1803884 - RNA, 19 nt, Homo sapiens
  misc_RNA (1)...(19): siRNA sense strand
ucaccucuaugacacgauu

SEQ ID NO: 1803885 - RNA, 19 nt, Homo sapiens
  misc_RNA (1)...(19): siRNA sense strand
gccucugccuguguuauua

SEQ ID NO: 1803886 - RNA, 19 nt, Homo sapiens
  misc_RNA (1)...(19): siRNA sense strand
ggaugccucugccuguguu

SEQ ID NO: 1803887 - RNA, 19 nt, Homo sapiens
  misc_RNA (1)...(19): siRNA sense strand
gggacuacaucaaucuaca

SEQ ID NO: 1803888 - RNA, 19 nt, Homo sapiens
  misc_RNA (1)...(19): siRNA sense strand
gagaaauuccacagaagau

SEQ ID NO: 1803889 - RNA, 19 nt, Homo sapiens
  misc_RNA (1)...(19): siRNA sense strand
cuaugacacgauuguauua

SEQ ID NO: 1803890 - RNA, 19 nt, Homo sapiens
  misc_RNA (1)...(19): siRNA sense strand
cacagaagauaucaugucu

SEQ ID NO: 1803891 - RNA, 19 nt, Homo sapiens
  misc_RNA (1)...(19): siRNA sense strand
ggacuacaucaaucuacaa

SEQ ID NO: 1803892 - RNA, 19 nt, Homo sapiens
  misc_RNA (1)...(19): siRNA sense strand
ugagaaauuccacagaaga

SEQ ID NO: 1803893 - RNA, 19 nt, Homo sapiens
  misc_RNA (1)...(19): siRNA sense strand
gauauucccaggacagcuu

SEQ ID NO: 1803894 - RNA, 19 nt, Homo sapiens
  misc_RNA (1)...(19): siRNA sense strand
gacagaaacaucagucaag

SEQ ID NO: 1803895 - RNA, 19 nt, Homo sapiens
  misc_RNA (1)...(19): siRNA sense strand
agauugaccgguucaguaa

SEQ ID NO: 1803896 - RNA, 19 nt, Homo sapiens
  misc_RNA (1)...(19): siRNA sense strand
uaaagagaacgguuucaca

SEQ ID NO: 1803897 - RNA, 19 nt, Homo sapiens
  misc_RNA (1)...(19): siRNA sense strand
ucaguaaagagaacgguuu

SEQ ID NO: 1803898 - RNA, 19 nt, Homo sapiens
  misc_RNA (1)...(19): siRNA sense strand
ccacagaagauaucauguc

SEQ ID NO: 1803899 - RNA, 19 nt, Homo sapiens
  misc_RNA (1)...(19): siRNA sense strand
cuucagcugugggauauug

SEQ ID NO: 1803900 - RNA, 19 nt, Homo sapiens
  misc_RNA (1)...(19): siRNA sense strand
agaaauuccacagaagaua

SEQ ID NO: 1803901 - RNA, 19 nt, Homo sapiens
  misc_RNA (1)...(19): siRNA sense strand
uuaaugaggcuaugagagu

SEQ ID NO: 1803902 - RNA, 19 nt, Homo sapiens
  misc_RNA (1)...(19): siRNA sense strand
gccaacaagugugaucugu

SEQ ID NO: 1803903 - RNA, 19 nt, Homo sapiens
  misc_RNA (1)...(19): siRNA sense strand
ccuguguuauuauguuuga

SEQ ID NO: 1803904 - RNA, 19 nt, Homo sapiens
  misc_RNA (1)...(19): siRNA sense strand
gcgcuucaccucuaugaca

SEQ ID NO: 1803905 - RNA, 19 nt, Homo sapiens
  misc_RNA (1)...(19): siRNA sense strand
gagcgcuucaccucuauga

SEQ ID NO: 1803906 - RNA, 19 nt, Homo sapiens
  misc_RNA (1)...(19): siRNA sense strand
cuacaucaaucuacaaacc

SEQ ID NO: 1803907 - RNA, 19 nt, Homo sapiens
  misc_RNA (1)...(19): siRNA sense strand
ggcuucagcugugggauau

SEQ ID NO: 1803908 - RNA, 19 nt, Homo sapiens
  misc_RNA (1)...(19): siRNA sense strand
ucuaugacacgauuguauu

SEQ ID NO: 1803909 - RNA, 19 nt, Homo sapiens
  misc_RNA (1)...(19): siRNA sense strand
gacuacaucaaucuacaaa

SEQ ID NO: 1803910 - RNA, 19 nt, Homo sapiens
  misc_RNA (1)...(19): siRNA sense strand
gguggaaacaggaccuaga

SEQ ID NO: 1803911 - RNA, 19 nt, Homo sapiens
  misc_RNA (1)...(19): siRNA sense strand
acaucaaucuacaaaccaa

SEQ ID NO: 1803912 - RNA, 19 nt, Homo sapiens
  misc_RNA (1)...(19): siRNA sense strand
aacaggaccuagacagcaa

SEQ ID NO: 1803913 - RNA, 19 nt, Homo sapiens
  misc_RNA (1)...(19): siRNA sense strand
agacagcaagcucacacua

SEQ ID NO: 1803914 - RNA, 19 nt, Homo sapiens
  misc_RNA (1)...(19): siRNA sense strand
ccaggacagcuucagcaaa

SEQ ID NO: 1803915 - RNA, 19 nt, Homo sapiens
  misc_RNA (1)...(19): siRNA sense strand
uuucacagguuggacagaa

SEQ ID NO: 1803916 - RNA, 19 nt, Homo sapiens
  misc_RNA (1)...(19): siRNA sense strand
gcaacagccagagguggaa

SEQ ID NO: 1803917 - RNA, 19 nt, Homo sapiens
  misc_RNA (1)...(19): siRNA sense strand
cggcuucagcugugggaua

SEQ ID NO: 1803918 - RNA, 19 nt, Homo sapiens
  misc_RNA (1)...(19): siRNA sense strand
gaccgguucaguaaagaga

SEQ ID NO: 1803919 - RNA, 19 nt, Homo sapiens
  misc_RNA (1)...(19): siRNA sense strand
cugccuguguuauuauguu

SEQ ID NO: 1803920 - RNA, 19 nt, Homo sapiens
  misc_RNA (1)...(19): siRNA sense strand
ugccuguguuauuauguuu

SEQ ID NO: 1803921 - RNA, 19 nt, Homo sapiens
  misc_RNA (1)...(19): siRNA sense strand
ggauuuugcucugaagguu

SEQ ID NO: 1803922 - RNA, 19 nt, Homo sapiens
  misc_RNA (1)...(19): siRNA sense strand
caaggggacuacaucaauc

SEQ ID NO: 1803923 - RNA, 19 nt, Homo sapiens
  misc_RNA (1)...(19): siRNA sense strand
cagaaacaucagucaagga

SEQ ID NO: 1803924 - RNA, 19 nt, Homo sapiens
  misc_RNA (1)...(19): siRNA sense strand
ucagcaaacacuacaaguc

SEQ ID NO: 1803925 - RNA, 19 nt, Homo sapiens
  misc_RNA (1)...(19): siRNA sense strand
gaagaugggugauuuacaa

SEQ ID NO: 1803926 - RNA, 19 nt, Homo sapiens
  misc_RNA (1)...(19): siRNA sense strand
gaaauagcacuaccaaaua

SEQ ID NO: 1803927 - RNA, 19 nt, Homo sapiens
  misc_RNA (1)...(19): siRNA sense strand
gaaggaagaugggugauuu

SEQ ID NO: 1803928 - RNA, 19 nt, Homo sapiens
  misc_RNA (1)...(19): siRNA sense strand
gggcagauguuuauucuuu

SEQ ID NO: 1803929 - RNA, 19 nt, Homo sapiens
  misc_RNA (1)...(19): siRNA sense strand
ggugaaaucugaacucauu

SEQ ID NO: 1803930 - RNA, 19 nt, Homo sapiens
  misc_RNA (1)...(19): siRNA sense strand
gcacgaaacugaagccaau

SEQ ID NO: 1803931 - RNA, 19 nt, Homo sapiens
  misc_RNA (1)...(19): siRNA sense strand
gcacuggauuggaucuuua

SEQ ID NO: 1803932 - RNA, 19 nt, Homo sapiens
  misc_RNA (1)...(19): siRNA sense strand
ggauggaucuggaacauau

SEQ ID NO: 1803933 - RNA, 19 nt, Homo sapiens
  misc_RNA (1)...(19): siRNA sense strand
ugauugagauggagaauaa

SEQ ID NO: 1803934 - RNA, 19 nt, Homo sapiens
  misc_RNA (1)...(19): siRNA sense strand
caacaaggaugaacugauc

SEQ ID NO: 1803935 - RNA, 19 nt, Homo sapiens
  misc_RNA (1)...(19): siRNA sense strand
guacuucacuggaaauaug

SEQ ID NO: 1803936 - RNA, 19 nt, Homo sapiens
  misc_RNA (1)...(19): siRNA sense strand
cauaugagcuauuugcauu

SEQ ID NO: 1803937 - RNA, 19 nt, Homo sapiens
  misc_RNA (1)...(19): siRNA sense strand
acacacagaugacuaaguu

SEQ ID NO: 1803938 - RNA, 19 nt, Homo sapiens
  misc_RNA (1)...(19): siRNA sense strand
gcacuacgagcaacgaaua

SEQ ID NO: 1803939 - RNA, 19 nt, Homo sapiens
  misc_RNA (1)...(19): siRNA sense strand
gaugggugauuuacaauga

SEQ ID NO: 1803940 - RNA, 19 nt, Homo sapiens
  misc_RNA (1)...(19): siRNA sense strand
gaaaaugaauugccaguau

SEQ ID NO: 1803941 - RNA, 19 nt, Homo sapiens
  misc_RNA (1)...(19): siRNA sense strand
gaagguggacucuauguau

SEQ ID NO: 1803942 - RNA, 19 nt, Homo sapiens
  misc_RNA (1)...(19): siRNA sense strand
aggaugaacugaucgcuua

SEQ ID NO: 1803943 - RNA, 19 nt, Homo sapiens
  misc_RNA (1)...(19): siRNA sense strand
gcagcaagaugcccaggaa

SEQ ID NO: 1803944 - RNA, 19 nt, Homo sapiens
  misc_RNA (1)...(19): siRNA sense strand
ggcaacagcugcuaucuca

SEQ ID NO: 1803945 - RNA, 19 nt, Homo sapiens
  misc_RNA (1)...(19): siRNA sense strand
uagcgacgauuaugaauau

SEQ ID NO: 1803946 - RNA, 19 nt, Homo sapiens
  misc_RNA (1)...(19): siRNA sense strand
gaugaagccaaacuuguua

SEQ ID NO: 1803947 - RNA, 19 nt, Homo sapiens
  misc_RNA (1)...(19): siRNA sense strand
gaucauuguucacauggaa

SEQ ID NO: 1803948 - RNA, 19 nt, Homo sapiens
  misc_RNA (1)...(19): siRNA sense strand
ugaaauagcacuaccaaau

SEQ ID NO: 1803949 - RNA, 19 nt, Homo sapiens
  misc_RNA (1)...(19): siRNA sense strand
gaagaugaagccaaacuug

SEQ ID NO: 1803950 - RNA, 19 nt, Homo sapiens
  misc_RNA (1)...(19): siRNA sense strand
gcagugcccuacaagcaaa

SEQ ID NO: 1803951 - RNA, 19 nt, Homo sapiens
  misc_RNA (1)...(19): siRNA sense strand
acugaucgcuuaugaacua

SEQ ID NO: 1803952 - RNA, 19 nt, Homo sapiens
  misc_RNA (1)...(19): siRNA sense strand
gaggguggauuaccugaug

SEQ ID NO: 1803953 - RNA, 19 nt, Homo sapiens
  misc_RNA (1)...(19): siRNA sense strand
gauuuacaaugaccacaaa

SEQ ID NO: 1803954 - RNA, 19 nt, Homo sapiens
  misc_RNA (1)...(19): siRNA sense strand
gaacugaucgcuuaugaac

SEQ ID NO: 1803955 - RNA, 19 nt, Homo sapiens
  misc_RNA (1)...(19): siRNA sense strand
gaacauaugagcuauuugc

SEQ ID NO: 1803956 - RNA, 19 nt, Homo sapiens
  misc_RNA (1)...(19): siRNA sense strand
gaagggaacauguugaaag

SEQ ID NO: 1803957 - RNA, 19 nt, Homo sapiens
  misc_RNA (1)...(19): siRNA sense strand
ccagagagcguauguagga

SEQ ID NO: 1803958 - RNA, 19 nt, Homo sapiens
  misc_RNA (1)...(19): siRNA sense strand
gggaacauguugaaagaca

SEQ ID NO: 1803959 - RNA, 19 nt, Homo sapiens
  misc_RNA (1)...(19): siRNA sense strand
gcgacagggucuacaagaa

SEQ ID NO: 1803960 - RNA, 19 nt, Homo sapiens
  misc_RNA (1)...(19): siRNA sense strand
cagaggaaaucguagcuau

SEQ ID NO: 1803961 - RNA, 19 nt, Homo sapiens
  misc_RNA (1)...(19): siRNA sense strand
acacggagaggguggauua

SEQ ID NO: 1803962 - RNA, 19 nt, Homo sapiens
  misc_RNA (1)...(19): siRNA sense strand
uaccaaauauugaggaguu

SEQ ID NO: 1803963 - RNA, 19 nt, Homo sapiens
  misc_RNA (1)...(19): siRNA sense strand
aaucugaacucauugaaca

SEQ ID NO: 1803964 - RNA, 19 nt, Homo sapiens
  misc_RNA (1)...(19): siRNA sense strand
aaagagcacuggauuggau

SEQ ID NO: 1803965 - RNA, 19 nt, Homo sapiens
  misc_RNA (1)...(19): siRNA sense strand
uggauuaccugaugcaguu

SEQ ID NO: 1803966 - RNA, 19 nt, Homo sapiens
  misc_RNA (1)...(19): siRNA sense strand
agaaugggcuccaggacaa

SEQ ID NO: 1803967 - RNA, 19 nt, Homo sapiens
  misc_RNA (1)...(19): siRNA sense strand
cgaaggaccuagagucaag

SEQ ID NO: 1803968 - RNA, 19 nt, Homo sapiens
  misc_RNA (1)...(19): siRNA sense strand
ggaaagagcacuggauugg

SEQ ID NO: 1803969 - RNA, 19 nt, Homo sapiens
  misc_RNA (1)...(19): siRNA sense strand
gcaagagccacccggaauu

SEQ ID NO: 1803970 - RNA, 19 nt, Homo sapiens
  misc_RNA (1)...(19): siRNA sense strand
cgacgauuaugaauaugaa

SEQ ID NO: 1803971 - RNA, 19 nt, Homo sapiens
  misc_RNA (1)...(19): siRNA sense strand
uggaacauaugagcuauuu

SEQ ID NO: 1803972 - RNA, 19 nt, Homo sapiens
  misc_RNA (1)...(19): siRNA sense strand
ggaagcagaagcaaacaga

SEQ ID NO: 1803973 - RNA, 19 nt, Homo sapiens
  misc_RNA (1)...(19): siRNA sense strand
gaagggaagcagaagcaaa

SEQ ID NO: 1803974 - RNA, 19 nt, Homo sapiens
  misc_RNA (1)...(19): siRNA sense strand
agauacugaugacgauuua

SEQ ID NO: 1803975 - RNA, 19 nt, Homo sapiens
  misc_RNA (1)...(19): siRNA sense strand
uaaauagcgacgauuauga

SEQ ID NO: 1803976 - RNA, 19 nt, Homo sapiens
  misc_RNA (1)...(19): siRNA sense strand
ugacggcucuguccugugu

SEQ ID NO: 1803977 - RNA, 19 nt, Homo sapiens
  misc_RNA (1)...(19): siRNA sense strand
gaaacugaagccaauguau

SEQ ID NO: 1803978 - RNA, 19 nt, Homo sapiens
  misc_RNA (1)...(19): siRNA sense strand
ucacccagcuggacaaugg

SEQ ID NO: 1803979 - RNA, 19 nt, Homo sapiens
  misc_RNA (1)...(19): siRNA sense strand
ccaagcacuuagcgcauuu

SEQ ID NO: 1803980 - RNA, 19 nt, Homo sapiens
  misc_RNA (1)...(19): siRNA sense strand
gcaagaugcccaggaauuc

SEQ ID NO: 1803981 - RNA, 19 nt, Homo sapiens
  misc_RNA (1)...(19): siRNA sense strand
cuaaagaccugggcuacau

SEQ ID NO: 1803982 - RNA, 19 nt, Homo sapiens
  misc_RNA (1)...(19): siRNA sense strand
ggucauuacauuugccaua

SEQ ID NO: 1803983 - RNA, 19 nt, Homo sapiens
  misc_RNA (1)...(19): siRNA sense strand
gaggaaaucguagcuauca

SEQ ID NO: 1803984 - RNA, 19 nt, Homo sapiens
  misc_RNA (1)...(19): siRNA sense strand
aagggaacauguugaaaga

SEQ ID NO: 1803985 - RNA, 19 nt, Homo sapiens
  misc_RNA (1)...(19): siRNA sense strand
ggacaauggagucaggauu

SEQ ID NO: 1803986 - RNA, 19 nt, Homo sapiens
  misc_RNA (1)...(19): siRNA sense strand
gaaaucugaacucauugaa

SEQ ID NO: 1803987 - RNA, 19 nt, Homo sapiens
  misc_RNA (1)...(19): siRNA sense strand
ggagaauaaugccaaugca

SEQ ID NO: 1803988 - RNA, 19 nt, Homo sapiens
  misc_RNA (1)...(19): siRNA sense strand
gaaaucguagcuaucauca

SEQ ID NO: 1803989 - RNA, 19 nt, Homo sapiens
  misc_RNA (1)...(19): siRNA sense strand
ggaaaucguagcuaucauc

SEQ ID NO: 1803990 - RNA, 19 nt, Homo sapiens
  misc_RNA (1)...(19): siRNA sense strand
gaagccaaacuuguuauau

SEQ ID NO: 1803991 - RNA, 19 nt, Homo sapiens
  misc_RNA (1)...(19): siRNA sense strand
cuacgagcaacgaauaaua

SEQ ID NO: 1803992 - RNA, 19 nt, Homo sapiens
  misc_RNA (1)...(19): siRNA sense strand
ucaacuggaucauuguuca

SEQ ID NO: 1803993 - RNA, 19 nt, Homo sapiens
  misc_RNA (1)...(19): siRNA sense strand
ugccagaccuacuugauau

SEQ ID NO: 1803994 - RNA, 19 nt, Homo sapiens
  misc_RNA (1)...(19): siRNA sense strand
caagaagaagaaccuguuu

SEQ ID NO: 1803995 - RNA, 19 nt, Homo sapiens
  misc_RNA (1)...(19): siRNA sense strand
aaggaggaauuccaagauu

SEQ ID NO: 1803996 - RNA, 19 nt, Homo sapiens
  misc_RNA (1)...(19): siRNA sense strand
ggaaggaagaugggugauu

SEQ ID NO: 1803997 - RNA, 19 nt, Homo sapiens
  misc_RNA (1)...(19): siRNA sense strand
gcuguguacuucacuggaa

SEQ ID NO: 1803998 - RNA, 19 nt, Homo sapiens
  misc_RNA (1)...(19): siRNA sense strand
gaaaacaucucgcuuugcu

SEQ ID NO: 1803999 - RNA, 19 nt, Homo sapiens
  misc_RNA (1)...(19): siRNA sense strand
gccaagauaccauuuagug

SEQ ID NO: 1804000 - RNA, 19 nt, Homo sapiens
  misc_RNA (1)...(19): siRNA sense strand
gccaagcacuuagcgcauu

SEQ ID NO: 1804001 - RNA, 19 nt, Homo sapiens
  misc_RNA (1)...(19): siRNA sense strand
gaauugccaguaucuaaau

SEQ ID NO: 1804002 - RNA, 19 nt, Homo sapiens
  misc_RNA (1)...(19): siRNA sense strand
aggaggaauuccaagauuu

SEQ ID NO: 1804003 - RNA, 19 nt, Homo sapiens
  misc_RNA (1)...(19): siRNA sense strand
gagcagugcccuacaagca

SEQ ID NO: 1804004 - RNA, 19 nt, Homo sapiens
  misc_RNA (1)...(19): siRNA sense strand
agaauaaugccaaugcaaa

SEQ ID NO: 1804005 - RNA, 19 nt, Homo sapiens
  misc_RNA (1)...(19): siRNA sense strand
auaugaagaugaagccaaa

SEQ ID NO: 1804006 - RNA, 19 nt, Homo sapiens
  misc_RNA (1)...(19): siRNA sense strand
gagaauaaugccaaugcaa

SEQ ID NO: 1804007 - RNA, 19 nt, Homo sapiens
  misc_RNA (1)...(19): siRNA sense strand
gccuucaacuggaucauug

SEQ ID NO: 1804008 - RNA, 19 nt, Homo sapiens
  misc_RNA (1)...(19): siRNA sense strand
cacaagauuucaacacaca

SEQ ID NO: 1804009 - RNA, 19 nt, Homo sapiens
  misc_RNA (1)...(19): siRNA sense strand
cuacgacucucccaauucu

SEQ ID NO: 1804010 - RNA, 19 nt, Homo sapiens
  misc_RNA (1)...(19): siRNA sense strand
ucaacacacagaugacuaa

SEQ ID NO: 1804011 - RNA, 19 nt, Homo sapiens
  misc_RNA (1)...(19): siRNA sense strand
ucgcaaggcuguguacuuc

SEQ ID NO: 1804012 - RNA, 19 nt, Homo sapiens
  misc_RNA (1)...(19): siRNA sense strand
ccugaugaaccaauugaua

SEQ ID NO: 1804013 - RNA, 19 nt, Homo sapiens
  misc_RNA (1)...(19): siRNA sense strand
caaagccuccggugaaauc

SEQ ID NO: 1804014 - RNA, 19 nt, Homo sapiens
  misc_RNA (1)...(19): siRNA sense strand
ugaauugccaguaucuaaa

SEQ ID NO: 1804015 - RNA, 19 nt, Homo sapiens
  misc_RNA (1)...(19): siRNA sense strand
uacaaugaccacaaaguuu

SEQ ID NO: 1804016 - RNA, 19 nt, Homo sapiens
  misc_RNA (1)...(19): siRNA sense strand
cauuacauuugccauauca

SEQ ID NO: 1804017 - RNA, 19 nt, Homo sapiens
  misc_RNA (1)...(19): siRNA sense strand
uugaacaggugaugaagga

SEQ ID NO: 1804018 - RNA, 19 nt, Homo sapiens
  misc_RNA (1)...(19): siRNA sense strand
gccuuuagauccaacacaa

SEQ ID NO: 1804019 - RNA, 19 nt, Homo sapiens
  misc_RNA (1)...(19): siRNA sense strand
aaacugaagccaauguaug

SEQ ID NO: 1804020 - RNA, 19 nt, Homo sapiens
  misc_RNA (1)...(19): siRNA sense strand
gacaauggagucaggauuc

SEQ ID NO: 1804021 - RNA, 19 nt, Homo sapiens
  misc_RNA (1)...(19): siRNA sense strand
gugccaagauaccauuuag

SEQ ID NO: 1804022 - RNA, 19 nt, Homo sapiens
  misc_RNA (1)...(19): siRNA sense strand
gucauuacauuugccauau

SEQ ID NO: 1804023 - RNA, 19 nt, Homo sapiens
  misc_RNA (1)...(19): siRNA sense strand
gaaagagcacuggauugga

SEQ ID NO: 1804024 - RNA, 19 nt, Homo sapiens
  misc_RNA (1)...(19): siRNA sense strand
gaauaauaaccuggaaaga

SEQ ID NO: 1804025 - RNA, 19 nt, Homo sapiens
  misc_RNA (1)...(19): siRNA sense strand
gaaaucauccguagcaaga

SEQ ID NO: 1804026 - RNA, 19 nt, Homo sapiens
  misc_RNA (1)...(19): siRNA sense strand
gagcggaccuucuccuucu

SEQ ID NO: 1804027 - RNA, 19 nt, Homo sapiens
  misc_RNA (1)...(19): siRNA sense strand
gcacaagcucggcaucauu

SEQ ID NO: 1804028 - RNA, 19 nt, Homo sapiens
  misc_RNA (1)...(19): siRNA sense strand
gcuggagccugucuacuca

SEQ ID NO: 1804029 - RNA, 19 nt, Homo sapiens
  misc_RNA (1)...(19): siRNA sense strand
ggaguucgcagucaagauc

SEQ ID NO: 1804030 - RNA, 19 nt, Homo sapiens
  misc_RNA (1)...(19): siRNA sense strand
cacaagcucggcaucauuu

SEQ ID NO: 1804031 - RNA, 19 nt, Homo sapiens
  misc_RNA (1)...(19): siRNA sense strand
gaacacgcagcgcgaagug

SEQ ID NO: 1804032 - RNA, 19 nt, Homo sapiens
  misc_RNA (1)...(19): siRNA sense strand
gaugaccgaugggcuggaa

SEQ ID NO: 1804033 - RNA, 19 nt, Homo sapiens
  misc_RNA (1)...(19): siRNA sense strand
ggacuccgagggccacauu

SEQ ID NO: 1804034 - RNA, 19 nt, Homo sapiens
  misc_RNA (1)...(19): siRNA sense strand
acgaccagcugcacacgua

SEQ ID NO: 1804035 - RNA, 19 nt, Homo sapiens
  misc_RNA (1)...(19): siRNA sense strand
gggaagcuguacgccauga

SEQ ID NO: 1804036 - RNA, 19 nt, Homo sapiens
  misc_RNA (1)...(19): siRNA sense strand
gcaggacucgcccuucuuc

SEQ ID NO: 1804037 - RNA, 19 nt, Homo sapiens
  misc_RNA (1)...(19): siRNA sense strand
caacuuugcggaggaauuc

SEQ ID NO: 1804038 - RNA, 19 nt, Homo sapiens
  misc_RNA (1)...(19): siRNA sense strand
ugaagagcguggagaaugc

SEQ ID NO: 1804039 - RNA, 19 nt, Homo sapiens
  misc_RNA (1)...(19): siRNA sense strand
ggacgaggacgacgaugag

SEQ ID NO: 1804040 - RNA, 19 nt, Homo sapiens
  misc_RNA (1)...(19): siRNA sense strand
cggccgagaucaugugcaa

SEQ ID NO: 1804041 - RNA, 19 nt, Homo sapiens
  misc_RNA (1)...(19): siRNA sense strand
gccaggaguucgcagucaa

SEQ ID NO: 1804042 - RNA, 19 nt, Homo sapiens
  misc_RNA (1)...(19): siRNA sense strand
gggacgaggacgacgauga

SEQ ID NO: 1804043 - RNA, 19 nt, Homo sapiens
  misc_RNA (1)...(19): siRNA sense strand
cacccuccauucucuuuga

SEQ ID NO: 1804044 - RNA, 19 nt, Homo sapiens
  misc_RNA (1)...(19): siRNA sense strand
gauguucacccaccucuac

SEQ ID NO: 1804045 - RNA, 19 nt, Homo sapiens
  misc_RNA (1)...(19): siRNA sense strand
gggagggcuucuuccugaa

SEQ ID NO: 1804046 - RNA, 19 nt, Homo sapiens
  misc_RNA (1)...(19): siRNA sense strand
ccggaaccaucccuucuuc

SEQ ID NO: 1804047 - RNA, 19 nt, Homo sapiens
  misc_RNA (1)...(19): siRNA sense strand
uuucagggauacuccuuug

SEQ ID NO: 1804048 - RNA, 19 nt, Homo sapiens
  misc_RNA (1)...(19): siRNA sense strand
gaagcuguacgccaugaag

SEQ ID NO: 1804049 - RNA, 19 nt, Homo sapiens
  misc_RNA (1)...(19): siRNA sense strand
uggaacaccugcacaagcu

SEQ ID NO: 1804050 - RNA, 19 nt, Homo sapiens
  misc_RNA (1)...(19): siRNA sense strand
gaccugaaacuggagaaug

SEQ ID NO: 1804051 - RNA, 19 nt, Homo sapiens
  misc_RNA (1)...(19): siRNA sense strand
ggccaggaguucgcaguca

SEQ ID NO: 1804052 - RNA, 19 nt, Homo sapiens
  misc_RNA (1)...(19): siRNA sense strand
ccaccuucauggcauucaa

SEQ ID NO: 1804053 - RNA, 19 nt, Homo sapiens
  misc_RNA (1)...(19): siRNA sense strand
ucucaacgccaccuucaug

SEQ ID NO: 1804054 - RNA, 19 nt, Homo sapiens
  misc_RNA (1)...(19): siRNA sense strand
gggcgucauucuguacaug

SEQ ID NO: 1804055 - RNA, 19 nt, Homo sapiens
  misc_RNA (1)...(19): siRNA sense strand
gagcugcggaucacagaag

SEQ ID NO: 1804056 - RNA, 19 nt, Homo sapiens
  misc_RNA (1)...(19): siRNA sense strand
aggcugaggugcgcgugua

SEQ ID NO: 1804057 - RNA, 19 nt, Homo sapiens
  misc_RNA (1)...(19): siRNA sense strand
ccacaacaacgcggugaug

SEQ ID NO: 1804058 - RNA, 19 nt, Homo sapiens
  misc_RNA (1)...(19): siRNA sense strand
ucagggauacuccuuugug

SEQ ID NO: 1804059 - RNA, 19 nt, Homo sapiens
  misc_RNA (1)...(19): siRNA sense strand
gguggagccugggcaucuu

SEQ ID NO: 1804060 - RNA, 19 nt, Homo sapiens
  misc_RNA (1)...(19): siRNA sense strand
accugaaacuggagaaugu

SEQ ID NO: 1804061 - RNA, 19 nt, Homo sapiens
  misc_RNA (1)...(19): siRNA sense strand
ucacgcugcacuacgcuuu

SEQ ID NO: 1804062 - RNA, 19 nt, Homo sapiens
  misc_RNA (1)...(19): siRNA sense strand
ggucucaacgccaccuuca

SEQ ID NO: 1804063 - RNA, 19 nt, Homo sapiens
  misc_RNA (1)...(19): siRNA sense strand
gccugggcgucauucugua

SEQ ID NO: 1804064 - RNA, 19 nt, Homo sapiens
  misc_RNA (1)...(19): siRNA sense strand
ugaccgggcacgaggagaa

SEQ ID NO: 1804065 - RNA, 19 nt, Homo sapiens
  misc_RNA (1)...(19): siRNA sense strand
ggccaggagcgcuaugaug

SEQ ID NO: 1804066 - RNA, 19 nt, Homo sapiens
  misc_RNA (1)...(19): siRNA sense strand
cacaagaaguccggaacca

SEQ ID NO: 1804067 - RNA, 19 nt, Homo sapiens
  misc_RNA (1)...(19): siRNA sense strand
cagggcagcuuuucugugu

SEQ ID NO: 1804068 - RNA, 19 nt, Homo sapiens
  misc_RNA (1)...(19): siRNA sense strand
gagccuacggcaagguguu

SEQ ID NO: 1804069 - RNA, 19 nt, Homo sapiens
  misc_RNA (1)...(19): siRNA sense strand
cugaagagcguggagaaug

SEQ ID NO: 1804070 - RNA, 19 nt, Homo sapiens
  misc_RNA (1)...(19): siRNA sense strand
uggagcacauccgcaagaa

SEQ ID NO: 1804071 - RNA, 19 nt, Homo sapiens
  misc_RNA (1)...(19): siRNA sense strand
acaagcucggcaucauuua

SEQ ID NO: 1804072 - RNA, 19 nt, Homo sapiens
  misc_RNA (1)...(19): siRNA sense strand
gaagagcguggagaaugca

SEQ ID NO: 1804073 - RNA, 19 nt, Homo sapiens
  misc_RNA (1)...(19): siRNA sense strand
gaacagagcuaaagaagaa

SEQ ID NO: 1804074 - RNA, 19 nt, Homo sapiens
  misc_RNA (1)...(19): siRNA sense strand
gaaaugagccucucugauu

SEQ ID NO: 1804075 - RNA, 19 nt, Homo sapiens
  misc_RNA (1)...(19): siRNA sense strand
gacaagagauaucugcuaa

SEQ ID NO: 1804076 - RNA, 19 nt, Homo sapiens
  misc_RNA (1)...(19): siRNA sense strand
ggaagucugugacaauuca

SEQ ID NO: 1804077 - RNA, 19 nt, Homo sapiens
  misc_RNA (1)...(19): siRNA sense strand
ucuuaaggcuccaguguua

SEQ ID NO: 1804078 - RNA, 19 nt, Homo sapiens
  misc_RNA (1)...(19): siRNA sense strand
caagagauaucugcuaaag

SEQ ID NO: 1804079 - RNA, 19 nt, Homo sapiens
  misc_RNA (1)...(19): siRNA sense strand
gaaaugaaagccuugaauc

SEQ ID NO: 1804080 - RNA, 19 nt, Homo sapiens
  misc_RNA (1)...(19): siRNA sense strand
gaagaaugcagcaauagau

SEQ ID NO: 1804081 - RNA, 19 nt, Homo sapiens
  misc_RNA (1)...(19): siRNA sense strand
ggacaagagauaucugcua

SEQ ID NO: 1804082 - RNA, 19 nt, Homo sapiens
  misc_RNA (1)...(19): siRNA sense strand
agcaauagauuccuagaaa

SEQ ID NO: 1804083 - RNA, 19 nt, Homo sapiens
  misc_RNA (1)...(19): siRNA sense strand
gauggguucuggucucauu

SEQ ID NO: 1804084 - RNA, 19 nt, Homo sapiens
  misc_RNA (1)...(19): siRNA sense strand
gaaacuggccaugaggaua

SEQ ID NO: 1804085 - RNA, 19 nt, Homo sapiens
  misc_RNA (1)...(19): siRNA sense strand
guucuggucucauuccauu

SEQ ID NO: 1804086 - RNA, 19 nt, Homo sapiens
  misc_RNA (1)...(19): siRNA sense strand
ggaaguuuguguugguaga

SEQ ID NO: 1804087 - RNA, 19 nt, Homo sapiens
  misc_RNA (1)...(19): siRNA sense strand
ggacauuugauuucuaaga

SEQ ID NO: 1804088 - RNA, 19 nt, Homo sapiens
  misc_RNA (1)...(19): siRNA sense strand
ggaagaaugcagcaauaga

SEQ ID NO: 1804089 - RNA, 19 nt, Homo sapiens
  misc_RNA (1)...(19): siRNA sense strand
gcuccaguguuaaaccuaa

SEQ ID NO: 1804090 - RNA, 19 nt, Homo sapiens
  misc_RNA (1)...(19): siRNA sense strand
cuaaagcagcuacauguuu

SEQ ID NO: 1804091 - RNA, 19 nt, Homo sapiens
  misc_RNA (1)...(19): siRNA sense strand
ggacugagcccuggaccuu

SEQ ID NO: 1804092 - RNA, 19 nt, Homo sapiens
  misc_RNA (1)...(19): siRNA sense strand
uaaagcagcuacauguuuu

SEQ ID NO: 1804093 - RNA, 19 nt, Homo sapiens
  misc_RNA (1)...(19): siRNA sense strand
caaagaccuugguaaacug

SEQ ID NO: 1804094 - RNA, 19 nt, Homo sapiens
  misc_RNA (1)...(19): siRNA sense strand
aaacuggccaugaggauaa

SEQ ID NO: 1804095 - RNA, 19 nt, Homo sapiens
  misc_RNA (1)...(19): siRNA sense strand
gcaauagauuccuagaaac

SEQ ID NO: 1804096 - RNA, 19 nt, Homo sapiens
  misc_RNA (1)...(19): siRNA sense strand
ugggaagaaugcagcaaua

SEQ ID NO: 1804097 - RNA, 19 nt, Homo sapiens
  misc_RNA (1)...(19): siRNA sense strand
caagaacagagcuaaagaa

SEQ ID NO: 1804098 - RNA, 19 nt, Homo sapiens
  misc_RNA (1)...(19): siRNA sense strand
ggaaaggguagcagugaug

SEQ ID NO: 1804099 - RNA, 19 nt, Homo sapiens
  misc_RNA (1)...(19): siRNA sense strand
gagccucucugauuugaac

SEQ ID NO: 1804100 - RNA, 19 nt, Homo sapiens
  misc_RNA (1)...(19): siRNA sense strand
ggagauggaacacuuacau

SEQ ID NO: 1804101 - RNA, 19 nt, Homo sapiens
  misc_RNA (1)...(19): siRNA sense strand
ggaguggaaguuuguguug

SEQ ID NO: 1804102 - RNA, 19 nt, Homo sapiens
  misc_RNA (1)...(19): siRNA sense strand
gggaauggacaauggaaga

SEQ ID NO: 1804103 - RNA, 19 nt, Homo sapiens
  misc_RNA (1)...(19): siRNA sense strand
aagaagcacuuugguggaa

SEQ ID NO: 1804104 - RNA, 19 nt, Homo sapiens
  misc_RNA (1)...(19): siRNA sense strand
gacauuugauuucuaagac

SEQ ID NO: 1804105 - RNA, 19 nt, Homo sapiens
  misc_RNA (1)...(19): siRNA sense strand
ccaugaggauaaagugguu

SEQ ID NO: 1804106 - RNA, 19 nt, Homo sapiens
  misc_RNA (1)...(19): siRNA sense strand
ccagguccauuaugucaca

SEQ ID NO: 1804107 - RNA, 19 nt, Homo sapiens
  misc_RNA (1)...(19): siRNA sense strand
ggaauggacaauggaagaa

SEQ ID NO: 1804108 - RNA, 19 nt, Homo sapiens
  misc_RNA (1)...(19): siRNA sense strand
gcaaccugcucaagaacag

SEQ ID NO: 1804109 - RNA, 19 nt, Homo sapiens
  misc_RNA (1)...(19): siRNA sense strand
ccuagaaacuggccaugag

SEQ ID NO: 1804110 - RNA, 19 nt, Homo sapiens
  misc_RNA (1)...(19): siRNA sense strand
acaucccacuccacuauaa

SEQ ID NO: 1804111 - RNA, 19 nt, Homo sapiens
  misc_RNA (1)...(19): siRNA sense strand
auacagugguggaguggaa

SEQ ID NO: 1804112 - RNA, 19 nt, Homo sapiens
  misc_RNA (1)...(19): siRNA sense strand
ucucugauuugaacaguca

SEQ ID NO: 1804113 - RNA, 19 nt, Homo sapiens
  misc_RNA (1)...(19): siRNA sense strand
gguuccagguccauuaugu

SEQ ID NO: 1804114 - RNA, 19 nt, Homo sapiens
  misc_RNA (1)...(19): siRNA sense strand
gcuaaagcagcuacauguu

SEQ ID NO: 1804115 - RNA, 19 nt, Homo sapiens
  misc_RNA (1)...(19): siRNA sense strand
ucagguuccagguccauua

SEQ ID NO: 1804116 - RNA, 19 nt, Homo sapiens
  misc_RNA (1)...(19): siRNA sense strand
gacaauggaagaagcacuu

SEQ ID NO: 1804117 - RNA, 19 nt, Homo sapiens
  misc_RNA (1)...(19): siRNA sense strand
gguguggguggcagucuua

SEQ ID NO: 1804118 - RNA, 19 nt, Homo sapiens
  misc_RNA (1)...(19): siRNA sense strand
caagcagcaucauggagau

SEQ ID NO: 1804119 - RNA, 19 nt, Homo sapiens
  misc_RNA (1)...(19): siRNA sense strand
ccagggaagucugugacaa

SEQ ID NO: 1804120 - RNA, 19 nt, Homo sapiens
  misc_RNA (1)...(19): siRNA sense strand
uuacaucccacuccacuau

SEQ ID NO: 1804121 - RNA, 19 nt, Homo sapiens
  misc_RNA (1)...(19): siRNA sense strand
ucaagaacagagcuaaaga

SEQ ID NO: 1804122 - RNA, 19 nt, Homo sapiens
  misc_RNA (1)...(19): siRNA sense strand
ggaagcaagaggucagcaa

SEQ ID NO: 1804123 - RNA, 19 nt, Homo sapiens
  misc_RNA (1)...(19): siRNA sense strand
gcagggucucagcaaguua

SEQ ID NO: 1804124 - RNA, 19 nt, Homo sapiens
  misc_RNA (1)...(19): siRNA sense strand
gcaagugcaugggaaaaug

SEQ ID NO: 1804125 - RNA, 19 nt, Homo sapiens
  misc_RNA (1)...(19): siRNA sense strand
guggaaguuuguguuggua

SEQ ID NO: 1804126 - RNA, 19 nt, Homo sapiens
  misc_RNA (1)...(19): siRNA sense strand
caaaccagagcaucuucaa

SEQ ID NO: 1804127 - RNA, 19 nt, Homo sapiens
  misc_RNA (1)...(19): siRNA sense strand
caauagauuccuagaaacu

SEQ ID NO: 1804128 - RNA, 19 nt, Homo sapiens
  misc_RNA (1)...(19): siRNA sense strand
ggucucagcaaguuagugu

SEQ ID NO: 1804129 - RNA, 19 nt, Homo sapiens
  misc_RNA (1)...(19): siRNA sense strand
agggaagucugugacaauu

SEQ ID NO: 1804130 - RNA, 19 nt, Homo sapiens
  misc_RNA (1)...(19): siRNA sense strand
gugguggaguggaaguuug

SEQ ID NO: 1804131 - RNA, 19 nt, Homo sapiens
  misc_RNA (1)...(19): siRNA sense strand
cuugggagauggaacacuu

SEQ ID NO: 1804132 - RNA, 19 nt, Homo sapiens
  misc_RNA (1)...(19): siRNA sense strand
gaaagccuugaaucuccua

SEQ ID NO: 1804133 - RNA, 19 nt, Homo sapiens
  misc_RNA (1)...(19): siRNA sense strand
caucauggagauugcagaa

SEQ ID NO: 1804134 - RNA, 19 nt, Homo sapiens
  misc_RNA (1)...(19): siRNA sense strand
aagaaugcagcaauagauu

SEQ ID NO: 1804135 - RNA, 19 nt, Homo sapiens
  misc_RNA (1)...(19): siRNA sense strand
agaaaugaaagccuugaau

SEQ ID NO: 1804136 - RNA, 19 nt, Homo sapiens
  misc_RNA (1)...(19): siRNA sense strand
aaaugaaagccuugaaucu

SEQ ID NO: 1804137 - RNA, 19 nt, Homo sapiens
  misc_RNA (1)...(19): siRNA sense strand
cagcaauagauuccuagaa

SEQ ID NO: 1804138 - RNA, 19 nt, Homo sapiens
  misc_RNA (1)...(19): siRNA sense strand
ggucuggccggagcacuuu

SEQ ID NO: 1804139 - RNA, 19 nt, Homo sapiens
  misc_RNA (1)...(19): siRNA sense strand
gggaugcggagcaggagaa

SEQ ID NO: 1804140 - RNA, 19 nt, Homo sapiens
  misc_RNA (1)...(19): siRNA sense strand
caauucaagagaacauguu

SEQ ID NO: 1804141 - RNA, 19 nt, Homo sapiens
  misc_RNA (1)...(19): siRNA sense strand
agcaagaggucagcaagug

SEQ ID NO: 1804142 - RNA, 19 nt, Homo sapiens
  misc_RNA (1)...(19): siRNA sense strand
cagggaagucugugacaau

SEQ ID NO: 1804143 - RNA, 19 nt, Homo sapiens
  misc_RNA (1)...(19): siRNA sense strand
ucugagaccaguaacucua

SEQ ID NO: 1804144 - RNA, 19 nt, Homo sapiens
  misc_RNA (1)...(19): siRNA sense strand
gggaagaaugcagcaauag

SEQ ID NO: 1804145 - RNA, 19 nt, Homo sapiens
  misc_RNA (1)...(19): siRNA sense strand
gcagcaauagauuccuaga

SEQ ID NO: 1804146 - RNA, 19 nt, Homo sapiens
  misc_RNA (1)...(19): siRNA sense strand
gagcuaaagaagaaaugag

SEQ ID NO: 1804147 - RNA, 19 nt, Homo sapiens
  misc_RNA (1)...(19): siRNA sense strand
augcagcaauagauuccua

SEQ ID NO: 1804148 - RNA, 19 nt, Homo sapiens
  misc_RNA (1)...(19): siRNA sense strand
gacaguuuccagacacaga

SEQ ID NO: 1804149 - RNA, 19 nt, Homo sapiens
  misc_RNA (1)...(19): siRNA sense strand
gaauggacaauggaagaag

SEQ ID NO: 1804150 - RNA, 19 nt, Homo sapiens
  misc_RNA (1)...(19): siRNA sense strand
aagaaaugagccucucuga

SEQ ID NO: 1804151 - RNA, 19 nt, Homo sapiens
  misc_RNA (1)...(19): siRNA sense strand
cuacauguuuugcagagaa

SEQ ID NO: 1804152 - RNA, 19 nt, Homo sapiens
  misc_RNA (1)...(19): siRNA sense strand
cuaccucugagaccaguaa

SEQ ID NO: 1804153 - RNA, 19 nt, Homo sapiens
  misc_RNA (1)...(19): siRNA sense strand
guuacccgcugggaagaau

SEQ ID NO: 1804154 - RNA, 19 nt, Homo sapiens
  misc_RNA (1)...(19): siRNA sense strand
ugcagggucucagcaaguu

SEQ ID NO: 1804155 - RNA, 19 nt, Homo sapiens
  misc_RNA (1)...(19): siRNA sense strand
uggaaaggguagcagugau

SEQ ID NO: 1804156 - RNA, 19 nt, Homo sapiens
  misc_RNA (1)...(19): siRNA sense strand
caauggaagaagcacuuug

SEQ ID NO: 1804157 - RNA, 19 nt, Homo sapiens
  misc_RNA (1)...(19): siRNA sense strand
aaaccuaaaccagggaaug

SEQ ID NO: 1804158 - RNA, 19 nt, Homo sapiens
  misc_RNA (1)...(19): siRNA sense strand
gcagcaucauggagauugc

SEQ ID NO: 1804159 - RNA, 19 nt, Homo sapiens
  misc_RNA (1)...(19): siRNA sense strand
agaacagagcuaaagaaga

SEQ ID NO: 1804160 - RNA, 19 nt, Homo sapiens
  misc_RNA (1)...(19): siRNA sense strand
augcggagcaggagaaaga

SEQ ID NO: 1804161 - RNA, 19 nt, Homo sapiens
  misc_RNA (1)...(19): siRNA sense strand
gcaaggagucuauccauga

SEQ ID NO: 1804162 - RNA, 19 nt, Homo sapiens
  misc_RNA (1)...(19): siRNA sense strand
gacgugagccaguuugaua

SEQ ID NO: 1804163 - RNA, 19 nt, Homo sapiens
  misc_RNA (1)...(19): siRNA sense strand
ggaagaaaaccauggauaa

SEQ ID NO: 1804164 - RNA, 19 nt, Homo sapiens
  misc_RNA (1)...(19): siRNA sense strand
gcagagaaccggaagaaaa

SEQ ID NO: 1804165 - RNA, 19 nt, Homo sapiens
  misc_RNA (1)...(19): siRNA sense strand
gagcggaacauucuagagu

SEQ ID NO: 1804166 - RNA, 19 nt, Homo sapiens
  misc_RNA (1)...(19): siRNA sense strand
gcggaacauucuagaguca

SEQ ID NO: 1804167 - RNA, 19 nt, Homo sapiens
  misc_RNA (1)...(19): siRNA sense strand
ggaacauucuagagucagu

SEQ ID NO: 1804168 - RNA, 19 nt, Homo sapiens
  misc_RNA (1)...(19): siRNA sense strand
guacauggccccugagauu

SEQ ID NO: 1804169 - RNA, 19 nt, Homo sapiens
  misc_RNA (1)...(19): siRNA sense strand
caaggagucuauccaugag

SEQ ID NO: 1804170 - RNA, 19 nt, Homo sapiens
  misc_RNA (1)...(19): siRNA sense strand
gggcugagcggaacauucu

SEQ ID NO: 1804171 - RNA, 19 nt, Homo sapiens
  misc_RNA (1)...(19): siRNA sense strand
ccaggcgccucaacaguag

SEQ ID NO: 1804172 - RNA, 19 nt, Homo sapiens
  misc_RNA (1)...(19): siRNA sense strand
ggagcgagagggcaucuuc

SEQ ID NO: 1804173 - RNA, 19 nt, Homo sapiens
  misc_RNA (1)...(19): siRNA sense strand
caucaaacugaccgacuuu

SEQ ID NO: 1804174 - RNA, 19 nt, Homo sapiens
  misc_RNA (1)...(19): siRNA sense strand
gaauugggacgaccuucug

SEQ ID NO: 1804175 - RNA, 19 nt, Homo sapiens
  misc_RNA (1)...(19): siRNA sense strand
gcuucuaccuggcugagau

SEQ ID NO: 1804176 - RNA, 19 nt, Homo sapiens
  misc_RNA (1)...(19): siRNA sense strand
ggaggacgugagccaguuu

SEQ ID NO: 1804177 - RNA, 19 nt, Homo sapiens
  misc_RNA (1)...(19): siRNA sense strand
caacuugggcaaaauauau

SEQ ID NO: 1804178 - RNA, 19 nt, Homo sapiens
  misc_RNA (1)...(19): siRNA sense strand
acaucaaacugaccgacuu

SEQ ID NO: 1804179 - RNA, 19 nt, Homo sapiens
  misc_RNA (1)...(19): siRNA sense strand
caaacucuaccucauccuu

SEQ ID NO: 1804180 - RNA, 19 nt, Homo sapiens
  misc_RNA (1)...(19): siRNA sense strand
cccaggcgccucaacagua

SEQ ID NO: 1804181 - RNA, 19 nt, Homo sapiens
  misc_RNA (1)...(19): siRNA sense strand
gagguggagcugacugaga

SEQ ID NO: 1804182 - RNA, 19 nt, Homo sapiens
  misc_RNA (1)...(19): siRNA sense strand
caaggacacagcacacaca

SEQ ID NO: 1804183 - RNA, 19 nt, Homo sapiens
  misc_RNA (1)...(19): siRNA sense strand
cagccagggccacaucaaa

SEQ ID NO: 1804184 - RNA, 19 nt, Homo sapiens
  misc_RNA (1)...(19): siRNA sense strand
ugacugagaccagcgugaa

SEQ ID NO: 1804185 - RNA, 19 nt, Homo sapiens
  misc_RNA (1)...(19): siRNA sense strand
agaaaaccauggauaagau

SEQ ID NO: 1804186 - RNA, 19 nt, Homo sapiens
  misc_RNA (1)...(19): siRNA sense strand
cguguuugauuuggauuug

SEQ ID NO: 1804187 - RNA, 19 nt, Homo sapiens
  misc_RNA (1)...(19): siRNA sense strand
gugaagcaccccuuuauug

SEQ ID NO: 1804188 - RNA, 19 nt, Homo sapiens
  misc_RNA (1)...(19): siRNA sense strand
ccgcagagaaccggaagaa

SEQ ID NO: 1804189 - RNA, 19 nt, Homo sapiens
  misc_RNA (1)...(19): siRNA sense strand
ggccguguuugauuuggau

SEQ ID NO: 1804190 - RNA, 19 nt, Homo sapiens
  misc_RNA (1)...(19): siRNA sense strand
ggacgugagccaguuugau

SEQ ID NO: 1804191 - RNA, 19 nt, Homo sapiens
  misc_RNA (1)...(19): siRNA sense strand
ccucagggaccaagaaguc

SEQ ID NO: 1804192 - RNA, 19 nt, Homo sapiens
  misc_RNA (1)...(19): siRNA sense strand
gaagaaaaccauggauaag

SEQ ID NO: 1804193 - RNA, 19 nt, Homo sapiens
  misc_RNA (1)...(19): siRNA sense strand
uaaggaaggccaaaauugu

SEQ ID NO: 1804194 - RNA, 19 nt, Homo sapiens
  misc_RNA (1)...(19): siRNA sense strand
gcggcaccauugaguacau

SEQ ID NO: 1804195 - RNA, 19 nt, Homo sapiens
  misc_RNA (1)...(19): siRNA sense strand
guggcaaacucuaccucau

SEQ ID NO: 1804196 - RNA, 19 nt, Homo sapiens
  misc_RNA (1)...(19): siRNA sense strand
aacucuaccucauccuuga

SEQ ID NO: 1804197 - RNA, 19 nt, Homo sapiens
  misc_RNA (1)...(19): siRNA sense strand
uggaagauacggccugcuu

SEQ ID NO: 1804198 - RNA, 19 nt, Homo sapiens
  misc_RNA (1)...(19): siRNA sense strand
gaacugggcugggaugaga

SEQ ID NO: 1804199 - RNA, 19 nt, Homo sapiens
  misc_RNA (1)...(19): siRNA sense strand
gaugagaugucccuacaag

SEQ ID NO: 1804200 - RNA, 19 nt, Homo sapiens
  misc_RNA (1)...(19): siRNA sense strand
ugagaugucccuacaaguu

SEQ ID NO: 1804201 - RNA, 19 nt, Homo sapiens
  misc_RNA (1)...(19): siRNA sense strand
gagaugucccuacaaguug

SEQ ID NO: 1804202 - RNA, 19 nt, Homo sapiens
  misc_RNA (1)...(19): siRNA sense strand
gaucaucguguuccugugu

SEQ ID NO: 1804203 - RNA, 19 nt, Homo sapiens
  misc_RNA (1)...(19): siRNA sense strand
agcaagcgcuccagcaguu

SEQ ID NO: 1804204 - RNA, 19 nt, Homo sapiens
  misc_RNA (1)...(19): siRNA sense strand
ucaucguguuccuguguua

SEQ ID NO: 1804205 - RNA, 19 nt, Homo sapiens
  misc_RNA (1)...(19): siRNA sense strand
ggauggugcuggccuuggu

SEQ ID NO: 1804206 - RNA, 19 nt, Homo sapiens
  misc_RNA (1)...(19): siRNA sense strand
uggccaacguugucaugaa

SEQ ID NO: 1804207 - RNA, 19 nt, Homo sapiens
  misc_RNA (1)...(19): siRNA sense strand
ggccaacguugucaugaac

SEQ ID NO: 1804208 - RNA, 19 nt, Homo sapiens
  misc_RNA (1)...(19): siRNA sense strand
cgagaacacaggcuucauc

SEQ ID NO: 1804209 - RNA, 19 nt, Homo sapiens
  misc_RNA (1)...(19): siRNA sense strand
acgagauccugccuuguga

SEQ ID NO: 1804210 - RNA, 19 nt, Homo sapiens
  misc_RNA (1)...(19): siRNA sense strand
uuacguggccuacgagauc

SEQ ID NO: 1804211 - RNA, 19 nt, Homo sapiens
  misc_RNA (1)...(19): siRNA sense strand
ccuacaaguugcugaggau

SEQ ID NO: 1804212 - RNA, 19 nt, Homo sapiens
  misc_RNA (1)...(19): siRNA sense strand
ggaacgucuucgccuacga

SEQ ID NO: 1804213 - RNA, 19 nt, Homo sapiens
  misc_RNA (1)...(19): siRNA sense strand
ccaacguugucaugaacug

SEQ ID NO: 1804214 - RNA, 19 nt, Homo sapiens
  misc_RNA (1)...(19): siRNA sense strand
gcaagcgcuccagcaguuu

SEQ ID NO: 1804215 - RNA, 19 nt, Homo sapiens
  misc_RNA (1)...(19): siRNA sense strand
agugggugcugcagaccua

SEQ ID NO: 1804216 - RNA, 19 nt, Homo sapiens
  misc_RNA (1)...(19): siRNA sense strand
cggccaagcuggacaugcu

SEQ ID NO: 1804217 - RNA, 19 nt, Homo sapiens
  misc_RNA (1)...(19): siRNA sense strand
gcaucagccugcucuaccu

SEQ ID NO: 1804218 - RNA, 19 nt, Homo sapiens
  misc_RNA (1)...(19): siRNA sense strand
ugaccauccugcggagcua

SEQ ID NO: 1804219 - RNA, 19 nt, Homo sapiens
  misc_RNA (1)...(19): siRNA sense strand
aggccuaggugucuacaag

SEQ ID NO: 1804220 - RNA, 19 nt, Homo sapiens
  misc_RNA (1)...(19): siRNA sense strand
uacgagauccugccuugug

SEQ ID NO: 1804221 - RNA, 19 nt, Homo sapiens
  misc_RNA (1)...(19): siRNA sense strand
acaaguugcugaggauggu

SEQ ID NO: 1804222 - RNA, 19 nt, Homo sapiens
  misc_RNA (1)...(19): siRNA sense strand
gaagggaaccuguguuaua

SEQ ID NO: 1804223 - RNA, 19 nt, Homo sapiens
  misc_RNA (1)...(19): siRNA sense strand
gaaagaacuuguuguagga

SEQ ID NO: 1804224 - RNA, 19 nt, Homo sapiens
  misc_RNA (1)...(19): siRNA sense strand
gaaaugcgguacuguucua

SEQ ID NO: 1804225 - RNA, 19 nt, Homo sapiens
  misc_RNA (1)...(19): siRNA sense strand
ucaacaaacuggacaagua

SEQ ID NO: 1804226 - RNA, 19 nt, Homo sapiens
  misc_RNA (1)...(19): siRNA sense strand
gggaagaccuauucuaaug

SEQ ID NO: 1804227 - RNA, 19 nt, Homo sapiens
  misc_RNA (1)...(19): siRNA sense strand
ggaaagauacugcaaugaa

SEQ ID NO: 1804228 - RNA, 19 nt, Homo sapiens
  misc_RNA (1)...(19): siRNA sense strand
gaggagagccugagcauga

SEQ ID NO: 1804229 - RNA, 19 nt, Homo sapiens
  misc_RNA (1)...(19): siRNA sense strand
gaggaaagauacugcaaug

SEQ ID NO: 1804230 - RNA, 19 nt, Homo sapiens
  misc_RNA (1)...(19): siRNA sense strand
gaagaaugcugcggauuuc

SEQ ID NO: 1804231 - RNA, 19 nt, Homo sapiens
  misc_RNA (1)...(19): siRNA sense strand
gaagacaccuggaccacau

SEQ ID NO: 1804232 - RNA, 19 nt, Homo sapiens
  misc_RNA (1)...(19): siRNA sense strand
gagcaacgauuccgauaca

SEQ ID NO: 1804233 - RNA, 19 nt, Homo sapiens
  misc_RNA (1)...(19): siRNA sense strand
ggaaagaaacaaauacuuc

SEQ ID NO: 1804234 - RNA, 19 nt, Homo sapiens
  misc_RNA (1)...(19): siRNA sense strand
gacgugauccugccauuua

SEQ ID NO: 1804235 - RNA, 19 nt, Homo sapiens
  misc_RNA (1)...(19): siRNA sense strand
gaaagauacugcaaugaac

SEQ ID NO: 1804236 - RNA, 19 nt, Homo sapiens
  misc_RNA (1)...(19): siRNA sense strand
ggacagaaagaacuuguug

SEQ ID NO: 1804237 - RNA, 19 nt, Homo sapiens
  misc_RNA (1)...(19): siRNA sense strand
caucaaggcauuuaacaaa

SEQ ID NO: 1804238 - RNA, 19 nt, Homo sapiens
  misc_RNA (1)...(19): siRNA sense strand
ggacagaaccgcgaggaaa

SEQ ID NO: 1804239 - RNA, 19 nt, Homo sapiens
  misc_RNA (1)...(19): siRNA sense strand
cgaagaaugcugcggauuu

SEQ ID NO: 1804240 - RNA, 19 nt, Homo sapiens
  misc_RNA (1)...(19): siRNA sense strand
gcggauuucucgcaguuaa

SEQ ID NO: 1804241 - RNA, 19 nt, Homo sapiens
  misc_RNA (1)...(19): siRNA sense strand
ggacuggucugagugugaa

SEQ ID NO: 1804242 - RNA, 19 nt, Homo sapiens
  misc_RNA (1)...(19): siRNA sense strand
gcauggagaucgccaacug

SEQ ID NO: 1804243 - RNA, 19 nt, Homo sapiens
  misc_RNA (1)...(19): siRNA sense strand
ccagucaucuccuauaaag

SEQ ID NO: 1804244 - RNA, 19 nt, Homo sapiens
  misc_RNA (1)...(19): siRNA sense strand
ggaggacaauagccgcuuu

SEQ ID NO: 1804245 - RNA, 19 nt, Homo sapiens
  misc_RNA (1)...(19): siRNA sense strand
gaaaagguguggagaguuc

SEQ ID NO: 1804246 - RNA, 19 nt, Homo sapiens
  misc_RNA (1)...(19): siRNA sense strand
uagcauggcuguucucaag

SEQ ID NO: 1804247 - RNA, 19 nt, Homo sapiens
  misc_RNA (1)...(19): siRNA sense strand
gcugggaugugguaaugaa

SEQ ID NO: 1804248 - RNA, 19 nt, Homo sapiens
  misc_RNA (1)...(19): siRNA sense strand
gcaaaucaaaggaggaaug

SEQ ID NO: 1804249 - RNA, 19 nt, Homo sapiens
  misc_RNA (1)...(19): siRNA sense strand
guggagaguucaacauguu

SEQ ID NO: 1804250 - RNA, 19 nt, Homo sapiens
  misc_RNA (1)...(19): siRNA sense strand
agaaguaucuguggcaaga

SEQ ID NO: 1804251 - RNA, 19 nt, Homo sapiens
  misc_RNA (1)...(19): siRNA sense strand
gcaggaugcucagaaguuc

SEQ ID NO: 1804252 - RNA, 19 nt, Homo sapiens
  misc_RNA (1)...(19): siRNA sense strand
acagaaagaacuuguugua

SEQ ID NO: 1804253 - RNA, 19 nt, Homo sapiens
  misc_RNA (1)...(19): siRNA sense strand
gaagacagagaaucgaaau

SEQ ID NO: 1804254 - RNA, 19 nt, Homo sapiens
  misc_RNA (1)...(19): siRNA sense strand
gaagugggaagacagagaa

SEQ ID NO: 1804255 - RNA, 19 nt, Homo sapiens
  misc_RNA (1)...(19): siRNA sense strand
ggaaugggagugugaugaa

SEQ ID NO: 1804256 - RNA, 19 nt, Homo sapiens
  misc_RNA (1)...(19): siRNA sense strand
gguuacagcuugaggaucu

SEQ ID NO: 1804257 - RNA, 19 nt, Homo sapiens
  misc_RNA (1)...(19): siRNA sense strand
cuuaugacaucggaaauuu

SEQ ID NO: 1804258 - RNA, 19 nt, Homo sapiens
  misc_RNA (1)...(19): siRNA sense strand
gggaugugguaaugaagaa

SEQ ID NO: 1804259 - RNA, 19 nt, Homo sapiens
  misc_RNA (1)...(19): siRNA sense strand
ggaggaaugucagaacuac

SEQ ID NO: 1804260 - RNA, 19 nt, Homo sapiens
  misc_RNA (1)...(19): siRNA sense strand
gagcuggauuugaucuaug

SEQ ID NO: 1804261 - RNA, 19 nt, Homo sapiens
  misc_RNA (1)...(19): siRNA sense strand
ugacaacggcgaccacuau

SEQ ID NO: 1804262 - RNA, 19 nt, Homo sapiens
  misc_RNA (1)...(19): siRNA sense strand
ggaagacagagaaucgaaa

SEQ ID NO: 1804263 - RNA, 19 nt, Homo sapiens
  misc_RNA (1)...(19): siRNA sense strand
ucucugggcccuucaagua

SEQ ID NO: 1804264 - RNA, 19 nt, Homo sapiens
  misc_RNA (1)...(19): siRNA sense strand
uaaccaaccacaucaacaa

SEQ ID NO: 1804265 - RNA, 19 nt, Homo sapiens
  misc_RNA (1)...(19): siRNA sense strand
uuacggaaccauuaagaaa

SEQ ID NO: 1804266 - RNA, 19 nt, Homo sapiens
  misc_RNA (1)...(19): siRNA sense strand
gcaaaggcaaaucaaagga

SEQ ID NO: 1804267 - RNA, 19 nt, Homo sapiens
  misc_RNA (1)...(19): siRNA sense strand
acagauuacggaaccauua

SEQ ID NO: 1804268 - RNA, 19 nt, Homo sapiens
  misc_RNA (1)...(19): siRNA sense strand
gaaccgagcauccagucau

SEQ ID NO: 1804269 - RNA, 19 nt, Homo sapiens
  misc_RNA (1)...(19): siRNA sense strand
gcccaucucuggaauacca

SEQ ID NO: 1804270 - RNA, 19 nt, Homo sapiens
  misc_RNA (1)...(19): siRNA sense strand
gaugggcacuuuggugugu

SEQ ID NO: 1804271 - RNA, 19 nt, Homo sapiens
  misc_RNA (1)...(19): siRNA sense strand
uacaacgaauugcagagua

SEQ ID NO: 1804272 - RNA, 19 nt, Homo sapiens
  misc_RNA (1)...(19): siRNA sense strand
uugaggaucugucucuuau

SEQ ID NO: 1804273 - RNA, 19 nt, Homo sapiens
  misc_RNA (1)...(19): siRNA sense strand
gggaaccuguguuauagca

SEQ ID NO: 1804274 - RNA, 19 nt, Homo sapiens
  misc_RNA (1)...(19): siRNA sense strand
gggagcacguggucaagau

SEQ ID NO: 1804275 - RNA, 19 nt, Homo sapiens
  misc_RNA (1)...(19): siRNA sense strand
gcuguuugcuggaagagau

SEQ ID NO: 1804276 - RNA, 19 nt, Homo sapiens
  misc_RNA (1)...(19): siRNA sense strand
gaaccugaccgagagaaau

SEQ ID NO: 1804277 - RNA, 19 nt, Homo sapiens
  misc_RNA (1)...(19): siRNA sense strand
gagcaugacugugggaaaa

SEQ ID NO: 1804278 - RNA, 19 nt, Homo sapiens
  misc_RNA (1)...(19): siRNA sense strand
uuugaucuauggcaucuuu

SEQ ID NO: 1804279 - RNA, 19 nt, Homo sapiens
  misc_RNA (1)...(19): siRNA sense strand
guguuugacucuaauuuca

SEQ ID NO: 1804280 - RNA, 19 nt, Homo sapiens
  misc_RNA (1)...(19): siRNA sense strand
guccugagcugaagaagac

SEQ ID NO: 1804281 - RNA, 19 nt, Homo sapiens
  misc_RNA (1)...(19): siRNA sense strand
cgagagaaaucugcaggau

SEQ ID NO: 1804282 - RNA, 19 nt, Homo sapiens
  misc_RNA (1)...(19): siRNA sense strand
gcaguacaacuccaaaugg

SEQ ID NO: 1804283 - RNA, 19 nt, Homo sapiens
  misc_RNA (1)...(19): siRNA sense strand
agucaucuccuauaaagaa

SEQ ID NO: 1804284 - RNA, 19 nt, Homo sapiens
  misc_RNA (1)...(19): siRNA sense strand
caaccuggcugagauccau

SEQ ID NO: 1804285 - RNA, 19 nt, Homo sapiens
  misc_RNA (1)...(19): siRNA sense strand
gaaucgaaaugcgguacug

SEQ ID NO: 1804286 - RNA, 19 nt, Homo sapiens
  misc_RNA (1)...(19): siRNA sense strand
ggaagugggaagacagaga

SEQ ID NO: 1804287 - RNA, 19 nt, Homo sapiens
  misc_RNA (1)...(19): siRNA sense strand
ugccugagcuggauuugau

SEQ ID NO: 1804288 - RNA, 19 nt, Homo sapiens
  misc_RNA (1)...(19): siRNA sense strand
gcacggcgcaguacaacuc

SEQ ID NO: 1804289 - RNA, 19 nt, Homo sapiens
  misc_RNA (1)...(19): siRNA sense strand
ugagcaaccuggcugagau

SEQ ID NO: 1804290 - RNA, 19 nt, Homo sapiens
  misc_RNA (1)...(19): siRNA sense strand
caacaaacuggacaaguac

SEQ ID NO: 1804291 - RNA, 19 nt, Homo sapiens
  misc_RNA (1)...(19): siRNA sense strand
cagcauaaccaaccacauc

SEQ ID NO: 1804292 - RNA, 19 nt, Homo sapiens
  misc_RNA (1)...(19): siRNA sense strand
ccaguagcguagaagagaa

SEQ ID NO: 1804293 - RNA, 19 nt, Homo sapiens
  misc_RNA (1)...(19): siRNA sense strand
ucuauuuggccacagauua

SEQ ID NO: 1804294 - RNA, 19 nt, Homo sapiens
  misc_RNA (1)...(19): siRNA sense strand
ccaccaaugugaacagcau

SEQ ID NO: 1804295 - RNA, 19 nt, Homo sapiens
  misc_RNA (1)...(19): siRNA sense strand
uaccgaagccuaggcauuu

SEQ ID NO: 1804296 - RNA, 19 nt, Homo sapiens
  misc_RNA (1)...(19): siRNA sense strand
ggacgugauccugccauuu

SEQ ID NO: 1804297 - RNA, 19 nt, Homo sapiens
  misc_RNA (1)...(19): siRNA sense strand
cagauuacggaaccauuaa

SEQ ID NO: 1804298 - RNA, 19 nt, Homo sapiens
  misc_RNA (1)...(19): siRNA sense strand
ugaagccucuggcguccaa

SEQ ID NO: 1804299 - RNA, 19 nt, Homo sapiens
  misc_RNA (1)...(19): siRNA sense strand
gaaccgcgaggaaagauac

SEQ ID NO: 1804300 - RNA, 19 nt, Homo sapiens
  misc_RNA (1)...(19): siRNA sense strand
caccguggaugggcacuuu

SEQ ID NO: 1804301 - RNA, 19 nt, Homo sapiens
  misc_RNA (1)...(19): siRNA sense strand
aagggaaccuguguuauag

SEQ ID NO: 1804302 - RNA, 19 nt, Homo sapiens
  misc_RNA (1)...(19): siRNA sense strand
gaaugggagugugaugaag

SEQ ID NO: 1804303 - RNA, 19 nt, Homo sapiens
  misc_RNA (1)...(19): siRNA sense strand
uaauuucaucccagaagua

SEQ ID NO: 1804304 - RNA, 19 nt, Homo sapiens
  misc_RNA (1)...(19): siRNA sense strand
aaucaaaggaggaauguca

SEQ ID NO: 1804305 - RNA, 19 nt, Homo sapiens
  misc_RNA (1)...(19): siRNA sense strand
cagcaaaggcaaaucaaag

SEQ ID NO: 1804306 - RNA, 19 nt, Homo sapiens
  misc_RNA (1)...(19): siRNA sense strand
gacccgcucuugcuccaau

SEQ ID NO: 1804307 - RNA, 19 nt, Homo sapiens
  misc_RNA (1)...(19): siRNA sense strand
cugggaagaccuauucuaa

SEQ ID NO: 1804308 - RNA, 19 nt, Homo sapiens
  misc_RNA (1)...(19): siRNA sense strand
ucacugggaagaccuauuc

SEQ ID NO: 1804309 - RNA, 19 nt, Homo sapiens
  misc_RNA (1)...(19): siRNA sense strand
ccaaccacaucaacaaacu

SEQ ID NO: 1804310 - RNA, 19 nt, Homo sapiens
  misc_RNA (1)...(19): siRNA sense strand
caaaggaggaaugucagaa

SEQ ID NO: 1804311 - RNA, 19 nt, Homo sapiens
  misc_RNA (1)...(19): siRNA sense strand
cguguguguuugacucuaa

SEQ ID NO: 1804312 - RNA, 19 nt, Homo sapiens
  misc_RNA (1)...(19): siRNA sense strand
gggaagacagagaaucgaa

SEQ ID NO: 1804313 - RNA, 19 nt, Homo sapiens
  misc_RNA (1)...(19): siRNA sense strand
gcaacgauuccgauacaca

SEQ ID NO: 1804314 - RNA, 19 nt, Homo sapiens
  misc_RNA (1)...(19): siRNA sense strand
guaaugaagaaaugcacaa

SEQ ID NO: 1804315 - RNA, 19 nt, Homo sapiens
  misc_RNA (1)...(19): siRNA sense strand
gauuacggaaccauuaaga

SEQ ID NO: 1804316 - RNA, 19 nt, Homo sapiens
  misc_RNA (1)...(19): siRNA sense strand
ugagcuggauuugaucuau

SEQ ID NO: 1804317 - RNA, 19 nt, Homo sapiens
  misc_RNA (1)...(19): siRNA sense strand
caucuuaugacaucggaaa

SEQ ID NO: 1804318 - RNA, 19 nt, Homo sapiens
  misc_RNA (1)...(19): siRNA sense strand
ggagcucuaugcugcuaca

SEQ ID NO: 1804319 - RNA, 19 nt, Homo sapiens
  misc_RNA (1)...(19): siRNA sense strand
ucucgcaguuaacauuuga

SEQ ID NO: 1804320 - RNA, 19 nt, Homo sapiens
  misc_RNA (1)...(19): siRNA sense strand
gagaaaagguguggagagu

SEQ ID NO: 1804321 - RNA, 19 nt, Homo sapiens
  misc_RNA (1)...(19): siRNA sense strand
gaaguucauucuggugcau

SEQ ID NO: 1804322 - RNA, 19 nt, Homo sapiens
  misc_RNA (1)...(19): siRNA sense strand
aaacuucccuuuguucuuu

SEQ ID NO: 1804323 - RNA, 19 nt, Homo sapiens
  misc_RNA (1)...(19): siRNA sense strand
gcacugaaacucacacuga

SEQ ID NO: 1804324 - RNA, 19 nt, Homo sapiens
  misc_RNA (1)...(19): siRNA sense strand
ggcccuggcugacauguuu

SEQ ID NO: 1804325 - RNA, 19 nt, Homo sapiens
  misc_RNA (1)...(19): siRNA sense strand
gacacgcacuguugauuug

SEQ ID NO: 1804326 - RNA, 19 nt, Homo sapiens
  misc_RNA (1)...(19): siRNA sense strand
cagcauacacuucguuauu

SEQ ID NO: 1804327 - RNA, 19 nt, Homo sapiens
  misc_RNA (1)...(19): siRNA sense strand
uggaagagaugccuugugu

SEQ ID NO: 1804328 - RNA, 19 nt, Homo sapiens
  misc_RNA (1)...(19): siRNA sense strand
ugacaucuuuaucugguuu

SEQ ID NO: 1804329 - RNA, 19 nt, Homo sapiens
  misc_RNA (1)...(19): siRNA sense strand
uuccaucucuguuucauuu

SEQ ID NO: 1804330 - RNA, 19 nt, Homo sapiens
  misc_RNA (1)...(19): siRNA sense strand
gacagccuccuucacuuua

SEQ ID NO: 1804331 - RNA, 19 nt, Homo sapiens
  misc_RNA (1)...(19): siRNA sense strand
gcuagggaauguauuugug

SEQ ID NO: 1804332 - RNA, 19 nt, Homo sapiens
  misc_RNA (1)...(19): siRNA sense strand
gguuaaacuucccuuuguu

SEQ ID NO: 1804333 - RNA, 19 nt, Homo sapiens
  misc_RNA (1)...(19): siRNA sense strand
augaucagcuuguauguga

SEQ ID NO: 1804334 - RNA, 19 nt, Homo sapiens
  misc_RNA (1)...(19): siRNA sense strand
guggagagcugcugguucu

SEQ ID NO: 1804335 - RNA, 19 nt, Homo sapiens
  misc_RNA (1)...(19): siRNA sense strand
gcauccaguuggucaucua

SEQ ID NO: 1804336 - RNA, 19 nt, Homo sapiens
  misc_RNA (1)...(19): siRNA sense strand
cgacagccuccuucacuuu

SEQ ID NO: 1804337 - RNA, 19 nt, Homo sapiens
  misc_RNA (1)...(19): siRNA sense strand
gcauuguugugggcauaua

SEQ ID NO: 1804338 - RNA, 19 nt, Homo sapiens
  misc_RNA (1)...(19): siRNA sense strand
cagacaggcucagcagauu

SEQ ID NO: 1804339 - RNA, 19 nt, Homo sapiens
  misc_RNA (1)...(19): siRNA sense strand
gcuuguaugugaagaucuu

SEQ ID NO: 1804340 - RNA, 19 nt, Homo sapiens
  misc_RNA (1)...(19): siRNA sense strand
gggcauuguugugggcaua

SEQ ID NO: 1804341 - RNA, 19 nt, Homo sapiens
  misc_RNA (1)...(19): siRNA sense strand
ccaagacccugggcauugu

SEQ ID NO: 1804342 - RNA, 19 nt, Homo sapiens
  misc_RNA (1)...(19): siRNA sense strand
caucuuccaucucuguuuc

SEQ ID NO: 1804343 - RNA, 19 nt, Homo sapiens
  misc_RNA (1)...(19): siRNA sense strand
cauccaaggugcugaagag

SEQ ID NO: 1804344 - RNA, 19 nt, Homo sapiens
  misc_RNA (1)...(19): siRNA sense strand
ccacuggucuuugacaucu

SEQ ID NO: 1804345 - RNA, 19 nt, Homo sapiens
  misc_RNA (1)...(19): siRNA sense strand
agacacgcacuguugauuu

SEQ ID NO: 1804346 - RNA, 19 nt, Homo sapiens
  misc_RNA (1)...(19): siRNA sense strand
agacaggcucagcagauua

SEQ ID NO: 1804347 - RNA, 19 nt, Homo sapiens
  misc_RNA (1)...(19): siRNA sense strand
gccaagacccugggcauug

SEQ ID NO: 1804348 - RNA, 19 nt, Homo sapiens
  misc_RNA (1)...(19): siRNA sense strand
cagcagauuaccacauuga

SEQ ID NO: 1804349 - RNA, 19 nt, Homo sapiens
  misc_RNA (1)...(19): siRNA sense strand
acacuucguuauuccucua

SEQ ID NO: 1804350 - RNA, 19 nt, Homo sapiens
  misc_RNA (1)...(19): siRNA sense strand
uaucugguuugcuuacuuc

SEQ ID NO: 1804351 - RNA, 19 nt, Homo sapiens
  misc_RNA (1)...(19): siRNA sense strand
ugguuaaacuucccuuugu

SEQ ID NO: 1804352 - RNA, 19 nt, Homo sapiens
  misc_RNA (1)...(19): siRNA sense strand
cucagcagauuaccacauu

SEQ ID NO: 1804353 - RNA, 19 nt, Homo sapiens
  misc_RNA (1)...(19): siRNA sense strand
ugauuuguaccaagaauga

SEQ ID NO: 1804354 - RNA, 19 nt, Homo sapiens
  misc_RNA (1)...(19): siRNA sense strand
ccgcagacacgcacuguug

SEQ ID NO: 1804355 - RNA, 19 nt, Homo sapiens
  misc_RNA (1)...(19): siRNA sense strand
gaagaucuuugugguugcu

SEQ ID NO: 1804356 - RNA, 19 nt, Homo sapiens
  misc_RNA (1)...(19): siRNA sense strand
uggcugcccuucaccauag

SEQ ID NO: 1804357 - RNA, 19 nt, Homo sapiens
  misc_RNA (1)...(19): siRNA sense strand
ggagagcugcugguucuuc

SEQ ID NO: 1804358 - RNA, 19 nt, Homo sapiens
  misc_RNA (1)...(19): siRNA sense strand
cguuauuccucuacacaga

SEQ ID NO: 1804359 - RNA, 19 nt, Homo sapiens
  misc_RNA (1)...(19): siRNA sense strand
cacgcacuguugauuugua

SEQ ID NO: 1804360 - RNA, 19 nt, Homo sapiens
  misc_RNA (1)...(19): siRNA sense strand
cauuugcuguguccuacuu

SEQ ID NO: 1804361 - RNA, 19 nt, Homo sapiens
  misc_RNA (1)...(19): siRNA sense strand
ccagacaggcucagcagau

SEQ ID NO: 1804362 - RNA, 19 nt, Homo sapiens
  misc_RNA (1)...(19): siRNA sense strand
gcucuaucccuccaaguuc

SEQ ID NO: 1804363 - RNA, 19 nt, Homo sapiens
  misc_RNA (1)...(19): siRNA sense strand
gcauacacuucguuauucc

SEQ ID NO: 1804364 - RNA, 19 nt, Homo sapiens
  misc_RNA (1)...(19): siRNA sense strand
gcaggcaugcugauuaucg

SEQ ID NO: 1804365 - RNA, 19 nt, Homo sapiens
  misc_RNA (1)...(19): siRNA sense strand
guuaaacuucccuuuguuc

SEQ ID NO: 1804366 - RNA, 19 nt, Homo sapiens
  misc_RNA (1)...(19): siRNA sense strand
gcagacacgcacuguugau

SEQ ID NO: 1804367 - RNA, 19 nt, Homo sapiens
  misc_RNA (1)...(19): siRNA sense strand
cagcuuguaugugaagauc

SEQ ID NO: 1804368 - RNA, 19 nt, Homo sapiens
  misc_RNA (1)...(19): siRNA sense strand
uaaacuucccuuuguucuu

SEQ ID NO: 1804369 - RNA, 19 nt, Homo sapiens
  misc_RNA (1)...(19): siRNA sense strand
ucaccuccaucuuccaucu

SEQ ID NO: 1804370 - RNA, 19 nt, Homo sapiens
  misc_RNA (1)...(19): siRNA sense strand
acuggucuuugacaucuuu

SEQ ID NO: 1804371 - RNA, 19 nt, Homo sapiens
  misc_RNA (1)...(19): siRNA sense strand
ucuguuucauuuccauuga

SEQ ID NO: 1804372 - RNA, 19 nt, Homo sapiens
  misc_RNA (1)...(19): siRNA sense strand
gaucagcuuguaugugaag

SEQ ID NO: 1804373 - RNA, 19 nt, Homo sapiens
  misc_RNA (1)...(19): siRNA sense strand
cugccaagcaugagagaaa

SEQ ID NO: 1804374 - RNA, 19 nt, Homo sapiens
  misc_RNA (1)...(19): siRNA sense strand
guugauuuguaccaagaau

SEQ ID NO: 1804375 - RNA, 19 nt, Homo sapiens
  misc_RNA (1)...(19): siRNA sense strand
agcauacacuucguuauuc

SEQ ID NO: 1804376 - RNA, 19 nt, Homo sapiens
  misc_RNA (1)...(19): siRNA sense strand
gcuguguccuacuucaaag

SEQ ID NO: 1804377 - RNA, 19 nt, Homo sapiens
  misc_RNA (1)...(19): siRNA sense strand
gcaaccccaucaucuaugu

SEQ ID NO: 1804378 - RNA, 19 nt, Homo sapiens
  misc_RNA (1)...(19): siRNA sense strand
cgugcuagggaauguauuu

SEQ ID NO: 1804379 - RNA, 19 nt, Homo sapiens
  misc_RNA (1)...(19): siRNA sense strand
gcagcauacacuucguuau

SEQ ID NO: 1804380 - RNA, 19 nt, Homo sapiens
  misc_RNA (1)...(19): siRNA sense strand
cggaaggcacugaaacuca

SEQ ID NO: 1804381 - RNA, 19 nt, Homo sapiens
  misc_RNA (1)...(19): siRNA sense strand
cagaugugguagagacaag

SEQ ID NO: 1804382 - RNA, 19 nt, Homo sapiens
  misc_RNA (1)...(19): siRNA sense strand
ucacacgcccaccaacuuc

SEQ ID NO: 1804383 - RNA, 19 nt, Homo sapiens
  misc_RNA (1)...(19): siRNA sense strand
gcugcugcucaauaaauuu

SEQ ID NO: 1804384 - RNA, 19 nt, Homo sapiens
  misc_RNA (1)...(19): siRNA sense strand
ucgacagccuccuucacuu

SEQ ID NO: 1804385 - RNA, 19 nt, Homo sapiens
  misc_RNA (1)...(19): siRNA sense strand
ucagcagauuaccacauug

SEQ ID NO: 1804386 - RNA, 19 nt, Homo sapiens
  misc_RNA (1)...(19): siRNA sense strand
gacaggcucagcagauuac

SEQ ID NO: 1804387 - RNA, 19 nt, Homo sapiens
  misc_RNA (1)...(19): siRNA sense strand
cagacacgcacuguugauu

SEQ ID NO: 1804388 - RNA, 19 nt, Homo sapiens
  misc_RNA (1)...(19): siRNA sense strand
gauggucgacagccuccuu

SEQ ID NO: 1804389 - RNA, 19 nt, Homo sapiens
  misc_RNA (1)...(19): siRNA sense strand
gcaaauaccugaagaagaa

SEQ ID NO: 1804390 - RNA, 19 nt, Homo sapiens
  misc_RNA (1)...(19): siRNA sense strand
gaacugaggugguaaagaa

SEQ ID NO: 1804391 - RNA, 19 nt, Homo sapiens
  misc_RNA (1)...(19): siRNA sense strand
gaagaaaccuggaggcuuu

SEQ ID NO: 1804392 - RNA, 19 nt, Homo sapiens
  misc_RNA (1)...(19): siRNA sense strand
ggaaagcgcugcaauuaga

SEQ ID NO: 1804393 - RNA, 19 nt, Homo sapiens
  misc_RNA (1)...(19): siRNA sense strand
gaguggagcugguucagua

SEQ ID NO: 1804394 - RNA, 19 nt, Homo sapiens
  misc_RNA (1)...(19): siRNA sense strand
cagcgcaacuucagcauua

SEQ ID NO: 1804395 - RNA, 19 nt, Homo sapiens
  misc_RNA (1)...(19): siRNA sense strand
uagaagagcugaaccaguu

SEQ ID NO: 1804396 - RNA, 19 nt, Homo sapiens
  misc_RNA (1)...(19): siRNA sense strand
gaccagcgguuacaaagaa

SEQ ID NO: 1804397 - RNA, 19 nt, Homo sapiens
  misc_RNA (1)...(19): siRNA sense strand
gaugauugcugaagaggaa

SEQ ID NO: 1804398 - RNA, 19 nt, Homo sapiens
  misc_RNA (1)...(19): siRNA sense strand
gaggaaagccugaaggaaa

SEQ ID NO: 1804399 - RNA, 19 nt, Homo sapiens
  misc_RNA (1)...(19): siRNA sense strand
acaaagaacugagguggua

SEQ ID NO: 1804400 - RNA, 19 nt, Homo sapiens
  misc_RNA (1)...(19): siRNA sense strand
aaagagaugugguguguga

SEQ ID NO: 1804401 - RNA, 19 nt, Homo sapiens
  misc_RNA (1)...(19): siRNA sense strand
aaagacaacugaagaacaa

SEQ ID NO: 1804402 - RNA, 19 nt, Homo sapiens
  misc_RNA (1)...(19): siRNA sense strand
uaaagaagcauaucaagga

SEQ ID NO: 1804403 - RNA, 19 nt, Homo sapiens
  misc_RNA (1)...(19): siRNA sense strand
gaacugugcgaaauucuuu

SEQ ID NO: 1804404 - RNA, 19 nt, Homo sapiens
  misc_RNA (1)...(19): siRNA sense strand
ggcaacaugugacaacuuu

SEQ ID NO: 1804405 - RNA, 19 nt, Homo sapiens
  misc_RNA (1)...(19): siRNA sense strand
ggaaauaugggagcuaauu

SEQ ID NO: 1804406 - RNA, 19 nt, Homo sapiens
  misc_RNA (1)...(19): siRNA sense strand
gcacguaagcugaacacua

SEQ ID NO: 1804407 - RNA, 19 nt, Homo sapiens
  misc_RNA (1)...(19): siRNA sense strand
gaaggaaagacucaucaaa

SEQ ID NO: 1804408 - RNA, 19 nt, Homo sapiens
  misc_RNA (1)...(19): siRNA sense strand
ugaaagagauguggugugu

SEQ ID NO: 1804409 - RNA, 19 nt, Homo sapiens
  misc_RNA (1)...(19): siRNA sense strand
gaagaugccuuuuguuugu

SEQ ID NO: 1804410 - RNA, 19 nt, Homo sapiens
  misc_RNA (1)...(19): siRNA sense strand
gcugaggacuacacagaaa

SEQ ID NO: 1804411 - RNA, 19 nt, Homo sapiens
  misc_RNA (1)...(19): siRNA sense strand
ggagaauauugcaacacua

SEQ ID NO: 1804412 - RNA, 19 nt, Homo sapiens
  misc_RNA (1)...(19): siRNA sense strand
cagcaccuauucugaguuu

SEQ ID NO: 1804413 - RNA, 19 nt, Homo sapiens
  misc_RNA (1)...(19): siRNA sense strand
caagaacugugcgaaauuc

SEQ ID NO: 1804414 - RNA, 19 nt, Homo sapiens
  misc_RNA (1)...(19): siRNA sense strand
gugaggaguuugucaguau

SEQ ID NO: 1804415 - RNA, 19 nt, Homo sapiens
  misc_RNA (1)...(19): siRNA sense strand
gaaagacaacugaagaaca

SEQ ID NO: 1804416 - RNA, 19 nt, Homo sapiens
  misc_RNA (1)...(19): siRNA sense strand
gaaauaugggagcuaauug

SEQ ID NO: 1804417 - RNA, 19 nt, Homo sapiens
  misc_RNA (1)...(19): siRNA sense strand
ggcagaaauucauggagua

SEQ ID NO: 1804418 - RNA, 19 nt, Homo sapiens
  misc_RNA (1)...(19): siRNA sense strand
caacaugugacaacuuuga

SEQ ID NO: 1804419 - RNA, 19 nt, Homo sapiens
  misc_RNA (1)...(19): siRNA sense strand
gcaaagcacguaagcugaa

SEQ ID NO: 1804420 - RNA, 19 nt, Homo sapiens
  misc_RNA (1)...(19): siRNA sense strand
gaaaugcagaaaucacaaa

SEQ ID NO: 1804421 - RNA, 19 nt, Homo sapiens
  misc_RNA (1)...(19): siRNA sense strand
uaaaucaccuucgggaaau

SEQ ID NO: 1804422 - RNA, 19 nt, Homo sapiens
  misc_RNA (1)...(19): siRNA sense strand
gaagcuguggccaccauua

SEQ ID NO: 1804423 - RNA, 19 nt, Homo sapiens
  misc_RNA (1)...(19): siRNA sense strand
caaaggcauuuauggugaa

SEQ ID NO: 1804424 - RNA, 19 nt, Homo sapiens
  misc_RNA (1)...(19): siRNA sense strand
gaacauucaaaggcauuua

SEQ ID NO: 1804425 - RNA, 19 nt, Homo sapiens
  misc_RNA (1)...(19): siRNA sense strand
gcuccacgaugcugagauu

SEQ ID NO: 1804426 - RNA, 19 nt, Homo sapiens
  misc_RNA (1)...(19): siRNA sense strand
gcagcgaguuacauguuga

SEQ ID NO: 1804427 - RNA, 19 nt, Homo sapiens
  misc_RNA (1)...(19): siRNA sense strand
ccggaaagcgcugcaauua

SEQ ID NO: 1804428 - RNA, 19 nt, Homo sapiens
  misc_RNA (1)...(19): siRNA sense strand
gaucaagaacugugcgaaa

SEQ ID NO: 1804429 - RNA, 19 nt, Homo sapiens
  misc_RNA (1)...(19): siRNA sense strand
gcggaggaguccauaguau

SEQ ID NO: 1804430 - RNA, 19 nt, Homo sapiens
  misc_RNA (1)...(19): siRNA sense strand
aaagaagcauaucaaggaa

SEQ ID NO: 1804431 - RNA, 19 nt, Homo sapiens
  misc_RNA (1)...(19): siRNA sense strand
agaaauucauggaguaugu

SEQ ID NO: 1804432 - RNA, 19 nt, Homo sapiens
  misc_RNA (1)...(19): siRNA sense strand
gaacaggaacauucaaagg

SEQ ID NO: 1804433 - RNA, 19 nt, Homo sapiens
  misc_RNA (1)...(19): siRNA sense strand
gcagaaagcccuaaaucac

SEQ ID NO: 1804434 - RNA, 19 nt, Homo sapiens
  misc_RNA (1)...(19): siRNA sense strand
gcacccaaguggaauugau

SEQ ID NO: 1804435 - RNA, 19 nt, Homo sapiens
  misc_RNA (1)...(19): siRNA sense strand
gagaaaagcuucagaucca

SEQ ID NO: 1804436 - RNA, 19 nt, Homo sapiens
  misc_RNA (1)...(19): siRNA sense strand
cuaaaucaccuucgggaaa

SEQ ID NO: 1804437 - RNA, 19 nt, Homo sapiens
  misc_RNA (1)...(19): siRNA sense strand
ugaggaguuugucaguaua

SEQ ID NO: 1804438 - RNA, 19 nt, Homo sapiens
  misc_RNA (1)...(19): siRNA sense strand
cacguaagcugaacacuac

SEQ ID NO: 1804439 - RNA, 19 nt, Homo sapiens
  misc_RNA (1)...(19): siRNA sense strand
gaauauugcaacacuacaa

SEQ ID NO: 1804440 - RNA, 19 nt, Homo sapiens
  misc_RNA (1)...(19): siRNA sense strand
ucuuagaguuugagagaaa

SEQ ID NO: 1804441 - RNA, 19 nt, Homo sapiens
  misc_RNA (1)...(19): siRNA sense strand
caaaggcuuccaaaucuga

SEQ ID NO: 1804442 - RNA, 19 nt, Homo sapiens
  misc_RNA (1)...(19): siRNA sense strand
aaugggagaugcaucgauu

SEQ ID NO: 1804443 - RNA, 19 nt, Homo sapiens
  misc_RNA (1)...(19): siRNA sense strand
gagaagcuguggccaccau

SEQ ID NO: 1804444 - RNA, 19 nt, Homo sapiens
  misc_RNA (1)...(19): siRNA sense strand
gagauguggugugugaaga

SEQ ID NO: 1804445 - RNA, 19 nt, Homo sapiens
  misc_RNA (1)...(19): siRNA sense strand
ucacaaggaacucuuugaa

SEQ ID NO: 1804446 - RNA, 19 nt, Homo sapiens
  misc_RNA (1)...(19): siRNA sense strand
gaacuccuggauaugauga

SEQ ID NO: 1804447 - RNA, 19 nt, Homo sapiens
  misc_RNA (1)...(19): siRNA sense strand
guccagaagugggaagaaa

SEQ ID NO: 1804448 - RNA, 19 nt, Homo sapiens
  misc_RNA (1)...(19): siRNA sense strand
gaaagcgcugcaauuagaa

SEQ ID NO: 1804449 - RNA, 19 nt, Homo sapiens
  misc_RNA (1)...(19): siRNA sense strand
gcagaaaucacaaaaugaa

SEQ ID NO: 1804450 - RNA, 19 nt, Homo sapiens
  misc_RNA (1)...(19): siRNA sense strand
gugcgaaauucuuuguaug

SEQ ID NO: 1804451 - RNA, 19 nt, Homo sapiens
  misc_RNA (1)...(19): siRNA sense strand
cgggaaauaugggagcuaa

SEQ ID NO: 1804452 - RNA, 19 nt, Homo sapiens
  misc_RNA (1)...(19): siRNA sense strand
uggcagcgcuccucgaaca

SEQ ID NO: 1804453 - RNA, 19 nt, Homo sapiens
  misc_RNA (1)...(19): siRNA sense strand
gagccaagcaggaaagaca

SEQ ID NO: 1804454 - RNA, 19 nt, Homo sapiens
  misc_RNA (1)...(19): siRNA sense strand
gggaacaggaacauucaaa

SEQ ID NO: 1804455 - RNA, 19 nt, Homo sapiens
  misc_RNA (1)...(19): siRNA sense strand
ggaaaugcagaaaucacaa

SEQ ID NO: 1804456 - RNA, 19 nt, Homo sapiens
  misc_RNA (1)...(19): siRNA sense strand
gaguuugucaguauaaaga

SEQ ID NO: 1804457 - RNA, 19 nt, Homo sapiens
  misc_RNA (1)...(19): siRNA sense strand
ucaagaacugugcgaaauu

SEQ ID NO: 1804458 - RNA, 19 nt, Homo sapiens
  misc_RNA (1)...(19): siRNA sense strand
agagcaagaucaagaacug

SEQ ID NO: 1804459 - RNA, 19 nt, Homo sapiens
  misc_RNA (1)...(19): siRNA sense strand
caggaaagacaacugaaga

SEQ ID NO: 1804460 - RNA, 19 nt, Homo sapiens
  misc_RNA (1)...(19): siRNA sense strand
ccacgaugcugagauugug

SEQ ID NO: 1804461 - RNA, 19 nt, Homo sapiens
  misc_RNA (1)...(19): siRNA sense strand
ugaagacgaagaugccuuu

SEQ ID NO: 1804462 - RNA, 19 nt, Homo sapiens
  misc_RNA (1)...(19): siRNA sense strand
ccacuaugauauugacagu

SEQ ID NO: 1804463 - RNA, 19 nt, Homo sapiens
  misc_RNA (1)...(19): siRNA sense strand
ccaaaucugaugcuacuuc

SEQ ID NO: 1804464 - RNA, 19 nt, Homo sapiens
  misc_RNA (1)...(19): siRNA sense strand
gaguugaaggcacgaauug

SEQ ID NO: 1804465 - RNA, 19 nt, Homo sapiens
  misc_RNA (1)...(19): siRNA sense strand
ugcccaagcuggaagaaga

SEQ ID NO: 1804466 - RNA, 19 nt, Homo sapiens
  misc_RNA (1)...(19): siRNA sense strand
gaggaggaaaucuucuaaa

SEQ ID NO: 1804467 - RNA, 19 nt, Homo sapiens
  misc_RNA (1)...(19): siRNA sense strand
agaaguggaucgguuggaa

SEQ ID NO: 1804468 - RNA, 19 nt, Homo sapiens
  misc_RNA (1)...(19): siRNA sense strand
gagaauauugcaacacuac

SEQ ID NO: 1804469 - RNA, 19 nt, Homo sapiens
  misc_RNA (1)...(19): siRNA sense strand
gaggaguuugucaguauaa

SEQ ID NO: 1804470 - RNA, 19 nt, Homo sapiens
  misc_RNA (1)...(19): siRNA sense strand
ccagacacaagcuuugaaa

SEQ ID NO: 1804471 - RNA, 19 nt, Homo sapiens
  misc_RNA (1)...(19): siRNA sense strand
caaaucugaugcuacuucu

SEQ ID NO: 1804472 - RNA, 19 nt, Homo sapiens
  misc_RNA (1)...(19): siRNA sense strand
uucaaaggcuuccaaaucu

SEQ ID NO: 1804473 - RNA, 19 nt, Homo sapiens
  misc_RNA (1)...(19): siRNA sense strand
gcagaaauucauggaguau

SEQ ID NO: 1804474 - RNA, 19 nt, Homo sapiens
  misc_RNA (1)...(19): siRNA sense strand
gaacugaaaaugcaaaaca

SEQ ID NO: 1804475 - RNA, 19 nt, Homo sapiens
  misc_RNA (1)...(19): siRNA sense strand
ggaccagcgguuacaaaga

SEQ ID NO: 1804476 - RNA, 19 nt, Homo sapiens
  misc_RNA (1)...(19): siRNA sense strand
gugacaacuuugagggaaa

SEQ ID NO: 1804477 - RNA, 19 nt, Homo sapiens
  misc_RNA (1)...(19): siRNA sense strand
ucaaaggcuuccaaaucug

SEQ ID NO: 1804478 - RNA, 19 nt, Homo sapiens
  misc_RNA (1)...(19): siRNA sense strand
ccaaugcuacggccaauag

SEQ ID NO: 1804479 - RNA, 19 nt, Homo sapiens
  misc_RNA (1)...(19): siRNA sense strand
guugaaggcacgaauugaa

SEQ ID NO: 1804480 - RNA, 19 nt, Homo sapiens
  misc_RNA (1)...(19): siRNA sense strand
ugggacagguugcaaauac

SEQ ID NO: 1804481 - RNA, 19 nt, Homo sapiens
  misc_RNA (1)...(19): siRNA sense strand
aaacagacagagacagaga

SEQ ID NO: 1804482 - RNA, 19 nt, Homo sapiens
  misc_RNA (1)...(19): siRNA sense strand
cgaggaggaaaucuucuaa

SEQ ID NO: 1804483 - RNA, 19 nt, Homo sapiens
  misc_RNA (1)...(19): siRNA sense strand
gaggaccagcgguuacaaa

SEQ ID NO: 1804484 - RNA, 19 nt, Homo sapiens
  misc_RNA (1)...(19): siRNA sense strand
ugugcgaaauucuuuguau

SEQ ID NO: 1804485 - RNA, 19 nt, Homo sapiens
  misc_RNA (1)...(19): siRNA sense strand
gcaggaaagacaacugaag

SEQ ID NO: 1804486 - RNA, 19 nt, Homo sapiens
  misc_RNA (1)...(19): siRNA sense strand
ggaacaggaacauucaaag

SEQ ID NO: 1804487 - RNA, 19 nt, Homo sapiens
  misc_RNA (1)...(19): siRNA sense strand
cgugaggaguuugucagua

SEQ ID NO: 1804488 - RNA, 19 nt, Homo sapiens
  misc_RNA (1)...(19): siRNA sense strand
aggaaagccugaaggaaag

SEQ ID NO: 1804489 - RNA, 19 nt, Homo sapiens
  misc_RNA (1)...(19): siRNA sense strand
ugaccaauguggccuauua

SEQ ID NO: 1804490 - RNA, 19 nt, Homo sapiens
  misc_RNA (1)...(19): siRNA sense strand
cagcuacgcuuauauucua

SEQ ID NO: 1804491 - RNA, 19 nt, Homo sapiens
  misc_RNA (1)...(19): siRNA sense strand
ggaauguccuggcugcuau

SEQ ID NO: 1804492 - RNA, 19 nt, Homo sapiens
  misc_RNA (1)...(19): siRNA sense strand
ccucaaagguccuccgaaa

SEQ ID NO: 1804493 - RNA, 19 nt, Homo sapiens
  misc_RNA (1)...(19): siRNA sense strand
ggagccagcuacgcuuaua

SEQ ID NO: 1804494 - RNA, 19 nt, Homo sapiens
  misc_RNA (1)...(19): siRNA sense strand
acacagugcugaacauuuc

SEQ ID NO: 1804495 - RNA, 19 nt, Homo sapiens
  misc_RNA (1)...(19): siRNA sense strand
acucugcccucuucucuua

SEQ ID NO: 1804496 - RNA, 19 nt, Homo sapiens
  misc_RNA (1)...(19): siRNA sense strand
caaagguccuccgaaacua

SEQ ID NO: 1804497 - RNA, 19 nt, Homo sapiens
  misc_RNA (1)...(19): siRNA sense strand
gaacugugccuaugucaag

SEQ ID NO: 1804498 - RNA, 19 nt, Homo sapiens
  misc_RNA (1)...(19): siRNA sense strand
ggugggcucuucucuguug

SEQ ID NO: 1804499 - RNA, 19 nt, Homo sapiens
  misc_RNA (1)...(19): siRNA sense strand
ggauuucuaugccaauugu

SEQ ID NO: 1804500 - RNA, 19 nt, Homo sapiens
  misc_RNA (1)...(19): siRNA sense strand
gaaacuaugcagcugaaga

SEQ ID NO: 1804501 - RNA, 19 nt, Homo sapiens
  misc_RNA (1)...(19): siRNA sense strand
caucaucgccaucaccuuu

SEQ ID NO: 1804502 - RNA, 19 nt, Homo sapiens
  misc_RNA (1)...(19): siRNA sense strand
ucacugacaccauuaauuc

SEQ ID NO: 1804503 - RNA, 19 nt, Homo sapiens
  misc_RNA (1)...(19): siRNA sense strand
uaugggaugucacugauug

SEQ ID NO: 1804504 - RNA, 19 nt, Homo sapiens
  misc_RNA (1)...(19): siRNA sense strand
gggacacucugagcacuuu

SEQ ID NO: 1804505 - RNA, 19 nt, Homo sapiens
  misc_RNA (1)...(19): siRNA sense strand
gaccagacguuuggcaugu

SEQ ID NO: 1804506 - RNA, 19 nt, Homo sapiens
  misc_RNA (1)...(19): siRNA sense strand
ccucuucacugacaccauu

SEQ ID NO: 1804507 - RNA, 19 nt, Homo sapiens
  misc_RNA (1)...(19): siRNA sense strand
cuaugcagcugaagaagga

SEQ ID NO: 1804508 - RNA, 19 nt, Homo sapiens
  misc_RNA (1)...(19): siRNA sense strand
ggaccaccaucaccaaguc

SEQ ID NO: 1804509 - RNA, 19 nt, Homo sapiens
  misc_RNA (1)...(19): siRNA sense strand
gguacacacugccuccuau

SEQ ID NO: 1804510 - RNA, 19 nt, Homo sapiens
  misc_RNA (1)...(19): siRNA sense strand
ccuaccaucuugucccuaa

SEQ ID NO: 1804511 - RNA, 19 nt, Homo sapiens
  misc_RNA (1)...(19): siRNA sense strand
guugggacacccuuaauuu

SEQ ID NO: 1804512 - RNA, 19 nt, Homo sapiens
  misc_RNA (1)...(19): siRNA sense strand
uuacaccuaucccugcuuu

SEQ ID NO: 1804513 - RNA, 19 nt, Homo sapiens
  misc_RNA (1)...(19): siRNA sense strand
cugcuuuacuguucaauug

SEQ ID NO: 1804514 - RNA, 19 nt, Homo sapiens
  misc_RNA (1)...(19): siRNA sense strand
aaacuaugcagcugaagaa

SEQ ID NO: 1804515 - RNA, 19 nt, Homo sapiens
  misc_RNA (1)...(19): siRNA sense strand
cggaggccauuguuuauuc

SEQ ID NO: 1804516 - RNA, 19 nt, Homo sapiens
  misc_RNA (1)...(19): siRNA sense strand
caccauuaauucccucauu

SEQ ID NO: 1804517 - RNA, 19 nt, Homo sapiens
  misc_RNA (1)...(19): siRNA sense strand
ccucuacucugcccucuuc

SEQ ID NO: 1804518 - RNA, 19 nt, Homo sapiens
  misc_RNA (1)...(19): siRNA sense strand
gaggauguuuuccagcuua

SEQ ID NO: 1804519 - RNA, 19 nt, Homo sapiens
  misc_RNA (1)...(19): siRNA sense strand
ccucaaugcauccaucuuu

SEQ ID NO: 1804520 - RNA, 19 nt, Homo sapiens
  misc_RNA (1)...(19): siRNA sense strand
uggagucccuuucuacuuc

SEQ ID NO: 1804521 - RNA, 19 nt, Homo sapiens
  misc_RNA (1)...(19): siRNA sense strand
gggccugucuguuguugga

SEQ ID NO: 1804522 - RNA, 19 nt, Homo sapiens
  misc_RNA (1)...(19): siRNA sense strand
ccgaaacuaugcagcugaa

SEQ ID NO: 1804523 - RNA, 19 nt, Homo sapiens
  misc_RNA (1)...(19): siRNA sense strand
cagauguccuuagcaguga

SEQ ID NO: 1804524 - RNA, 19 nt, Homo sapiens
  misc_RNA (1)...(19): siRNA sense strand
gcaucgggauugcccuuuc

SEQ ID NO: 1804525 - RNA, 19 nt, Homo sapiens
  misc_RNA (1)...(19): siRNA sense strand
cugcauaugcuccguguuu

SEQ ID NO: 1804526 - RNA, 19 nt, Homo sapiens
  misc_RNA (1)...(19): siRNA sense strand
ugucaugggccuuguuaaa

SEQ ID NO: 1804527 - RNA, 19 nt, Homo sapiens
  misc_RNA (1)...(19): siRNA sense strand
acacccaccuaccaucuug

SEQ ID NO: 1804528 - RNA, 19 nt, Homo sapiens
  misc_RNA (1)...(19): siRNA sense strand
ugcaggacacguucacuua

SEQ ID NO: 1804529 - RNA, 19 nt, Homo sapiens
  misc_RNA (1)...(19): siRNA sense strand
ggagucccuuucuacuuca

SEQ ID NO: 1804530 - RNA, 19 nt, Homo sapiens
  misc_RNA (1)...(19): siRNA sense strand
ucaaagguccuccgaaacu

SEQ ID NO: 1804531 - RNA, 19 nt, Homo sapiens
  misc_RNA (1)...(19): siRNA sense strand
ggacacccuuaauuuugua

SEQ ID NO: 1804532 - RNA, 19 nt, Homo sapiens
  misc_RNA (1)...(19): siRNA sense strand
gcacuuucaggacgccuuu

SEQ ID NO: 1804533 - RNA, 19 nt, Homo sapiens
  misc_RNA (1)...(19): siRNA sense strand
ccaagggugugcugguaca

SEQ ID NO: 1804534 - RNA, 19 nt, Homo sapiens
  misc_RNA (1)...(19): siRNA sense strand
ucccggaggccauuguuua

SEQ ID NO: 1804535 - RNA, 19 nt, Homo sapiens
  misc_RNA (1)...(19): siRNA sense strand
ggacaugggaaaccucucu

SEQ ID NO: 1804536 - RNA, 19 nt, Homo sapiens
  misc_RNA (1)...(19): siRNA sense strand
gggcuucauugccuucauc

SEQ ID NO: 1804537 - RNA, 19 nt, Homo sapiens
  misc_RNA (1)...(19): siRNA sense strand
ccagacguuuggcauguuc

SEQ ID NO: 1804538 - RNA, 19 nt, Homo sapiens
  misc_RNA (1)...(19): siRNA sense strand
ccuggcugcugcuugcaua

SEQ ID NO: 1804539 - RNA, 19 nt, Homo sapiens
  misc_RNA (1)...(19): siRNA sense strand
caucaagguuguucuucgu

SEQ ID NO: 1804540 - RNA, 19 nt, Homo sapiens
  misc_RNA (1)...(19): siRNA sense strand
ucaugggccuuguuaaacu

SEQ ID NO: 1804541 - RNA, 19 nt, Homo sapiens
  misc_RNA (1)...(19): siRNA sense strand
ucucacugcuaguuguuga

SEQ ID NO: 1804542 - RNA, 19 nt, Homo sapiens
  misc_RNA (1)...(19): siRNA sense strand
ugauccacauugagcguuu

SEQ ID NO: 1804543 - RNA, 19 nt, Homo sapiens
  misc_RNA (1)...(19): siRNA sense strand
ccuaugggaugucacugau

SEQ ID NO: 1804544 - RNA, 19 nt, Homo sapiens
  misc_RNA (1)...(19): siRNA sense strand
uaucccugcuuuacuguuc

SEQ ID NO: 1804545 - RNA, 19 nt, Homo sapiens
  misc_RNA (1)...(19): siRNA sense strand
caauugugacgcucaucua

SEQ ID NO: 1804546 - RNA, 19 nt, Homo sapiens
  misc_RNA (1)...(19): siRNA sense strand
gguugggacacccuuaauu

SEQ ID NO: 1804547 - RNA, 19 nt, Homo sapiens
  misc_RNA (1)...(19): siRNA sense strand
gcugacauuugugaacugu

SEQ ID NO: 1804548 - RNA, 19 nt, Homo sapiens
  misc_RNA (1)...(19): siRNA sense strand
ccaucaccuuugccaacua

SEQ ID NO: 1804549 - RNA, 19 nt, Homo sapiens
  misc_RNA (1)...(19): siRNA sense strand
accauuaauucccucauug

SEQ ID NO: 1804550 - RNA, 19 nt, Homo sapiens
  misc_RNA (1)...(19): siRNA sense strand
gcaccauggcacucaucua

SEQ ID NO: 1804551 - RNA, 19 nt, Homo sapiens
  misc_RNA (1)...(19): siRNA sense strand
gagaucucccugcugaaug

SEQ ID NO: 1804552 - RNA, 19 nt, Homo sapiens
  misc_RNA (1)...(19): siRNA sense strand
uguccaugauccacauuga

SEQ ID NO: 1804553 - RNA, 19 nt, Homo sapiens
  misc_RNA (1)...(19): siRNA sense strand
cucaaugcauccaucuuug

SEQ ID NO: 1804554 - RNA, 19 nt, Homo sapiens
  misc_RNA (1)...(19): siRNA sense strand
ucaucuacauccugaccaa

SEQ ID NO: 1804555 - RNA, 19 nt, Homo sapiens
  misc_RNA (1)...(19): siRNA sense strand
gcccuuggccauugggauu

SEQ ID NO: 1804556 - RNA, 19 nt, Homo sapiens
  misc_RNA (1)...(19): siRNA sense strand
gcaggacacguucacuuac

SEQ ID NO: 1804557 - RNA, 19 nt, Homo sapiens
  misc_RNA (1)...(19): siRNA sense strand
cagcuuaucaacuacuuca

SEQ ID NO: 1804558 - RNA, 19 nt, Homo sapiens
  misc_RNA (1)...(19): siRNA sense strand
aaacccagaaagaaauuug

SEQ ID NO: 1804559 - RNA, 19 nt, Homo sapiens
  misc_RNA (1)...(19): siRNA sense strand
uuggugggcucuucucugu

SEQ ID NO: 1804560 - RNA, 19 nt, Homo sapiens
  misc_RNA (1)...(19): siRNA sense strand
uuucuggagucccuuucua

SEQ ID NO: 1804561 - RNA, 19 nt, Homo sapiens
  misc_RNA (1)...(19): siRNA sense strand
gcuuuacuguucaauugca

SEQ ID NO: 1804562 - RNA, 19 nt, Homo sapiens
  misc_RNA (1)...(19): siRNA sense strand
gcucauugccaucauuguc

SEQ ID NO: 1804563 - RNA, 19 nt, Homo sapiens
  misc_RNA (1)...(19): siRNA sense strand
ggccauuggugggcucuuc

SEQ ID NO: 1804564 - RNA, 19 nt, Homo sapiens
  misc_RNA (1)...(19): siRNA sense strand
ggaggccauuguuuauucg

SEQ ID NO: 1804565 - RNA, 19 nt, Homo sapiens
  misc_RNA (1)...(19): siRNA sense strand
gcauccaucuuugcuucau

SEQ ID NO: 1804566 - RNA, 19 nt, Homo sapiens
  misc_RNA (1)...(19): siRNA sense strand
caucaccuuugccaacuac

SEQ ID NO: 1804567 - RNA, 19 nt, Homo sapiens
  misc_RNA (1)...(19): siRNA sense strand
ccaagucgggagccagcua

SEQ ID NO: 1804568 - RNA, 19 nt, Homo sapiens
  misc_RNA (1)...(19): siRNA sense strand
caccauggcacucaucuac

SEQ ID NO: 1804569 - RNA, 19 nt, Homo sapiens
  misc_RNA (1)...(19): siRNA sense strand
gggacacccuuaauuuugu

SEQ ID NO: 1804570 - RNA, 19 nt, Homo sapiens
  misc_RNA (1)...(19): siRNA sense strand
cagguugggacacccuuaa

SEQ ID NO: 1804571 - RNA, 19 nt, Homo sapiens
  misc_RNA (1)...(19): siRNA sense strand
gugcaggacacguucacuu

SEQ ID NO: 1804572 - RNA, 19 nt, Homo sapiens
  misc_RNA (1)...(19): siRNA sense strand
ggcugcugcuugcauaugu

SEQ ID NO: 1804573 - RNA, 19 nt, Homo sapiens
  misc_RNA (1)...(19): siRNA sense strand
gggucucacugcuaguugu

SEQ ID NO: 1804574 - RNA, 19 nt, Homo sapiens
  misc_RNA (1)...(19): siRNA sense strand
gagccagcuacgcuuauau

SEQ ID NO: 1804575 - RNA, 19 nt, Homo sapiens
  misc_RNA (1)...(19): siRNA sense strand
gugggugcccuuuguuaug

SEQ ID NO: 1804576 - RNA, 19 nt, Homo sapiens
  misc_RNA (1)...(19): siRNA sense strand
cggaauguccuggcugcua

SEQ ID NO: 1804577 - RNA, 19 nt, Homo sapiens
  misc_RNA (1)...(19): siRNA sense strand
agucccagguggaagaaga

SEQ ID NO: 1804578 - RNA, 19 nt, Homo sapiens
  misc_RNA (1)...(19): siRNA sense strand
ugcuguggcugugacauuu

SEQ ID NO: 1804579 - RNA, 19 nt, Homo sapiens
  misc_RNA (1)...(19): siRNA sense strand
guacacacugccuccuaug

SEQ ID NO: 1804580 - RNA, 19 nt, Homo sapiens
  misc_RNA (1)...(19): siRNA sense strand
caugggccuuguuaaacug

SEQ ID NO: 1804581 - RNA, 19 nt, Homo sapiens
  misc_RNA (1)...(19): siRNA sense strand
gcgcucauugccaucauug

SEQ ID NO: 1804582 - RNA, 19 nt, Homo sapiens
  misc_RNA (1)...(19): siRNA sense strand
caucgggauugcccuuucu

SEQ ID NO: 1804583 - RNA, 19 nt, Homo sapiens
  misc_RNA (1)...(19): siRNA sense strand
cccaucguguucugcauau

SEQ ID NO: 1804584 - RNA, 19 nt, Homo sapiens
  misc_RNA (1)...(19): siRNA sense strand
aaagguccuccgaaacuau

SEQ ID NO: 1804585 - RNA, 19 nt, Homo sapiens
  misc_RNA (1)...(19): siRNA sense strand
agaucucccugcugaaugg

SEQ ID NO: 1804586 - RNA, 19 nt, Homo sapiens
  misc_RNA (1)...(19): siRNA sense strand
gcauaugcuccguguuucu

SEQ ID NO: 1804587 - RNA, 19 nt, Homo sapiens
  misc_RNA (1)...(19): siRNA sense strand
ccauggcacucaucuaccu

SEQ ID NO: 1804588 - RNA, 19 nt, Homo sapiens
  misc_RNA (1)...(19): siRNA sense strand
gggauuucuaugccaauug

SEQ ID NO: 1804589 - RNA, 19 nt, Homo sapiens
  misc_RNA (1)...(19): siRNA sense strand
caacuuugcuuucagcuau

SEQ ID NO: 1804590 - RNA, 19 nt, Homo sapiens
  misc_RNA (1)...(19): siRNA sense strand
gcacgagccugccuagacu

SEQ ID NO: 1804591 - RNA, 19 nt, Homo sapiens
  misc_RNA (1)...(19): siRNA sense strand
ggaagcgcuccaucagaua

SEQ ID NO: 1804592 - RNA, 19 nt, Homo sapiens
  misc_RNA (1)...(19): siRNA sense strand
gaaggaagcgcuccaucag

SEQ ID NO: 1804593 - RNA, 19 nt, Homo sapiens
  misc_RNA (1)...(19): siRNA sense strand
cauuugacauggugagaga

SEQ ID NO: 1804594 - RNA, 19 nt, Homo sapiens
  misc_RNA (1)...(19): siRNA sense strand
aggaagcgcuccaucagau

SEQ ID NO: 1804595 - RNA, 19 nt, Homo sapiens
  misc_RNA (1)...(19): siRNA sense strand
gaagcgcuccaucagauag

SEQ ID NO: 1804596 - RNA, 19 nt, Homo sapiens
  misc_RNA (1)...(19): siRNA sense strand
ggugagagagagagagaga

SEQ ID NO: 1804597 - RNA, 19 nt, Homo sapiens
  misc_RNA (1)...(19): siRNA sense strand
ggaagcuucuaggcauugu

SEQ ID NO: 1804598 - RNA, 19 nt, Homo sapiens
  misc_RNA (1)...(19): siRNA sense strand
ugagagagagagagagaga

SEQ ID NO: 1804599 - RNA, 19 nt, Homo sapiens
  misc_RNA (1)...(19): siRNA sense strand
agacaucaagcuccgguuu

SEQ ID NO: 1804600 - RNA, 19 nt, Homo sapiens
  misc_RNA (1)...(19): siRNA sense strand
guacccacccacuaccauu

SEQ ID NO: 1804601 - RNA, 19 nt, Homo sapiens
  misc_RNA (1)...(19): siRNA sense strand
gagagagagagagagauga

SEQ ID NO: 1804602 - RNA, 19 nt, Homo sapiens
  misc_RNA (1)...(19): siRNA sense strand
agagagagagagagagaug

SEQ ID NO: 1804603 - RNA, 19 nt, Homo sapiens
  misc_RNA (1)...(19): siRNA sense strand
ccagcuguguuccuugaag

SEQ ID NO: 1804604 - RNA, 19 nt, Homo sapiens
  misc_RNA (1)...(19): siRNA sense strand
gacaucaagcuccgguuuc

SEQ ID NO: 1804605 - RNA, 19 nt, Homo sapiens
  misc_RNA (1)...(19): siRNA sense strand
ugacauggugagagagaga

SEQ ID NO: 1804606 - RNA, 19 nt, Homo sapiens
  misc_RNA (1)...(19): siRNA sense strand
gagccucugagcaacuuug

SEQ ID NO: 1804607 - RNA, 19 nt, Homo sapiens
  misc_RNA (1)...(19): siRNA sense strand
ggaagacggugaaccagaa

SEQ ID NO: 1804608 - RNA, 19 nt, Homo sapiens
  misc_RNA (1)...(19): siRNA sense strand
ugaccaagcuugauaaugg

SEQ ID NO: 1804609 - RNA, 19 nt, Homo sapiens
  misc_RNA (1)...(19): siRNA sense strand
cagaagaugccguggaaua

SEQ ID NO: 1804610 - RNA, 19 nt, Homo sapiens
  misc_RNA (1)...(19): siRNA sense strand
cggaagaacuuuggcauug

SEQ ID NO: 1804611 - RNA, 19 nt, Homo sapiens
  misc_RNA (1)...(19): siRNA sense strand
caucauacccuccaaguuc

SEQ ID NO: 1804612 - RNA, 19 nt, Homo sapiens
  misc_RNA (1)...(19): siRNA sense strand
gcuccuaccugaucguguu

SEQ ID NO: 1804613 - RNA, 19 nt, Homo sapiens
  misc_RNA (1)...(19): siRNA sense strand
gaggugaccaagcuugaua

SEQ ID NO: 1804614 - RNA, 19 nt, Homo sapiens
  misc_RNA (1)...(19): siRNA sense strand
gggcacaucucagccagaa

SEQ ID NO: 1804615 - RNA, 19 nt, Homo sapiens
  misc_RNA (1)...(19): siRNA sense strand
gccguggaauaucguguua

SEQ ID NO: 1804616 - RNA, 19 nt, Homo sapiens
  misc_RNA (1)...(19): siRNA sense strand
cagaguggcugggaaacaa

SEQ ID NO: 1804617 - RNA, 19 nt, Homo sapiens
  misc_RNA (1)...(19): siRNA sense strand
uuaauccuguucccuauga

SEQ ID NO: 1804618 - RNA, 19 nt, Homo sapiens
  misc_RNA (1)...(19): siRNA sense strand
ggaagaacuuuggcauugg

SEQ ID NO: 1804619 - RNA, 19 nt, Homo sapiens
  misc_RNA (1)...(19): siRNA sense strand
gaacacuggaaccugcaua

SEQ ID NO: 1804620 - RNA, 19 nt, Homo sapiens
  misc_RNA (1)...(19): siRNA sense strand
cccaugaccuuugcagaaa

SEQ ID NO: 1804621 - RNA, 19 nt, Homo sapiens
  misc_RNA (1)...(19): siRNA sense strand
gaagaugccguggaauauc

SEQ ID NO: 1804622 - RNA, 19 nt, Homo sapiens
  misc_RNA (1)...(19): siRNA sense strand
agaaggaggugaccaagcu

SEQ ID NO: 1804623 - RNA, 19 nt, Homo sapiens
  misc_RNA (1)...(19): siRNA sense strand
gaccucaaaguguuggaua

SEQ ID NO: 1804624 - RNA, 19 nt, Homo sapiens
  misc_RNA (1)...(19): siRNA sense strand
ggacuccaaccuccuguuc

SEQ ID NO: 1804625 - RNA, 19 nt, Homo sapiens
  misc_RNA (1)...(19): siRNA sense strand
caucuucaucggcauaauu

SEQ ID NO: 1804626 - RNA, 19 nt, Homo sapiens
  misc_RNA (1)...(19): siRNA sense strand
ggacaguggccaucuucau

SEQ ID NO: 1804627 - RNA, 19 nt, Homo sapiens
  misc_RNA (1)...(19): siRNA sense strand
ggauuccuccucaacauca

SEQ ID NO: 1804628 - RNA, 19 nt, Homo sapiens
  misc_RNA (1)...(19): siRNA sense strand
gacaguggccaucuucauc

SEQ ID NO: 1804629 - RNA, 19 nt, Homo sapiens
  misc_RNA (1)...(19): siRNA sense strand
ccaaugccaucgucuucuc

SEQ ID NO: 1804630 - RNA, 19 nt, Homo sapiens
  misc_RNA (1)...(19): siRNA sense strand
accagaagaugccguggaa

SEQ ID NO: 1804631 - RNA, 19 nt, Homo sapiens
  misc_RNA (1)...(19): siRNA sense strand
ugagguugccgucgaguau

SEQ ID NO: 1804632 - RNA, 19 nt, Homo sapiens
  misc_RNA (1)...(19): siRNA sense strand
ccaccucccuggccuucau

SEQ ID NO: 1804633 - RNA, 19 nt, Homo sapiens
  misc_RNA (1)...(19): siRNA sense strand
agaagaugccguggaauau

SEQ ID NO: 1804634 - RNA, 19 nt, Homo sapiens
  misc_RNA (1)...(19): siRNA sense strand
acuccaaccuccuguucuu

SEQ ID NO: 1804635 - RNA, 19 nt, Homo sapiens
  misc_RNA (1)...(19): siRNA sense strand
ccuuaauccuguucccuau

SEQ ID NO: 1804636 - RNA, 19 nt, Homo sapiens
  misc_RNA (1)...(19): siRNA sense strand
ucuucagccugcacucuuu

SEQ ID NO: 1804637 - RNA, 19 nt, Homo sapiens
  misc_RNA (1)...(19): siRNA sense strand
ugugccagcuccagccauu

SEQ ID NO: 1804638 - RNA, 19 nt, Homo sapiens
  misc_RNA (1)...(19): siRNA sense strand
gaucuuccugcccauccua

SEQ ID NO: 1804639 - RNA, 19 nt, Homo sapiens
  misc_RNA (1)...(19): siRNA sense strand
ggccaucagcauccuauuc

SEQ ID NO: 1804640 - RNA, 19 nt, Homo sapiens
  misc_RNA (1)...(19): siRNA sense strand
gaaggaggugaccaagcuu

SEQ ID NO: 1804641 - RNA, 19 nt, Homo sapiens
  misc_RNA (1)...(19): siRNA sense strand
gcccaaugccaucgucuuc

SEQ ID NO: 1804642 - RNA, 19 nt, Homo sapiens
  misc_RNA (1)...(19): siRNA sense strand
gcuaauccugggcuucaug

SEQ ID NO: 1804643 - RNA, 19 nt, Homo sapiens
  misc_RNA (1)...(19): siRNA sense strand
gccaacaccaccacaccaa

SEQ ID NO: 1804644 - RNA, 19 nt, Homo sapiens
  misc_RNA (1)...(19): siRNA sense strand
ucaucgcacuggccaucaa

SEQ ID NO: 1804645 - RNA, 19 nt, Homo sapiens
  misc_RNA (1)...(19): siRNA sense strand
ggaggccuacugcgcguau

SEQ ID NO: 1804646 - RNA, 19 nt, Homo sapiens
  misc_RNA (1)...(19): siRNA sense strand
gccaucgucuucucuuucg

SEQ ID NO: 1804647 - RNA, 19 nt, Homo sapiens
  misc_RNA (1)...(19): siRNA sense strand
ggccaccacuacgaucuuc

SEQ ID NO: 1804648 - RNA, 19 nt, Homo sapiens
  misc_RNA (1)...(19): siRNA sense strand
ggccaucuucaucggcaua

SEQ ID NO: 1804649 - RNA, 19 nt, Homo sapiens
  misc_RNA (1)...(19): siRNA sense strand
aagaugccguggaauaucg

SEQ ID NO: 1804650 - RNA, 19 nt, Homo sapiens
  misc_RNA (1)...(19): siRNA sense strand
caccucacccagugcauga

SEQ ID NO: 1804651 - RNA, 19 nt, Homo sapiens
  misc_RNA (1)...(19): siRNA sense strand
ugucagaguggcugggaaa

SEQ ID NO: 1804652 - RNA, 19 nt, Homo sapiens
  misc_RNA (1)...(19): siRNA sense strand
ccagaucaacucgcucuuc

SEQ ID NO: 1804653 - RNA, 19 nt, Homo sapiens
  misc_RNA (1)...(19): siRNA sense strand
ggaauaagaagcucaaaua

SEQ ID NO: 1804654 - RNA, 19 nt, Homo sapiens
  misc_RNA (1)...(19): siRNA sense strand
gaacaggcaguauuugaua

SEQ ID NO: 1804655 - RNA, 19 nt, Homo sapiens
  misc_RNA (1)...(19): siRNA sense strand
gaaggcaaaccucaaauaa

SEQ ID NO: 1804656 - RNA, 19 nt, Homo sapiens
  misc_RNA (1)...(19): siRNA sense strand
gggauaacaucacucuuaa

SEQ ID NO: 1804657 - RNA, 19 nt, Homo sapiens
  misc_RNA (1)...(19): siRNA sense strand
gccauucaguggacaauua

SEQ ID NO: 1804658 - RNA, 19 nt, Homo sapiens
  misc_RNA (1)...(19): siRNA sense strand
uaacaucacucuuaaaugc

SEQ ID NO: 1804659 - RNA, 19 nt, Homo sapiens
  misc_RNA (1)...(19): siRNA sense strand
gaaugucucugcuauaagu

SEQ ID NO: 1804660 - RNA, 19 nt, Homo sapiens
  misc_RNA (1)...(19): siRNA sense strand
cuacaaguguucccugaua

SEQ ID NO: 1804661 - RNA, 19 nt, Homo sapiens
  misc_RNA (1)...(19): siRNA sense strand
gaagacaguuauccagaug

SEQ ID NO: 1804662 - RNA, 19 nt, Homo sapiens
  misc_RNA (1)...(19): siRNA sense strand
caucacaguucacuauuug

SEQ ID NO: 1804663 - RNA, 19 nt, Homo sapiens
  misc_RNA (1)...(19): siRNA sense strand
ucaaauacuuacacacuga

SEQ ID NO: 1804664 - RNA, 19 nt, Homo sapiens
  misc_RNA (1)...(19): siRNA sense strand
uaucauaccuugccgacuu

SEQ ID NO: 1804665 - RNA, 19 nt, Homo sapiens
  misc_RNA (1)...(19): siRNA sense strand
gcaggagguugaaggacua

SEQ ID NO: 1804666 - RNA, 19 nt, Homo sapiens
  misc_RNA (1)...(19): siRNA sense strand
caacagccaucacaguuca

SEQ ID NO: 1804667 - RNA, 19 nt, Homo sapiens
  misc_RNA (1)...(19): siRNA sense strand
acaguaaacuccuugaaug

SEQ ID NO: 1804668 - RNA, 19 nt, Homo sapiens
  misc_RNA (1)...(19): siRNA sense strand
ucacaaaacugaagccuaa

SEQ ID NO: 1804669 - RNA, 19 nt, Homo sapiens
  misc_RNA (1)...(19): siRNA sense strand
acaaggaccucgguaauau

SEQ ID NO: 1804670 - RNA, 19 nt, Homo sapiens
  misc_RNA (1)...(19): siRNA sense strand
ggaccucgguaauauggaa

SEQ ID NO: 1804671 - RNA, 19 nt, Homo sapiens
  misc_RNA (1)...(19): siRNA sense strand
gaugguauacuguaaauuc

SEQ ID NO: 1804672 - RNA, 19 nt, Homo sapiens
  misc_RNA (1)...(19): siRNA sense strand
ccugcucggugacauauua

SEQ ID NO: 1804673 - RNA, 19 nt, Homo sapiens
  misc_RNA (1)...(19): siRNA sense strand
gcaaccaucuaaaccugaa

SEQ ID NO: 1804674 - RNA, 19 nt, Homo sapiens
  misc_RNA (1)...(19): siRNA sense strand
ggacagcccgaaggaauaa

SEQ ID NO: 1804675 - RNA, 19 nt, Homo sapiens
  misc_RNA (1)...(19): siRNA sense strand
agaagugacuagacagauu

SEQ ID NO: 1804676 - RNA, 19 nt, Homo sapiens
  misc_RNA (1)...(19): siRNA sense strand
aaaguugggugacugcauu

SEQ ID NO: 1804677 - RNA, 19 nt, Homo sapiens
  misc_RNA (1)...(19): siRNA sense strand
ucaggaugcuggaaacuau

SEQ ID NO: 1804678 - RNA, 19 nt, Homo sapiens
  misc_RNA (1)...(19): siRNA sense strand
gaaugcaacugugguaugg

SEQ ID NO: 1804679 - RNA, 19 nt, Homo sapiens
  misc_RNA (1)...(19): siRNA sense strand
ugacucagcucuauaccau

SEQ ID NO: 1804680 - RNA, 19 nt, Homo sapiens
  misc_RNA (1)...(19): siRNA sense strand
aaccaaggcugacauacaa

SEQ ID NO: 1804681 - RNA, 19 nt, Homo sapiens
  misc_RNA (1)...(19): siRNA sense strand
uugaaugucucugcuauaa

SEQ ID NO: 1804682 - RNA, 19 nt, Homo sapiens
  misc_RNA (1)...(19): siRNA sense strand
gaagugacuagacagauug

SEQ ID NO: 1804683 - RNA, 19 nt, Homo sapiens
  misc_RNA (1)...(19): siRNA sense strand
caucuaaaccugaaauugu

SEQ ID NO: 1804684 - RNA, 19 nt, Homo sapiens
  misc_RNA (1)...(19): siRNA sense strand
gaacaguaaacuccuugaa

SEQ ID NO: 1804685 - RNA, 19 nt, Homo sapiens
  misc_RNA (1)...(19): siRNA sense strand
ugguauggaugaaagauaa

SEQ ID NO: 1804686 - RNA, 19 nt, Homo sapiens
  misc_RNA (1)...(19): siRNA sense strand
ccaucacaguucacuauuu

SEQ ID NO: 1804687 - RNA, 19 nt, Homo sapiens
  misc_RNA (1)...(19): siRNA sense strand
ugaaggagcgguggucaua

SEQ ID NO: 1804688 - RNA, 19 nt, Homo sapiens
  misc_RNA (1)...(19): siRNA sense strand
guagaaggcaaaccucaaa

SEQ ID NO: 1804689 - RNA, 19 nt, Homo sapiens
  misc_RNA (1)...(19): siRNA sense strand
cuacagagcaggugacaau

SEQ ID NO: 1804690 - RNA, 19 nt, Homo sapiens
  misc_RNA (1)...(19): siRNA sense strand
guaaacuccuugaaugucu

SEQ ID NO: 1804691 - RNA, 19 nt, Homo sapiens
  misc_RNA (1)...(19): siRNA sense strand
gaaacuaugucugcgaaac

SEQ ID NO: 1804692 - RNA, 19 nt, Homo sapiens
  misc_RNA (1)...(19): siRNA sense strand
cagauccucuacaaagaaa

SEQ ID NO: 1804693 - RNA, 19 nt, Homo sapiens
  misc_RNA (1)...(19): siRNA sense strand
aauggcagguauuauagua

SEQ ID NO: 1804694 - RNA, 19 nt, Homo sapiens
  misc_RNA (1)...(19): siRNA sense strand
cuauuuggauuuguccuua

SEQ ID NO: 1804695 - RNA, 19 nt, Homo sapiens
  misc_RNA (1)...(19): siRNA sense strand
uaaacaaggaccucgguaa

SEQ ID NO: 1804696 - RNA, 19 nt, Homo sapiens
  misc_RNA (1)...(19): siRNA sense strand
gaauacaaagacagauuga

SEQ ID NO: 1804697 - RNA, 19 nt, Homo sapiens
  misc_RNA (1)...(19): siRNA sense strand
uggcagguauuauaguaaa

SEQ ID NO: 1804698 - RNA, 19 nt, Homo sapiens
  misc_RNA (1)...(19): siRNA sense strand
ggaagcgucauaaaccaaa

SEQ ID NO: 1804699 - RNA, 19 nt, Homo sapiens
  misc_RNA (1)...(19): siRNA sense strand
gauugaaccucucagaaaa

SEQ ID NO: 1804700 - RNA, 19 nt, Homo sapiens
  misc_RNA (1)...(19): siRNA sense strand
gaauaagaagcucaaauac

SEQ ID NO: 1804701 - RNA, 19 nt, Homo sapiens
  misc_RNA (1)...(19): siRNA sense strand
ggaaauggacccagugacu

SEQ ID NO: 1804702 - RNA, 19 nt, Homo sapiens
  misc_RNA (1)...(19): siRNA sense strand
cagagcaggugacaauaca

SEQ ID NO: 1804703 - RNA, 19 nt, Homo sapiens
  misc_RNA (1)...(19): siRNA sense strand
gauaagugaugaaaacaga

SEQ ID NO: 1804704 - RNA, 19 nt, Homo sapiens
  misc_RNA (1)...(19): siRNA sense strand
aggcaaaccucaaauaaaa

SEQ ID NO: 1804705 - RNA, 19 nt, Homo sapiens
  misc_RNA (1)...(19): siRNA sense strand
gaaggaauaagaagcucaa

SEQ ID NO: 1804706 - RNA, 19 nt, Homo sapiens
  misc_RNA (1)...(19): siRNA sense strand
uacaagugcugccaccaaa

SEQ ID NO: 1804707 - RNA, 19 nt, Homo sapiens
  misc_RNA (1)...(19): siRNA sense strand
gcauuucagaagacaguua

SEQ ID NO: 1804708 - RNA, 19 nt, Homo sapiens
  misc_RNA (1)...(19): siRNA sense strand
gauaacaucaggcuucgau

SEQ ID NO: 1804709 - RNA, 19 nt, Homo sapiens
  misc_RNA (1)...(19): siRNA sense strand
ggaaugcaacugugguaug

SEQ ID NO: 1804710 - RNA, 19 nt, Homo sapiens
  misc_RNA (1)...(19): siRNA sense strand
acaguucacuauuuggauu

SEQ ID NO: 1804711 - RNA, 19 nt, Homo sapiens
  misc_RNA (1)...(19): siRNA sense strand
caaccaaggcugacauaca

SEQ ID NO: 1804712 - RNA, 19 nt, Homo sapiens
  misc_RNA (1)...(19): siRNA sense strand
acucagcucuauaccauga

SEQ ID NO: 1804713 - RNA, 19 nt, Homo sapiens
  misc_RNA (1)...(19): siRNA sense strand
ggagcgguggucauaauuu

SEQ ID NO: 1804714 - RNA, 19 nt, Homo sapiens
  misc_RNA (1)...(19): siRNA sense strand
guaaugcaaggaucaguga

SEQ ID NO: 1804715 - RNA, 19 nt, Homo sapiens
  misc_RNA (1)...(19): siRNA sense strand
ucuacuggcuguacaugaa

SEQ ID NO: 1804716 - RNA, 19 nt, Homo sapiens
  misc_RNA (1)...(19): siRNA sense strand
cgaugaggcagacgagaua

SEQ ID NO: 1804717 - RNA, 19 nt, Homo sapiens
  misc_RNA (1)...(19): siRNA sense strand
agaaggcaaaccucaaaua

SEQ ID NO: 1804718 - RNA, 19 nt, Homo sapiens
  misc_RNA (1)...(19): siRNA sense strand
ggagaagugacuagacaga

SEQ ID NO: 1804719 - RNA, 19 nt, Homo sapiens
  misc_RNA (1)...(19): siRNA sense strand
guggagaagugacuagaca

SEQ ID NO: 1804720 - RNA, 19 nt, Homo sapiens
  misc_RNA (1)...(19): siRNA sense strand
caacaggagacuacaagug

SEQ ID NO: 1804721 - RNA, 19 nt, Homo sapiens
  misc_RNA (1)...(19): siRNA sense strand
gaugugaggcgcaaugcaa

SEQ ID NO: 1804722 - RNA, 19 nt, Homo sapiens
  misc_RNA (1)...(19): siRNA sense strand
uaacugaggacaacguguu

SEQ ID NO: 1804723 - RNA, 19 nt, Homo sapiens
  misc_RNA (1)...(19): siRNA sense strand
aaacuacacuuugucuauc

SEQ ID NO: 1804724 - RNA, 19 nt, Homo sapiens
  misc_RNA (1)...(19): siRNA sense strand
ggggauaacaucacucuua

SEQ ID NO: 1804725 - RNA, 19 nt, Homo sapiens
  misc_RNA (1)...(19): siRNA sense strand
gagcgguggucauaauuuu

SEQ ID NO: 1804726 - RNA, 19 nt, Homo sapiens
  misc_RNA (1)...(19): siRNA sense strand
gcuaguaacugaggacaac

SEQ ID NO: 1804727 - RNA, 19 nt, Homo sapiens
  misc_RNA (1)...(19): siRNA sense strand
ggccuuggaugguauacug

SEQ ID NO: 1804728 - RNA, 19 nt, Homo sapiens
  misc_RNA (1)...(19): siRNA sense strand
caaaacauguaaacaagga

SEQ ID NO: 1804729 - RNA, 19 nt, Homo sapiens
  misc_RNA (1)...(19): siRNA sense strand
cagacgagauaagugauga

SEQ ID NO: 1804730 - RNA, 19 nt, Homo sapiens
  misc_RNA (1)...(19): siRNA sense strand
gcaguggaagcgucauaaa

SEQ ID NO: 1804731 - RNA, 19 nt, Homo sapiens
  misc_RNA (1)...(19): siRNA sense strand
gcaacugugguauggauga

SEQ ID NO: 1804732 - RNA, 19 nt, Homo sapiens
  misc_RNA (1)...(19): siRNA sense strand
ggcaguauuugauauuuac

SEQ ID NO: 1804733 - RNA, 19 nt, Homo sapiens
  misc_RNA (1)...(19): siRNA sense strand
caggcaguauuugauauuu

SEQ ID NO: 1804734 - RNA, 19 nt, Homo sapiens
  misc_RNA (1)...(19): siRNA sense strand
cagaauacaaagacagauu

SEQ ID NO: 1804735 - RNA, 19 nt, Homo sapiens
  misc_RNA (1)...(19): siRNA sense strand
aaacaaggaccucgguaau

SEQ ID NO: 1804736 - RNA, 19 nt, Homo sapiens
  misc_RNA (1)...(19): siRNA sense strand
aaacccaaguggagaagug

SEQ ID NO: 1804737 - RNA, 19 nt, Homo sapiens
  misc_RNA (1)...(19): siRNA sense strand
gaaggagcgguggucauaa

SEQ ID NO: 1804738 - RNA, 19 nt, Homo sapiens
  misc_RNA (1)...(19): siRNA sense strand
guacaggaauggaaaagug

SEQ ID NO: 1804739 - RNA, 19 nt, Homo sapiens
  misc_RNA (1)...(19): siRNA sense strand
agauugaaccucucagaaa

SEQ ID NO: 1804740 - RNA, 19 nt, Homo sapiens
  misc_RNA (1)...(19): siRNA sense strand
caacugugguauggaugaa

SEQ ID NO: 1804741 - RNA, 19 nt, Homo sapiens
  misc_RNA (1)...(19): siRNA sense strand
caucacucuuaaaugcuua

SEQ ID NO: 1804742 - RNA, 19 nt, Homo sapiens
  misc_RNA (1)...(19): siRNA sense strand
cuacaauagucaagguguu

SEQ ID NO: 1804743 - RNA, 19 nt, Homo sapiens
  misc_RNA (1)...(19): siRNA sense strand
agaagacaguuauccagau

SEQ ID NO: 1804744 - RNA, 19 nt, Homo sapiens
  misc_RNA (1)...(19): siRNA sense strand
aaacaauaaucugccaugu

SEQ ID NO: 1804745 - RNA, 19 nt, Homo sapiens
  misc_RNA (1)...(19): siRNA sense strand
cauugacucucauuguaga

SEQ ID NO: 1804746 - RNA, 19 nt, Homo sapiens
  misc_RNA (1)...(19): siRNA sense strand
gguugaaggacuaaagaaa

SEQ ID NO: 1804747 - RNA, 19 nt, Homo sapiens
  misc_RNA (1)...(19): siRNA sense strand
gcucaaauacuuacacacu

SEQ ID NO: 1804748 - RNA, 19 nt, Homo sapiens
  misc_RNA (1)...(19): siRNA sense strand
gacaaccaaggcugacaua

SEQ ID NO: 1804749 - RNA, 19 nt, Homo sapiens
  misc_RNA (1)...(19): siRNA sense strand
ggauaacaucacucuuaaa

SEQ ID NO: 1804750 - RNA, 19 nt, Homo sapiens
  misc_RNA (1)...(19): siRNA sense strand
cgacuugacguaccucaga

SEQ ID NO: 1804751 - RNA, 19 nt, Homo sapiens
  misc_RNA (1)...(19): siRNA sense strand
guaccagaauacaaagaca

SEQ ID NO: 1804752 - RNA, 19 nt, Homo sapiens
  misc_RNA (1)...(19): siRNA sense strand
aaggagcgguggucauaau

SEQ ID NO: 1804753 - RNA, 19 nt, Homo sapiens
  misc_RNA (1)...(19): siRNA sense strand
ccaccguguucgacaauua

SEQ ID NO: 1804754 - RNA, 19 nt, Homo sapiens
  misc_RNA (1)...(19): siRNA sense strand
gcaacaggauggugucaag

SEQ ID NO: 1804755 - RNA, 19 nt, Homo sapiens
  misc_RNA (1)...(19): siRNA sense strand
cuacacaacuaacgcuuuc

SEQ ID NO: 1804756 - RNA, 19 nt, Homo sapiens
  misc_RNA (1)...(19): siRNA sense strand
cgucaucuguuucuccauu

SEQ ID NO: 1804757 - RNA, 19 nt, Homo sapiens
  misc_RNA (1)...(19): siRNA sense strand
ccaguccgccguccuauga

SEQ ID NO: 1804758 - RNA, 19 nt, Homo sapiens
  misc_RNA (1)...(19): siRNA sense strand
gcugugcgcuaccucgaau

SEQ ID NO: 1804759 - RNA, 19 nt, Homo sapiens
  misc_RNA (1)...(19): siRNA sense strand
agacgugccugcucaucug

SEQ ID NO: 1804760 - RNA, 19 nt, Homo sapiens
  misc_RNA (1)...(19): siRNA sense strand
gcuacacaacuaacgcuuu

SEQ ID NO: 1804761 - RNA, 19 nt, Homo sapiens
  misc_RNA (1)...(19): siRNA sense strand
acaggauggugucaaggaa

SEQ ID NO: 1804762 - RNA, 19 nt, Homo sapiens
  misc_RNA (1)...(19): siRNA sense strand
cugcucaucugcuacacaa

SEQ ID NO: 1804763 - RNA, 19 nt, Homo sapiens
  misc_RNA (1)...(19): siRNA sense strand
gguccugcauccucuugug

SEQ ID NO: 1804764 - RNA, 19 nt, Homo sapiens
  misc_RNA (1)...(19): siRNA sense strand
cgaaugcucagcccugcaa

SEQ ID NO: 1804765 - RNA, 19 nt, Homo sapiens
  misc_RNA (1)...(19): siRNA sense strand
gcucaucugcuacacaacu

SEQ ID NO: 1804766 - RNA, 19 nt, Homo sapiens
  misc_RNA (1)...(19): siRNA sense strand
gaccaacguuuucgucauc

SEQ ID NO: 1804767 - RNA, 19 nt, Homo sapiens
  misc_RNA (1)...(19): siRNA sense strand
ugccaccacugcccugaug

SEQ ID NO: 1804768 - RNA, 19 nt, Homo sapiens
  misc_RNA (1)...(19): siRNA sense strand
acacucuccuacccucaga

SEQ ID NO: 1804769 - RNA, 19 nt, Homo sapiens
  misc_RNA (1)...(19): siRNA sense strand
gucaucuguuucuccauug

SEQ ID NO: 1804770 - RNA, 19 nt, Homo sapiens
  misc_RNA (1)...(19): siRNA sense strand
gagcaugacuucguuauua

SEQ ID NO: 1804771 - RNA, 19 nt, Homo sapiens
  misc_RNA (1)...(19): siRNA sense strand
acaacaagcucuucuucaa

SEQ ID NO: 1804772 - RNA, 19 nt, Homo sapiens
  misc_RNA (1)...(19): siRNA sense strand
gggagucggugaaguacuu

SEQ ID NO: 1804773 - RNA, 19 nt, Homo sapiens
  misc_RNA (1)...(19): siRNA sense strand
agaaggcgcugcuggaguu

SEQ ID NO: 1804774 - RNA, 19 nt, Homo sapiens
  misc_RNA (1)...(19): siRNA sense strand
ggaucggccagcugaauua

SEQ ID NO: 1804775 - RNA, 19 nt, Homo sapiens
  misc_RNA (1)...(19): siRNA sense strand
gagauaagcuuggcauucc

SEQ ID NO: 1804776 - RNA, 19 nt, Homo sapiens
  misc_RNA (1)...(19): siRNA sense strand
caacaacaagcucuucuuc

SEQ ID NO: 1804777 - RNA, 19 nt, Homo sapiens
  misc_RNA (1)...(19): siRNA sense strand
cagcugaauuacuuuccua

SEQ ID NO: 1804778 - RNA, 19 nt, Homo sapiens
  misc_RNA (1)...(19): siRNA sense strand
ggaaagccaccaagggaau

SEQ ID NO: 1804779 - RNA, 19 nt, Homo sapiens
  misc_RNA (1)...(19): siRNA sense strand
gaagauccccuuuaagaug

SEQ ID NO: 1804780 - RNA, 19 nt, Homo sapiens
  misc_RNA (1)...(19): siRNA sense strand
gaaagccaccaagggaauu

SEQ ID NO: 1804781 - RNA, 19 nt, Homo sapiens
  misc_RNA (1)...(19): siRNA sense strand
ccacguuccucaagcagau

SEQ ID NO: 1804782 - RNA, 19 nt, Homo sapiens
  misc_RNA (1)...(19): siRNA sense strand
gaaccugaaggacaucaug

SEQ ID NO: 1804783 - RNA, 19 nt, Homo sapiens
  misc_RNA (1)...(19): siRNA sense strand
gugaagaccgugagcauca

SEQ ID NO: 1804784 - RNA, 19 nt, Homo sapiens
  misc_RNA (1)...(19): siRNA sense strand
ggagcaugacuucguuauu

SEQ ID NO: 1804785 - RNA, 19 nt, Homo sapiens
  misc_RNA (1)...(19): siRNA sense strand
ccuuuaagaugguggaugu

SEQ ID NO: 1804786 - RNA, 19 nt, Homo sapiens
  misc_RNA (1)...(19): siRNA sense strand
agcaugacuucguuauuaa

SEQ ID NO: 1804787 - RNA, 19 nt, Homo sapiens
  misc_RNA (1)...(19): siRNA sense strand
gaucacguccauccuguuc

SEQ ID NO: 1804788 - RNA, 19 nt, Homo sapiens
  misc_RNA (1)...(19): siRNA sense strand
cguguuccaugcugugaaa

SEQ ID NO: 1804789 - RNA, 19 nt, Homo sapiens
  misc_RNA (1)...(19): siRNA sense strand
gcaaguccacguuccucaa

SEQ ID NO: 1804790 - RNA, 19 nt, Homo sapiens
  misc_RNA (1)...(19): siRNA sense strand
agaagugguuccagugcuu

SEQ ID NO: 1804791 - RNA, 19 nt, Homo sapiens
  misc_RNA (1)...(19): siRNA sense strand
ugagaagcaugggauguuc

SEQ ID NO: 1804792 - RNA, 19 nt, Homo sapiens
  misc_RNA (1)...(19): siRNA sense strand
gcgacaccaucuucgacaa

SEQ ID NO: 1804793 - RNA, 19 nt, Homo sapiens
  misc_RNA (1)...(19): siRNA sense strand
ggacaucaugcugcaguga

SEQ ID NO: 1804794 - RNA, 19 nt, Homo sapiens
  misc_RNA (1)...(19): siRNA sense strand
cgagauaagcuuggcauuc

SEQ ID NO: 1804795 - RNA, 19 nt, Homo sapiens
  misc_RNA (1)...(19): siRNA sense strand
ggcauuccuuggcaguauu

SEQ ID NO: 1804796 - RNA, 19 nt, Homo sapiens
  misc_RNA (1)...(19): siRNA sense strand
ucggccagcugaauuacuu

SEQ ID NO: 1804797 - RNA, 19 nt, Homo sapiens
  misc_RNA (1)...(19): siRNA sense strand
guacuuccuggacaacuug

SEQ ID NO: 1804798 - RNA, 19 nt, Homo sapiens
  misc_RNA (1)...(19): siRNA sense strand
ucgagaccaucgucaacaa

SEQ ID NO: 1804799 - RNA, 19 nt, Homo sapiens
  misc_RNA (1)...(19): siRNA sense strand
ucacguccauccuguucau

SEQ ID NO: 1804800 - RNA, 19 nt, Homo sapiens
  misc_RNA (1)...(19): siRNA sense strand
gacaccaucuucgacaaca

SEQ ID NO: 1804801 - RNA, 19 nt, Homo sapiens
  misc_RNA (1)...(19): siRNA sense strand
caacaagcucuucuucaac

SEQ ID NO: 1804802 - RNA, 19 nt, Homo sapiens
  misc_RNA (1)...(19): siRNA sense strand
gauaagcuuggcauuccuu

SEQ ID NO: 1804803 - RNA, 19 nt, Homo sapiens
  misc_RNA (1)...(19): siRNA sense strand
aggagaaccugaaggacau

SEQ ID NO: 1804804 - RNA, 19 nt, Homo sapiens
  misc_RNA (1)...(19): siRNA sense strand
ugaagaccgugagcaucaa

SEQ ID NO: 1804805 - RNA, 19 nt, Homo sapiens
  misc_RNA (1)...(19): siRNA sense strand
gccgcgaguucgaccagaa

SEQ ID NO: 1804806 - RNA, 19 nt, Homo sapiens
  misc_RNA (1)...(19): siRNA sense strand
uggcauuccuuggcaguau

SEQ ID NO: 1804807 - RNA, 19 nt, Homo sapiens
  misc_RNA (1)...(19): siRNA sense strand
gagaccaucgucaacaaca

SEQ ID NO: 1804808 - RNA, 19 nt, Homo sapiens
  misc_RNA (1)...(19): siRNA sense strand
caagggaauuguggagcau

SEQ ID NO: 1804809 - RNA, 19 nt, Homo sapiens
  misc_RNA (1)...(19): siRNA sense strand
gcagcaagccacucuucca

SEQ ID NO: 1804810 - RNA, 19 nt, Homo sapiens
  misc_RNA (1)...(19): siRNA sense strand
aagaagauccccuuuaaga

SEQ ID NO: 1804811 - RNA, 19 nt, Homo sapiens
  misc_RNA (1)...(19): siRNA sense strand
gaauuguggagcaugacuu

SEQ ID NO: 1804812 - RNA, 19 nt, Homo sapiens
  misc_RNA (1)...(19): siRNA sense strand
cuucaacgucuccaucauu

SEQ ID NO: 1804813 - RNA, 19 nt, Homo sapiens
  misc_RNA (1)...(19): siRNA sense strand
caacgucuccaucauucuc

SEQ ID NO: 1804814 - RNA, 19 nt, Homo sapiens
  misc_RNA (1)...(19): siRNA sense strand
caugacuucguuauuaaga

SEQ ID NO: 1804815 - RNA, 19 nt, Homo sapiens
  misc_RNA (1)...(19): siRNA sense strand
agaccaucgucaacaacaa

SEQ ID NO: 1804816 - RNA, 19 nt, Homo sapiens
  misc_RNA (1)...(19): siRNA sense strand
uguggagcaugacuucguu

SEQ ID NO: 1804817 - RNA, 19 nt, Homo sapiens
  misc_RNA (1)...(19): siRNA sense strand
ugauggccuucgagaacaa

SEQ ID NO: 1804818 - RNA, 19 nt, Homo sapiens
  misc_RNA (1)...(19): siRNA sense strand
uucaacgucuccaucauuc

SEQ ID NO: 1804819 - RNA, 19 nt, Homo sapiens
  misc_RNA (1)...(19): siRNA sense strand
agggaauuguggagcauga

SEQ ID NO: 1804820 - RNA, 19 nt, Homo sapiens
  misc_RNA (1)...(19): siRNA sense strand
gcaguauucugaaaaugag

SEQ ID NO: 1804821 - RNA, 19 nt, Homo sapiens
  misc_RNA (1)...(19): siRNA sense strand
ccuuggcaguauucugaaa

SEQ ID NO: 1804822 - RNA, 19 nt, Homo sapiens
  misc_RNA (1)...(19): siRNA sense strand
gaccaucgucaacaacaag

SEQ ID NO: 1804823 - RNA, 19 nt, Homo sapiens
  misc_RNA (1)...(19): siRNA sense strand
gcaugacuucguuauuaag

SEQ ID NO: 1804824 - RNA, 19 nt, Homo sapiens
  misc_RNA (1)...(19): siRNA sense strand
ggaaacccuucaaauaguu

SEQ ID NO: 1804825 - RNA, 19 nt, Homo sapiens
  misc_RNA (1)...(19): siRNA sense strand
acaggaaacccuucaaaua

SEQ ID NO: 1804826 - RNA, 19 nt, Homo sapiens
  misc_RNA (1)...(19): siRNA sense strand
ucacaggucuauaugagaa

SEQ ID NO: 1804827 - RNA, 19 nt, Homo sapiens
  misc_RNA (1)...(19): siRNA sense strand
gaucacaggucuauaugag

SEQ ID NO: 1804828 - RNA, 19 nt, Homo sapiens
  misc_RNA (1)...(19): siRNA sense strand
ggaggugucauacgcauaa

SEQ ID NO: 1804829 - RNA, 19 nt, Homo sapiens
  misc_RNA (1)...(19): siRNA sense strand
ggagagagcgugaccuugu

SEQ ID NO: 1804830 - RNA, 19 nt, Homo sapiens
  misc_RNA (1)...(19): siRNA sense strand
caggaaacccuucaaauag

SEQ ID NO: 1804831 - RNA, 19 nt, Homo sapiens
  misc_RNA (1)...(19): siRNA sense strand
caugagggauuccgcagaa

SEQ ID NO: 1804832 - RNA, 19 nt, Homo sapiens
  misc_RNA (1)...(19): siRNA sense strand
gaacauuccaggccgacuu

SEQ ID NO: 1804833 - RNA, 19 nt, Homo sapiens
  misc_RNA (1)...(19): siRNA sense strand
ggaggaaccuacagaugcu

SEQ ID NO: 1804834 - RNA, 19 nt, Homo sapiens
  misc_RNA (1)...(19): siRNA sense strand
cagggaggauucugacgaa

SEQ ID NO: 1804835 - RNA, 19 nt, Homo sapiens
  misc_RNA (1)...(19): siRNA sense strand
gcagggaccuacagaugcu

SEQ ID NO: 1804836 - RNA, 19 nt, Homo sapiens
  misc_RNA (1)...(19): siRNA sense strand
ggaggauucugacgaacag

SEQ ID NO: 1804837 - RNA, 19 nt, Homo sapiens
  misc_RNA (1)...(19): siRNA sense strand
ggugaaaucagaagagaca

SEQ ID NO: 1804838 - RNA, 19 nt, Homo sapiens
  misc_RNA (1)...(19): siRNA sense strand
uaugacauguaccaucuau

SEQ ID NO: 1804839 - RNA, 19 nt, Homo sapiens
  misc_RNA (1)...(19): siRNA sense strand
gagcuccuaugacauguac

SEQ ID NO: 1804840 - RNA, 19 nt, Homo sapiens
  misc_RNA (1)...(19): siRNA sense strand
gagagagcgugaccuuguc

SEQ ID NO: 1804841 - RNA, 19 nt, Homo sapiens
  misc_RNA (1)...(19): siRNA sense strand
agacagucauccugcaaug

SEQ ID NO: 1804842 - RNA, 19 nt, Homo sapiens
  misc_RNA (1)...(19): siRNA sense strand
ucaaauaguuggccuucac

SEQ ID NO: 1804843 - RNA, 19 nt, Homo sapiens
  misc_RNA (1)...(19): siRNA sense strand
aggaaacccuucaaauagu

SEQ ID NO: 1804844 - RNA, 19 nt, Homo sapiens
  misc_RNA (1)...(19): siRNA sense strand
ucacaggaaacccuucaaa

SEQ ID NO: 1804845 - RNA, 19 nt, Homo sapiens
  misc_RNA (1)...(19): siRNA sense strand
ccuaugacauguaccaucu

SEQ ID NO: 1804846 - RNA, 19 nt, Homo sapiens
  misc_RNA (1)...(19): siRNA sense strand
caaggucaacggaacauuc

SEQ ID NO: 1804847 - RNA, 19 nt, Homo sapiens
  misc_RNA (1)...(19): siRNA sense strand
ccaaggaggaaccuacaga

SEQ ID NO: 1804848 - RNA, 19 nt, Homo sapiens
  misc_RNA (1)...(19): siRNA sense strand
gaaacccuucaaauaguug

SEQ ID NO: 1804849 - RNA, 19 nt, Homo sapiens
  misc_RNA (1)...(19): siRNA sense strand
acagaugcuucggcucuuu

SEQ ID NO: 1804850 - RNA, 19 nt, Homo sapiens
  misc_RNA (1)...(19): siRNA sense strand
acagucauccugcaauguu

SEQ ID NO: 1804851 - RNA, 19 nt, Homo sapiens
  misc_RNA (1)...(19): siRNA sense strand
gcacagagaggggacguuu

SEQ ID NO: 1804852 - RNA, 19 nt, Homo sapiens
  misc_RNA (1)...(19): siRNA sense strand
ugaacagggaggauucuga

SEQ ID NO: 1804853 - RNA, 19 nt, Homo sapiens
  misc_RNA (1)...(19): siRNA sense strand
caaggaggaaccuacagau

SEQ ID NO: 1804854 - RNA, 19 nt, Homo sapiens
  misc_RNA (1)...(19): siRNA sense strand
ggagcuccuaugacaugua

SEQ ID NO: 1804855 - RNA, 19 nt, Homo sapiens
  misc_RNA (1)...(19): siRNA sense strand
cacaggaaacccuucaaau

SEQ ID NO: 1804856 - RNA, 19 nt, Homo sapiens
  misc_RNA (1)...(19): siRNA sense strand
cuacagaugcuacgguucu

SEQ ID NO: 1804857 - RNA, 19 nt, Homo sapiens
  misc_RNA (1)...(19): siRNA sense strand
caggagagagcgugaccuu

SEQ ID NO: 1804858 - RNA, 19 nt, Homo sapiens
  misc_RNA (1)...(19): siRNA sense strand
cagucauccugcaauguug

SEQ ID NO: 1804859 - RNA, 19 nt, Homo sapiens
  misc_RNA (1)...(19): siRNA sense strand
gggaggauucugacgaaca

SEQ ID NO: 1804860 - RNA, 19 nt, Homo sapiens
  misc_RNA (1)...(19): siRNA sense strand
gagacagucauccugcaau

SEQ ID NO: 1804861 - RNA, 19 nt, Homo sapiens
  misc_RNA (1)...(19): siRNA sense strand
uggcagggaccuacagaug

SEQ ID NO: 1804862 - RNA, 19 nt, Homo sapiens
  misc_RNA (1)...(19): siRNA sense strand
gugacccacugcuuguuuc

SEQ ID NO: 1804863 - RNA, 19 nt, Homo sapiens
  misc_RNA (1)...(19): siRNA sense strand
uccuggagcuccuaugaca

SEQ ID NO: 1804864 - RNA, 19 nt, Homo sapiens
  misc_RNA (1)...(19): siRNA sense strand
ugacauguaccaucuaucc

SEQ ID NO: 1804865 - RNA, 19 nt, Homo sapiens
  misc_RNA (1)...(19): siRNA sense strand
gggaacagaacagugaaca

SEQ ID NO: 1804866 - RNA, 19 nt, Homo sapiens
  misc_RNA (1)...(19): siRNA sense strand
ggaaggaguucguguggaa

SEQ ID NO: 1804867 - RNA, 19 nt, Homo sapiens
  misc_RNA (1)...(19): siRNA sense strand
ggaggugaauguagaaugu

SEQ ID NO: 1804868 - RNA, 19 nt, Homo sapiens
  misc_RNA (1)...(19): siRNA sense strand
aaccagagcaugaauguua

SEQ ID NO: 1804869 - RNA, 19 nt, Homo sapiens
  misc_RNA (1)...(19): siRNA sense strand
gggaccagcugggccuuua

SEQ ID NO: 1804870 - RNA, 19 nt, Homo sapiens
  misc_RNA (1)...(19): siRNA sense strand
gaaccuugaugucauuguc

SEQ ID NO: 1804871 - RNA, 19 nt, Homo sapiens
  misc_RNA (1)...(19): siRNA sense strand
gcugugaaguuccugaaug

SEQ ID NO: 1804872 - RNA, 19 nt, Homo sapiens
  misc_RNA (1)...(19): siRNA sense strand
gaagcgagaugaagaugcu

SEQ ID NO: 1804873 - RNA, 19 nt, Homo sapiens
  misc_RNA (1)...(19): siRNA sense strand
ugagaaccuugaugucauu

SEQ ID NO: 1804874 - RNA, 19 nt, Homo sapiens
  misc_RNA (1)...(19): siRNA sense strand
uucagaagcucaacaaguu

SEQ ID NO: 1804875 - RNA, 19 nt, Homo sapiens
  misc_RNA (1)...(19): siRNA sense strand
acaccgggcuugaugauuc

SEQ ID NO: 1804876 - RNA, 19 nt, Homo sapiens
  misc_RNA (1)...(19): siRNA sense strand
ggagcaaaccagagcauga

SEQ ID NO: 1804877 - RNA, 19 nt, Homo sapiens
  misc_RNA (1)...(19): siRNA sense strand
ggaccagcauguucagaag

SEQ ID NO: 1804878 - RNA, 19 nt, Homo sapiens
  misc_RNA (1)...(19): siRNA sense strand
gagcaaaccagagcaugaa

SEQ ID NO: 1804879 - RNA, 19 nt, Homo sapiens
  misc_RNA (1)...(19): siRNA sense strand
auaauggaguccucaacua

SEQ ID NO: 1804880 - RNA, 19 nt, Homo sapiens
  misc_RNA (1)...(19): siRNA sense strand
gagaugaagaugcugagaa

SEQ ID NO: 1804881 - RNA, 19 nt, Homo sapiens
  misc_RNA (1)...(19): siRNA sense strand
agaugaagaugcugagaau

SEQ ID NO: 1804882 - RNA, 19 nt, Homo sapiens
  misc_RNA (1)...(19): siRNA sense strand
caaaccagagcaugaaugu

SEQ ID NO: 1804883 - RNA, 19 nt, Homo sapiens
  misc_RNA (1)...(19): siRNA sense strand
caacguggaggugaaugua

SEQ ID NO: 1804884 - RNA, 19 nt, Homo sapiens
  misc_RNA (1)...(19): siRNA sense strand
gcaaaccagagcaugaaug

SEQ ID NO: 1804885 - RNA, 19 nt, Homo sapiens
  misc_RNA (1)...(19): siRNA sense strand
gugaaguuccugaauguga

SEQ ID NO: 1804886 - RNA, 19 nt, Homo sapiens
  misc_RNA (1)...(19): siRNA sense strand
cgaggacgcaccaguuuau

SEQ ID NO: 1804887 - RNA, 19 nt, Homo sapiens
  misc_RNA (1)...(19): siRNA sense strand
ugaaccgggucaucaacuu

SEQ ID NO: 1804888 - RNA, 19 nt, Homo sapiens
  misc_RNA (1)...(19): siRNA sense strand
gaaccgggucaucaacuuc

SEQ ID NO: 1804889 - RNA, 19 nt, Homo sapiens
  misc_RNA (1)...(19): siRNA sense strand
uuacaacgacucuaugcaa

SEQ ID NO: 1804890 - RNA, 19 nt, Homo sapiens
  misc_RNA (1)...(19): siRNA sense strand
gauaauggaguccucaacu

SEQ ID NO: 1804891 - RNA, 19 nt, Homo sapiens
  misc_RNA (1)...(19): siRNA sense strand
caaacuccgcaucaacaaa

SEQ ID NO: 1804892 - RNA, 19 nt, Homo sapiens
  misc_RNA (1)...(19): siRNA sense strand
gggugaugcugcagacugu

SEQ ID NO: 1804893 - RNA, 19 nt, Homo sapiens
  misc_RNA (1)...(19): siRNA sense strand
guucagaagcucaacaagu

SEQ ID NO: 1804894 - RNA, 19 nt, Homo sapiens
  misc_RNA (1)...(19): siRNA sense strand
agacugagaaccuugaugu

SEQ ID NO: 1804895 - RNA, 19 nt, Homo sapiens
  misc_RNA (1)...(19): siRNA sense strand
gggaccagcauguucagaa

SEQ ID NO: 1804896 - RNA, 19 nt, Homo sapiens
  misc_RNA (1)...(19): siRNA sense strand
ggcaacugcuccggcauug

SEQ ID NO: 1804897 - RNA, 19 nt, Homo sapiens
  misc_RNA (1)...(19): siRNA sense strand
gggcaacugcuccggcauu

SEQ ID NO: 1804898 - RNA, 19 nt, Homo sapiens
  misc_RNA (1)...(19): siRNA sense strand
ggacuccacccacuauggu

SEQ ID NO: 1804899 - RNA, 19 nt, Homo sapiens
  misc_RNA (1)...(19): siRNA sense strand
ccgccaacaucgccacaga

SEQ ID NO: 1804900 - RNA, 19 nt, Homo sapiens
  misc_RNA (1)...(19): siRNA sense strand
aauguagaaugucgcauca

SEQ ID NO: 1804901 - RNA, 19 nt, Homo sapiens
  misc_RNA (1)...(19): siRNA sense strand
ccugguggcugugaaguuc

SEQ ID NO: 1804902 - RNA, 19 nt, Homo sapiens
  misc_RNA (1)...(19): siRNA sense strand
ccgaggacgcaccaguuua

SEQ ID NO: 1804903 - RNA, 19 nt, Homo sapiens
  misc_RNA (1)...(19): siRNA sense strand
ggucaucaacuucuaugca

SEQ ID NO: 1804904 - RNA, 19 nt, Homo sapiens
  misc_RNA (1)...(19): siRNA sense strand
gcagcccugugucuucauc

SEQ ID NO: 1804905 - RNA, 19 nt, Homo sapiens
  misc_RNA (1)...(19): siRNA sense strand
cugagaaccuugaugucau

SEQ ID NO: 1804906 - RNA, 19 nt, Homo sapiens
  misc_RNA (1)...(19): siRNA sense strand
uguagaaugucgcaucaac

SEQ ID NO: 1804907 - RNA, 19 nt, Homo sapiens
  misc_RNA (1)...(19): siRNA sense strand
ccuuuauccuccucuucua

SEQ ID NO: 1804908 - RNA, 19 nt, Homo sapiens
  misc_RNA (1)...(19): siRNA sense strand
cugugaaguuccugaaugu

SEQ ID NO: 1804909 - RNA, 19 nt, Homo sapiens
  misc_RNA (1)...(19): siRNA sense strand
acgaugagcgagacaaguu

SEQ ID NO: 1804910 - RNA, 19 nt, Homo sapiens
  misc_RNA (1)...(19): siRNA sense strand
cgaacagccagauaaugga

SEQ ID NO: 1804911 - RNA, 19 nt, Homo sapiens
  misc_RNA (1)...(19): siRNA sense strand
uaauggaguccucaacuac

SEQ ID NO: 1804912 - RNA, 19 nt, Homo sapiens
  misc_RNA (1)...(19): siRNA sense strand
uuacgaacagccagauaau

SEQ ID NO: 1804913 - RNA, 19 nt, Homo sapiens
  misc_RNA (1)...(19): siRNA sense strand
ucaaacuccgcaucaacaa

SEQ ID NO: 1804914 - RNA, 19 nt, Homo sapiens
  misc_RNA (1)...(19): siRNA sense strand
acgaacagccagauaaugg

SEQ ID NO: 1804915 - RNA, 19 nt, Homo sapiens
  misc_RNA (1)...(19): siRNA sense strand
ggaccagcugggccuuuau

SEQ ID NO: 1804916 - RNA, 19 nt, Homo sapiens
  misc_RNA (1)...(19): siRNA sense strand
acguggaggugaauguaga

SEQ ID NO: 1804917 - RNA, 19 nt, Homo sapiens
  misc_RNA (1)...(19): siRNA sense strand
gaaagcagauguuggauuu

SEQ ID NO: 1804918 - RNA, 19 nt, Homo sapiens
  misc_RNA (1)...(19): siRNA sense strand
gaaggaaucuuuaacaaug

SEQ ID NO: 1804919 - RNA, 19 nt, Homo sapiens
  misc_RNA (1)...(19): siRNA sense strand
gaagaaagaugagaagaaa

SEQ ID NO: 1804920 - RNA, 19 nt, Homo sapiens
  misc_RNA (1)...(19): siRNA sense strand
gaaacaagauggagcuauu

SEQ ID NO: 1804921 - RNA, 19 nt, Homo sapiens
  misc_RNA (1)...(19): siRNA sense strand
gaacugauguagcuaaaga

SEQ ID NO: 1804922 - RNA, 19 nt, Homo sapiens
  misc_RNA (1)...(19): siRNA sense strand
ggccaaaucuugugguuua

SEQ ID NO: 1804923 - RNA, 19 nt, Homo sapiens
  misc_RNA (1)...(19): siRNA sense strand
gaaaugaaauaccagaaga

SEQ ID NO: 1804924 - RNA, 19 nt, Homo sapiens
  misc_RNA (1)...(19): siRNA sense strand
caaagaagcuggucaugga

SEQ ID NO: 1804925 - RNA, 19 nt, Homo sapiens
  misc_RNA (1)...(19): siRNA sense strand
gaaggaagcuaaucaugau

SEQ ID NO: 1804926 - RNA, 19 nt, Homo sapiens
  misc_RNA (1)...(19): siRNA sense strand
gauggagacuuuggaauua

SEQ ID NO: 1804927 - RNA, 19 nt, Homo sapiens
  misc_RNA (1)...(19): siRNA sense strand
ggaagaaggugaaggugaa

SEQ ID NO: 1804928 - RNA, 19 nt, Homo sapiens
  misc_RNA (1)...(19): siRNA sense strand
ggaauuaucuuuaccuuac

SEQ ID NO: 1804929 - RNA, 19 nt, Homo sapiens
  misc_RNA (1)...(19): siRNA sense strand
ggagaugucuauggaauuu

SEQ ID NO: 1804930 - RNA, 19 nt, Homo sapiens
  misc_RNA (1)...(19): siRNA sense strand
gaauucaccuuacaauaga

SEQ ID NO: 1804931 - RNA, 19 nt, Homo sapiens
  misc_RNA (1)...(19): siRNA sense strand
ggaaggcucuggaagaaug

SEQ ID NO: 1804932 - RNA, 19 nt, Homo sapiens
  misc_RNA (1)...(19): siRNA sense strand
cgaaauaaaugcccggaaa

SEQ ID NO: 1804933 - RNA, 19 nt, Homo sapiens
  misc_RNA (1)...(19): siRNA sense strand
gaaauauggugaucuucuu

SEQ ID NO: 1804934 - RNA, 19 nt, Homo sapiens
  misc_RNA (1)...(19): siRNA sense strand
gaauugugcuuauacauca

SEQ ID NO: 1804935 - RNA, 19 nt, Homo sapiens
  misc_RNA (1)...(19): siRNA sense strand
uggaaacccugcagauuua

SEQ ID NO: 1804936 - RNA, 19 nt, Homo sapiens
  misc_RNA (1)...(19): siRNA sense strand
aaagaagcauccgauauua

SEQ ID NO: 1804937 - RNA, 19 nt, Homo sapiens
  misc_RNA (1)...(19): siRNA sense strand
gaaaacaucucccaaugaa

SEQ ID NO: 1804938 - RNA, 19 nt, Homo sapiens
  misc_RNA (1)...(19): siRNA sense strand
gagaagcaguguuuggaaa

SEQ ID NO: 1804939 - RNA, 19 nt, Homo sapiens
  misc_RNA (1)...(19): siRNA sense strand
ccaggaagcccacuacaua

SEQ ID NO: 1804940 - RNA, 19 nt, Homo sapiens
  misc_RNA (1)...(19): siRNA sense strand
uaaagaagcauccgauauu

SEQ ID NO: 1804941 - RNA, 19 nt, Homo sapiens
  misc_RNA (1)...(19): siRNA sense strand
gaaauaagccucucaucuc

SEQ ID NO: 1804942 - RNA, 19 nt, Homo sapiens
  misc_RNA (1)...(19): siRNA sense strand
gaaaugaacaagucugcua

SEQ ID NO: 1804943 - RNA, 19 nt, Homo sapiens
  misc_RNA (1)...(19): siRNA sense strand
ggaauucaccuuacaauag

SEQ ID NO: 1804944 - RNA, 19 nt, Homo sapiens
  misc_RNA (1)...(19): siRNA sense strand
gauggaaguuaucgaauau

SEQ ID NO: 1804945 - RNA, 19 nt, Homo sapiens
  misc_RNA (1)...(19): siRNA sense strand
ggaccgugaugauauugua

SEQ ID NO: 1804946 - RNA, 19 nt, Homo sapiens
  misc_RNA (1)...(19): siRNA sense strand
gaugacaacuuuacaagca

SEQ ID NO: 1804947 - RNA, 19 nt, Homo sapiens
  misc_RNA (1)...(19): siRNA sense strand
gcaauccucuugucuguag

SEQ ID NO: 1804948 - RNA, 19 nt, Homo sapiens
  misc_RNA (1)...(19): siRNA sense strand
gcacaccaauuuauauaca

SEQ ID NO: 1804949 - RNA, 19 nt, Homo sapiens
  misc_RNA (1)...(19): siRNA sense strand
gcaacgaucuuaaaauuga

SEQ ID NO: 1804950 - RNA, 19 nt, Homo sapiens
  misc_RNA (1)...(19): siRNA sense strand
ucucacagaugacaacuuu

SEQ ID NO: 1804951 - RNA, 19 nt, Homo sapiens
  misc_RNA (1)...(19): siRNA sense strand
ugacagucguucaagcuua

SEQ ID NO: 1804952 - RNA, 19 nt, Homo sapiens
  misc_RNA (1)...(19): siRNA sense strand
caauagaaaugaacaaguc

SEQ ID NO: 1804953 - RNA, 19 nt, Homo sapiens
  misc_RNA (1)...(19): siRNA sense strand
gauugaagauccugugaga

SEQ ID NO: 1804954 - RNA, 19 nt, Homo sapiens
  misc_RNA (1)...(19): siRNA sense strand
guuaggaaguccaugagua

SEQ ID NO: 1804955 - RNA, 19 nt, Homo sapiens
  misc_RNA (1)...(19): siRNA sense strand
ggaaagcuauggagauguc

SEQ ID NO: 1804956 - RNA, 19 nt, Homo sapiens
  misc_RNA (1)...(19): siRNA sense strand
gagcucagguccacagaug

SEQ ID NO: 1804957 - RNA, 19 nt, Homo sapiens
  misc_RNA (1)...(19): siRNA sense strand
ccaacuuacuguuaaugua

SEQ ID NO: 1804958 - RNA, 19 nt, Homo sapiens
  misc_RNA (1)...(19): siRNA sense strand
gagccgaauugaacaagaa

SEQ ID NO: 1804959 - RNA, 19 nt, Homo sapiens
  misc_RNA (1)...(19): siRNA sense strand
gugaaugcauuucguaguu

SEQ ID NO: 1804960 - RNA, 19 nt, Homo sapiens
  misc_RNA (1)...(19): siRNA sense strand
agaaauaccugaggaggaa

SEQ ID NO: 1804961 - RNA, 19 nt, Homo sapiens
  misc_RNA (1)...(19): siRNA sense strand
cagcuuauuucaacaauuc

SEQ ID NO: 1804962 - RNA, 19 nt, Homo sapiens
  misc_RNA (1)...(19): siRNA sense strand
acucaagacucaccgcuua

SEQ ID NO: 1804963 - RNA, 19 nt, Homo sapiens
  misc_RNA (1)...(19): siRNA sense strand
gaaagaggguggauuaccu

SEQ ID NO: 1804964 - RNA, 19 nt, Homo sapiens
  misc_RNA (1)...(19): siRNA sense strand
agagaaagaggguggauua

SEQ ID NO: 1804965 - RNA, 19 nt, Homo sapiens
  misc_RNA (1)...(19): siRNA sense strand
gaaauugcagccauaguau

SEQ ID NO: 1804966 - RNA, 19 nt, Homo sapiens
  misc_RNA (1)...(19): siRNA sense strand
ggaauuagcagaggauguu

SEQ ID NO: 1804967 - RNA, 19 nt, Homo sapiens
  misc_RNA (1)...(19): siRNA sense strand
guaaaccucauaauggaua

SEQ ID NO: 1804968 - RNA, 19 nt, Homo sapiens
  misc_RNA (1)...(19): siRNA sense strand
ggguaaaccucauaaugga

SEQ ID NO: 1804969 - RNA, 19 nt, Homo sapiens
  misc_RNA (1)...(19): siRNA sense strand
gaaccagagugggauaaug

SEQ ID NO: 1804970 - RNA, 19 nt, Homo sapiens
  misc_RNA (1)...(19): siRNA sense strand
agauggaaguuaucgaaua

SEQ ID NO: 1804971 - RNA, 19 nt, Homo sapiens
  misc_RNA (1)...(19): siRNA sense strand
gggaaaugcuacagcuauu

SEQ ID NO: 1804972 - RNA, 19 nt, Homo sapiens
  misc_RNA (1)...(19): siRNA sense strand
caaagcaggucuguugaug

SEQ ID NO: 1804973 - RNA, 19 nt, Homo sapiens
  misc_RNA (1)...(19): siRNA sense strand
cagaagcuauuccaccaaa

SEQ ID NO: 1804974 - RNA, 19 nt, Homo sapiens
  misc_RNA (1)...(19): siRNA sense strand
uaugacacauccugaguuu

SEQ ID NO: 1804975 - RNA, 19 nt, Homo sapiens
  misc_RNA (1)...(19): siRNA sense strand
gaagaaaugcuccuuugca

SEQ ID NO: 1804976 - RNA, 19 nt, Homo sapiens
  misc_RNA (1)...(19): siRNA sense strand
caacggaaccacccacuga

SEQ ID NO: 1804977 - RNA, 19 nt, Homo sapiens
  misc_RNA (1)...(19): siRNA sense strand
guggaaacccugcagauuu

SEQ ID NO: 1804978 - RNA, 19 nt, Homo sapiens
  misc_RNA (1)...(19): siRNA sense strand
ucaagaaguucgauucaca

SEQ ID NO: 1804979 - RNA, 19 nt, Homo sapiens
  misc_RNA (1)...(19): siRNA sense strand
guaguagucuuuacacucu

SEQ ID NO: 1804980 - RNA, 19 nt, Homo sapiens
  misc_RNA (1)...(19): siRNA sense strand
aaauaagccucucaucuca

SEQ ID NO: 1804981 - RNA, 19 nt, Homo sapiens
  misc_RNA (1)...(19): siRNA sense strand
agauauugcucaagugaaa

SEQ ID NO: 1804982 - RNA, 19 nt, Homo sapiens
  misc_RNA (1)...(19): siRNA sense strand
gaagcaguguuuggaaaga

SEQ ID NO: 1804983 - RNA, 19 nt, Homo sapiens
  misc_RNA (1)...(19): siRNA sense strand
ggagauauugcucaaguga

SEQ ID NO: 1804984 - RNA, 19 nt, Homo sapiens
  misc_RNA (1)...(19): siRNA sense strand
gauaagcauacacugguua

SEQ ID NO: 1804985 - RNA, 19 nt, Homo sapiens
  misc_RNA (1)...(19): siRNA sense strand
aaggagagauugagcaaga

SEQ ID NO: 1804986 - RNA, 19 nt, Homo sapiens
  misc_RNA (1)...(19): siRNA sense strand
acaggaacuuugacaauga

SEQ ID NO: 1804987 - RNA, 19 nt, Homo sapiens
  misc_RNA (1)...(19): siRNA sense strand
caucacaguuaucauucua

SEQ ID NO: 1804988 - RNA, 19 nt, Homo sapiens
  misc_RNA (1)...(19): siRNA sense strand
caugaguacuguccugaaa

SEQ ID NO: 1804989 - RNA, 19 nt, Homo sapiens
  misc_RNA (1)...(19): siRNA sense strand
agaaauugcagccauagua

SEQ ID NO: 1804990 - RNA, 19 nt, Homo sapiens
  misc_RNA (1)...(19): siRNA sense strand
ucagaaggcuugagaacca

SEQ ID NO: 1804991 - RNA, 19 nt, Homo sapiens
  misc_RNA (1)...(19): siRNA sense strand
ggaaguccaugaguacugu

SEQ ID NO: 1804992 - RNA, 19 nt, Homo sapiens
  misc_RNA (1)...(19): siRNA sense strand
aagaagcacuguacaaagu

SEQ ID NO: 1804993 - RNA, 19 nt, Homo sapiens
  misc_RNA (1)...(19): siRNA sense strand
gaacagaaugacagucguu

SEQ ID NO: 1804994 - RNA, 19 nt, Homo sapiens
  misc_RNA (1)...(19): siRNA sense strand
ugaaggaagcuaaucauga

SEQ ID NO: 1804995 - RNA, 19 nt, Homo sapiens
  misc_RNA (1)...(19): siRNA sense strand
gaauugaacaagaacagaa

SEQ ID NO: 1804996 - RNA, 19 nt, Homo sapiens
  misc_RNA (1)...(19): siRNA sense strand
gaagaagcacuguacaaag

SEQ ID NO: 1804997 - RNA, 19 nt, Homo sapiens
  misc_RNA (1)...(19): siRNA sense strand
aaaccggaaucaagaaguu

SEQ ID NO: 1804998 - RNA, 19 nt, Homo sapiens
  misc_RNA (1)...(19): siRNA sense strand
aaagaaagcagauguugga

SEQ ID NO: 1804999 - RNA, 19 nt, Homo sapiens
  misc_RNA (1)...(19): siRNA sense strand
gagaggauagacaagauuu

SEQ ID NO: 1805000 - RNA, 19 nt, Homo sapiens
  misc_RNA (1)...(19): siRNA sense strand
ggugccagaugcaauuaaa

SEQ ID NO: 1805001 - RNA, 19 nt, Homo sapiens
  misc_RNA (1)...(19): siRNA sense strand
caagggaccgugaugauau

SEQ ID NO: 1805002 - RNA, 19 nt, Homo sapiens
  misc_RNA (1)...(19): siRNA sense strand
ugacauuacuguuggagau

SEQ ID NO: 1805003 - RNA, 19 nt, Homo sapiens
  misc_RNA (1)...(19): siRNA sense strand
gaacaguggcuauggucaa

SEQ ID NO: 1805004 - RNA, 19 nt, Homo sapiens
  misc_RNA (1)...(19): siRNA sense strand
uggaagaaaugcuccuuug

SEQ ID NO: 1805005 - RNA, 19 nt, Homo sapiens
  misc_RNA (1)...(19): siRNA sense strand
gaaaccuuaugguagaaau

SEQ ID NO: 1805006 - RNA, 19 nt, Homo sapiens
  misc_RNA (1)...(19): siRNA sense strand
caggaaagcuauggagaug

SEQ ID NO: 1805007 - RNA, 19 nt, Homo sapiens
  misc_RNA (1)...(19): siRNA sense strand
gauauuauucucacagaug

SEQ ID NO: 1805008 - RNA, 19 nt, Homo sapiens
  misc_RNA (1)...(19): siRNA sense strand
uggauuaccucgucacguu

SEQ ID NO: 1805009 - RNA, 19 nt, Homo sapiens
  misc_RNA (1)...(19): siRNA sense strand
acagcuauuuguucagaua

SEQ ID NO: 1805010 - RNA, 19 nt, Homo sapiens
  misc_RNA (1)...(19): siRNA sense strand
gcugagugcacaccaauuu

SEQ ID NO: 1805011 - RNA, 19 nt, Homo sapiens
  misc_RNA (1)...(19): siRNA sense strand
aagaagagaagcaguguuu

SEQ ID NO: 1805012 - RNA, 19 nt, Homo sapiens
  misc_RNA (1)...(19): siRNA sense strand
ugacauugauaguggaaga

SEQ ID NO: 1805013 - RNA, 19 nt, Homo sapiens
  misc_RNA (1)...(19): siRNA sense strand
cguucaagcuuacauaaau

SEQ ID NO: 1805014 - RNA, 19 nt, Homo sapiens
  misc_RNA (1)...(19): siRNA sense strand
ugaagaagguggagauggu

SEQ ID NO: 1805015 - RNA, 19 nt, Homo sapiens
  misc_RNA (1)...(19): siRNA sense strand
caagauggagcuauugaga

SEQ ID NO: 1805016 - RNA, 19 nt, Homo sapiens
  misc_RNA (1)...(19): siRNA sense strand
gaagauucagagccucaua

SEQ ID NO: 1805017 - RNA, 19 nt, Homo sapiens
  misc_RNA (1)...(19): siRNA sense strand
gaugaaagcucccuaacug

SEQ ID NO: 1805018 - RNA, 19 nt, Homo sapiens
  misc_RNA (1)...(19): siRNA sense strand
ggacauagcccaggucaaa

SEQ ID NO: 1805019 - RNA, 19 nt, Homo sapiens
  misc_RNA (1)...(19): siRNA sense strand
gcacugacguggccaagga

SEQ ID NO: 1805020 - RNA, 19 nt, Homo sapiens
  misc_RNA (1)...(19): siRNA sense strand
gacgagagcuuccgcaugu

SEQ ID NO: 1805021 - RNA, 19 nt, Homo sapiens
  misc_RNA (1)...(19): siRNA sense strand
gaaccuccauccauaacuu

SEQ ID NO: 1805022 - RNA, 19 nt, Homo sapiens
  misc_RNA (1)...(19): siRNA sense strand
gagcaggaacagaaauuua

SEQ ID NO: 1805023 - RNA, 19 nt, Homo sapiens
  misc_RNA (1)...(19): siRNA sense strand
caaaucagcuaccucuuca

SEQ ID NO: 1805024 - RNA, 19 nt, Homo sapiens
  misc_RNA (1)...(19): siRNA sense strand
gggacgagaugguaaagaa

SEQ ID NO: 1805025 - RNA, 19 nt, Homo sapiens
  misc_RNA (1)...(19): siRNA sense strand
ggacaagcauacccugguu

SEQ ID NO: 1805026 - RNA, 19 nt, Homo sapiens
  misc_RNA (1)...(19): siRNA sense strand
gaggagaaguuguacaaag

SEQ ID NO: 1805027 - RNA, 19 nt, Homo sapiens
  misc_RNA (1)...(19): siRNA sense strand
cgucaucccucaacaagaa

SEQ ID NO: 1805028 - RNA, 19 nt, Homo sapiens
  misc_RNA (1)...(19): siRNA sense strand
ucucgaaccuccauccaua

SEQ ID NO: 1805029 - RNA, 19 nt, Homo sapiens
  misc_RNA (1)...(19): siRNA sense strand
gcgagaagauguuccagau

SEQ ID NO: 1805030 - RNA, 19 nt, Homo sapiens
  misc_RNA (1)...(19): siRNA sense strand
gacaagaucuggccaaagc

SEQ ID NO: 1805031 - RNA, 19 nt, Homo sapiens
  misc_RNA (1)...(19): siRNA sense strand
gcaaaucagcuaccucuuc

SEQ ID NO: 1805032 - RNA, 19 nt, Homo sapiens
  misc_RNA (1)...(19): siRNA sense strand
gccauucuccucucaguua

SEQ ID NO: 1805033 - RNA, 19 nt, Homo sapiens
  misc_RNA (1)...(19): siRNA sense strand
gggagagccucgugucuuc

SEQ ID NO: 1805034 - RNA, 19 nt, Homo sapiens
  misc_RNA (1)...(19): siRNA sense strand
ccaggaccaugaugaagaa

SEQ ID NO: 1805035 - RNA, 19 nt, Homo sapiens
  misc_RNA (1)...(19): siRNA sense strand
gagcaaagagaaacaguuc

SEQ ID NO: 1805036 - RNA, 19 nt, Homo sapiens
  misc_RNA (1)...(19): siRNA sense strand
gaaggacaacaaccuggua

SEQ ID NO: 1805037 - RNA, 19 nt, Homo sapiens
  misc_RNA (1)...(19): siRNA sense strand
gcgaugggcuccgcacuau

SEQ ID NO: 1805038 - RNA, 19 nt, Homo sapiens
  misc_RNA (1)...(19): siRNA sense strand
gcacugaggcuguggucaa

SEQ ID NO: 1805039 - RNA, 19 nt, Homo sapiens
  misc_RNA (1)...(19): siRNA sense strand
acaccgaccuggaagaaga

SEQ ID NO: 1805040 - RNA, 19 nt, Homo sapiens
  misc_RNA (1)...(19): siRNA sense strand
gaacauuacaccaucaucu

SEQ ID NO: 1805041 - RNA, 19 nt, Homo sapiens
  misc_RNA (1)...(19): siRNA sense strand
gacagcaucuccaaauucu

SEQ ID NO: 1805042 - RNA, 19 nt, Homo sapiens
  misc_RNA (1)...(19): siRNA sense strand
gucaaguucuucaucauug

SEQ ID NO: 1805043 - RNA, 19 nt, Homo sapiens
  misc_RNA (1)...(19): siRNA sense strand
gcaaguccaugagcacugu

SEQ ID NO: 1805044 - RNA, 19 nt, Homo sapiens
  misc_RNA (1)...(19): siRNA sense strand
cuauggagcugcugaucaa

SEQ ID NO: 1805045 - RNA, 19 nt, Homo sapiens
  misc_RNA (1)...(19): siRNA sense strand
ggaccaugaugaagaacau

SEQ ID NO: 1805046 - RNA, 19 nt, Homo sapiens
  misc_RNA (1)...(19): siRNA sense strand
agaaugacauccucaacga

SEQ ID NO: 1805047 - RNA, 19 nt, Homo sapiens
  misc_RNA (1)...(19): siRNA sense strand
gagaaguuguacaaagugu

SEQ ID NO: 1805048 - RNA, 19 nt, Homo sapiens
  misc_RNA (1)...(19): siRNA sense strand
cagacuggcaucaucuuua

SEQ ID NO: 1805049 - RNA, 19 nt, Homo sapiens
  misc_RNA (1)...(19): siRNA sense strand
ggagauugccgccaucauc

SEQ ID NO: 1805050 - RNA, 19 nt, Homo sapiens
  misc_RNA (1)...(19): siRNA sense strand
caacagcgccaucgacagu

SEQ ID NO: 1805051 - RNA, 19 nt, Homo sapiens
  misc_RNA (1)...(19): siRNA sense strand
gggugaaccucaucaugga

SEQ ID NO: 1805052 - RNA, 19 nt, Homo sapiens
  misc_RNA (1)...(19): siRNA sense strand
ggagcgaauugacaagauc

SEQ ID NO: 1805053 - RNA, 19 nt, Homo sapiens
  misc_RNA (1)...(19): siRNA sense strand
caucaaguguggcaucauc

SEQ ID NO: 1805054 - RNA, 19 nt, Homo sapiens
  misc_RNA (1)...(19): siRNA sense strand
ggacugggacaaugagaau

SEQ ID NO: 1805055 - RNA, 19 nt, Homo sapiens
  misc_RNA (1)...(19): siRNA sense strand
ggaagagaagaaagacaaa

SEQ ID NO: 1805056 - RNA, 19 nt, Homo sapiens
  misc_RNA (1)...(19): siRNA sense strand
cagcaucuccaaauucuug

SEQ ID NO: 1805057 - RNA, 19 nt, Homo sapiens
  misc_RNA (1)...(19): siRNA sense strand
gugcauauucauuggguua

SEQ ID NO: 1805058 - RNA, 19 nt, Homo sapiens
  misc_RNA (1)...(19): siRNA sense strand
gggcaaugaccucaagauu

SEQ ID NO: 1805059 - RNA, 19 nt, Homo sapiens
  misc_RNA (1)...(19): siRNA sense strand
ucagcuaccucuucaaguc

SEQ ID NO: 1805060 - RNA, 19 nt, Homo sapiens
  misc_RNA (1)...(19): siRNA sense strand
gcaggcaggcucacacaga

SEQ ID NO: 1805061 - RNA, 19 nt, Homo sapiens
  misc_RNA (1)...(19): siRNA sense strand
ugaugcagcucuucaacga

SEQ ID NO: 1805062 - RNA, 19 nt, Homo sapiens
  misc_RNA (1)...(19): siRNA sense strand
gcaacaagccgcucaucuc

SEQ ID NO: 1805063 - RNA, 19 nt, Homo sapiens
  misc_RNA (1)...(19): siRNA sense strand
caaggaggccucagacauc

SEQ ID NO: 1805064 - RNA, 19 nt, Homo sapiens
  misc_RNA (1)...(19): siRNA sense strand
gcaucgagcaggaacagaa

SEQ ID NO: 1805065 - RNA, 19 nt, Homo sapiens
  misc_RNA (1)...(19): siRNA sense strand
caggcaggcucacacagaa

SEQ ID NO: 1805066 - RNA, 19 nt, Homo sapiens
  misc_RNA (1)...(19): siRNA sense strand
ucaacgaacucaccugcau

SEQ ID NO: 1805067 - RNA, 19 nt, Homo sapiens
  misc_RNA (1)...(19): siRNA sense strand
ggacgugacgcucaucauc

SEQ ID NO: 1805068 - RNA, 19 nt, Homo sapiens
  misc_RNA (1)...(19): siRNA sense strand
cauggucacuggcgacaau

SEQ ID NO: 1805069 - RNA, 19 nt, Homo sapiens
  misc_RNA (1)...(19): siRNA sense strand
ucaaugccaucgccaucaa

SEQ ID NO: 1805070 - RNA, 19 nt, Homo sapiens
  misc_RNA (1)...(19): siRNA sense strand
acauagcccaggucaaaua

SEQ ID NO: 1805071 - RNA, 19 nt, Homo sapiens
  misc_RNA (1)...(19): siRNA sense strand
gugaagaggaagagaagaa

SEQ ID NO: 1805072 - RNA, 19 nt, Homo sapiens
  misc_RNA (1)...(19): siRNA sense strand
caguggauguggugcauau

SEQ ID NO: 1805073 - RNA, 19 nt, Homo sapiens
  misc_RNA (1)...(19): siRNA sense strand
cagaggagaaguuguacaa

SEQ ID NO: 1805074 - RNA, 19 nt, Homo sapiens
  misc_RNA (1)...(19): siRNA sense strand
gacacaagcaaaucagcua

SEQ ID NO: 1805075 - RNA, 19 nt, Homo sapiens
  misc_RNA (1)...(19): siRNA sense strand
ugaaucggauccagacaca

SEQ ID NO: 1805076 - RNA, 19 nt, Homo sapiens
  misc_RNA (1)...(19): siRNA sense strand
gacaagcauacccugguua

SEQ ID NO: 1805077 - RNA, 19 nt, Homo sapiens
  misc_RNA (1)...(19): siRNA sense strand
caagcuggcugugcagauc

SEQ ID NO: 1805078 - RNA, 19 nt, Homo sapiens
  misc_RNA (1)...(19): siRNA sense strand
ccguagcucucucuaugaa

SEQ ID NO: 1805079 - RNA, 19 nt, Homo sapiens
  misc_RNA (1)...(19): siRNA sense strand
gagcaggagcgaauugaca

SEQ ID NO: 1805080 - RNA, 19 nt, Homo sapiens
  misc_RNA (1)...(19): siRNA sense strand
gagccggacugggacaaug

SEQ ID NO: 1805081 - RNA, 19 nt, Homo sapiens
  misc_RNA (1)...(19): siRNA sense strand
ucaagaucaaggagacuua

SEQ ID NO: 1805082 - RNA, 19 nt, Homo sapiens
  misc_RNA (1)...(19): siRNA sense strand
ugaagaaaaugaugaagga

SEQ ID NO: 1805083 - RNA, 19 nt, Homo sapiens
  misc_RNA (1)...(19): siRNA sense strand
ggagcaaagagaaacaguu

SEQ ID NO: 1805084 - RNA, 19 nt, Homo sapiens
  misc_RNA (1)...(19): siRNA sense strand
ugacagcaucuccaaauuc

SEQ ID NO: 1805085 - RNA, 19 nt, Homo sapiens
  misc_RNA (1)...(19): siRNA sense strand
ggagaaguuguacaaagug

SEQ ID NO: 1805086 - RNA, 19 nt, Homo sapiens
  misc_RNA (1)...(19): siRNA sense strand
gacguccacuauaaagaga

SEQ ID NO: 1805087 - RNA, 19 nt, Homo sapiens
  misc_RNA (1)...(19): siRNA sense strand
gaccaccaaucgcaugaca

SEQ ID NO: 1805088 - RNA, 19 nt, Homo sapiens
  misc_RNA (1)...(19): siRNA sense strand
aggagaaguuguacaaagu

SEQ ID NO: 1805089 - RNA, 19 nt, Homo sapiens
  misc_RNA (1)...(19): siRNA sense strand
caucuucacccugcucuuu

SEQ ID NO: 1805090 - RNA, 19 nt, Homo sapiens
  misc_RNA (1)...(19): siRNA sense strand
caacgugguggccgugauu

SEQ ID NO: 1805091 - RNA, 19 nt, Homo sapiens
  misc_RNA (1)...(19): siRNA sense strand
gaaugacauccucaacgaa

SEQ ID NO: 1805092 - RNA, 19 nt, Homo sapiens
  misc_RNA (1)...(19): siRNA sense strand
ggaagaaggccagcaugca

SEQ ID NO: 1805093 - RNA, 19 nt, Homo sapiens
  misc_RNA (1)...(19): siRNA sense strand
gccuggagacgucgcuuua

SEQ ID NO: 1805094 - RNA, 19 nt, Homo sapiens
  misc_RNA (1)...(19): siRNA sense strand
gauguggugcauauucauu

SEQ ID NO: 1805095 - RNA, 19 nt, Homo sapiens
  misc_RNA (1)...(19): siRNA sense strand
uagcccaggucaaauaugg

SEQ ID NO: 1805096 - RNA, 19 nt, Homo sapiens
  misc_RNA (1)...(19): siRNA sense strand
gauagugaucgugcaguuu

SEQ ID NO: 1805097 - RNA, 19 nt, Homo sapiens
  misc_RNA (1)...(19): siRNA sense strand
ucagaacauuacaccauca

SEQ ID NO: 1805098 - RNA, 19 nt, Homo sapiens
  misc_RNA (1)...(19): siRNA sense strand
ggacaaugagaaugacauc

SEQ ID NO: 1805099 - RNA, 19 nt, Homo sapiens
  misc_RNA (1)...(19): siRNA sense strand
gcucaagaagugcugcaaa

SEQ ID NO: 1805100 - RNA, 19 nt, Homo sapiens
  misc_RNA (1)...(19): siRNA sense strand
gaagaggaagagaagaaag

SEQ ID NO: 1805101 - RNA, 19 nt, Homo sapiens
  misc_RNA (1)...(19): siRNA sense strand
agacuggcaucaucuuuac

SEQ ID NO: 1805102 - RNA, 19 nt, Homo sapiens
  misc_RNA (1)...(19): siRNA sense strand
cagaagccauccgcaagug

SEQ ID NO: 1805103 - RNA, 19 nt, Homo sapiens
  misc_RNA (1)...(19): siRNA sense strand
caacaccuucgucaugaug

SEQ ID NO: 1805104 - RNA, 19 nt, Homo sapiens
  misc_RNA (1)...(19): siRNA sense strand
acaagcauacccugguuaa

SEQ ID NO: 1805105 - RNA, 19 nt, Homo sapiens
  misc_RNA (1)...(19): siRNA sense strand
caggcacgcugaccaccaa

SEQ ID NO: 1805106 - RNA, 19 nt, Homo sapiens
  misc_RNA (1)...(19): siRNA sense strand
uuccguagcucucucuaug

SEQ ID NO: 1805107 - RNA, 19 nt, Homo sapiens
  misc_RNA (1)...(19): siRNA sense strand
agauagugaucgugcaguu

SEQ ID NO: 1805108 - RNA, 19 nt, Homo sapiens
  misc_RNA (1)...(19): siRNA sense strand
gaguucgggugcacaaugg

SEQ ID NO: 1805109 - RNA, 19 nt, Homo sapiens
  misc_RNA (1)...(19): siRNA sense strand
uaugacagcaucuccaaau

SEQ ID NO: 1805110 - RNA, 19 nt, Homo sapiens
  misc_RNA (1)...(19): siRNA sense strand
ccaaggaggccucagacau

SEQ ID NO: 1805111 - RNA, 19 nt, Homo sapiens
  misc_RNA (1)...(19): siRNA sense strand
ggccaucgccaucaagugu

SEQ ID NO: 1805112 - RNA, 19 nt, Homo sapiens
  misc_RNA (1)...(19): siRNA sense strand
gaugggcuccgcacuaucu

SEQ ID NO: 1805113 - RNA, 19 nt, Homo sapiens
  misc_RNA (1)...(19): siRNA sense strand
ccagggcaaugaccucaag

SEQ ID NO: 1805114 - RNA, 19 nt, Homo sapiens
  misc_RNA (1)...(19): siRNA sense strand
caccuuugccauccagaua

SEQ ID NO: 1805115 - RNA, 19 nt, Homo sapiens
  misc_RNA (1)...(19): siRNA sense strand
gaucgugguuggggacaua

SEQ ID NO: 1805116 - RNA, 19 nt, Homo sapiens
  misc_RNA (1)...(19): siRNA sense strand
ccaucucguuggccuauuc

SEQ ID NO: 1805117 - RNA, 19 nt, Homo sapiens
  misc_RNA (1)...(19): siRNA sense strand
gaaaucaacucccgaaaga

SEQ ID NO: 1805118 - RNA, 19 nt, Homo sapiens
  misc_RNA (1)...(19): siRNA sense strand
ugacaaggcuucuaaguuu

SEQ ID NO: 1805119 - RNA, 19 nt, Homo sapiens
  misc_RNA (1)...(19): siRNA sense strand
gaaagacaauaaccuagua

SEQ ID NO: 1805120 - RNA, 19 nt, Homo sapiens
  misc_RNA (1)...(19): siRNA sense strand
gaacaccacuccuggauga

SEQ ID NO: 1805121 - RNA, 19 nt, Homo sapiens
  misc_RNA (1)...(19): siRNA sense strand
agacagagaugauauggua

SEQ ID NO: 1805122 - RNA, 19 nt, Homo sapiens
  misc_RNA (1)...(19): siRNA sense strand
gguaaacccuucaguugua

SEQ ID NO: 1805123 - RNA, 19 nt, Homo sapiens
  misc_RNA (1)...(19): siRNA sense strand
gcacagauguagcaaagga

SEQ ID NO: 1805124 - RNA, 19 nt, Homo sapiens
  misc_RNA (1)...(19): siRNA sense strand
gaaggcaccucuacauuca

SEQ ID NO: 1805125 - RNA, 19 nt, Homo sapiens
  misc_RNA (1)...(19): siRNA sense strand
gugcagauguuguggguua

SEQ ID NO: 1805126 - RNA, 19 nt, Homo sapiens
  misc_RNA (1)...(19): siRNA sense strand
gaaauaagccucugaucuc

SEQ ID NO: 1805127 - RNA, 19 nt, Homo sapiens
  misc_RNA (1)...(19): siRNA sense strand
gcacugacccagauuaaug

SEQ ID NO: 1805128 - RNA, 19 nt, Homo sapiens
  misc_RNA (1)...(19): siRNA sense strand
ugaugcagcucuucaauga

SEQ ID NO: 1805129 - RNA, 19 nt, Homo sapiens
  misc_RNA (1)...(19): siRNA sense strand
gcuuauaccuccaagauuc

SEQ ID NO: 1805130 - RNA, 19 nt, Homo sapiens
  misc_RNA (1)...(19): siRNA sense strand
ggacuagggugcuccuguu

SEQ ID NO: 1805131 - RNA, 19 nt, Homo sapiens
  misc_RNA (1)...(19): siRNA sense strand
gacuuuggcugcacaguaa

SEQ ID NO: 1805132 - RNA, 19 nt, Homo sapiens
  misc_RNA (1)...(19): siRNA sense strand
caaacaagcuggcauuacu

SEQ ID NO: 1805133 - RNA, 19 nt, Homo sapiens
  misc_RNA (1)...(19): siRNA sense strand
gaagaaagcggauguuggu

SEQ ID NO: 1805134 - RNA, 19 nt, Homo sapiens
  misc_RNA (1)...(19): siRNA sense strand
gaugaaagacaauaaccua

SEQ ID NO: 1805135 - RNA, 19 nt, Homo sapiens
  misc_RNA (1)...(19): siRNA sense strand
ucaccgaacugaccuguau

SEQ ID NO: 1805136 - RNA, 19 nt, Homo sapiens
  misc_RNA (1)...(19): siRNA sense strand
gcacuaugaugaagaacau

SEQ ID NO: 1805137 - RNA, 19 nt, Homo sapiens
  misc_RNA (1)...(19): siRNA sense strand
gacaagaucuggccuaagc

SEQ ID NO: 1805138 - RNA, 19 nt, Homo sapiens
  misc_RNA (1)...(19): siRNA sense strand
ggagggaaauccugacaag

SEQ ID NO: 1805139 - RNA, 19 nt, Homo sapiens
  misc_RNA (1)...(19): siRNA sense strand
ucaaagcguuccauaguuc

SEQ ID NO: 1805140 - RNA, 19 nt, Homo sapiens
  misc_RNA (1)...(19): siRNA sense strand
ggaaggcaccucuacauuc

SEQ ID NO: 1805141 - RNA, 19 nt, Homo sapiens
  misc_RNA (1)...(19): siRNA sense strand
ccucugaucucacgcacua

SEQ ID NO: 1805142 - RNA, 19 nt, Homo sapiens
  misc_RNA (1)...(19): siRNA sense strand
ugaaagcugugcagauguu

SEQ ID NO: 1805143 - RNA, 19 nt, Homo sapiens
  misc_RNA (1)...(19): siRNA sense strand
cagaaacccuacaaccaaa

SEQ ID NO: 1805144 - RNA, 19 nt, Homo sapiens
  misc_RNA (1)...(19): siRNA sense strand
gaaagccggucugcucaug

SEQ ID NO: 1805145 - RNA, 19 nt, Homo sapiens
  misc_RNA (1)...(19): siRNA sense strand
ccuaacagaugacaacuuc

SEQ ID NO: 1805146 - RNA, 19 nt, Homo sapiens
  misc_RNA (1)...(19): siRNA sense strand
ggcacaagcuggcuggauu

SEQ ID NO: 1805147 - RNA, 19 nt, Homo sapiens
  misc_RNA (1)...(19): siRNA sense strand
ggacuuuggcugcacagua

SEQ ID NO: 1805148 - RNA, 19 nt, Homo sapiens
  misc_RNA (1)...(19): siRNA sense strand
gaaagcggauguugguuuu

SEQ ID NO: 1805149 - RNA, 19 nt, Homo sapiens
  misc_RNA (1)...(19): siRNA sense strand
gaauaaagacagagaugau

SEQ ID NO: 1805150 - RNA, 19 nt, Homo sapiens
  misc_RNA (1)...(19): siRNA sense strand
ugacugugguacaagcuua

SEQ ID NO: 1805151 - RNA, 19 nt, Homo sapiens
  misc_RNA (1)...(19): siRNA sense strand
aaaggaggcuucagacauc

SEQ ID NO: 1805152 - RNA, 19 nt, Homo sapiens
  misc_RNA (1)...(19): siRNA sense strand
gaggaggaguugccacgaa

SEQ ID NO: 1805153 - RNA, 19 nt, Homo sapiens
  misc_RNA (1)...(19): siRNA sense strand
gugacugccuuuaaugauu

SEQ ID NO: 1805154 - RNA, 19 nt, Homo sapiens
  misc_RNA (1)...(19): siRNA sense strand
cagaugcuauugccaaaug

SEQ ID NO: 1805155 - RNA, 19 nt, Homo sapiens
  misc_RNA (1)...(19): siRNA sense strand
guuagugacugccuuuaau

SEQ ID NO: 1805156 - RNA, 19 nt, Homo sapiens
  misc_RNA (1)...(19): siRNA sense strand
ggaaucauccuuacucucu

SEQ ID NO: 1805157 - RNA, 19 nt, Homo sapiens
  misc_RNA (1)...(19): siRNA sense strand
gauugugguuggugauauu

SEQ ID NO: 1805158 - RNA, 19 nt, Homo sapiens
  misc_RNA (1)...(19): siRNA sense strand
ugacugccuuuaaugauug

SEQ ID NO: 1805159 - RNA, 19 nt, Homo sapiens
  misc_RNA (1)...(19): siRNA sense strand
gacaaggcuucuaaguuug

SEQ ID NO: 1805160 - RNA, 19 nt, Homo sapiens
  misc_RNA (1)...(19): siRNA sense strand
ggucaaagcguuccauagu

SEQ ID NO: 1805161 - RNA, 19 nt, Homo sapiens
  misc_RNA (1)...(19): siRNA sense strand
aagaggagaucaccaagga

SEQ ID NO: 1805162 - RNA, 19 nt, Homo sapiens
  misc_RNA (1)...(19): siRNA sense strand
ggguuaaucugaucaugga

SEQ ID NO: 1805163 - RNA, 19 nt, Homo sapiens
  misc_RNA (1)...(19): siRNA sense strand
ccagauuaauguccacuau

SEQ ID NO: 1805164 - RNA, 19 nt, Homo sapiens
  misc_RNA (1)...(19): siRNA sense strand
gauaagacaggcacguuga

SEQ ID NO: 1805165 - RNA, 19 nt, Homo sapiens
  misc_RNA (1)...(19): siRNA sense strand
ggacaaagaccccauguug

SEQ ID NO: 1805166 - RNA, 19 nt, Homo sapiens
  misc_RNA (1)...(19): siRNA sense strand
caucugcucugauaagaca

SEQ ID NO: 1805167 - RNA, 19 nt, Homo sapiens
  misc_RNA (1)...(19): siRNA sense strand
gaaaggcgagguagagcaa

SEQ ID NO: 1805168 - RNA, 19 nt, Homo sapiens
  misc_RNA (1)...(19): siRNA sense strand
ggugacaggugacaacauc

SEQ ID NO: 1805169 - RNA, 19 nt, Homo sapiens
  misc_RNA (1)...(19): siRNA sense strand
gagcaaaaguucuccauca

SEQ ID NO: 1805170 - RNA, 19 nt, Homo sapiens
  misc_RNA (1)...(19): siRNA sense strand
gcuguggugucucuucauu

SEQ ID NO: 1805171 - RNA, 19 nt, Homo sapiens
  misc_RNA (1)...(19): siRNA sense strand
gggaagcagugccauucaa

SEQ ID NO: 1805172 - RNA, 19 nt, Homo sapiens
  misc_RNA (1)...(19): siRNA sense strand
caaaucccaugcccugaug

SEQ ID NO: 1805173 - RNA, 19 nt, Homo sapiens
  misc_RNA (1)...(19): siRNA sense strand
aaacaaggagucccugaaa

SEQ ID NO: 1805174 - RNA, 19 nt, Homo sapiens
  misc_RNA (1)...(19): siRNA sense strand
cauccugauucuauacuuu

SEQ ID NO: 1805175 - RNA, 19 nt, Homo sapiens
  misc_RNA (1)...(19): siRNA sense strand
ucggacagcucucuacaga

SEQ ID NO: 1805176 - RNA, 19 nt, Homo sapiens
  misc_RNA (1)...(19): siRNA sense strand
gucaaagcguuccauaguu

SEQ ID NO: 1805177 - RNA, 19 nt, Homo sapiens
  misc_RNA (1)...(19): siRNA sense strand
ccaaagaggagaucaccaa

SEQ ID NO: 1805178 - RNA, 19 nt, Homo sapiens
  misc_RNA (1)...(19): siRNA sense strand
gaccgagugugcucugcua

SEQ ID NO: 1805179 - RNA, 19 nt, Homo sapiens
  misc_RNA (1)...(19): siRNA sense strand
gggaugcacugacccagau

SEQ ID NO: 1805180 - RNA, 19 nt, Homo sapiens
  misc_RNA (1)...(19): siRNA sense strand
ucagaaacccuacaaccaa

SEQ ID NO: 1805181 - RNA, 19 nt, Homo sapiens
  misc_RNA (1)...(19): siRNA sense strand
ggccuacucugugaagaaa

SEQ ID NO: 1805182 - RNA, 19 nt, Homo sapiens
  misc_RNA (1)...(19): siRNA sense strand
ccacgaaagcauucagaaa

SEQ ID NO: 1805183 - RNA, 19 nt, Homo sapiens
  misc_RNA (1)...(19): siRNA sense strand
caaaggaggcuucagacau

SEQ ID NO: 1805184 - RNA, 19 nt, Homo sapiens
  misc_RNA (1)...(19): siRNA sense strand
gaucuucucccacugacaa

SEQ ID NO: 1805185 - RNA, 19 nt, Homo sapiens
  misc_RNA (1)...(19): siRNA sense strand
guacggcacuuggaugcuu

SEQ ID NO: 1805186 - RNA, 19 nt, Homo sapiens
  misc_RNA (1)...(19): siRNA sense strand
gagcaaagagaagcaauuc

SEQ ID NO: 1805187 - RNA, 19 nt, Homo sapiens
  misc_RNA (1)...(19): siRNA sense strand
cgaaauaagccucugaucu

SEQ ID NO: 1805188 - RNA, 19 nt, Homo sapiens
  misc_RNA (1)...(19): siRNA sense strand
ccaagggaaugaucugaag

SEQ ID NO: 1805189 - RNA, 19 nt, Homo sapiens
  misc_RNA (1)...(19): siRNA sense strand
cuauggagguguacagaau

SEQ ID NO: 1805190 - RNA, 19 nt, Homo sapiens
  misc_RNA (1)...(19): siRNA sense strand
gcagaucuggagaaacgua

SEQ ID NO: 1805191 - RNA, 19 nt, Homo sapiens
  misc_RNA (1)...(19): siRNA sense strand
cuucugcucuguagucuug

SEQ ID NO: 1805192 - RNA, 19 nt, Homo sapiens
  misc_RNA (1)...(19): siRNA sense strand
aggagaagcucuacaaggu

SEQ ID NO: 1805193 - RNA, 19 nt, Homo sapiens
  misc_RNA (1)...(19): siRNA sense strand
gggcauccauuaccgucaa

SEQ ID NO: 1805194 - RNA, 19 nt, Homo sapiens
  misc_RNA (1)...(19): siRNA sense strand
ccgaaacggucaacucauc

SEQ ID NO: 1805195 - RNA, 19 nt, Homo sapiens
  misc_RNA (1)...(19): siRNA sense strand
gcacaagcuggcuggauug

SEQ ID NO: 1805196 - RNA, 19 nt, Homo sapiens
  misc_RNA (1)...(19): siRNA sense strand
aaagauccauggagagaag

SEQ ID NO: 1805197 - RNA, 19 nt, Homo sapiens
  misc_RNA (1)...(19): siRNA sense strand
caacgagaaaggcgaggua

SEQ ID NO: 1805198 - RNA, 19 nt, Homo sapiens
  misc_RNA (1)...(19): siRNA sense strand
gggaugacuuccugugcuu

SEQ ID NO: 1805199 - RNA, 19 nt, Homo sapiens
  misc_RNA (1)...(19): siRNA sense strand
gcgcaaguguaaucgaauc

SEQ ID NO: 1805200 - RNA, 19 nt, Homo sapiens
  misc_RNA (1)...(19): siRNA sense strand
ucgccuggcuguucagauu

SEQ ID NO: 1805201 - RNA, 19 nt, Homo sapiens
  misc_RNA (1)...(19): siRNA sense strand
ggagcaaagagaagcaauu

SEQ ID NO: 1805202 - RNA, 19 nt, Homo sapiens
  misc_RNA (1)...(19): siRNA sense strand
gaagcagugccauucaaga

SEQ ID NO: 1805203 - RNA, 19 nt, Homo sapiens
  misc_RNA (1)...(19): siRNA sense strand
gauugaccaugcugagaug

SEQ ID NO: 1805204 - RNA, 19 nt, Homo sapiens
  misc_RNA (1)...(19): siRNA sense strand
cgaaagauccauggagaga

SEQ ID NO: 1805205 - RNA, 19 nt, Homo sapiens
  misc_RNA (1)...(19): siRNA sense strand
aaauaagccucugaucuca

SEQ ID NO: 1805206 - RNA, 19 nt, Homo sapiens
  misc_RNA (1)...(19): siRNA sense strand
aagaaaagcuggacaagau

SEQ ID NO: 1805207 - RNA, 19 nt, Homo sapiens
  misc_RNA (1)...(19): siRNA sense strand
gugcuuagaaggcaaagaa

SEQ ID NO: 1805208 - RNA, 19 nt, Homo sapiens
  misc_RNA (1)...(19): siRNA sense strand
gaaucauccuuacucucuu

SEQ ID NO: 1805209 - RNA, 19 nt, Homo sapiens
  misc_RNA (1)...(19): siRNA sense strand
gcaucuaccgcaacauuau

SEQ ID NO: 1805210 - RNA, 19 nt, Homo sapiens
  misc_RNA (1)...(19): siRNA sense strand
agaaagcggauguugguuu

SEQ ID NO: 1805211 - RNA, 19 nt, Homo sapiens
  misc_RNA (1)...(19): siRNA sense strand
gccagaugcuauugccaaa

SEQ ID NO: 1805212 - RNA, 19 nt, Homo sapiens
  misc_RNA (1)...(19): siRNA sense strand
gggaaucgacaaugaggaa

SEQ ID NO: 1805213 - RNA, 19 nt, Homo sapiens
  misc_RNA (1)...(19): siRNA sense strand
gaaauccagccacucaaca

SEQ ID NO: 1805214 - RNA, 19 nt, Homo sapiens
  misc_RNA (1)...(19): siRNA sense strand
ggagauugcagccaucauc

SEQ ID NO: 1805215 - RNA, 19 nt, Homo sapiens
  misc_RNA (1)...(19): siRNA sense strand
ccacccagccagcacuaua

SEQ ID NO: 1805216 - RNA, 19 nt, Homo sapiens
  misc_RNA (1)...(19): siRNA sense strand
ucagcucauugucaucuuu

SEQ ID NO: 1805217 - RNA, 19 nt, Homo sapiens
  misc_RNA (1)...(19): siRNA sense strand
ugauacugcugccaaauuu

SEQ ID NO: 1805218 - RNA, 19 nt, Homo sapiens
  misc_RNA (1)...(19): siRNA sense strand
ggauuugccuugucugaag

SEQ ID NO: 1805219 - RNA, 19 nt, Homo sapiens
  misc_RNA (1)...(19): siRNA sense strand
gcucuacgguauuuaaugg

SEQ ID NO: 1805220 - RNA, 19 nt, Homo sapiens
  misc_RNA (1)...(19): siRNA sense strand
gcagccuuaucauugguua

SEQ ID NO: 1805221 - RNA, 19 nt, Homo sapiens
  misc_RNA (1)...(19): siRNA sense strand
ccagaaacccuucgcugaa

SEQ ID NO: 1805222 - RNA, 19 nt, Homo sapiens
  misc_RNA (1)...(19): siRNA sense strand
gauacugcugccaaauuua

SEQ ID NO: 1805223 - RNA, 19 nt, Homo sapiens
  misc_RNA (1)...(19): siRNA sense strand
aauggugugucucagcuaa

SEQ ID NO: 1805224 - RNA, 19 nt, Homo sapiens
  misc_RNA (1)...(19): siRNA sense strand
ugucucagcuaauccaaag

SEQ ID NO: 1805225 - RNA, 19 nt, Homo sapiens
  misc_RNA (1)...(19): siRNA sense strand
gauccagaguugcauacag

SEQ ID NO: 1805226 - RNA, 19 nt, Homo sapiens
  misc_RNA (1)...(19): siRNA sense strand
ccagugcaaucagcagaga

SEQ ID NO: 1805227 - RNA, 19 nt, Homo sapiens
  misc_RNA (1)...(19): siRNA sense strand
cauugauacugcugccaaa

SEQ ID NO: 1805228 - RNA, 19 nt, Homo sapiens
  misc_RNA (1)...(19): siRNA sense strand
cagcagagacauugauacu

SEQ ID NO: 1805229 - RNA, 19 nt, Homo sapiens
  misc_RNA (1)...(19): siRNA sense strand
gauuuuguuugccauguaa

SEQ ID NO: 1805230 - RNA, 19 nt, Homo sapiens
  misc_RNA (1)...(19): siRNA sense strand
cuaugggucucuuuuguuu

SEQ ID NO: 1805231 - RNA, 19 nt, Homo sapiens
  misc_RNA (1)...(19): siRNA sense strand
auccagaguugcauacaga

SEQ ID NO: 1805232 - RNA, 19 nt, Homo sapiens
  misc_RNA (1)...(19): siRNA sense strand
gaauggugugucucagcua

SEQ ID NO: 1805233 - RNA, 19 nt, Homo sapiens
  misc_RNA (1)...(19): siRNA sense strand
gcuaauccaaagggaguuu

SEQ ID NO: 1805234 - RNA, 19 nt, Homo sapiens
  misc_RNA (1)...(19): siRNA sense strand
ugccuugucugaagcuaug

SEQ ID NO: 1805235 - RNA, 19 nt, Homo sapiens
  misc_RNA (1)...(19): siRNA sense strand
auacugcugccaaauuuau

SEQ ID NO: 1805236 - RNA, 19 nt, Homo sapiens
  misc_RNA (1)...(19): siRNA sense strand
uuuggcagccuuaucauug

SEQ ID NO: 1805237 - RNA, 19 nt, Homo sapiens
  misc_RNA (1)...(19): siRNA sense strand
gaagcuaugggucucuuuu

SEQ ID NO: 1805238 - RNA, 19 nt, Homo sapiens
  misc_RNA (1)...(19): siRNA sense strand
agaguugcauacagaccaa

SEQ ID NO: 1805239 - RNA, 19 nt, Homo sapiens
  misc_RNA (1)...(19): siRNA sense strand
gggauuugccuugucugaa

SEQ ID NO: 1805240 - RNA, 19 nt, Homo sapiens
  misc_RNA (1)...(19): siRNA sense strand
guugcauacagaccaauuu

SEQ ID NO: 1805241 - RNA, 19 nt, Homo sapiens
  misc_RNA (1)...(19): siRNA sense strand
caaaguggcugcuucuguu

SEQ ID NO: 1805242 - RNA, 19 nt, Homo sapiens
  misc_RNA (1)...(19): siRNA sense strand
agaauaagcuggagcaagu

SEQ ID NO: 1805243 - RNA, 19 nt, Homo sapiens
  misc_RNA (1)...(19): siRNA sense strand
aauggucgauuaagcaaua

SEQ ID NO: 1805244 - RNA, 19 nt, Homo sapiens
  misc_RNA (1)...(19): siRNA sense strand
caggugcgaugcuucagua

SEQ ID NO: 1805245 - RNA, 19 nt, Homo sapiens
  misc_RNA (1)...(19): siRNA sense strand
uaugugaagcguuccauua

SEQ ID NO: 1805246 - RNA, 19 nt, Homo sapiens
  misc_RNA (1)...(19): siRNA sense strand
gugaagcguuccauuaaag

SEQ ID NO: 1805247 - RNA, 19 nt, Homo sapiens
  misc_RNA (1)...(19): siRNA sense strand
gagguaccuugcacaguga

SEQ ID NO: 1805248 - RNA, 19 nt, Homo sapiens
  misc_RNA (1)...(19): siRNA sense strand
gccacacucucugaauuaa

SEQ ID NO: 1805249 - RNA, 19 nt, Homo sapiens
  misc_RNA (1)...(19): siRNA sense strand
aaacuguccucaagagcuu

SEQ ID NO: 1805250 - RNA, 19 nt, Homo sapiens
  misc_RNA (1)...(19): siRNA sense strand
gaaauuggaggcuaagacu

SEQ ID NO: 1805251 - RNA, 19 nt, Homo sapiens
  misc_RNA (1)...(19): siRNA sense strand
ugugaagcguuccauuaaa

SEQ ID NO: 1805252 - RNA, 19 nt, Homo sapiens
  misc_RNA (1)...(19): siRNA sense strand
aagccacacucucugaauu

SEQ ID NO: 1805253 - RNA, 19 nt, Homo sapiens
  misc_RNA (1)...(19): siRNA sense strand
ucaauuugcuugcugaaaa

SEQ ID NO: 1805254 - RNA, 19 nt, Homo sapiens
  misc_RNA (1)...(19): siRNA sense strand
gcuaugccacagcucuuua

SEQ ID NO: 1805255 - RNA, 19 nt, Homo sapiens
  misc_RNA (1)...(19): siRNA sense strand
agacugauccgucaaucuu

SEQ ID NO: 1805256 - RNA, 19 nt, Homo sapiens
  misc_RNA (1)...(19): siRNA sense strand
ugccacagcucuuuauucu

SEQ ID NO: 1805257 - RNA, 19 nt, Homo sapiens
  misc_RNA (1)...(19): siRNA sense strand
uauugaaauuggaggcuaa

SEQ ID NO: 1805258 - RNA, 19 nt, Homo sapiens
  misc_RNA (1)...(19): siRNA sense strand
gaauaagcuggagcaagua

SEQ ID NO: 1805259 - RNA, 19 nt, Homo sapiens
  misc_RNA (1)...(19): siRNA sense strand
gaccucugcaucuccuuua

SEQ ID NO: 1805260 - RNA, 19 nt, Homo sapiens
  misc_RNA (1)...(19): siRNA sense strand
gaagccacacucucugaau

SEQ ID NO: 1805261 - RNA, 19 nt, Homo sapiens
  misc_RNA (1)...(19): siRNA sense strand
ccaaaguggcugcuucugu

SEQ ID NO: 1805262 - RNA, 19 nt, Homo sapiens
  misc_RNA (1)...(19): siRNA sense strand
agaccaagauucagaagcu

SEQ ID NO: 1805263 - RNA, 19 nt, Homo sapiens
  misc_RNA (1)...(19): siRNA sense strand
gaaaauggucgauuaagca

SEQ ID NO: 1805264 - RNA, 19 nt, Homo sapiens
  misc_RNA (1)...(19): siRNA sense strand
cuaaaugacaucacagcaa

SEQ ID NO: 1805265 - RNA, 19 nt, Homo sapiens
  misc_RNA (1)...(19): siRNA sense strand
gaagcguuccauuaaagug

SEQ ID NO: 1805266 - RNA, 19 nt, Homo sapiens
  misc_RNA (1)...(19): siRNA sense strand
gcgcauuggcgagaaauau

SEQ ID NO: 1805267 - RNA, 19 nt, Homo sapiens
  misc_RNA (1)...(19): siRNA sense strand
aggagucguuucugccuuu

SEQ ID NO: 1805268 - RNA, 19 nt, Homo sapiens
  misc_RNA (1)...(19): siRNA sense strand
agaagaagccacacucucu

SEQ ID NO: 1805269 - RNA, 19 nt, Homo sapiens
  misc_RNA (1)...(19): siRNA sense strand
uaagcuggagcaaguagaa

SEQ ID NO: 1805270 - RNA, 19 nt, Homo sapiens
  misc_RNA (1)...(19): siRNA sense strand
gcauuggcgagaaauaugu

SEQ ID NO: 1805271 - RNA, 19 nt, Homo sapiens
  misc_RNA (1)...(19): siRNA sense strand
cugcaucuccuuuagaaga

SEQ ID NO: 1805272 - RNA, 19 nt, Homo sapiens
  misc_RNA (1)...(19): siRNA sense strand
aagccuaaaugacaucaca

SEQ ID NO: 1805273 - RNA, 19 nt, Homo sapiens
  misc_RNA (1)...(19): siRNA sense strand
gcagggcuaugcgggagau

SEQ ID NO: 1805274 - RNA, 19 nt, Homo sapiens
  misc_RNA (1)...(19): siRNA sense strand
gugaaaagccuaaaugaca

SEQ ID NO: 1805275 - RNA, 19 nt, Homo sapiens
  misc_RNA (1)...(19): siRNA sense strand
cacacucucugaauuaaaa

SEQ ID NO: 1805276 - RNA, 19 nt, Homo sapiens
  misc_RNA (1)...(19): siRNA sense strand
agccacacucucugaauua

SEQ ID NO: 1805277 - RNA, 19 nt, Homo sapiens
  misc_RNA (1)...(19): siRNA sense strand
ucaagaccaagauucagaa

SEQ ID NO: 1805278 - RNA, 19 nt, Homo sapiens
  misc_RNA (1)...(19): siRNA sense strand
aaaaggaguuguugagagu

SEQ ID NO: 1805279 - RNA, 19 nt, Homo sapiens
  misc_RNA (1)...(19): siRNA sense strand
gucaagaccaagauucaga

SEQ ID NO: 1805280 - RNA, 19 nt, Homo sapiens
  misc_RNA (1)...(19): siRNA sense strand
guugagaguagcacaaauc

SEQ ID NO: 1805281 - RNA, 19 nt, Homo sapiens
  misc_RNA (1)...(19): siRNA sense strand
uaagacugauccgucaauc

SEQ ID NO: 1805282 - RNA, 19 nt, Homo sapiens
  misc_RNA (1)...(19): siRNA sense strand
aauuggaggcuaagacuga

SEQ ID NO: 1805283 - RNA, 19 nt, Homo sapiens
  misc_RNA (1)...(19): siRNA sense strand
ccacacucucugaauuaaa

SEQ ID NO: 1805284 - RNA, 19 nt, Homo sapiens
  misc_RNA (1)...(19): siRNA sense strand
ggcgagaaauauguugaca

SEQ ID NO: 1805285 - RNA, 19 nt, Homo sapiens
  misc_RNA (1)...(19): siRNA sense strand
gggcuaugcgggagauugu

SEQ ID NO: 1805286 - RNA, 19 nt, Homo sapiens
  misc_RNA (1)...(19): siRNA sense strand
aaaguggcugcuucuguuu

SEQ ID NO: 1805287 - RNA, 19 nt, Homo sapiens
  misc_RNA (1)...(19): siRNA sense strand
ugcaucuccuuuagaagaa

SEQ ID NO: 1805288 - RNA, 19 nt, Homo sapiens
  misc_RNA (1)...(19): siRNA sense strand
aaggaguuguugagaguag

SEQ ID NO: 1805289 - RNA, 19 nt, Homo sapiens
  misc_RNA (1)...(19): siRNA sense strand
gugcgaugcuucaguaccu

SEQ ID NO: 1805290 - RNA, 19 nt, Homo sapiens
  misc_RNA (1)...(19): siRNA sense strand
gaucaauuugcuugcugaa

SEQ ID NO: 1805291 - RNA, 19 nt, Homo sapiens
  misc_RNA (1)...(19): siRNA sense strand
gaguagcacaaauccugaa

SEQ ID NO: 1805292 - RNA, 19 nt, Homo sapiens
  misc_RNA (1)...(19): siRNA sense strand
ugaaaagccuaaaugacau

SEQ ID NO: 1805293 - RNA, 19 nt, Homo sapiens
  misc_RNA (1)...(19): siRNA sense strand
cagaccauuugccaagcuu

SEQ ID NO: 1805294 - RNA, 19 nt, Homo sapiens
  misc_RNA (1)...(19): siRNA sense strand
aagaagccacacucucuga

SEQ ID NO: 1805295 - RNA, 19 nt, Homo sapiens
  misc_RNA (1)...(19): siRNA sense strand
cucugcaucuccuuuagaa

SEQ ID NO: 1805296 - RNA, 19 nt, Homo sapiens
  misc_RNA (1)...(19): siRNA sense strand
ggaaggccaugacagauga

SEQ ID NO: 1805297 - RNA, 19 nt, Homo sapiens
  misc_RNA (1)...(19): siRNA sense strand
guuccaagcuugcaucaug

SEQ ID NO: 1805298 - RNA, 19 nt, Homo sapiens
  misc_RNA (1)...(19): siRNA sense strand
uaacggauacuucgucuuc

SEQ ID NO: 1805299 - RNA, 19 nt, Homo sapiens
  misc_RNA (1)...(19): siRNA sense strand
ggcacugucuuccuuauag

SEQ ID NO: 1805300 - RNA, 19 nt, Homo sapiens
  misc_RNA (1)...(19): siRNA sense strand
caccauuccuucauucuuc

SEQ ID NO: 1805301 - RNA, 19 nt, Homo sapiens
  misc_RNA (1)...(19): siRNA sense strand
ucaacuacauucuggucaa

SEQ ID NO: 1805302 - RNA, 19 nt, Homo sapiens
  misc_RNA (1)...(19): siRNA sense strand
caucuacaaucccaucauc

SEQ ID NO: 1805303 - RNA, 19 nt, Homo sapiens
  misc_RNA (1)...(19): siRNA sense strand
gcgcuacauugucaucugu

SEQ ID NO: 1805304 - RNA, 19 nt, Homo sapiens
  misc_RNA (1)...(19): siRNA sense strand
ucuacugcuucaugaauaa

SEQ ID NO: 1805305 - RNA, 19 nt, Homo sapiens
  misc_RNA (1)...(19): siRNA sense strand
gaugguaggauccuucugu

SEQ ID NO: 1805306 - RNA, 19 nt, Homo sapiens
  misc_RNA (1)...(19): siRNA sense strand
cgucuucggucgccauguu

SEQ ID NO: 1805307 - RNA, 19 nt, Homo sapiens
  misc_RNA (1)...(19): siRNA sense strand
caugggcacugucuuccuu

SEQ ID NO: 1805308 - RNA, 19 nt, Homo sapiens
  misc_RNA (1)...(19): siRNA sense strand
guaggauccuucugugucu

SEQ ID NO: 1805309 - RNA, 19 nt, Homo sapiens
  misc_RNA (1)...(19): siRNA sense strand
ggaagaguuuuaucuguuc

SEQ ID NO: 1805310 - RNA, 19 nt, Homo sapiens
  misc_RNA (1)...(19): siRNA sense strand
gggaaggccaugacagaug

SEQ ID NO: 1805311 - RNA, 19 nt, Homo sapiens
  misc_RNA (1)...(19): siRNA sense strand
caucaucuacugcuucaug

SEQ ID NO: 1805312 - RNA, 19 nt, Homo sapiens
  misc_RNA (1)...(19): siRNA sense strand
gggcacugucuuccuuaua

SEQ ID NO: 1805313 - RNA, 19 nt, Homo sapiens
  misc_RNA (1)...(19): siRNA sense strand
cuuauaggguucccacuca

SEQ ID NO: 1805314 - RNA, 19 nt, Homo sapiens
  misc_RNA (1)...(19): siRNA sense strand
aagcuugcaucaugaagau

SEQ ID NO: 1805315 - RNA, 19 nt, Homo sapiens
  misc_RNA (1)...(19): siRNA sense strand
cauggugguugugauggua

SEQ ID NO: 1805316 - RNA, 19 nt, Homo sapiens
  misc_RNA (1)...(19): siRNA sense strand
gaggaagaguuuuaucugu

SEQ ID NO: 1805317 - RNA, 19 nt, Homo sapiens
  misc_RNA (1)...(19): siRNA sense strand
gggccucaguaccacauug

SEQ ID NO: 1805318 - RNA, 19 nt, Homo sapiens
  misc_RNA (1)...(19): siRNA sense strand
gcacugucuuccuuauagg

SEQ ID NO: 1805319 - RNA, 19 nt, Homo sapiens
  misc_RNA (1)...(19): siRNA sense strand
uuugagcgcuacauuguca

SEQ ID NO: 1805320 - RNA, 19 nt, Homo sapiens
  misc_RNA (1)...(19): siRNA sense strand
ucuacaaucccaucaucua

SEQ ID NO: 1805321 - RNA, 19 nt, Homo sapiens
  misc_RNA (1)...(19): siRNA sense strand
cuggcuaccuggaccauug

SEQ ID NO: 1805322 - RNA, 19 nt, Homo sapiens
  misc_RNA (1)...(19): siRNA sense strand
gcauggugguugugauggu

SEQ ID NO: 1805323 - RNA, 19 nt, Homo sapiens
  misc_RNA (1)...(19): siRNA sense strand
caagcuugcaucaugaaga

SEQ ID NO: 1805324 - RNA, 19 nt, Homo sapiens
  misc_RNA (1)...(19): siRNA sense strand
gggaugggccucaguacca

SEQ ID NO: 1805325 - RNA, 19 nt, Homo sapiens
  misc_RNA (1)...(19): siRNA sense strand
cugagggccugcaguguuc

SEQ ID NO: 1805326 - RNA, 19 nt, Homo sapiens
  misc_RNA (1)...(19): siRNA sense strand
gugggaaggccaugacaga

SEQ ID NO: 1805327 - RNA, 19 nt, Homo sapiens
  misc_RNA (1)...(19): siRNA sense strand
caucuacugcuucaugaau

SEQ ID NO: 1805328 - RNA, 19 nt, Homo sapiens
  misc_RNA (1)...(19): siRNA sense strand
acaaucccaucaucuacug

SEQ ID NO: 1805329 - RNA, 19 nt, Homo sapiens
  misc_RNA (1)...(19): siRNA sense strand
cagcaggagucagcuacga

SEQ ID NO: 1805330 - RNA, 19 nt, Homo sapiens
  misc_RNA (1)...(19): siRNA sense strand
ugucucgucuacccaaguu

SEQ ID NO: 1805331 - RNA, 19 nt, Homo sapiens
  misc_RNA (1)...(19): siRNA sense strand
cagaugaauccgacacaug

SEQ ID NO: 1805332 - RNA, 19 nt, Homo sapiens
  misc_RNA (1)...(19): siRNA sense strand
caacuacauucuggucaac

SEQ ID NO: 1805333 - RNA, 19 nt, Homo sapiens
  misc_RNA (1)...(19): siRNA sense strand
uaaccaugggcuggacuua

SEQ ID NO: 1805334 - RNA, 19 nt, Homo sapiens
  misc_RNA (1)...(19): siRNA sense strand
guacaccgugggcaccaaa

SEQ ID NO: 1805335 - RNA, 19 nt, Homo sapiens
  misc_RNA (1)...(19): siRNA sense strand
gaauaagcaguuccaagcu

SEQ ID NO: 1805336 - RNA, 19 nt, Homo sapiens
  misc_RNA (1)...(19): siRNA sense strand
gugccucucucccucaucu

SEQ ID NO: 1805337 - RNA, 19 nt, Homo sapiens
  misc_RNA (1)...(19): siRNA sense strand
ggucaacaaccguaaccau

SEQ ID NO: 1805338 - RNA, 19 nt, Homo sapiens
  misc_RNA (1)...(19): siRNA sense strand
ccuguggcccugacuggua

SEQ ID NO: 1805339 - RNA, 19 nt, Homo sapiens
  misc_RNA (1)...(19): siRNA sense strand
guaagcccuucggcaacuu

SEQ ID NO: 1805340 - RNA, 19 nt, Homo sapiens
  misc_RNA (1)...(19): siRNA sense strand
gugcuugcaucuacaaucc

SEQ ID NO: 1805341 - RNA, 19 nt, Homo sapiens
  misc_RNA (1)...(19): siRNA sense strand
ugucaccauuccuucauuc

SEQ ID NO: 1805342 - RNA, 19 nt, Homo sapiens
  misc_RNA (1)...(19): siRNA sense strand
caucuucugcuucauugug

SEQ ID NO: 1805343 - RNA, 19 nt, Homo sapiens
  misc_RNA (1)...(19): siRNA sense strand
acaccgugggcaccaaaua

SEQ ID NO: 1805344 - RNA, 19 nt, Homo sapiens
  misc_RNA (1)...(19): siRNA sense strand
ccugagggccugcaguguu

SEQ ID NO: 1805345 - RNA, 19 nt, Homo sapiens
  misc_RNA (1)...(19): siRNA sense strand
acacaugcagcucccagaa

SEQ ID NO: 1805346 - RNA, 19 nt, Homo sapiens
  misc_RNA (1)...(19): siRNA sense strand
acaugcagcucccagaaaa

SEQ ID NO: 1805347 - RNA, 19 nt, Homo sapiens
  misc_RNA (1)...(19): siRNA sense strand
uauacgugguuccucuuca

SEQ ID NO: 1805348 - RNA, 19 nt, Homo sapiens
  misc_RNA (1)...(19): siRNA sense strand
cacaugcagcucccagaaa

SEQ ID NO: 1805349 - RNA, 19 nt, Homo sapiens
  misc_RNA (1)...(19): siRNA sense strand
cccaucaucuacugcuuca

SEQ ID NO: 1805350 - RNA, 19 nt, Homo sapiens
  misc_RNA (1)...(19): siRNA sense strand
cgugguuccucuucaucuu

SEQ ID NO: 1805351 - RNA, 19 nt, Homo sapiens
  misc_RNA (1)...(19): siRNA sense strand
uuccaagcuugcaucauga

SEQ ID NO: 1805352 - RNA, 19 nt, Homo sapiens
  misc_RNA (1)...(19): siRNA sense strand
gaaaugaacugaaggcuuu

SEQ ID NO: 1805353 - RNA, 19 nt, Homo sapiens
  misc_RNA (1)...(19): siRNA sense strand
gcaaagagccaaugaauau

SEQ ID NO: 1805354 - RNA, 19 nt, Homo sapiens
  misc_RNA (1)...(19): siRNA sense strand
gaagagauccucaagcuaa

SEQ ID NO: 1805355 - RNA, 19 nt, Homo sapiens
  misc_RNA (1)...(19): siRNA sense strand
ugacgaagcuuagaaauga

SEQ ID NO: 1805356 - RNA, 19 nt, Homo sapiens
  misc_RNA (1)...(19): siRNA sense strand
gaauacggaugaaggauga

SEQ ID NO: 1805357 - RNA, 19 nt, Homo sapiens
  misc_RNA (1)...(19): siRNA sense strand
gcaacugucucgucaaaga

SEQ ID NO: 1805358 - RNA, 19 nt, Homo sapiens
  misc_RNA (1)...(19): siRNA sense strand
gaaacugaauggagacuau

SEQ ID NO: 1805359 - RNA, 19 nt, Homo sapiens
  misc_RNA (1)...(19): siRNA sense strand
gaaggaggcuuacuaucug

SEQ ID NO: 1805360 - RNA, 19 nt, Homo sapiens
  misc_RNA (1)...(19): siRNA sense strand
gcacagagcccagcaaaga

SEQ ID NO: 1805361 - RNA, 19 nt, Homo sapiens
  misc_RNA (1)...(19): siRNA sense strand
ggacuauacugaauuggaa

SEQ ID NO: 1805362 - RNA, 19 nt, Homo sapiens
  misc_RNA (1)...(19): siRNA sense strand
gaugaaauccgagaauaua

SEQ ID NO: 1805363 - RNA, 19 nt, Homo sapiens
  misc_RNA (1)...(19): siRNA sense strand
gaagguugcugaagaugga

SEQ ID NO: 1805364 - RNA, 19 nt, Homo sapiens
  misc_RNA (1)...(19): siRNA sense strand
agaagacucugaacacuuu

SEQ ID NO: 1805365 - RNA, 19 nt, Homo sapiens
  misc_RNA (1)...(19): siRNA sense strand
ggagugaaccaaacaauga

SEQ ID NO: 1805366 - RNA, 19 nt, Homo sapiens
  misc_RNA (1)...(19): siRNA sense strand
ggacaucaaugguuuagag

SEQ ID NO: 1805367 - RNA, 19 nt, Homo sapiens
  misc_RNA (1)...(19): siRNA sense strand
uaacugaggugauugaucu

SEQ ID NO: 1805368 - RNA, 19 nt, Homo sapiens
  misc_RNA (1)...(19): siRNA sense strand
gaaccaaguccaacuaaga

SEQ ID NO: 1805369 - RNA, 19 nt, Homo sapiens
  misc_RNA (1)...(19): siRNA sense strand
gaucugaaagcugaaauua

SEQ ID NO: 1805370 - RNA, 19 nt, Homo sapiens
  misc_RNA (1)...(19): siRNA sense strand
uagcuaaucucaagaacaa

SEQ ID NO: 1805371 - RNA, 19 nt, Homo sapiens
  misc_RNA (1)...(19): siRNA sense strand
gcaacaagaugugaugaau

SEQ ID NO: 1805372 - RNA, 19 nt, Homo sapiens
  misc_RNA (1)...(19): siRNA sense strand
gagcagaucgccacauuga

SEQ ID NO: 1805373 - RNA, 19 nt, Homo sapiens
  misc_RNA (1)...(19): siRNA sense strand
cacaaucucuccuguuauu

SEQ ID NO: 1805374 - RNA, 19 nt, Homo sapiens
  misc_RNA (1)...(19): siRNA sense strand
ccacagugcucacaacuag

SEQ ID NO: 1805375 - RNA, 19 nt, Homo sapiens
  misc_RNA (1)...(19): siRNA sense strand
aagaagcccucgagacuuu

SEQ ID NO: 1805376 - RNA, 19 nt, Homo sapiens
  misc_RNA (1)...(19): siRNA sense strand
gaaaaucacaguacccuua

SEQ ID NO: 1805377 - RNA, 19 nt, Homo sapiens
  misc_RNA (1)...(19): siRNA sense strand
gacauucagugaggaguua

SEQ ID NO: 1805378 - RNA, 19 nt, Homo sapiens
  misc_RNA (1)...(19): siRNA sense strand
ucaaacagcaguaugauga

SEQ ID NO: 1805379 - RNA, 19 nt, Homo sapiens
  misc_RNA (1)...(19): siRNA sense strand
cccacaaucucuccuguua

SEQ ID NO: 1805380 - RNA, 19 nt, Homo sapiens
  misc_RNA (1)...(19): siRNA sense strand
guagauggacucaaauuug

SEQ ID NO: 1805381 - RNA, 19 nt, Homo sapiens
  misc_RNA (1)...(19): siRNA sense strand
caacaagaugugaugaaua

SEQ ID NO: 1805382 - RNA, 19 nt, Homo sapiens
  misc_RNA (1)...(19): siRNA sense strand
gaaaccaugacgaagcuua

SEQ ID NO: 1805383 - RNA, 19 nt, Homo sapiens
  misc_RNA (1)...(19): siRNA sense strand
gggagcagaucgccacauu

SEQ ID NO: 1805384 - RNA, 19 nt, Homo sapiens
  misc_RNA (1)...(19): siRNA sense strand
gaccucaucugaaccaguu

SEQ ID NO: 1805385 - RNA, 19 nt, Homo sapiens
  misc_RNA (1)...(19): siRNA sense strand
ggaggaggcccaugacuau

SEQ ID NO: 1805386 - RNA, 19 nt, Homo sapiens
  misc_RNA (1)...(19): siRNA sense strand
acacuuaccuccugcauag

SEQ ID NO: 1805387 - RNA, 19 nt, Homo sapiens
  misc_RNA (1)...(19): siRNA sense strand
aaacaaggaccucaucuga

SEQ ID NO: 1805388 - RNA, 19 nt, Homo sapiens
  misc_RNA (1)...(19): siRNA sense strand
gaagaagacucugaacacu

SEQ ID NO: 1805389 - RNA, 19 nt, Homo sapiens
  misc_RNA (1)...(19): siRNA sense strand
ucugaaagcugaaauuaag

SEQ ID NO: 1805390 - RNA, 19 nt, Homo sapiens
  misc_RNA (1)...(19): siRNA sense strand
caagugacauccgcaaaga

SEQ ID NO: 1805391 - RNA, 19 nt, Homo sapiens
  misc_RNA (1)...(19): siRNA sense strand
aaacuacacugaugagaag

SEQ ID NO: 1805392 - RNA, 19 nt, Homo sapiens
  misc_RNA (1)...(19): siRNA sense strand
ggaagaagcccucgagacu

SEQ ID NO: 1805393 - RNA, 19 nt, Homo sapiens
  misc_RNA (1)...(19): siRNA sense strand
caccaugugugucuaugua

SEQ ID NO: 1805394 - RNA, 19 nt, Homo sapiens
  misc_RNA (1)...(19): siRNA sense strand
guuuagagauccuugaaug

SEQ ID NO: 1805395 - RNA, 19 nt, Homo sapiens
  misc_RNA (1)...(19): siRNA sense strand
gaucggcagcccuaaagua

SEQ ID NO: 1805396 - RNA, 19 nt, Homo sapiens
  misc_RNA (1)...(19): siRNA sense strand
cuacagagaauacggauga

SEQ ID NO: 1805397 - RNA, 19 nt, Homo sapiens
  misc_RNA (1)...(19): siRNA sense strand
gaucccaccuccacagaau

SEQ ID NO: 1805398 - RNA, 19 nt, Homo sapiens
  misc_RNA (1)...(19): siRNA sense strand
aaacuaguguccacguuga

SEQ ID NO: 1805399 - RNA, 19 nt, Homo sapiens
  misc_RNA (1)...(19): siRNA sense strand
ccaugggccucuugugaaa

SEQ ID NO: 1805400 - RNA, 19 nt, Homo sapiens
  misc_RNA (1)...(19): siRNA sense strand
cuuccuaccuacagaauuu

SEQ ID NO: 1805401 - RNA, 19 nt, Homo sapiens
  misc_RNA (1)...(19): siRNA sense strand
gaacccugucucugacuua

SEQ ID NO: 1805402 - RNA, 19 nt, Homo sapiens
  misc_RNA (1)...(19): siRNA sense strand
ccacagacacccaacauuc

SEQ ID NO: 1805403 - RNA, 19 nt, Homo sapiens
  misc_RNA (1)...(19): siRNA sense strand
gauccaggcugccgaguac

SEQ ID NO: 1805404 - RNA, 19 nt, Homo sapiens
  misc_RNA (1)...(19): siRNA sense strand
ugcagacgguggaccauua

SEQ ID NO: 1805405 - RNA, 19 nt, Homo sapiens
  misc_RNA (1)...(19): siRNA sense strand
cuacaaccuuaaugccaua

SEQ ID NO: 1805406 - RNA, 19 nt, Homo sapiens
  misc_RNA (1)...(19): siRNA sense strand
ggagaguggugagaagaug

SEQ ID NO: 1805407 - RNA, 19 nt, Homo sapiens
  misc_RNA (1)...(19): siRNA sense strand
cagcaucgaaggaggcuua

SEQ ID NO: 1805408 - RNA, 19 nt, Homo sapiens
  misc_RNA (1)...(19): siRNA sense strand
uagagaggcuaaccaagga

SEQ ID NO: 1805409 - RNA, 19 nt, Homo sapiens
  misc_RNA (1)...(19): siRNA sense strand
caucaaugguuuagagauc

SEQ ID NO: 1805410 - RNA, 19 nt, Homo sapiens
  misc_RNA (1)...(19): siRNA sense strand
gggcuguggucacuaaugu

SEQ ID NO: 1805411 - RNA, 19 nt, Homo sapiens
  misc_RNA (1)...(19): siRNA sense strand
cgaaggaggcuuacuaucu

SEQ ID NO: 1805412 - RNA, 19 nt, Homo sapiens
  misc_RNA (1)...(19): siRNA sense strand
aaauccagauguaugauga

SEQ ID NO: 1805413 - RNA, 19 nt, Homo sapiens
  misc_RNA (1)...(19): siRNA sense strand
ggacuuagaguuugaccau

SEQ ID NO: 1805414 - RNA, 19 nt, Homo sapiens
  misc_RNA (1)...(19): siRNA sense strand
guuagcagcugcagaggau

SEQ ID NO: 1805415 - RNA, 19 nt, Homo sapiens
  misc_RNA (1)...(19): siRNA sense strand
gcuuagaaaugaacugaag

SEQ ID NO: 1805416 - RNA, 19 nt, Homo sapiens
  misc_RNA (1)...(19): siRNA sense strand
gagaaggaguugcaaaaga

SEQ ID NO: 1805417 - RNA, 19 nt, Homo sapiens
  misc_RNA (1)...(19): siRNA sense strand
gggaggaggcccaugacua

SEQ ID NO: 1805418 - RNA, 19 nt, Homo sapiens
  misc_RNA (1)...(19): siRNA sense strand
gcuggaggacuuagaguuu

SEQ ID NO: 1805419 - RNA, 19 nt, Homo sapiens
  misc_RNA (1)...(19): siRNA sense strand
caagaugugaugaauaugu

SEQ ID NO: 1805420 - RNA, 19 nt, Homo sapiens
  misc_RNA (1)...(19): siRNA sense strand
caucgaaggaggcuuacua

SEQ ID NO: 1805421 - RNA, 19 nt, Homo sapiens
  misc_RNA (1)...(19): siRNA sense strand
ggaagagauccucaagcua

SEQ ID NO: 1805422 - RNA, 19 nt, Homo sapiens
  misc_RNA (1)...(19): siRNA sense strand
caaccuuaaugccauaauc

SEQ ID NO: 1805423 - RNA, 19 nt, Homo sapiens
  misc_RNA (1)...(19): siRNA sense strand
acaaggaccucaucugaac

SEQ ID NO: 1805424 - RNA, 19 nt, Homo sapiens
  misc_RNA (1)...(19): siRNA sense strand
acagggucaugcuggauua

SEQ ID NO: 1805425 - RNA, 19 nt, Homo sapiens
  misc_RNA (1)...(19): siRNA sense strand
gaagaagcccucgagacuu

SEQ ID NO: 1805426 - RNA, 19 nt, Homo sapiens
  misc_RNA (1)...(19): siRNA sense strand
gguugaauacgaaggcuua

SEQ ID NO: 1805427 - RNA, 19 nt, Homo sapiens
  misc_RNA (1)...(19): siRNA sense strand
gaaauccgagaauauaagu

SEQ ID NO: 1805428 - RNA, 19 nt, Homo sapiens
  misc_RNA (1)...(19): siRNA sense strand
gagaagaagacucugaaca

SEQ ID NO: 1805429 - RNA, 19 nt, Homo sapiens
  misc_RNA (1)...(19): siRNA sense strand
gaaacaaggaccucaucug

SEQ ID NO: 1805430 - RNA, 19 nt, Homo sapiens
  misc_RNA (1)...(19): siRNA sense strand
ucacagagcacgucaaugc

SEQ ID NO: 1805431 - RNA, 19 nt, Homo sapiens
  misc_RNA (1)...(19): siRNA sense strand
cucaguagauggacucaaa

SEQ ID NO: 1805432 - RNA, 19 nt, Homo sapiens
  misc_RNA (1)...(19): siRNA sense strand
gaaggagaacaaugagaug

SEQ ID NO: 1805433 - RNA, 19 nt, Homo sapiens
  misc_RNA (1)...(19): siRNA sense strand
gcaaaggcaaacuuggaaa

SEQ ID NO: 1805434 - RNA, 19 nt, Homo sapiens
  misc_RNA (1)...(19): siRNA sense strand
aaucacaguacccuuaaua

SEQ ID NO: 1805435 - RNA, 19 nt, Homo sapiens
  misc_RNA (1)...(19): siRNA sense strand
ugaggugauugaucugaaa

SEQ ID NO: 1805436 - RNA, 19 nt, Homo sapiens
  misc_RNA (1)...(19): siRNA sense strand
ugacugaaaccaugacgaa

SEQ ID NO: 1805437 - RNA, 19 nt, Homo sapiens
  misc_RNA (1)...(19): siRNA sense strand
gaugagaagaagacucuga

SEQ ID NO: 1805438 - RNA, 19 nt, Homo sapiens
  misc_RNA (1)...(19): siRNA sense strand
ugcaggaucugaaggagaa

SEQ ID NO: 1805439 - RNA, 19 nt, Homo sapiens
  misc_RNA (1)...(19): siRNA sense strand
ucaagcaucugcagaaagc

SEQ ID NO: 1805440 - RNA, 19 nt, Homo sapiens
  misc_RNA (1)...(19): siRNA sense strand
gaugaucccagaggacuuu

SEQ ID NO: 1805441 - RNA, 19 nt, Homo sapiens
  misc_RNA (1)...(19): siRNA sense strand
gggucaugcuggauuacua

SEQ ID NO: 1805442 - RNA, 19 nt, Homo sapiens
  misc_RNA (1)...(19): siRNA sense strand
caaggagaguggugagaag

SEQ ID NO: 1805443 - RNA, 19 nt, Homo sapiens
  misc_RNA (1)...(19): siRNA sense strand
gagaaggccaaguaugaga

SEQ ID NO: 1805444 - RNA, 19 nt, Homo sapiens
  misc_RNA (1)...(19): siRNA sense strand
cuaucggacucccaccuua

SEQ ID NO: 1805445 - RNA, 19 nt, Homo sapiens
  misc_RNA (1)...(19): siRNA sense strand
gccauccgauugaaagaga

SEQ ID NO: 1805446 - RNA, 19 nt, Homo sapiens
  misc_RNA (1)...(19): siRNA sense strand
auacugaauuggaagaaga

SEQ ID NO: 1805447 - RNA, 19 nt, Homo sapiens
  misc_RNA (1)...(19): siRNA sense strand
caucugaaccaguugcaaa

SEQ ID NO: 1805448 - RNA, 19 nt, Homo sapiens
  misc_RNA (1)...(19): siRNA sense strand
uggaugagaugcagagaca

SEQ ID NO: 1805449 - RNA, 19 nt, Homo sapiens
  misc_RNA (1)...(19): siRNA sense strand
gaccgguccuugcaacugu

SEQ ID NO: 1805450 - RNA, 19 nt, Homo sapiens
  misc_RNA (1)...(19): siRNA sense strand
caagaucggcagcccuaaa

SEQ ID NO: 1805451 - RNA, 19 nt, Homo sapiens
  misc_RNA (1)...(19): siRNA sense strand
gaauggcuauccagcaaaa

SEQ ID NO: 1805452 - RNA, 19 nt, Homo sapiens
  misc_RNA (1)...(19): siRNA sense strand
ggacaacucuccaggaaua

SEQ ID NO: 1805453 - RNA, 19 nt, Homo sapiens
  misc_RNA (1)...(19): siRNA sense strand
gaacauaccuacugaggaa

SEQ ID NO: 1805454 - RNA, 19 nt, Homo sapiens
  misc_RNA (1)...(19): siRNA sense strand
gcaaacaguuccaaauauu

SEQ ID NO: 1805455 - RNA, 19 nt, Homo sapiens
  misc_RNA (1)...(19): siRNA sense strand
gaaaugcuauucucaucaa

SEQ ID NO: 1805456 - RNA, 19 nt, Homo sapiens
  misc_RNA (1)...(19): siRNA sense strand
gaucgugucuaugauauuu

SEQ ID NO: 1805457 - RNA, 19 nt, Homo sapiens
  misc_RNA (1)...(19): siRNA sense strand
guuguaaggugcucucuuu

SEQ ID NO: 1805458 - RNA, 19 nt, Homo sapiens
  misc_RNA (1)...(19): siRNA sense strand
gaaagagaauugccagaac

SEQ ID NO: 1805459 - RNA, 19 nt, Homo sapiens
  misc_RNA (1)...(19): siRNA sense strand
caagcucugugguuucuaa

SEQ ID NO: 1805460 - RNA, 19 nt, Homo sapiens
  misc_RNA (1)...(19): siRNA sense strand
ccaaauccaugcaaacagu

SEQ ID NO: 1805461 - RNA, 19 nt, Homo sapiens
  misc_RNA (1)...(19): siRNA sense strand
ccucuuauccugucucuaa

SEQ ID NO: 1805462 - RNA, 19 nt, Homo sapiens
  misc_RNA (1)...(19): siRNA sense strand
ggaugcaacucacuaccuu

SEQ ID NO: 1805463 - RNA, 19 nt, Homo sapiens
  misc_RNA (1)...(19): siRNA sense strand
guaaggugcucucuuucau

SEQ ID NO: 1805464 - RNA, 19 nt, Homo sapiens
  misc_RNA (1)...(19): siRNA sense strand
aaucacaaaugacacagaa

SEQ ID NO: 1805465 - RNA, 19 nt, Homo sapiens
  misc_RNA (1)...(19): siRNA sense strand
caaaucaccuccuguaccu

SEQ ID NO: 1805466 - RNA, 19 nt, Homo sapiens
  misc_RNA (1)...(19): siRNA sense strand
ccagaacgguauugguguu

SEQ ID NO: 1805467 - RNA, 19 nt, Homo sapiens
  misc_RNA (1)...(19): siRNA sense strand
ucaucaagcucugugguuu

SEQ ID NO: 1805468 - RNA, 19 nt, Homo sapiens
  misc_RNA (1)...(19): siRNA sense strand
ugcaaacaguuccaaauau

SEQ ID NO: 1805469 - RNA, 19 nt, Homo sapiens
  misc_RNA (1)...(19): siRNA sense strand
ggaaaugcuauucucauca

SEQ ID NO: 1805470 - RNA, 19 nt, Homo sapiens
  misc_RNA (1)...(19): siRNA sense strand
ugucuacuauuccuugauu

SEQ ID NO: 1805471 - RNA, 19 nt, Homo sapiens
  misc_RNA (1)...(19): siRNA sense strand
gcugacaccucucuuacca

SEQ ID NO: 1805472 - RNA, 19 nt, Homo sapiens
  misc_RNA (1)...(19): siRNA sense strand
cgaaagagaauugccagaa

SEQ ID NO: 1805473 - RNA, 19 nt, Homo sapiens
  misc_RNA (1)...(19): siRNA sense strand
gcucugugguuucuaacga

SEQ ID NO: 1805474 - RNA, 19 nt, Homo sapiens
  misc_RNA (1)...(19): siRNA sense strand
ugaaucauguaccucuuau

SEQ ID NO: 1805475 - RNA, 19 nt, Homo sapiens
  misc_RNA (1)...(19): siRNA sense strand
cagccucacucaccuaauc

SEQ ID NO: 1805476 - RNA, 19 nt, Homo sapiens
  misc_RNA (1)...(19): siRNA sense strand
aagcucaguuguucuguug

SEQ ID NO: 1805477 - RNA, 19 nt, Homo sapiens
  misc_RNA (1)...(19): siRNA sense strand
ggauggcuguucggaagaa

SEQ ID NO: 1805478 - RNA, 19 nt, Homo sapiens
  misc_RNA (1)...(19): siRNA sense strand
gaacgguauugguguuggu

SEQ ID NO: 1805479 - RNA, 19 nt, Homo sapiens
  misc_RNA (1)...(19): siRNA sense strand
caaaagcacccugaacaua

SEQ ID NO: 1805480 - RNA, 19 nt, Homo sapiens
  misc_RNA (1)...(19): siRNA sense strand
gcacugggagcauacagau

SEQ ID NO: 1805481 - RNA, 19 nt, Homo sapiens
  misc_RNA (1)...(19): siRNA sense strand
aaauuagugugaccucguu

SEQ ID NO: 1805482 - RNA, 19 nt, Homo sapiens
  misc_RNA (1)...(19): siRNA sense strand
gcaggcagaggacagauuc

SEQ ID NO: 1805483 - RNA, 19 nt, Homo sapiens
  misc_RNA (1)...(19): siRNA sense strand
ucacaaaugacacagaauc

SEQ ID NO: 1805484 - RNA, 19 nt, Homo sapiens
  misc_RNA (1)...(19): siRNA sense strand
ggaagaauugguuguaagg

SEQ ID NO: 1805485 - RNA, 19 nt, Homo sapiens
  misc_RNA (1)...(19): siRNA sense strand
gaccaaauccaugcaaaca

SEQ ID NO: 1805486 - RNA, 19 nt, Homo sapiens
  misc_RNA (1)...(19): siRNA sense strand
augcaaacaguuccaaaua

SEQ ID NO: 1805487 - RNA, 19 nt, Homo sapiens
  misc_RNA (1)...(19): siRNA sense strand
ucggaagaauugguuguaa

SEQ ID NO: 1805488 - RNA, 19 nt, Homo sapiens
  misc_RNA (1)...(19): siRNA sense strand
uggaaaugcuauucucauc

SEQ ID NO: 1805489 - RNA, 19 nt, Homo sapiens
  misc_RNA (1)...(19): siRNA sense strand
uacauucucugcugugcuu

SEQ ID NO: 1805490 - RNA, 19 nt, Homo sapiens
  misc_RNA (1)...(19): siRNA sense strand
caacucuccaggaauagaa

SEQ ID NO: 1805491 - RNA, 19 nt, Homo sapiens
  misc_RNA (1)...(19): siRNA sense strand
gcuaggacccuuuacaaaa

SEQ ID NO: 1805492 - RNA, 19 nt, Homo sapiens
  misc_RNA (1)...(19): siRNA sense strand
gcgucuggaucgugucuau

SEQ ID NO: 1805493 - RNA, 19 nt, Homo sapiens
  misc_RNA (1)...(19): siRNA sense strand
gaagcaggcagaggacaga

SEQ ID NO: 1805494 - RNA, 19 nt, Homo sapiens
  misc_RNA (1)...(19): siRNA sense strand
gcucaguuguucuguugca

SEQ ID NO: 1805495 - RNA, 19 nt, Homo sapiens
  misc_RNA (1)...(19): siRNA sense strand
guaccucuaccauucauuc

SEQ ID NO: 1805496 - RNA, 19 nt, Homo sapiens
  misc_RNA (1)...(19): siRNA sense strand
ucacucaccuaaucagacu

SEQ ID NO: 1805497 - RNA, 19 nt, Homo sapiens
  misc_RNA (1)...(19): siRNA sense strand
ucaccuaaucagacuuuaa

SEQ ID NO: 1805498 - RNA, 19 nt, Homo sapiens
  misc_RNA (1)...(19): siRNA sense strand
gagcgacagcccuccaaug

SEQ ID NO: 1805499 - RNA, 19 nt, Homo sapiens
  misc_RNA (1)...(19): siRNA sense strand
gugucaguguucacauuaa

SEQ ID NO: 1805500 - RNA, 19 nt, Homo sapiens
  misc_RNA (1)...(19): siRNA sense strand
caccuaaucagacuuuaau

SEQ ID NO: 1805501 - RNA, 19 nt, Homo sapiens
  misc_RNA (1)...(19): siRNA sense strand
cggaagaauugguuguaag

SEQ ID NO: 1805502 - RNA, 19 nt, Homo sapiens
  misc_RNA (1)...(19): siRNA sense strand
cuuaugcugugaucauuuc

SEQ ID NO: 1805503 - RNA, 19 nt, Homo sapiens
  misc_RNA (1)...(19): siRNA sense strand
aaagcucaguuguucuguu

SEQ ID NO: 1805504 - RNA, 19 nt, Homo sapiens
  misc_RNA (1)...(19): siRNA sense strand
cugcugugcuucuuagugu

SEQ ID NO: 1805505 - RNA, 19 nt, Homo sapiens
  misc_RNA (1)...(19): siRNA sense strand
ucagugggcauccuuggaa

SEQ ID NO: 1805506 - RNA, 19 nt, Homo sapiens
  misc_RNA (1)...(19): siRNA sense strand
ucugugguuucuaacgaua

SEQ ID NO: 1805507 - RNA, 19 nt, Homo sapiens
  misc_RNA (1)...(19): siRNA sense strand
guugcugacaccucucuua

SEQ ID NO: 1805508 - RNA, 19 nt, Homo sapiens
  misc_RNA (1)...(19): siRNA sense strand
ucacuucucaaaccuaugu

SEQ ID NO: 1805509 - RNA, 19 nt, Homo sapiens
  misc_RNA (1)...(19): siRNA sense strand
acaaagccaugcccguaag

SEQ ID NO: 1805510 - RNA, 19 nt, Homo sapiens
  misc_RNA (1)...(19): siRNA sense strand
uacuauuccuugauugcua

SEQ ID NO: 1805511 - RNA, 19 nt, Homo sapiens
  misc_RNA (1)...(19): siRNA sense strand
gcuauucucaucaaagucu

SEQ ID NO: 1805512 - RNA, 19 nt, Homo sapiens
  misc_RNA (1)...(19): siRNA sense strand
uggaucgugucuaugauau

SEQ ID NO: 1805513 - RNA, 19 nt, Homo sapiens
  misc_RNA (1)...(19): siRNA sense strand
aagaccaaauccaugcaaa

SEQ ID NO: 1805514 - RNA, 19 nt, Homo sapiens
  misc_RNA (1)...(19): siRNA sense strand
cgauaacacaaauaaagga

SEQ ID NO: 1805515 - RNA, 19 nt, Homo sapiens
  misc_RNA (1)...(19): siRNA sense strand
ggggacaacucuccaggaa

SEQ ID NO: 1805516 - RNA, 19 nt, Homo sapiens
  misc_RNA (1)...(19): siRNA sense strand
gcaguugugaagccacuug

SEQ ID NO: 1805517 - RNA, 19 nt, Homo sapiens
  misc_RNA (1)...(19): siRNA sense strand
gaaucccgaaagagaauug

SEQ ID NO: 1805518 - RNA, 19 nt, Homo sapiens
  misc_RNA (1)...(19): siRNA sense strand
gguguugguggcucuguuu

SEQ ID NO: 1805519 - RNA, 19 nt, Homo sapiens
  misc_RNA (1)...(19): siRNA sense strand
gcauugugugccaucuaua

SEQ ID NO: 1805520 - RNA, 19 nt, Homo sapiens
  misc_RNA (1)...(19): siRNA sense strand
aggaauagaagcauugugu

SEQ ID NO: 1805521 - RNA, 19 nt, Homo sapiens
  misc_RNA (1)...(19): siRNA sense strand
ugacagauacaaggcaguu

SEQ ID NO: 1805522 - RNA, 19 nt, Homo sapiens
  misc_RNA (1)...(19): siRNA sense strand
ucuaugauauuugcucuac

SEQ ID NO: 1805523 - RNA, 19 nt, Homo sapiens
  misc_RNA (1)...(19): siRNA sense strand
ugccaaaucaccuccugua

SEQ ID NO: 1805524 - RNA, 19 nt, Homo sapiens
  misc_RNA (1)...(19): siRNA sense strand
gaauugccagaacgguauu

SEQ ID NO: 1805525 - RNA, 19 nt, Homo sapiens
  misc_RNA (1)...(19): siRNA sense strand
agaauugccagaacgguau

SEQ ID NO: 1805526 - RNA, 19 nt, Homo sapiens
  misc_RNA (1)...(19): siRNA sense strand
cagugggcauccuuggaaa

SEQ ID NO: 1805527 - RNA, 19 nt, Homo sapiens
  misc_RNA (1)...(19): siRNA sense strand
cuacauuauuccacucucu

SEQ ID NO: 1805528 - RNA, 19 nt, Homo sapiens
  misc_RNA (1)...(19): siRNA sense strand
ucauccggcucacuucugu

SEQ ID NO: 1805529 - RNA, 19 nt, Homo sapiens
  misc_RNA (1)...(19): siRNA sense strand
gacacagaaucaucaagcu

SEQ ID NO: 1805530 - RNA, 19 nt, Homo sapiens
  misc_RNA (1)...(19): siRNA sense strand
uuaucucugucuacuauuc

SEQ ID NO: 1805531 - RNA, 19 nt, Homo sapiens
  misc_RNA (1)...(19): siRNA sense strand
ucucuauuaucucugucua

SEQ ID NO: 1805532 - RNA, 19 nt, Homo sapiens
  misc_RNA (1)...(19): siRNA sense strand
cuucuuaguguucuacauu

SEQ ID NO: 1805533 - RNA, 19 nt, Homo sapiens
  misc_RNA (1)...(19): siRNA sense strand
uugaaucauguaccucuua

SEQ ID NO: 1805534 - RNA, 19 nt, Homo sapiens
  misc_RNA (1)...(19): siRNA sense strand
caaauccaugcaaacaguu

SEQ ID NO: 1805535 - RNA, 19 nt, Homo sapiens
  misc_RNA (1)...(19): siRNA sense strand
uccuguaccucuaccauuc

SEQ ID NO: 1805536 - RNA, 19 nt, Homo sapiens
  misc_RNA (1)...(19): siRNA sense strand
ugauugcuaggacccuuua

SEQ ID NO: 1805537 - RNA, 19 nt, Homo sapiens
  misc_RNA (1)...(19): siRNA sense strand
cauugugugccaucuauau

SEQ ID NO: 1805538 - RNA, 19 nt, Homo sapiens
  misc_RNA (1)...(19): siRNA sense strand
caagaccaaauccaugcaa

SEQ ID NO: 1805539 - RNA, 19 nt, Homo sapiens
  misc_RNA (1)...(19): siRNA sense strand
gaagcauugugugccaucu

SEQ ID NO: 1805540 - RNA, 19 nt, Homo sapiens
  misc_RNA (1)...(19): siRNA sense strand
cacaaaugacacagaauca

SEQ ID NO: 1805541 - RNA, 19 nt, Homo sapiens
  misc_RNA (1)...(19): siRNA sense strand
uaugauauuugcucuaccu

SEQ ID NO: 1805542 - RNA, 19 nt, Homo sapiens
  misc_RNA (1)...(19): siRNA sense strand
ggaucgugucuaugauauu

SEQ ID NO: 1805543 - RNA, 19 nt, Homo sapiens
  misc_RNA (1)...(19): siRNA sense strand
caugcaaacaguuccaaau

SEQ ID NO: 1805544 - RNA, 19 nt, Homo sapiens
  misc_RNA (1)...(19): siRNA sense strand
gaagaauugguuguaaggu

SEQ ID NO: 1805545 - RNA, 19 nt, Homo sapiens
  misc_RNA (1)...(19): siRNA sense strand
ccucuaccauucauucacu

SEQ ID NO: 1805546 - RNA, 19 nt, Homo sapiens
  misc_RNA (1)...(19): siRNA sense strand
aacaaagccaugcccguaa

SEQ ID NO: 1805547 - RNA, 19 nt, Homo sapiens
  misc_RNA (1)...(19): siRNA sense strand
gucuggaucgugucuauga

SEQ ID NO: 1805548 - RNA, 19 nt, Homo sapiens
  misc_RNA (1)...(19): siRNA sense strand
ucucugcugugcuucuuag

SEQ ID NO: 1805549 - RNA, 19 nt, Homo sapiens
  misc_RNA (1)...(19): siRNA sense strand
uuaaagcucaguuguucug

SEQ ID NO: 1805550 - RNA, 19 nt, Homo sapiens
  misc_RNA (1)...(19): siRNA sense strand
agcauugugugccaucuau

SEQ ID NO: 1805551 - RNA, 19 nt, Homo sapiens
  misc_RNA (1)...(19): siRNA sense strand
ucuauuaucucugucuacu

SEQ ID NO: 1805552 - RNA, 19 nt, Homo sapiens
  misc_RNA (1)...(19): siRNA sense strand
ggucagagcuacacauuga

SEQ ID NO: 1805553 - RNA, 19 nt, Homo sapiens
  misc_RNA (1)...(19): siRNA sense strand
ggacaaggcccucaugaac

SEQ ID NO: 1805554 - RNA, 19 nt, Homo sapiens
  misc_RNA (1)...(19): siRNA sense strand
gcgggcagcaccagaauga

SEQ ID NO: 1805555 - RNA, 19 nt, Homo sapiens
  misc_RNA (1)...(19): siRNA sense strand
gacugggccugguacaaga

SEQ ID NO: 1805556 - RNA, 19 nt, Homo sapiens
  misc_RNA (1)...(19): siRNA sense strand
gcagguucuucgugaguuc

SEQ ID NO: 1805557 - RNA, 19 nt, Homo sapiens
  misc_RNA (1)...(19): siRNA sense strand
uugagaaccugaacaugga

SEQ ID NO: 1805558 - RNA, 19 nt, Homo sapiens
  misc_RNA (1)...(19): siRNA sense strand
gaagucgucagaacacauc

SEQ ID NO: 1805559 - RNA, 19 nt, Homo sapiens
  misc_RNA (1)...(19): siRNA sense strand
ucaccaucaucuucaucua

SEQ ID NO: 1805560 - RNA, 19 nt, Homo sapiens
  misc_RNA (1)...(19): siRNA sense strand
gcugugaagucgucagaac

SEQ ID NO: 1805561 - RNA, 19 nt, Homo sapiens
  misc_RNA (1)...(19): siRNA sense strand
gagugaaggcugugaaguc

SEQ ID NO: 1805562 - RNA, 19 nt, Homo sapiens
  misc_RNA (1)...(19): siRNA sense strand
cgucagaacacaucaacga

SEQ ID NO: 1805563 - RNA, 19 nt, Homo sapiens
  misc_RNA (1)...(19): siRNA sense strand
gggcagcaccagaaugaca

SEQ ID NO: 1805564 - RNA, 19 nt, Homo sapiens
  misc_RNA (1)...(19): siRNA sense strand
ucacugacugggccuggua

SEQ ID NO: 1805565 - RNA, 19 nt, Homo sapiens
  misc_RNA (1)...(19): siRNA sense strand
gagcagguucuucgugagu

SEQ ID NO: 1805566 - RNA, 19 nt, Homo sapiens
  misc_RNA (1)...(19): siRNA sense strand
ucacugacucugaggacaa

SEQ ID NO: 1805567 - RNA, 19 nt, Homo sapiens
  misc_RNA (1)...(19): siRNA sense strand
agaguacuccugcgucuuc

SEQ ID NO: 1805568 - RNA, 19 nt, Homo sapiens
  misc_RNA (1)...(19): siRNA sense strand
ucagagcuacacauugaga

SEQ ID NO: 1805569 - RNA, 19 nt, Homo sapiens
  misc_RNA (1)...(19): siRNA sense strand
acaagaucacugacucuga

SEQ ID NO: 1805570 - RNA, 19 nt, Homo sapiens
  misc_RNA (1)...(19): siRNA sense strand
gcagcaccagaaugacaaa

SEQ ID NO: 1805571 - RNA, 19 nt, Homo sapiens
  misc_RNA (1)...(19): siRNA sense strand
cggccaugcuggucugcaa

SEQ ID NO: 1805572 - RNA, 19 nt, Homo sapiens
  misc_RNA (1)...(19): siRNA sense strand
guacaagaucacugacucu

SEQ ID NO: 1805573 - RNA, 19 nt, Homo sapiens
  misc_RNA (1)...(19): siRNA sense strand
ugacugggccugguacaag

SEQ ID NO: 1805574 - RNA, 19 nt, Homo sapiens
  misc_RNA (1)...(19): siRNA sense strand
ccugguacaagaucacuga

SEQ ID NO: 1805575 - RNA, 19 nt, Homo sapiens
  misc_RNA (1)...(19): siRNA sense strand
ggucagagcuacacauuga

SEQ ID NO: 1805576 - RNA, 19 nt, Homo sapiens
  misc_RNA (1)...(19): siRNA sense strand
ggacaaggcccucaugaac

SEQ ID NO: 1805577 - RNA, 19 nt, Homo sapiens
  misc_RNA (1)...(19): siRNA sense strand
gcgggcagcaccagaauga

SEQ ID NO: 1805578 - RNA, 19 nt, Homo sapiens
  misc_RNA (1)...(19): siRNA sense strand
gacugggccugguacaaga

SEQ ID NO: 1805579 - RNA, 19 nt, Homo sapiens
  misc_RNA (1)...(19): siRNA sense strand
gcagguucuucgugaguuc

SEQ ID NO: 1805580 - RNA, 19 nt, Homo sapiens
  misc_RNA (1)...(19): siRNA sense strand
uugagaaccugaacaugga

SEQ ID NO: 1805581 - RNA, 19 nt, Homo sapiens
  misc_RNA (1)...(19): siRNA sense strand
gaagucgucagaacacauc

SEQ ID NO: 1805582 - RNA, 19 nt, Homo sapiens
  misc_RNA (1)...(19): siRNA sense strand
ucaccaucaucuucaucua

SEQ ID NO: 1805583 - RNA, 19 nt, Homo sapiens
  misc_RNA (1)...(19): siRNA sense strand
gcugugaagucgucagaac

SEQ ID NO: 1805584 - RNA, 19 nt, Homo sapiens
  misc_RNA (1)...(19): siRNA sense strand
gagugaaggcugugaaguc

SEQ ID NO: 1805585 - RNA, 19 nt, Homo sapiens
  misc_RNA (1)...(19): siRNA sense strand
cgucagaacacaucaacga

SEQ ID NO: 1805586 - RNA, 19 nt, Homo sapiens
  misc_RNA (1)...(19): siRNA sense strand
gggcagcaccagaaugaca

SEQ ID NO: 1805587 - RNA, 19 nt, Homo sapiens
  misc_RNA (1)...(19): siRNA sense strand
ucacugacugggccuggua

SEQ ID NO: 1805588 - RNA, 19 nt, Homo sapiens
  misc_RNA (1)...(19): siRNA sense strand
gagcagguucuucgugagu

SEQ ID NO: 1805589 - RNA, 19 nt, Homo sapiens
  misc_RNA (1)...(19): siRNA sense strand
ucacugacucugaggacaa

SEQ ID NO: 1805590 - RNA, 19 nt, Homo sapiens
  misc_RNA (1)...(19): siRNA sense strand
agaguacuccugcgucuuc

SEQ ID NO: 1805591 - RNA, 19 nt, Homo sapiens
  misc_RNA (1)...(19): siRNA sense strand
ucagagcuacacauugaga

SEQ ID NO: 1805592 - RNA, 19 nt, Homo sapiens
  misc_RNA (1)...(19): siRNA sense strand
acaagaucacugacucuga

SEQ ID NO: 1805593 - RNA, 19 nt, Homo sapiens
  misc_RNA (1)...(19): siRNA sense strand
gcagcaccagaaugacaaa

SEQ ID NO: 1805594 - RNA, 19 nt, Homo sapiens
  misc_RNA (1)...(19): siRNA sense strand
cggccaugcuggucugcaa

SEQ ID NO: 1805595 - RNA, 19 nt, Homo sapiens
  misc_RNA (1)...(19): siRNA sense strand
guacaagaucacugacucu

SEQ ID NO: 1805596 - RNA, 19 nt, Homo sapiens
  misc_RNA (1)...(19): siRNA sense strand
ugacugggccugguacaag

SEQ ID NO: 1805597 - RNA, 19 nt, Homo sapiens
  misc_RNA (1)...(19): siRNA sense strand
ccugguacaagaucacuga

SEQ ID NO: 1805598 - RNA, 19 nt, Homo sapiens
  misc_RNA (1)...(19): siRNA sense strand
ggucagagcuacacauuga

SEQ ID NO: 1805599 - RNA, 19 nt, Homo sapiens
  misc_RNA (1)...(19): siRNA sense strand
ggacaaggcccucaugaac

SEQ ID NO: 1805600 - RNA, 19 nt, Homo sapiens
  misc_RNA (1)...(19): siRNA sense strand
gcgggcagcaccagaauga

SEQ ID NO: 1805601 - RNA, 19 nt, Homo sapiens
  misc_RNA (1)...(19): siRNA sense strand
gacugggccugguacaaga

SEQ ID NO: 1805602 - RNA, 19 nt, Homo sapiens
  misc_RNA (1)...(19): siRNA sense strand
gcagguucuucgugaguuc

SEQ ID NO: 1805603 - RNA, 19 nt, Homo sapiens
  misc_RNA (1)...(19): siRNA sense strand
uugagaaccugaacaugga

SEQ ID NO: 1805604 - RNA, 19 nt, Homo sapiens
  misc_RNA (1)...(19): siRNA sense strand
gaagucgucagaacacauc

SEQ ID NO: 1805605 - RNA, 19 nt, Homo sapiens
  misc_RNA (1)...(19): siRNA sense strand
ucaccaucaucuucaucua

SEQ ID NO: 1805606 - RNA, 19 nt, Homo sapiens
  misc_RNA (1)...(19): siRNA sense strand
gcugugaagucgucagaac

SEQ ID NO: 1805607 - RNA, 19 nt, Homo sapiens
  misc_RNA (1)...(19): siRNA sense strand
cgucagaacacaucaacga

SEQ ID NO: 1805608 - RNA, 19 nt, Homo sapiens
  misc_RNA (1)...(19): siRNA sense strand
gagugaaggcugugaaguc

SEQ ID NO: 1805609 - RNA, 19 nt, Homo sapiens
  misc_RNA (1)...(19): siRNA sense strand
gggcagcaccagaaugaca

SEQ ID NO: 1805610 - RNA, 19 nt, Homo sapiens
  misc_RNA (1)...(19): siRNA sense strand
ucacugacugggccuggua

SEQ ID NO: 1805611 - RNA, 19 nt, Homo sapiens
  misc_RNA (1)...(19): siRNA sense strand
gagcagguucuucgugagu

SEQ ID NO: 1805612 - RNA, 19 nt, Homo sapiens
  misc_RNA (1)...(19): siRNA sense strand
ucacugacucugaggacaa

SEQ ID NO: 1805613 - RNA, 19 nt, Homo sapiens
  misc_RNA (1)...(19): siRNA sense strand
ucagagcuacacauugaga

SEQ ID NO: 1805614 - RNA, 19 nt, Homo sapiens
  misc_RNA (1)...(19): siRNA sense strand
acaagaucacugacucuga

SEQ ID NO: 1805615 - RNA, 19 nt, Homo sapiens
  misc_RNA (1)...(19): siRNA sense strand
gcagcaccagaaugacaaa

SEQ ID NO: 1805616 - RNA, 19 nt, Homo sapiens
  misc_RNA (1)...(19): siRNA sense strand
cggccaugcuggucugcaa

SEQ ID NO: 1805617 - RNA, 19 nt, Homo sapiens
  misc_RNA (1)...(19): siRNA sense strand
guacaagaucacugacucu

SEQ ID NO: 1805618 - RNA, 19 nt, Homo sapiens
  misc_RNA (1)...(19): siRNA sense strand
ugacugggccugguacaag

SEQ ID NO: 1805619 - RNA, 19 nt, Homo sapiens
  misc_RNA (1)...(19): siRNA sense strand
ccugguacaagaucacuga

SEQ ID NO: 1805620 - RNA, 19 nt, Homo sapiens
  misc_RNA (1)...(19): siRNA sense strand
ggucagagcuacacauuga

SEQ ID NO: 1805621 - RNA, 19 nt, Homo sapiens
  misc_RNA (1)...(19): siRNA sense strand
ggacaaggcccucaugaac

SEQ ID NO: 1805622 - RNA, 19 nt, Homo sapiens
  misc_RNA (1)...(19): siRNA sense strand
gcgggcagcaccagaauga

SEQ ID NO: 1805623 - RNA, 19 nt, Homo sapiens
  misc_RNA (1)...(19): siRNA sense strand
gacugggccugguacaaga

SEQ ID NO: 1805624 - RNA, 19 nt, Homo sapiens
  misc_RNA (1)...(19): siRNA sense strand
gcagguucuucgugaguuc

SEQ ID NO: 1805625 - RNA, 19 nt, Homo sapiens
  misc_RNA (1)...(19): siRNA sense strand
uugagaaccugaacaugga

SEQ ID NO: 1805626 - RNA, 19 nt, Homo sapiens
  misc_RNA (1)...(19): siRNA sense strand
gaagucgucagaacacauc

SEQ ID NO: 1805627 - RNA, 19 nt, Homo sapiens
  misc_RNA (1)...(19): siRNA sense strand
ucaccaucaucuucaucua

SEQ ID NO: 1805628 - RNA, 19 nt, Homo sapiens
  misc_RNA (1)...(19): siRNA sense strand
gcugugaagucgucagaac

SEQ ID NO: 1805629 - RNA, 19 nt, Homo sapiens
  misc_RNA (1)...(19): siRNA sense strand
gagugaaggcugugaaguc

SEQ ID NO: 1805630 - RNA, 19 nt, Homo sapiens
  misc_RNA (1)...(19): siRNA sense strand
cgucagaacacaucaacga

SEQ ID NO: 1805631 - RNA, 19 nt, Homo sapiens
  misc_RNA (1)...(19): siRNA sense strand
gggcagcaccagaaugaca

SEQ ID NO: 1805632 - RNA, 19 nt, Homo sapiens
  misc_RNA (1)...(19): siRNA sense strand
ucacugacugggccuggua

SEQ ID NO: 1805633 - RNA, 19 nt, Homo sapiens
  misc_RNA (1)...(19): siRNA sense strand
gagcagguucuucgugagu

SEQ ID NO: 1805634 - RNA, 19 nt, Homo sapiens
  misc_RNA (1)...(19): siRNA sense strand
ucacugacucugaggacaa

SEQ ID NO: 1805635 - RNA, 19 nt, Homo sapiens
  misc_RNA (1)...(19): siRNA sense strand
agaguacuccugcgucuuc

SEQ ID NO: 1805636 - RNA, 19 nt, Homo sapiens
  misc_RNA (1)...(19): siRNA sense strand
ucagagcuacacauugaga

SEQ ID NO: 1805637 - RNA, 19 nt, Homo sapiens
  misc_RNA (1)...(19): siRNA sense strand
acaagaucacugacucuga

SEQ ID NO: 1805638 - RNA, 19 nt, Homo sapiens
  misc_RNA (1)...(19): siRNA sense strand
gcagcaccagaaugacaaa

SEQ ID NO: 1805639 - RNA, 19 nt, Homo sapiens
  misc_RNA (1)...(19): siRNA sense strand
cggccaugcuggucugcaa

SEQ ID NO: 1805640 - RNA, 19 nt, Homo sapiens
  misc_RNA (1)...(19): siRNA sense strand
guacaagaucacugacucu

SEQ ID NO: 1805641 - RNA, 19 nt, Homo sapiens
  misc_RNA (1)...(19): siRNA sense strand
ugacugggccugguacaag

SEQ ID NO: 1805642 - RNA, 19 nt, Homo sapiens
  misc_RNA (1)...(19): siRNA sense strand
ccugguacaagaucacuga

SEQ ID NO: 1805643 - RNA, 19 nt, Homo sapiens
  misc_RNA (1)...(19): siRNA sense strand
gagacacccugcuacauca

SEQ ID NO: 1805644 - RNA, 19 nt, Homo sapiens
  misc_RNA (1)...(19): siRNA sense strand
gcaggaagcccacgguguu

SEQ ID NO: 1805645 - RNA, 19 nt, Homo sapiens
  misc_RNA (1)...(19): siRNA sense strand
ugacaucgcccucaucaag

SEQ ID NO: 1805646 - RNA, 19 nt, Homo sapiens
  misc_RNA (1)...(19): siRNA sense strand
gaccauagcaagccacuag

SEQ ID NO: 1805647 - RNA, 19 nt, Homo sapiens
  misc_RNA (1)...(19): siRNA sense strand
guacgaccgugcugugaag

SEQ ID NO: 1805648 - RNA, 19 nt, Homo sapiens
  misc_RNA (1)...(19): siRNA sense strand
cagcuuuguuucugccuuu

SEQ ID NO: 1805649 - RNA, 19 nt, Homo sapiens
  misc_RNA (1)...(19): siRNA sense strand
gaagaagaccauggugugu

SEQ ID NO: 1805650 - RNA, 19 nt, Homo sapiens
  misc_RNA (1)...(19): siRNA sense strand
ucaguucccuccuccuugu

SEQ ID NO: 1805651 - RNA, 19 nt, Homo sapiens
  misc_RNA (1)...(19): siRNA sense strand
ggcgugaccagcuuuguuu

SEQ ID NO: 1805652 - RNA, 19 nt, Homo sapiens
  misc_RNA (1)...(19): siRNA sense strand
cgagacacccugcuacauc

SEQ ID NO: 1805653 - RNA, 19 nt, Homo sapiens
  misc_RNA (1)...(19): siRNA sense strand
ccaacgagacacccugcua

SEQ ID NO: 1805654 - RNA, 19 nt, Homo sapiens
  misc_RNA (1)...(19): siRNA sense strand
agguuucccugcaguauga

SEQ ID NO: 1805655 - RNA, 19 nt, Homo sapiens
  misc_RNA (1)...(19): siRNA sense strand
gcucaguucccuccuccuu

SEQ ID NO: 1805656 - RNA, 19 nt, Homo sapiens
  misc_RNA (1)...(19): siRNA sense strand
ugccggugguggacuauga

SEQ ID NO: 1805657 - RNA, 19 nt, Homo sapiens
  misc_RNA (1)...(19): siRNA sense strand
gugaccagcuuuguuucug

SEQ ID NO: 1805658 - RNA, 19 nt, Homo sapiens
  misc_RNA (1)...(19): siRNA sense strand
gugacauccuucccaacga

SEQ ID NO: 1805659 - RNA, 19 nt, Homo sapiens
  misc_RNA (1)...(19): siRNA sense strand
gaguacgaccgugcuguga

SEQ ID NO: 1805660 - RNA, 19 nt, Homo sapiens
  misc_RNA (1)...(19): siRNA sense strand
gagaacagcuuauaucuua

SEQ ID NO: 1805661 - RNA, 19 nt, Homo sapiens
  misc_RNA (1)...(19): siRNA sense strand
gaagggauguugagcauua

SEQ ID NO: 1805662 - RNA, 19 nt, Homo sapiens
  misc_RNA (1)...(19): siRNA sense strand
ggaagacaguacuuaauua

SEQ ID NO: 1805663 - RNA, 19 nt, Homo sapiens
  misc_RNA (1)...(19): siRNA sense strand
ucaaagaacugucauacua

SEQ ID NO: 1805664 - RNA, 19 nt, Homo sapiens
  misc_RNA (1)...(19): siRNA sense strand
ggacuuaccuuccucacua

SEQ ID NO: 1805665 - RNA, 19 nt, Homo sapiens
  misc_RNA (1)...(19): siRNA sense strand
gagaaagacucugagauua

SEQ ID NO: 1805666 - RNA, 19 nt, Homo sapiens
  misc_RNA (1)...(19): siRNA sense strand
cgacacagcucuaauuaaa

SEQ ID NO: 1805667 - RNA, 19 nt, Homo sapiens
  misc_RNA (1)...(19): siRNA sense strand
gagaaacugucuuaacuuu

SEQ ID NO: 1805668 - RNA, 19 nt, Homo sapiens
  misc_RNA (1)...(19): siRNA sense strand
ggauuucucuucauucaua

SEQ ID NO: 1805669 - RNA, 19 nt, Homo sapiens
  misc_RNA (1)...(19): siRNA sense strand
gcagaugacucccaagaaa

SEQ ID NO: 1805670 - RNA, 19 nt, Homo sapiens
  misc_RNA (1)...(19): siRNA sense strand
gagagaagcuuugguuaaa

SEQ ID NO: 1805671 - RNA, 19 nt, Homo sapiens
  misc_RNA (1)...(19): siRNA sense strand
gaaaggaacuguuuacaac

SEQ ID NO: 1805672 - RNA, 19 nt, Homo sapiens
  misc_RNA (1)...(19): siRNA sense strand
gaagaaauguuguuacgau

SEQ ID NO: 1805673 - RNA, 19 nt, Homo sapiens
  misc_RNA (1)...(19): siRNA sense strand
uaaagaagcccuccagaua

SEQ ID NO: 1805674 - RNA, 19 nt, Homo sapiens
  misc_RNA (1)...(19): siRNA sense strand
gcuaauaucucucauaaag

SEQ ID NO: 1805675 - RNA, 19 nt, Homo sapiens
  misc_RNA (1)...(19): siRNA sense strand
gcaaacauaugucauuuca

SEQ ID NO: 1805676 - RNA, 19 nt, Homo sapiens
  misc_RNA (1)...(19): siRNA sense strand
caaacugugucucuuaaua

SEQ ID NO: 1805677 - RNA, 19 nt, Homo sapiens
  misc_RNA (1)...(19): siRNA sense strand
agaaauaccuggcaucaaa

SEQ ID NO: 1805678 - RNA, 19 nt, Homo sapiens
  misc_RNA (1)...(19): siRNA sense strand
gagaacagauccaauugaa

SEQ ID NO: 1805679 - RNA, 19 nt, Homo sapiens
  misc_RNA (1)...(19): siRNA sense strand
ggagaacaucugaauauua

SEQ ID NO: 1805680 - RNA, 19 nt, Homo sapiens
  misc_RNA (1)...(19): siRNA sense strand
gcaaagguguucaaagaug

SEQ ID NO: 1805681 - RNA, 19 nt, Homo sapiens
  misc_RNA (1)...(19): siRNA sense strand
gaaaugcugacuacucuua

SEQ ID NO: 1805682 - RNA, 19 nt, Homo sapiens
  misc_RNA (1)...(19): siRNA sense strand
gaaguuguaucaaagcauu

SEQ ID NO: 1805683 - RNA, 19 nt, Homo sapiens
  misc_RNA (1)...(19): siRNA sense strand
gaagaacgcugcaaaagaa

SEQ ID NO: 1805684 - RNA, 19 nt, Homo sapiens
  misc_RNA (1)...(19): siRNA sense strand
gaucuugucugcaguucua

SEQ ID NO: 1805685 - RNA, 19 nt, Homo sapiens
  misc_RNA (1)...(19): siRNA sense strand
gagcaaacauaugucauuu

SEQ ID NO: 1805686 - RNA, 19 nt, Homo sapiens
  misc_RNA (1)...(19): siRNA sense strand
gggaugcaguucuguguua

SEQ ID NO: 1805687 - RNA, 19 nt, Homo sapiens
  misc_RNA (1)...(19): siRNA sense strand
caagaugcaucaaagcuuu

SEQ ID NO: 1805688 - RNA, 19 nt, Homo sapiens
  misc_RNA (1)...(19): siRNA sense strand
gauucagucugguuaaaua

SEQ ID NO: 1805689 - RNA, 19 nt, Homo sapiens
  misc_RNA (1)...(19): siRNA sense strand
gcacaaaguccuccaaaug

SEQ ID NO: 1805690 - RNA, 19 nt, Homo sapiens
  misc_RNA (1)...(19): siRNA sense strand
ccaaaacucugcaaucuua

SEQ ID NO: 1805691 - RNA, 19 nt, Homo sapiens
  misc_RNA (1)...(19): siRNA sense strand
ggaaagcuauucugguguu

SEQ ID NO: 1805692 - RNA, 19 nt, Homo sapiens
  misc_RNA (1)...(19): siRNA sense strand
gaaauuggccuucacaaca

SEQ ID NO: 1805693 - RNA, 19 nt, Homo sapiens
  misc_RNA (1)...(19): siRNA sense strand
gaacagauccaauugaaag

SEQ ID NO: 1805694 - RNA, 19 nt, Homo sapiens
  misc_RNA (1)...(19): siRNA sense strand
gugcuaauaucucucauaa

SEQ ID NO: 1805695 - RNA, 19 nt, Homo sapiens
  misc_RNA (1)...(19): siRNA sense strand
ucaaauggcuaucagaaga

SEQ ID NO: 1805696 - RNA, 19 nt, Homo sapiens
  misc_RNA (1)...(19): siRNA sense strand
gauggagccugcguuaaua

SEQ ID NO: 1805697 - RNA, 19 nt, Homo sapiens
  misc_RNA (1)...(19): siRNA sense strand
gaagagagaagcuuugguu

SEQ ID NO: 1805698 - RNA, 19 nt, Homo sapiens
  misc_RNA (1)...(19): siRNA sense strand
gaaaggaguucccauacag

SEQ ID NO: 1805699 - RNA, 19 nt, Homo sapiens
  misc_RNA (1)...(19): siRNA sense strand
gauaaacaguguaccaugu

SEQ ID NO: 1805700 - RNA, 19 nt, Homo sapiens
  misc_RNA (1)...(19): siRNA sense strand
agucugaacuugaaagaua

SEQ ID NO: 1805701 - RNA, 19 nt, Homo sapiens
  misc_RNA (1)...(19): siRNA sense strand
gcacuugguuaacagcuuu

SEQ ID NO: 1805702 - RNA, 19 nt, Homo sapiens
  misc_RNA (1)...(19): siRNA sense strand
gcacaaacaauugauguaa

SEQ ID NO: 1805703 - RNA, 19 nt, Homo sapiens
  misc_RNA (1)...(19): siRNA sense strand
cggaaacucugauuacaaa

SEQ ID NO: 1805704 - RNA, 19 nt, Homo sapiens
  misc_RNA (1)...(19): siRNA sense strand
uaauggaucuuucaaggaa

SEQ ID NO: 1805705 - RNA, 19 nt, Homo sapiens
  misc_RNA (1)...(19): siRNA sense strand
ugacggugcuggaguuuaa

SEQ ID NO: 1805706 - RNA, 19 nt, Homo sapiens
  misc_RNA (1)...(19): siRNA sense strand
gaugagcguugucccagua

SEQ ID NO: 1805707 - RNA, 19 nt, Homo sapiens
  misc_RNA (1)...(19): siRNA sense strand
ugaugaaccuuguaaagaa

SEQ ID NO: 1805708 - RNA, 19 nt, Homo sapiens
  misc_RNA (1)...(19): siRNA sense strand
gcaaaugcaggaagaauug

SEQ ID NO: 1805709 - RNA, 19 nt, Homo sapiens
  misc_RNA (1)...(19): siRNA sense strand
aaucaaagauggacauguu

SEQ ID NO: 1805710 - RNA, 19 nt, Homo sapiens
  misc_RNA (1)...(19): siRNA sense strand
gagccugcguuaauaauga

SEQ ID NO: 1805711 - RNA, 19 nt, Homo sapiens
  misc_RNA (1)...(19): siRNA sense strand
gaugaaccuuguaaagaaa

SEQ ID NO: 1805712 - RNA, 19 nt, Homo sapiens
  misc_RNA (1)...(19): siRNA sense strand
caacuggaaccgcauauuu

SEQ ID NO: 1805713 - RNA, 19 nt, Homo sapiens
  misc_RNA (1)...(19): siRNA sense strand
gaaauguuguuacgaugga

SEQ ID NO: 1805714 - RNA, 19 nt, Homo sapiens
  misc_RNA (1)...(19): siRNA sense strand
gacaauggauuucucuuca

SEQ ID NO: 1805715 - RNA, 19 nt, Homo sapiens
  misc_RNA (1)...(19): siRNA sense strand
guuaacagcuuuugcuuua

SEQ ID NO: 1805716 - RNA, 19 nt, Homo sapiens
  misc_RNA (1)...(19): siRNA sense strand
ucacugaggcugacguuua

SEQ ID NO: 1805717 - RNA, 19 nt, Homo sapiens
  misc_RNA (1)...(19): siRNA sense strand
gaucagaaguugacauggu

SEQ ID NO: 1805718 - RNA, 19 nt, Homo sapiens
  misc_RNA (1)...(19): siRNA sense strand
gaugcaacaaucucuauua

SEQ ID NO: 1805719 - RNA, 19 nt, Homo sapiens
  misc_RNA (1)...(19): siRNA sense strand
uagaggugcuucucaauga

SEQ ID NO: 1805720 - RNA, 19 nt, Homo sapiens
  misc_RNA (1)...(19): siRNA sense strand
gaaagcuauucugguguua

SEQ ID NO: 1805721 - RNA, 19 nt, Homo sapiens
  misc_RNA (1)...(19): siRNA sense strand
caaucgagccagaauauaa

SEQ ID NO: 1805722 - RNA, 19 nt, Homo sapiens
  misc_RNA (1)...(19): siRNA sense strand
gaagaaucaucaucuggau

SEQ ID NO: 1805723 - RNA, 19 nt, Homo sapiens
  misc_RNA (1)...(19): siRNA sense strand
gaggagaacagauccaauu

SEQ ID NO: 1805724 - RNA, 19 nt, Homo sapiens
  misc_RNA (1)...(19): siRNA sense strand
ugaaacagcagucaaagaa

SEQ ID NO: 1805725 - RNA, 19 nt, Homo sapiens
  misc_RNA (1)...(19): siRNA sense strand
gagauugcauaugcuuaua

SEQ ID NO: 1805726 - RNA, 19 nt, Homo sapiens
  misc_RNA (1)...(19): siRNA sense strand
gaauaccacagaccagaua

SEQ ID NO: 1805727 - RNA, 19 nt, Homo sapiens
  misc_RNA (1)...(19): siRNA sense strand
gaauauucacuccugguua

SEQ ID NO: 1805728 - RNA, 19 nt, Homo sapiens
  misc_RNA (1)...(19): siRNA sense strand
aggcaaagguguucaaaga

SEQ ID NO: 1805729 - RNA, 19 nt, Homo sapiens
  misc_RNA (1)...(19): siRNA sense strand
gaaugccaauaaccuauga

SEQ ID NO: 1805730 - RNA, 19 nt, Homo sapiens
  misc_RNA (1)...(19): siRNA sense strand
aagaagcccuccagauaaa

SEQ ID NO: 1805731 - RNA, 19 nt, Homo sapiens
  misc_RNA (1)...(19): siRNA sense strand
ugagaaagacucugagauu

SEQ ID NO: 1805732 - RNA, 19 nt, Homo sapiens
  misc_RNA (1)...(19): siRNA sense strand
ugaggaaguuugcagcuuu

SEQ ID NO: 1805733 - RNA, 19 nt, Homo sapiens
  misc_RNA (1)...(19): siRNA sense strand
ggaacuguuuacaacuaua

SEQ ID NO: 1805734 - RNA, 19 nt, Homo sapiens
  misc_RNA (1)...(19): siRNA sense strand
uggauacacugaagcauuu

SEQ ID NO: 1805735 - RNA, 19 nt, Homo sapiens
  misc_RNA (1)...(19): siRNA sense strand
gccaaacugugucucuuaa

SEQ ID NO: 1805736 - RNA, 19 nt, Homo sapiens
  misc_RNA (1)...(19): siRNA sense strand
gaaaugaugcaaacagcaa

SEQ ID NO: 1805737 - RNA, 19 nt, Homo sapiens
  misc_RNA (1)...(19): siRNA sense strand
aaagaagcccuccagauaa

SEQ ID NO: 1805738 - RNA, 19 nt, Homo sapiens
  misc_RNA (1)...(19): siRNA sense strand
aauauucacuccugguuaa

SEQ ID NO: 1805739 - RNA, 19 nt, Homo sapiens
  misc_RNA (1)...(19): siRNA sense strand
gaagauagaagaaauagcu

SEQ ID NO: 1805740 - RNA, 19 nt, Homo sapiens
  misc_RNA (1)...(19): siRNA sense strand
gggagaacaucugaauauu

SEQ ID NO: 1805741 - RNA, 19 nt, Homo sapiens
  misc_RNA (1)...(19): siRNA sense strand
ccaauaaccuaugacaaug

SEQ ID NO: 1805742 - RNA, 19 nt, Homo sapiens
  misc_RNA (1)...(19): siRNA sense strand
gggaagcuguugcugagaa

SEQ ID NO: 1805743 - RNA, 19 nt, Homo sapiens
  misc_RNA (1)...(19): siRNA sense strand
caucaaauauguccucucu

SEQ ID NO: 1805744 - RNA, 19 nt, Homo sapiens
  misc_RNA (1)...(19): siRNA sense strand
ccggauauuugaacucuuu

SEQ ID NO: 1805745 - RNA, 19 nt, Homo sapiens
  misc_RNA (1)...(19): siRNA sense strand
gaaggcaucaauauccuaa

SEQ ID NO: 1805746 - RNA, 19 nt, Homo sapiens
  misc_RNA (1)...(19): siRNA sense strand
ggagcaaacauaugucauu

SEQ ID NO: 1805747 - RNA, 19 nt, Homo sapiens
  misc_RNA (1)...(19): siRNA sense strand
gagcugcacggauuaguuu

SEQ ID NO: 1805748 - RNA, 19 nt, Homo sapiens
  misc_RNA (1)...(19): siRNA sense strand
gagaacagacagcagaauu

SEQ ID NO: 1805749 - RNA, 19 nt, Homo sapiens
  misc_RNA (1)...(19): siRNA sense strand
ggacgaucaaggcuaaaua

SEQ ID NO: 1805750 - RNA, 19 nt, Homo sapiens
  misc_RNA (1)...(19): siRNA sense strand
caggauacccuuagauuug

SEQ ID NO: 1805751 - RNA, 19 nt, Homo sapiens
  misc_RNA (1)...(19): siRNA sense strand
ggaguucccauacaggaua

SEQ ID NO: 1805752 - RNA, 19 nt, Homo sapiens
  misc_RNA (1)...(19): siRNA sense strand
ggaagguuaccgagcaaua

SEQ ID NO: 1805753 - RNA, 19 nt, Homo sapiens
  misc_RNA (1)...(19): siRNA sense strand
cgaucaaggcuaaauauaa

SEQ ID NO: 1805754 - RNA, 19 nt, Homo sapiens
  misc_RNA (1)...(19): siRNA sense strand
acaaguaccuuuauauugc

SEQ ID NO: 1805755 - RNA, 19 nt, Homo sapiens
  misc_RNA (1)...(19): siRNA sense strand
agacaguacuuaauuaugg

SEQ ID NO: 1805756 - RNA, 19 nt, Homo sapiens
  misc_RNA (1)...(19): siRNA sense strand
ggaagcuguugcugagaaa

SEQ ID NO: 1805757 - RNA, 19 nt, Homo sapiens
  misc_RNA (1)...(19): siRNA sense strand
cuacagaaaugcugacuac

SEQ ID NO: 1805758 - RNA, 19 nt, Homo sapiens
  misc_RNA (1)...(19): siRNA sense strand
caauugauguaaaccaaga

SEQ ID NO: 1805759 - RNA, 19 nt, Homo sapiens
  misc_RNA (1)...(19): siRNA sense strand
aagauucgcuugaccaguu

SEQ ID NO: 1805760 - RNA, 19 nt, Homo sapiens
  misc_RNA (1)...(19): siRNA sense strand
gagaucaucccuuugaaua

SEQ ID NO: 1805761 - RNA, 19 nt, Homo sapiens
  misc_RNA (1)...(19): siRNA sense strand
ucaaaccuauccaacaaua

SEQ ID NO: 1805762 - RNA, 19 nt, Homo sapiens
  misc_RNA (1)...(19): siRNA sense strand
gaacauguuucuuacuuac

SEQ ID NO: 1805763 - RNA, 19 nt, Homo sapiens
  misc_RNA (1)...(19): siRNA sense strand
ccggugagcugcaagauuu

SEQ ID NO: 1805764 - RNA, 19 nt, Homo sapiens
  misc_RNA (1)...(19): siRNA sense strand
ggucauucuuugucaauuu

SEQ ID NO: 1805765 - RNA, 19 nt, Homo sapiens
  misc_RNA (1)...(19): siRNA sense strand
gugcugagaucaucccuuu

SEQ ID NO: 1805766 - RNA, 19 nt, Homo sapiens
  misc_RNA (1)...(19): siRNA sense strand
caaaugcuaugaccgaaug

SEQ ID NO: 1805767 - RNA, 19 nt, Homo sapiens
  misc_RNA (1)...(19): siRNA sense strand
gauauaugauuacgugaug

SEQ ID NO: 1805768 - RNA, 19 nt, Homo sapiens
  misc_RNA (1)...(19): siRNA sense strand
caauagagcccaagccauu

SEQ ID NO: 1805769 - RNA, 19 nt, Homo sapiens
  misc_RNA (1)...(19): siRNA sense strand
ccaaugggcccaauucaaa

SEQ ID NO: 1805770 - RNA, 19 nt, Homo sapiens
  misc_RNA (1)...(19): siRNA sense strand
gaucaucccuuugaauauc

SEQ ID NO: 1805771 - RNA, 19 nt, Homo sapiens
  misc_RNA (1)...(19): siRNA sense strand
ccaccugguugaaguagua

SEQ ID NO: 1805772 - RNA, 19 nt, Homo sapiens
  misc_RNA (1)...(19): siRNA sense strand
ggaaugaaccagccaacaa

SEQ ID NO: 1805773 - RNA, 19 nt, Homo sapiens
  misc_RNA (1)...(19): siRNA sense strand
aaucaaaccuauccaacaa

SEQ ID NO: 1805774 - RNA, 19 nt, Homo sapiens
  misc_RNA (1)...(19): siRNA sense strand
gaugauggaugcacaguac

SEQ ID NO: 1805775 - RNA, 19 nt, Homo sapiens
  misc_RNA (1)...(19): siRNA sense strand
gaagguccauauugcaauc

SEQ ID NO: 1805776 - RNA, 19 nt, Homo sapiens
  misc_RNA (1)...(19): siRNA sense strand
gaaugcauauguucuguac

SEQ ID NO: 1805777 - RNA, 19 nt, Homo sapiens
  misc_RNA (1)...(19): siRNA sense strand
gcaguuacccgcauaccaa

SEQ ID NO: 1805778 - RNA, 19 nt, Homo sapiens
  misc_RNA (1)...(19): siRNA sense strand
ggagagugcugagaucauc

SEQ ID NO: 1805779 - RNA, 19 nt, Homo sapiens
  misc_RNA (1)...(19): siRNA sense strand
caaccacuauccaugcuau

SEQ ID NO: 1805780 - RNA, 19 nt, Homo sapiens
  misc_RNA (1)...(19): siRNA sense strand
gugaugcacucucugauuc

SEQ ID NO: 1805781 - RNA, 19 nt, Homo sapiens
  misc_RNA (1)...(19): siRNA sense strand
gcugagaucaucccuuuga

SEQ ID NO: 1805782 - RNA, 19 nt, Homo sapiens
  misc_RNA (1)...(19): siRNA sense strand
gcggugguauuaucucuug

SEQ ID NO: 1805783 - RNA, 19 nt, Homo sapiens
  misc_RNA (1)...(19): siRNA sense strand
augcauauguucuguacua

SEQ ID NO: 1805784 - RNA, 19 nt, Homo sapiens
  misc_RNA (1)...(19): siRNA sense strand
gcacuguuucuucuucuaa

SEQ ID NO: 1805785 - RNA, 19 nt, Homo sapiens
  misc_RNA (1)...(19): siRNA sense strand
ggaucuaucuucauacacu

SEQ ID NO: 1805786 - RNA, 19 nt, Homo sapiens
  misc_RNA (1)...(19): siRNA sense strand
ccaaggagaagguccauau

SEQ ID NO: 1805787 - RNA, 19 nt, Homo sapiens
  misc_RNA (1)...(19): siRNA sense strand
caugauggccugcaacuau

SEQ ID NO: 1805788 - RNA, 19 nt, Homo sapiens
  misc_RNA (1)...(19): siRNA sense strand
gagaagguccauauugcaa

SEQ ID NO: 1805789 - RNA, 19 nt, Homo sapiens
  misc_RNA (1)...(19): siRNA sense strand
ggaaacccauuugcuuuac

SEQ ID NO: 1805790 - RNA, 19 nt, Homo sapiens
  misc_RNA (1)...(19): siRNA sense strand
caauuuacaucugccauca

SEQ ID NO: 1805791 - RNA, 19 nt, Homo sapiens
  misc_RNA (1)...(19): siRNA sense strand
gaaacccauuugcuuuaca

SEQ ID NO: 1805792 - RNA, 19 nt, Homo sapiens
  misc_RNA (1)...(19): siRNA sense strand
ugacacaccggcuggagua

SEQ ID NO: 1805793 - RNA, 19 nt, Homo sapiens
  misc_RNA (1)...(19): siRNA sense strand
gaaccugguccaacuauac

SEQ ID NO: 1805794 - RNA, 19 nt, Homo sapiens
  misc_RNA (1)...(19): siRNA sense strand
gagcccaagccauuucuuu

SEQ ID NO: 1805795 - RNA, 19 nt, Homo sapiens
  misc_RNA (1)...(19): siRNA sense strand
uuccagggcuucuuuguug

SEQ ID NO: 1805796 - RNA, 19 nt, Homo sapiens
  misc_RNA (1)...(19): siRNA sense strand
uguggucaauuucuucuuu

SEQ ID NO: 1805797 - RNA, 19 nt, Homo sapiens
  misc_RNA (1)...(19): siRNA sense strand
uggaaacccauuugcuuua

SEQ ID NO: 1805798 - RNA, 19 nt, Homo sapiens
  misc_RNA (1)...(19): siRNA sense strand
ggaguauuguccuaucagu

SEQ ID NO: 1805799 - RNA, 19 nt, Homo sapiens
  misc_RNA (1)...(19): siRNA sense strand
uaucauagagcaagaguca

SEQ ID NO: 1805800 - RNA, 19 nt, Homo sapiens
  misc_RNA (1)...(19): siRNA sense strand
guggaaacccauuugcuuu

SEQ ID NO: 1805801 - RNA, 19 nt, Homo sapiens
  misc_RNA (1)...(19): siRNA sense strand
gaaacugaagaaugcauau

SEQ ID NO: 1805802 - RNA, 19 nt, Homo sapiens
  misc_RNA (1)...(19): siRNA sense strand
cacaccggcuggaguauug

SEQ ID NO: 1805803 - RNA, 19 nt, Homo sapiens
  misc_RNA (1)...(19): siRNA sense strand
cggcacuuguggucaauuu

SEQ ID NO: 1805804 - RNA, 19 nt, Homo sapiens
  misc_RNA (1)...(19): siRNA sense strand
cgaaccugguccaacuaua

SEQ ID NO: 1805805 - RNA, 19 nt, Homo sapiens
  misc_RNA (1)...(19): siRNA sense strand
cuggcgacaucccaauuua

SEQ ID NO: 1805806 - RNA, 19 nt, Homo sapiens
  misc_RNA (1)...(19): siRNA sense strand
uauacuaugugcaaugcuu

SEQ ID NO: 1805807 - RNA, 19 nt, Homo sapiens
  misc_RNA (1)...(19): siRNA sense strand
ugcacucucugauucauuu

SEQ ID NO: 1805808 - RNA, 19 nt, Homo sapiens
  misc_RNA (1)...(19): siRNA sense strand
gcauauguucuguacuauu

SEQ ID NO: 1805809 - RNA, 19 nt, Homo sapiens
  misc_RNA (1)...(19): siRNA sense strand
cugagaaacugaagaaugc

SEQ ID NO: 1805810 - RNA, 19 nt, Homo sapiens
  misc_RNA (1)...(19): siRNA sense strand
cccauuugcuuuacauaau

SEQ ID NO: 1805811 - RNA, 19 nt, Homo sapiens
  misc_RNA (1)...(19): siRNA sense strand
gaauccaguuugucgucuu

SEQ ID NO: 1805812 - RNA, 19 nt, Homo sapiens
  misc_RNA (1)...(19): siRNA sense strand
gacgaaagaagaugaugga

SEQ ID NO: 1805813 - RNA, 19 nt, Homo sapiens
  misc_RNA (1)...(19): siRNA sense strand
cagauuauuuuccggauuu

SEQ ID NO: 1805814 - RNA, 19 nt, Homo sapiens
  misc_RNA (1)...(19): siRNA sense strand
caacuauacuaugugcaau

SEQ ID NO: 1805815 - RNA, 19 nt, Homo sapiens
  misc_RNA (1)...(19): siRNA sense strand
caaggagaagguccauauu

SEQ ID NO: 1805816 - RNA, 19 nt, Homo sapiens
  misc_RNA (1)...(19): siRNA sense strand
ugaauaucauagagcaaga

SEQ ID NO: 1805817 - RNA, 19 nt, Homo sapiens
  misc_RNA (1)...(19): siRNA sense strand
gaaugaaccagccaacaac

SEQ ID NO: 1805818 - RNA, 19 nt, Homo sapiens
  misc_RNA (1)...(19): siRNA sense strand
ccauuugcuuuacauaauc

SEQ ID NO: 1805819 - RNA, 19 nt, Homo sapiens
  misc_RNA (1)...(19): siRNA sense strand
ccaacuauacuaugugcaa

SEQ ID NO: 1805820 - RNA, 19 nt, Homo sapiens
  misc_RNA (1)...(19): siRNA sense strand
ggagaagguccauauugca

SEQ ID NO: 1805821 - RNA, 19 nt, Homo sapiens
  misc_RNA (1)...(19): siRNA sense strand
gcacaguacaaaugcuaug

SEQ ID NO: 1805822 - RNA, 19 nt, Homo sapiens
  misc_RNA (1)...(19): siRNA sense strand
uauugugggucauucuuug

SEQ ID NO: 1805823 - RNA, 19 nt, Homo sapiens
  misc_RNA (1)...(19): siRNA sense strand
aaucgaaccugguccaacu

SEQ ID NO: 1805824 - RNA, 19 nt, Homo sapiens
  misc_RNA (1)...(19): siRNA sense strand
cgaggagagugcugagauc

SEQ ID NO: 1805825 - RNA, 19 nt, Homo sapiens
  misc_RNA (1)...(19): siRNA sense strand
ccagggccguguacuucaa

SEQ ID NO: 1805826 - RNA, 19 nt, Homo sapiens
  misc_RNA (1)...(19): siRNA sense strand
gcacuuguggucaauuucu

SEQ ID NO: 1805827 - RNA, 19 nt, Homo sapiens
  misc_RNA (1)...(19): siRNA sense strand
gcuggcgacaucccaauuu

SEQ ID NO: 1805828 - RNA, 19 nt, Homo sapiens
  misc_RNA (1)...(19): siRNA sense strand
guaggacgaaagaagauga

SEQ ID NO: 1805829 - RNA, 19 nt, Homo sapiens
  misc_RNA (1)...(19): siRNA sense strand
gaggcggaaucccacaugu

SEQ ID NO: 1805830 - RNA, 19 nt, Homo sapiens
  misc_RNA (1)...(19): siRNA sense strand
acugaagaaugcauauguu

SEQ ID NO: 1805831 - RNA, 19 nt, Homo sapiens
  misc_RNA (1)...(19): siRNA sense strand
cgacaucccaauuuacauc

SEQ ID NO: 1805832 - RNA, 19 nt, Homo sapiens
  misc_RNA (1)...(19): siRNA sense strand
aauccaguuugucgucuuu

SEQ ID NO: 1805833 - RNA, 19 nt, Homo sapiens
  misc_RNA (1)...(19): siRNA sense strand
aaggagaagguccauauug

SEQ ID NO: 1805834 - RNA, 19 nt, Homo sapiens
  misc_RNA (1)...(19): siRNA sense strand
ucaaaucaaaccuauccaa

SEQ ID NO: 1805835 - RNA, 19 nt, Homo sapiens
  misc_RNA (1)...(19): siRNA sense strand
ccugagaaacugaagaaug

SEQ ID NO: 1805836 - RNA, 19 nt, Homo sapiens
  misc_RNA (1)...(19): siRNA sense strand
gcuggaguauuguccuauc

SEQ ID NO: 1805837 - RNA, 19 nt, Homo sapiens
  misc_RNA (1)...(19): siRNA sense strand
gccaaugggcccaauucaa

SEQ ID NO: 1805838 - RNA, 19 nt, Homo sapiens
  misc_RNA (1)...(19): siRNA sense strand
agaaacugaagaaugcaua

SEQ ID NO: 1805839 - RNA, 19 nt, Homo sapiens
  misc_RNA (1)...(19): siRNA sense strand
gcugugaaggccaccauga

SEQ ID NO: 1805840 - RNA, 19 nt, Homo sapiens
  misc_RNA (1)...(19): siRNA sense strand
aaacccauuugcuuuacau

SEQ ID NO: 1805841 - RNA, 19 nt, Homo sapiens
  misc_RNA (1)...(19): siRNA sense strand
ggcacuguuucuucuucua

SEQ ID NO: 1805842 - RNA, 19 nt, Homo sapiens
  misc_RNA (1)...(19): siRNA sense strand
cggcuggaguauuguccua

SEQ ID NO: 1805843 - RNA, 19 nt, Homo sapiens
  misc_RNA (1)...(19): siRNA sense strand
gcgaggagagugcugagau

SEQ ID NO: 1805844 - RNA, 19 nt, Homo sapiens
  misc_RNA (1)...(19): siRNA sense strand
ggagaccuuccaacaagau

SEQ ID NO: 1805845 - RNA, 19 nt, Homo sapiens
  misc_RNA (1)...(19): siRNA sense strand
gauggaugcacaguacaaa

SEQ ID NO: 1805846 - RNA, 19 nt, Homo sapiens
  misc_RNA (1)...(19): siRNA sense strand
ugaaguaguacccaaugga

SEQ ID NO: 1805847 - RNA, 19 nt, Homo sapiens
  misc_RNA (1)...(19): siRNA sense strand
aggagaagguccauauugc

SEQ ID NO: 1805848 - RNA, 19 nt, Homo sapiens
  misc_RNA (1)...(19): siRNA sense strand
ucauagagcaagagucauc

SEQ ID NO: 1805849 - RNA, 19 nt, Homo sapiens
  misc_RNA (1)...(19): siRNA sense strand
gcuuggcacuguuucuucu

SEQ ID NO: 1805850 - RNA, 19 nt, Homo sapiens
  misc_RNA (1)...(19): siRNA sense strand
gggaagauauaugauuacg

SEQ ID NO: 1805851 - RNA, 19 nt, Homo sapiens
  misc_RNA (1)...(19): siRNA sense strand
augauggccugcaacuauu

SEQ ID NO: 1805852 - RNA, 19 nt, Homo sapiens
  misc_RNA (1)...(19): siRNA sense strand
uguacuauuuggcuauugu

SEQ ID NO: 1805853 - RNA, 19 nt, Homo sapiens
  misc_RNA (1)...(19): siRNA sense strand
cacuguuucuucuucuaaa

SEQ ID NO: 1805854 - RNA, 19 nt, Homo sapiens
  misc_RNA (1)...(19): siRNA sense strand
gaggagagugcugagauca

SEQ ID NO: 1805855 - RNA, 19 nt, Homo sapiens
  misc_RNA (1)...(19): siRNA sense strand
ggcgacaucccaauuuaca

SEQ ID NO: 1805856 - RNA, 19 nt, Homo sapiens
  misc_RNA (1)...(19): siRNA sense strand
agcccaagccauuucuuua

SEQ ID NO: 1805857 - RNA, 19 nt, Homo sapiens
  misc_RNA (1)...(19): siRNA sense strand
gcaacaaugagguccaaac

SEQ ID NO: 1805858 - RNA, 19 nt, Homo sapiens
  misc_RNA (1)...(19): siRNA sense strand
aaaucaaaccuauccaaca

SEQ ID NO: 1805859 - RNA, 19 nt, Homo sapiens
  misc_RNA (1)...(19): siRNA sense strand
gccguguacuucaaugaca

SEQ ID NO: 1805860 - RNA, 19 nt, Homo sapiens
  misc_RNA (1)...(19): siRNA sense strand
gcaagaagaagaaagaaua

SEQ ID NO: 1805861 - RNA, 19 nt, Homo sapiens
  misc_RNA (1)...(19): siRNA sense strand
gaacagggcucaaauucuc

SEQ ID NO: 1805862 - RNA, 19 nt, Homo sapiens
  misc_RNA (1)...(19): siRNA sense strand
aaccaaaucuguacaguua

SEQ ID NO: 1805863 - RNA, 19 nt, Homo sapiens
  misc_RNA (1)...(19): siRNA sense strand
gcaaagcagcaaccaauua

SEQ ID NO: 1805864 - RNA, 19 nt, Homo sapiens
  misc_RNA (1)...(19): siRNA sense strand
ucacacagcucccuaauca

SEQ ID NO: 1805865 - RNA, 19 nt, Homo sapiens
  misc_RNA (1)...(19): siRNA sense strand
gaacaggauuccaggagaa

SEQ ID NO: 1805866 - RNA, 19 nt, Homo sapiens
  misc_RNA (1)...(19): siRNA sense strand
gaagaaccauugcuuuaca

SEQ ID NO: 1805867 - RNA, 19 nt, Homo sapiens
  misc_RNA (1)...(19): siRNA sense strand
ggaggcaccuucuaggauu

SEQ ID NO: 1805868 - RNA, 19 nt, Homo sapiens
  misc_RNA (1)...(19): siRNA sense strand
ccaaaucuguacaguuaaa

SEQ ID NO: 1805869 - RNA, 19 nt, Homo sapiens
  misc_RNA (1)...(19): siRNA sense strand
gcugauggcuguucaauac

SEQ ID NO: 1805870 - RNA, 19 nt, Homo sapiens
  misc_RNA (1)...(19): siRNA sense strand
caaaguaccaugagaaaug

SEQ ID NO: 1805871 - RNA, 19 nt, Homo sapiens
  misc_RNA (1)...(19): siRNA sense strand
gaacaagacugaaaaugga

SEQ ID NO: 1805872 - RNA, 19 nt, Homo sapiens
  misc_RNA (1)...(19): siRNA sense strand
gcaaccaauuaucaguuua

SEQ ID NO: 1805873 - RNA, 19 nt, Homo sapiens
  misc_RNA (1)...(19): siRNA sense strand
guucgucgguuccuccuua

SEQ ID NO: 1805874 - RNA, 19 nt, Homo sapiens
  misc_RNA (1)...(19): siRNA sense strand
gacuaaaccuguccuacaa

SEQ ID NO: 1805875 - RNA, 19 nt, Homo sapiens
  misc_RNA (1)...(19): siRNA sense strand
caccaucccugagucauua

SEQ ID NO: 1805876 - RNA, 19 nt, Homo sapiens
  misc_RNA (1)...(19): siRNA sense strand
gcaaaugagacguaugaaa

SEQ ID NO: 1805877 - RNA, 19 nt, Homo sapiens
  misc_RNA (1)...(19): siRNA sense strand
gaagugaugaugcagauug

SEQ ID NO: 1805878 - RNA, 19 nt, Homo sapiens
  misc_RNA (1)...(19): siRNA sense strand
gaggauggguucauagaca

SEQ ID NO: 1805879 - RNA, 19 nt, Homo sapiens
  misc_RNA (1)...(19): siRNA sense strand
uaccaacgcuuaugccauu

SEQ ID NO: 1805880 - RNA, 19 nt, Homo sapiens
  misc_RNA (1)...(19): siRNA sense strand
ucagagaaccagaggcuua

SEQ ID NO: 1805881 - RNA, 19 nt, Homo sapiens
  misc_RNA (1)...(19): siRNA sense strand
cuacagauaugaucauucu

SEQ ID NO: 1805882 - RNA, 19 nt, Homo sapiens
  misc_RNA (1)...(19): siRNA sense strand
agaaaugucgguucagaua

SEQ ID NO: 1805883 - RNA, 19 nt, Homo sapiens
  misc_RNA (1)...(19): siRNA sense strand
aaaccuguccuacaaagua

SEQ ID NO: 1805884 - RNA, 19 nt, Homo sapiens
  misc_RNA (1)...(19): siRNA sense strand
cagguuaaaucaugaacuu

SEQ ID NO: 1805885 - RNA, 19 nt, Homo sapiens
  misc_RNA (1)...(19): siRNA sense strand
gauaugaucauucuguuuc

SEQ ID NO: 1805886 - RNA, 19 nt, Homo sapiens
  misc_RNA (1)...(19): siRNA sense strand
aaaugucgguucagauauu

SEQ ID NO: 1805887 - RNA, 19 nt, Homo sapiens
  misc_RNA (1)...(19): siRNA sense strand
uugcugaacuugguuauuu

SEQ ID NO: 1805888 - RNA, 19 nt, Homo sapiens
  misc_RNA (1)...(19): siRNA sense strand
gcgaauagcccagugaaug

SEQ ID NO: 1805889 - RNA, 19 nt, Homo sapiens
  misc_RNA (1)...(19): siRNA sense strand
caauucagcccaagccuuu

SEQ ID NO: 1805890 - RNA, 19 nt, Homo sapiens
  misc_RNA (1)...(19): siRNA sense strand
gaagggaucaccugcuguu

SEQ ID NO: 1805891 - RNA, 19 nt, Homo sapiens
  misc_RNA (1)...(19): siRNA sense strand
caaagcagcaaccaauuau

SEQ ID NO: 1805892 - RNA, 19 nt, Homo sapiens
  misc_RNA (1)...(19): siRNA sense strand
cagcaaaugagacguauga

SEQ ID NO: 1805893 - RNA, 19 nt, Homo sapiens
  misc_RNA (1)...(19): siRNA sense strand
cagaugguauuauccagaa

SEQ ID NO: 1805894 - RNA, 19 nt, Homo sapiens
  misc_RNA (1)...(19): siRNA sense strand
ggacaucaacaaccaaauc

SEQ ID NO: 1805895 - RNA, 19 nt, Homo sapiens
  misc_RNA (1)...(19): siRNA sense strand
gcagcuggaugaaguugug

SEQ ID NO: 1805896 - RNA, 19 nt, Homo sapiens
  misc_RNA (1)...(19): siRNA sense strand
agacagcaacguaugauaa

SEQ ID NO: 1805897 - RNA, 19 nt, Homo sapiens
  misc_RNA (1)...(19): siRNA sense strand
cugaugagcugcaauugga

SEQ ID NO: 1805898 - RNA, 19 nt, Homo sapiens
  misc_RNA (1)...(19): siRNA sense strand
gaucagcagaggaaucaaa

SEQ ID NO: 1805899 - RNA, 19 nt, Homo sapiens
  misc_RNA (1)...(19): siRNA sense strand
gaugauaguauuggcauuu

SEQ ID NO: 1805900 - RNA, 19 nt, Homo sapiens
  misc_RNA (1)...(19): siRNA sense strand
uaaagucccuaguccaaag

SEQ ID NO: 1805901 - RNA, 19 nt, Homo sapiens
  misc_RNA (1)...(19): siRNA sense strand
caugagaaaugucgguuca

SEQ ID NO: 1805902 - RNA, 19 nt, Homo sapiens
  misc_RNA (1)...(19): siRNA sense strand
ggauuugucuucuaguucu

SEQ ID NO: 1805903 - RNA, 19 nt, Homo sapiens
  misc_RNA (1)...(19): siRNA sense strand
gcaauuggaagcagcaaau

SEQ ID NO: 1805904 - RNA, 19 nt, Homo sapiens
  misc_RNA (1)...(19): siRNA sense strand
caaaugagacguaugaaaa

SEQ ID NO: 1805905 - RNA, 19 nt, Homo sapiens
  misc_RNA (1)...(19): siRNA sense strand
gggcaggacuacgaaguga

SEQ ID NO: 1805906 - RNA, 19 nt, Homo sapiens
  misc_RNA (1)...(19): siRNA sense strand
cugaagaaccauugcuuua

SEQ ID NO: 1805907 - RNA, 19 nt, Homo sapiens
  misc_RNA (1)...(19): siRNA sense strand
ucaguggacucuuauucuu

SEQ ID NO: 1805908 - RNA, 19 nt, Homo sapiens
  misc_RNA (1)...(19): siRNA sense strand
ugagaaaugucgguucaga

SEQ ID NO: 1805909 - RNA, 19 nt, Homo sapiens
  misc_RNA (1)...(19): siRNA sense strand
ucaauuguguuaccagcaa

SEQ ID NO: 1805910 - RNA, 19 nt, Homo sapiens
  misc_RNA (1)...(19): siRNA sense strand
gaaaugucgguucagauau

SEQ ID NO: 1805911 - RNA, 19 nt, Homo sapiens
  misc_RNA (1)...(19): siRNA sense strand
ggaugaagauugggauucu

SEQ ID NO: 1805912 - RNA, 19 nt, Homo sapiens
  misc_RNA (1)...(19): siRNA sense strand
ggaaucaaaccaacaccuu

SEQ ID NO: 1805913 - RNA, 19 nt, Homo sapiens
  misc_RNA (1)...(19): siRNA sense strand
gacagcaacguaugauaaa

SEQ ID NO: 1805914 - RNA, 19 nt, Homo sapiens
  misc_RNA (1)...(19): siRNA sense strand
gaggcaccuucuaggauuu

SEQ ID NO: 1805915 - RNA, 19 nt, Homo sapiens
  misc_RNA (1)...(19): siRNA sense strand
cuaaggagacagcaacgua

SEQ ID NO: 1805916 - RNA, 19 nt, Homo sapiens
  misc_RNA (1)...(19): siRNA sense strand
ucucucagguuaaaucaug

SEQ ID NO: 1805917 - RNA, 19 nt, Homo sapiens
  misc_RNA (1)...(19): siRNA sense strand
acgagcaacugaagaaaga

SEQ ID NO: 1805918 - RNA, 19 nt, Homo sapiens
  misc_RNA (1)...(19): siRNA sense strand
uggaugaaguugugucaga

SEQ ID NO: 1805919 - RNA, 19 nt, Homo sapiens
  misc_RNA (1)...(19): siRNA sense strand
acaccaggauccuccauau

SEQ ID NO: 1805920 - RNA, 19 nt, Homo sapiens
  misc_RNA (1)...(19): siRNA sense strand
gagcaacugaagaaagaaa

SEQ ID NO: 1805921 - RNA, 19 nt, Homo sapiens
  misc_RNA (1)...(19): siRNA sense strand
gcaccaucccugagucauu

SEQ ID NO: 1805922 - RNA, 19 nt, Homo sapiens
  misc_RNA (1)...(19): siRNA sense strand
gagaucagcagaggaauca

SEQ ID NO: 1805923 - RNA, 19 nt, Homo sapiens
  misc_RNA (1)...(19): siRNA sense strand
acaaguguauuaugcuuca

SEQ ID NO: 1805924 - RNA, 19 nt, Homo sapiens
  misc_RNA (1)...(19): siRNA sense strand
gaaccauugcuuuacauuc

SEQ ID NO: 1805925 - RNA, 19 nt, Homo sapiens
  misc_RNA (1)...(19): siRNA sense strand
gaguuggauuugucuucua

SEQ ID NO: 1805926 - RNA, 19 nt, Homo sapiens
  misc_RNA (1)...(19): siRNA sense strand
agaguugucugugugauga

SEQ ID NO: 1805927 - RNA, 19 nt, Homo sapiens
  misc_RNA (1)...(19): siRNA sense strand
gagacagcaacguaugaua

SEQ ID NO: 1805928 - RNA, 19 nt, Homo sapiens
  misc_RNA (1)...(19): siRNA sense strand
ucaagcaccuggaguucug

SEQ ID NO: 1805929 - RNA, 19 nt, Homo sapiens
  misc_RNA (1)...(19): siRNA sense strand
ggugaaaacucuaauaguc

SEQ ID NO: 1805930 - RNA, 19 nt, Homo sapiens
  misc_RNA (1)...(19): siRNA sense strand
caaccaaaucuguacaguu

SEQ ID NO: 1805931 - RNA, 19 nt, Homo sapiens
  misc_RNA (1)...(19): siRNA sense strand
acacagaaaccacuaguag

SEQ ID NO: 1805932 - RNA, 19 nt, Homo sapiens
  misc_RNA (1)...(19): siRNA sense strand
gaauauaugcuaggguuag

SEQ ID NO: 1805933 - RNA, 19 nt, Homo sapiens
  misc_RNA (1)...(19): siRNA sense strand
cuacaaaguaccaugagaa

SEQ ID NO: 1805934 - RNA, 19 nt, Homo sapiens
  misc_RNA (1)...(19): siRNA sense strand
ggaguuggauuugucuucu

SEQ ID NO: 1805935 - RNA, 19 nt, Homo sapiens
  misc_RNA (1)...(19): siRNA sense strand
ccaauuaucaguuuacaac

SEQ ID NO: 1805936 - RNA, 19 nt, Homo sapiens
  misc_RNA (1)...(19): siRNA sense strand
gcaggacuacgaagugaug

SEQ ID NO: 1805937 - RNA, 19 nt, Homo sapiens
  misc_RNA (1)...(19): siRNA sense strand
uauguugugucauuucgaa

SEQ ID NO: 1805938 - RNA, 19 nt, Homo sapiens
  misc_RNA (1)...(19): siRNA sense strand
ggugcuaacugaagaacca

SEQ ID NO: 1805939 - RNA, 19 nt, Homo sapiens
  misc_RNA (1)...(19): siRNA sense strand
auuaaaggcugcccucuca

SEQ ID NO: 1805940 - RNA, 19 nt, Homo sapiens
  misc_RNA (1)...(19): siRNA sense strand
agaauccgcuugucagucu

SEQ ID NO: 1805941 - RNA, 19 nt, Homo sapiens
  misc_RNA (1)...(19): siRNA sense strand
aaaguaccaugagaaaugu

SEQ ID NO: 1805942 - RNA, 19 nt, Homo sapiens
  misc_RNA (1)...(19): siRNA sense strand
guuaccagcaauaaacaua

SEQ ID NO: 1805943 - RNA, 19 nt, Homo sapiens
  misc_RNA (1)...(19): siRNA sense strand
ccaggauccuccauaucaa

SEQ ID NO: 1805944 - RNA, 19 nt, Homo sapiens
  misc_RNA (1)...(19): siRNA sense strand
cagcagcacccaagacuca

SEQ ID NO: 1805945 - RNA, 19 nt, Homo sapiens
  misc_RNA (1)...(19): siRNA sense strand
gaaggggagacacauuuua

SEQ ID NO: 1805946 - RNA, 19 nt, Homo sapiens
  misc_RNA (1)...(19): siRNA sense strand
cuucgaggauggguucaua

SEQ ID NO: 1805947 - RNA, 19 nt, Homo sapiens
  misc_RNA (1)...(19): siRNA sense strand
auacugaacuauggaccua

SEQ ID NO: 1805948 - RNA, 19 nt, Homo sapiens
  misc_RNA (1)...(19): siRNA sense strand
gaagaguugucugugugau

SEQ ID NO: 1805949 - RNA, 19 nt, Homo sapiens
  misc_RNA (1)...(19): siRNA sense strand
ugacuaaaccuguccuaca

SEQ ID NO: 1805950 - RNA, 19 nt, Homo sapiens
  misc_RNA (1)...(19): siRNA sense strand
caucauuauucagacagua

SEQ ID NO: 1805951 - RNA, 19 nt, Homo sapiens
  misc_RNA (1)...(19): siRNA sense strand
gguuagaggcgagauuaaa

SEQ ID NO: 1805952 - RNA, 19 nt, Homo sapiens
  misc_RNA (1)...(19): siRNA sense strand
ggacuacgaagugaugaug

SEQ ID NO: 1805953 - RNA, 19 nt, Homo sapiens
  misc_RNA (1)...(19): siRNA sense strand
ggaacagggcucaaauucu

SEQ ID NO: 1805954 - RNA, 19 nt, Homo sapiens
  misc_RNA (1)...(19): siRNA sense strand
caucaacaaccaaaucugu

SEQ ID NO: 1805955 - RNA, 19 nt, Homo sapiens
  misc_RNA (1)...(19): siRNA sense strand
ggagaaugaacccuagugu

SEQ ID NO: 1805956 - RNA, 19 nt, Homo sapiens
  misc_RNA (1)...(19): siRNA sense strand
ucaaaccaacaccuucuuu

SEQ ID NO: 1805957 - RNA, 19 nt, Homo sapiens
  misc_RNA (1)...(19): siRNA sense strand
ugugggaccugcaaaucaa

SEQ ID NO: 1805958 - RNA, 19 nt, Homo sapiens
  misc_RNA (1)...(19): siRNA sense strand
uaaaggcugcccucucaga

SEQ ID NO: 1805959 - RNA, 19 nt, Homo sapiens
  misc_RNA (1)...(19): siRNA sense strand
gaaguagaaaggaccaagu

SEQ ID NO: 1805960 - RNA, 19 nt, Homo sapiens
  misc_RNA (1)...(19): siRNA sense strand
ggaggagccugcugagaug

SEQ ID NO: 1805961 - RNA, 19 nt, Homo sapiens
  misc_RNA (1)...(19): siRNA sense strand
cagaagagguuucccaucu

SEQ ID NO: 1805962 - RNA, 19 nt, Homo sapiens
  misc_RNA (1)...(19): siRNA sense strand
gauaucugaugacugcuuu

SEQ ID NO: 1805963 - RNA, 19 nt, Homo sapiens
  misc_RNA (1)...(19): siRNA sense strand
caaugagucugaccucuuc

SEQ ID NO: 1805964 - RNA, 19 nt, Homo sapiens
  misc_RNA (1)...(19): siRNA sense strand
gaacugcugauaucugaug

SEQ ID NO: 1805965 - RNA, 19 nt, Homo sapiens
  misc_RNA (1)...(19): siRNA sense strand
gcaaugagucugaccucuu

SEQ ID NO: 1805966 - RNA, 19 nt, Homo sapiens
  misc_RNA (1)...(19): siRNA sense strand
ggaaggugguguggaguca

SEQ ID NO: 1805967 - RNA, 19 nt, Homo sapiens
  misc_RNA (1)...(19): siRNA sense strand
ggagucagcauuucacaag

SEQ ID NO: 1805968 - RNA, 19 nt, Homo sapiens
  misc_RNA (1)...(19): siRNA sense strand
gggaggagccugcugagau

SEQ ID NO: 1805969 - RNA, 19 nt, Homo sapiens
  misc_RNA (1)...(19): siRNA sense strand
ccgcagcucuguauaaggu

SEQ ID NO: 1805970 - RNA, 19 nt, Homo sapiens
  misc_RNA (1)...(19): siRNA sense strand
gauccaggccugcaugugu

SEQ ID NO: 1805971 - RNA, 19 nt, Homo sapiens
  misc_RNA (1)...(19): siRNA sense strand
gaaaagcgaaugagaagga

SEQ ID NO: 1805972 - RNA, 19 nt, Homo sapiens
  misc_RNA (1)...(19): siRNA sense strand
gcacaauggcccagaagag

SEQ ID NO: 1805973 - RNA, 19 nt, Homo sapiens
  misc_RNA (1)...(19): siRNA sense strand
uugaacugcugauaucuga

SEQ ID NO: 1805974 - RNA, 19 nt, Homo sapiens
  misc_RNA (1)...(19): siRNA sense strand
gaacugggacagcuucaac

SEQ ID NO: 1805975 - RNA, 19 nt, Homo sapiens
  misc_RNA (1)...(19): siRNA sense strand
gagucagcauuucacaaga

SEQ ID NO: 1805976 - RNA, 19 nt, Homo sapiens
  misc_RNA (1)...(19): siRNA sense strand
gcaaggcccagguggagau

SEQ ID NO: 1805977 - RNA, 19 nt, Homo sapiens
  misc_RNA (1)...(19): siRNA sense strand
agguggagauugucacuga

SEQ ID NO: 1805978 - RNA, 19 nt, Homo sapiens
  misc_RNA (1)...(19): siRNA sense strand
gagucugaccucuucauga

SEQ ID NO: 1805979 - RNA, 19 nt, Homo sapiens
  misc_RNA (1)...(19): siRNA sense strand
cagcugccaucaagaaacu

SEQ ID NO: 1805980 - RNA, 19 nt, Homo sapiens
  misc_RNA (1)...(19): siRNA sense strand
caucugcaccuguggauag

SEQ ID NO: 1805981 - RNA, 19 nt, Homo sapiens
  misc_RNA (1)...(19): siRNA sense strand
ggccgcagcucuguauaag

SEQ ID NO: 1805982 - RNA, 19 nt, Homo sapiens
  misc_RNA (1)...(19): siRNA sense strand
gggcaacccugaggaagac

SEQ ID NO: 1805983 - RNA, 19 nt, Homo sapiens
  misc_RNA (1)...(19): siRNA sense strand
ggauaggccagcagucauc

SEQ ID NO: 1805984 - RNA, 19 nt, Homo sapiens
  misc_RNA (1)...(19): siRNA sense strand
gcugcacaauggcccagaa

SEQ ID NO: 1805985 - RNA, 19 nt, Homo sapiens
  misc_RNA (1)...(19): siRNA sense strand
gaacacucagguggagauu

SEQ ID NO: 1805986 - RNA, 19 nt, Homo sapiens
  misc_RNA (1)...(19): siRNA sense strand
ucacagcugacaaggcaaa

SEQ ID NO: 1805987 - RNA, 19 nt, Homo sapiens
  misc_RNA (1)...(19): siRNA sense strand
agucugaccucuucaugag

SEQ ID NO: 1805988 - RNA, 19 nt, Homo sapiens
  misc_RNA (1)...(19): siRNA sense strand
ugaugccacuggacagaug

SEQ ID NO: 1805989 - RNA, 19 nt, Homo sapiens
  misc_RNA (1)...(19): siRNA sense strand
agaagagguuucccaucug

SEQ ID NO: 1805990 - RNA, 19 nt, Homo sapiens
  misc_RNA (1)...(19): siRNA sense strand
gguguggagucagcauuuc

SEQ ID NO: 1805991 - RNA, 19 nt, Homo sapiens
  misc_RNA (1)...(19): siRNA sense strand
gcccuugaacugcugauau

SEQ ID NO: 1805992 - RNA, 19 nt, Homo sapiens
  misc_RNA (1)...(19): siRNA sense strand
gaagaccucacagcugaca

SEQ ID NO: 1805993 - RNA, 19 nt, Homo sapiens
  misc_RNA (1)...(19): siRNA sense strand
gaaacucuaccaggugaag

SEQ ID NO: 1805994 - RNA, 19 nt, Homo sapiens
  misc_RNA (1)...(19): siRNA sense strand
caauggcccagaagagguu

SEQ ID NO: 1805995 - RNA, 19 nt, Homo sapiens
  misc_RNA (1)...(19): siRNA sense strand
gcgaggugcagggcaauga

SEQ ID NO: 1805996 - RNA, 19 nt, Homo sapiens
  misc_RNA (1)...(19): siRNA sense strand
ccaggccgcagcucuguau

SEQ ID NO: 1805997 - RNA, 19 nt, Homo sapiens
  misc_RNA (1)...(19): siRNA sense strand
ggagccugcugagaugauc

SEQ ID NO: 1805998 - RNA, 19 nt, Homo sapiens
  misc_RNA (1)...(19): siRNA sense strand
cccuugaacugcugauauc

SEQ ID NO: 1805999 - RNA, 19 nt, Homo sapiens
  misc_RNA (1)...(19): siRNA sense strand
ccaagccugcucugaagga

SEQ ID NO: 1806000 - RNA, 19 nt, Homo sapiens
  misc_RNA (1)...(19): siRNA sense strand
ucaucucgcgcaugcagua

SEQ ID NO: 1806001 - RNA, 19 nt, Homo sapiens
  misc_RNA (1)...(19): siRNA sense strand
guggauaggccagcaguca

SEQ ID NO: 1806002 - RNA, 19 nt, Homo sapiens
  misc_RNA (1)...(19): siRNA sense strand
gaaauucugugcacuaauc

SEQ ID NO: 1806003 - RNA, 19 nt, Homo sapiens
  misc_RNA (1)...(19): siRNA sense strand
uaaggagguugcugaguua

SEQ ID NO: 1806004 - RNA, 19 nt, Homo sapiens
  misc_RNA (1)...(19): siRNA sense strand
uggauucgcucgagaagua

SEQ ID NO: 1806005 - RNA, 19 nt, Homo sapiens
  misc_RNA (1)...(19): siRNA sense strand
acuguuagcuguucucuuu

SEQ ID NO: 1806006 - RNA, 19 nt, Homo sapiens
  misc_RNA (1)...(19): siRNA sense strand
gcacuaaucauacaauauc

SEQ ID NO: 1806007 - RNA, 19 nt, Homo sapiens
  misc_RNA (1)...(19): siRNA sense strand
gaggagauauuccgagucu

SEQ ID NO: 1806008 - RNA, 19 nt, Homo sapiens
  misc_RNA (1)...(19): siRNA sense strand
cauggaaacugugagaauu

SEQ ID NO: 1806009 - RNA, 19 nt, Homo sapiens
  misc_RNA (1)...(19): siRNA sense strand
gggccgaccuccuuucaug

SEQ ID NO: 1806010 - RNA, 19 nt, Homo sapiens
  misc_RNA (1)...(19): siRNA sense strand
gcacugccauauuccugaa

SEQ ID NO: 1806011 - RNA, 19 nt, Homo sapiens
  misc_RNA (1)...(19): siRNA sense strand
auaaggagguugcugaguu

SEQ ID NO: 1806012 - RNA, 19 nt, Homo sapiens
  misc_RNA (1)...(19): siRNA sense strand
gugcacuaaucauacaaua

SEQ ID NO: 1806013 - RNA, 19 nt, Homo sapiens
  misc_RNA (1)...(19): siRNA sense strand
gcugccauuucaacuguua

SEQ ID NO: 1806014 - RNA, 19 nt, Homo sapiens
  misc_RNA (1)...(19): siRNA sense strand
agaauucuccucuaugaaa

SEQ ID NO: 1806015 - RNA, 19 nt, Homo sapiens
  misc_RNA (1)...(19): siRNA sense strand
auccagaccucguccuuua

SEQ ID NO: 1806016 - RNA, 19 nt, Homo sapiens
  misc_RNA (1)...(19): siRNA sense strand
aauaguaccugggcacaaa

SEQ ID NO: 1806017 - RNA, 19 nt, Homo sapiens
  misc_RNA (1)...(19): siRNA sense strand
gagucuacaucuuuggauu

SEQ ID NO: 1806018 - RNA, 19 nt, Homo sapiens
  misc_RNA (1)...(19): siRNA sense strand
ggagguugcugaguuagag

SEQ ID NO: 1806019 - RNA, 19 nt, Homo sapiens
  misc_RNA (1)...(19): siRNA sense strand
gaucugcaaagacaaguga

SEQ ID NO: 1806020 - RNA, 19 nt, Homo sapiens
  misc_RNA (1)...(19): siRNA sense strand
gauuggauuuccugagugu

SEQ ID NO: 1806021 - RNA, 19 nt, Homo sapiens
  misc_RNA (1)...(19): siRNA sense strand
ggagauauuccgagucuac

SEQ ID NO: 1806022 - RNA, 19 nt, Homo sapiens
  misc_RNA (1)...(19): siRNA sense strand
ucaagaaugcuucaugugu

SEQ ID NO: 1806023 - RNA, 19 nt, Homo sapiens
  misc_RNA (1)...(19): siRNA sense strand
ugucaagaaugcuucaugu

SEQ ID NO: 1806024 - RNA, 19 nt, Homo sapiens
  misc_RNA (1)...(19): siRNA sense strand
gcagcagggcacagaaauu

SEQ ID NO: 1806025 - RNA, 19 nt, Homo sapiens
  misc_RNA (1)...(19): siRNA sense strand
ccgaccuccuuucauguua

SEQ ID NO: 1806026 - RNA, 19 nt, Homo sapiens
  misc_RNA (1)...(19): siRNA sense strand
caauaauagugccuuccuu

SEQ ID NO: 1806027 - RNA, 19 nt, Homo sapiens
  misc_RNA (1)...(19): siRNA sense strand
ggugaagcacagcaguuua

SEQ ID NO: 1806028 - RNA, 19 nt, Homo sapiens
  misc_RNA (1)...(19): siRNA sense strand
caggcugguuggaugauuu

SEQ ID NO: 1806029 - RNA, 19 nt, Homo sapiens
  misc_RNA (1)...(19): siRNA sense strand
gaauucuccucuaugaaac

SEQ ID NO: 1806030 - RNA, 19 nt, Homo sapiens
  misc_RNA (1)...(19): siRNA sense strand
gaaauaccccuuugagauc

SEQ ID NO: 1806031 - RNA, 19 nt, Homo sapiens
  misc_RNA (1)...(19): siRNA sense strand
ugccuugcauuaugguaua

SEQ ID NO: 1806032 - RNA, 19 nt, Homo sapiens
  misc_RNA (1)...(19): siRNA sense strand
cgaccuccuuucauguuau

SEQ ID NO: 1806033 - RNA, 19 nt, Homo sapiens
  misc_RNA (1)...(19): siRNA sense strand
gaggugccauaguaagcuu

SEQ ID NO: 1806034 - RNA, 19 nt, Homo sapiens
  misc_RNA (1)...(19): siRNA sense strand
uggaugauuugcagauuca

SEQ ID NO: 1806035 - RNA, 19 nt, Homo sapiens
  misc_RNA (1)...(19): siRNA sense strand
ccugaagccuuggucuaaa

SEQ ID NO: 1806036 - RNA, 19 nt, Homo sapiens
  misc_RNA (1)...(19): siRNA sense strand
gugccuuccuugcuccuuu

SEQ ID NO: 1806037 - RNA, 19 nt, Homo sapiens
  misc_RNA (1)...(19): siRNA sense strand
cagcagggcacagaaauuc

SEQ ID NO: 1806038 - RNA, 19 nt, Homo sapiens
  misc_RNA (1)...(19): siRNA sense strand
gcucuaggaggauuggauu

SEQ ID NO: 1806039 - RNA, 19 nt, Homo sapiens
  misc_RNA (1)...(19): siRNA sense strand
ucucaggauucuacccaaa

SEQ ID NO: 1806040 - RNA, 19 nt, Homo sapiens
  misc_RNA (1)...(19): siRNA sense strand
gggugaagcacagcaguuu

SEQ ID NO: 1806041 - RNA, 19 nt, Homo sapiens
  misc_RNA (1)...(19): siRNA sense strand
ccucguccuuuaccaauag

SEQ ID NO: 1806042 - RNA, 19 nt, Homo sapiens
  misc_RNA (1)...(19): siRNA sense strand
ugaguuagaggagauauuc

SEQ ID NO: 1806043 - RNA, 19 nt, Homo sapiens
  misc_RNA (1)...(19): siRNA sense strand
cagcuugugugccaugucu

SEQ ID NO: 1806044 - RNA, 19 nt, Homo sapiens
  misc_RNA (1)...(19): siRNA sense strand
caagguaucauggaaacug

SEQ ID NO: 1806045 - RNA, 19 nt, Homo sapiens
  misc_RNA (1)...(19): siRNA sense strand
ccggugauuuccagaugaa

SEQ ID NO: 1806046 - RNA, 19 nt, Homo sapiens
  misc_RNA (1)...(19): siRNA sense strand
gccggugauuuccagauga

SEQ ID NO: 1806047 - RNA, 19 nt, Homo sapiens
  misc_RNA (1)...(19): siRNA sense strand
agacuuugccggugauuuc

SEQ ID NO: 1806048 - RNA, 19 nt, Homo sapiens
  misc_RNA (1)...(19): siRNA sense strand
guuggaugauuugcagauu

SEQ ID NO: 1806049 - RNA, 19 nt, Homo sapiens
  misc_RNA (1)...(19): siRNA sense strand
gugaagcacagcaguuuag

SEQ ID NO: 1806050 - RNA, 19 nt, Homo sapiens
  misc_RNA (1)...(19): siRNA sense strand
uaucaagguaucauggaaa

SEQ ID NO: 1806051 - RNA, 19 nt, Homo sapiens
  misc_RNA (1)...(19): siRNA sense strand
gauauuccgagucuacauc

SEQ ID NO: 1806052 - RNA, 19 nt, Homo sapiens
  misc_RNA (1)...(19): siRNA sense strand
uucuggaggugccauagua

SEQ ID NO: 1806053 - RNA, 19 nt, Homo sapiens
  misc_RNA (1)...(19): siRNA sense strand
gcagcagggcacucagcua

SEQ ID NO: 1806054 - RNA, 19 nt, Homo sapiens
  misc_RNA (1)...(19): siRNA sense strand
gcucaggcugguuggauga

SEQ ID NO: 1806055 - RNA, 19 nt, Homo sapiens
  misc_RNA (1)...(19): siRNA sense strand
gaccuccuuucauguuauc

SEQ ID NO: 1806056 - RNA, 19 nt, Homo sapiens
  misc_RNA (1)...(19): siRNA sense strand
gguaucauggaaacuguga

SEQ ID NO: 1806057 - RNA, 19 nt, Homo sapiens
  misc_RNA (1)...(19): siRNA sense strand
guaccugggcacaaacuca

SEQ ID NO: 1806058 - RNA, 19 nt, Homo sapiens
  misc_RNA (1)...(19): siRNA sense strand
ugaaauaccccuuugagau

SEQ ID NO: 1806059 - RNA, 19 nt, Homo sapiens
  misc_RNA (1)...(19): siRNA sense strand
uaucauggaaacugugaga

SEQ ID NO: 1806060 - RNA, 19 nt, Homo sapiens
  misc_RNA (1)...(19): siRNA sense strand
ggugguaacagugaacaug

SEQ ID NO: 1806061 - RNA, 19 nt, Homo sapiens
  misc_RNA (1)...(19): siRNA sense strand
gcaauaauagugccuuccu

SEQ ID NO: 1806062 - RNA, 19 nt, Homo sapiens
  misc_RNA (1)...(19): siRNA sense strand
ucauggaaacugugagaau

SEQ ID NO: 1806063 - RNA, 19 nt, Homo sapiens
  misc_RNA (1)...(19): siRNA sense strand
cugcugccauuucaacugu

SEQ ID NO: 1806064 - RNA, 19 nt, Homo sapiens
  misc_RNA (1)...(19): siRNA sense strand
uggcugggauagcgacuca

SEQ ID NO: 1806065 - RNA, 19 nt, Homo sapiens
  misc_RNA (1)...(19): siRNA sense strand
cgccggucauaucagaaua

SEQ ID NO: 1806066 - RNA, 19 nt, Homo sapiens
  misc_RNA (1)...(19): siRNA sense strand
gacauccugcccaaugcua

SEQ ID NO: 1806067 - RNA, 19 nt, Homo sapiens
  misc_RNA (1)...(19): siRNA sense strand
gggacauccugcccaaugc

SEQ ID NO: 1806068 - RNA, 19 nt, Homo sapiens
  misc_RNA (1)...(19): siRNA sense strand
auaucaagguaucauggaa

SEQ ID NO: 1806069 - RNA, 19 nt, Homo sapiens
  misc_RNA (1)...(19): siRNA sense strand
gaccucguccuuuaccaau

SEQ ID NO: 1806070 - RNA, 19 nt, Homo sapiens
  misc_RNA (1)...(19): siRNA sense strand
cugaagccuuggucuaaag

SEQ ID NO: 1806071 - RNA, 19 nt, Homo sapiens
  misc_RNA (1)...(19): siRNA sense strand
gaagcacagcaguuuagag

SEQ ID NO: 1806072 - RNA, 19 nt, Homo sapiens
  misc_RNA (1)...(19): siRNA sense strand
aaugcuaacuggacauggu

SEQ ID NO: 1806073 - RNA, 19 nt, Homo sapiens
  misc_RNA (1)...(19): siRNA sense strand
cagauucauggcugggaua

SEQ ID NO: 1806074 - RNA, 19 nt, Homo sapiens
  misc_RNA (1)...(19): siRNA sense strand
ucugugcacuaaucauaca

SEQ ID NO: 1806075 - RNA, 19 nt, Homo sapiens
  misc_RNA (1)...(19): siRNA sense strand
gccgaccuccuuucauguu

SEQ ID NO: 1806076 - RNA, 19 nt, Homo sapiens
  misc_RNA (1)...(19): siRNA sense strand
guaacuuuagugauaagga

SEQ ID NO: 1806077 - RNA, 19 nt, Homo sapiens
  misc_RNA (1)...(19): siRNA sense strand
auucugugcacuaaucaua

SEQ ID NO: 1806078 - RNA, 19 nt, Homo sapiens
  misc_RNA (1)...(19): siRNA sense strand
cuugcauuaugguauauga

SEQ ID NO: 1806079 - RNA, 19 nt, Homo sapiens
  misc_RNA (1)...(19): siRNA sense strand
ucaggcugguuggaugauu

SEQ ID NO: 1806080 - RNA, 19 nt, Homo sapiens
  misc_RNA (1)...(19): siRNA sense strand
uuucaacuguuagcuguuc

SEQ ID NO: 1806081 - RNA, 19 nt, Homo sapiens
  misc_RNA (1)...(19): siRNA sense strand
gaaauaucccuuugaagua

SEQ ID NO: 1806082 - RNA, 19 nt, Homo sapiens
  misc_RNA (1)...(19): siRNA sense strand
ggacaccacucuuccauga

SEQ ID NO: 1806083 - RNA, 19 nt, Homo sapiens
  misc_RNA (1)...(19): siRNA sense strand
uuacugaguuuccagaaua

SEQ ID NO: 1806084 - RNA, 19 nt, Homo sapiens
  misc_RNA (1)...(19): siRNA sense strand
gaaucaggcacaauaauuu

SEQ ID NO: 1806085 - RNA, 19 nt, Homo sapiens
  misc_RNA (1)...(19): siRNA sense strand
caaagugucugucaucuac

SEQ ID NO: 1806086 - RNA, 19 nt, Homo sapiens
  misc_RNA (1)...(19): siRNA sense strand
ucacagaaacaguguauaa

SEQ ID NO: 1806087 - RNA, 19 nt, Homo sapiens
  misc_RNA (1)...(19): siRNA sense strand
gaaacaguguauaaucuca

SEQ ID NO: 1806088 - RNA, 19 nt, Homo sapiens
  misc_RNA (1)...(19): siRNA sense strand
ugacauggaugcggaauga

SEQ ID NO: 1806089 - RNA, 19 nt, Homo sapiens
  misc_RNA (1)...(19): siRNA sense strand
gaauuggauugccuuggua

SEQ ID NO: 1806090 - RNA, 19 nt, Homo sapiens
  misc_RNA (1)...(19): siRNA sense strand
caagauuacucgaaauauc

SEQ ID NO: 1806091 - RNA, 19 nt, Homo sapiens
  misc_RNA (1)...(19): siRNA sense strand
gaugggacaugguaucuuc

SEQ ID NO: 1806092 - RNA, 19 nt, Homo sapiens
  misc_RNA (1)...(19): siRNA sense strand
ucuaauaguccuuguguua

SEQ ID NO: 1806093 - RNA, 19 nt, Homo sapiens
  misc_RNA (1)...(19): siRNA sense strand
cgaaauaucccuuugaagu

SEQ ID NO: 1806094 - RNA, 19 nt, Homo sapiens
  misc_RNA (1)...(19): siRNA sense strand
gcacuaaacauggugauau

SEQ ID NO: 1806095 - RNA, 19 nt, Homo sapiens
  misc_RNA (1)...(19): siRNA sense strand
gcaaugaagaguugucaga

SEQ ID NO: 1806096 - RNA, 19 nt, Homo sapiens
  misc_RNA (1)...(19): siRNA sense strand
cagaaacaguguauaaucu

SEQ ID NO: 1806097 - RNA, 19 nt, Homo sapiens
  misc_RNA (1)...(19): siRNA sense strand
gaccuagaguuguuauuuc

SEQ ID NO: 1806098 - RNA, 19 nt, Homo sapiens
  misc_RNA (1)...(19): siRNA sense strand
caacugggcacuaaacaug

SEQ ID NO: 1806099 - RNA, 19 nt, Homo sapiens
  misc_RNA (1)...(19): siRNA sense strand
guccuuguguuaugguuua

SEQ ID NO: 1806100 - RNA, 19 nt, Homo sapiens
  misc_RNA (1)...(19): siRNA sense strand
uaauaguccuuguguuaug

SEQ ID NO: 1806101 - RNA, 19 nt, Homo sapiens
  misc_RNA (1)...(19): siRNA sense strand
cggauuagauuuacugagu

SEQ ID NO: 1806102 - RNA, 19 nt, Homo sapiens
  misc_RNA (1)...(19): siRNA sense strand
ggauuagauuuacugaguu

SEQ ID NO: 1806103 - RNA, 19 nt, Homo sapiens
  misc_RNA (1)...(19): siRNA sense strand
ugucagaccuagaguuguu

SEQ ID NO: 1806104 - RNA, 19 nt, Homo sapiens
  misc_RNA (1)...(19): siRNA sense strand
ugaaucaggcacaauaauu

SEQ ID NO: 1806105 - RNA, 19 nt, Homo sapiens
  misc_RNA (1)...(19): siRNA sense strand
cacuaaacauggugauauu

SEQ ID NO: 1806106 - RNA, 19 nt, Homo sapiens
  misc_RNA (1)...(19): siRNA sense strand
uggauuaacucgggagauu

SEQ ID NO: 1806107 - RNA, 19 nt, Homo sapiens
  misc_RNA (1)...(19): siRNA sense strand
ggugauauucuuccuaaug

SEQ ID NO: 1806108 - RNA, 19 nt, Homo sapiens
  misc_RNA (1)...(19): siRNA sense strand
auccagaucuucucauuug

SEQ ID NO: 1806109 - RNA, 19 nt, Homo sapiens
  misc_RNA (1)...(19): siRNA sense strand
gauagugcccuuggugauu

SEQ ID NO: 1806110 - RNA, 19 nt, Homo sapiens
  misc_RNA (1)...(19): siRNA sense strand
caugguaucuucaggugau

SEQ ID NO: 1806111 - RNA, 19 nt, Homo sapiens
  misc_RNA (1)...(19): siRNA sense strand
ggaaugaacaggagcaacu

SEQ ID NO: 1806112 - RNA, 19 nt, Homo sapiens
  misc_RNA (1)...(19): siRNA sense strand
gagcugcauucuggaaaga

SEQ ID NO: 1806113 - RNA, 19 nt, Homo sapiens
  misc_RNA (1)...(19): siRNA sense strand
gucaagauuacucgaaaua

SEQ ID NO: 1806114 - RNA, 19 nt, Homo sapiens
  misc_RNA (1)...(19): siRNA sense strand
ugaauuggauugccuuggu

SEQ ID NO: 1806115 - RNA, 19 nt, Homo sapiens
  misc_RNA (1)...(19): siRNA sense strand
guaugaaggcgucacagaa

SEQ ID NO: 1806116 - RNA, 19 nt, Homo sapiens
  misc_RNA (1)...(19): siRNA sense strand
acaccacucuuccaugaau

SEQ ID NO: 1806117 - RNA, 19 nt, Homo sapiens
  misc_RNA (1)...(19): siRNA sense strand
cuagaguuguuauuucguu

SEQ ID NO: 1806118 - RNA, 19 nt, Homo sapiens
  misc_RNA (1)...(19): siRNA sense strand
ucauccagaucuucucauu

SEQ ID NO: 1806119 - RNA, 19 nt, Homo sapiens
  misc_RNA (1)...(19): siRNA sense strand
uaugaaggcgucacagaaa

SEQ ID NO: 1806120 - RNA, 19 nt, Homo sapiens
  misc_RNA (1)...(19): siRNA sense strand
cagugaaucaggcacaaua

SEQ ID NO: 1806121 - RNA, 19 nt, Homo sapiens
  misc_RNA (1)...(19): siRNA sense strand
gcugcuagcucuucuucuc

SEQ ID NO: 1806122 - RNA, 19 nt, Homo sapiens
  misc_RNA (1)...(19): siRNA sense strand
guuucuaccucuuuggauu

SEQ ID NO: 1806123 - RNA, 19 nt, Homo sapiens
  misc_RNA (1)...(19): siRNA sense strand
gaccaugcaagucaagauu

SEQ ID NO: 1806124 - RNA, 19 nt, Homo sapiens
  misc_RNA (1)...(19): siRNA sense strand
cagaucuucucauuuguca

SEQ ID NO: 1806125 - RNA, 19 nt, Homo sapiens
  misc_RNA (1)...(19): siRNA sense strand
agaccuagaguuguuauuu

SEQ ID NO: 1806126 - RNA, 19 nt, Homo sapiens
  misc_RNA (1)...(19): siRNA sense strand
ccaaagugucugucaucua

SEQ ID NO: 1806127 - RNA, 19 nt, Homo sapiens
  misc_RNA (1)...(19): siRNA sense strand
ucaagaccaugcaagucaa

SEQ ID NO: 1806128 - RNA, 19 nt, Homo sapiens
  misc_RNA (1)...(19): siRNA sense strand
aaauaucccuuugaaguac

SEQ ID NO: 1806129 - RNA, 19 nt, Homo sapiens
  misc_RNA (1)...(19): siRNA sense strand
gugauauucuuccuaaugc

SEQ ID NO: 1806130 - RNA, 19 nt, Homo sapiens
  misc_RNA (1)...(19): siRNA sense strand
aagggcaacuucagcaaug

SEQ ID NO: 1806131 - RNA, 19 nt, Homo sapiens
  misc_RNA (1)...(19): siRNA sense strand
uggauugccuugguaguga

SEQ ID NO: 1806132 - RNA, 19 nt, Homo sapiens
  misc_RNA (1)...(19): siRNA sense strand
caacggauuagauuuacug

SEQ ID NO: 1806133 - RNA, 19 nt, Homo sapiens
  misc_RNA (1)...(19): siRNA sense strand
gauuaacucgggagauuca

SEQ ID NO: 1806134 - RNA, 19 nt, Homo sapiens
  misc_RNA (1)...(19): siRNA sense strand
caagucaagauuacucgaa

SEQ ID NO: 1806135 - RNA, 19 nt, Homo sapiens
  misc_RNA (1)...(19): siRNA sense strand
gcagggaagauguauguac

SEQ ID NO: 1806136 - RNA, 19 nt, Homo sapiens
  misc_RNA (1)...(19): siRNA sense strand
ucugucaucuacucaauca

SEQ ID NO: 1806137 - RNA, 19 nt, Homo sapiens
  misc_RNA (1)...(19): siRNA sense strand
guuguuauuucguuucuac

SEQ ID NO: 1806138 - RNA, 19 nt, Homo sapiens
  misc_RNA (1)...(19): siRNA sense strand
acagaaacaguguauaauc

SEQ ID NO: 1806139 - RNA, 19 nt, Homo sapiens
  misc_RNA (1)...(19): siRNA sense strand
aagucaagauuacucgaaa

SEQ ID NO: 1806140 - RNA, 19 nt, Homo sapiens
  misc_RNA (1)...(19): siRNA sense strand
cucgaaauaucccuuugaa

SEQ ID NO: 1806141 - RNA, 19 nt, Homo sapiens
  misc_RNA (1)...(19): siRNA sense strand
gaucuucucauuugucaac

SEQ ID NO: 1806142 - RNA, 19 nt, Homo sapiens
  misc_RNA (1)...(19): siRNA sense strand
auggugauauucuuccuaa

SEQ ID NO: 1806143 - RNA, 19 nt, Homo sapiens
  misc_RNA (1)...(19): siRNA sense strand
aggagcaacugggcacuaa

SEQ ID NO: 1806144 - RNA, 19 nt, Homo sapiens
  misc_RNA (1)...(19): siRNA sense strand
uaacucgggagauucaaga

SEQ ID NO: 1806145 - RNA, 19 nt, Homo sapiens
  misc_RNA (1)...(19): siRNA sense strand
gcccuuggugauucuaaua

SEQ ID NO: 1806146 - RNA, 19 nt, Homo sapiens
  misc_RNA (1)...(19): siRNA sense strand
guugucagaccuagaguug

SEQ ID NO: 1806147 - RNA, 19 nt, Homo sapiens
  misc_RNA (1)...(19): siRNA sense strand
aaacauggugauauucuuc

SEQ ID NO: 1806148 - RNA, 19 nt, Homo sapiens
  misc_RNA (1)...(19): siRNA sense strand
gacagugaaucaggcacaa

SEQ ID NO: 1806149 - RNA, 19 nt, Homo sapiens
  misc_RNA (1)...(19): siRNA sense strand
gcuuucaacggauuagauu

SEQ ID NO: 1806150 - RNA, 19 nt, Homo sapiens
  misc_RNA (1)...(19): siRNA sense strand
ccaugcaagucaagauuac

SEQ ID NO: 1806151 - RNA, 19 nt, Homo sapiens
  misc_RNA (1)...(19): siRNA sense strand
gcaacugggcacuaaacau

SEQ ID NO: 1806152 - RNA, 19 nt, Homo sapiens
  misc_RNA (1)...(19): siRNA sense strand
gagcaacugggcacuaaac

SEQ ID NO: 1806153 - RNA, 19 nt, Homo sapiens
  misc_RNA (1)...(19): siRNA sense strand
cuaauaguccuuguguuau

SEQ ID NO: 1806154 - RNA, 19 nt, Homo sapiens
  misc_RNA (1)...(19): siRNA sense strand
gaguuguuauuucguuucu

SEQ ID NO: 1806155 - RNA, 19 nt, Homo sapiens
  misc_RNA (1)...(19): siRNA sense strand
ggauugccuugguagugau

SEQ ID NO: 1806156 - RNA, 19 nt, Homo sapiens
  misc_RNA (1)...(19): siRNA sense strand
cauccagaucuucucauuu

SEQ ID NO: 1806157 - RNA, 19 nt, Homo sapiens
  misc_RNA (1)...(19): siRNA sense strand
caagggcaacuucagcaau

SEQ ID NO: 1806158 - RNA, 19 nt, Homo sapiens
  misc_RNA (1)...(19): siRNA sense strand
ucucuugggucuccuggau

SEQ ID NO: 1806159 - RNA, 19 nt, Homo sapiens
  misc_RNA (1)...(19): siRNA sense strand
gauucaagaccaugcaagu

SEQ ID NO: 1806160 - RNA, 19 nt, Homo sapiens
  misc_RNA (1)...(19): siRNA sense strand
gucaucuacucaaucauca

SEQ ID NO: 1806161 - RNA, 19 nt, Homo sapiens
  misc_RNA (1)...(19): siRNA sense strand
ucucauuugucaaccaauc

SEQ ID NO: 1806162 - RNA, 19 nt, Homo sapiens
  misc_RNA (1)...(19): siRNA sense strand
uuucuaccucuuuggauua

SEQ ID NO: 1806163 - RNA, 19 nt, Homo sapiens
  misc_RNA (1)...(19): siRNA sense strand
uauguacacaggcaaguga

SEQ ID NO: 1806164 - RNA, 19 nt, Homo sapiens
  misc_RNA (1)...(19): siRNA sense strand
gugaaucaggcacaauaau

SEQ ID NO: 1806165 - RNA, 19 nt, Homo sapiens
  misc_RNA (1)...(19): siRNA sense strand
ggccugucuugucgaguga

SEQ ID NO: 1806166 - RNA, 19 nt, Homo sapiens
  misc_RNA (1)...(19): siRNA sense strand
ggagcaacugggcacuaaa

SEQ ID NO: 1806167 - RNA, 19 nt, Homo sapiens
  misc_RNA (1)...(19): siRNA sense strand
gcccaaagugucugucauc

SEQ ID NO: 1806168 - RNA, 19 nt, Homo sapiens
  misc_RNA (1)...(19): siRNA sense strand
cgucacagaaacaguguau

SEQ ID NO: 1806169 - RNA, 19 nt, Homo sapiens
  misc_RNA (1)...(19): siRNA sense strand
cuuguguuaugguuuaaga

SEQ ID NO: 1806170 - RNA, 19 nt, Homo sapiens
  misc_RNA (1)...(19): siRNA sense strand
ucucccagguggugacaau

SEQ ID NO: 1806171 - RNA, 19 nt, Homo sapiens
  misc_RNA (1)...(19): siRNA sense strand
gaaugaacaggagcaacug

SEQ ID NO: 1806172 - RNA, 19 nt, Homo sapiens
  misc_RNA (1)...(19): siRNA sense strand
cuaaacauggugauauucu

SEQ ID NO: 1806173 - RNA, 19 nt, Homo sapiens
  misc_RNA (1)...(19): siRNA sense strand
uguuaugguuuaagaagca

SEQ ID NO: 1806174 - RNA, 19 nt, Homo sapiens
  misc_RNA (1)...(19): siRNA sense strand
caccacucuuccaugaauu

SEQ ID NO: 1806175 - RNA, 19 nt, Homo sapiens
  misc_RNA (1)...(19): siRNA sense strand
ggauuaacucgggagauuc

SEQ ID NO: 1806176 - RNA, 19 nt, Homo sapiens
  misc_RNA (1)...(19): siRNA sense strand
auagugcccuuggugauuc

SEQ ID NO: 1806177 - RNA, 19 nt, Homo sapiens
  misc_RNA (1)...(19): siRNA sense strand
ugucugucaucuacucaau

SEQ ID NO: 1806178 - RNA, 19 nt, Homo sapiens
  misc_RNA (1)...(19): siRNA sense strand
ugagcugcauucuggaaag

SEQ ID NO: 1806179 - RNA, 19 nt, Homo sapiens
  misc_RNA (1)...(19): siRNA sense strand
gagauucaagaccaugcaa

SEQ ID NO: 1806180 - RNA, 19 nt, Homo sapiens
  misc_RNA (1)...(19): siRNA sense strand
ggcacuaaacauggugaua

SEQ ID NO: 1806181 - RNA, 19 nt, Homo sapiens
  misc_RNA (1)...(19): siRNA sense strand
ggccagagcuucuuuguga

SEQ ID NO: 1806182 - RNA, 19 nt, Homo sapiens
  misc_RNA (1)...(19): siRNA sense strand
ggacaagacucuaugaaag

SEQ ID NO: 1806183 - RNA, 19 nt, Homo sapiens
  misc_RNA (1)...(19): siRNA sense strand
aauaagaacugcacacuga

SEQ ID NO: 1806184 - RNA, 19 nt, Homo sapiens
  misc_RNA (1)...(19): siRNA sense strand
gaugggaccucgcugaaga

SEQ ID NO: 1806185 - RNA, 19 nt, Homo sapiens
  misc_RNA (1)...(19): siRNA sense strand
ggaccucgcugaagaagca

SEQ ID NO: 1806186 - RNA, 19 nt, Homo sapiens
  misc_RNA (1)...(19): siRNA sense strand
ccaauccucuuccaacaaa

SEQ ID NO: 1806187 - RNA, 19 nt, Homo sapiens
  misc_RNA (1)...(19): siRNA sense strand
gaaauggauggaacgaaua

SEQ ID NO: 1806188 - RNA, 19 nt, Homo sapiens
  misc_RNA (1)...(19): siRNA sense strand
ugaagaagcagaauacauu

SEQ ID NO: 1806189 - RNA, 19 nt, Homo sapiens
  misc_RNA (1)...(19): siRNA sense strand
gcugucaggucuccaauga

SEQ ID NO: 1806190 - RNA, 19 nt, Homo sapiens
  misc_RNA (1)...(19): siRNA sense strand
aaagaaagccagcugaauu

SEQ ID NO: 1806191 - RNA, 19 nt, Homo sapiens
  misc_RNA (1)...(19): siRNA sense strand
gaacgaauacaccucaaug

SEQ ID NO: 1806192 - RNA, 19 nt, Homo sapiens
  misc_RNA (1)...(19): siRNA sense strand
gugcaacccugaccuguga

SEQ ID NO: 1806193 - RNA, 19 nt, Homo sapiens
  misc_RNA (1)...(19): siRNA sense strand
caacaaauuacacguggua

SEQ ID NO: 1806194 - RNA, 19 nt, Homo sapiens
  misc_RNA (1)...(19): siRNA sense strand
ccaagaaggugaccacagu

SEQ ID NO: 1806195 - RNA, 19 nt, Homo sapiens
  misc_RNA (1)...(19): siRNA sense strand
gaagucaagucgaguuucu

SEQ ID NO: 1806196 - RNA, 19 nt, Homo sapiens
  misc_RNA (1)...(19): siRNA sense strand
gaaggugaccacagugauu

SEQ ID NO: 1806197 - RNA, 19 nt, Homo sapiens
  misc_RNA (1)...(19): siRNA sense strand
gaagauggcauuagcuaca

SEQ ID NO: 1806198 - RNA, 19 nt, Homo sapiens
  misc_RNA (1)...(19): siRNA sense strand
caagaacaccucgaaguuu

SEQ ID NO: 1806199 - RNA, 19 nt, Homo sapiens
  misc_RNA (1)...(19): siRNA sense strand
gaacgucauuccagauuuu

SEQ ID NO: 1806200 - RNA, 19 nt, Homo sapiens
  misc_RNA (1)...(19): siRNA sense strand
gagaugaacauaccacgaa

SEQ ID NO: 1806201 - RNA, 19 nt, Homo sapiens
  misc_RNA (1)...(19): siRNA sense strand
ccagcucccuccagaaauu

SEQ ID NO: 1806202 - RNA, 19 nt, Homo sapiens
  misc_RNA (1)...(19): siRNA sense strand
gaaguuugaugggacaaga

SEQ ID NO: 1806203 - RNA, 19 nt, Homo sapiens
  misc_RNA (1)...(19): siRNA sense strand
agaaauggauggaacgaau

SEQ ID NO: 1806204 - RNA, 19 nt, Homo sapiens
  misc_RNA (1)...(19): siRNA sense strand
ggaaagaaagccagcugaa

SEQ ID NO: 1806205 - RNA, 19 nt, Homo sapiens
  misc_RNA (1)...(19): siRNA sense strand
aagaacaccucgaaguuug

SEQ ID NO: 1806206 - RNA, 19 nt, Homo sapiens
  misc_RNA (1)...(19): siRNA sense strand
cagaagaugcugggaguua

SEQ ID NO: 1806207 - RNA, 19 nt, Homo sapiens
  misc_RNA (1)...(19): siRNA sense strand
gaaagaaagccagcugaau

SEQ ID NO: 1806208 - RNA, 19 nt, Homo sapiens
  misc_RNA (1)...(19): siRNA sense strand
guaacuacaauuccaguaa

SEQ ID NO: 1806209 - RNA, 19 nt, Homo sapiens
  misc_RNA (1)...(19): siRNA sense strand
gggacaagacucuaugaaa

SEQ ID NO: 1806210 - RNA, 19 nt, Homo sapiens
  misc_RNA (1)...(19): siRNA sense strand
cagugacccuuuccuguaa

SEQ ID NO: 1806211 - RNA, 19 nt, Homo sapiens
  misc_RNA (1)...(19): siRNA sense strand
ugaccugcuugcugaauuu

SEQ ID NO: 1806212 - RNA, 19 nt, Homo sapiens
  misc_RNA (1)...(19): siRNA sense strand
caaugugacuucucaagca

SEQ ID NO: 1806213 - RNA, 19 nt, Homo sapiens
  misc_RNA (1)...(19): siRNA sense strand
gagaacgucauuccagauu

SEQ ID NO: 1806214 - RNA, 19 nt, Homo sapiens
  misc_RNA (1)...(19): siRNA sense strand
gccagaagcugagauugga

SEQ ID NO: 1806215 - RNA, 19 nt, Homo sapiens
  misc_RNA (1)...(19): siRNA sense strand
aagaaagccagcugaauuu

SEQ ID NO: 1806216 - RNA, 19 nt, Homo sapiens
  misc_RNA (1)...(19): siRNA sense strand
ggucacuuauucagcauug

SEQ ID NO: 1806217 - RNA, 19 nt, Homo sapiens
  misc_RNA (1)...(19): siRNA sense strand
ggagacacagugacccuuu

SEQ ID NO: 1806218 - RNA, 19 nt, Homo sapiens
  misc_RNA (1)...(19): siRNA sense strand
gauggaagauggcauuagc

SEQ ID NO: 1806219 - RNA, 19 nt, Homo sapiens
  misc_RNA (1)...(19): siRNA sense strand
gagauucacucuggaaacu

SEQ ID NO: 1806220 - RNA, 19 nt, Homo sapiens
  misc_RNA (1)...(19): siRNA sense strand
guaccacaaugggaaagaa

SEQ ID NO: 1806221 - RNA, 19 nt, Homo sapiens
  misc_RNA (1)...(19): siRNA sense strand
ggaugcagaugggaaguuc

SEQ ID NO: 1806222 - RNA, 19 nt, Homo sapiens
  misc_RNA (1)...(19): siRNA sense strand
cuacagagcccuagauggu

SEQ ID NO: 1806223 - RNA, 19 nt, Homo sapiens
  misc_RNA (1)...(19): siRNA sense strand
acaagaacaccucgaaguu

SEQ ID NO: 1806224 - RNA, 19 nt, Homo sapiens
  misc_RNA (1)...(19): siRNA sense strand
gcacaaaggaugggaaggu

SEQ ID NO: 1806225 - RNA, 19 nt, Homo sapiens
  misc_RNA (1)...(19): siRNA sense strand
uaacuacaauuccaguaac

SEQ ID NO: 1806226 - RNA, 19 nt, Homo sapiens
  misc_RNA (1)...(19): siRNA sense strand
ggaaagcuucauccuguuc

SEQ ID NO: 1806227 - RNA, 19 nt, Homo sapiens
  misc_RNA (1)...(19): siRNA sense strand
gaugcagaguccucagaga

SEQ ID NO: 1806228 - RNA, 19 nt, Homo sapiens
  misc_RNA (1)...(19): siRNA sense strand
gagacacagugacccuuuc

SEQ ID NO: 1806229 - RNA, 19 nt, Homo sapiens
  misc_RNA (1)...(19): siRNA sense strand
gagacaagaauaagaacug

SEQ ID NO: 1806230 - RNA, 19 nt, Homo sapiens
  misc_RNA (1)...(19): siRNA sense strand
gaaaguccacaucccaaag

SEQ ID NO: 1806231 - RNA, 19 nt, Homo sapiens
  misc_RNA (1)...(19): siRNA sense strand
agaacgucauuccagauuu

SEQ ID NO: 1806232 - RNA, 19 nt, Homo sapiens
  misc_RNA (1)...(19): siRNA sense strand
uccacaauccugaguauaa

SEQ ID NO: 1806233 - RNA, 19 nt, Homo sapiens
  misc_RNA (1)...(19): siRNA sense strand
gaaggacagaggagaaagu

SEQ ID NO: 1806234 - RNA, 19 nt, Homo sapiens
  misc_RNA (1)...(19): siRNA sense strand
ggccaauccucuuccaaca

SEQ ID NO: 1806235 - RNA, 19 nt, Homo sapiens
  misc_RNA (1)...(19): siRNA sense strand
gcaugucacuggccaaucc

SEQ ID NO: 1806236 - RNA, 19 nt, Homo sapiens
  misc_RNA (1)...(19): siRNA sense strand
gggaaggucggaagaagug

SEQ ID NO: 1806237 - RNA, 19 nt, Homo sapiens
  misc_RNA (1)...(19): siRNA sense strand
gcuccugguucuagaauac

SEQ ID NO: 1806238 - RNA, 19 nt, Homo sapiens
  misc_RNA (1)...(19): siRNA sense strand
cgaauacaccucaaugucu

SEQ ID NO: 1806239 - RNA, 19 nt, Homo sapiens
  misc_RNA (1)...(19): siRNA sense strand
cacaaaggaugggaagguu

SEQ ID NO: 1806240 - RNA, 19 nt, Homo sapiens
  misc_RNA (1)...(19): siRNA sense strand
guuccacaauccugaguau

SEQ ID NO: 1806241 - RNA, 19 nt, Homo sapiens
  misc_RNA (1)...(19): siRNA sense strand
gauuggagccggugaaggu

SEQ ID NO: 1806242 - RNA, 19 nt, Homo sapiens
  misc_RNA (1)...(19): siRNA sense strand
gguauccgauccaauugca

SEQ ID NO: 1806243 - RNA, 19 nt, Homo sapiens
  misc_RNA (1)...(19): siRNA sense strand
caagugggcgacuaugaga

SEQ ID NO: 1806244 - RNA, 19 nt, Homo sapiens
  misc_RNA (1)...(19): siRNA sense strand
ccuccaaugugacuucuca

SEQ ID NO: 1806245 - RNA, 19 nt, Homo sapiens
  misc_RNA (1)...(19): siRNA sense strand
aaagccagcugaauuuuga

SEQ ID NO: 1806246 - RNA, 19 nt, Homo sapiens
  misc_RNA (1)...(19): siRNA sense strand
gaaggucggaagaaguguu

SEQ ID NO: 1806247 - RNA, 19 nt, Homo sapiens
  misc_RNA (1)...(19): siRNA sense strand
ggugaacaacuccauagga

SEQ ID NO: 1806248 - RNA, 19 nt, Homo sapiens
  misc_RNA (1)...(19): siRNA sense strand
gaacugcacacugaguauc

SEQ ID NO: 1806249 - RNA, 19 nt, Homo sapiens
  misc_RNA (1)...(19): siRNA sense strand
gaaaauguggacuauguga

SEQ ID NO: 1806250 - RNA, 19 nt, Homo sapiens
  misc_RNA (1)...(19): siRNA sense strand
acaccugguuugacuggaa

SEQ ID NO: 1806251 - RNA, 19 nt, Homo sapiens
  misc_RNA (1)...(19): siRNA sense strand
gaagaugcugggaguuaca

SEQ ID NO: 1806252 - RNA, 19 nt, Homo sapiens
  misc_RNA (1)...(19): siRNA sense strand
ccacaauccugaguauaac

SEQ ID NO: 1806253 - RNA, 19 nt, Homo sapiens
  misc_RNA (1)...(19): siRNA sense strand
ccaguauccucccaagaag

SEQ ID NO: 1806254 - RNA, 19 nt, Homo sapiens
  misc_RNA (1)...(19): siRNA sense strand
gggaaggacagaggagaaa

SEQ ID NO: 1806255 - RNA, 19 nt, Homo sapiens
  misc_RNA (1)...(19): siRNA sense strand
caagucgaguuucuuugca

SEQ ID NO: 1806256 - RNA, 19 nt, Homo sapiens
  misc_RNA (1)...(19): siRNA sense strand
gggaagucaagucgaguuu

SEQ ID NO: 1806257 - RNA, 19 nt, Homo sapiens
  misc_RNA (1)...(19): siRNA sense strand
guccaagacugagaaaugg

SEQ ID NO: 1806258 - RNA, 19 nt, Homo sapiens
  misc_RNA (1)...(19): siRNA sense strand
ggaacgaauacaccucaau

SEQ ID NO: 1806259 - RNA, 19 nt, Homo sapiens
  misc_RNA (1)...(19): siRNA sense strand
aagaaaauguggacuaugu

SEQ ID NO: 1806260 - RNA, 19 nt, Homo sapiens
  misc_RNA (1)...(19): siRNA sense strand
cgagaaggagacacaguga

SEQ ID NO: 1806261 - RNA, 19 nt, Homo sapiens
  misc_RNA (1)...(19): siRNA sense strand
ccacaaugggaaagaaaug

SEQ ID NO: 1806262 - RNA, 19 nt, Homo sapiens
  misc_RNA (1)...(19): siRNA sense strand
ccuagauggugaccuggaa

SEQ ID NO: 1806263 - RNA, 19 nt, Homo sapiens
  misc_RNA (1)...(19): siRNA sense strand
gaccaucaagucugucuuc

SEQ ID NO: 1806264 - RNA, 19 nt, Homo sapiens
  misc_RNA (1)...(19): siRNA sense strand
ggacuaugugauccucaaa

SEQ ID NO: 1806265 - RNA, 19 nt, Homo sapiens
  misc_RNA (1)...(19): siRNA sense strand
ggaccagagugggaaguac

SEQ ID NO: 1806266 - RNA, 19 nt, Homo sapiens
  misc_RNA (1)...(19): siRNA sense strand
gagaugcagaguccucaga

SEQ ID NO: 1806267 - RNA, 19 nt, Homo sapiens
  misc_RNA (1)...(19): siRNA sense strand
gagcuucuuugugaggaau

SEQ ID NO: 1806268 - RNA, 19 nt, Homo sapiens
  misc_RNA (1)...(19): siRNA sense strand
acaccucaaugucucugaa

SEQ ID NO: 1806269 - RNA, 19 nt, Homo sapiens
  misc_RNA (1)...(19): siRNA sense strand
uccaguauccucccaagaa

SEQ ID NO: 1806270 - RNA, 19 nt, Homo sapiens
  misc_RNA (1)...(19): siRNA sense strand
cugaauuucuccugcuaug

SEQ ID NO: 1806271 - RNA, 19 nt, Homo sapiens
  misc_RNA (1)...(19): siRNA sense strand
cgaguuucuuugcauguca

SEQ ID NO: 1806272 - RNA, 19 nt, Homo sapiens
  misc_RNA (1)...(19): siRNA sense strand
gaacaccucgaaguuugau

SEQ ID NO: 1806273 - RNA, 19 nt, Homo sapiens
  misc_RNA (1)...(19): siRNA sense strand
gccaagugggcgacuauga

SEQ ID NO: 1806274 - RNA, 19 nt, Homo sapiens
  misc_RNA (1)...(19): siRNA sense strand
uggaagauggcauuagcua

SEQ ID NO: 1806275 - RNA, 19 nt, Homo sapiens
  misc_RNA (1)...(19): siRNA sense strand
gaaagccagcugaauuuug

SEQ ID NO: 1806276 - RNA, 19 nt, Homo sapiens
  misc_RNA (1)...(19): siRNA sense strand
caaauuacacgugguacca

SEQ ID NO: 1806277 - RNA, 19 nt, Homo sapiens
  misc_RNA (1)...(19): siRNA sense strand
gagaaauggauggaacgaa

SEQ ID NO: 1806278 - RNA, 19 nt, Homo sapiens
  misc_RNA (1)...(19): siRNA sense strand
acaagacucuaugaaagca

SEQ ID NO: 1806279 - RNA, 19 nt, Homo sapiens
  misc_RNA (1)...(19): siRNA sense strand
gaugggacaagacucuaug

SEQ ID NO: 1806280 - RNA, 19 nt, Homo sapiens
  misc_RNA (1)...(19): siRNA sense strand
cggugcagcugaacgugaa

SEQ ID NO: 1806281 - RNA, 19 nt, Homo sapiens
  misc_RNA (1)...(19): siRNA sense strand
ggaagacgguguaccacua

SEQ ID NO: 1806282 - RNA, 19 nt, Homo sapiens
  misc_RNA (1)...(19): siRNA sense strand
ccucauagcugacauugaa

SEQ ID NO: 1806283 - RNA, 19 nt, Homo sapiens
  misc_RNA (1)...(19): siRNA sense strand
ugaaguaccuggaggagaa

SEQ ID NO: 1806284 - RNA, 19 nt, Homo sapiens
  misc_RNA (1)...(19): siRNA sense strand
ggaaggagcagggcacaua

SEQ ID NO: 1806285 - RNA, 19 nt, Homo sapiens
  misc_RNA (1)...(19): siRNA sense strand
cagaggagcucaaggacaa

SEQ ID NO: 1806286 - RNA, 19 nt, Homo sapiens
  misc_RNA (1)...(19): siRNA sense strand
gcaacguccugcugguuaa

SEQ ID NO: 1806287 - RNA, 19 nt, Homo sapiens
  misc_RNA (1)...(19): siRNA sense strand
ggaaguggccgcucaagug

SEQ ID NO: 1806288 - RNA, 19 nt, Homo sapiens
  misc_RNA (1)...(19): siRNA sense strand
gaacuuggcugcggcaacu

SEQ ID NO: 1806289 - RNA, 19 nt, Homo sapiens
  misc_RNA (1)...(19): siRNA sense strand
gaacuguacgcacucauga

SEQ ID NO: 1806290 - RNA, 19 nt, Homo sapiens
  misc_RNA (1)...(19): siRNA sense strand
gccagaagcccuacaagaa

SEQ ID NO: 1806291 - RNA, 19 nt, Homo sapiens
  misc_RNA (1)...(19): siRNA sense strand
cagaagcccuacaagaaga

SEQ ID NO: 1806292 - RNA, 19 nt, Homo sapiens
  misc_RNA (1)...(19): siRNA sense strand
ggagaucccugugagcaau

SEQ ID NO: 1806293 - RNA, 19 nt, Homo sapiens
  misc_RNA (1)...(19): siRNA sense strand
caacggcaccuacgccauu

SEQ ID NO: 1806294 - RNA, 19 nt, Homo sapiens
  misc_RNA (1)...(19): siRNA sense strand
uggaguaucugaagcugaa

SEQ ID NO: 1806295 - RNA, 19 nt, Homo sapiens
  misc_RNA (1)...(19): siRNA sense strand
ucuggcagcugguggagua

SEQ ID NO: 1806296 - RNA, 19 nt, Homo sapiens
  misc_RNA (1)...(19): siRNA sense strand
gcgauaaccuccucauagc

SEQ ID NO: 1806297 - RNA, 19 nt, Homo sapiens
  misc_RNA (1)...(19): siRNA sense strand
gcagcgaugucuggagcua

SEQ ID NO: 1806298 - RNA, 19 nt, Homo sapiens
  misc_RNA (1)...(19): siRNA sense strand
gcagaccgacggcaaguuc

SEQ ID NO: 1806299 - RNA, 19 nt, Homo sapiens
  misc_RNA (1)...(19): siRNA sense strand
guggagaagcucauugcua

SEQ ID NO: 1806300 - RNA, 19 nt, Homo sapiens
  misc_RNA (1)...(19): siRNA sense strand
ggccagaagcccuacaaga

SEQ ID NO: 1806301 - RNA, 19 nt, Homo sapiens
  misc_RNA (1)...(19): siRNA sense strand
gcaccugcccuucuucuac

SEQ ID NO: 1806302 - RNA, 19 nt, Homo sapiens
  misc_RNA (1)...(19): siRNA sense strand
gcgcgauaaccuccucaua

SEQ ID NO: 1806303 - RNA, 19 nt, Homo sapiens
  misc_RNA (1)...(19): siRNA sense strand
ccagaagcccuacaagaag

SEQ ID NO: 1806304 - RNA, 19 nt, Homo sapiens
  misc_RNA (1)...(19): siRNA sense strand
gcccacccauccacguuga

SEQ ID NO: 1806305 - RNA, 19 nt, Homo sapiens
  misc_RNA (1)...(19): siRNA sense strand
gagaagcucauugcuacga

SEQ ID NO: 1806306 - RNA, 19 nt, Homo sapiens
  misc_RNA (1)...(19): siRNA sense strand
aguggccgcucaaguggua

SEQ ID NO: 1806307 - RNA, 19 nt, Homo sapiens
  misc_RNA (1)...(19): siRNA sense strand
cggacgggcucaucuacug

SEQ ID NO: 1806308 - RNA, 19 nt, Homo sapiens
  misc_RNA (1)...(19): siRNA sense strand
aggccgagcgcaaacuuua

SEQ ID NO: 1806309 - RNA, 19 nt, Homo sapiens
  misc_RNA (1)...(19): siRNA sense strand
ucgacacccucaacucaga

SEQ ID NO: 1806310 - RNA, 19 nt, Homo sapiens
  misc_RNA (1)...(19): siRNA sense strand
cgcaacguccugcugguua

SEQ ID NO: 1806311 - RNA, 19 nt, Homo sapiens
  misc_RNA (1)...(19): siRNA sense strand
gaagacgguguaccacuac

SEQ ID NO: 1806312 - RNA, 19 nt, Homo sapiens
  misc_RNA (1)...(19): siRNA sense strand
gcacccgaaugcaucaacu

SEQ ID NO: 1806313 - RNA, 19 nt, Homo sapiens
  misc_RNA (1)...(19): siRNA sense strand
gcucaucuacugccugaag

SEQ ID NO: 1806314 - RNA, 19 nt, Homo sapiens
  misc_RNA (1)...(19): siRNA sense strand
gcgggcaaguacugcauuc

SEQ ID NO: 1806315 - RNA, 19 nt, Homo sapiens
  misc_RNA (1)...(19): siRNA sense strand
gaaggagcagggcacauac

SEQ ID NO: 1806316 - RNA, 19 nt, Homo sapiens
  misc_RNA (1)...(19): siRNA sense strand
gccaagaucagcgacuuug

SEQ ID NO: 1806317 - RNA, 19 nt, Homo sapiens
  misc_RNA (1)...(19): siRNA sense strand
acgagcggaugcccuggua

SEQ ID NO: 1806318 - RNA, 19 nt, Homo sapiens
  misc_RNA (1)...(19): siRNA sense strand
caugcgagccuguuacuac

SEQ ID NO: 1806319 - RNA, 19 nt, Homo sapiens
  misc_RNA (1)...(19): siRNA sense strand
ugaagcagggcacggagaa

SEQ ID NO: 1806320 - RNA, 19 nt, Homo sapiens
  misc_RNA (1)...(19): siRNA sense strand
gaaucgacacccucaacuc

SEQ ID NO: 1806321 - RNA, 19 nt, Homo sapiens
  misc_RNA (1)...(19): siRNA sense strand
ggaggccgagcgcaaacuu

SEQ ID NO: 1806322 - RNA, 19 nt, Homo sapiens
  misc_RNA (1)...(19): siRNA sense strand
gcagacacggaagagauga

SEQ ID NO: 1806323 - RNA, 19 nt, Homo sapiens
  misc_RNA (1)...(19): siRNA sense strand
gcagguggagaagcucauu

SEQ ID NO: 1806324 - RNA, 19 nt, Homo sapiens
  misc_RNA (1)...(19): siRNA sense strand
cgaacuguacgcacucaug

SEQ ID NO: 1806325 - RNA, 19 nt, Homo sapiens
  misc_RNA (1)...(19): siRNA sense strand
cgcgauaaccuccucauag

SEQ ID NO: 1806326 - RNA, 19 nt, Homo sapiens
  misc_RNA (1)...(19): siRNA sense strand
aaucgacacccucaacuca

SEQ ID NO: 1806327 - RNA, 19 nt, Homo sapiens
  misc_RNA (1)...(19): siRNA sense strand
guguaccacuaccucauca

SEQ ID NO: 1806328 - RNA, 19 nt, Homo sapiens
  misc_RNA (1)...(19): siRNA sense strand
guugacucauccucagaga

SEQ ID NO: 1806329 - RNA, 19 nt, Homo sapiens
  misc_RNA (1)...(19): siRNA sense strand
ugugggaggccuuguccua

SEQ ID NO: 1806330 - RNA, 19 nt, Homo sapiens
  misc_RNA (1)...(19): siRNA sense strand
uggaggagaagaacuuugu

SEQ ID NO: 1806331 - RNA, 19 nt, Homo sapiens
  misc_RNA (1)...(19): siRNA sense strand
gcgaggcgcagaucaugca

SEQ ID NO: 1806332 - RNA, 19 nt, Homo sapiens
  misc_RNA (1)...(19): siRNA sense strand
ggcagacacggaagagaug

SEQ ID NO: 1806333 - RNA, 19 nt, Homo sapiens
  misc_RNA (1)...(19): siRNA sense strand
gaaggcagacacggaagag

SEQ ID NO: 1806334 - RNA, 19 nt, Homo sapiens
  misc_RNA (1)...(19): siRNA sense strand
gaggccgagcgcaaacuuu

SEQ ID NO: 1806335 - RNA, 19 nt, Homo sapiens
  misc_RNA (1)...(19): siRNA sense strand
ccgagggcaccaaguuuga

SEQ ID NO: 1806336 - RNA, 19 nt, Homo sapiens
  misc_RNA (1)...(19): siRNA sense strand
gggaaguggccgcucaagu

SEQ ID NO: 1806337 - RNA, 19 nt, Homo sapiens
  misc_RNA (1)...(19): siRNA sense strand
ugaggaggccgagcgcaaa

SEQ ID NO: 1806338 - RNA, 19 nt, Homo sapiens
  misc_RNA (1)...(19): siRNA sense strand
caagcuagaucaagaagua

SEQ ID NO: 1806339 - RNA, 19 nt, Homo sapiens
  misc_RNA (1)...(19): siRNA sense strand
caaacaagcuagaucaaga

SEQ ID NO: 1806340 - RNA, 19 nt, Homo sapiens
  misc_RNA (1)...(19): siRNA sense strand
gaaguaccaaauacaguua

SEQ ID NO: 1806341 - RNA, 19 nt, Homo sapiens
  misc_RNA (1)...(19): siRNA sense strand
ggauaaugguucauacuuc

SEQ ID NO: 1806342 - RNA, 19 nt, Homo sapiens
  misc_RNA (1)...(19): siRNA sense strand
cccaacaacugguaucuuu

SEQ ID NO: 1806343 - RNA, 19 nt, Homo sapiens
  misc_RNA (1)...(19): siRNA sense strand
gagaggaaguaccaaauac

SEQ ID NO: 1806344 - RNA, 19 nt, Homo sapiens
  misc_RNA (1)...(19): siRNA sense strand
ggaaguaccaaauacaguu

SEQ ID NO: 1806345 - RNA, 19 nt, Homo sapiens
  misc_RNA (1)...(19): siRNA sense strand
gauaaugguucauacuucu

SEQ ID NO: 1806346 - RNA, 19 nt, Homo sapiens
  misc_RNA (1)...(19): siRNA sense strand
ccacagaacccaacaacug

SEQ ID NO: 1806347 - RNA, 19 nt, Homo sapiens
  misc_RNA (1)...(19): siRNA sense strand
ccaaauacaguuacaaauc

SEQ ID NO: 1806348 - RNA, 19 nt, Homo sapiens
  misc_RNA (1)...(19): siRNA sense strand
ggagauggcucagggaaac

SEQ ID NO: 1806349 - RNA, 19 nt, Homo sapiens
  misc_RNA (1)...(19): siRNA sense strand
ggaaggagccauuauaucc

SEQ ID NO: 1806350 - RNA, 19 nt, Homo sapiens
  misc_RNA (1)...(19): siRNA sense strand
ucaccuauguuccacagaa

SEQ ID NO: 1806351 - RNA, 19 nt, Homo sapiens
  misc_RNA (1)...(19): siRNA sense strand
ggagagaggaaguaccaaa

SEQ ID NO: 1806352 - RNA, 19 nt, Homo sapiens
  misc_RNA (1)...(19): siRNA sense strand
gaggagggauaaugguuca

SEQ ID NO: 1806353 - RNA, 19 nt, Homo sapiens
  misc_RNA (1)...(19): siRNA sense strand
ggagggauaaugguucaua

SEQ ID NO: 1806354 - RNA, 19 nt, Homo sapiens
  misc_RNA (1)...(19): siRNA sense strand
uggaggagcugguguuaca

SEQ ID NO: 1806355 - RNA, 19 nt, Homo sapiens
  misc_RNA (1)...(19): siRNA sense strand
ccacaaacaagcuagauca

SEQ ID NO: 1806356 - RNA, 19 nt, Homo sapiens
  misc_RNA (1)...(19): siRNA sense strand
ccucaucccuggcacucua

SEQ ID NO: 1806357 - RNA, 19 nt, Homo sapiens
  misc_RNA (1)...(19): siRNA sense strand
uggaugaggagcugcauua

SEQ ID NO: 1806358 - RNA, 19 nt, Homo sapiens
  misc_RNA (1)...(19): siRNA sense strand
agagaggaaguaccaaaua

SEQ ID NO: 1806359 - RNA, 19 nt, Homo sapiens
  misc_RNA (1)...(19): siRNA sense strand
ggcuauggauccaaauuuc

SEQ ID NO: 1806360 - RNA, 19 nt, Homo sapiens
  misc_RNA (1)...(19): siRNA sense strand
acugaaaccucaagcuguu

SEQ ID NO: 1806361 - RNA, 19 nt, Homo sapiens
  misc_RNA (1)...(19): siRNA sense strand
gggauaaugguucauacuu

SEQ ID NO: 1806362 - RNA, 19 nt, Homo sapiens
  misc_RNA (1)...(19): siRNA sense strand
ggacaccuccaccgaauac

SEQ ID NO: 1806363 - RNA, 19 nt, Homo sapiens
  misc_RNA (1)...(19): siRNA sense strand
gaugaggagcugcauuaug

SEQ ID NO: 1806364 - RNA, 19 nt, Homo sapiens
  misc_RNA (1)...(19): siRNA sense strand
aaccuuaccugcucugugu

SEQ ID NO: 1806365 - RNA, 19 nt, Homo sapiens
  misc_RNA (1)...(19): siRNA sense strand
gagagaggaaguaccaaau

SEQ ID NO: 1806366 - RNA, 19 nt, Homo sapiens
  misc_RNA (1)...(19): siRNA sense strand
aaacaagcuagaucaagaa

SEQ ID NO: 1806367 - RNA, 19 nt, Homo sapiens
  misc_RNA (1)...(19): siRNA sense strand
gaucuucuccugguuguca

SEQ ID NO: 1806368 - RNA, 19 nt, Homo sapiens
  misc_RNA (1)...(19): siRNA sense strand
ccgggaaggagccauuaua

SEQ ID NO: 1806369 - RNA, 19 nt, Homo sapiens
  misc_RNA (1)...(19): siRNA sense strand
caacgucaccuauguucca

SEQ ID NO: 1806370 - RNA, 19 nt, Homo sapiens
  misc_RNA (1)...(19): siRNA sense strand
gagggauaaugguucauac

SEQ ID NO: 1806371 - RNA, 19 nt, Homo sapiens
  misc_RNA (1)...(19): siRNA sense strand
gcccugcacuuucuuccau

SEQ ID NO: 1806372 - RNA, 19 nt, Homo sapiens
  misc_RNA (1)...(19): siRNA sense strand
gggaaggagccauuauauc

SEQ ID NO: 1806373 - RNA, 19 nt, Homo sapiens
  misc_RNA (1)...(19): siRNA sense strand
ugccucaucuucuucauag

SEQ ID NO: 1806374 - RNA, 19 nt, Homo sapiens
  misc_RNA (1)...(19): siRNA sense strand
gcucaacgucaccuauguu

SEQ ID NO: 1806375 - RNA, 19 nt, Homo sapiens
  misc_RNA (1)...(19): siRNA sense strand
aaggacaccuccaccgaau

SEQ ID NO: 1806376 - RNA, 19 nt, Homo sapiens
  misc_RNA (1)...(19): siRNA sense strand
agagaaccauccagcucaa

SEQ ID NO: 1806377 - RNA, 19 nt, Homo sapiens
  misc_RNA (1)...(19): siRNA sense strand
cgggaaggagccauuauau

SEQ ID NO: 1806378 - RNA, 19 nt, Homo sapiens
  misc_RNA (1)...(19): siRNA sense strand
gaggaaguaccaaauacag

SEQ ID NO: 1806379 - RNA, 19 nt, Homo sapiens
  misc_RNA (1)...(19): siRNA sense strand
gaacccaacaacugguauc

SEQ ID NO: 1806380 - RNA, 19 nt, Homo sapiens
  misc_RNA (1)...(19): siRNA sense strand
gggcagauuccgccuccuu

SEQ ID NO: 1806381 - RNA, 19 nt, Homo sapiens
  misc_RNA (1)...(19): siRNA sense strand
cagaacccaacaacuggua

SEQ ID NO: 1806382 - RNA, 19 nt, Homo sapiens
  misc_RNA (1)...(19): siRNA sense strand
augcuucccucaacuuuca

SEQ ID NO: 1806383 - RNA, 19 nt, Homo sapiens
  misc_RNA (1)...(19): siRNA sense strand
uggcuauggauccaaauuu

SEQ ID NO: 1806384 - RNA, 19 nt, Homo sapiens
  misc_RNA (1)...(19): siRNA sense strand
cagcccugcucgcucuuug

SEQ ID NO: 1806385 - RNA, 19 nt, Homo sapiens
  misc_RNA (1)...(19): siRNA sense strand
caagugcaggagucaguga

SEQ ID NO: 1806386 - RNA, 19 nt, Homo sapiens
  misc_RNA (1)...(19): siRNA sense strand
uuacauggccccacugaaa

SEQ ID NO: 1806387 - RNA, 19 nt, Homo sapiens
  misc_RNA (1)...(19): siRNA sense strand
gaagacccacaggaggaaa

SEQ ID NO: 1806388 - RNA, 19 nt, Homo sapiens
  misc_RNA (1)...(19): siRNA sense strand
ugacgguacaggaggguuu

SEQ ID NO: 1806389 - RNA, 19 nt, Homo sapiens
  misc_RNA (1)...(19): siRNA sense strand
ucacuccucggugcucaua

SEQ ID NO: 1806390 - RNA, 19 nt, Homo sapiens
  misc_RNA (1)...(19): siRNA sense strand
ggaugaggagcugcauuau

SEQ ID NO: 1806391 - RNA, 19 nt, Homo sapiens
  misc_RNA (1)...(19): siRNA sense strand
ccagcucucugugcaugug

SEQ ID NO: 1806392 - RNA, 19 nt, Homo sapiens
  misc_RNA (1)...(19): siRNA sense strand
cuacuguggagauggauga

SEQ ID NO: 1806393 - RNA, 19 nt, Homo sapiens
  misc_RNA (1)...(19): siRNA sense strand
caacaacugguaucuuucc

SEQ ID NO: 1806394 - RNA, 19 nt, Homo sapiens
  misc_RNA (1)...(19): siRNA sense strand
ccaggaggagggauaaugg

SEQ ID NO: 1806395 - RNA, 19 nt, Homo sapiens
  misc_RNA (1)...(19): siRNA sense strand
ccucaucuucuucauagug

SEQ ID NO: 1806396 - RNA, 19 nt, Homo sapiens
  misc_RNA (1)...(19): siRNA sense strand
gccaggaggagggauaaug

SEQ ID NO: 1806397 - RNA, 19 nt, Homo sapiens
  misc_RNA (1)...(19): siRNA sense strand
cucaucuucuucauaguga

SEQ ID NO: 1806398 - RNA, 19 nt, Homo sapiens
  misc_RNA (1)...(19): siRNA sense strand
cagcucaacgucaccuaug

SEQ ID NO: 1806399 - RNA, 19 nt, Homo sapiens
  misc_RNA (1)...(19): siRNA sense strand
gaaccauccagcucaacgu

SEQ ID NO: 1806400 - RNA, 19 nt, Homo sapiens
  misc_RNA (1)...(19): siRNA sense strand
gaacagaaauuuccagcaa

SEQ ID NO: 1806401 - RNA, 19 nt, Homo sapiens
  misc_RNA (1)...(19): siRNA sense strand
gcaccaaucugaccugaaa

SEQ ID NO: 1806402 - RNA, 19 nt, Homo sapiens
  misc_RNA (1)...(19): siRNA sense strand
gcaaugaggccacaacaaa

SEQ ID NO: 1806403 - RNA, 19 nt, Homo sapiens
  misc_RNA (1)...(19): siRNA sense strand
gcacuagccuugcaacauc

SEQ ID NO: 1806404 - RNA, 19 nt, Homo sapiens
  misc_RNA (1)...(19): siRNA sense strand
caacaaacaucacagaaac

SEQ ID NO: 1806405 - RNA, 19 nt, Homo sapiens
  misc_RNA (1)...(19): siRNA sense strand
gggcaucacuggcuauuuc

SEQ ID NO: 1806406 - RNA, 19 nt, Homo sapiens
  misc_RNA (1)...(19): siRNA sense strand
caccagagcuauucccaaa

SEQ ID NO: 1806407 - RNA, 19 nt, Homo sapiens
  misc_RNA (1)...(19): siRNA sense strand
caucaaggcagaaaucaaa

SEQ ID NO: 1806408 - RNA, 19 nt, Homo sapiens
  misc_RNA (1)...(19): siRNA sense strand
gcgcuuugcuugcugaguu

SEQ ID NO: 1806409 - RNA, 19 nt, Homo sapiens
  misc_RNA (1)...(19): siRNA sense strand
ccagcaaacuccaacuuau

SEQ ID NO: 1806410 - RNA, 19 nt, Homo sapiens
  misc_RNA (1)...(19): siRNA sense strand
uaaccucaguuuauggaaa

SEQ ID NO: 1806411 - RNA, 19 nt, Homo sapiens
  misc_RNA (1)...(19): siRNA sense strand
gaaacgacagucaaauuca

SEQ ID NO: 1806412 - RNA, 19 nt, Homo sapiens
  misc_RNA (1)...(19): siRNA sense strand
ccacuaaacccuauacauc

SEQ ID NO: 1806413 - RNA, 19 nt, Homo sapiens
  misc_RNA (1)...(19): siRNA sense strand
gugcggaguuuaagaagga

SEQ ID NO: 1806414 - RNA, 19 nt, Homo sapiens
  misc_RNA (1)...(19): siRNA sense strand
cagaaacgacagucaaauu

SEQ ID NO: 1806415 - RNA, 19 nt, Homo sapiens
  misc_RNA (1)...(19): siRNA sense strand
aaauguauccuaccaagaa

SEQ ID NO: 1806416 - RNA, 19 nt, Homo sapiens
  misc_RNA (1)...(19): siRNA sense strand
caucagagaagugaaauug

SEQ ID NO: 1806417 - RNA, 19 nt, Homo sapiens
  misc_RNA (1)...(19): siRNA sense strand
aggcagaaaucaaauguuc

SEQ ID NO: 1806418 - RNA, 19 nt, Homo sapiens
  misc_RNA (1)...(19): siRNA sense strand
ucaugagucuugacaacaa

SEQ ID NO: 1806419 - RNA, 19 nt, Homo sapiens
  misc_RNA (1)...(19): siRNA sense strand
gacaacaacgguacugcua

SEQ ID NO: 1806420 - RNA, 19 nt, Homo sapiens
  misc_RNA (1)...(19): siRNA sense strand
acagucaaauucacaucua

SEQ ID NO: 1806421 - RNA, 19 nt, Homo sapiens
  misc_RNA (1)...(19): siRNA sense strand
caagaaacuacaacaccua

SEQ ID NO: 1806422 - RNA, 19 nt, Homo sapiens
  misc_RNA (1)...(19): siRNA sense strand
caacagaacagaaauuucc

SEQ ID NO: 1806423 - RNA, 19 nt, Homo sapiens
  misc_RNA (1)...(19): siRNA sense strand
gaaacacaaacucuucugu

SEQ ID NO: 1806424 - RNA, 19 nt, Homo sapiens
  misc_RNA (1)...(19): siRNA sense strand
ccuaguacccuuggaagua

SEQ ID NO: 1806425 - RNA, 19 nt, Homo sapiens
  misc_RNA (1)...(19): siRNA sense strand
gcuauuuccugaugaaucg

SEQ ID NO: 1806426 - RNA, 19 nt, Homo sapiens
  misc_RNA (1)...(19): siRNA sense strand
gccaacagaacagaaauuu

SEQ ID NO: 1806427 - RNA, 19 nt, Homo sapiens
  misc_RNA (1)...(19): siRNA sense strand
ugcaacaucucccacuaaa

SEQ ID NO: 1806428 - RNA, 19 nt, Homo sapiens
  misc_RNA (1)...(19): siRNA sense strand
acaacaaacaucacagaaa

SEQ ID NO: 1806429 - RNA, 19 nt, Homo sapiens
  misc_RNA (1)...(19): siRNA sense strand
caaacuccaacuuaugaaa

SEQ ID NO: 1806430 - RNA, 19 nt, Homo sapiens
  misc_RNA (1)...(19): siRNA sense strand
aaacucuucuguccaguca

SEQ ID NO: 1806431 - RNA, 19 nt, Homo sapiens
  misc_RNA (1)...(19): siRNA sense strand
acaucuaccucugugauaa

SEQ ID NO: 1806432 - RNA, 19 nt, Homo sapiens
  misc_RNA (1)...(19): siRNA sense strand
ucagagaagugaaauugac

SEQ ID NO: 1806433 - RNA, 19 nt, Homo sapiens
  misc_RNA (1)...(19): siRNA sense strand
ccacaacaaacaucacaga

SEQ ID NO: 1806434 - RNA, 19 nt, Homo sapiens
  misc_RNA (1)...(19): siRNA sense strand
ccugucaccuggaaauguu

SEQ ID NO: 1806435 - RNA, 19 nt, Homo sapiens
  misc_RNA (1)...(19): siRNA sense strand
caaauguucaggcaucaga

SEQ ID NO: 1806436 - RNA, 19 nt, Homo sapiens
  misc_RNA (1)...(19): siRNA sense strand
gcaagccaccagagcuauu

SEQ ID NO: 1806437 - RNA, 19 nt, Homo sapiens
  misc_RNA (1)...(19): siRNA sense strand
ucacagaaacgacagucaa

SEQ ID NO: 1806438 - RNA, 19 nt, Homo sapiens
  misc_RNA (1)...(19): siRNA sense strand
cagcaaacuccaacuuaug

SEQ ID NO: 1806439 - RNA, 19 nt, Homo sapiens
  misc_RNA (1)...(19): siRNA sense strand
caacaucucccacuaaacc

SEQ ID NO: 1806440 - RNA, 19 nt, Homo sapiens
  misc_RNA (1)...(19): siRNA sense strand
ucagaccuuucaaccacua

SEQ ID NO: 1806441 - RNA, 19 nt, Homo sapiens
  misc_RNA (1)...(19): siRNA sense strand
agaaacgacagucaaauuc

SEQ ID NO: 1806442 - RNA, 19 nt, Homo sapiens
  misc_RNA (1)...(19): siRNA sense strand
gcaaacuccaacuuaugaa

SEQ ID NO: 1806443 - RNA, 19 nt, Homo sapiens
  misc_RNA (1)...(19): siRNA sense strand
gcagaaaucaaauguucag

SEQ ID NO: 1806444 - RNA, 19 nt, Homo sapiens
  misc_RNA (1)...(19): siRNA sense strand
caaggcagaaaucaaaugu

SEQ ID NO: 1806445 - RNA, 19 nt, Homo sapiens
  misc_RNA (1)...(19): siRNA sense strand
guucaugagucuugacaac

SEQ ID NO: 1806446 - RNA, 19 nt, Homo sapiens
  misc_RNA (1)...(19): siRNA sense strand
uauccuaagugacaucaag

SEQ ID NO: 1806447 - RNA, 19 nt, Homo sapiens
  misc_RNA (1)...(19): siRNA sense strand
aacagaaauuuccagcaaa

SEQ ID NO: 1806448 - RNA, 19 nt, Homo sapiens
  misc_RNA (1)...(19): siRNA sense strand
guaaucagcacaguguuca

SEQ ID NO: 1806449 - RNA, 19 nt, Homo sapiens
  misc_RNA (1)...(19): siRNA sense strand
acagaaauuuccagcaaac

SEQ ID NO: 1806450 - RNA, 19 nt, Homo sapiens
  misc_RNA (1)...(19): siRNA sense strand
ggucuuggccaacagaaca

SEQ ID NO: 1806451 - RNA, 19 nt, Homo sapiens
  misc_RNA (1)...(19): siRNA sense strand
gcugugcggaguuuaagaa

SEQ ID NO: 1806452 - RNA, 19 nt, Homo sapiens
  misc_RNA (1)...(19): siRNA sense strand
gagaagugaaauugacuca

SEQ ID NO: 1806453 - RNA, 19 nt, Homo sapiens
  misc_RNA (1)...(19): siRNA sense strand
cacuaaacccuauacauca

SEQ ID NO: 1806454 - RNA, 19 nt, Homo sapiens
  misc_RNA (1)...(19): siRNA sense strand
uacaucaucuucuccuauc

SEQ ID NO: 1806455 - RNA, 19 nt, Homo sapiens
  misc_RNA (1)...(19): siRNA sense strand
ggaccgcgcuuugcuugcu

SEQ ID NO: 1806456 - RNA, 19 nt, Homo sapiens
  misc_RNA (1)...(19): siRNA sense strand
ugacaucaaggcagaaauc

SEQ ID NO: 1806457 - RNA, 19 nt, Homo sapiens
  misc_RNA (1)...(19): siRNA sense strand
caaauguauccuaccaaga

SEQ ID NO: 1806458 - RNA, 19 nt, Homo sapiens
  misc_RNA (1)...(19): siRNA sense strand
cacagaaacgacagucaaa

SEQ ID NO: 1806459 - RNA, 19 nt, Homo sapiens
  misc_RNA (1)...(19): siRNA sense strand
aauguauccuaccaagaaa

SEQ ID NO: 1806460 - RNA, 19 nt, Homo sapiens
  misc_RNA (1)...(19): siRNA sense strand
uauacaucaucuucuccua

SEQ ID NO: 1806461 - RNA, 19 nt, Homo sapiens
  misc_RNA (1)...(19): siRNA sense strand
ggaaacacaaacucuucug

SEQ ID NO: 1806462 - RNA, 19 nt, Homo sapiens
  misc_RNA (1)...(19): siRNA sense strand
ccagcugugcggaguuuaa

SEQ ID NO: 1806463 - RNA, 19 nt, Homo sapiens
  misc_RNA (1)...(19): siRNA sense strand
uccagcaaacuccaacuua

SEQ ID NO: 1806464 - RNA, 19 nt, Homo sapiens
  misc_RNA (1)...(19): siRNA sense strand
cuucuccuauccuaaguga

SEQ ID NO: 1806465 - RNA, 19 nt, Homo sapiens
  misc_RNA (1)...(19): siRNA sense strand
ggccaacagaacagaaauu

SEQ ID NO: 1806466 - RNA, 19 nt, Homo sapiens
  misc_RNA (1)...(19): siRNA sense strand
gcaucugccuggagcaaaa

SEQ ID NO: 1806467 - RNA, 19 nt, Homo sapiens
  misc_RNA (1)...(19): siRNA sense strand
aaacgacagucaaauucac

SEQ ID NO: 1806468 - RNA, 19 nt, Homo sapiens
  misc_RNA (1)...(19): siRNA sense strand
guucaggcaucagagaagu

SEQ ID NO: 1806469 - RNA, 19 nt, Homo sapiens
  misc_RNA (1)...(19): siRNA sense strand
acuaaacccuauacaucau

SEQ ID NO: 1806470 - RNA, 19 nt, Homo sapiens
  misc_RNA (1)...(19): siRNA sense strand
agcaaacuccaacuuauga

SEQ ID NO: 1806471 - RNA, 19 nt, Homo sapiens
  misc_RNA (1)...(19): siRNA sense strand
ucugugauaaccucaguuu

SEQ ID NO: 1806472 - RNA, 19 nt, Homo sapiens
  misc_RNA (1)...(19): siRNA sense strand
agauuucacugagcaagau

SEQ ID NO: 1806473 - RNA, 19 nt, Homo sapiens
  misc_RNA (1)...(19): siRNA sense strand
caucuucuccuauccuaag

SEQ ID NO: 1806474 - RNA, 19 nt, Homo sapiens
  misc_RNA (1)...(19): siRNA sense strand
uaaacccuauacaucaucu

SEQ ID NO: 1806475 - RNA, 19 nt, Homo sapiens
  misc_RNA (1)...(19): siRNA sense strand
cuugaagccuagccuguca

SEQ ID NO: 1806476 - RNA, 19 nt, Homo sapiens
  misc_RNA (1)...(19): siRNA sense strand
cguuucaacuccagagaca

SEQ ID NO: 1806477 - RNA, 19 nt, Homo sapiens
  misc_RNA (1)...(19): siRNA sense strand
cacccugugucucaacaug

SEQ ID NO: 1806478 - RNA, 19 nt, Homo sapiens
  misc_RNA (1)...(19): siRNA sense strand
gcaucagagaagugaaauu

SEQ ID NO: 1806479 - RNA, 19 nt, Homo sapiens
  misc_RNA (1)...(19): siRNA sense strand
ucaaggcagaaaucaaaug

SEQ ID NO: 1806480 - RNA, 19 nt, Homo sapiens
  misc_RNA (1)...(19): siRNA sense strand
cuugcaacaucucccacua

SEQ ID NO: 1806481 - RNA, 19 nt, Homo sapiens
  misc_RNA (1)...(19): siRNA sense strand
ccuagccugucaccuggaa

SEQ ID NO: 1806482 - RNA, 19 nt, Homo sapiens
  misc_RNA (1)...(19): siRNA sense strand
cacaacaaacaucacagaa

SEQ ID NO: 1806483 - RNA, 19 nt, Homo sapiens
  misc_RNA (1)...(19): siRNA sense strand
ccagagcuauucccaaaag

SEQ ID NO: 1806484 - RNA, 19 nt, Homo sapiens
  misc_RNA (1)...(19): siRNA sense strand
ccaacagaacagaaauuuc

SEQ ID NO: 1806485 - RNA, 19 nt, Homo sapiens
  misc_RNA (1)...(19): siRNA sense strand
ggcaaugaggccacaacaa

SEQ ID NO: 1806486 - RNA, 19 nt, Homo sapiens
  misc_RNA (1)...(19): siRNA sense strand
acaaacaucacagaaacga

SEQ ID NO: 1806487 - RNA, 19 nt, Homo sapiens
  misc_RNA (1)...(19): siRNA sense strand
caaugaggccacaacaaac

SEQ ID NO: 1806488 - RNA, 19 nt, Homo sapiens
  misc_RNA (1)...(19): siRNA sense strand
gcacgaagaccaugcauau

SEQ ID NO: 1806489 - RNA, 19 nt, Homo sapiens
  misc_RNA (1)...(19): siRNA sense strand
gggaaacugugguugcuuu

SEQ ID NO: 1806490 - RNA, 19 nt, Homo sapiens
  misc_RNA (1)...(19): siRNA sense strand
cuacaaacagcucuaauaa

SEQ ID NO: 1806491 - RNA, 19 nt, Homo sapiens
  misc_RNA (1)...(19): siRNA sense strand
ugagguggcugcagaaauc

SEQ ID NO: 1806492 - RNA, 19 nt, Homo sapiens
  misc_RNA (1)...(19): siRNA sense strand
gcucuagcuucccgacuuu

SEQ ID NO: 1806493 - RNA, 19 nt, Homo sapiens
  misc_RNA (1)...(19): siRNA sense strand
ugacagcucuggugcucuu

SEQ ID NO: 1806494 - RNA, 19 nt, Homo sapiens
  misc_RNA (1)...(19): siRNA sense strand
ccugugcacuuuaccauau

SEQ ID NO: 1806495 - RNA, 19 nt, Homo sapiens
  misc_RNA (1)...(19): siRNA sense strand
gcaguaccugugcacuuua

SEQ ID NO: 1806496 - RNA, 19 nt, Homo sapiens
  misc_RNA (1)...(19): siRNA sense strand
aaacagcucuaauaauucc

SEQ ID NO: 1806497 - RNA, 19 nt, Homo sapiens
  misc_RNA (1)...(19): siRNA sense strand
ggagacgaguggcauaucg

SEQ ID NO: 1806498 - RNA, 19 nt, Homo sapiens
  misc_RNA (1)...(19): siRNA sense strand
gagcuuggucuccuuacaa

SEQ ID NO: 1806499 - RNA, 19 nt, Homo sapiens
  misc_RNA (1)...(19): siRNA sense strand
caaacagcucuaauaauuc

SEQ ID NO: 1806500 - RNA, 19 nt, Homo sapiens
  misc_RNA (1)...(19): siRNA sense strand
acuacaaacagcucuaaua

SEQ ID NO: 1806501 - RNA, 19 nt, Homo sapiens
  misc_RNA (1)...(19): siRNA sense strand
gaacgcagggcagcugaga

SEQ ID NO: 1806502 - RNA, 19 nt, Homo sapiens
  misc_RNA (1)...(19): siRNA sense strand
gccccuaacuggucuaauu

SEQ ID NO: 1806503 - RNA, 19 nt, Homo sapiens
  misc_RNA (1)...(19): siRNA sense strand
gcagggcagcugagaagga

SEQ ID NO: 1806504 - RNA, 19 nt, Homo sapiens
  misc_RNA (1)...(19): siRNA sense strand
ccucgccgcagucccauua

SEQ ID NO: 1806505 - RNA, 19 nt, Homo sapiens
  misc_RNA (1)...(19): siRNA sense strand
gcucaucucagacucauac

SEQ ID NO: 1806506 - RNA, 19 nt, Homo sapiens
  misc_RNA (1)...(19): siRNA sense strand
cccacucgcucaucucaga

SEQ ID NO: 1806507 - RNA, 19 nt, Homo sapiens
  misc_RNA (1)...(19): siRNA sense strand
cagggacaaugggauuauu

SEQ ID NO: 1806508 - RNA, 19 nt, Homo sapiens
  misc_RNA (1)...(19): siRNA sense strand
ccaggcagcgacuuuaugu

SEQ ID NO: 1806509 - RNA, 19 nt, Homo sapiens
  misc_RNA (1)...(19): siRNA sense strand
aaacugugguugcuuuuga

SEQ ID NO: 1806510 - RNA, 19 nt, Homo sapiens
  misc_RNA (1)...(19): siRNA sense strand
cugggcagcugcucuuugu

SEQ ID NO: 1806511 - RNA, 19 nt, Homo sapiens
  misc_RNA (1)...(19): siRNA sense strand
gccaggagccccacuguaa

SEQ ID NO: 1806512 - RNA, 19 nt, Homo sapiens
  misc_RNA (1)...(19): siRNA sense strand
gggacaaugggauuauuuc

SEQ ID NO: 1806513 - RNA, 19 nt, Homo sapiens
  misc_RNA (1)...(19): siRNA sense strand
ucacuacaaacagcucuaa

SEQ ID NO: 1806514 - RNA, 19 nt, Homo sapiens
  misc_RNA (1)...(19): siRNA sense strand
guggccgucuucagaguau

SEQ ID NO: 1806515 - RNA, 19 nt, Homo sapiens
  misc_RNA (1)...(19): siRNA sense strand
auccaugcgucacuacaaa

SEQ ID NO: 1806516 - RNA, 19 nt, Homo sapiens
  misc_RNA (1)...(19): siRNA sense strand
gcucugggcagcugcucuu

SEQ ID NO: 1806517 - RNA, 19 nt, Homo sapiens
  misc_RNA (1)...(19): siRNA sense strand
cuacagaccugacaaguuu

SEQ ID NO: 1806518 - RNA, 19 nt, Homo sapiens
  misc_RNA (1)...(19): siRNA sense strand
gagcuggaaucgauuauaa

SEQ ID NO: 1806519 - RNA, 19 nt, Homo sapiens
  misc_RNA (1)...(19): siRNA sense strand
aaacauccuugcaacauua

SEQ ID NO: 1806520 - RNA, 19 nt, Homo sapiens
  misc_RNA (1)...(19): siRNA sense strand
gaagagaagauuccagaga

SEQ ID NO: 1806521 - RNA, 19 nt, Homo sapiens
  misc_RNA (1)...(19): siRNA sense strand
ggugauacaugguggaaga

SEQ ID NO: 1806522 - RNA, 19 nt, Homo sapiens
  misc_RNA (1)...(19): siRNA sense strand
ggaaguccauaauuugcaa

SEQ ID NO: 1806523 - RNA, 19 nt, Homo sapiens
  misc_RNA (1)...(19): siRNA sense strand
uaaaagagcuggaaucgau

SEQ ID NO: 1806524 - RNA, 19 nt, Homo sapiens
  misc_RNA (1)...(19): siRNA sense strand
caacauuacugaagaagac

SEQ ID NO: 1806525 - RNA, 19 nt, Homo sapiens
  misc_RNA (1)...(19): siRNA sense strand
uaaaagaucuggcccauca

SEQ ID NO: 1806526 - RNA, 19 nt, Homo sapiens
  misc_RNA (1)...(19): siRNA sense strand
ggauucaucuugcacaucu

SEQ ID NO: 1806527 - RNA, 19 nt, Homo sapiens
  misc_RNA (1)...(19): siRNA sense strand
agaaaggacugcagcaaca

SEQ ID NO: 1806528 - RNA, 19 nt, Homo sapiens
  misc_RNA (1)...(19): siRNA sense strand
gauacaugguggaagagaa

SEQ ID NO: 1806529 - RNA, 19 nt, Homo sapiens
  misc_RNA (1)...(19): siRNA sense strand
ggaaucgauuauaagcaaa

SEQ ID NO: 1806530 - RNA, 19 nt, Homo sapiens
  misc_RNA (1)...(19): siRNA sense strand
uuucaagggugcauuuauu

SEQ ID NO: 1806531 - RNA, 19 nt, Homo sapiens
  misc_RNA (1)...(19): siRNA sense strand
ugacaaguuucuucagugu

SEQ ID NO: 1806532 - RNA, 19 nt, Homo sapiens
  misc_RNA (1)...(19): siRNA sense strand
uggaaucgauuauaagcaa

SEQ ID NO: 1806533 - RNA, 19 nt, Homo sapiens
  misc_RNA (1)...(19): siRNA sense strand
uaggcuaccuugcugauga

SEQ ID NO: 1806534 - RNA, 19 nt, Homo sapiens
  misc_RNA (1)...(19): siRNA sense strand
cauguagacugccaaagug

SEQ ID NO: 1806535 - RNA, 19 nt, Homo sapiens
  misc_RNA (1)...(19): siRNA sense strand
caauggaucccgcaguaaa

SEQ ID NO: 1806536 - RNA, 19 nt, Homo sapiens
  misc_RNA (1)...(19): siRNA sense strand
gccaggaucccaccauaaa

SEQ ID NO: 1806537 - RNA, 19 nt, Homo sapiens
  misc_RNA (1)...(19): siRNA sense strand
caaaguguaugggaugcuu

SEQ ID NO: 1806538 - RNA, 19 nt, Homo sapiens
  misc_RNA (1)...(19): siRNA sense strand
cagagaagguucagacacu

SEQ ID NO: 1806539 - RNA, 19 nt, Homo sapiens
  misc_RNA (1)...(19): siRNA sense strand
gcaguaaaaucuuugacaa

SEQ ID NO: 1806540 - RNA, 19 nt, Homo sapiens
  misc_RNA (1)...(19): siRNA sense strand
acaaguuucuucagugugu

SEQ ID NO: 1806541 - RNA, 19 nt, Homo sapiens
  misc_RNA (1)...(19): siRNA sense strand
aaagagcuggaaucgauua

SEQ ID NO: 1806542 - RNA, 19 nt, Homo sapiens
  misc_RNA (1)...(19): siRNA sense strand
agaagauuccagagacuua

SEQ ID NO: 1806543 - RNA, 19 nt, Homo sapiens
  misc_RNA (1)...(19): siRNA sense strand
cucaauggaucccgcagua

SEQ ID NO: 1806544 - RNA, 19 nt, Homo sapiens
  misc_RNA (1)...(19): siRNA sense strand
caacccuguuucaguauuc

SEQ ID NO: 1806545 - RNA, 19 nt, Homo sapiens
  misc_RNA (1)...(19): siRNA sense strand
caauuuuccugcaagaaua

SEQ ID NO: 1806546 - RNA, 19 nt, Homo sapiens
  misc_RNA (1)...(19): siRNA sense strand
caagggugcauuuauuuca

SEQ ID NO: 1806547 - RNA, 19 nt, Homo sapiens
  misc_RNA (1)...(19): siRNA sense strand
gacuaucagccacuaauga

SEQ ID NO: 1806548 - RNA, 19 nt, Homo sapiens
  misc_RNA (1)...(19): siRNA sense strand
gaaaggacugcagcaacaa

SEQ ID NO: 1806549 - RNA, 19 nt, Homo sapiens
  misc_RNA (1)...(19): siRNA sense strand
ggagaaaggacugcagcaa

SEQ ID NO: 1806550 - RNA, 19 nt, Homo sapiens
  misc_RNA (1)...(19): siRNA sense strand
guggugaauucaacacuuc

SEQ ID NO: 1806551 - RNA, 19 nt, Homo sapiens
  misc_RNA (1)...(19): siRNA sense strand
gaagauuccagagacuuau

SEQ ID NO: 1806552 - RNA, 19 nt, Homo sapiens
  misc_RNA (1)...(19): siRNA sense strand
gcaacauuacugaagaaga

SEQ ID NO: 1806553 - RNA, 19 nt, Homo sapiens
  misc_RNA (1)...(19): siRNA sense strand
agaagacuaucagccacua

SEQ ID NO: 1806554 - RNA, 19 nt, Homo sapiens
  misc_RNA (1)...(19): siRNA sense strand
agagaagguucagacacua

SEQ ID NO: 1806555 - RNA, 19 nt, Homo sapiens
  misc_RNA (1)...(19): siRNA sense strand
gaagacuaucagccacuaa

SEQ ID NO: 1806556 - RNA, 19 nt, Homo sapiens
  misc_RNA (1)...(19): siRNA sense strand
guagacugccaaaguguau

SEQ ID NO: 1806557 - RNA, 19 nt, Homo sapiens
  misc_RNA (1)...(19): siRNA sense strand
gaggauucaucuugcacau

SEQ ID NO: 1806558 - RNA, 19 nt, Homo sapiens
  misc_RNA (1)...(19): siRNA sense strand
cgucaaguacacugaaauu

SEQ ID NO: 1806559 - RNA, 19 nt, Homo sapiens
  misc_RNA (1)...(19): siRNA sense strand
ccugugaugugguccaugu

SEQ ID NO: 1806560 - RNA, 19 nt, Homo sapiens
  misc_RNA (1)...(19): siRNA sense strand
uguaugggaugcuuucaag

SEQ ID NO: 1806561 - RNA, 19 nt, Homo sapiens
  misc_RNA (1)...(19): siRNA sense strand
gagaagauuccagagacuu

SEQ ID NO: 1806562 - RNA, 19 nt, Homo sapiens
  misc_RNA (1)...(19): siRNA sense strand
gaucuggcccaucaguuca

SEQ ID NO: 1806563 - RNA, 19 nt, Homo sapiens
  misc_RNA (1)...(19): siRNA sense strand
cugcaagaauaucuacaga

SEQ ID NO: 1806564 - RNA, 19 nt, Homo sapiens
  misc_RNA (1)...(19): siRNA sense strand
ugaauucaacacuuccaaa

SEQ ID NO: 1806565 - RNA, 19 nt, Homo sapiens
  misc_RNA (1)...(19): siRNA sense strand
gaauucaacacuuccaaaa

SEQ ID NO: 1806566 - RNA, 19 nt, Homo sapiens
  misc_RNA (1)...(19): siRNA sense strand
acaacccuguuucaguauu

SEQ ID NO: 1806567 - RNA, 19 nt, Homo sapiens
  misc_RNA (1)...(19): siRNA sense strand
gaccugacaaguuucuuca

SEQ ID NO: 1806568 - RNA, 19 nt, Homo sapiens
  misc_RNA (1)...(19): siRNA sense strand
gagaagguucagacacuag

SEQ ID NO: 1806569 - RNA, 19 nt, Homo sapiens
  misc_RNA (1)...(19): siRNA sense strand
aagggugcauuuauuucaa

SEQ ID NO: 1806570 - RNA, 19 nt, Homo sapiens
  misc_RNA (1)...(19): siRNA sense strand
cuugcaacauuacugaaga

SEQ ID NO: 1806571 - RNA, 19 nt, Homo sapiens
  misc_RNA (1)...(19): siRNA sense strand
cuagaggccugggugauac

SEQ ID NO: 1806572 - RNA, 19 nt, Homo sapiens
  misc_RNA (1)...(19): siRNA sense strand
acuagaggccugggugaua

SEQ ID NO: 1806573 - RNA, 19 nt, Homo sapiens
  misc_RNA (1)...(19): siRNA sense strand
aaaacauccuugcaacauu

SEQ ID NO: 1806574 - RNA, 19 nt, Homo sapiens
  misc_RNA (1)...(19): siRNA sense strand
ucaagggugcauuuauuuc

SEQ ID NO: 1806575 - RNA, 19 nt, Homo sapiens
  misc_RNA (1)...(19): siRNA sense strand
gcugaugaccucacauggu

SEQ ID NO: 1806576 - RNA, 19 nt, Homo sapiens
  misc_RNA (1)...(19): siRNA sense strand
uugcaacauuacugaagaa

SEQ ID NO: 1806577 - RNA, 19 nt, Homo sapiens
  misc_RNA (1)...(19): siRNA sense strand
uuacugaagaagacuauca

SEQ ID NO: 1806578 - RNA, 19 nt, Homo sapiens
  misc_RNA (1)...(19): siRNA sense strand
acauguagacugccaaagu

SEQ ID NO: 1806579 - RNA, 19 nt, Homo sapiens
  misc_RNA (1)...(19): siRNA sense strand
agggugcauuuauuucaaa

SEQ ID NO: 1806580 - RNA, 19 nt, Homo sapiens
  misc_RNA (1)...(19): siRNA sense strand
uaucagccacuaaugaagu

SEQ ID NO: 1806581 - RNA, 19 nt, Homo sapiens
  misc_RNA (1)...(19): siRNA sense strand
acuaucagccacuaaugaa

SEQ ID NO: 1806582 - RNA, 19 nt, Homo sapiens
  misc_RNA (1)...(19): siRNA sense strand
ucuacagaccugacaaguu

SEQ ID NO: 1806583 - RNA, 19 nt, Homo sapiens
  misc_RNA (1)...(19): siRNA sense strand
caugugaugcucaauggau

SEQ ID NO: 1806584 - RNA, 19 nt, Homo sapiens
  misc_RNA (1)...(19): siRNA sense strand
gugaugugguccaugugau

SEQ ID NO: 1806585 - RNA, 19 nt, Homo sapiens
  misc_RNA (1)...(19): siRNA sense strand
uguggugaauucaacacuu

SEQ ID NO: 1806586 - RNA, 19 nt, Homo sapiens
  misc_RNA (1)...(19): siRNA sense strand
gagaugagacauguagacu

SEQ ID NO: 1806587 - RNA, 19 nt, Homo sapiens
  misc_RNA (1)...(19): siRNA sense strand
augccaggaucccaccaua

SEQ ID NO: 1806588 - RNA, 19 nt, Homo sapiens
  misc_RNA (1)...(19): siRNA sense strand
ucaauggaucccgcaguaa

SEQ ID NO: 1806589 - RNA, 19 nt, Homo sapiens
  misc_RNA (1)...(19): siRNA sense strand
gcuuucaagggugcauuua

SEQ ID NO: 1806590 - RNA, 19 nt, Homo sapiens
  misc_RNA (1)...(19): siRNA sense strand
cauaauuugcaaccagaga

SEQ ID NO: 1806591 - RNA, 19 nt, Homo sapiens
  misc_RNA (1)...(19): siRNA sense strand
gaagagauauuuacaccuu

SEQ ID NO: 1806592 - RNA, 19 nt, Homo sapiens
  misc_RNA (1)...(19): siRNA sense strand
uaucuuagcucuagcacaa

SEQ ID NO: 1806593 - RNA, 19 nt, Homo sapiens
  misc_RNA (1)...(19): siRNA sense strand
gcauggcccucuucugauu

SEQ ID NO: 1806594 - RNA, 19 nt, Homo sapiens
  misc_RNA (1)...(19): siRNA sense strand
uaacagaauuaaccagaga

SEQ ID NO: 1806595 - RNA, 19 nt, Homo sapiens
  misc_RNA (1)...(19): siRNA sense strand
aaauauagauccgguggua

SEQ ID NO: 1806596 - RNA, 19 nt, Homo sapiens
  misc_RNA (1)...(19): siRNA sense strand
gucauuccaugcuuuguua

SEQ ID NO: 1806597 - RNA, 19 nt, Homo sapiens
  misc_RNA (1)...(19): siRNA sense strand
acaauuacuuggacuaguu

SEQ ID NO: 1806598 - RNA, 19 nt, Homo sapiens
  misc_RNA (1)...(19): siRNA sense strand
uaagagugaugcugucuca

SEQ ID NO: 1806599 - RNA, 19 nt, Homo sapiens
  misc_RNA (1)...(19): siRNA sense strand
ugauggagcucuaaacaag

SEQ ID NO: 1806600 - RNA, 19 nt, Homo sapiens
  misc_RNA (1)...(19): siRNA sense strand
ggccuugguuuaauuguga

SEQ ID NO: 1806601 - RNA, 19 nt, Homo sapiens
  misc_RNA (1)...(19): siRNA sense strand
gaagauggauaagagugau

SEQ ID NO: 1806602 - RNA, 19 nt, Homo sapiens
  misc_RNA (1)...(19): siRNA sense strand
ugaagucucacaauuacua

SEQ ID NO: 1806603 - RNA, 19 nt, Homo sapiens
  misc_RNA (1)...(19): siRNA sense strand
gcuaaaauaucguguuguu

SEQ ID NO: 1806604 - RNA, 19 nt, Homo sapiens
  misc_RNA (1)...(19): siRNA sense strand
guacagcgauuggauuaac

SEQ ID NO: 1806605 - RNA, 19 nt, Homo sapiens
  misc_RNA (1)...(19): siRNA sense strand
gaauucacguuuuguaaug

SEQ ID NO: 1806606 - RNA, 19 nt, Homo sapiens
  misc_RNA (1)...(19): siRNA sense strand
gggacaguuugguauuaaa

SEQ ID NO: 1806607 - RNA, 19 nt, Homo sapiens
  misc_RNA (1)...(19): siRNA sense strand
uuacuucacuacuaugugu

SEQ ID NO: 1806608 - RNA, 19 nt, Homo sapiens
  misc_RNA (1)...(19): siRNA sense strand
ugaaauuuguggcuuccaa

SEQ ID NO: 1806609 - RNA, 19 nt, Homo sapiens
  misc_RNA (1)...(19): siRNA sense strand
gagcuaaaauaucguguug

SEQ ID NO: 1806610 - RNA, 19 nt, Homo sapiens
  misc_RNA (1)...(19): siRNA sense strand
guggaaauuuaaaggaaga

SEQ ID NO: 1806611 - RNA, 19 nt, Homo sapiens
  misc_RNA (1)...(19): siRNA sense strand
gcuacuggccuugguuuaa

SEQ ID NO: 1806612 - RNA, 19 nt, Homo sapiens
  misc_RNA (1)...(19): siRNA sense strand
gaagucucacaauuacuaa

SEQ ID NO: 1806613 - RNA, 19 nt, Homo sapiens
  misc_RNA (1)...(19): siRNA sense strand
agagauauuuacaccuuug

SEQ ID NO: 1806614 - RNA, 19 nt, Homo sapiens
  misc_RNA (1)...(19): siRNA sense strand
acaggaaacuacacuugug

SEQ ID NO: 1806615 - RNA, 19 nt, Homo sapiens
  misc_RNA (1)...(19): siRNA sense strand
uaguacagcgauuggauua

SEQ ID NO: 1806616 - RNA, 19 nt, Homo sapiens
  misc_RNA (1)...(19): siRNA sense strand
gauauuuacaccuuugaug

SEQ ID NO: 1806617 - RNA, 19 nt, Homo sapiens
  misc_RNA (1)...(19): siRNA sense strand
cuacuggccuugguuuaau

SEQ ID NO: 1806618 - RNA, 19 nt, Homo sapiens
  misc_RNA (1)...(19): siRNA sense strand
gaucaucgagcuaaaauau

SEQ ID NO: 1806619 - RNA, 19 nt, Homo sapiens
  misc_RNA (1)...(19): siRNA sense strand
gucauugccauauugguua

SEQ ID NO: 1806620 - RNA, 19 nt, Homo sapiens
  misc_RNA (1)...(19): siRNA sense strand
ucacugucauugucauugu

SEQ ID NO: 1806621 - RNA, 19 nt, Homo sapiens
  misc_RNA (1)...(19): siRNA sense strand
gaaguaacagaauuaacca

SEQ ID NO: 1806622 - RNA, 19 nt, Homo sapiens
  misc_RNA (1)...(19): siRNA sense strand
gaaauuuguggcuuccaau

SEQ ID NO: 1806623 - RNA, 19 nt, Homo sapiens
  misc_RNA (1)...(19): siRNA sense strand
gcacaaaacacuacugaag

SEQ ID NO: 1806624 - RNA, 19 nt, Homo sapiens
  misc_RNA (1)...(19): siRNA sense strand
cuugugaaguaacagaauu

SEQ ID NO: 1806625 - RNA, 19 nt, Homo sapiens
  misc_RNA (1)...(19): siRNA sense strand
ccaaucagaagacuauaca

SEQ ID NO: 1806626 - RNA, 19 nt, Homo sapiens
  misc_RNA (1)...(19): siRNA sense strand
gcacaauuacuuggacuag

SEQ ID NO: 1806627 - RNA, 19 nt, Homo sapiens
  misc_RNA (1)...(19): siRNA sense strand
gcucuagcacaauuacuug

SEQ ID NO: 1806628 - RNA, 19 nt, Homo sapiens
  misc_RNA (1)...(19): siRNA sense strand
ucuuagcucuagcacaauu

SEQ ID NO: 1806629 - RNA, 19 nt, Homo sapiens
  misc_RNA (1)...(19): siRNA sense strand
cuucgucauugccauauug

SEQ ID NO: 1806630 - RNA, 19 nt, Homo sapiens
  misc_RNA (1)...(19): siRNA sense strand
aaguauacguaaaguggaa

SEQ ID NO: 1806631 - RNA, 19 nt, Homo sapiens
  misc_RNA (1)...(19): siRNA sense strand
ggaaacuacacuugugaag

SEQ ID NO: 1806632 - RNA, 19 nt, Homo sapiens
  misc_RNA (1)...(19): siRNA sense strand
acacaggaaacuacacuug

SEQ ID NO: 1806633 - RNA, 19 nt, Homo sapiens
  misc_RNA (1)...(19): siRNA sense strand
uuccaugcuuuguuacuaa

SEQ ID NO: 1806634 - RNA, 19 nt, Homo sapiens
  misc_RNA (1)...(19): siRNA sense strand
caauuacuuggacuaguuu

SEQ ID NO: 1806635 - RNA, 19 nt, Homo sapiens
  misc_RNA (1)...(19): siRNA sense strand
ugucgucauuccaugcuuu

SEQ ID NO: 1806636 - RNA, 19 nt, Homo sapiens
  misc_RNA (1)...(19): siRNA sense strand
aauaucguguuguuucaug

SEQ ID NO: 1806637 - RNA, 19 nt, Homo sapiens
  misc_RNA (1)...(19): siRNA sense strand
ugaagauggauaagaguga

SEQ ID NO: 1806638 - RNA, 19 nt, Homo sapiens
  misc_RNA (1)...(19): siRNA sense strand
agaauuaaccagagaaggu

SEQ ID NO: 1806639 - RNA, 19 nt, Homo sapiens
  misc_RNA (1)...(19): siRNA sense strand
cuauacaaccuccuaggaa

SEQ ID NO: 1806640 - RNA, 19 nt, Homo sapiens
  misc_RNA (1)...(19): siRNA sense strand
caccuuugauggagcucua

SEQ ID NO: 1806641 - RNA, 19 nt, Homo sapiens
  misc_RNA (1)...(19): siRNA sense strand
ucagaagacuauacaaccu

SEQ ID NO: 1806642 - RNA, 19 nt, Homo sapiens
  misc_RNA (1)...(19): siRNA sense strand
uugaguaucuuagcucuag

SEQ ID NO: 1806643 - RNA, 19 nt, Homo sapiens
  misc_RNA (1)...(19): siRNA sense strand
gauuucagguuugaguauc

SEQ ID NO: 1806644 - RNA, 19 nt, Homo sapiens
  misc_RNA (1)...(19): siRNA sense strand
gaaugcuacuggccuuggu

SEQ ID NO: 1806645 - RNA, 19 nt, Homo sapiens
  misc_RNA (1)...(19): siRNA sense strand
ugucauuguuggagccauu

SEQ ID NO: 1806646 - RNA, 19 nt, Homo sapiens
  misc_RNA (1)...(19): siRNA sense strand
gaucacugucauugucauu

SEQ ID NO: 1806647 - RNA, 19 nt, Homo sapiens
  misc_RNA (1)...(19): siRNA sense strand
caggaaacuacacuuguga

SEQ ID NO: 1806648 - RNA, 19 nt, Homo sapiens
  misc_RNA (1)...(19): siRNA sense strand
ccagagaaggugaaacgau

SEQ ID NO: 1806649 - RNA, 19 nt, Homo sapiens
  misc_RNA (1)...(19): siRNA sense strand
ccggugguauggaugagaa

SEQ ID NO: 1806650 - RNA, 19 nt, Homo sapiens
  misc_RNA (1)...(19): siRNA sense strand
augcauggcccucuucuga

SEQ ID NO: 1806651 - RNA, 19 nt, Homo sapiens
  misc_RNA (1)...(19): siRNA sense strand
cgucauugccauauugguu

SEQ ID NO: 1806652 - RNA, 19 nt, Homo sapiens
  misc_RNA (1)...(19): siRNA sense strand
gagauauuuacaccuuuga

SEQ ID NO: 1806653 - RNA, 19 nt, Homo sapiens
  misc_RNA (1)...(19): siRNA sense strand
aaggagaugccucuuugaa

SEQ ID NO: 1806654 - RNA, 19 nt, Homo sapiens
  misc_RNA (1)...(19): siRNA sense strand
cuucacuacuauguguuua

SEQ ID NO: 1806655 - RNA, 19 nt, Homo sapiens
  misc_RNA (1)...(19): siRNA sense strand
uauccucgcugugguugga

SEQ ID NO: 1806656 - RNA, 19 nt, Homo sapiens
  misc_RNA (1)...(19): siRNA sense strand
ucauugccauauugguuau

SEQ ID NO: 1806657 - RNA, 19 nt, Homo sapiens
  misc_RNA (1)...(19): siRNA sense strand
ugaaguaacagaauuaacc

SEQ ID NO: 1806658 - RNA, 19 nt, Homo sapiens
  misc_RNA (1)...(19): siRNA sense strand
ggaaauuuaaaggaagaga

SEQ ID NO: 1806659 - RNA, 19 nt, Homo sapiens
  misc_RNA (1)...(19): siRNA sense strand
ggggacaguuugguauuaa

SEQ ID NO: 1806660 - RNA, 19 nt, Homo sapiens
  misc_RNA (1)...(19): siRNA sense strand
cuuugaagauggauaagag

SEQ ID NO: 1806661 - RNA, 19 nt, Homo sapiens
  misc_RNA (1)...(19): siRNA sense strand
ugugacuucuacagggaua

SEQ ID NO: 1806662 - RNA, 19 nt, Homo sapiens
  misc_RNA (1)...(19): siRNA sense strand
ggacaguuugguauuaaaa

SEQ ID NO: 1806663 - RNA, 19 nt, Homo sapiens
  misc_RNA (1)...(19): siRNA sense strand
gguuuaauugugacuucua

SEQ ID NO: 1806664 - RNA, 19 nt, Homo sapiens
  misc_RNA (1)...(19): siRNA sense strand
uaaccuccuucgucauugc

SEQ ID NO: 1806665 - RNA, 19 nt, Homo sapiens
  misc_RNA (1)...(19): siRNA sense strand
cacaggaaacuacacuugu

SEQ ID NO: 1806666 - RNA, 19 nt, Homo sapiens
  misc_RNA (1)...(19): siRNA sense strand
guagaauucacguuuugua

SEQ ID NO: 1806667 - RNA, 19 nt, Homo sapiens
  misc_RNA (1)...(19): siRNA sense strand
uacuggccuugguuuaauu

SEQ ID NO: 1806668 - RNA, 19 nt, Homo sapiens
  misc_RNA (1)...(19): siRNA sense strand
auauagauccggugguaug

SEQ ID NO: 1806669 - RNA, 19 nt, Homo sapiens
  misc_RNA (1)...(19): siRNA sense strand
gaagagauauuuacaccuu

SEQ ID NO: 1806670 - RNA, 19 nt, Homo sapiens
  misc_RNA (1)...(19): siRNA sense strand
uaucuuagcucuagcacaa

SEQ ID NO: 1806671 - RNA, 19 nt, Homo sapiens
  misc_RNA (1)...(19): siRNA sense strand
gcauggcccucuucugauu

SEQ ID NO: 1806672 - RNA, 19 nt, Homo sapiens
  misc_RNA (1)...(19): siRNA sense strand
uaacagaauuaaccagaga

SEQ ID NO: 1806673 - RNA, 19 nt, Homo sapiens
  misc_RNA (1)...(19): siRNA sense strand
aaauauagauccgguggua

SEQ ID NO: 1806674 - RNA, 19 nt, Homo sapiens
  misc_RNA (1)...(19): siRNA sense strand
gucauuccaugcuuuguua

SEQ ID NO: 1806675 - RNA, 19 nt, Homo sapiens
  misc_RNA (1)...(19): siRNA sense strand
acaauuacuuggacuaguu

SEQ ID NO: 1806676 - RNA, 19 nt, Homo sapiens
  misc_RNA (1)...(19): siRNA sense strand
uaagagugaugcugucuca

SEQ ID NO: 1806677 - RNA, 19 nt, Homo sapiens
  misc_RNA (1)...(19): siRNA sense strand
ugauggagcucuaaacaag

SEQ ID NO: 1806678 - RNA, 19 nt, Homo sapiens
  misc_RNA (1)...(19): siRNA sense strand
ggccuugguuuaauuguga

SEQ ID NO: 1806679 - RNA, 19 nt, Homo sapiens
  misc_RNA (1)...(19): siRNA sense strand
gaagauggauaagagugau

SEQ ID NO: 1806680 - RNA, 19 nt, Homo sapiens
  misc_RNA (1)...(19): siRNA sense strand
ugaagucucacaauuacua

SEQ ID NO: 1806681 - RNA, 19 nt, Homo sapiens
  misc_RNA (1)...(19): siRNA sense strand
gcuaaaauaucguguuguu

SEQ ID NO: 1806682 - RNA, 19 nt, Homo sapiens
  misc_RNA (1)...(19): siRNA sense strand
guacagcgauuggauuaac

SEQ ID NO: 1806683 - RNA, 19 nt, Homo sapiens
  misc_RNA (1)...(19): siRNA sense strand
gaauucacguuuuguaaug

SEQ ID NO: 1806684 - RNA, 19 nt, Homo sapiens
  misc_RNA (1)...(19): siRNA sense strand
gggacaguuugguauuaaa

SEQ ID NO: 1806685 - RNA, 19 nt, Homo sapiens
  misc_RNA (1)...(19): siRNA sense strand
uuacuucacuacuaugugu

SEQ ID NO: 1806686 - RNA, 19 nt, Homo sapiens
  misc_RNA (1)...(19): siRNA sense strand
ugaaauuuguggcuuccaa

SEQ ID NO: 1806687 - RNA, 19 nt, Homo sapiens
  misc_RNA (1)...(19): siRNA sense strand
gagcuaaaauaucguguug

SEQ ID NO: 1806688 - RNA, 19 nt, Homo sapiens
  misc_RNA (1)...(19): siRNA sense strand
guggaaauuuaaaggaaga

SEQ ID NO: 1806689 - RNA, 19 nt, Homo sapiens
  misc_RNA (1)...(19): siRNA sense strand
gcuacuggccuugguuuaa

SEQ ID NO: 1806690 - RNA, 19 nt, Homo sapiens
  misc_RNA (1)...(19): siRNA sense strand
gaagucucacaauuacuaa

SEQ ID NO: 1806691 - RNA, 19 nt, Homo sapiens
  misc_RNA (1)...(19): siRNA sense strand
agagauauuuacaccuuug

SEQ ID NO: 1806692 - RNA, 19 nt, Homo sapiens
  misc_RNA (1)...(19): siRNA sense strand
acaggaaacuacacuugug

SEQ ID NO: 1806693 - RNA, 19 nt, Homo sapiens
  misc_RNA (1)...(19): siRNA sense strand
uaguacagcgauuggauua

SEQ ID NO: 1806694 - RNA, 19 nt, Homo sapiens
  misc_RNA (1)...(19): siRNA sense strand
gauauuuacaccuuugaug

SEQ ID NO: 1806695 - RNA, 19 nt, Homo sapiens
  misc_RNA (1)...(19): siRNA sense strand
cuacuggccuugguuuaau

SEQ ID NO: 1806696 - RNA, 19 nt, Homo sapiens
  misc_RNA (1)...(19): siRNA sense strand
gaucaucgagcuaaaauau

SEQ ID NO: 1806697 - RNA, 19 nt, Homo sapiens
  misc_RNA (1)...(19): siRNA sense strand
gucauugccauauugguua

SEQ ID NO: 1806698 - RNA, 19 nt, Homo sapiens
  misc_RNA (1)...(19): siRNA sense strand
ucacugucauugucauugu

SEQ ID NO: 1806699 - RNA, 19 nt, Homo sapiens
  misc_RNA (1)...(19): siRNA sense strand
gaaguaacagaauuaacca

SEQ ID NO: 1806700 - RNA, 19 nt, Homo sapiens
  misc_RNA (1)...(19): siRNA sense strand
gaaauuuguggcuuccaau

SEQ ID NO: 1806701 - RNA, 19 nt, Homo sapiens
  misc_RNA (1)...(19): siRNA sense strand
gcacaaaacacuacugaag

SEQ ID NO: 1806702 - RNA, 19 nt, Homo sapiens
  misc_RNA (1)...(19): siRNA sense strand
cuugugaaguaacagaauu

SEQ ID NO: 1806703 - RNA, 19 nt, Homo sapiens
  misc_RNA (1)...(19): siRNA sense strand
ccaaucagaagacuauaca

SEQ ID NO: 1806704 - RNA, 19 nt, Homo sapiens
  misc_RNA (1)...(19): siRNA sense strand
gcacaauuacuuggacuag

SEQ ID NO: 1806705 - RNA, 19 nt, Homo sapiens
  misc_RNA (1)...(19): siRNA sense strand
gcucuagcacaauuacuug

SEQ ID NO: 1806706 - RNA, 19 nt, Homo sapiens
  misc_RNA (1)...(19): siRNA sense strand
ucuuagcucuagcacaauu

SEQ ID NO: 1806707 - RNA, 19 nt, Homo sapiens
  misc_RNA (1)...(19): siRNA sense strand
cuucgucauugccauauug

SEQ ID NO: 1806708 - RNA, 19 nt, Homo sapiens
  misc_RNA (1)...(19): siRNA sense strand
aaguauacguaaaguggaa

SEQ ID NO: 1806709 - RNA, 19 nt, Homo sapiens
  misc_RNA (1)...(19): siRNA sense strand
ggaaacuacacuugugaag

SEQ ID NO: 1806710 - RNA, 19 nt, Homo sapiens
  misc_RNA (1)...(19): siRNA sense strand
acacaggaaacuacacuug

SEQ ID NO: 1806711 - RNA, 19 nt, Homo sapiens
  misc_RNA (1)...(19): siRNA sense strand
uuccaugcuuuguuacuaa

SEQ ID NO: 1806712 - RNA, 19 nt, Homo sapiens
  misc_RNA (1)...(19): siRNA sense strand
caauuacuuggacuaguuu

SEQ ID NO: 1806713 - RNA, 19 nt, Homo sapiens
  misc_RNA (1)...(19): siRNA sense strand
ugucgucauuccaugcuuu

SEQ ID NO: 1806714 - RNA, 19 nt, Homo sapiens
  misc_RNA (1)...(19): siRNA sense strand
aauaucguguuguuucaug

SEQ ID NO: 1806715 - RNA, 19 nt, Homo sapiens
  misc_RNA (1)...(19): siRNA sense strand
ugaagauggauaagaguga

SEQ ID NO: 1806716 - RNA, 19 nt, Homo sapiens
  misc_RNA (1)...(19): siRNA sense strand
agaauuaaccagagaaggu

SEQ ID NO: 1806717 - RNA, 19 nt, Homo sapiens
  misc_RNA (1)...(19): siRNA sense strand
cuauacaaccuccuaggaa

SEQ ID NO: 1806718 - RNA, 19 nt, Homo sapiens
  misc_RNA (1)...(19): siRNA sense strand
caccuuugauggagcucua

SEQ ID NO: 1806719 - RNA, 19 nt, Homo sapiens
  misc_RNA (1)...(19): siRNA sense strand
ucagaagacuauacaaccu

SEQ ID NO: 1806720 - RNA, 19 nt, Homo sapiens
  misc_RNA (1)...(19): siRNA sense strand
uugaguaucuuagcucuag

SEQ ID NO: 1806721 - RNA, 19 nt, Homo sapiens
  misc_RNA (1)...(19): siRNA sense strand
gauuucagguuugaguauc

SEQ ID NO: 1806722 - RNA, 19 nt, Homo sapiens
  misc_RNA (1)...(19): siRNA sense strand
gaaugcuacuggccuuggu

SEQ ID NO: 1806723 - RNA, 19 nt, Homo sapiens
  misc_RNA (1)...(19): siRNA sense strand
ugucauuguuggagccauu

SEQ ID NO: 1806724 - RNA, 19 nt, Homo sapiens
  misc_RNA (1)...(19): siRNA sense strand
gaucacugucauugucauu

SEQ ID NO: 1806725 - RNA, 19 nt, Homo sapiens
  misc_RNA (1)...(19): siRNA sense strand
caggaaacuacacuuguga

SEQ ID NO: 1806726 - RNA, 19 nt, Homo sapiens
  misc_RNA (1)...(19): siRNA sense strand
ccagagaaggugaaacgau

SEQ ID NO: 1806727 - RNA, 19 nt, Homo sapiens
  misc_RNA (1)...(19): siRNA sense strand
ccggugguauggaugagaa

SEQ ID NO: 1806728 - RNA, 19 nt, Homo sapiens
  misc_RNA (1)...(19): siRNA sense strand
augcauggcccucuucuga

SEQ ID NO: 1806729 - RNA, 19 nt, Homo sapiens
  misc_RNA (1)...(19): siRNA sense strand
cgucauugccauauugguu

SEQ ID NO: 1806730 - RNA, 19 nt, Homo sapiens
  misc_RNA (1)...(19): siRNA sense strand
gagauauuuacaccuuuga

SEQ ID NO: 1806731 - RNA, 19 nt, Homo sapiens
  misc_RNA (1)...(19): siRNA sense strand
aaggagaugccucuuugaa

SEQ ID NO: 1806732 - RNA, 19 nt, Homo sapiens
  misc_RNA (1)...(19): siRNA sense strand
cuucacuacuauguguuua

SEQ ID NO: 1806733 - RNA, 19 nt, Homo sapiens
  misc_RNA (1)...(19): siRNA sense strand
uauccucgcugugguugga

SEQ ID NO: 1806734 - RNA, 19 nt, Homo sapiens
  misc_RNA (1)...(19): siRNA sense strand
ucauugccauauugguuau

SEQ ID NO: 1806735 - RNA, 19 nt, Homo sapiens
  misc_RNA (1)...(19): siRNA sense strand
ugaaguaacagaauuaacc

SEQ ID NO: 1806736 - RNA, 19 nt, Homo sapiens
  misc_RNA (1)...(19): siRNA sense strand
ggaaauuuaaaggaagaga

SEQ ID NO: 1806737 - RNA, 19 nt, Homo sapiens
  misc_RNA (1)...(19): siRNA sense strand
ggggacaguuugguauuaa

SEQ ID NO: 1806738 - RNA, 19 nt, Homo sapiens
  misc_RNA (1)...(19): siRNA sense strand
cuuugaagauggauaagag

SEQ ID NO: 1806739 - RNA, 19 nt, Homo sapiens
  misc_RNA (1)...(19): siRNA sense strand
ugugacuucuacagggaua

SEQ ID NO: 1806740 - RNA, 19 nt, Homo sapiens
  misc_RNA (1)...(19): siRNA sense strand
ggacaguuugguauuaaaa

SEQ ID NO: 1806741 - RNA, 19 nt, Homo sapiens
  misc_RNA (1)...(19): siRNA sense strand
gguuuaauugugacuucua

SEQ ID NO: 1806742 - RNA, 19 nt, Homo sapiens
  misc_RNA (1)...(19): siRNA sense strand
uaaccuccuucgucauugc

SEQ ID NO: 1806743 - RNA, 19 nt, Homo sapiens
  misc_RNA (1)...(19): siRNA sense strand
cacaggaaacuacacuugu

SEQ ID NO: 1806744 - RNA, 19 nt, Homo sapiens
  misc_RNA (1)...(19): siRNA sense strand
guagaauucacguuuugua

SEQ ID NO: 1806745 - RNA, 19 nt, Homo sapiens
  misc_RNA (1)...(19): siRNA sense strand
uacuggccuugguuuaauu

SEQ ID NO: 1806746 - RNA, 19 nt, Homo sapiens
  misc_RNA (1)...(19): siRNA sense strand
auauagauccggugguaug

SEQ ID NO: 1806747 - RNA, 19 nt, Homo sapiens
  misc_RNA (1)...(19): siRNA sense strand
ggaaagaccuucagcuauc

SEQ ID NO: 1806748 - RNA, 19 nt, Homo sapiens
  misc_RNA (1)...(19): siRNA sense strand
ggucugcacucacagguuu

SEQ ID NO: 1806749 - RNA, 19 nt, Homo sapiens
  misc_RNA (1)...(19): siRNA sense strand
gaaagaccuucagcuauca

SEQ ID NO: 1806750 - RNA, 19 nt, Homo sapiens
  misc_RNA (1)...(19): siRNA sense strand
gggaagaccuacaaaugca

SEQ ID NO: 1806751 - RNA, 19 nt, Homo sapiens
  misc_RNA (1)...(19): siRNA sense strand
ggugaagccuuaugaaugc

SEQ ID NO: 1806752 - RNA, 19 nt, Homo sapiens
  misc_RNA (1)...(19): siRNA sense strand
cgacuucguucgacacaug

SEQ ID NO: 1806753 - RNA, 19 nt, Homo sapiens
  misc_RNA (1)...(19): siRNA sense strand
caaagaaugugggaaaggu

SEQ ID NO: 1806754 - RNA, 19 nt, Homo sapiens
  misc_RNA (1)...(19): siRNA sense strand
gagagaagcccugcaagug

SEQ ID NO: 1806755 - RNA, 19 nt, Homo sapiens
  misc_RNA (1)...(19): siRNA sense strand
gagucacacuggagagaaa

SEQ ID NO: 1806756 - RNA, 19 nt, Homo sapiens
  misc_RNA (1)...(19): siRNA sense strand
ggagagaagcccuaugagu

SEQ ID NO: 1806757 - RNA, 19 nt, Homo sapiens
  misc_RNA (1)...(19): siRNA sense strand
gggugaagccuuaugaaug

SEQ ID NO: 1806758 - RNA, 19 nt, Homo sapiens
  misc_RNA (1)...(19): siRNA sense strand
ggagagaagcccugcaagu

SEQ ID NO: 1806759 - RNA, 19 nt, Homo sapiens
  misc_RNA (1)...(19): siRNA sense strand
uacuacaacucuuccuuaa

SEQ ID NO: 1806760 - RNA, 19 nt, Homo sapiens
  misc_RNA (1)...(19): siRNA sense strand
uuacuacaacucuuccuua

SEQ ID NO: 1806761 - RNA, 19 nt, Homo sapiens
  misc_RNA (1)...(19): siRNA sense strand
guggaaagaccuucagcua

SEQ ID NO: 1806762 - RNA, 19 nt, Homo sapiens
  misc_RNA (1)...(19): siRNA sense strand
gaaugugggagcguguuua

SEQ ID NO: 1806763 - RNA, 19 nt, Homo sapiens
  misc_RNA (1)...(19): siRNA sense strand
gugcaaagaaugugggaaa

SEQ ID NO: 1806764 - RNA, 19 nt, Homo sapiens
  misc_RNA (1)...(19): siRNA sense strand
gggagaagcccuguaagug

SEQ ID NO: 1806765 - RNA, 19 nt, Homo sapiens
  misc_RNA (1)...(19): siRNA sense strand
ggaaugugggagcguguuu

SEQ ID NO: 1806766 - RNA, 19 nt, Homo sapiens
  misc_RNA (1)...(19): siRNA sense strand
cuacaacucuuccuuaacc

SEQ ID NO: 1806767 - RNA, 19 nt, Homo sapiens
  misc_RNA (1)...(19): siRNA sense strand
cgacauacaaggagucaca

SEQ ID NO: 1806768 - RNA, 19 nt, Homo sapiens
  misc_RNA (1)...(19): siRNA sense strand
acacuggggugaagccuua

SEQ ID NO: 1806769 - RNA, 19 nt, Homo sapiens
  misc_RNA (1)...(19): siRNA sense strand
gacccacacugcaggaaag

SEQ ID NO: 1806770 - RNA, 19 nt, Homo sapiens
  misc_RNA (1)...(19): siRNA sense strand
acacuggagagaaaccuua

SEQ ID NO: 1806771 - RNA, 19 nt, Homo sapiens
  misc_RNA (1)...(19): siRNA sense strand
gauucacacuggagagaag

SEQ ID NO: 1806772 - RNA, 19 nt, Homo sapiens
  misc_RNA (1)...(19): siRNA sense strand
cuacagcuauucccucacu

SEQ ID NO: 1806773 - RNA, 19 nt, Homo sapiens
  misc_RNA (1)...(19): siRNA sense strand
gauucacacuggagagaag

SEQ ID NO: 1806774 - RNA, 19 nt, Homo sapiens
  misc_RNA (1)...(19): siRNA sense strand
ggaagaccuacaaaugcaa

SEQ ID NO: 1806775 - RNA, 19 nt, Homo sapiens
  misc_RNA (1)...(19): siRNA sense strand
uggaaagaccuucagcuau

SEQ ID NO: 1806776 - RNA, 19 nt, Homo sapiens
  misc_RNA (1)...(19): siRNA sense strand
cuacaaaugcaaggaaugu

SEQ ID NO: 1806777 - RNA, 19 nt, Homo sapiens
  misc_RNA (1)...(19): siRNA sense strand
gcaaagaaugugggaaagg

SEQ ID NO: 1806778 - RNA, 19 nt, Homo sapiens
  misc_RNA (1)...(19): siRNA sense strand
gcccuacgagugcaaagaa

SEQ ID NO: 1806779 - RNA, 19 nt, Homo sapiens
  misc_RNA (1)...(19): siRNA sense strand
cuggagagaagcccuauga

SEQ ID NO: 1806780 - RNA, 19 nt, Homo sapiens
  misc_RNA (1)...(19): siRNA sense strand
cgacacaugaggauucaca

SEQ ID NO: 1806781 - RNA, 19 nt, Homo sapiens
  misc_RNA (1)...(19): siRNA sense strand
ggagucacacuggagagaa

SEQ ID NO: 1806782 - RNA, 19 nt, Homo sapiens
  misc_RNA (1)...(19): siRNA sense strand
cgacaucagcagauucaca

SEQ ID NO: 1806783 - RNA, 19 nt, Homo sapiens
  misc_RNA (1)...(19): siRNA sense strand
aagaaugugggaaagguuu

SEQ ID NO: 1806784 - RNA, 19 nt, Homo sapiens
  misc_RNA (1)...(19): siRNA sense strand
gaccuacaaaugcaaggaa

SEQ ID NO: 1806785 - RNA, 19 nt, Homo sapiens
  misc_RNA (1)...(19): siRNA sense strand
guucgacacaugaggauuc

SEQ ID NO: 1806786 - RNA, 19 nt, Homo sapiens
  misc_RNA (1)...(19): siRNA sense strand
uaacccggcacaugaagau

SEQ ID NO: 1806787 - RNA, 19 nt, Homo sapiens
  misc_RNA (1)...(19): siRNA sense strand
cuaucacucugucuucauc

SEQ ID NO: 1806788 - RNA, 19 nt, Homo sapiens
  misc_RNA (1)...(19): siRNA sense strand
gugcaaagaauguggaaaa

SEQ ID NO: 1806789 - RNA, 19 nt, Homo sapiens
  misc_RNA (1)...(19): siRNA sense strand
aaugugggagcguguuuaa

SEQ ID NO: 1806790 - RNA, 19 nt, Homo sapiens
  misc_RNA (1)...(19): siRNA sense strand
gaaagcccuacgagugcaa

SEQ ID NO: 1806791 - RNA, 19 nt, Homo sapiens
  misc_RNA (1)...(19): siRNA sense strand
gacaaucuccaugaaugug

SEQ ID NO: 1806792 - RNA, 19 nt, Homo sapiens
  misc_RNA (1)...(19): siRNA sense strand
cuacgagugcaaagaaugu

SEQ ID NO: 1806793 - RNA, 19 nt, Homo sapiens
  misc_RNA (1)...(19): siRNA sense strand
gagugcagcgaguguggaa

SEQ ID NO: 1806794 - RNA, 19 nt, Homo sapiens
  misc_RNA (1)...(19): siRNA sense strand
gaccuucagcuaucacucu

SEQ ID NO: 1806795 - RNA, 19 nt, Homo sapiens
  misc_RNA (1)...(19): siRNA sense strand
agacaaucuccaugaaugu

SEQ ID NO: 1806796 - RNA, 19 nt, Homo sapiens
  misc_RNA (1)...(19): siRNA sense strand
gaaauggaaucgccaaaua

SEQ ID NO: 1806797 - RNA, 19 nt, Homo sapiens
  misc_RNA (1)...(19): siRNA sense strand
gaauguaacuuuccaugua

SEQ ID NO: 1806798 - RNA, 19 nt, Homo sapiens
  misc_RNA (1)...(19): siRNA sense strand
aaacguaacucaaccagua

SEQ ID NO: 1806799 - RNA, 19 nt, Homo sapiens
  misc_RNA (1)...(19): siRNA sense strand
acacagauaugcacuuaua

SEQ ID NO: 1806800 - RNA, 19 nt, Homo sapiens
  misc_RNA (1)...(19): siRNA sense strand
caacauguauugugcugua

SEQ ID NO: 1806801 - RNA, 19 nt, Homo sapiens
  misc_RNA (1)...(19): siRNA sense strand
ccaugaaguucuuucuuua

SEQ ID NO: 1806802 - RNA, 19 nt, Homo sapiens
  misc_RNA (1)...(19): siRNA sense strand
caagcaaugugccuuuaaa

SEQ ID NO: 1806803 - RNA, 19 nt, Homo sapiens
  misc_RNA (1)...(19): siRNA sense strand
agacacagauaugcacuua

SEQ ID NO: 1806804 - RNA, 19 nt, Homo sapiens
  misc_RNA (1)...(19): siRNA sense strand
gaaguucuuucuuuaugug

SEQ ID NO: 1806805 - RNA, 19 nt, Homo sapiens
  misc_RNA (1)...(19): siRNA sense strand
caacagccaucgaggacuu

SEQ ID NO: 1806806 - RNA, 19 nt, Homo sapiens
  misc_RNA (1)...(19): siRNA sense strand
uaaaagagguccuauggaa

SEQ ID NO: 1806807 - RNA, 19 nt, Homo sapiens
  misc_RNA (1)...(19): siRNA sense strand
ucagagcuuucucaucuuu

SEQ ID NO: 1806808 - RNA, 19 nt, Homo sapiens
  misc_RNA (1)...(19): siRNA sense strand
guauugugcuguauaugaa

SEQ ID NO: 1806809 - RNA, 19 nt, Homo sapiens
  misc_RNA (1)...(19): siRNA sense strand
gaagaugaguaugaaaugg

SEQ ID NO: 1806810 - RNA, 19 nt, Homo sapiens
  misc_RNA (1)...(19): siRNA sense strand
caacuuaacaucaucagau

SEQ ID NO: 1806811 - RNA, 19 nt, Homo sapiens
  misc_RNA (1)...(19): siRNA sense strand
gcacugcuuugguuucauc

SEQ ID NO: 1806812 - RNA, 19 nt, Homo sapiens
  misc_RNA (1)...(19): siRNA sense strand
gaaguccaaugcaugauac

SEQ ID NO: 1806813 - RNA, 19 nt, Homo sapiens
  misc_RNA (1)...(19): siRNA sense strand
cagguagccucacuaucua

SEQ ID NO: 1806814 - RNA, 19 nt, Homo sapiens
  misc_RNA (1)...(19): siRNA sense strand
uaacuugugcauugacuaa

SEQ ID NO: 1806815 - RNA, 19 nt, Homo sapiens
  misc_RNA (1)...(19): siRNA sense strand
aagcagcggucauucaaga

SEQ ID NO: 1806816 - RNA, 19 nt, Homo sapiens
  misc_RNA (1)...(19): siRNA sense strand
gcaugauaccagagcauua

SEQ ID NO: 1806817 - RNA, 19 nt, Homo sapiens
  misc_RNA (1)...(19): siRNA sense strand
cagaugaagaugaguauga

SEQ ID NO: 1806818 - RNA, 19 nt, Homo sapiens
  misc_RNA (1)...(19): siRNA sense strand
gcacuuauacccauaccau

SEQ ID NO: 1806819 - RNA, 19 nt, Homo sapiens
  misc_RNA (1)...(19): siRNA sense strand
accaugaaguucuuucuuu

SEQ ID NO: 1806820 - RNA, 19 nt, Homo sapiens
  misc_RNA (1)...(19): siRNA sense strand
auucagagcuuucucaucu

SEQ ID NO: 1806821 - RNA, 19 nt, Homo sapiens
  misc_RNA (1)...(19): siRNA sense strand
ucagguagccucacuaucu

SEQ ID NO: 1806822 - RNA, 19 nt, Homo sapiens
  misc_RNA (1)...(19): siRNA sense strand
caucgaggacuuauaaugu

SEQ ID NO: 1806823 - RNA, 19 nt, Homo sapiens
  misc_RNA (1)...(19): siRNA sense strand
gaaaaugaucuuccacaaa

SEQ ID NO: 1806824 - RNA, 19 nt, Homo sapiens
  misc_RNA (1)...(19): siRNA sense strand
uuacugauaccaugaaguu

SEQ ID NO: 1806825 - RNA, 19 nt, Homo sapiens
  misc_RNA (1)...(19): siRNA sense strand
cauguauugugcuguauau

SEQ ID NO: 1806826 - RNA, 19 nt, Homo sapiens
  misc_RNA (1)...(19): siRNA sense strand
uagcaguaauuacaacaug

SEQ ID NO: 1806827 - RNA, 19 nt, Homo sapiens
  misc_RNA (1)...(19): siRNA sense strand
ugaaguccaaugcaugaua

SEQ ID NO: 1806828 - RNA, 19 nt, Homo sapiens
  misc_RNA (1)...(19): siRNA sense strand
acacuaacuugugcauuga

SEQ ID NO: 1806829 - RNA, 19 nt, Homo sapiens
  misc_RNA (1)...(19): siRNA sense strand
gacagaaccaacuccaauu

SEQ ID NO: 1806830 - RNA, 19 nt, Homo sapiens
  misc_RNA (1)...(19): siRNA sense strand
cgccaaauauuacugauac

SEQ ID NO: 1806831 - RNA, 19 nt, Homo sapiens
  misc_RNA (1)...(19): siRNA sense strand
guaacucaaccaguauaua

SEQ ID NO: 1806832 - RNA, 19 nt, Homo sapiens
  misc_RNA (1)...(19): siRNA sense strand
uauaugguguuguguaugg

SEQ ID NO: 1806833 - RNA, 19 nt, Homo sapiens
  misc_RNA (1)...(19): siRNA sense strand
guaugggaauguaacuuuc

SEQ ID NO: 1806834 - RNA, 19 nt, Homo sapiens
  misc_RNA (1)...(19): siRNA sense strand
auaauguacucaugggauu

SEQ ID NO: 1806835 - RNA, 19 nt, Homo sapiens
  misc_RNA (1)...(19): siRNA sense strand
acuuauacccauaccauua

SEQ ID NO: 1806836 - RNA, 19 nt, Homo sapiens
  misc_RNA (1)...(19): siRNA sense strand
agaugaagaugaguaugaa

SEQ ID NO: 1806837 - RNA, 19 nt, Homo sapiens
  misc_RNA (1)...(19): siRNA sense strand
ccaagcagcggucauucaa

SEQ ID NO: 1806838 - RNA, 19 nt, Homo sapiens
  misc_RNA (1)...(19): siRNA sense strand
ggacuuauaauguacucau

SEQ ID NO: 1806839 - RNA, 19 nt, Homo sapiens
  misc_RNA (1)...(19): siRNA sense strand
gcaauguaaacguaacuca

SEQ ID NO: 1806840 - RNA, 19 nt, Homo sapiens
  misc_RNA (1)...(19): siRNA sense strand
agacagaaccaacuccaau

SEQ ID NO: 1806841 - RNA, 19 nt, Homo sapiens
  misc_RNA (1)...(19): siRNA sense strand
ccaagcaaugugccuuuaa

SEQ ID NO: 1806842 - RNA, 19 nt, Homo sapiens
  misc_RNA (1)...(19): siRNA sense strand
agaugaguaugaaauggaa

SEQ ID NO: 1806843 - RNA, 19 nt, Homo sapiens
  misc_RNA (1)...(19): siRNA sense strand
cagaaccaacuccaauuga

SEQ ID NO: 1806844 - RNA, 19 nt, Homo sapiens
  misc_RNA (1)...(19): siRNA sense strand
uguauugugcuguauauga

SEQ ID NO: 1806845 - RNA, 19 nt, Homo sapiens
  misc_RNA (1)...(19): siRNA sense strand
cugcugcacugcuuugguu

SEQ ID NO: 1806846 - RNA, 19 nt, Homo sapiens
  misc_RNA (1)...(19): siRNA sense strand
cucacuaucuacaacuuaa

SEQ ID NO: 1806847 - RNA, 19 nt, Homo sapiens
  misc_RNA (1)...(19): siRNA sense strand
uguaugggaauguaacuuu

SEQ ID NO: 1806848 - RNA, 19 nt, Homo sapiens
  misc_RNA (1)...(19): siRNA sense strand
aucgaggacuuauaaugua

SEQ ID NO: 1806849 - RNA, 19 nt, Homo sapiens
  misc_RNA (1)...(19): siRNA sense strand
gcuugagucucuuccaucu

SEQ ID NO: 1806850 - RNA, 19 nt, Homo sapiens
  misc_RNA (1)...(19): siRNA sense strand
ugaagaugaguaugaaaug

SEQ ID NO: 1806851 - RNA, 19 nt, Homo sapiens
  misc_RNA (1)...(19): siRNA sense strand
aaauggaaucgccaaauau

SEQ ID NO: 1806852 - RNA, 19 nt, Homo sapiens
  misc_RNA (1)...(19): siRNA sense strand
caauguaaacguaacucaa

SEQ ID NO: 1806853 - RNA, 19 nt, Homo sapiens
  misc_RNA (1)...(19): siRNA sense strand
aauggaaucgccaaauauu

SEQ ID NO: 1806854 - RNA, 19 nt, Homo sapiens
  misc_RNA (1)...(19): siRNA sense strand
ggagcaauguaaacguaac

SEQ ID NO: 1806855 - RNA, 19 nt, Homo sapiens
  misc_RNA (1)...(19): siRNA sense strand
gaugaagaugaguaugaaa

SEQ ID NO: 1806856 - RNA, 19 nt, Homo sapiens
  misc_RNA (1)...(19): siRNA sense strand
acagaaccaacuccaauug

SEQ ID NO: 1806857 - RNA, 19 nt, Homo sapiens
  misc_RNA (1)...(19): siRNA sense strand
cccauaccauuagcaguaa

SEQ ID NO: 1806858 - RNA, 19 nt, Homo sapiens
  misc_RNA (1)...(19): siRNA sense strand
uugcagaacuggaaaauuc

SEQ ID NO: 1806859 - RNA, 19 nt, Homo sapiens
  misc_RNA (1)...(19): siRNA sense strand
auggagcaauguaaacgua

SEQ ID NO: 1806860 - RNA, 19 nt, Homo sapiens
  misc_RNA (1)...(19): siRNA sense strand
gacuuauaauguacucaug

SEQ ID NO: 1806861 - RNA, 19 nt, Homo sapiens
  misc_RNA (1)...(19): siRNA sense strand
acccauaccauuagcagua

SEQ ID NO: 1806862 - RNA, 19 nt, Homo sapiens
  misc_RNA (1)...(19): siRNA sense strand
acaguguacucuuagcaau

SEQ ID NO: 1806863 - RNA, 19 nt, Homo sapiens
  misc_RNA (1)...(19): siRNA sense strand
accaagcaaugugccuuua

SEQ ID NO: 1806864 - RNA, 19 nt, Homo sapiens
  misc_RNA (1)...(19): siRNA sense strand
ggguuuauuuagacacugu

SEQ ID NO: 1806865 - RNA, 19 nt, Homo sapiens
  misc_RNA (1)...(19): siRNA sense strand
agccaucgaggacuuauaa

SEQ ID NO: 1806866 - RNA, 19 nt, Homo sapiens
  misc_RNA (1)...(19): siRNA sense strand
acucuuagcaauccauuau

SEQ ID NO: 1806867 - RNA, 19 nt, Homo sapiens
  misc_RNA (1)...(19): siRNA sense strand
ccaucgaggacuuauaaug

SEQ ID NO: 1806868 - RNA, 19 nt, Homo sapiens
  misc_RNA (1)...(19): siRNA sense strand
ccucacuaucuacaacuua

SEQ ID NO: 1806869 - RNA, 19 nt, Homo sapiens
  misc_RNA (1)...(19): siRNA sense strand
aaagagguccuauggaaaa

SEQ ID NO: 1806870 - RNA, 19 nt, Homo sapiens
  misc_RNA (1)...(19): siRNA sense strand
ugaauucagagcuuucuca

SEQ ID NO: 1806871 - RNA, 19 nt, Homo sapiens
  misc_RNA (1)...(19): siRNA sense strand
ugaaauggaaucgccaaau

SEQ ID NO: 1806872 - RNA, 19 nt, Homo sapiens
  misc_RNA (1)...(19): siRNA sense strand
agagcuuucucaucuuuua

SEQ ID NO: 1806873 - RNA, 19 nt, Homo sapiens
  misc_RNA (1)...(19): siRNA sense strand
gaauucagagcuuucucau

SEQ ID NO: 1806874 - RNA, 19 nt, Homo sapiens
  misc_RNA (1)...(19): siRNA sense strand
aauguaacuuuccauguac

SEQ ID NO: 1806875 - RNA, 19 nt, Homo sapiens
  misc_RNA (1)...(19): siRNA sense strand
gcagcggucauucaagaca

SEQ ID NO: 1806876 - RNA, 19 nt, Homo sapiens
  misc_RNA (1)...(19): siRNA sense strand
uaccagagcauuacaacag

SEQ ID NO: 1806877 - RNA, 19 nt, Homo sapiens
  misc_RNA (1)...(19): siRNA sense strand
gugcuugagucucuuccau

SEQ ID NO: 1806878 - RNA, 19 nt, Homo sapiens
  misc_RNA (1)...(19): siRNA sense strand
cugauaccaugaaguucuu

SEQ ID NO: 1806879 - RNA, 19 nt, Homo sapiens
  misc_RNA (1)...(19): siRNA sense strand
uggaaucgccaaauauuac

SEQ ID NO: 1806880 - RNA, 19 nt, Homo sapiens
  misc_RNA (1)...(19): siRNA sense strand
guucuuucuuuaugugcuu

SEQ ID NO: 1806881 - RNA, 19 nt, Homo sapiens
  misc_RNA (1)...(19): siRNA sense strand
auggaaucgccaaauauua

SEQ ID NO: 1806882 - RNA, 19 nt, Homo sapiens
  misc_RNA (1)...(19): siRNA sense strand
augguauucugaaauguga

SEQ ID NO: 1806883 - RNA, 19 nt, Homo sapiens
  misc_RNA (1)...(19): siRNA sense strand
ggauuguccuauggagcaa

SEQ ID NO: 1806884 - RNA, 19 nt, Homo sapiens
  misc_RNA (1)...(19): siRNA sense strand
uuuaugugcuugagucucu

SEQ ID NO: 1806885 - RNA, 19 nt, Homo sapiens
  misc_RNA (1)...(19): siRNA sense strand
gguguuguguaugggaaug

SEQ ID NO: 1806886 - RNA, 19 nt, Homo sapiens
  misc_RNA (1)...(19): siRNA sense strand
gaggacuuauaauguacuc

SEQ ID NO: 1806887 - RNA, 19 nt, Homo sapiens
  misc_RNA (1)...(19): siRNA sense strand
ggaaucgccaaauauuacu

SEQ ID NO: 1806888 - RNA, 19 nt, Homo sapiens
  misc_RNA (1)...(19): siRNA sense strand
ucgccaaauauuacugaua

SEQ ID NO: 1806889 - RNA, 19 nt, Homo sapiens
  misc_RNA (1)...(19): siRNA sense strand
gcaaagaauuuaacaacug

SEQ ID NO: 1806890 - RNA, 19 nt, Homo sapiens
  misc_RNA (1)...(19): siRNA sense strand
cagaggaaaugcuacuuua

SEQ ID NO: 1806891 - RNA, 19 nt, Homo sapiens
  misc_RNA (1)...(19): siRNA sense strand
gaacauggugcuacucuug

SEQ ID NO: 1806892 - RNA, 19 nt, Homo sapiens
  misc_RNA (1)...(19): siRNA sense strand
gaggaaaugcuacuuuauu

SEQ ID NO: 1806893 - RNA, 19 nt, Homo sapiens
  misc_RNA (1)...(19): siRNA sense strand
ggauauguaacaaaccuua

SEQ ID NO: 1806894 - RNA, 19 nt, Homo sapiens
  misc_RNA (1)...(19): siRNA sense strand
ggucaaauggcaaagaauu

SEQ ID NO: 1806895 - RNA, 19 nt, Homo sapiens
  misc_RNA (1)...(19): siRNA sense strand
ccauggaaguggucaaaug

SEQ ID NO: 1806896 - RNA, 19 nt, Homo sapiens
  misc_RNA (1)...(19): siRNA sense strand
ggacaugaacuuucuaaaa

SEQ ID NO: 1806897 - RNA, 19 nt, Homo sapiens
  misc_RNA (1)...(19): siRNA sense strand
acacuggguuggacugaaa

SEQ ID NO: 1806898 - RNA, 19 nt, Homo sapiens
  misc_RNA (1)...(19): siRNA sense strand
ccaaguuccuguccugugu

SEQ ID NO: 1806899 - RNA, 19 nt, Homo sapiens
  misc_RNA (1)...(19): siRNA sense strand
ggaaugugagaagaauuua

SEQ ID NO: 1806900 - RNA, 19 nt, Homo sapiens
  misc_RNA (1)...(19): siRNA sense strand
gaaguggucaaauggcaaa

SEQ ID NO: 1806901 - RNA, 19 nt, Homo sapiens
  misc_RNA (1)...(19): siRNA sense strand
agacagccauguuucuuca

SEQ ID NO: 1806902 - RNA, 19 nt, Homo sapiens
  misc_RNA (1)...(19): siRNA sense strand
gaauuuaacaacugguuca

SEQ ID NO: 1806903 - RNA, 19 nt, Homo sapiens
  misc_RNA (1)...(19): siRNA sense strand
ccagaggaaaugcuacuuu

SEQ ID NO: 1806904 - RNA, 19 nt, Homo sapiens
  misc_RNA (1)...(19): siRNA sense strand
uaacaacugguucaacguu

SEQ ID NO: 1806905 - RNA, 19 nt, Homo sapiens
  misc_RNA (1)...(19): siRNA sense strand
guggucaaauggcaaagaa

SEQ ID NO: 1806906 - RNA, 19 nt, Homo sapiens
  misc_RNA (1)...(19): siRNA sense strand
ccaaaaugcuuguucugaa

SEQ ID NO: 1806907 - RNA, 19 nt, Homo sapiens
  misc_RNA (1)...(19): siRNA sense strand
aacaacugguucaacguua

SEQ ID NO: 1806908 - RNA, 19 nt, Homo sapiens
  misc_RNA (1)...(19): siRNA sense strand
ucagugggccaauacaauu

SEQ ID NO: 1806909 - RNA, 19 nt, Homo sapiens
  misc_RNA (1)...(19): siRNA sense strand
ggcaaagaauuuaacaacu

SEQ ID NO: 1806910 - RNA, 19 nt, Homo sapiens
  misc_RNA (1)...(19): siRNA sense strand
gacaugaacuuucuaaaac

SEQ ID NO: 1806911 - RNA, 19 nt, Homo sapiens
  misc_RNA (1)...(19): siRNA sense strand
ucagcagcauggaauguga

SEQ ID NO: 1806912 - RNA, 19 nt, Homo sapiens
  misc_RNA (1)...(19): siRNA sense strand
uggaaugugagaagaauuu

SEQ ID NO: 1806913 - RNA, 19 nt, Homo sapiens
  misc_RNA (1)...(19): siRNA sense strand
gaacacuggguuggacuga

SEQ ID NO: 1806914 - RNA, 19 nt, Homo sapiens
  misc_RNA (1)...(19): siRNA sense strand
ccugugugcuguaaugaau

SEQ ID NO: 1806915 - RNA, 19 nt, Homo sapiens
  misc_RNA (1)...(19): siRNA sense strand
gcauggaaugugagaagaa

SEQ ID NO: 1806916 - RNA, 19 nt, Homo sapiens
  misc_RNA (1)...(19): siRNA sense strand
uacagggucugacaagugu

SEQ ID NO: 1806917 - RNA, 19 nt, Homo sapiens
  misc_RNA (1)...(19): siRNA sense strand
gcuacuuuauuucuacugu

SEQ ID NO: 1806918 - RNA, 19 nt, Homo sapiens
  misc_RNA (1)...(19): siRNA sense strand
aagaggagcuggacuucag

SEQ ID NO: 1806919 - RNA, 19 nt, Homo sapiens
  misc_RNA (1)...(19): siRNA sense strand
cauggaaugugagaagaau

SEQ ID NO: 1806920 - RNA, 19 nt, Homo sapiens
  misc_RNA (1)...(19): siRNA sense strand
acacagaggucagcagcau

SEQ ID NO: 1806921 - RNA, 19 nt, Homo sapiens
  misc_RNA (1)...(19): siRNA sense strand
gugagaagaauuuauacug

SEQ ID NO: 1806922 - RNA, 19 nt, Homo sapiens
  misc_RNA (1)...(19): siRNA sense strand
gccaauacacauucucaau

SEQ ID NO: 1806923 - RNA, 19 nt, Homo sapiens
  misc_RNA (1)...(19): siRNA sense strand
auacgcagguagagaggaa

SEQ ID NO: 1806924 - RNA, 19 nt, Homo sapiens
  misc_RNA (1)...(19): siRNA sense strand
gaggucagcagcauggaau

SEQ ID NO: 1806925 - RNA, 19 nt, Homo sapiens
  misc_RNA (1)...(19): siRNA sense strand
uguaaugaauguggucuuc

SEQ ID NO: 1806926 - RNA, 19 nt, Homo sapiens
  misc_RNA (1)...(19): siRNA sense strand
gugaagaggagcuggacuu

SEQ ID NO: 1806927 - RNA, 19 nt, Homo sapiens
  misc_RNA (1)...(19): siRNA sense strand
ccuuaucagugggccaaua

SEQ ID NO: 1806928 - RNA, 19 nt, Homo sapiens
  misc_RNA (1)...(19): siRNA sense strand
caucagacagccauguuuc

SEQ ID NO: 1806929 - RNA, 19 nt, Homo sapiens
  misc_RNA (1)...(19): siRNA sense strand
gcuaccagaggaaaugcua

SEQ ID NO: 1806930 - RNA, 19 nt, Homo sapiens
  misc_RNA (1)...(19): siRNA sense strand
gugcuacucuugcugucau

SEQ ID NO: 1806931 - RNA, 19 nt, Homo sapiens
  misc_RNA (1)...(19): siRNA sense strand
gaaccuggucacccaugga

SEQ ID NO: 1806932 - RNA, 19 nt, Homo sapiens
  misc_RNA (1)...(19): siRNA sense strand
uuaaucauagcucucauug

SEQ ID NO: 1806933 - RNA, 19 nt, Homo sapiens
  misc_RNA (1)...(19): siRNA sense strand
uuacagggucugacaagug

SEQ ID NO: 1806934 - RNA, 19 nt, Homo sapiens
  misc_RNA (1)...(19): siRNA sense strand
uguccugugugcuguaaug

SEQ ID NO: 1806935 - RNA, 19 nt, Homo sapiens
  misc_RNA (1)...(19): siRNA sense strand
ugaacauggugcuacucuu

SEQ ID NO: 1806936 - RNA, 19 nt, Homo sapiens
  misc_RNA (1)...(19): siRNA sense strand
cagcauggaaugugagaag

SEQ ID NO: 1806937 - RNA, 19 nt, Homo sapiens
  misc_RNA (1)...(19): siRNA sense strand
ccggagaguggacaagaaa

SEQ ID NO: 1806938 - RNA, 19 nt, Homo sapiens
  misc_RNA (1)...(19): siRNA sense strand
ccaucagacagccauguuu

SEQ ID NO: 1806939 - RNA, 19 nt, Homo sapiens
  misc_RNA (1)...(19): siRNA sense strand
ugugugcuguaaugaaugu

SEQ ID NO: 1806940 - RNA, 19 nt, Homo sapiens
  misc_RNA (1)...(19): siRNA sense strand
uggcaaagaauuuaacaac

SEQ ID NO: 1806941 - RNA, 19 nt, Homo sapiens
  misc_RNA (1)...(19): siRNA sense strand
cuaaaacgauacgcaggua

SEQ ID NO: 1806942 - RNA, 19 nt, Homo sapiens
  misc_RNA (1)...(19): siRNA sense strand
uugcugucauugauucuga

SEQ ID NO: 1806943 - RNA, 19 nt, Homo sapiens
  misc_RNA (1)...(19): siRNA sense strand
ucagacagccauguuucuu

SEQ ID NO: 1806944 - RNA, 19 nt, Homo sapiens
  misc_RNA (1)...(19): siRNA sense strand
uaucagugggccaauacaa

SEQ ID NO: 1806945 - RNA, 19 nt, Homo sapiens
  misc_RNA (1)...(19): siRNA sense strand
caacugguucaacguuaca

SEQ ID NO: 1806946 - RNA, 19 nt, Homo sapiens
  misc_RNA (1)...(19): siRNA sense strand
agaggaaaugcuacuuuau

SEQ ID NO: 1806947 - RNA, 19 nt, Homo sapiens
  misc_RNA (1)...(19): siRNA sense strand
gagagaagccuuauaaaug

SEQ ID NO: 1806948 - RNA, 19 nt, Homo sapiens
  misc_RNA (1)...(19): siRNA sense strand
gaaauuugcucgcucagau

SEQ ID NO: 1806949 - RNA, 19 nt, Homo sapiens
  misc_RNA (1)...(19): siRNA sense strand
gaagacggauucaccaaug

SEQ ID NO: 1806950 - RNA, 19 nt, Homo sapiens
  misc_RNA (1)...(19): siRNA sense strand
gagauagaauacagaagua

SEQ ID NO: 1806951 - RNA, 19 nt, Homo sapiens
  misc_RNA (1)...(19): siRNA sense strand
cagcagaucuuacauguca

SEQ ID NO: 1806952 - RNA, 19 nt, Homo sapiens
  misc_RNA (1)...(19): siRNA sense strand
ggagagaagccuuauaaau

SEQ ID NO: 1806953 - RNA, 19 nt, Homo sapiens
  misc_RNA (1)...(19): siRNA sense strand
ggagaacccagcacuguuu

SEQ ID NO: 1806954 - RNA, 19 nt, Homo sapiens
  misc_RNA (1)...(19): siRNA sense strand
cagcaaacauuccuacugu

SEQ ID NO: 1806955 - RNA, 19 nt, Homo sapiens
  misc_RNA (1)...(19): siRNA sense strand
caaaagcucucaccugaaa

SEQ ID NO: 1806956 - RNA, 19 nt, Homo sapiens
  misc_RNA (1)...(19): siRNA sense strand
gcaagaaccagcagcaaug

SEQ ID NO: 1806957 - RNA, 19 nt, Homo sapiens
  misc_RNA (1)...(19): siRNA sense strand
caggagagaagccuuauaa

SEQ ID NO: 1806958 - RNA, 19 nt, Homo sapiens
  misc_RNA (1)...(19): siRNA sense strand
uaauaugacuucuccaaca

SEQ ID NO: 1806959 - RNA, 19 nt, Homo sapiens
  misc_RNA (1)...(19): siRNA sense strand
gcagcaaaguguacaccaa

SEQ ID NO: 1806960 - RNA, 19 nt, Homo sapiens
  misc_RNA (1)...(19): siRNA sense strand
gcuacaagcuccaauacgu

SEQ ID NO: 1806961 - RNA, 19 nt, Homo sapiens
  misc_RNA (1)...(19): siRNA sense strand
uaagauggguggccugaag

SEQ ID NO: 1806962 - RNA, 19 nt, Homo sapiens
  misc_RNA (1)...(19): siRNA sense strand
cagucagucugccaaauaa

SEQ ID NO: 1806963 - RNA, 19 nt, Homo sapiens
  misc_RNA (1)...(19): siRNA sense strand
acccagcacuguuuaauga

SEQ ID NO: 1806964 - RNA, 19 nt, Homo sapiens
  misc_RNA (1)...(19): siRNA sense strand
gcucaccgcagaauccaua

SEQ ID NO: 1806965 - RNA, 19 nt, Homo sapiens
  misc_RNA (1)...(19): siRNA sense strand
agagaagccuuauaaaugc

SEQ ID NO: 1806966 - RNA, 19 nt, Homo sapiens
  misc_RNA (1)...(19): siRNA sense strand
gagaacccagcacuguuua

SEQ ID NO: 1806967 - RNA, 19 nt, Homo sapiens
  misc_RNA (1)...(19): siRNA sense strand
gccagcagaucuuacaugu

SEQ ID NO: 1806968 - RNA, 19 nt, Homo sapiens
  misc_RNA (1)...(19): siRNA sense strand
ucagucagucugccaaaua

SEQ ID NO: 1806969 - RNA, 19 nt, Homo sapiens
  misc_RNA (1)...(19): siRNA sense strand
caguugaccucuccuuuca

SEQ ID NO: 1806970 - RNA, 19 nt, Homo sapiens
  misc_RNA (1)...(19): siRNA sense strand
cagcagcaauggcccaaau

SEQ ID NO: 1806971 - RNA, 19 nt, Homo sapiens
  misc_RNA (1)...(19): siRNA sense strand
gaggagaguacaauugaga

SEQ ID NO: 1806972 - RNA, 19 nt, Homo sapiens
  misc_RNA (1)...(19): siRNA sense strand
gacaugagcacuucagcaa

SEQ ID NO: 1806973 - RNA, 19 nt, Homo sapiens
  misc_RNA (1)...(19): siRNA sense strand
gcagaucuuacaugucauu

SEQ ID NO: 1806974 - RNA, 19 nt, Homo sapiens
  misc_RNA (1)...(19): siRNA sense strand
ucgcuugacuugaagagaa

SEQ ID NO: 1806975 - RNA, 19 nt, Homo sapiens
  misc_RNA (1)...(19): siRNA sense strand
gaucuuacaugucauucac

SEQ ID NO: 1806976 - RNA, 19 nt, Homo sapiens
  misc_RNA (1)...(19): siRNA sense strand
gaacccagcacuguuuaau

SEQ ID NO: 1806977 - RNA, 19 nt, Homo sapiens
  misc_RNA (1)...(19): siRNA sense strand
gugaggagaguacaauuga

SEQ ID NO: 1806978 - RNA, 19 nt, Homo sapiens
  misc_RNA (1)...(19): siRNA sense strand
gauggcugcuccuggaaau

SEQ ID NO: 1806979 - RNA, 19 nt, Homo sapiens
  misc_RNA (1)...(19): siRNA sense strand
caucugacaugagcacuuc

SEQ ID NO: 1806980 - RNA, 19 nt, Homo sapiens
  misc_RNA (1)...(19): siRNA sense strand
uuacaugucauucacacua

SEQ ID NO: 1806981 - RNA, 19 nt, Homo sapiens
  misc_RNA (1)...(19): siRNA sense strand
cagcaaaguguacaccaaa

SEQ ID NO: 1806982 - RNA, 19 nt, Homo sapiens
  misc_RNA (1)...(19): siRNA sense strand
gaugagcucacucgccauu

SEQ ID NO: 1806983 - RNA, 19 nt, Homo sapiens
  misc_RNA (1)...(19): siRNA sense strand
gagaagccuuauaaaugca

SEQ ID NO: 1806984 - RNA, 19 nt, Homo sapiens
  misc_RNA (1)...(19): siRNA sense strand
gguccaacuuaauucagaa

SEQ ID NO: 1806985 - RNA, 19 nt, Homo sapiens
  misc_RNA (1)...(19): siRNA sense strand
caugagcacuucagcaaac

SEQ ID NO: 1806986 - RNA, 19 nt, Homo sapiens
  misc_RNA (1)...(19): siRNA sense strand
caaugcagguauucaagca

SEQ ID NO: 1806987 - RNA, 19 nt, Homo sapiens
  misc_RNA (1)...(19): siRNA sense strand
gagcacuucagcaaacauu

SEQ ID NO: 1806988 - RNA, 19 nt, Homo sapiens
  misc_RNA (1)...(19): siRNA sense strand
ugagauagaauacagaagu

SEQ ID NO: 1806989 - RNA, 19 nt, Homo sapiens
  misc_RNA (1)...(19): siRNA sense strand
ugagcucacucgccauuuc

SEQ ID NO: 1806990 - RNA, 19 nt, Homo sapiens
  misc_RNA (1)...(19): siRNA sense strand
gcucaaugcagguauucaa

SEQ ID NO: 1806991 - RNA, 19 nt, Homo sapiens
  misc_RNA (1)...(19): siRNA sense strand
gcaggaugcagcaaagugu

SEQ ID NO: 1806992 - RNA, 19 nt, Homo sapiens
  misc_RNA (1)...(19): siRNA sense strand
gagaagacggauucaccaa

SEQ ID NO: 1806993 - RNA, 19 nt, Homo sapiens
  misc_RNA (1)...(19): siRNA sense strand
ggagguccaacuuaauuca

SEQ ID NO: 1806994 - RNA, 19 nt, Homo sapiens
  misc_RNA (1)...(19): siRNA sense strand
caaugugacuuugcaggau

SEQ ID NO: 1806995 - RNA, 19 nt, Homo sapiens
  misc_RNA (1)...(19): siRNA sense strand
guugaccucuccuuucaca

SEQ ID NO: 1806996 - RNA, 19 nt, Homo sapiens
  misc_RNA (1)...(19): siRNA sense strand
ggaaauuugcucgcucaga

SEQ ID NO: 1806997 - RNA, 19 nt, Homo sapiens
  misc_RNA (1)...(19): siRNA sense strand
caugguguauacuacuuug

SEQ ID NO: 1806998 - RNA, 19 nt, Homo sapiens
  misc_RNA (1)...(19): siRNA sense strand
auacaggagagaagccuua

SEQ ID NO: 1806999 - RNA, 19 nt, Homo sapiens
  misc_RNA (1)...(19): siRNA sense strand
ccagcacuguuuaaugaca

SEQ ID NO: 1807000 - RNA, 19 nt, Homo sapiens
  misc_RNA (1)...(19): siRNA sense strand
cuggaucagugaaaguuga

SEQ ID NO: 1807001 - RNA, 19 nt, Homo sapiens
  misc_RNA (1)...(19): siRNA sense strand
ccaguugaccucuccuuuc

SEQ ID NO: 1807002 - RNA, 19 nt, Homo sapiens
  misc_RNA (1)...(19): siRNA sense strand
ccaacuuaauucagaaggu

SEQ ID NO: 1807003 - RNA, 19 nt, Homo sapiens
  misc_RNA (1)...(19): siRNA sense strand
caugcuacaagcuccaaua

SEQ ID NO: 1807004 - RNA, 19 nt, Homo sapiens
  misc_RNA (1)...(19): siRNA sense strand
gaagaacuuuuggcuagug

SEQ ID NO: 1807005 - RNA, 19 nt, Homo sapiens
  misc_RNA (1)...(19): siRNA sense strand
ggauggcugcuccuggaaa

SEQ ID NO: 1807006 - RNA, 19 nt, Homo sapiens
  misc_RNA (1)...(19): siRNA sense strand
uacaugucauucacacuau

SEQ ID NO: 1807007 - RNA, 19 nt, Homo sapiens
  misc_RNA (1)...(19): siRNA sense strand
uucagaagguggcucaaug

SEQ ID NO: 1807008 - RNA, 19 nt, Homo sapiens
  misc_RNA (1)...(19): siRNA sense strand
gaaagcucaccgcagaauc

SEQ ID NO: 1807009 - RNA, 19 nt, Homo sapiens
  misc_RNA (1)...(19): siRNA sense strand
uggcugcuccuggaaauuu

SEQ ID NO: 1807010 - RNA, 19 nt, Homo sapiens
  misc_RNA (1)...(19): siRNA sense strand
cauuacagucccacucauu

SEQ ID NO: 1807011 - RNA, 19 nt, Homo sapiens
  misc_RNA (1)...(19): siRNA sense strand
gcagggacuacagcaagaa

SEQ ID NO: 1807012 - RNA, 19 nt, Homo sapiens
  misc_RNA (1)...(19): siRNA sense strand
guagccagcagaucuuaca

SEQ ID NO: 1807013 - RNA, 19 nt, Homo sapiens
  misc_RNA (1)...(19): siRNA sense strand
ggagaguacaauugagagu

SEQ ID NO: 1807014 - RNA, 19 nt, Homo sapiens
  misc_RNA (1)...(19): siRNA sense strand
ggauaaacucauaaacaac

SEQ ID NO: 1807015 - RNA, 19 nt, Homo sapiens
  misc_RNA (1)...(19): siRNA sense strand
gucagucugccaaauaaga

SEQ ID NO: 1807016 - RNA, 19 nt, Homo sapiens
  misc_RNA (1)...(19): siRNA sense strand
guggcucaaugcagguauu

SEQ ID NO: 1807017 - RNA, 19 nt, Homo sapiens
  misc_RNA (1)...(19): siRNA sense strand
caggaugcagcaaagugua

SEQ ID NO: 1807018 - RNA, 19 nt, Homo sapiens
  misc_RNA (1)...(19): siRNA sense strand
gaacuuuuggcuagugauu

SEQ ID NO: 1807019 - RNA, 19 nt, Homo sapiens
  misc_RNA (1)...(19): siRNA sense strand
ugaaagcucaccgcagaau

SEQ ID NO: 1807020 - RNA, 19 nt, Homo sapiens
  misc_RNA (1)...(19): siRNA sense strand
uugaagagaagacggauuc

SEQ ID NO: 1807021 - RNA, 19 nt, Homo sapiens
  misc_RNA (1)...(19): siRNA sense strand
cauuggaggagaugguaaa

SEQ ID NO: 1807022 - RNA, 19 nt, Homo sapiens
  misc_RNA (1)...(19): siRNA sense strand
gccauuacagucccacuca

SEQ ID NO: 1807023 - RNA, 19 nt, Homo sapiens
  misc_RNA (1)...(19): siRNA sense strand
cagcacuguuuaaugacau

SEQ ID NO: 1807024 - RNA, 19 nt, Homo sapiens
  misc_RNA (1)...(19): siRNA sense strand
ugaccucuccuuucacaag

SEQ ID NO: 1807025 - RNA, 19 nt, Homo sapiens
  misc_RNA (1)...(19): siRNA sense strand
ucagcaaacauuccuacug

SEQ ID NO: 1807026 - RNA, 19 nt, Homo sapiens
  misc_RNA (1)...(19): siRNA sense strand
aagacggauucaccaaugu

SEQ ID NO: 1807027 - RNA, 19 nt, Homo sapiens
  misc_RNA (1)...(19): siRNA sense strand
gcagcaauggcccaaaugc

SEQ ID NO: 1807028 - RNA, 19 nt, Homo sapiens
  misc_RNA (1)...(19): siRNA sense strand
ugcagggacuacagcaaga

SEQ ID NO: 1807029 - RNA, 19 nt, Homo sapiens
  misc_RNA (1)...(19): siRNA sense strand
gcuccucuccagccugcua

SEQ ID NO: 1807030 - RNA, 19 nt, Homo sapiens
  misc_RNA (1)...(19): siRNA sense strand
cccaugguguauacuacuu

SEQ ID NO: 1807031 - RNA, 19 nt, Homo sapiens
  misc_RNA (1)...(19): siRNA sense strand
gaugacagcuuucagguuu

SEQ ID NO: 1807032 - RNA, 19 nt, Homo sapiens
  misc_RNA (1)...(19): siRNA sense strand
gaaguugacugaugauaca

SEQ ID NO: 1807033 - RNA, 19 nt, Homo sapiens
  misc_RNA (1)...(19): siRNA sense strand
uaaauucacuguugccaaa

SEQ ID NO: 1807034 - RNA, 19 nt, Homo sapiens
  misc_RNA (1)...(19): siRNA sense strand
gcucaaagcucaaaaugua

SEQ ID NO: 1807035 - RNA, 19 nt, Homo sapiens
  misc_RNA (1)...(19): siRNA sense strand
ggacuggccucagcucuaa

SEQ ID NO: 1807036 - RNA, 19 nt, Homo sapiens
  misc_RNA (1)...(19): siRNA sense strand
uaacaaggauuggaaguug

SEQ ID NO: 1807037 - RNA, 19 nt, Homo sapiens
  misc_RNA (1)...(19): siRNA sense strand
ggaaaucaccuacgagaau

SEQ ID NO: 1807038 - RNA, 19 nt, Homo sapiens
  misc_RNA (1)...(19): siRNA sense strand
gaaaucaccuacgagaaug

SEQ ID NO: 1807039 - RNA, 19 nt, Homo sapiens
  misc_RNA (1)...(19): siRNA sense strand
gagcaucuccagccgguua

SEQ ID NO: 1807040 - RNA, 19 nt, Homo sapiens
  misc_RNA (1)...(19): siRNA sense strand
gugaaacucugucuuccaa

SEQ ID NO: 1807041 - RNA, 19 nt, Homo sapiens
  misc_RNA (1)...(19): siRNA sense strand
gauuggaaguugacugaug

SEQ ID NO: 1807042 - RNA, 19 nt, Homo sapiens
  misc_RNA (1)...(19): siRNA sense strand
cuucuuaaauucacuguug

SEQ ID NO: 1807043 - RNA, 19 nt, Homo sapiens
  misc_RNA (1)...(19): siRNA sense strand
gcuuucagguuuccagauu

SEQ ID NO: 1807044 - RNA, 19 nt, Homo sapiens
  misc_RNA (1)...(19): siRNA sense strand
gcagaucugagguuuguga

SEQ ID NO: 1807045 - RNA, 19 nt, Homo sapiens
  misc_RNA (1)...(19): siRNA sense strand
gguggacacuggagucaga

SEQ ID NO: 1807046 - RNA, 19 nt, Homo sapiens
  misc_RNA (1)...(19): siRNA sense strand
ggacaaagcagcggucaag

SEQ ID NO: 1807047 - RNA, 19 nt, Homo sapiens
  misc_RNA (1)...(19): siRNA sense strand
cuuccaagcuggccacauu

SEQ ID NO: 1807048 - RNA, 19 nt, Homo sapiens
  misc_RNA (1)...(19): siRNA sense strand
guucagggaauucauauug

SEQ ID NO: 1807049 - RNA, 19 nt, Homo sapiens
  misc_RNA (1)...(19): siRNA sense strand
gagcagaagcugagcaaca

SEQ ID NO: 1807050 - RNA, 19 nt, Homo sapiens
  misc_RNA (1)...(19): siRNA sense strand
ucagagucauguagaaguu

SEQ ID NO: 1807051 - RNA, 19 nt, Homo sapiens
  misc_RNA (1)...(19): siRNA sense strand
gaugauacacaacgcacua

SEQ ID NO: 1807052 - RNA, 19 nt, Homo sapiens
  misc_RNA (1)...(19): siRNA sense strand
cuacgagaauguucaagug

SEQ ID NO: 1807053 - RNA, 19 nt, Homo sapiens
  misc_RNA (1)...(19): siRNA sense strand
cagcuccgccucaagauaa

SEQ ID NO: 1807054 - RNA, 19 nt, Homo sapiens
  misc_RNA (1)...(19): siRNA sense strand
gcacaaccugccugcgaua

SEQ ID NO: 1807055 - RNA, 19 nt, Homo sapiens
  misc_RNA (1)...(19): siRNA sense strand
ggagggccuuggagcagaa

SEQ ID NO: 1807056 - RNA, 19 nt, Homo sapiens
  misc_RNA (1)...(19): siRNA sense strand
gcagcuccgccucaagaua

SEQ ID NO: 1807057 - RNA, 19 nt, Homo sapiens
  misc_RNA (1)...(19): siRNA sense strand
cacaaucacacucuuacua

SEQ ID NO: 1807058 - RNA, 19 nt, Homo sapiens
  misc_RNA (1)...(19): siRNA sense strand
gagucagagucauguagaa

SEQ ID NO: 1807059 - RNA, 19 nt, Homo sapiens
  misc_RNA (1)...(19): siRNA sense strand
acaucucacuuacuucaaa

SEQ ID NO: 1807060 - RNA, 19 nt, Homo sapiens
  misc_RNA (1)...(19): siRNA sense strand
ggaaguugacugaugauac

SEQ ID NO: 1807061 - RNA, 19 nt, Homo sapiens
  misc_RNA (1)...(19): siRNA sense strand
ucagggaauucauauugga

SEQ ID NO: 1807062 - RNA, 19 nt, Homo sapiens
  misc_RNA (1)...(19): siRNA sense strand
ucaagugcccgcaguccua

SEQ ID NO: 1807063 - RNA, 19 nt, Homo sapiens
  misc_RNA (1)...(19): siRNA sense strand
ggagucagagucauguaga

SEQ ID NO: 1807064 - RNA, 19 nt, Homo sapiens
  misc_RNA (1)...(19): siRNA sense strand
gcucuaacaaggauuggaa

SEQ ID NO: 1807065 - RNA, 19 nt, Homo sapiens
  misc_RNA (1)...(19): siRNA sense strand
cagcagcuccgccucaaga

SEQ ID NO: 1807066 - RNA, 19 nt, Homo sapiens
  misc_RNA (1)...(19): siRNA sense strand
ccucagcucuaacaaggau

SEQ ID NO: 1807067 - RNA, 19 nt, Homo sapiens
  misc_RNA (1)...(19): siRNA sense strand
acacaacgcacuaggacuu

SEQ ID NO: 1807068 - RNA, 19 nt, Homo sapiens
  misc_RNA (1)...(19): siRNA sense strand
acacucuuacuacuucuua

SEQ ID NO: 1807069 - RNA, 19 nt, Homo sapiens
  misc_RNA (1)...(19): siRNA sense strand
gcagagucaggaagcacua

SEQ ID NO: 1807070 - RNA, 19 nt, Homo sapiens
  misc_RNA (1)...(19): siRNA sense strand
gauacacaacgcacuagga

SEQ ID NO: 1807071 - RNA, 19 nt, Homo sapiens
  misc_RNA (1)...(19): siRNA sense strand
cagugaaauuuauccacaa

SEQ ID NO: 1807072 - RNA, 19 nt, Homo sapiens
  misc_RNA (1)...(19): siRNA sense strand
cuaugcagaucugagguuu

SEQ ID NO: 1807073 - RNA, 19 nt, Homo sapiens
  misc_RNA (1)...(19): siRNA sense strand
gggaaaucaccuacgagaa

SEQ ID NO: 1807074 - RNA, 19 nt, Homo sapiens
  misc_RNA (1)...(19): siRNA sense strand
uuacaucucacuuacuuca

SEQ ID NO: 1807075 - RNA, 19 nt, Homo sapiens
  misc_RNA (1)...(19): siRNA sense strand
auuggaaguugacugauga

SEQ ID NO: 1807076 - RNA, 19 nt, Homo sapiens
  misc_RNA (1)...(19): siRNA sense strand
ggccaucaccuaugcagau

SEQ ID NO: 1807077 - RNA, 19 nt, Homo sapiens
  misc_RNA (1)...(19): siRNA sense strand
caucaccuaugcagaucug

SEQ ID NO: 1807078 - RNA, 19 nt, Homo sapiens
  misc_RNA (1)...(19): siRNA sense strand
aacaaggauuggaaguuga

SEQ ID NO: 1807079 - RNA, 19 nt, Homo sapiens
  misc_RNA (1)...(19): siRNA sense strand
cuuucagguuuccagauua

SEQ ID NO: 1807080 - RNA, 19 nt, Homo sapiens
  misc_RNA (1)...(19): siRNA sense strand
guugacugaugauacacaa

SEQ ID NO: 1807081 - RNA, 19 nt, Homo sapiens
  misc_RNA (1)...(19): siRNA sense strand
gcacuacagguggaacaga

SEQ ID NO: 1807082 - RNA, 19 nt, Homo sapiens
  misc_RNA (1)...(19): siRNA sense strand
augcagaucugagguuugu

SEQ ID NO: 1807083 - RNA, 19 nt, Homo sapiens
  misc_RNA (1)...(19): siRNA sense strand
caaagugaggagcaacaga

SEQ ID NO: 1807084 - RNA, 19 nt, Homo sapiens
  misc_RNA (1)...(19): siRNA sense strand
ucaccugccugcuguuagg

SEQ ID NO: 1807085 - RNA, 19 nt, Homo sapiens
  misc_RNA (1)...(19): siRNA sense strand
guaacaagguacauaaaac

SEQ ID NO: 1807086 - RNA, 19 nt, Homo sapiens
  misc_RNA (1)...(19): siRNA sense strand
cacuaggacuuaugcucaa

SEQ ID NO: 1807087 - RNA, 19 nt, Homo sapiens
  misc_RNA (1)...(19): siRNA sense strand
gugguucagggaauucaua

SEQ ID NO: 1807088 - RNA, 19 nt, Homo sapiens
  misc_RNA (1)...(19): siRNA sense strand
caaucacacucuuacuacu

SEQ ID NO: 1807089 - RNA, 19 nt, Homo sapiens
  misc_RNA (1)...(19): siRNA sense strand
gggacagagugcagaggau

SEQ ID NO: 1807090 - RNA, 19 nt, Homo sapiens
  misc_RNA (1)...(19): siRNA sense strand
caacgcacuaggacuuaug

SEQ ID NO: 1807091 - RNA, 19 nt, Homo sapiens
  misc_RNA (1)...(19): siRNA sense strand
acagacagaagacgaagga

SEQ ID NO: 1807092 - RNA, 19 nt, Homo sapiens
  misc_RNA (1)...(19): siRNA sense strand
cacaacgcacuaggacuua

SEQ ID NO: 1807093 - RNA, 19 nt, Homo sapiens
  misc_RNA (1)...(19): siRNA sense strand
aggagaccuugcaaaguga

SEQ ID NO: 1807094 - RNA, 19 nt, Homo sapiens
  misc_RNA (1)...(19): siRNA sense strand
cuaacaaggauuggaaguu

SEQ ID NO: 1807095 - RNA, 19 nt, Homo sapiens
  misc_RNA (1)...(19): siRNA sense strand
caagcuggccacauucagu

SEQ ID NO: 1807096 - RNA, 19 nt, Homo sapiens
  misc_RNA (1)...(19): siRNA sense strand
ugagcaacauggagaacag

SEQ ID NO: 1807097 - RNA, 19 nt, Homo sapiens
  misc_RNA (1)...(19): siRNA sense strand
aaauggugguucagggaau

SEQ ID NO: 1807098 - RNA, 19 nt, Homo sapiens
  misc_RNA (1)...(19): siRNA sense strand
gcugaggccaucaccuaug

SEQ ID NO: 1807099 - RNA, 19 nt, Homo sapiens
  misc_RNA (1)...(19): siRNA sense strand
gcagaagcugagcaacaug

SEQ ID NO: 1807100 - RNA, 19 nt, Homo sapiens
  misc_RNA (1)...(19): siRNA sense strand
acaaagcagcggucaaguc

SEQ ID NO: 1807101 - RNA, 19 nt, Homo sapiens
  misc_RNA (1)...(19): siRNA sense strand
aaugugaaacucugucuuc

SEQ ID NO: 1807102 - RNA, 19 nt, Homo sapiens
  misc_RNA (1)...(19): siRNA sense strand
ccucaccugccugcuguua

SEQ ID NO: 1807103 - RNA, 19 nt, Homo sapiens
  misc_RNA (1)...(19): siRNA sense strand
uuucagguuuccagauuag

SEQ ID NO: 1807104 - RNA, 19 nt, Homo sapiens
  misc_RNA (1)...(19): siRNA sense strand
aaucacacucuuacuacuu

SEQ ID NO: 1807105 - RNA, 19 nt, Homo sapiens
  misc_RNA (1)...(19): siRNA sense strand
cuuggcuucuucuguacua

SEQ ID NO: 1807106 - RNA, 19 nt, Homo sapiens
  misc_RNA (1)...(19): siRNA sense strand
uauccacaaucacacucuu

SEQ ID NO: 1807107 - RNA, 19 nt, Homo sapiens
  misc_RNA (1)...(19): siRNA sense strand
cagacagacagaagacgaa

SEQ ID NO: 1807108 - RNA, 19 nt, Homo sapiens
  misc_RNA (1)...(19): siRNA sense strand
gccaucaccuaugcagauc

SEQ ID NO: 1807109 - RNA, 19 nt, Homo sapiens
  misc_RNA (1)...(19): siRNA sense strand
aauggugguucagggaauu

SEQ ID NO: 1807110 - RNA, 19 nt, Homo sapiens
  misc_RNA (1)...(19): siRNA sense strand
acaaucacacucuuacuac

SEQ ID NO: 1807111 - RNA, 19 nt, Homo sapiens
  misc_RNA (1)...(19): siRNA sense strand
gagcaacauggagaacaga

SEQ ID NO: 1807112 - RNA, 19 nt, Homo sapiens
  misc_RNA (1)...(19): siRNA sense strand
agcagaagcugagcaacau

SEQ ID NO: 1807113 - RNA, 19 nt, Homo sapiens
  misc_RNA (1)...(19): siRNA sense strand
ccaaugagauggucaagaa

SEQ ID NO: 1807114 - RNA, 19 nt, Homo sapiens
  misc_RNA (1)...(19): siRNA sense strand
ggacauggcagcaguauuc

SEQ ID NO: 1807115 - RNA, 19 nt, Homo sapiens
  misc_RNA (1)...(19): siRNA sense strand
gaucaaagaacaggacaua

SEQ ID NO: 1807116 - RNA, 19 nt, Homo sapiens
  misc_RNA (1)...(19): siRNA sense strand
guagagaacaucagccaua

SEQ ID NO: 1807117 - RNA, 19 nt, Homo sapiens
  misc_RNA (1)...(19): siRNA sense strand
gcgaugaggucaauguaga

SEQ ID NO: 1807118 - RNA, 19 nt, Homo sapiens
  misc_RNA (1)...(19): siRNA sense strand
ucaaagaacaggacauaaa

SEQ ID NO: 1807119 - RNA, 19 nt, Homo sapiens
  misc_RNA (1)...(19): siRNA sense strand
ggaaucagaacuccaaaug

SEQ ID NO: 1807120 - RNA, 19 nt, Homo sapiens
  misc_RNA (1)...(19): siRNA sense strand
guacagguauacccgaaau

SEQ ID NO: 1807121 - RNA, 19 nt, Homo sapiens
  misc_RNA (1)...(19): siRNA sense strand
gcagcaguauucaugauca

SEQ ID NO: 1807122 - RNA, 19 nt, Homo sapiens
  misc_RNA (1)...(19): siRNA sense strand
aaucagaacuccaaaugca

SEQ ID NO: 1807123 - RNA, 19 nt, Homo sapiens
  misc_RNA (1)...(19): siRNA sense strand
ugaagaugcuacagggaaa

SEQ ID NO: 1807124 - RNA, 19 nt, Homo sapiens
  misc_RNA (1)...(19): siRNA sense strand
cccgaaaucuuguggauca

SEQ ID NO: 1807125 - RNA, 19 nt, Homo sapiens
  misc_RNA (1)...(19): siRNA sense strand
gaaaucuaaaggagacauu

SEQ ID NO: 1807126 - RNA, 19 nt, Homo sapiens
  misc_RNA (1)...(19): siRNA sense strand
gaacuccaaaugcaacuuc

SEQ ID NO: 1807127 - RNA, 19 nt, Homo sapiens
  misc_RNA (1)...(19): siRNA sense strand
ggucaagaagucugaaaga

SEQ ID NO: 1807128 - RNA, 19 nt, Homo sapiens
  misc_RNA (1)...(19): siRNA sense strand
gaaggacauggcagcagua

SEQ ID NO: 1807129 - RNA, 19 nt, Homo sapiens
  misc_RNA (1)...(19): siRNA sense strand
cuaaaggagacauuauuug

SEQ ID NO: 1807130 - RNA, 19 nt, Homo sapiens
  misc_RNA (1)...(19): siRNA sense strand
uaaaggagacauuauuugc

SEQ ID NO: 1807131 - RNA, 19 nt, Homo sapiens
  misc_RNA (1)...(19): siRNA sense strand
caaagaacaggacauaaaa

SEQ ID NO: 1807132 - RNA, 19 nt, Homo sapiens
  misc_RNA (1)...(19): siRNA sense strand
uaccaacucccacugcuuu

SEQ ID NO: 1807133 - RNA, 19 nt, Homo sapiens
  misc_RNA (1)...(19): siRNA sense strand
ucaagaagucugaaagagu

SEQ ID NO: 1807134 - RNA, 19 nt, Homo sapiens
  misc_RNA (1)...(19): siRNA sense strand
aaaccagugugccuacauc

SEQ ID NO: 1807135 - RNA, 19 nt, Homo sapiens
  misc_RNA (1)...(19): siRNA sense strand
ccacugcuuucugaagaug

SEQ ID NO: 1807136 - RNA, 19 nt, Homo sapiens
  misc_RNA (1)...(19): siRNA sense strand
ccagugugccuacaucaau

SEQ ID NO: 1807137 - RNA, 19 nt, Homo sapiens
  misc_RNA (1)...(19): siRNA sense strand
acgccaaguucgaccagua

SEQ ID NO: 1807138 - RNA, 19 nt, Homo sapiens
  misc_RNA (1)...(19): siRNA sense strand
gaugcuacagggaaaucua

SEQ ID NO: 1807139 - RNA, 19 nt, Homo sapiens
  misc_RNA (1)...(19): siRNA sense strand
uggcuuacaucgaguagag

SEQ ID NO: 1807140 - RNA, 19 nt, Homo sapiens
  misc_RNA (1)...(19): siRNA sense strand
cgggcucgcuggagaacaa

SEQ ID NO: 1807141 - RNA, 19 nt, Homo sapiens
  misc_RNA (1)...(19): siRNA sense strand
ggcaauguacgccaaguuc

SEQ ID NO: 1807142 - RNA, 19 nt, Homo sapiens
  misc_RNA (1)...(19): siRNA sense strand
cagugugccuacaucaaug

SEQ ID NO: 1807143 - RNA, 19 nt, Homo sapiens
  misc_RNA (1)...(19): siRNA sense strand
gucaagaagucugaaagag

SEQ ID NO: 1807144 - RNA, 19 nt, Homo sapiens
  misc_RNA (1)...(19): siRNA sense strand
ucccacugcuuucugaaga

SEQ ID NO: 1807145 - RNA, 19 nt, Homo sapiens
  misc_RNA (1)...(19): siRNA sense strand
uagagaacaucagccauac

SEQ ID NO: 1807146 - RNA, 19 nt, Homo sapiens
  misc_RNA (1)...(19): siRNA sense strand
agguauacccgaaaucuug

SEQ ID NO: 1807147 - RNA, 19 nt, Homo sapiens
  misc_RNA (1)...(19): siRNA sense strand
ggaggugcaggccaucaug

SEQ ID NO: 1807148 - RNA, 19 nt, Homo sapiens
  misc_RNA (1)...(19): siRNA sense strand
gaagaugcuacagggaaau

SEQ ID NO: 1807149 - RNA, 19 nt, Homo sapiens
  misc_RNA (1)...(19): siRNA sense strand
gaaucagaacuccaaaugc

SEQ ID NO: 1807150 - RNA, 19 nt, Homo sapiens
  misc_RNA (1)...(19): siRNA sense strand
gggcaauguacgccaaguu

SEQ ID NO: 1807151 - RNA, 19 nt, Homo sapiens
  misc_RNA (1)...(19): siRNA sense strand
caauguacgccaaguucga

SEQ ID NO: 1807152 - RNA, 19 nt, Homo sapiens
  misc_RNA (1)...(19): siRNA sense strand
uuauuugccuggccugaca

SEQ ID NO: 1807153 - RNA, 19 nt, Homo sapiens
  misc_RNA (1)...(19): siRNA sense strand
uacccgaaaucuuguggau

SEQ ID NO: 1807154 - RNA, 19 nt, Homo sapiens
  misc_RNA (1)...(19): siRNA sense strand
uggcagcaguauucaugau

SEQ ID NO: 1807155 - RNA, 19 nt, Homo sapiens
  misc_RNA (1)...(19): siRNA sense strand
gcuuacaucgaguagagaa

SEQ ID NO: 1807156 - RNA, 19 nt, Homo sapiens
  misc_RNA (1)...(19): siRNA sense strand
cagcaguauucaugaucau

SEQ ID NO: 1807157 - RNA, 19 nt, Homo sapiens
  misc_RNA (1)...(19): siRNA sense strand
gguauacccgaaaucuugu

SEQ ID NO: 1807158 - RNA, 19 nt, Homo sapiens
  misc_RNA (1)...(19): siRNA sense strand
gauacaaacuggacucuca

SEQ ID NO: 1807159 - RNA, 19 nt, Homo sapiens
  misc_RNA (1)...(19): siRNA sense strand
uaauccaccucuucugcuu

SEQ ID NO: 1807160 - RNA, 19 nt, Homo sapiens
  misc_RNA (1)...(19): siRNA sense strand
ccaucagccuccugguuau

SEQ ID NO: 1807161 - RNA, 19 nt, Homo sapiens
  misc_RNA (1)...(19): siRNA sense strand
guuaugguacagauacaaa

SEQ ID NO: 1807162 - RNA, 19 nt, Homo sapiens
  misc_RNA (1)...(19): siRNA sense strand
gcggaggcauuuuccuuuu

SEQ ID NO: 1807163 - RNA, 19 nt, Homo sapiens
  misc_RNA (1)...(19): siRNA sense strand
caccucuucugcuucaguu

SEQ ID NO: 1807164 - RNA, 19 nt, Homo sapiens
  misc_RNA (1)...(19): siRNA sense strand
gcgcuuccucuuccuccua

SEQ ID NO: 1807165 - RNA, 19 nt, Homo sapiens
  misc_RNA (1)...(19): siRNA sense strand
acuggacucucaggacaaa

SEQ ID NO: 1807166 - RNA, 19 nt, Homo sapiens
  misc_RNA (1)...(19): siRNA sense strand
ccucuucugcuucaguuga

SEQ ID NO: 1807167 - RNA, 19 nt, Homo sapiens
  misc_RNA (1)...(19): siRNA sense strand
agucagaucuugugaauga

SEQ ID NO: 1807168 - RNA, 19 nt, Homo sapiens
  misc_RNA (1)...(19): siRNA sense strand
gacagcagcuuccaucuau

SEQ ID NO: 1807169 - RNA, 19 nt, Homo sapiens
  misc_RNA (1)...(19): siRNA sense strand
gcucacagccucacuucua

SEQ ID NO: 1807170 - RNA, 19 nt, Homo sapiens
  misc_RNA (1)...(19): siRNA sense strand
ggacagcagcuuccaucua

SEQ ID NO: 1807171 - RNA, 19 nt, Homo sapiens
  misc_RNA (1)...(19): siRNA sense strand
gagacaauauacaccaaug

SEQ ID NO: 1807172 - RNA, 19 nt, Homo sapiens
  misc_RNA (1)...(19): siRNA sense strand
aaagucagaucuugugaau

SEQ ID NO: 1807173 - RNA, 19 nt, Homo sapiens
  misc_RNA (1)...(19): siRNA sense strand
cugccaagcucacuauuga

SEQ ID NO: 1807174 - RNA, 19 nt, Homo sapiens
  misc_RNA (1)...(19): siRNA sense strand
gauggcaacagucuaauug

SEQ ID NO: 1807175 - RNA, 19 nt, Homo sapiens
  misc_RNA (1)...(19): siRNA sense strand
gagagacaauauacaccaa

SEQ ID NO: 1807176 - RNA, 19 nt, Homo sapiens
  misc_RNA (1)...(19): siRNA sense strand
cagccucacuucuaaacuu

SEQ ID NO: 1807177 - RNA, 19 nt, Homo sapiens
  misc_RNA (1)...(19): siRNA sense strand
gcauacagcggucgagaga

SEQ ID NO: 1807178 - RNA, 19 nt, Homo sapiens
  misc_RNA (1)...(19): siRNA sense strand
cuaauugugggauauguaa

SEQ ID NO: 1807179 - RNA, 19 nt, Homo sapiens
  misc_RNA (1)...(19): siRNA sense strand
gucauaaagucagaucuug

SEQ ID NO: 1807180 - RNA, 19 nt, Homo sapiens
  misc_RNA (1)...(19): siRNA sense strand
aauaggaacucaacaagcu

SEQ ID NO: 1807181 - RNA, 19 nt, Homo sapiens
  misc_RNA (1)...(19): siRNA sense strand
ggcuacagcugguacaaag

SEQ ID NO: 1807182 - RNA, 19 nt, Homo sapiens
  misc_RNA (1)...(19): siRNA sense strand
cagcagcuuccaucuauga

SEQ ID NO: 1807183 - RNA, 19 nt, Homo sapiens
  misc_RNA (1)...(19): siRNA sense strand
ugugggauauguaauagga

SEQ ID NO: 1807184 - RNA, 19 nt, Homo sapiens
  misc_RNA (1)...(19): siRNA sense strand
ggauggcaacagucuaauu

SEQ ID NO: 1807185 - RNA, 19 nt, Homo sapiens
  misc_RNA (1)...(19): siRNA sense strand
guggauggcaacagucuaa

SEQ ID NO: 1807186 - RNA, 19 nt, Homo sapiens
  misc_RNA (1)...(19): siRNA sense strand
auacagcggucgagagaca

SEQ ID NO: 1807187 - RNA, 19 nt, Homo sapiens
  misc_RNA (1)...(19): siRNA sense strand
ggaggugcuucuacuuguc

SEQ ID NO: 1807188 - RNA, 19 nt, Homo sapiens
  misc_RNA (1)...(19): siRNA sense strand
cagaaugucacccagaaug

SEQ ID NO: 1807189 - RNA, 19 nt, Homo sapiens
  misc_RNA (1)...(19): siRNA sense strand
guaauaggaacucaacaag

SEQ ID NO: 1807190 - RNA, 19 nt, Homo sapiens
  misc_RNA (1)...(19): siRNA sense strand
cauaaagucagaucuugug

SEQ ID NO: 1807191 - RNA, 19 nt, Homo sapiens
  misc_RNA (1)...(19): siRNA sense strand
uggcaacagucuaauugug

SEQ ID NO: 1807192 - RNA, 19 nt, Homo sapiens
  misc_RNA (1)...(19): siRNA sense strand
acaguuccauguauaccaa

SEQ ID NO: 1807193 - RNA, 19 nt, Homo sapiens
  misc_RNA (1)...(19): siRNA sense strand
gccaagcucacuauugaau

SEQ ID NO: 1807194 - RNA, 19 nt, Homo sapiens
  misc_RNA (1)...(19): siRNA sense strand
gauauguaauaggaacuca

SEQ ID NO: 1807195 - RNA, 19 nt, Homo sapiens
  misc_RNA (1)...(19): siRNA sense strand
aagaguggauggcaacagu

SEQ ID NO: 1807196 - RNA, 19 nt, Homo sapiens
  misc_RNA (1)...(19): siRNA sense strand
uaaagucagaucuugugaa

SEQ ID NO: 1807197 - RNA, 19 nt, Homo sapiens
  misc_RNA (1)...(19): siRNA sense strand
cucacagccucacuucuaa

SEQ ID NO: 1807198 - RNA, 19 nt, Homo sapiens
  misc_RNA (1)...(19): siRNA sense strand
uccagaaugucacccagaa

SEQ ID NO: 1807199 - RNA, 19 nt, Homo sapiens
  misc_RNA (1)...(19): siRNA sense strand
caucccugcugauccagaa

SEQ ID NO: 1807200 - RNA, 19 nt, Homo sapiens
  misc_RNA (1)...(19): siRNA sense strand
gacaauauacaccaaugca

SEQ ID NO: 1807201 - RNA, 19 nt, Homo sapiens
  misc_RNA (1)...(19): siRNA sense strand
caagcucacuauugaaucc

SEQ ID NO: 1807202 - RNA, 19 nt, Homo sapiens
  misc_RNA (1)...(19): siRNA sense strand
acagucuaauugugggaua

SEQ ID NO: 1807203 - RNA, 19 nt, Homo sapiens
  misc_RNA (1)...(19): siRNA sense strand
uguaauaggaacucaacaa

SEQ ID NO: 1807204 - RNA, 19 nt, Homo sapiens
  misc_RNA (1)...(19): siRNA sense strand
agaaugucacccagaauga

SEQ ID NO: 1807205 - RNA, 19 nt, Homo sapiens
  misc_RNA (1)...(19): siRNA sense strand
ccacugccaagcucacuau

SEQ ID NO: 1807206 - RNA, 19 nt, Homo sapiens
  misc_RNA (1)...(19): siRNA sense strand
cacccagaaugacauagga

SEQ ID NO: 1807207 - RNA, 19 nt, Homo sapiens
  misc_RNA (1)...(19): siRNA sense strand
cuacacccuacaagucaua

SEQ ID NO: 1807208 - RNA, 19 nt, Homo sapiens
  misc_RNA (1)...(19): siRNA sense strand
uacaagucauaaagucaga

SEQ ID NO: 1807209 - RNA, 19 nt, Homo sapiens
  misc_RNA (1)...(19): siRNA sense strand
uuccauguauaccaagaaa

SEQ ID NO: 1807210 - RNA, 19 nt, Homo sapiens
  misc_RNA (1)...(19): siRNA sense strand
gcucugccuucucgauguc

SEQ ID NO: 1807211 - RNA, 19 nt, Homo sapiens
  misc_RNA (1)...(19): siRNA sense strand
aggaggugcuucuacuugu

SEQ ID NO: 1807212 - RNA, 19 nt, Homo sapiens
  misc_RNA (1)...(19): siRNA sense strand
gcggucgagagacaauaua

SEQ ID NO: 1807213 - RNA, 19 nt, Homo sapiens
  misc_RNA (1)...(19): siRNA sense strand
ucacagccucacuucuaaa

SEQ ID NO: 1807214 - RNA, 19 nt, Homo sapiens
  misc_RNA (1)...(19): siRNA sense strand
aaggaggugcuucuacuug

SEQ ID NO: 1807215 - RNA, 19 nt, Homo sapiens
  misc_RNA (1)...(19): siRNA sense strand
gaaagaguggauggcaaca

SEQ ID NO: 1807216 - RNA, 19 nt, Homo sapiens
  misc_RNA (1)...(19): siRNA sense strand
caacaaaugugaagaaugu

SEQ ID NO: 1807217 - RNA, 19 nt, Homo sapiens
  misc_RNA (1)...(19): siRNA sense strand
ccucaacccuuacuuauua

SEQ ID NO: 1807218 - RNA, 19 nt, Homo sapiens
  misc_RNA (1)...(19): siRNA sense strand
gaaaugugauguuagagaa

SEQ ID NO: 1807219 - RNA, 19 nt, Homo sapiens
  misc_RNA (1)...(19): siRNA sense strand
ggagagaaauccuacaaau

SEQ ID NO: 1807220 - RNA, 19 nt, Homo sapiens
  misc_RNA (1)...(19): siRNA sense strand
gaucugcaauccuuauuaa

SEQ ID NO: 1807221 - RNA, 19 nt, Homo sapiens
  misc_RNA (1)...(19): siRNA sense strand
gagagaagcccuacaaaug

SEQ ID NO: 1807222 - RNA, 19 nt, Homo sapiens
  misc_RNA (1)...(19): siRNA sense strand
gagagaagcccuacaaaug

SEQ ID NO: 1807223 - RNA, 19 nt, Homo sapiens
  misc_RNA (1)...(19): siRNA sense strand
gagagaagcccuacaaaug

SEQ ID NO: 1807224 - RNA, 19 nt, Homo sapiens
  misc_RNA (1)...(19): siRNA sense strand
gagagaagcccuacaaaug

SEQ ID NO: 1807225 - RNA, 19 nt, Homo sapiens
  misc_RNA (1)...(19): siRNA sense strand
cuacaaaugugaagaaugu

SEQ ID NO: 1807226 - RNA, 19 nt, Homo sapiens
  misc_RNA (1)...(19): siRNA sense strand
cuacaaaugugaagaaugu

SEQ ID NO: 1807227 - RNA, 19 nt, Homo sapiens
  misc_RNA (1)...(19): siRNA sense strand
cuacaaaugugaagaaugu

SEQ ID NO: 1807228 - RNA, 19 nt, Homo sapiens
  misc_RNA (1)...(19): siRNA sense strand
cuacaaaugugaagaaugu

SEQ ID NO: 1807229 - RNA, 19 nt, Homo sapiens
  misc_RNA (1)...(19): siRNA sense strand
cuacaaaugugaagaaugu

SEQ ID NO: 1807230 - RNA, 19 nt, Homo sapiens
  misc_RNA (1)...(19): siRNA sense strand
cuacaaaugugaagaaugu

SEQ ID NO: 1807231 - RNA, 19 nt, Homo sapiens
  misc_RNA (1)...(19): siRNA sense strand
cuacaaaugugaagaaugu

SEQ ID NO: 1807232 - RNA, 19 nt, Homo sapiens
  misc_RNA (1)...(19): siRNA sense strand
cuacaaaugugaagaaugu

SEQ ID NO: 1807233 - RNA, 19 nt, Homo sapiens
  misc_RNA (1)...(19): siRNA sense strand
cuacaaaugugaagaaugu

SEQ ID NO: 1807234 - RNA, 19 nt, Homo sapiens
  misc_RNA (1)...(19): siRNA sense strand
cuacaaaugugaagaaugu

SEQ ID NO: 1807235 - RNA, 19 nt, Homo sapiens
  misc_RNA (1)...(19): siRNA sense strand
cuacaaaugugaagaaugu

SEQ ID NO: 1807236 - RNA, 19 nt, Homo sapiens
  misc_RNA (1)...(19): siRNA sense strand
cuacaaaugugaagaaugu

SEQ ID NO: 1807237 - RNA, 19 nt, Homo sapiens
  misc_RNA (1)...(19): siRNA sense strand
cuacaaaugugaagaaugu

SEQ ID NO: 1807238 - RNA, 19 nt, Homo sapiens
  misc_RNA (1)...(19): siRNA sense strand
cuacaaaugugaagaaugu

SEQ ID NO: 1807239 - RNA, 19 nt, Homo sapiens
  misc_RNA (1)...(19): siRNA sense strand
cuacaaaugugaagaaugu

SEQ ID NO: 1807240 - RNA, 19 nt, Homo sapiens
  misc_RNA (1)...(19): siRNA sense strand
cuacaaaugugaagaaugu

SEQ ID NO: 1807241 - RNA, 19 nt, Homo sapiens
  misc_RNA (1)...(19): siRNA sense strand
cuacaaaugugaagaaugu

SEQ ID NO: 1807242 - RNA, 19 nt, Homo sapiens
  misc_RNA (1)...(19): siRNA sense strand
cuacaaaugugaagaaugu

SEQ ID NO: 1807243 - RNA, 19 nt, Homo sapiens
  misc_RNA (1)...(19): siRNA sense strand
cuacaaaugugaagaaugu

SEQ ID NO: 1807244 - RNA, 19 nt, Homo sapiens
  misc_RNA (1)...(19): siRNA sense strand
cuacaaaugugaagaaugu

SEQ ID NO: 1807245 - RNA, 19 nt, Homo sapiens
  misc_RNA (1)...(19): siRNA sense strand
cuacaaaugugaagaaugu

SEQ ID NO: 1807246 - RNA, 19 nt, Homo sapiens
  misc_RNA (1)...(19): siRNA sense strand
cuacaaaugugaagaaugu

SEQ ID NO: 1807247 - RNA, 19 nt, Homo sapiens
  misc_RNA (1)...(19): siRNA sense strand
cuacaaaugugaagaaugu

SEQ ID NO: 1807248 - RNA, 19 nt, Homo sapiens
  misc_RNA (1)...(19): siRNA sense strand
cuacaaaugugaagaaugu

SEQ ID NO: 1807249 - RNA, 19 nt, Homo sapiens
  misc_RNA (1)...(19): siRNA sense strand
gcacaaagaagguuauaau

SEQ ID NO: 1807250 - RNA, 19 nt, Homo sapiens
  misc_RNA (1)...(19): siRNA sense strand
ccaguuauauguucucauu

SEQ ID NO: 1807251 - RNA, 19 nt, Homo sapiens
  misc_RNA (1)...(19): siRNA sense strand
gaacauaaggcaacucaug

SEQ ID NO: 1807252 - RNA, 19 nt, Homo sapiens
  misc_RNA (1)...(19): siRNA sense strand
gaacauaaggcaacucaug

SEQ ID NO: 1807253 - RNA, 19 nt, Homo sapiens
  misc_RNA (1)...(19): siRNA sense strand
caucaaaccuuauggaaca

SEQ ID NO: 1807254 - RNA, 19 nt, Homo sapiens
  misc_RNA (1)...(19): siRNA sense strand
gagagaaacccuacaaaug

SEQ ID NO: 1807255 - RNA, 19 nt, Homo sapiens
  misc_RNA (1)...(19): siRNA sense strand
gagagaaacccuacaaaug

SEQ ID NO: 1807256 - RNA, 19 nt, Homo sapiens
  misc_RNA (1)...(19): siRNA sense strand
gagagaaacccuacaaaug

SEQ ID NO: 1807257 - RNA, 19 nt, Homo sapiens
  misc_RNA (1)...(19): siRNA sense strand
gagagaaacccuacaaaug

SEQ ID NO: 1807258 - RNA, 19 nt, Homo sapiens
  misc_RNA (1)...(19): siRNA sense strand
gagagaaacccuacaaaug

SEQ ID NO: 1807259 - RNA, 19 nt, Homo sapiens
  misc_RNA (1)...(19): siRNA sense strand
gagagaaacccuacaaaug

SEQ ID NO: 1807260 - RNA, 19 nt, Homo sapiens
  misc_RNA (1)...(19): siRNA sense strand
gagagaaacccuacaaaug

SEQ ID NO: 1807261 - RNA, 19 nt, Homo sapiens
  misc_RNA (1)...(19): siRNA sense strand
gagagaaacccuacaaaug

SEQ ID NO: 1807262 - RNA, 19 nt, Homo sapiens
  misc_RNA (1)...(19): siRNA sense strand
gagagaaacccuacaaaug

SEQ ID NO: 1807263 - RNA, 19 nt, Homo sapiens
  misc_RNA (1)...(19): siRNA sense strand
gagagaaacccuacaaaug

SEQ ID NO: 1807264 - RNA, 19 nt, Homo sapiens
  misc_RNA (1)...(19): siRNA sense strand
gagagaaacccuacaaaug

SEQ ID NO: 1807265 - RNA, 19 nt, Homo sapiens
  misc_RNA (1)...(19): siRNA sense strand
gagagaaacccuacaaaug

SEQ ID NO: 1807266 - RNA, 19 nt, Homo sapiens
  misc_RNA (1)...(19): siRNA sense strand
gagagaaacccuacaaaug

SEQ ID NO: 1807267 - RNA, 19 nt, Homo sapiens
  misc_RNA (1)...(19): siRNA sense strand
gagagaaacccuacaaaug

SEQ ID NO: 1807268 - RNA, 19 nt, Homo sapiens
  misc_RNA (1)...(19): siRNA sense strand
gacaugagaugguggaaga

SEQ ID NO: 1807269 - RNA, 19 nt, Homo sapiens
  misc_RNA (1)...(19): siRNA sense strand
aaagaguccuggaauauga

SEQ ID NO: 1807270 - RNA, 19 nt, Homo sapiens
  misc_RNA (1)...(19): siRNA sense strand
ucacaccuaucucaacaua

SEQ ID NO: 1807271 - RNA, 19 nt, Homo sapiens
  misc_RNA (1)...(19): siRNA sense strand
acaccuaucucaacauaaa

SEQ ID NO: 1807272 - RNA, 19 nt, Homo sapiens
  misc_RNA (1)...(19): siRNA sense strand
gagaaacucuacaaaugug

SEQ ID NO: 1807273 - RNA, 19 nt, Homo sapiens
  misc_RNA (1)...(19): siRNA sense strand
gagaggaacccuacaaaug

SEQ ID NO: 1807274 - RNA, 19 nt, Homo sapiens
  misc_RNA (1)...(19): siRNA sense strand
ggaaaagaguccuggaaua

SEQ ID NO: 1807275 - RNA, 19 nt, Homo sapiens
  misc_RNA (1)...(19): siRNA sense strand
uaaccaaucugcaauucuu

SEQ ID NO: 1807276 - RNA, 19 nt, Homo sapiens
  misc_RNA (1)...(19): siRNA sense strand
uaaccaaucugcaauccuu

SEQ ID NO: 1807277 - RNA, 19 nt, Homo sapiens
  misc_RNA (1)...(19): siRNA sense strand
gagaaacccuacaaaugug

SEQ ID NO: 1807278 - RNA, 19 nt, Homo sapiens
  misc_RNA (1)...(19): siRNA sense strand
gagaaacccuacaaaugug

SEQ ID NO: 1807279 - RNA, 19 nt, Homo sapiens
  misc_RNA (1)...(19): siRNA sense strand
gagaaacccuacaaaugug

SEQ ID NO: 1807280 - RNA, 19 nt, Homo sapiens
  misc_RNA (1)...(19): siRNA sense strand
gagaaacccuacaaaugug

SEQ ID NO: 1807281 - RNA, 19 nt, Homo sapiens
  misc_RNA (1)...(19): siRNA sense strand
gagaaacccuacaaaugug

SEQ ID NO: 1807282 - RNA, 19 nt, Homo sapiens
  misc_RNA (1)...(19): siRNA sense strand
gagaaacccuacaaaugug

SEQ ID NO: 1807283 - RNA, 19 nt, Homo sapiens
  misc_RNA (1)...(19): siRNA sense strand
gcacagcagaauuuauaua

SEQ ID NO: 1807284 - RNA, 19 nt, Homo sapiens
  misc_RNA (1)...(19): siRNA sense strand
gagaaacccuacaaaugug

SEQ ID NO: 1807285 - RNA, 19 nt, Homo sapiens
  misc_RNA (1)...(19): siRNA sense strand
cuacaaaugugaagcaugu

SEQ ID NO: 1807286 - RNA, 19 nt, Homo sapiens
  misc_RNA (1)...(19): siRNA sense strand
gagaaacccuacaaaugug

SEQ ID NO: 1807287 - RNA, 19 nt, Homo sapiens
  misc_RNA (1)...(19): siRNA sense strand
gagaaacccuacaaaugug

SEQ ID NO: 1807288 - RNA, 19 nt, Homo sapiens
  misc_RNA (1)...(19): siRNA sense strand
gagaaacccuacaaaugug

SEQ ID NO: 1807289 - RNA, 19 nt, Homo sapiens
  misc_RNA (1)...(19): siRNA sense strand
gagaaacccuacaaaugug

SEQ ID NO: 1807290 - RNA, 19 nt, Homo sapiens
  misc_RNA (1)...(19): siRNA sense strand
gagaaacccuacaaaugug

SEQ ID NO: 1807291 - RNA, 19 nt, Homo sapiens
  misc_RNA (1)...(19): siRNA sense strand
gagaaacccuacaaaugug

SEQ ID NO: 1807292 - RNA, 19 nt, Homo sapiens
  misc_RNA (1)...(19): siRNA sense strand
gagaaacccuacaaaugug

SEQ ID NO: 1807293 - RNA, 19 nt, Homo sapiens
  misc_RNA (1)...(19): siRNA sense strand
gagaaacccuacaaaugug

SEQ ID NO: 1807294 - RNA, 19 nt, Homo sapiens
  misc_RNA (1)...(19): siRNA sense strand
gagaaacccuacaaaugug

SEQ ID NO: 1807295 - RNA, 19 nt, Homo sapiens
  misc_RNA (1)...(19): siRNA sense strand
gagaaacccuacaaaugug

SEQ ID NO: 1807296 - RNA, 19 nt, Homo sapiens
  misc_RNA (1)...(19): siRNA sense strand
gagaaacccuacaaaugug

SEQ ID NO: 1807297 - RNA, 19 nt, Homo sapiens
  misc_RNA (1)...(19): siRNA sense strand
gagaaacccuacaaaugug

SEQ ID NO: 1807298 - RNA, 19 nt, Homo sapiens
  misc_RNA (1)...(19): siRNA sense strand
uaaccgaucugcaauccuu

SEQ ID NO: 1807299 - RNA, 19 nt, Homo sapiens
  misc_RNA (1)...(19): siRNA sense strand
gagagaaacccuacagaug

SEQ ID NO: 1807300 - RNA, 19 nt, Homo sapiens
  misc_RNA (1)...(19): siRNA sense strand
gguuaucagucuucaguaa

SEQ ID NO: 1807301 - RNA, 19 nt, Homo sapiens
  misc_RNA (1)...(19): siRNA sense strand
ccucaaaccuuauggaaca

SEQ ID NO: 1807302 - RNA, 19 nt, Homo sapiens
  misc_RNA (1)...(19): siRNA sense strand
ggaagaauccccaguuaua

SEQ ID NO: 1807303 - RNA, 19 nt, Homo sapiens
  misc_RNA (1)...(19): siRNA sense strand
ccucaaaccuuauggaaca

SEQ ID NO: 1807304 - RNA, 19 nt, Homo sapiens
  misc_RNA (1)...(19): siRNA sense strand
aaauggcccucaacccuua

SEQ ID NO: 1807305 - RNA, 19 nt, Homo sapiens
  misc_RNA (1)...(19): siRNA sense strand
ccucaaaccuuauggaaca

SEQ ID NO: 1807306 - RNA, 19 nt, Homo sapiens
  misc_RNA (1)...(19): siRNA sense strand
ggagagaaacccuacaaau

SEQ ID NO: 1807307 - RNA, 19 nt, Homo sapiens
  misc_RNA (1)...(19): siRNA sense strand
ggagagaaacccuacaaau

SEQ ID NO: 1807308 - RNA, 19 nt, Homo sapiens
  misc_RNA (1)...(19): siRNA sense strand
ggagagaaacccuacaaau

SEQ ID NO: 1807309 - RNA, 19 nt, Homo sapiens
  misc_RNA (1)...(19): siRNA sense strand
ggagagaaacccuacaaau

SEQ ID NO: 1807310 - RNA, 19 nt, Homo sapiens
  misc_RNA (1)...(19): siRNA sense strand
ggagagaaacccuacaaau

SEQ ID NO: 1807311 - RNA, 19 nt, Homo sapiens
  misc_RNA (1)...(19): siRNA sense strand
ggagagaaacccuacaaau

SEQ ID NO: 1807312 - RNA, 19 nt, Homo sapiens
  misc_RNA (1)...(19): siRNA sense strand
ggagagaaacccuacaaau

SEQ ID NO: 1807313 - RNA, 19 nt, Homo sapiens
  misc_RNA (1)...(19): siRNA sense strand
ggagagaaacccuacaaau

SEQ ID NO: 1807314 - RNA, 19 nt, Homo sapiens
  misc_RNA (1)...(19): siRNA sense strand
ggagagaaacccuacaaau

SEQ ID NO: 1807315 - RNA, 19 nt, Homo sapiens
  misc_RNA (1)...(19): siRNA sense strand
ggagagaaacccuacaaau

SEQ ID NO: 1807316 - RNA, 19 nt, Homo sapiens
  misc_RNA (1)...(19): siRNA sense strand
gguaauagccauacucuua

SEQ ID NO: 1807317 - RNA, 19 nt, Homo sapiens
  misc_RNA (1)...(19): siRNA sense strand
gaaagaagaugcugagaag

SEQ ID NO: 1807318 - RNA, 19 nt, Homo sapiens
  misc_RNA (1)...(19): siRNA sense strand
gcaagaagcccaaguagaa

SEQ ID NO: 1807319 - RNA, 19 nt, Homo sapiens
  misc_RNA (1)...(19): siRNA sense strand
gaaagaaacuuccagaaac

SEQ ID NO: 1807320 - RNA, 19 nt, Homo sapiens
  misc_RNA (1)...(19): siRNA sense strand
aaacaacgcugggagaaua

SEQ ID NO: 1807321 - RNA, 19 nt, Homo sapiens
  misc_RNA (1)...(19): siRNA sense strand
gaaacgaaauugagguuau

SEQ ID NO: 1807322 - RNA, 19 nt, Homo sapiens
  misc_RNA (1)...(19): siRNA sense strand
gaagggaauuccuguaaga

SEQ ID NO: 1807323 - RNA, 19 nt, Homo sapiens
  misc_RNA (1)...(19): siRNA sense strand
gcaauugauuacccaguua

SEQ ID NO: 1807324 - RNA, 19 nt, Homo sapiens
  misc_RNA (1)...(19): siRNA sense strand
ggacagagcaagcgaauga

SEQ ID NO: 1807325 - RNA, 19 nt, Homo sapiens
  misc_RNA (1)...(19): siRNA sense strand
cuacagagauuccaaguug

SEQ ID NO: 1807326 - RNA, 19 nt, Homo sapiens
  misc_RNA (1)...(19): siRNA sense strand
gaaagcagccugaaacaga

SEQ ID NO: 1807327 - RNA, 19 nt, Homo sapiens
  misc_RNA (1)...(19): siRNA sense strand
gaaagauccuggcucaaga

SEQ ID NO: 1807328 - RNA, 19 nt, Homo sapiens
  misc_RNA (1)...(19): siRNA sense strand
cuaaggagcugguugaguu

SEQ ID NO: 1807329 - RNA, 19 nt, Homo sapiens
  misc_RNA (1)...(19): siRNA sense strand
ccagacagcugaacuuaau

SEQ ID NO: 1807330 - RNA, 19 nt, Homo sapiens
  misc_RNA (1)...(19): siRNA sense strand
ugaaugaccuccuugaaga

SEQ ID NO: 1807331 - RNA, 19 nt, Homo sapiens
  misc_RNA (1)...(19): siRNA sense strand
gaaaagagacaaagaagua

SEQ ID NO: 1807332 - RNA, 19 nt, Homo sapiens
  misc_RNA (1)...(19): siRNA sense strand
gaccaggaauugaaagaaa

SEQ ID NO: 1807333 - RNA, 19 nt, Homo sapiens
  misc_RNA (1)...(19): siRNA sense strand
caaggaugcucuccagaaa

SEQ ID NO: 1807334 - RNA, 19 nt, Homo sapiens
  misc_RNA (1)...(19): siRNA sense strand
gcaagagaaugaaccaaca

SEQ ID NO: 1807335 - RNA, 19 nt, Homo sapiens
  misc_RNA (1)...(19): siRNA sense strand
guuaaugcgucaaaugaaa

SEQ ID NO: 1807336 - RNA, 19 nt, Homo sapiens
  misc_RNA (1)...(19): siRNA sense strand
ggaagaugacucagaauga

SEQ ID NO: 1807337 - RNA, 19 nt, Homo sapiens
  misc_RNA (1)...(19): siRNA sense strand
gaacagggcaacaacucua

SEQ ID NO: 1807338 - RNA, 19 nt, Homo sapiens
  misc_RNA (1)...(19): siRNA sense strand
cgagauagagacagaguua

SEQ ID NO: 1807339 - RNA, 19 nt, Homo sapiens
  misc_RNA (1)...(19): siRNA sense strand
ucagaaagcuccuucaaac

SEQ ID NO: 1807340 - RNA, 19 nt, Homo sapiens
  misc_RNA (1)...(19): siRNA sense strand
ugaaagaaacuuccagaaa

SEQ ID NO: 1807341 - RNA, 19 nt, Homo sapiens
  misc_RNA (1)...(19): siRNA sense strand
gcagauaagcggaaagaga

SEQ ID NO: 1807342 - RNA, 19 nt, Homo sapiens
  misc_RNA (1)...(19): siRNA sense strand
gcaagauccugaaagagau

SEQ ID NO: 1807343 - RNA, 19 nt, Homo sapiens
  misc_RNA (1)...(19): siRNA sense strand
ccaaacuucugaaacuaaa

SEQ ID NO: 1807344 - RNA, 19 nt, Homo sapiens
  misc_RNA (1)...(19): siRNA sense strand
ugaaagagaugugcgaugu

SEQ ID NO: 1807345 - RNA, 19 nt, Homo sapiens
  misc_RNA (1)...(19): siRNA sense strand
caacaagcgucucaaggau

SEQ ID NO: 1807346 - RNA, 19 nt, Homo sapiens
  misc_RNA (1)...(19): siRNA sense strand
caaucuagaggaaacauua

SEQ ID NO: 1807347 - RNA, 19 nt, Homo sapiens
  misc_RNA (1)...(19): siRNA sense strand
gauccuggcucaagaugug

SEQ ID NO: 1807348 - RNA, 19 nt, Homo sapiens
  misc_RNA (1)...(19): siRNA sense strand
ucaaauugcugaucugaag

SEQ ID NO: 1807349 - RNA, 19 nt, Homo sapiens
  misc_RNA (1)...(19): siRNA sense strand
cagcugaacuuaaucaucu

SEQ ID NO: 1807350 - RNA, 19 nt, Homo sapiens
  misc_RNA (1)...(19): siRNA sense strand
uaauacaacugcucuucaa

SEQ ID NO: 1807351 - RNA, 19 nt, Homo sapiens
  misc_RNA (1)...(19): siRNA sense strand
ccaagugugcccugaaaua

SEQ ID NO: 1807352 - RNA, 19 nt, Homo sapiens
  misc_RNA (1)...(19): siRNA sense strand
cuaggaagaugacucagaa

SEQ ID NO: 1807353 - RNA, 19 nt, Homo sapiens
  misc_RNA (1)...(19): siRNA sense strand
caaguugacucgacugcuu

SEQ ID NO: 1807354 - RNA, 19 nt, Homo sapiens
  misc_RNA (1)...(19): siRNA sense strand
ugacaagaauagcagcuuu

SEQ ID NO: 1807355 - RNA, 19 nt, Homo sapiens
  misc_RNA (1)...(19): siRNA sense strand
aaagaaacuuccagaaaca

SEQ ID NO: 1807356 - RNA, 19 nt, Homo sapiens
  misc_RNA (1)...(19): siRNA sense strand
ggagcaagaagcccaagua

SEQ ID NO: 1807357 - RNA, 19 nt, Homo sapiens
  misc_RNA (1)...(19): siRNA sense strand
gacagaaacaucuuccuaa

SEQ ID NO: 1807358 - RNA, 19 nt, Homo sapiens
  misc_RNA (1)...(19): siRNA sense strand
ccaaugugcucagacguaa

SEQ ID NO: 1807359 - RNA, 19 nt, Homo sapiens
  misc_RNA (1)...(19): siRNA sense strand
auaaagcgcuugcacugaa

SEQ ID NO: 1807360 - RNA, 19 nt, Homo sapiens
  misc_RNA (1)...(19): siRNA sense strand
ggaugaagaacuugagaaa

SEQ ID NO: 1807361 - RNA, 19 nt, Homo sapiens
  misc_RNA (1)...(19): siRNA sense strand
gaagugcguggucaaguuu

SEQ ID NO: 1807362 - RNA, 19 nt, Homo sapiens
  misc_RNA (1)...(19): siRNA sense strand
aaagaaggaugccaaccaa

SEQ ID NO: 1807363 - RNA, 19 nt, Homo sapiens
  misc_RNA (1)...(19): siRNA sense strand
agaagaugcugagaaguuu

SEQ ID NO: 1807364 - RNA, 19 nt, Homo sapiens
  misc_RNA (1)...(19): siRNA sense strand
gcccugaaauauuugauug

SEQ ID NO: 1807365 - RNA, 19 nt, Homo sapiens
  misc_RNA (1)...(19): siRNA sense strand
gaauuggcuuggaaacgaa

SEQ ID NO: 1807366 - RNA, 19 nt, Homo sapiens
  misc_RNA (1)...(19): siRNA sense strand
aauaugagcugcugaaacu

SEQ ID NO: 1807367 - RNA, 19 nt, Homo sapiens
  misc_RNA (1)...(19): siRNA sense strand
gcugagaaguuuagacagu

SEQ ID NO: 1807368 - RNA, 19 nt, Homo sapiens
  misc_RNA (1)...(19): siRNA sense strand
gaagaugcugagaaguuua

SEQ ID NO: 1807369 - RNA, 19 nt, Homo sapiens
  misc_RNA (1)...(19): siRNA sense strand
gcaguagcgccacucauaa

SEQ ID NO: 1807370 - RNA, 19 nt, Homo sapiens
  misc_RNA (1)...(19): siRNA sense strand
ugaagugcguggucaaguu

SEQ ID NO: 1807371 - RNA, 19 nt, Homo sapiens
  misc_RNA (1)...(19): siRNA sense strand
agauguggcucaacucaaa

SEQ ID NO: 1807372 - RNA, 19 nt, Homo sapiens
  misc_RNA (1)...(19): siRNA sense strand
gugaagaauuggcuuggaa

SEQ ID NO: 1807373 - RNA, 19 nt, Homo sapiens
  misc_RNA (1)...(19): siRNA sense strand
cauaaaagagccagaauua

SEQ ID NO: 1807374 - RNA, 19 nt, Homo sapiens
  misc_RNA (1)...(19): siRNA sense strand
gaagaugacucagaaugac

SEQ ID NO: 1807375 - RNA, 19 nt, Homo sapiens
  misc_RNA (1)...(19): siRNA sense strand
gaucagaaagacagaagaa

SEQ ID NO: 1807376 - RNA, 19 nt, Homo sapiens
  misc_RNA (1)...(19): siRNA sense strand
uaaggaaggcauaaagauu

SEQ ID NO: 1807377 - RNA, 19 nt, Homo sapiens
  misc_RNA (1)...(19): siRNA sense strand
guuaauguguccaggaaga

SEQ ID NO: 1807378 - RNA, 19 nt, Homo sapiens
  misc_RNA (1)...(19): siRNA sense strand
uugcugaucugaagaagaa

SEQ ID NO: 1807379 - RNA, 19 nt, Homo sapiens
  misc_RNA (1)...(19): siRNA sense strand
guagaaaccaguccagaga

SEQ ID NO: 1807380 - RNA, 19 nt, Homo sapiens
  misc_RNA (1)...(19): siRNA sense strand
ggaagaccaggaauugaaa

SEQ ID NO: 1807381 - RNA, 19 nt, Homo sapiens
  misc_RNA (1)...(19): siRNA sense strand
ugaagaagaaacugaauga

SEQ ID NO: 1807382 - RNA, 19 nt, Homo sapiens
  misc_RNA (1)...(19): siRNA sense strand
agugugcccugaaauauuu

SEQ ID NO: 1807383 - RNA, 19 nt, Homo sapiens
  misc_RNA (1)...(19): siRNA sense strand
ggagaauauugccaccauu

SEQ ID NO: 1807384 - RNA, 19 nt, Homo sapiens
  misc_RNA (1)...(19): siRNA sense strand
ccuagagacugaaauggaa

SEQ ID NO: 1807385 - RNA, 19 nt, Homo sapiens
  misc_RNA (1)...(19): siRNA sense strand
aggcguacauucucccuua

SEQ ID NO: 1807386 - RNA, 19 nt, Homo sapiens
  misc_RNA (1)...(19): siRNA sense strand
uacaaucccugauggagaa

SEQ ID NO: 1807387 - RNA, 19 nt, Homo sapiens
  misc_RNA (1)...(19): siRNA sense strand
ccaaaaccuucucguguua

SEQ ID NO: 1807388 - RNA, 19 nt, Homo sapiens
  misc_RNA (1)...(19): siRNA sense strand
uugaauauguccagccuaa

SEQ ID NO: 1807389 - RNA, 19 nt, Homo sapiens
  misc_RNA (1)...(19): siRNA sense strand
ccaauaccaggauaacaua

SEQ ID NO: 1807390 - RNA, 19 nt, Homo sapiens
  misc_RNA (1)...(19): siRNA sense strand
caacgguccuggccuaugg

SEQ ID NO: 1807391 - RNA, 19 nt, Homo sapiens
  misc_RNA (1)...(19): siRNA sense strand
ccaaacgccaucugaauga

SEQ ID NO: 1807392 - RNA, 19 nt, Homo sapiens
  misc_RNA (1)...(19): siRNA sense strand
ggaaacgaaauugagguua

SEQ ID NO: 1807393 - RNA, 19 nt, Homo sapiens
  misc_RNA (1)...(19): siRNA sense strand
gaagucaucaaucugcaaa

SEQ ID NO: 1807394 - RNA, 19 nt, Homo sapiens
  misc_RNA (1)...(19): siRNA sense strand
cgaggcagcuggucagaca

SEQ ID NO: 1807395 - RNA, 19 nt, Homo sapiens
  misc_RNA (1)...(19): siRNA sense strand
gaagaaucagucccuggua

SEQ ID NO: 1807396 - RNA, 19 nt, Homo sapiens
  misc_RNA (1)...(19): siRNA sense strand
ugacucgacugcuucaaga

SEQ ID NO: 1807397 - RNA, 19 nt, Homo sapiens
  misc_RNA (1)...(19): siRNA sense strand
agaccucgcuggaucagaa

SEQ ID NO: 1807398 - RNA, 19 nt, Homo sapiens
  misc_RNA (1)...(19): siRNA sense strand
gacuuugaauuuacucuga

SEQ ID NO: 1807399 - RNA, 19 nt, Homo sapiens
  misc_RNA (1)...(19): siRNA sense strand
cgaagaagaggcccacuga

SEQ ID NO: 1807400 - RNA, 19 nt, Homo sapiens
  misc_RNA (1)...(19): siRNA sense strand
ugcagaagaugcuguuuga

SEQ ID NO: 1807401 - RNA, 19 nt, Homo sapiens
  misc_RNA (1)...(19): siRNA sense strand
uggauacuguuuccuguuu

SEQ ID NO: 1807402 - RNA, 19 nt, Homo sapiens
  misc_RNA (1)...(19): siRNA sense strand
gaauuuacucugaaagugu

SEQ ID NO: 1807403 - RNA, 19 nt, Homo sapiens
  misc_RNA (1)...(19): siRNA sense strand
cagcucgagugaagaauug

SEQ ID NO: 1807404 - RNA, 19 nt, Homo sapiens
  misc_RNA (1)...(19): siRNA sense strand
gaaagaaaagugacaagaa

SEQ ID NO: 1807405 - RNA, 19 nt, Homo sapiens
  misc_RNA (1)...(19): siRNA sense strand
gcauggacaucgaggaucu

SEQ ID NO: 1807406 - RNA, 19 nt, Homo sapiens
  misc_RNA (1)...(19): siRNA sense strand
gagaagcaguuagaggaau

SEQ ID NO: 1807407 - RNA, 19 nt, Homo sapiens
  misc_RNA (1)...(19): siRNA sense strand
gugcugacaugcagaagau

SEQ ID NO: 1807408 - RNA, 19 nt, Homo sapiens
  misc_RNA (1)...(19): siRNA sense strand
gaauccaccuccuaaacuc

SEQ ID NO: 1807409 - RNA, 19 nt, Homo sapiens
  misc_RNA (1)...(19): siRNA sense strand
aacgggagguugcagauaa

SEQ ID NO: 1807410 - RNA, 19 nt, Homo sapiens
  misc_RNA (1)...(19): siRNA sense strand
uaaagcgcuugcacugaaa

SEQ ID NO: 1807411 - RNA, 19 nt, Homo sapiens
  misc_RNA (1)...(19): siRNA sense strand
gugaagggaauuccuguaa

SEQ ID NO: 1807412 - RNA, 19 nt, Homo sapiens
  misc_RNA (1)...(19): siRNA sense strand
guaauagccauacucuuau

SEQ ID NO: 1807413 - RNA, 19 nt, Homo sapiens
  misc_RNA (1)...(19): siRNA sense strand
gcuucaagauucucuagga

SEQ ID NO: 1807414 - RNA, 19 nt, Homo sapiens
  misc_RNA (1)...(19): siRNA sense strand
gaagaugcuguuugaggaa

SEQ ID NO: 1807415 - RNA, 19 nt, Homo sapiens
  misc_RNA (1)...(19): siRNA sense strand
ggacaucgaggaucuaaaa

SEQ ID NO: 1807416 - RNA, 19 nt, Homo sapiens
  misc_RNA (1)...(19): siRNA sense strand
uaacagacauucaagcaaa

SEQ ID NO: 1807417 - RNA, 19 nt, Homo sapiens
  misc_RNA (1)...(19): siRNA sense strand
cuacuggccugcaauauuu

SEQ ID NO: 1807418 - RNA, 19 nt, Homo sapiens
  misc_RNA (1)...(19): siRNA sense strand
aagcagauguggucucuua

SEQ ID NO: 1807419 - RNA, 19 nt, Homo sapiens
  misc_RNA (1)...(19): siRNA sense strand
gggaaaggauguucuucua

SEQ ID NO: 1807420 - RNA, 19 nt, Homo sapiens
  misc_RNA (1)...(19): siRNA sense strand
ucucauugcugguuauaua

SEQ ID NO: 1807421 - RNA, 19 nt, Homo sapiens
  misc_RNA (1)...(19): siRNA sense strand
gaaaggauguucuucuacu

SEQ ID NO: 1807422 - RNA, 19 nt, Homo sapiens
  misc_RNA (1)...(19): siRNA sense strand
gaacagccacucccaucua

SEQ ID NO: 1807423 - RNA, 19 nt, Homo sapiens
  misc_RNA (1)...(19): siRNA sense strand
gaucacagccucacuuuua

SEQ ID NO: 1807424 - RNA, 19 nt, Homo sapiens
  misc_RNA (1)...(19): siRNA sense strand
gaaccauaaaugccaguua

SEQ ID NO: 1807425 - RNA, 19 nt, Homo sapiens
  misc_RNA (1)...(19): siRNA sense strand
caaagcagauguggucucu

SEQ ID NO: 1807426 - RNA, 19 nt, Homo sapiens
  misc_RNA (1)...(19): siRNA sense strand
uuacgacucugaccaagca

SEQ ID NO: 1807427 - RNA, 19 nt, Homo sapiens
  misc_RNA (1)...(19): siRNA sense strand
acucugaugcaaacauuua

SEQ ID NO: 1807428 - RNA, 19 nt, Homo sapiens
  misc_RNA (1)...(19): siRNA sense strand
ggccugcaauauuucagaa

SEQ ID NO: 1807429 - RNA, 19 nt, Homo sapiens
  misc_RNA (1)...(19): siRNA sense strand
ggaaaggauguucuucuac

SEQ ID NO: 1807430 - RNA, 19 nt, Homo sapiens
  misc_RNA (1)...(19): siRNA sense strand
cauggucccucucacagau

SEQ ID NO: 1807431 - RNA, 19 nt, Homo sapiens
  misc_RNA (1)...(19): siRNA sense strand
gcccucucauugcugguua

SEQ ID NO: 1807432 - RNA, 19 nt, Homo sapiens
  misc_RNA (1)...(19): siRNA sense strand
gaaacuauucaagccuauu

SEQ ID NO: 1807433 - RNA, 19 nt, Homo sapiens
  misc_RNA (1)...(19): siRNA sense strand
ccagaucgaccacaaagca

SEQ ID NO: 1807434 - RNA, 19 nt, Homo sapiens
  misc_RNA (1)...(19): siRNA sense strand
auacucugaugcaaacauu

SEQ ID NO: 1807435 - RNA, 19 nt, Homo sapiens
  misc_RNA (1)...(19): siRNA sense strand
auacaguggucgagagcaa

SEQ ID NO: 1807436 - RNA, 19 nt, Homo sapiens
  misc_RNA (1)...(19): siRNA sense strand
caauggaucccugcuguuc

SEQ ID NO: 1807437 - RNA, 19 nt, Homo sapiens
  misc_RNA (1)...(19): siRNA sense strand
aaaggauguucuucuacug

SEQ ID NO: 1807438 - RNA, 19 nt, Homo sapiens
  misc_RNA (1)...(19): siRNA sense strand
aaccauaaaugccaguuac

SEQ ID NO: 1807439 - RNA, 19 nt, Homo sapiens
  misc_RNA (1)...(19): siRNA sense strand
cuauucaagccuauuauug

SEQ ID NO: 1807440 - RNA, 19 nt, Homo sapiens
  misc_RNA (1)...(19): siRNA sense strand
ucuacuggccugcaauauu

SEQ ID NO: 1807441 - RNA, 19 nt, Homo sapiens
  misc_RNA (1)...(19): siRNA sense strand
gagcaaguauaccccaaug

SEQ ID NO: 1807442 - RNA, 19 nt, Homo sapiens
  misc_RNA (1)...(19): siRNA sense strand
ucucacagauccaccuucu

SEQ ID NO: 1807443 - RNA, 19 nt, Homo sapiens
  misc_RNA (1)...(19): siRNA sense strand
uauaacagacauucaagca

SEQ ID NO: 1807444 - RNA, 19 nt, Homo sapiens
  misc_RNA (1)...(19): siRNA sense strand
aacagccacucccaucuau

SEQ ID NO: 1807445 - RNA, 19 nt, Homo sapiens
  misc_RNA (1)...(19): siRNA sense strand
aaacauuuacugccagauc

SEQ ID NO: 1807446 - RNA, 19 nt, Homo sapiens
  misc_RNA (1)...(19): siRNA sense strand
agaaacuauucaagccuau

SEQ ID NO: 1807447 - RNA, 19 nt, Homo sapiens
  misc_RNA (1)...(19): siRNA sense strand
gaucccugcuguuccaaaa

SEQ ID NO: 1807448 - RNA, 19 nt, Homo sapiens
  misc_RNA (1)...(19): siRNA sense strand
gcaaguauaccccaaugga

SEQ ID NO: 1807449 - RNA, 19 nt, Homo sapiens
  misc_RNA (1)...(19): siRNA sense strand
gcagagggaaaggauguuc

SEQ ID NO: 1807450 - RNA, 19 nt, Homo sapiens
  misc_RNA (1)...(19): siRNA sense strand
acagacauucaagcaaaua

SEQ ID NO: 1807451 - RNA, 19 nt, Homo sapiens
  misc_RNA (1)...(19): siRNA sense strand
gaucgaccacaaagcagau

SEQ ID NO: 1807452 - RNA, 19 nt, Homo sapiens
  misc_RNA (1)...(19): siRNA sense strand
uauucaagccuauuauugg

SEQ ID NO: 1807453 - RNA, 19 nt, Homo sapiens
  misc_RNA (1)...(19): siRNA sense strand
ccauaaaugccaguuacga

SEQ ID NO: 1807454 - RNA, 19 nt, Homo sapiens
  misc_RNA (1)...(19): siRNA sense strand
gauaaagacucucauagaa

SEQ ID NO: 1807455 - RNA, 19 nt, Homo sapiens
  misc_RNA (1)...(19): siRNA sense strand
gaaagaggaugcccuaaau

SEQ ID NO: 1807456 - RNA, 19 nt, Homo sapiens
  misc_RNA (1)...(19): siRNA sense strand
gaagaacccuaaauuuaug

SEQ ID NO: 1807457 - RNA, 19 nt, Homo sapiens
  misc_RNA (1)...(19): siRNA sense strand
agaaagcgcugcaggaaua

SEQ ID NO: 1807458 - RNA, 19 nt, Homo sapiens
  misc_RNA (1)...(19): siRNA sense strand
ggaagaacccuaaauuuau

SEQ ID NO: 1807459 - RNA, 19 nt, Homo sapiens
  misc_RNA (1)...(19): siRNA sense strand
gaaguaaguacgucaauaa

SEQ ID NO: 1807460 - RNA, 19 nt, Homo sapiens
  misc_RNA (1)...(19): siRNA sense strand
ggaaguaaguacgucaaua

SEQ ID NO: 1807461 - RNA, 19 nt, Homo sapiens
  misc_RNA (1)...(19): siRNA sense strand
guaaguacgucaauaagga

SEQ ID NO: 1807462 - RNA, 19 nt, Homo sapiens
  misc_RNA (1)...(19): siRNA sense strand
aaacagaccugcaugaagu

SEQ ID NO: 1807463 - RNA, 19 nt, Homo sapiens
  misc_RNA (1)...(19): siRNA sense strand
acaaugagcuccaggaaau

SEQ ID NO: 1807464 - RNA, 19 nt, Homo sapiens
  misc_RNA (1)...(19): siRNA sense strand
guagaagucuccaggaaga

SEQ ID NO: 1807465 - RNA, 19 nt, Homo sapiens
  misc_RNA (1)...(19): siRNA sense strand
aggaagaacccuaaauuua

SEQ ID NO: 1807466 - RNA, 19 nt, Homo sapiens
  misc_RNA (1)...(19): siRNA sense strand
gcacgcgucugcagaagug

SEQ ID NO: 1807467 - RNA, 19 nt, Homo sapiens
  misc_RNA (1)...(19): siRNA sense strand
guacgucaauaaggaaauu

SEQ ID NO: 1807468 - RNA, 19 nt, Homo sapiens
  misc_RNA (1)...(19): siRNA sense strand
gaagaagccaagaagaaga

SEQ ID NO: 1807469 - RNA, 19 nt, Homo sapiens
  misc_RNA (1)...(19): siRNA sense strand
acaacgagcugcuaaaguc

SEQ ID NO: 1807470 - RNA, 19 nt, Homo sapiens
  misc_RNA (1)...(19): siRNA sense strand
gaucuugucuguggacugu

SEQ ID NO: 1807471 - RNA, 19 nt, Homo sapiens
  misc_RNA (1)...(19): siRNA sense strand
ggagaaagcgcugcaggaa

SEQ ID NO: 1807472 - RNA, 19 nt, Homo sapiens
  misc_RNA (1)...(19): siRNA sense strand
gaggaugcccuaaaugaga

SEQ ID NO: 1807473 - RNA, 19 nt, Homo sapiens
  misc_RNA (1)...(19): siRNA sense strand
ccaggaagaacccuaaauu

SEQ ID NO: 1807474 - RNA, 19 nt, Homo sapiens
  misc_RNA (1)...(19): siRNA sense strand
ugaaacagauaaagacucu

SEQ ID NO: 1807475 - RNA, 19 nt, Homo sapiens
  misc_RNA (1)...(19): siRNA sense strand
gaaauacaacgagcugcua

SEQ ID NO: 1807476 - RNA, 19 nt, Homo sapiens
  misc_RNA (1)...(19): siRNA sense strand
ugaagacucugcugcuguu

SEQ ID NO: 1807477 - RNA, 19 nt, Homo sapiens
  misc_RNA (1)...(19): siRNA sense strand
caggaagaacccuaaauuu

SEQ ID NO: 1807478 - RNA, 19 nt, Homo sapiens
  misc_RNA (1)...(19): siRNA sense strand
uagaagaagccaagaagaa

SEQ ID NO: 1807479 - RNA, 19 nt, Homo sapiens
  misc_RNA (1)...(19): siRNA sense strand
gaaacagaccugcaugaag

SEQ ID NO: 1807480 - RNA, 19 nt, Homo sapiens
  misc_RNA (1)...(19): siRNA sense strand
gcucagcaaccuagaagaa

SEQ ID NO: 1807481 - RNA, 19 nt, Homo sapiens
  misc_RNA (1)...(19): siRNA sense strand
gcgaagaccaguacuaucu

SEQ ID NO: 1807482 - RNA, 19 nt, Homo sapiens
  misc_RNA (1)...(19): siRNA sense strand
cagcugaacgagcaguuua

SEQ ID NO: 1807483 - RNA, 19 nt, Homo sapiens
  misc_RNA (1)...(19): siRNA sense strand
ccaggagugugcaaugaga

SEQ ID NO: 1807484 - RNA, 19 nt, Homo sapiens
  misc_RNA (1)...(19): siRNA sense strand
agaaagaggaugcccuaaa

SEQ ID NO: 1807485 - RNA, 19 nt, Homo sapiens
  misc_RNA (1)...(19): siRNA sense strand
gccgggagaucuugucugu

SEQ ID NO: 1807486 - RNA, 19 nt, Homo sapiens
  misc_RNA (1)...(19): siRNA sense strand
acagauaaagacucucaua

SEQ ID NO: 1807487 - RNA, 19 nt, Homo sapiens
  misc_RNA (1)...(19): siRNA sense strand
agauaaagacucucauaga

SEQ ID NO: 1807488 - RNA, 19 nt, Homo sapiens
  misc_RNA (1)...(19): siRNA sense strand
gacaaugagcuccaggaaa

SEQ ID NO: 1807489 - RNA, 19 nt, Homo sapiens
  misc_RNA (1)...(19): siRNA sense strand
gacggucccuguagaaguc

SEQ ID NO: 1807490 - RNA, 19 nt, Homo sapiens
  misc_RNA (1)...(19): siRNA sense strand
aagaggaugcccuaaauga

SEQ ID NO: 1807491 - RNA, 19 nt, Homo sapiens
  misc_RNA (1)...(19): siRNA sense strand
caucauagacgagcucuuc

SEQ ID NO: 1807492 - RNA, 19 nt, Homo sapiens
  misc_RNA (1)...(19): siRNA sense strand
ccggaggccucacuucuuc

SEQ ID NO: 1807493 - RNA, 19 nt, Homo sapiens
  misc_RNA (1)...(19): siRNA sense strand
aaacagauaaagacucuca

SEQ ID NO: 1807494 - RNA, 19 nt, Homo sapiens
  misc_RNA (1)...(19): siRNA sense strand
agaccugcaugaaguucua

SEQ ID NO: 1807495 - RNA, 19 nt, Homo sapiens
  misc_RNA (1)...(19): siRNA sense strand
uaaaugagaccagggaauc

SEQ ID NO: 1807496 - RNA, 19 nt, Homo sapiens
  misc_RNA (1)...(19): siRNA sense strand
uccaggaaauguccaauca

SEQ ID NO: 1807497 - RNA, 19 nt, Homo sapiens
  misc_RNA (1)...(19): siRNA sense strand
gaagcucuuugacucugau

SEQ ID NO: 1807498 - RNA, 19 nt, Homo sapiens
  misc_RNA (1)...(19): siRNA sense strand
gagcucgcccuucuacuuc

SEQ ID NO: 1807499 - RNA, 19 nt, Homo sapiens
  misc_RNA (1)...(19): siRNA sense strand
gagaaagcgcugcaggaau

SEQ ID NO: 1807500 - RNA, 19 nt, Homo sapiens
  misc_RNA (1)...(19): siRNA sense strand
agacucugcugcuguuugu

SEQ ID NO: 1807501 - RNA, 19 nt, Homo sapiens
  misc_RNA (1)...(19): siRNA sense strand
gcccuuccuugagaugaua

SEQ ID NO: 1807502 - RNA, 19 nt, Homo sapiens
  misc_RNA (1)...(19): siRNA sense strand
ugaaacagaccugcaugaa

SEQ ID NO: 1807503 - RNA, 19 nt, Homo sapiens
  misc_RNA (1)...(19): siRNA sense strand
gcaaggcgaagaccaguac

SEQ ID NO: 1807504 - RNA, 19 nt, Homo sapiens
  misc_RNA (1)...(19): siRNA sense strand
aaccagagcucgcccuucu

SEQ ID NO: 1807505 - RNA, 19 nt, Homo sapiens
  misc_RNA (1)...(19): siRNA sense strand
gccgccagcuugaggaguu

SEQ ID NO: 1807506 - RNA, 19 nt, Homo sapiens
  misc_RNA (1)...(19): siRNA sense strand
aaacgaagagcgcaagaca

SEQ ID NO: 1807507 - RNA, 19 nt, Homo sapiens
  misc_RNA (1)...(19): siRNA sense strand
ccaaucagggaaguaagua

SEQ ID NO: 1807508 - RNA, 19 nt, Homo sapiens
  misc_RNA (1)...(19): siRNA sense strand
gacgaugaccggacugugu

SEQ ID NO: 1807509 - RNA, 19 nt, Homo sapiens
  misc_RNA (1)...(19): siRNA sense strand
cagauaaagacucucauag

SEQ ID NO: 1807510 - RNA, 19 nt, Homo sapiens
  misc_RNA (1)...(19): siRNA sense strand
uaaguacgucaauaaggaa

SEQ ID NO: 1807511 - RNA, 19 nt, Homo sapiens
  misc_RNA (1)...(19): siRNA sense strand
gcagcugaacgagcaguuu

SEQ ID NO: 1807512 - RNA, 19 nt, Homo sapiens
  misc_RNA (1)...(19): siRNA sense strand
uguaagcccugccugaaac

SEQ ID NO: 1807513 - RNA, 19 nt, Homo sapiens
  misc_RNA (1)...(19): siRNA sense strand
gaccagggaaucagagaca

SEQ ID NO: 1807514 - RNA, 19 nt, Homo sapiens
  misc_RNA (1)...(19): siRNA sense strand
ugaagcucuuugacucuga

SEQ ID NO: 1807515 - RNA, 19 nt, Homo sapiens
  misc_RNA (1)...(19): siRNA sense strand
aaauacaacgagcugcuaa

SEQ ID NO: 1807516 - RNA, 19 nt, Homo sapiens
  misc_RNA (1)...(19): siRNA sense strand
gccaacagaauucauacga

SEQ ID NO: 1807517 - RNA, 19 nt, Homo sapiens
  misc_RNA (1)...(19): siRNA sense strand
guguaagcccugccugaaa

SEQ ID NO: 1807518 - RNA, 19 nt, Homo sapiens
  misc_RNA (1)...(19): siRNA sense strand
cuguagaagucuccaggaa

SEQ ID NO: 1807519 - RNA, 19 nt, Homo sapiens
  misc_RNA (1)...(19): siRNA sense strand
aagccaagaagaagaaaga

SEQ ID NO: 1807520 - RNA, 19 nt, Homo sapiens
  misc_RNA (1)...(19): siRNA sense strand
uuccagcccuuccuugaga

SEQ ID NO: 1807521 - RNA, 19 nt, Homo sapiens
  misc_RNA (1)...(19): siRNA sense strand
ccagggaaucagagacaaa

SEQ ID NO: 1807522 - RNA, 19 nt, Homo sapiens
  misc_RNA (1)...(19): siRNA sense strand
aagaagccaagaagaagaa

SEQ ID NO: 1807523 - RNA, 19 nt, Homo sapiens
  misc_RNA (1)...(19): siRNA sense strand
ucccaggagugugcaauga

SEQ ID NO: 1807524 - RNA, 19 nt, Homo sapiens
  misc_RNA (1)...(19): siRNA sense strand
ggaggccucacuucuucuu

SEQ ID NO: 1807525 - RNA, 19 nt, Homo sapiens
  misc_RNA (1)...(19): siRNA sense strand
agagguugaccaggaaaua

SEQ ID NO: 1807526 - RNA, 19 nt, Homo sapiens
  misc_RNA (1)...(19): siRNA sense strand
cugagagguugaccaggaa

SEQ ID NO: 1807527 - RNA, 19 nt, Homo sapiens
  misc_RNA (1)...(19): siRNA sense strand
aaagaggaugcccuaaaug

SEQ ID NO: 1807528 - RNA, 19 nt, Homo sapiens
  misc_RNA (1)...(19): siRNA sense strand
uaaaguccuaccaguggaa

SEQ ID NO: 1807529 - RNA, 19 nt, Homo sapiens
  misc_RNA (1)...(19): siRNA sense strand
gcacccgccaacagaauuc

SEQ ID NO: 1807530 - RNA, 19 nt, Homo sapiens
  misc_RNA (1)...(19): siRNA sense strand
caagaagaagaaagaggau

SEQ ID NO: 1807531 - RNA, 19 nt, Homo sapiens
  misc_RNA (1)...(19): siRNA sense strand
uggagaccguggcggagaa

SEQ ID NO: 1807532 - RNA, 19 nt, Homo sapiens
  misc_RNA (1)...(19): siRNA sense strand
agaagaagccaagaagaag

SEQ ID NO: 1807533 - RNA, 19 nt, Homo sapiens
  misc_RNA (1)...(19): siRNA sense strand
ugauggcccucugggaaga

SEQ ID NO: 1807534 - RNA, 19 nt, Homo sapiens
  misc_RNA (1)...(19): siRNA sense strand
agagcucgcccuucuacuu

SEQ ID NO: 1807535 - RNA, 19 nt, Homo sapiens
  misc_RNA (1)...(19): siRNA sense strand
agacaaugagcuccaggaa

SEQ ID NO: 1807536 - RNA, 19 nt, Homo sapiens
  misc_RNA (1)...(19): siRNA sense strand
cuagaagaagccaagaaga

SEQ ID NO: 1807537 - RNA, 19 nt, Homo sapiens
  misc_RNA (1)...(19): siRNA sense strand
gagaccagggaaucagaga

SEQ ID NO: 1807538 - RNA, 19 nt, Homo sapiens
  misc_RNA (1)...(19): siRNA sense strand
ccagagcucgcccuucuac

SEQ ID NO: 1807539 - RNA, 19 nt, Homo sapiens
  misc_RNA (1)...(19): siRNA sense strand
gggaaguaaguacgucaau

SEQ ID NO: 1807540 - RNA, 19 nt, Homo sapiens
  misc_RNA (1)...(19): siRNA sense strand
gaagacucugcugcuguuu

SEQ ID NO: 1807541 - RNA, 19 nt, Homo sapiens
  misc_RNA (1)...(19): siRNA sense strand
cccaggauaccuaccacua

SEQ ID NO: 1807542 - RNA, 19 nt, Homo sapiens
  misc_RNA (1)...(19): siRNA sense strand
gcgcguccagcaucauaga

SEQ ID NO: 1807543 - RNA, 19 nt, Homo sapiens
  misc_RNA (1)...(19): siRNA sense strand
caauacagcuggagaaaug

SEQ ID NO: 1807544 - RNA, 19 nt, Homo sapiens
  misc_RNA (1)...(19): siRNA sense strand
gagagagccugcugcguaa

SEQ ID NO: 1807545 - RNA, 19 nt, Homo sapiens
  misc_RNA (1)...(19): siRNA sense strand
ggagacagcagcaugauga

SEQ ID NO: 1807546 - RNA, 19 nt, Homo sapiens
  misc_RNA (1)...(19): siRNA sense strand
ccuaugaccuucuacuuug

SEQ ID NO: 1807547 - RNA, 19 nt, Homo sapiens
  misc_RNA (1)...(19): siRNA sense strand
gaauguggaacuacuguuu

SEQ ID NO: 1807548 - RNA, 19 nt, Homo sapiens
  misc_RNA (1)...(19): siRNA sense strand
caacagaugcugagcuuuc

SEQ ID NO: 1807549 - RNA, 19 nt, Homo sapiens
  misc_RNA (1)...(19): siRNA sense strand
gaagaaggcagugguagug

SEQ ID NO: 1807550 - RNA, 19 nt, Homo sapiens
  misc_RNA (1)...(19): siRNA sense strand
ucacagagcauugccauug

SEQ ID NO: 1807551 - RNA, 19 nt, Homo sapiens
  misc_RNA (1)...(19): siRNA sense strand
gacagcagcaugaugauga

SEQ ID NO: 1807552 - RNA, 19 nt, Homo sapiens
  misc_RNA (1)...(19): siRNA sense strand
agaaauggcuggagcuuuu

SEQ ID NO: 1807553 - RNA, 19 nt, Homo sapiens
  misc_RNA (1)...(19): siRNA sense strand
ggcaacagaugcugagcuu

SEQ ID NO: 1807554 - RNA, 19 nt, Homo sapiens
  misc_RNA (1)...(19): siRNA sense strand
ggaggagacagcagcauga

SEQ ID NO: 1807555 - RNA, 19 nt, Homo sapiens
  misc_RNA (1)...(19): siRNA sense strand
gaucaauacagcuggagaa

SEQ ID NO: 1807556 - RNA, 19 nt, Homo sapiens
  misc_RNA (1)...(19): siRNA sense strand
cacagagcauugccauuga

SEQ ID NO: 1807557 - RNA, 19 nt, Homo sapiens
  misc_RNA (1)...(19): siRNA sense strand
gaccuucuacuuuggcuuu

SEQ ID NO: 1807558 - RNA, 19 nt, Homo sapiens
  misc_RNA (1)...(19): siRNA sense strand
caacggguaccucugcauu

SEQ ID NO: 1807559 - RNA, 19 nt, Homo sapiens
  misc_RNA (1)...(19): siRNA sense strand
uacuagcaauguucuauga

SEQ ID NO: 1807560 - RNA, 19 nt, Homo sapiens
  misc_RNA (1)...(19): siRNA sense strand
gccuaugaccuucuacuuu

SEQ ID NO: 1807561 - RNA, 19 nt, Homo sapiens
  misc_RNA (1)...(19): siRNA sense strand
ggaagaaggcagugguagu

SEQ ID NO: 1807562 - RNA, 19 nt, Homo sapiens
  misc_RNA (1)...(19): siRNA sense strand
cuaugaaggacucaagaua

SEQ ID NO: 1807563 - RNA, 19 nt, Homo sapiens
  misc_RNA (1)...(19): siRNA sense strand
uacuuuggcuuuaagaaug

SEQ ID NO: 1807564 - RNA, 19 nt, Homo sapiens
  misc_RNA (1)...(19): siRNA sense strand
gagaaauggcuggagcuuu

SEQ ID NO: 1807565 - RNA, 19 nt, Homo sapiens
  misc_RNA (1)...(19): siRNA sense strand
cauaagcuacuuccucaug

SEQ ID NO: 1807566 - RNA, 19 nt, Homo sapiens
  misc_RNA (1)...(19): siRNA sense strand
gaucauucccaccauaugg

SEQ ID NO: 1807567 - RNA, 19 nt, Homo sapiens
  misc_RNA (1)...(19): siRNA sense strand
cugcguaagucacaaguca

SEQ ID NO: 1807568 - RNA, 19 nt, Homo sapiens
  misc_RNA (1)...(19): siRNA sense strand
cuagcaauguucuaugaag

SEQ ID NO: 1807569 - RNA, 19 nt, Homo sapiens
  misc_RNA (1)...(19): siRNA sense strand
caagucagcauucgcuaca

SEQ ID NO: 1807570 - RNA, 19 nt, Homo sapiens
  misc_RNA (1)...(19): siRNA sense strand
caugcaaccuucucaccau

SEQ ID NO: 1807571 - RNA, 19 nt, Homo sapiens
  misc_RNA (1)...(19): siRNA sense strand
uaugaaggacucaagauag

SEQ ID NO: 1807572 - RNA, 19 nt, Homo sapiens
  misc_RNA (1)...(19): siRNA sense strand
uuaagaauguggaacuacu

SEQ ID NO: 1807573 - RNA, 19 nt, Homo sapiens
  misc_RNA (1)...(19): siRNA sense strand
gaaggcagugguaguggau

SEQ ID NO: 1807574 - RNA, 19 nt, Homo sapiens
  misc_RNA (1)...(19): siRNA sense strand
ggagaaauggcuggagcuu

SEQ ID NO: 1807575 - RNA, 19 nt, Homo sapiens
  misc_RNA (1)...(19): siRNA sense strand
caucauccagguggucaua

SEQ ID NO: 1807576 - RNA, 19 nt, Homo sapiens
  misc_RNA (1)...(19): siRNA sense strand
cuacuuuggcuuuaagaau

SEQ ID NO: 1807577 - RNA, 19 nt, Homo sapiens
  misc_RNA (1)...(19): siRNA sense strand
ugaugccuaugaccuucua

SEQ ID NO: 1807578 - RNA, 19 nt, Homo sapiens
  misc_RNA (1)...(19): siRNA sense strand
gcagugguaguggauauca

SEQ ID NO: 1807579 - RNA, 19 nt, Homo sapiens
  misc_RNA (1)...(19): siRNA sense strand
uaagucacaagucagcauu

SEQ ID NO: 1807580 - RNA, 19 nt, Homo sapiens
  misc_RNA (1)...(19): siRNA sense strand
caccaucacccaaccacuu

SEQ ID NO: 1807581 - RNA, 19 nt, Homo sapiens
  misc_RNA (1)...(19): siRNA sense strand
guggauaucacagagcauu

SEQ ID NO: 1807582 - RNA, 19 nt, Homo sapiens
  misc_RNA (1)...(19): siRNA sense strand
ccgguuuggugaucaauac

SEQ ID NO: 1807583 - RNA, 19 nt, Homo sapiens
  misc_RNA (1)...(19): siRNA sense strand
aggcagugguaguggauau

SEQ ID NO: 1807584 - RNA, 19 nt, Homo sapiens
  misc_RNA (1)...(19): siRNA sense strand
agucagcauucgcuacaau

SEQ ID NO: 1807585 - RNA, 19 nt, Homo sapiens
  misc_RNA (1)...(19): siRNA sense strand
cuuuaagaauguggaacua

SEQ ID NO: 1807586 - RNA, 19 nt, Homo sapiens
  misc_RNA (1)...(19): siRNA sense strand
uccagguggucauaagcua

SEQ ID NO: 1807587 - RNA, 19 nt, Homo sapiens
  misc_RNA (1)...(19): siRNA sense strand
gagagccugcugcguaagu

SEQ ID NO: 1807588 - RNA, 19 nt, Homo sapiens
  misc_RNA (1)...(19): siRNA sense strand
ggaucauucccaccauaug

SEQ ID NO: 1807589 - RNA, 19 nt, Homo sapiens
  misc_RNA (1)...(19): siRNA sense strand
cagcggugcuucuguuuga

SEQ ID NO: 1807590 - RNA, 19 nt, Homo sapiens
  misc_RNA (1)...(19): siRNA sense strand
cuaccuagcuuacccacuu

SEQ ID NO: 1807591 - RNA, 19 nt, Homo sapiens
  misc_RNA (1)...(19): siRNA sense strand
gcauggcccuuucgguguu

SEQ ID NO: 1807592 - RNA, 19 nt, Homo sapiens
  misc_RNA (1)...(19): siRNA sense strand
gcuucuggcuguacuguau

SEQ ID NO: 1807593 - RNA, 19 nt, Homo sapiens
  misc_RNA (1)...(19): siRNA sense strand
ucagauucauucccuguug

SEQ ID NO: 1807594 - RNA, 19 nt, Homo sapiens
  misc_RNA (1)...(19): siRNA sense strand
gcucugcugugggcuacua

SEQ ID NO: 1807595 - RNA, 19 nt, Homo sapiens
  misc_RNA (1)...(19): siRNA sense strand
gccagucucuaauccaugu

SEQ ID NO: 1807596 - RNA, 19 nt, Homo sapiens
  misc_RNA (1)...(19): siRNA sense strand
ggucaucggcuacuucauc

SEQ ID NO: 1807597 - RNA, 19 nt, Homo sapiens
  misc_RNA (1)...(19): siRNA sense strand
guaugaaggcaucaagguu

SEQ ID NO: 1807598 - RNA, 19 nt, Homo sapiens
  misc_RNA (1)...(19): siRNA sense strand
aagccaagcugcucaacca

SEQ ID NO: 1807599 - RNA, 19 nt, Homo sapiens
  misc_RNA (1)...(19): siRNA sense strand
gcaaagccaagcugcucaa

SEQ ID NO: 1807600 - RNA, 19 nt, Homo sapiens
  misc_RNA (1)...(19): siRNA sense strand
gucaucggcuacuucauca

SEQ ID NO: 1807601 - RNA, 19 nt, Homo sapiens
  misc_RNA (1)...(19): siRNA sense strand
ccacuucucagcacagcuu

SEQ ID NO: 1807602 - RNA, 19 nt, Homo sapiens
  misc_RNA (1)...(19): siRNA sense strand
gcaucaagguuggcaaagc

SEQ ID NO: 1807603 - RNA, 19 nt, Homo sapiens
  misc_RNA (1)...(19): siRNA sense strand
cagcagaccaucgcagaga

SEQ ID NO: 1807604 - RNA, 19 nt, Homo sapiens
  misc_RNA (1)...(19): siRNA sense strand
caucggcuacuucaucaug

SEQ ID NO: 1807605 - RNA, 19 nt, Homo sapiens
  misc_RNA (1)...(19): siRNA sense strand
cggugcuucuguuugauuu

SEQ ID NO: 1807606 - RNA, 19 nt, Homo sapiens
  misc_RNA (1)...(19): siRNA sense strand
cacuuuggccagucucuaa

SEQ ID NO: 1807607 - RNA, 19 nt, Homo sapiens
  misc_RNA (1)...(19): siRNA sense strand
gcggugcuucuguuugauu

SEQ ID NO: 1807608 - RNA, 19 nt, Homo sapiens
  misc_RNA (1)...(19): siRNA sense strand
gugcuucuguuugauuucu

SEQ ID NO: 1807609 - RNA, 19 nt, Homo sapiens
  misc_RNA (1)...(19): siRNA sense strand
gaaaugaagucucuuauga

SEQ ID NO: 1807610 - RNA, 19 nt, Homo sapiens
  misc_RNA (1)...(19): siRNA sense strand
gcaaaugucucauauggaa

SEQ ID NO: 1807611 - RNA, 19 nt, Homo sapiens
  misc_RNA (1)...(19): siRNA sense strand
gaaggcaacucuugacaaa

SEQ ID NO: 1807612 - RNA, 19 nt, Homo sapiens
  misc_RNA (1)...(19): siRNA sense strand
gauauuugcuugcauguuu

SEQ ID NO: 1807613 - RNA, 19 nt, Homo sapiens
  misc_RNA (1)...(19): siRNA sense strand
gcaaauggauacaagauau

SEQ ID NO: 1807614 - RNA, 19 nt, Homo sapiens
  misc_RNA (1)...(19): siRNA sense strand
caagauaucuggcaaggaa

SEQ ID NO: 1807615 - RNA, 19 nt, Homo sapiens
  misc_RNA (1)...(19): siRNA sense strand
ggauaaaccugcuccuaaa

SEQ ID NO: 1807616 - RNA, 19 nt, Homo sapiens
  misc_RNA (1)...(19): siRNA sense strand
uaacgacacugugauauuu

SEQ ID NO: 1807617 - RNA, 19 nt, Homo sapiens
  misc_RNA (1)...(19): siRNA sense strand
guaaagagguaaacuguag

SEQ ID NO: 1807618 - RNA, 19 nt, Homo sapiens
  misc_RNA (1)...(19): siRNA sense strand
ugaagucucuuaugaaugu

SEQ ID NO: 1807619 - RNA, 19 nt, Homo sapiens
  misc_RNA (1)...(19): siRNA sense strand
uaaauggccggauuaguua

SEQ ID NO: 1807620 - RNA, 19 nt, Homo sapiens
  misc_RNA (1)...(19): siRNA sense strand
gccaguaugugaagaaauu

SEQ ID NO: 1807621 - RNA, 19 nt, Homo sapiens
  misc_RNA (1)...(19): siRNA sense strand
gcugugaacuuucuacuuc

SEQ ID NO: 1807622 - RNA, 19 nt, Homo sapiens
  misc_RNA (1)...(19): siRNA sense strand
gagaggcacuccuucuuug

SEQ ID NO: 1807623 - RNA, 19 nt, Homo sapiens
  misc_RNA (1)...(19): siRNA sense strand
gaccagaugucaacucuuc

SEQ ID NO: 1807624 - RNA, 19 nt, Homo sapiens
  misc_RNA (1)...(19): siRNA sense strand
gcaacucacuagcaaaugu

SEQ ID NO: 1807625 - RNA, 19 nt, Homo sapiens
  misc_RNA (1)...(19): siRNA sense strand
gaaauaccaguuugugaaa

SEQ ID NO: 1807626 - RNA, 19 nt, Homo sapiens
  misc_RNA (1)...(19): siRNA sense strand
caccugggauccugaaaua

SEQ ID NO: 1807627 - RNA, 19 nt, Homo sapiens
  misc_RNA (1)...(19): siRNA sense strand
ggagauucgucuuuguaaa

SEQ ID NO: 1807628 - RNA, 19 nt, Homo sapiens
  misc_RNA (1)...(19): siRNA sense strand
ggagaagaauccauacagu

SEQ ID NO: 1807629 - RNA, 19 nt, Homo sapiens
  misc_RNA (1)...(19): siRNA sense strand
guaaaguuauucacuguca

SEQ ID NO: 1807630 - RNA, 19 nt, Homo sapiens
  misc_RNA (1)...(19): siRNA sense strand
caagauggguaccaguuga

SEQ ID NO: 1807631 - RNA, 19 nt, Homo sapiens
  misc_RNA (1)...(19): siRNA sense strand
gggauaaaccugcuccuaa

SEQ ID NO: 1807632 - RNA, 19 nt, Homo sapiens
  misc_RNA (1)...(19): siRNA sense strand
uaucagaugugucaagaug

SEQ ID NO: 1807633 - RNA, 19 nt, Homo sapiens
  misc_RNA (1)...(19): siRNA sense strand
ggaguuccuuagaagauuu

SEQ ID NO: 1807634 - RNA, 19 nt, Homo sapiens
  misc_RNA (1)...(19): siRNA sense strand
gaagaggcacgcuguaaau

SEQ ID NO: 1807635 - RNA, 19 nt, Homo sapiens
  misc_RNA (1)...(19): siRNA sense strand
guauggagcuguuguaacu

SEQ ID NO: 1807636 - RNA, 19 nt, Homo sapiens
  misc_RNA (1)...(19): siRNA sense strand
ggugaaggguacaaguuaa

SEQ ID NO: 1807637 - RNA, 19 nt, Homo sapiens
  misc_RNA (1)...(19): siRNA sense strand
cuucuuaccuucuugauug

SEQ ID NO: 1807638 - RNA, 19 nt, Homo sapiens
  misc_RNA (1)...(19): siRNA sense strand
gagaaaagaucauuaacug

SEQ ID NO: 1807639 - RNA, 19 nt, Homo sapiens
  misc_RNA (1)...(19): siRNA sense strand
gaugucaacucuucuugug

SEQ ID NO: 1807640 - RNA, 19 nt, Homo sapiens
  misc_RNA (1)...(19): siRNA sense strand
gcagaaagaucgauauacc

SEQ ID NO: 1807641 - RNA, 19 nt, Homo sapiens
  misc_RNA (1)...(19): siRNA sense strand
uagcaaaugucucauaugg

SEQ ID NO: 1807642 - RNA, 19 nt, Homo sapiens
  misc_RNA (1)...(19): siRNA sense strand
aaaggaagauagacacaug

SEQ ID NO: 1807643 - RNA, 19 nt, Homo sapiens
  misc_RNA (1)...(19): siRNA sense strand
gcuccaggauugucuguga

SEQ ID NO: 1807644 - RNA, 19 nt, Homo sapiens
  misc_RNA (1)...(19): siRNA sense strand
cagcagauauggauggaau

SEQ ID NO: 1807645 - RNA, 19 nt, Homo sapiens
  misc_RNA (1)...(19): siRNA sense strand
gugauuaggugucauacug

SEQ ID NO: 1807646 - RNA, 19 nt, Homo sapiens
  misc_RNA (1)...(19): siRNA sense strand
ggaaaugaagucucuuaug

SEQ ID NO: 1807647 - RNA, 19 nt, Homo sapiens
  misc_RNA (1)...(19): siRNA sense strand
gugauaagguacaguuguu

SEQ ID NO: 1807648 - RNA, 19 nt, Homo sapiens
  misc_RNA (1)...(19): siRNA sense strand
caaggaaaauguaucagua

SEQ ID NO: 1807649 - RNA, 19 nt, Homo sapiens
  misc_RNA (1)...(19): siRNA sense strand
caaguguuauaguggauuu

SEQ ID NO: 1807650 - RNA, 19 nt, Homo sapiens
  misc_RNA (1)...(19): siRNA sense strand
aaacauagcucgauuuucu

SEQ ID NO: 1807651 - RNA, 19 nt, Homo sapiens
  misc_RNA (1)...(19): siRNA sense strand
uaaaccugcuccuaaaugu

SEQ ID NO: 1807652 - RNA, 19 nt, Homo sapiens
  misc_RNA (1)...(19): siRNA sense strand
ccuuauacgugauaucaaa

SEQ ID NO: 1807653 - RNA, 19 nt, Homo sapiens
  misc_RNA (1)...(19): siRNA sense strand
aagcaaugaucaagaaaga

SEQ ID NO: 1807654 - RNA, 19 nt, Homo sapiens
  misc_RNA (1)...(19): siRNA sense strand
ccuaagaggccgaauggua

SEQ ID NO: 1807655 - RNA, 19 nt, Homo sapiens
  misc_RNA (1)...(19): siRNA sense strand
gcuccuaaaugugaauauu

SEQ ID NO: 1807656 - RNA, 19 nt, Homo sapiens
  misc_RNA (1)...(19): siRNA sense strand
gcagguuugauacuucuua

SEQ ID NO: 1807657 - RNA, 19 nt, Homo sapiens
  misc_RNA (1)...(19): siRNA sense strand
ccauacugguggaaacaua

SEQ ID NO: 1807658 - RNA, 19 nt, Homo sapiens
  misc_RNA (1)...(19): siRNA sense strand
ugaaauaccaguuugugaa

SEQ ID NO: 1807659 - RNA, 19 nt, Homo sapiens
  misc_RNA (1)...(19): siRNA sense strand
uacaagcaaugaucaagaa

SEQ ID NO: 1807660 - RNA, 19 nt, Homo sapiens
  misc_RNA (1)...(19): siRNA sense strand
gcacaauuccuugguuuau

SEQ ID NO: 1807661 - RNA, 19 nt, Homo sapiens
  misc_RNA (1)...(19): siRNA sense strand
gggcagaaagaucgauaua

SEQ ID NO: 1807662 - RNA, 19 nt, Homo sapiens
  misc_RNA (1)...(19): siRNA sense strand
cauagucacuuacacuugu

SEQ ID NO: 1807663 - RNA, 19 nt, Homo sapiens
  misc_RNA (1)...(19): siRNA sense strand
ugguguaacugcaaacuuu

SEQ ID NO: 1807664 - RNA, 19 nt, Homo sapiens
  misc_RNA (1)...(19): siRNA sense strand
cuacagacauggugauucu

SEQ ID NO: 1807665 - RNA, 19 nt, Homo sapiens
  misc_RNA (1)...(19): siRNA sense strand
ccaggaggauacaaaauua

SEQ ID NO: 1807666 - RNA, 19 nt, Homo sapiens
  misc_RNA (1)...(19): siRNA sense strand
gaacuucauccuuauugga

SEQ ID NO: 1807667 - RNA, 19 nt, Homo sapiens
  misc_RNA (1)...(19): siRNA sense strand
gcaaggaagccccauauuu

SEQ ID NO: 1807668 - RNA, 19 nt, Homo sapiens
  misc_RNA (1)...(19): siRNA sense strand
gagagcaccauccguugua

SEQ ID NO: 1807669 - RNA, 19 nt, Homo sapiens
  misc_RNA (1)...(19): siRNA sense strand
gaaccacggucacuuacac

SEQ ID NO: 1807670 - RNA, 19 nt, Homo sapiens
  misc_RNA (1)...(19): siRNA sense strand
gcaagcaaauccgaugcaa

SEQ ID NO: 1807671 - RNA, 19 nt, Homo sapiens
  misc_RNA (1)...(19): siRNA sense strand
caacucuucuuguggugaa

SEQ ID NO: 1807672 - RNA, 19 nt, Homo sapiens
  misc_RNA (1)...(19): siRNA sense strand
gugcucacauguccauauu

SEQ ID NO: 1807673 - RNA, 19 nt, Homo sapiens
  misc_RNA (1)...(19): siRNA sense strand
caauggacaucacacaagu

SEQ ID NO: 1807674 - RNA, 19 nt, Homo sapiens
  misc_RNA (1)...(19): siRNA sense strand
ccaaucggaucaccaaugg

SEQ ID NO: 1807675 - RNA, 19 nt, Homo sapiens
  misc_RNA (1)...(19): siRNA sense strand
gauggaaccugggauaaac

SEQ ID NO: 1807676 - RNA, 19 nt, Homo sapiens
  misc_RNA (1)...(19): siRNA sense strand
gcaaaguggcagcguguga

SEQ ID NO: 1807677 - RNA, 19 nt, Homo sapiens
  misc_RNA (1)...(19): siRNA sense strand
aaaccaacuucuccaugaa

SEQ ID NO: 1807678 - RNA, 19 nt, Homo sapiens
  misc_RNA (1)...(19): siRNA sense strand
ccacagugcuuacgaucuc

SEQ ID NO: 1807679 - RNA, 19 nt, Homo sapiens
  misc_RNA (1)...(19): siRNA sense strand
gaaagaggaguggaauuca

SEQ ID NO: 1807680 - RNA, 19 nt, Homo sapiens
  misc_RNA (1)...(19): siRNA sense strand
caaguuaagugggaguguu

SEQ ID NO: 1807681 - RNA, 19 nt, Homo sapiens
  misc_RNA (1)...(19): siRNA sense strand
agaaagaucgauauaccua

SEQ ID NO: 1807682 - RNA, 19 nt, Homo sapiens
  misc_RNA (1)...(19): siRNA sense strand
ggugggagaagaauccaua

SEQ ID NO: 1807683 - RNA, 19 nt, Homo sapiens
  misc_RNA (1)...(19): siRNA sense strand
gaaugucaauccuguacag

SEQ ID NO: 1807684 - RNA, 19 nt, Homo sapiens
  misc_RNA (1)...(19): siRNA sense strand
ggauggaaccugggauaaa

SEQ ID NO: 1807685 - RNA, 19 nt, Homo sapiens
  misc_RNA (1)...(19): siRNA sense strand
guacaagcaaugaucaaga

SEQ ID NO: 1807686 - RNA, 19 nt, Homo sapiens
  misc_RNA (1)...(19): siRNA sense strand
gggaguuccuuagaagauu

SEQ ID NO: 1807687 - RNA, 19 nt, Homo sapiens
  misc_RNA (1)...(19): siRNA sense strand
cuaggacgauuucccaaug

SEQ ID NO: 1807688 - RNA, 19 nt, Homo sapiens
  misc_RNA (1)...(19): siRNA sense strand
gaaaauguaucaguaugga

SEQ ID NO: 1807689 - RNA, 19 nt, Homo sapiens
  misc_RNA (1)...(19): siRNA sense strand
aaacacauucugcauauuc

SEQ ID NO: 1807690 - RNA, 19 nt, Homo sapiens
  misc_RNA (1)...(19): siRNA sense strand
ggaauucagccucauugga

SEQ ID NO: 1807691 - RNA, 19 nt, Homo sapiens
  misc_RNA (1)...(19): siRNA sense strand
ggaaggcaacucuugacaa

SEQ ID NO: 1807692 - RNA, 19 nt, Homo sapiens
  misc_RNA (1)...(19): siRNA sense strand
aagcaaauccgaugcaaug

SEQ ID NO: 1807693 - RNA, 19 nt, Homo sapiens
  misc_RNA (1)...(19): siRNA sense strand
gaaagaucgauauaccuau

SEQ ID NO: 1807694 - RNA, 19 nt, Homo sapiens
  misc_RNA (1)...(19): siRNA sense strand
uuuagaagcacgagaagua

SEQ ID NO: 1807695 - RNA, 19 nt, Homo sapiens
  misc_RNA (1)...(19): siRNA sense strand
gauacaagccagaaagaag

SEQ ID NO: 1807696 - RNA, 19 nt, Homo sapiens
  misc_RNA (1)...(19): siRNA sense strand
guggaaacauagcucgauu

SEQ ID NO: 1807697 - RNA, 19 nt, Homo sapiens
  misc_RNA (1)...(19): siRNA sense strand
gugacucgcugcccuaauc

SEQ ID NO: 1807698 - RNA, 19 nt, Homo sapiens
  misc_RNA (1)...(19): siRNA sense strand
gacccuggaacaucuauaa

SEQ ID NO: 1807699 - RNA, 19 nt, Homo sapiens
  misc_RNA (1)...(19): siRNA sense strand
gaagacauauaggcaacuc

SEQ ID NO: 1807700 - RNA, 19 nt, Homo sapiens
  misc_RNA (1)...(19): siRNA sense strand
gcucacauguccauauugc

SEQ ID NO: 1807701 - RNA, 19 nt, Homo sapiens
  misc_RNA (1)...(19): siRNA sense strand
ugaaggguaucgacugcaa

SEQ ID NO: 1807702 - RNA, 19 nt, Homo sapiens
  misc_RNA (1)...(19): siRNA sense strand
gcuccuguccuuuguggua

SEQ ID NO: 1807703 - RNA, 19 nt, Homo sapiens
  misc_RNA (1)...(19): siRNA sense strand
guguggagcuaguuaauac

SEQ ID NO: 1807704 - RNA, 19 nt, Homo sapiens
  misc_RNA (1)...(19): siRNA sense strand
cuaagaggccgaaugguau

SEQ ID NO: 1807705 - RNA, 19 nt, Homo sapiens
  misc_RNA (1)...(19): siRNA sense strand
caggauugucugugacuua

SEQ ID NO: 1807706 - RNA, 19 nt, Homo sapiens
  misc_RNA (1)...(19): siRNA sense strand
gauccugaaauaccaguuu

SEQ ID NO: 1807707 - RNA, 19 nt, Homo sapiens
  misc_RNA (1)...(19): siRNA sense strand
uaagugggaguguuuauca

SEQ ID NO: 1807708 - RNA, 19 nt, Homo sapiens
  misc_RNA (1)...(19): siRNA sense strand
ucuagucgguguguaauug

SEQ ID NO: 1807709 - RNA, 19 nt, Homo sapiens
  misc_RNA (1)...(19): siRNA sense strand
ccaccaaacugaccuauga

SEQ ID NO: 1807710 - RNA, 19 nt, Homo sapiens
  misc_RNA (1)...(19): siRNA sense strand
ugacagagcuauucacauc

SEQ ID NO: 1807711 - RNA, 19 nt, Homo sapiens
  misc_RNA (1)...(19): siRNA sense strand
gauauuugcugccuggaaa

SEQ ID NO: 1807712 - RNA, 19 nt, Homo sapiens
  misc_RNA (1)...(19): siRNA sense strand
acacagagguggcaauguu

SEQ ID NO: 1807713 - RNA, 19 nt, Homo sapiens
  misc_RNA (1)...(19): siRNA sense strand
ggacuuacaagguguggua

SEQ ID NO: 1807714 - RNA, 19 nt, Homo sapiens
  misc_RNA (1)...(19): siRNA sense strand
ugaggugauugaaggauua

SEQ ID NO: 1807715 - RNA, 19 nt, Homo sapiens
  misc_RNA (1)...(19): siRNA sense strand
ggugcaagcuugucucaau

SEQ ID NO: 1807716 - RNA, 19 nt, Homo sapiens
  misc_RNA (1)...(19): siRNA sense strand
agaaggcgcugcaguccua

SEQ ID NO: 1807717 - RNA, 19 nt, Homo sapiens
  misc_RNA (1)...(19): siRNA sense strand
ggaccaggaugcugugauc

SEQ ID NO: 1807718 - RNA, 19 nt, Homo sapiens
  misc_RNA (1)...(19): siRNA sense strand
gaagauuaugggagauaua

SEQ ID NO: 1807719 - RNA, 19 nt, Homo sapiens
  misc_RNA (1)...(19): siRNA sense strand
gggcuggacuggugcaaug

SEQ ID NO: 1807720 - RNA, 19 nt, Homo sapiens
  misc_RNA (1)...(19): siRNA sense strand
ggaagauuaugggagauau

SEQ ID NO: 1807721 - RNA, 19 nt, Homo sapiens
  misc_RNA (1)...(19): siRNA sense strand
ggaaaauucucggauauga

SEQ ID NO: 1807722 - RNA, 19 nt, Homo sapiens
  misc_RNA (1)...(19): siRNA sense strand
caaacugaccuaugaugaa

SEQ ID NO: 1807723 - RNA, 19 nt, Homo sapiens
  misc_RNA (1)...(19): siRNA sense strand
caaugauggugcucagauu

SEQ ID NO: 1807724 - RNA, 19 nt, Homo sapiens
  misc_RNA (1)...(19): siRNA sense strand
acuauacucuggaucauga

SEQ ID NO: 1807725 - RNA, 19 nt, Homo sapiens
  misc_RNA (1)...(19): siRNA sense strand
ggauaugaccgcugugaug

SEQ ID NO: 1807726 - RNA, 19 nt, Homo sapiens
  misc_RNA (1)...(19): siRNA sense strand
gauaaaagcagauaugaug

SEQ ID NO: 1807727 - RNA, 19 nt, Homo sapiens
  misc_RNA (1)...(19): siRNA sense strand
cggauuaccucaaggaagu

SEQ ID NO: 1807728 - RNA, 19 nt, Homo sapiens
  misc_RNA (1)...(19): siRNA sense strand
gaucaugacagagcuauuc

SEQ ID NO: 1807729 - RNA, 19 nt, Homo sapiens
  misc_RNA (1)...(19): siRNA sense strand
gaagggaggcagugauagu

SEQ ID NO: 1807730 - RNA, 19 nt, Homo sapiens
  misc_RNA (1)...(19): siRNA sense strand
ucgagacccuacagcauuu

SEQ ID NO: 1807731 - RNA, 19 nt, Homo sapiens
  misc_RNA (1)...(19): siRNA sense strand
gguauucccuuacuuucca

SEQ ID NO: 1807732 - RNA, 19 nt, Homo sapiens
  misc_RNA (1)...(19): siRNA sense strand
caagcuaacuucggauuac

SEQ ID NO: 1807733 - RNA, 19 nt, Homo sapiens
  misc_RNA (1)...(19): siRNA sense strand
ugcaauaucccaucacaaa

SEQ ID NO: 1807734 - RNA, 19 nt, Homo sapiens
  misc_RNA (1)...(19): siRNA sense strand
aaacugaccuaugaugaag

SEQ ID NO: 1807735 - RNA, 19 nt, Homo sapiens
  misc_RNA (1)...(19): siRNA sense strand
ccaaacugaccuaugauga

SEQ ID NO: 1807736 - RNA, 19 nt, Homo sapiens
  misc_RNA (1)...(19): siRNA sense strand
aaagugggccagauauuug

SEQ ID NO: 1807737 - RNA, 19 nt, Homo sapiens
  misc_RNA (1)...(19): siRNA sense strand
ccaagcuaacuucggauua

SEQ ID NO: 1807738 - RNA, 19 nt, Homo sapiens
  misc_RNA (1)...(19): siRNA sense strand
gugaggugauugaaggauu

SEQ ID NO: 1807739 - RNA, 19 nt, Homo sapiens
  misc_RNA (1)...(19): siRNA sense strand
ucaaggaaguggauguuuu

SEQ ID NO: 1807740 - RNA, 19 nt, Homo sapiens
  misc_RNA (1)...(19): siRNA sense strand
gcaagcuugucucaaugau

SEQ ID NO: 1807741 - RNA, 19 nt, Homo sapiens
  misc_RNA (1)...(19): siRNA sense strand
gugcaagcuugucucaaug

SEQ ID NO: 1807742 - RNA, 19 nt, Homo sapiens
  misc_RNA (1)...(19): siRNA sense strand
gcuacaaucucaauuuuca

SEQ ID NO: 1807743 - RNA, 19 nt, Homo sapiens
  misc_RNA (1)...(19): siRNA sense strand
gcgcuacaaucucaauuuu

SEQ ID NO: 1807744 - RNA, 19 nt, Homo sapiens
  misc_RNA (1)...(19): siRNA sense strand
agaugauacuguuguggua

SEQ ID NO: 1807745 - RNA, 19 nt, Homo sapiens
  misc_RNA (1)...(19): siRNA sense strand
ugauggcucugugcaauau

SEQ ID NO: 1807746 - RNA, 19 nt, Homo sapiens
  misc_RNA (1)...(19): siRNA sense strand
gcucaggaauccauaaaau

SEQ ID NO: 1807747 - RNA, 19 nt, Homo sapiens
  misc_RNA (1)...(19): siRNA sense strand
gauuagaagaugauacugu

SEQ ID NO: 1807748 - RNA, 19 nt, Homo sapiens
  misc_RNA (1)...(19): siRNA sense strand
gauugaaggauuagaagau

SEQ ID NO: 1807749 - RNA, 19 nt, Homo sapiens
  misc_RNA (1)...(19): siRNA sense strand
caggguagaguguuucuga

SEQ ID NO: 1807750 - RNA, 19 nt, Homo sapiens
  misc_RNA (1)...(19): siRNA sense strand
gcauuuggcucaggaaucc

SEQ ID NO: 1807751 - RNA, 19 nt, Homo sapiens
  misc_RNA (1)...(19): siRNA sense strand
agacaacuauacucuggau

SEQ ID NO: 1807752 - RNA, 19 nt, Homo sapiens
  misc_RNA (1)...(19): siRNA sense strand
caacuauacucuggaucau

SEQ ID NO: 1807753 - RNA, 19 nt, Homo sapiens
  misc_RNA (1)...(19): siRNA sense strand
cugcugggcugaucaucuu

SEQ ID NO: 1807754 - RNA, 19 nt, Homo sapiens
  misc_RNA (1)...(19): siRNA sense strand
ggugauugaaggauuagaa

SEQ ID NO: 1807755 - RNA, 19 nt, Homo sapiens
  misc_RNA (1)...(19): siRNA sense strand
ugugguagcacuggacuua

SEQ ID NO: 1807756 - RNA, 19 nt, Homo sapiens
  misc_RNA (1)...(19): siRNA sense strand
acacugccauguaaauuuu

SEQ ID NO: 1807757 - RNA, 19 nt, Homo sapiens
  misc_RNA (1)...(19): siRNA sense strand
gcaauaucccaucacaaag

SEQ ID NO: 1807758 - RNA, 19 nt, Homo sapiens
  misc_RNA (1)...(19): siRNA sense strand
gaaggauuagaagaugaua

SEQ ID NO: 1807759 - RNA, 19 nt, Homo sapiens
  misc_RNA (1)...(19): siRNA sense strand
cacagagguggcaauguua

SEQ ID NO: 1807760 - RNA, 19 nt, Homo sapiens
  misc_RNA (1)...(19): siRNA sense strand
gauauaagugugaggugau

SEQ ID NO: 1807761 - RNA, 19 nt, Homo sapiens
  misc_RNA (1)...(19): siRNA sense strand
gggaggcagugauagugau

SEQ ID NO: 1807762 - RNA, 19 nt, Homo sapiens
  misc_RNA (1)...(19): siRNA sense strand
gaucaucuuucagacaacu

SEQ ID NO: 1807763 - RNA, 19 nt, Homo sapiens
  misc_RNA (1)...(19): siRNA sense strand
uaagcuguauggugucuac

SEQ ID NO: 1807764 - RNA, 19 nt, Homo sapiens
  misc_RNA (1)...(19): siRNA sense strand
uaacuucggauuaccucaa

SEQ ID NO: 1807765 - RNA, 19 nt, Homo sapiens
  misc_RNA (1)...(19): siRNA sense strand
gugauggcucugugcaaua

SEQ ID NO: 1807766 - RNA, 19 nt, Homo sapiens
  misc_RNA (1)...(19): siRNA sense strand
cuuacaaggugugguauuc

SEQ ID NO: 1807767 - RNA, 19 nt, Homo sapiens
  misc_RNA (1)...(19): siRNA sense strand
cugaagggaggcagugaua

SEQ ID NO: 1807768 - RNA, 19 nt, Homo sapiens
  misc_RNA (1)...(19): siRNA sense strand
agucaggaacuacggauuu

SEQ ID NO: 1807769 - RNA, 19 nt, Homo sapiens
  misc_RNA (1)...(19): siRNA sense strand
agaagaugauacuguugug

SEQ ID NO: 1807770 - RNA, 19 nt, Homo sapiens
  misc_RNA (1)...(19): siRNA sense strand
acaacuauacucuggauca

SEQ ID NO: 1807771 - RNA, 19 nt, Homo sapiens
  misc_RNA (1)...(19): siRNA sense strand
aagcagauaugauguuuuc

SEQ ID NO: 1807772 - RNA, 19 nt, Homo sapiens
  misc_RNA (1)...(19): siRNA sense strand
ggcgcuacaaucucaauuu

SEQ ID NO: 1807773 - RNA, 19 nt, Homo sapiens
  misc_RNA (1)...(19): siRNA sense strand
gaauuaaguggaccaagcu

SEQ ID NO: 1807774 - RNA, 19 nt, Homo sapiens
  misc_RNA (1)...(19): siRNA sense strand
caauuucaauggccguuuu

SEQ ID NO: 1807775 - RNA, 19 nt, Homo sapiens
  misc_RNA (1)...(19): siRNA sense strand
uagaagaugauacuguugu

SEQ ID NO: 1807776 - RNA, 19 nt, Homo sapiens
  misc_RNA (1)...(19): siRNA sense strand
uguauggugucuacugcuu

SEQ ID NO: 1807777 - RNA, 19 nt, Homo sapiens
  misc_RNA (1)...(19): siRNA sense strand
uauggugucuacugcuuca

SEQ ID NO: 1807778 - RNA, 19 nt, Homo sapiens
  misc_RNA (1)...(19): siRNA sense strand
agaccucacucuggaagau

SEQ ID NO: 1807779 - RNA, 19 nt, Homo sapiens
  misc_RNA (1)...(19): siRNA sense strand
uugaaggauuagaagauga

SEQ ID NO: 1807780 - RNA, 19 nt, Homo sapiens
  misc_RNA (1)...(19): siRNA sense strand
accucacucuggaagauua

SEQ ID NO: 1807781 - RNA, 19 nt, Homo sapiens
  misc_RNA (1)...(19): siRNA sense strand
gcaaaagugggccagauau

SEQ ID NO: 1807782 - RNA, 19 nt, Homo sapiens
  misc_RNA (1)...(19): siRNA sense strand
ucaaugauggugcucagau

SEQ ID NO: 1807783 - RNA, 19 nt, Homo sapiens
  misc_RNA (1)...(19): siRNA sense strand
agagcaagccaagguguuu

SEQ ID NO: 1807784 - RNA, 19 nt, Homo sapiens
  misc_RNA (1)...(19): siRNA sense strand
ggugugguauucccuuacu

SEQ ID NO: 1807785 - RNA, 19 nt, Homo sapiens
  misc_RNA (1)...(19): siRNA sense strand
acagagcuauucacaucca

SEQ ID NO: 1807786 - RNA, 19 nt, Homo sapiens
  misc_RNA (1)...(19): siRNA sense strand
ccuggaaaauucucggaua

SEQ ID NO: 1807787 - RNA, 19 nt, Homo sapiens
  misc_RNA (1)...(19): siRNA sense strand
uuacauccaauuucaaugg

SEQ ID NO: 1807788 - RNA, 19 nt, Homo sapiens
  misc_RNA (1)...(19): siRNA sense strand
ugugguauucccuuacuuu

SEQ ID NO: 1807789 - RNA, 19 nt, Homo sapiens
  misc_RNA (1)...(19): siRNA sense strand
caugacagagcuauucaca

SEQ ID NO: 1807790 - RNA, 19 nt, Homo sapiens
  misc_RNA (1)...(19): siRNA sense strand
caauaucccaucacaaagc

SEQ ID NO: 1807791 - RNA, 19 nt, Homo sapiens
  misc_RNA (1)...(19): siRNA sense strand
ucaaucugcugggcugauc

SEQ ID NO: 1807792 - RNA, 19 nt, Homo sapiens
  misc_RNA (1)...(19): siRNA sense strand
ugguagcacuggacuuaca

SEQ ID NO: 1807793 - RNA, 19 nt, Homo sapiens
  misc_RNA (1)...(19): siRNA sense strand
auauaagugugaggugauu

SEQ ID NO: 1807794 - RNA, 19 nt, Homo sapiens
  misc_RNA (1)...(19): siRNA sense strand
ggaggcagugauagugaug

SEQ ID NO: 1807795 - RNA, 19 nt, Homo sapiens
  misc_RNA (1)...(19): siRNA sense strand
ucacacagagguggcaaug

SEQ ID NO: 1807796 - RNA, 19 nt, Homo sapiens
  misc_RNA (1)...(19): siRNA sense strand
aaaagugggccagauauuu

SEQ ID NO: 1807797 - RNA, 19 nt, Homo sapiens
  misc_RNA (1)...(19): siRNA sense strand
uggaagauuaugggagaua

SEQ ID NO: 1807798 - RNA, 19 nt, Homo sapiens
  misc_RNA (1)...(19): siRNA sense strand
agugauggcucugugcaau

SEQ ID NO: 1807799 - RNA, 19 nt, Homo sapiens
  misc_RNA (1)...(19): siRNA sense strand
ugaaggauuagaagaugau

SEQ ID NO: 1807800 - RNA, 19 nt, Homo sapiens
  misc_RNA (1)...(19): siRNA sense strand
caaaagugggccagauauu

SEQ ID NO: 1807801 - RNA, 19 nt, Homo sapiens
  misc_RNA (1)...(19): siRNA sense strand
gugcucagauugcaaaagu

SEQ ID NO: 1807802 - RNA, 19 nt, Homo sapiens
  misc_RNA (1)...(19): siRNA sense strand
aagcagagcaagccaaggu

SEQ ID NO: 1807803 - RNA, 19 nt, Homo sapiens
  misc_RNA (1)...(19): siRNA sense strand
gcucaagccuuucuaauca

SEQ ID NO: 1807804 - RNA, 19 nt, Homo sapiens
  misc_RNA (1)...(19): siRNA sense strand
gagagaagcccuacaaaug

SEQ ID NO: 1807805 - RNA, 19 nt, Homo sapiens
  misc_RNA (1)...(19): siRNA sense strand
gaaagacugggaaaguuua

SEQ ID NO: 1807806 - RNA, 19 nt, Homo sapiens
  misc_RNA (1)...(19): siRNA sense strand
gagaggauauggaaauugu

SEQ ID NO: 1807807 - RNA, 19 nt, Homo sapiens
  misc_RNA (1)...(19): siRNA sense strand
gaaauuguggccuugauaa

SEQ ID NO: 1807808 - RNA, 19 nt, Homo sapiens
  misc_RNA (1)...(19): siRNA sense strand
cuacaaaugugacgaaugu

SEQ ID NO: 1807809 - RNA, 19 nt, Homo sapiens
  misc_RNA (1)...(19): siRNA sense strand
gagagaaacccuacaaaug

SEQ ID NO: 1807810 - RNA, 19 nt, Homo sapiens
  misc_RNA (1)...(19): siRNA sense strand
cuacaaaugugacgaaugu

SEQ ID NO: 1807811 - RNA, 19 nt, Homo sapiens
  misc_RNA (1)...(19): siRNA sense strand
caacaucuuuaagcaguua

SEQ ID NO: 1807812 - RNA, 19 nt, Homo sapiens
  misc_RNA (1)...(19): siRNA sense strand
guacagggaugugauguug

SEQ ID NO: 1807813 - RNA, 19 nt, Homo sapiens
  misc_RNA (1)...(19): siRNA sense strand
aaagagcccuggaauguga

SEQ ID NO: 1807814 - RNA, 19 nt, Homo sapiens
  misc_RNA (1)...(19): siRNA sense strand
ggaaagacugggaaaguuu

SEQ ID NO: 1807815 - RNA, 19 nt, Homo sapiens
  misc_RNA (1)...(19): siRNA sense strand
agagaaaccuuacaagugu

SEQ ID NO: 1807816 - RNA, 19 nt, Homo sapiens
  misc_RNA (1)...(19): siRNA sense strand
gcaaagccuucacccaguu

SEQ ID NO: 1807817 - RNA, 19 nt, Homo sapiens
  misc_RNA (1)...(19): siRNA sense strand
gagagaaaccuuacaagug

SEQ ID NO: 1807818 - RNA, 19 nt, Homo sapiens
  misc_RNA (1)...(19): siRNA sense strand
gagaaacccuacaaaugug

SEQ ID NO: 1807819 - RNA, 19 nt, Homo sapiens
  misc_RNA (1)...(19): siRNA sense strand
ucucagaccuuacuaaaca

SEQ ID NO: 1807820 - RNA, 19 nt, Homo sapiens
  misc_RNA (1)...(19): siRNA sense strand
gagagaaacccuaccaaug

SEQ ID NO: 1807821 - RNA, 19 nt, Homo sapiens
  misc_RNA (1)...(19): siRNA sense strand
gagagaaacccuacaagug

SEQ ID NO: 1807822 - RNA, 19 nt, Homo sapiens
  misc_RNA (1)...(19): siRNA sense strand
gagagaaacccuacaagug

SEQ ID NO: 1807823 - RNA, 19 nt, Homo sapiens
  misc_RNA (1)...(19): siRNA sense strand
gagaagcccuacaaaugug

SEQ ID NO: 1807824 - RNA, 19 nt, Homo sapiens
  misc_RNA (1)...(19): siRNA sense strand
uaucagaccucacuaagca

SEQ ID NO: 1807825 - RNA, 19 nt, Homo sapiens
  misc_RNA (1)...(19): siRNA sense strand
gagaaacccuaccaaugug

SEQ ID NO: 1807826 - RNA, 19 nt, Homo sapiens
  misc_RNA (1)...(19): siRNA sense strand
gaaacaugguacaaagguu

SEQ ID NO: 1807827 - RNA, 19 nt, Homo sapiens
  misc_RNA (1)...(19): siRNA sense strand
cuacaagugugaagaaugu

SEQ ID NO: 1807828 - RNA, 19 nt, Homo sapiens
  misc_RNA (1)...(19): siRNA sense strand
auacaaaugugacgaaugu

SEQ ID NO: 1807829 - RNA, 19 nt, Homo sapiens
  misc_RNA (1)...(19): siRNA sense strand
ggagagaaacccuacaaau

SEQ ID NO: 1807830 - RNA, 19 nt, Homo sapiens
  misc_RNA (1)...(19): siRNA sense strand
ggaaauuguggccuugaua

SEQ ID NO: 1807831 - RNA, 19 nt, Homo sapiens
  misc_RNA (1)...(19): siRNA sense strand
aaacauaagcaaacccaua

SEQ ID NO: 1807832 - RNA, 19 nt, Homo sapiens
  misc_RNA (1)...(19): siRNA sense strand
gaacacaggaggauucaca

SEQ ID NO: 1807833 - RNA, 19 nt, Homo sapiens
  misc_RNA (1)...(19): siRNA sense strand
gcagagccuucaugugguu

SEQ ID NO: 1807834 - RNA, 19 nt, Homo sapiens
  misc_RNA (1)...(19): siRNA sense strand
gagcagggcauacaagaug

SEQ ID NO: 1807835 - RNA, 19 nt, Homo sapiens
  misc_RNA (1)...(19): siRNA sense strand
ccucaaaccuuauuguaca

SEQ ID NO: 1807836 - RNA, 19 nt, Homo sapiens
  misc_RNA (1)...(19): siRNA sense strand
ggagagaagcccuacaaau

SEQ ID NO: 1807837 - RNA, 19 nt, Homo sapiens
  misc_RNA (1)...(19): siRNA sense strand
gagaaaccauacaaaugug

SEQ ID NO: 1807838 - RNA, 19 nt, Homo sapiens
  misc_RNA (1)...(19): siRNA sense strand
uuacaagugucaagaaugu

SEQ ID NO: 1807839 - RNA, 19 nt, Homo sapiens
  misc_RNA (1)...(19): siRNA sense strand
gaaaagagcccuggaaugu

SEQ ID NO: 1807840 - RNA, 19 nt, Homo sapiens
  misc_RNA (1)...(19): siRNA sense strand
gcucaagccuuucuaacca

SEQ ID NO: 1807841 - RNA, 19 nt, Homo sapiens
  misc_RNA (1)...(19): siRNA sense strand
ggaccucgcucagcagaau

SEQ ID NO: 1807842 - RNA, 19 nt, Homo sapiens
  misc_RNA (1)...(19): siRNA sense strand
aaagaauacugagaggaua

SEQ ID NO: 1807843 - RNA, 19 nt, Homo sapiens
  misc_RNA (1)...(19): siRNA sense strand
ggagagaaaccuuacaagu

SEQ ID NO: 1807844 - RNA, 19 nt, Homo sapiens
  misc_RNA (1)...(19): siRNA sense strand
aaccagugcucccaccuua

SEQ ID NO: 1807845 - RNA, 19 nt, Homo sapiens
  misc_RNA (1)...(19): siRNA sense strand
agagaaacccuacaaaugu

SEQ ID NO: 1807846 - RNA, 19 nt, Homo sapiens
  misc_RNA (1)...(19): siRNA sense strand
cuaccaaugugaagaaugu

SEQ ID NO: 1807847 - RNA, 19 nt, Homo sapiens
  misc_RNA (1)...(19): siRNA sense strand
ugagaaaccauacaaaugu

SEQ ID NO: 1807848 - RNA, 19 nt, Homo sapiens
  misc_RNA (1)...(19): siRNA sense strand
guucagggauguggccaua

SEQ ID NO: 1807849 - RNA, 19 nt, Homo sapiens
  misc_RNA (1)...(19): siRNA sense strand
ucucagacauuaccaaaca

SEQ ID NO: 1807850 - RNA, 19 nt, Homo sapiens
  misc_RNA (1)...(19): siRNA sense strand
uggcaaauccuuucaaaug

SEQ ID NO: 1807851 - RNA, 19 nt, Homo sapiens
  misc_RNA (1)...(19): siRNA sense strand
auaauggacuuaaccaaug

SEQ ID NO: 1807852 - RNA, 19 nt, Homo sapiens
  misc_RNA (1)...(19): siRNA sense strand
ggagagaaacccuacaagu

SEQ ID NO: 1807853 - RNA, 19 nt, Homo sapiens
  misc_RNA (1)...(19): siRNA sense strand
ggagagaaacccuacaagu

SEQ ID NO: 1807854 - RNA, 19 nt, Homo sapiens
  misc_RNA (1)...(19): siRNA sense strand
ggagagaaacccuaccaau

SEQ ID NO: 1807855 - RNA, 19 nt, Homo sapiens
  misc_RNA (1)...(19): siRNA sense strand
gggaaagccuauacacagu

SEQ ID NO: 1807856 - RNA, 19 nt, Homo sapiens
  misc_RNA (1)...(19): siRNA sense strand
gcagugucuuuaucucuug

SEQ ID NO: 1807857 - RNA, 19 nt, Homo sapiens
  misc_RNA (1)...(19): siRNA sense strand
ggagaacuacagaaacuug

SEQ ID NO: 1807858 - RNA, 19 nt, Homo sapiens
  misc_RNA (1)...(19): siRNA sense strand
ggacuuaaccaauguucau

SEQ ID NO: 1807859 - RNA, 19 nt, Homo sapiens
  misc_RNA (1)...(19): siRNA sense strand
agagaaacccuaccaaugu

SEQ ID NO: 1807860 - RNA, 19 nt, Homo sapiens
  misc_RNA (1)...(19): siRNA sense strand
gggaugugauguuggagaa

SEQ ID NO: 1807861 - RNA, 19 nt, Homo sapiens
  misc_RNA (1)...(19): siRNA sense strand
gcccaaauccuuccaaaca

SEQ ID NO: 1807862 - RNA, 19 nt, Homo sapiens
  misc_RNA (1)...(19): siRNA sense strand
ggauguggccauagaauuc

SEQ ID NO: 1807863 - RNA, 19 nt, Homo sapiens
  misc_RNA (1)...(19): siRNA sense strand
ccaaacaccagagaaauga

SEQ ID NO: 1807864 - RNA, 19 nt, Homo sapiens
  misc_RNA (1)...(19): siRNA sense strand
gcaaauccuuucaaaugcu

SEQ ID NO: 1807865 - RNA, 19 nt, Homo sapiens
  misc_RNA (1)...(19): siRNA sense strand
ccaaagugcugggauuaca

SEQ ID NO: 1807866 - RNA, 19 nt, Homo sapiens
  misc_RNA (1)...(19): siRNA sense strand
gacuguacaugaaagcauu

SEQ ID NO: 1807867 - RNA, 19 nt, Homo sapiens
  misc_RNA (1)...(19): siRNA sense strand
cuacacgugugaagaaugu

SEQ ID NO: 1807868 - RNA, 19 nt, Homo sapiens
  misc_RNA (1)...(19): siRNA sense strand
ccagagaaaugagauugga

SEQ ID NO: 1807869 - RNA, 19 nt, Homo sapiens
  misc_RNA (1)...(19): siRNA sense strand
cauugacacuggagagaaa

SEQ ID NO: 1807870 - RNA, 19 nt, Homo sapiens
  misc_RNA (1)...(19): siRNA sense strand
cuagcuaugucuucucauu

SEQ ID NO: 1807871 - RNA, 19 nt, Homo sapiens
  misc_RNA (1)...(19): siRNA sense strand
ucagggauguggccauaga

SEQ ID NO: 1807872 - RNA, 19 nt, Homo sapiens
  misc_RNA (1)...(19): siRNA sense strand
cagccaggccucaauguuu

SEQ ID NO: 1807873 - RNA, 19 nt, Homo sapiens
  misc_RNA (1)...(19): siRNA sense strand
acaccugacuguacaugaa

SEQ ID NO: 1807874 - RNA, 19 nt, Homo sapiens
  misc_RNA (1)...(19): siRNA sense strand
cauaagagaauucauacug

SEQ ID NO: 1807875 - RNA, 19 nt, Homo sapiens
  misc_RNA (1)...(19): siRNA sense strand
cauaagagaauucauacug

SEQ ID NO: 1807876 - RNA, 19 nt, Homo sapiens
  misc_RNA (1)...(19): siRNA sense strand
ucaagccuuucuaaccaua

SEQ ID NO: 1807877 - RNA, 19 nt, Homo sapiens
  misc_RNA (1)...(19): siRNA sense strand
uaaccaauguucaucaacu

SEQ ID NO: 1807878 - RNA, 19 nt, Homo sapiens
  misc_RNA (1)...(19): siRNA sense strand
ggugagaaaccauacaaau

SEQ ID NO: 1807879 - RNA, 19 nt, Homo sapiens
  misc_RNA (1)...(19): siRNA sense strand
gcaacaucuuuaagcaguu

SEQ ID NO: 1807880 - RNA, 19 nt, Homo sapiens
  misc_RNA (1)...(19): siRNA sense strand
gugagaaaccauacaaaug

SEQ ID NO: 1807881 - RNA, 19 nt, Homo sapiens
  misc_RNA (1)...(19): siRNA sense strand
auuguggccuugauaauuu

SEQ ID NO: 1807882 - RNA, 19 nt, Homo sapiens
  misc_RNA (1)...(19): siRNA sense strand
agagaaacccuacaagugu

SEQ ID NO: 1807883 - RNA, 19 nt, Homo sapiens
  misc_RNA (1)...(19): siRNA sense strand
agagaaacccuacaagugu

SEQ ID NO: 1807884 - RNA, 19 nt, Homo sapiens
  misc_RNA (1)...(19): siRNA sense strand
caauguuucuguggacaaa

SEQ ID NO: 1807885 - RNA, 19 nt, Homo sapiens
  misc_RNA (1)...(19): siRNA sense strand
gaagagugcagcagugucu

SEQ ID NO: 1807886 - RNA, 19 nt, Homo sapiens
  misc_RNA (1)...(19): siRNA sense strand
ucaagaauguggcaaaucc

SEQ ID NO: 1807887 - RNA, 19 nt, Homo sapiens
  misc_RNA (1)...(19): siRNA sense strand
ucaaaugugaggaauguga

SEQ ID NO: 1807888 - RNA, 19 nt, Homo sapiens
  misc_RNA (1)...(19): siRNA sense strand
gcucccaccuuacugaaca

SEQ ID NO: 1807889 - RNA, 19 nt, Homo sapiens
  misc_RNA (1)...(19): siRNA sense strand
ggcaaauccuuucaaaugc

SEQ ID NO: 1807890 - RNA, 19 nt, Homo sapiens
  misc_RNA (1)...(19): siRNA sense strand
uaauggacuuaaccaaugu

SEQ ID NO: 1807891 - RNA, 19 nt, Homo sapiens
  misc_RNA (1)...(19): siRNA sense strand
gugcagcagugucuuuauc

SEQ ID NO: 1807892 - RNA, 19 nt, Homo sapiens
  misc_RNA (1)...(19): siRNA sense strand
agagaagcccuacaaaugu

SEQ ID NO: 1807893 - RNA, 19 nt, Homo sapiens
  misc_RNA (1)...(19): siRNA sense strand
gaagcucuccaaaugugaa

SEQ ID NO: 1807894 - RNA, 19 nt, Homo sapiens
  misc_RNA (1)...(19): siRNA sense strand
acccaguccucaaaccuua

SEQ ID NO: 1807895 - RNA, 19 nt, Homo sapiens
  misc_RNA (1)...(19): siRNA sense strand
gcugcaaacugugaaaugg

SEQ ID NO: 1807896 - RNA, 19 nt, Homo sapiens
  misc_RNA (1)...(19): siRNA sense strand
acagggaugugauguugga

SEQ ID NO: 1807897 - RNA, 19 nt, Homo sapiens
  misc_RNA (1)...(19): siRNA sense strand
gaaugugacagcaucuuca

SEQ ID NO: 1807898 - RNA, 19 nt, Homo sapiens
  misc_RNA (1)...(19): siRNA sense strand
ggaaugugacagcaucuuc

SEQ ID NO: 1807899 - RNA, 19 nt, Homo sapiens
  misc_RNA (1)...(19): siRNA sense strand
acaagugucaagaauguaa

SEQ ID NO: 1807900 - RNA, 19 nt, Homo sapiens
  misc_RNA (1)...(19): siRNA sense strand
gaauguggcaaauccuuuc

SEQ ID NO: 1807901 - RNA, 19 nt, Homo sapiens
  misc_RNA (1)...(19): siRNA sense strand
aggaaagacugggaaaguu

SEQ ID NO: 1807902 - RNA, 19 nt, Homo sapiens
  misc_RNA (1)...(19): siRNA sense strand
ucagacauuaccaaacaua

SEQ ID NO: 1807903 - RNA, 19 nt, Homo sapiens
  misc_RNA (1)...(19): siRNA sense strand
gaggaaaugucucucagua

SEQ ID NO: 1807904 - RNA, 19 nt, Homo sapiens
  misc_RNA (1)...(19): siRNA sense strand
ggaaaugucucucaguaag

SEQ ID NO: 1807905 - RNA, 19 nt, Homo sapiens
  misc_RNA (1)...(19): siRNA sense strand
gcagugagccuauaccauu

SEQ ID NO: 1807906 - RNA, 19 nt, Homo sapiens
  misc_RNA (1)...(19): siRNA sense strand
gaacgaauacaaccaacuu

SEQ ID NO: 1807907 - RNA, 19 nt, Homo sapiens
  misc_RNA (1)...(19): siRNA sense strand
gaacaggcagagaaacauu

SEQ ID NO: 1807908 - RNA, 19 nt, Homo sapiens
  misc_RNA (1)...(19): siRNA sense strand
aaacagccauguccaagug

SEQ ID NO: 1807909 - RNA, 19 nt, Homo sapiens
  misc_RNA (1)...(19): siRNA sense strand
cagugagccuauaccauua

SEQ ID NO: 1807910 - RNA, 19 nt, Homo sapiens
  misc_RNA (1)...(19): siRNA sense strand
ccacaaaucaugcaguaug

SEQ ID NO: 1807911 - RNA, 19 nt, Homo sapiens
  misc_RNA (1)...(19): siRNA sense strand
caagagaggaauacaugaa

SEQ ID NO: 1807912 - RNA, 19 nt, Homo sapiens
  misc_RNA (1)...(19): siRNA sense strand
gaggaauacaugaauggua

SEQ ID NO: 1807913 - RNA, 19 nt, Homo sapiens
  misc_RNA (1)...(19): siRNA sense strand
uuuguagacugaacgaaua

SEQ ID NO: 1807914 - RNA, 19 nt, Homo sapiens
  misc_RNA (1)...(19): siRNA sense strand
gaaaucaaggauacuagga

SEQ ID NO: 1807915 - RNA, 19 nt, Homo sapiens
  misc_RNA (1)...(19): siRNA sense strand
gaugaaaucaaggauacua

SEQ ID NO: 1807916 - RNA, 19 nt, Homo sapiens
  misc_RNA (1)...(19): siRNA sense strand
ccagaacgccuucagaauc

SEQ ID NO: 1807917 - RNA, 19 nt, Homo sapiens
  misc_RNA (1)...(19): siRNA sense strand
gguaugaacaggcagagaa

SEQ ID NO: 1807918 - RNA, 19 nt, Homo sapiens
  misc_RNA (1)...(19): siRNA sense strand
ucaaggauacuaggaauga

SEQ ID NO: 1807919 - RNA, 19 nt, Homo sapiens
  misc_RNA (1)...(19): siRNA sense strand
uaagugugcggaacaguuu

SEQ ID NO: 1807920 - RNA, 19 nt, Homo sapiens
  misc_RNA (1)...(19): siRNA sense strand
uaaacuuccucuuagauac

SEQ ID NO: 1807921 - RNA, 19 nt, Homo sapiens
  misc_RNA (1)...(19): siRNA sense strand
ccacugcucaugaaaauua

SEQ ID NO: 1807922 - RNA, 19 nt, Homo sapiens
  misc_RNA (1)...(19): siRNA sense strand
gagccuauaccauuagaau

SEQ ID NO: 1807923 - RNA, 19 nt, Homo sapiens
  misc_RNA (1)...(19): siRNA sense strand
uggcagagccugagaagau

SEQ ID NO: 1807924 - RNA, 19 nt, Homo sapiens
  misc_RNA (1)...(19): siRNA sense strand
gaaaugucucucaguaagu

SEQ ID NO: 1807925 - RNA, 19 nt, Homo sapiens
  misc_RNA (1)...(19): siRNA sense strand
caaaucaugcaguauguuc

SEQ ID NO: 1807926 - RNA, 19 nt, Homo sapiens
  misc_RNA (1)...(19): siRNA sense strand
cacaaaucaugcaguaugu

SEQ ID NO: 1807927 - RNA, 19 nt, Homo sapiens
  misc_RNA (1)...(19): siRNA sense strand
guaagugugcggaacaguu

SEQ ID NO: 1807928 - RNA, 19 nt, Homo sapiens
  misc_RNA (1)...(19): siRNA sense strand
agagagcagugagccuaua

SEQ ID NO: 1807929 - RNA, 19 nt, Homo sapiens
  misc_RNA (1)...(19): siRNA sense strand
aaucaaggauacuaggaau

SEQ ID NO: 1807930 - RNA, 19 nt, Homo sapiens
  misc_RNA (1)...(19): siRNA sense strand
agagaggaauacaugaaug

SEQ ID NO: 1807931 - RNA, 19 nt, Homo sapiens
  misc_RNA (1)...(19): siRNA sense strand
gccuauaccauuagaauca

SEQ ID NO: 1807932 - RNA, 19 nt, Homo sapiens
  misc_RNA (1)...(19): siRNA sense strand
caaucccacugcucaugaa

SEQ ID NO: 1807933 - RNA, 19 nt, Homo sapiens
  misc_RNA (1)...(19): siRNA sense strand
guacuauccacaaaucaug

SEQ ID NO: 1807934 - RNA, 19 nt, Homo sapiens
  misc_RNA (1)...(19): siRNA sense strand
ccuaugcuguuugguacua

SEQ ID NO: 1807935 - RNA, 19 nt, Homo sapiens
  misc_RNA (1)...(19): siRNA sense strand
uagaaucaagagaggaaua

SEQ ID NO: 1807936 - RNA, 19 nt, Homo sapiens
  misc_RNA (1)...(19): siRNA sense strand
aaaugucucucaguaagug

SEQ ID NO: 1807937 - RNA, 19 nt, Homo sapiens
  misc_RNA (1)...(19): siRNA sense strand
guaugaacaggcagagaaa

SEQ ID NO: 1807938 - RNA, 19 nt, Homo sapiens
  misc_RNA (1)...(19): siRNA sense strand
caaccaacuucagcugcaa

SEQ ID NO: 1807939 - RNA, 19 nt, Homo sapiens
  misc_RNA (1)...(19): siRNA sense strand
gagaggaauacaugaaugg

SEQ ID NO: 1807940 - RNA, 19 nt, Homo sapiens
  misc_RNA (1)...(19): siRNA sense strand
ggcagagccugagaagaug

SEQ ID NO: 1807941 - RNA, 19 nt, Homo sapiens
  misc_RNA (1)...(19): siRNA sense strand
aggccuaaacuuccucuua

SEQ ID NO: 1807942 - RNA, 19 nt, Homo sapiens
  misc_RNA (1)...(19): siRNA sense strand
cagaacgccuucagaaucc

SEQ ID NO: 1807943 - RNA, 19 nt, Homo sapiens
  misc_RNA (1)...(19): siRNA sense strand
ccaaucccacugcucauga

SEQ ID NO: 1807944 - RNA, 19 nt, Homo sapiens
  misc_RNA (1)...(19): siRNA sense strand
guucaucgagugaggaaau

SEQ ID NO: 1807945 - RNA, 19 nt, Homo sapiens
  misc_RNA (1)...(19): siRNA sense strand
cagcagcucaaccaacuug

SEQ ID NO: 1807946 - RNA, 19 nt, Homo sapiens
  misc_RNA (1)...(19): siRNA sense strand
aaaacagacugaugaaauc

SEQ ID NO: 1807947 - RNA, 19 nt, Homo sapiens
  misc_RNA (1)...(19): siRNA sense strand
ccucuuagauacccagaac

SEQ ID NO: 1807948 - RNA, 19 nt, Homo sapiens
  misc_RNA (1)...(19): siRNA sense strand
auccacaaaucaugcagua

SEQ ID NO: 1807949 - RNA, 19 nt, Homo sapiens
  misc_RNA (1)...(19): siRNA sense strand
gaauccagcaucaguucau

SEQ ID NO: 1807950 - RNA, 19 nt, Homo sapiens
  misc_RNA (1)...(19): siRNA sense strand
ccuauaccauuagaaucaa

SEQ ID NO: 1807951 - RNA, 19 nt, Homo sapiens
  misc_RNA (1)...(19): siRNA sense strand
ucaagagaggaauacauga

SEQ ID NO: 1807952 - RNA, 19 nt, Homo sapiens
  misc_RNA (1)...(19): siRNA sense strand
gugagccuauaccauuaga

SEQ ID NO: 1807953 - RNA, 19 nt, Homo sapiens
  misc_RNA (1)...(19): siRNA sense strand
aaaauaacgucaugcuaca

SEQ ID NO: 1807954 - RNA, 19 nt, Homo sapiens
  misc_RNA (1)...(19): siRNA sense strand
guagacugaacgaauacaa

SEQ ID NO: 1807955 - RNA, 19 nt, Homo sapiens
  misc_RNA (1)...(19): siRNA sense strand
aaaucaaggauacuaggaa

SEQ ID NO: 1807956 - RNA, 19 nt, Homo sapiens
  misc_RNA (1)...(19): siRNA sense strand
caugcaguauguuccuuuc

SEQ ID NO: 1807957 - RNA, 19 nt, Homo sapiens
  misc_RNA (1)...(19): siRNA sense strand
ggaauccagcaucaguuca

SEQ ID NO: 1807958 - RNA, 19 nt, Homo sapiens
  misc_RNA (1)...(19): siRNA sense strand
gguacuauccacaaaucau

SEQ ID NO: 1807959 - RNA, 19 nt, Homo sapiens
  misc_RNA (1)...(19): siRNA sense strand
aggaaaugucucucaguaa

SEQ ID NO: 1807960 - RNA, 19 nt, Homo sapiens
  misc_RNA (1)...(19): siRNA sense strand
cuucagaauccaucagaga

SEQ ID NO: 1807961 - RNA, 19 nt, Homo sapiens
  misc_RNA (1)...(19): siRNA sense strand
gagcagugagccuauacca

SEQ ID NO: 1807962 - RNA, 19 nt, Homo sapiens
  misc_RNA (1)...(19): siRNA sense strand
gauacuaggaaugagucua

SEQ ID NO: 1807963 - RNA, 19 nt, Homo sapiens
  misc_RNA (1)...(19): siRNA sense strand
ggaagucccuaaagcuaaa

SEQ ID NO: 1807964 - RNA, 19 nt, Homo sapiens
  misc_RNA (1)...(19): siRNA sense strand
gcagaaaguugagaagguu

SEQ ID NO: 1807965 - RNA, 19 nt, Homo sapiens
  misc_RNA (1)...(19): siRNA sense strand
ccuuaaaucuccaacgaua

SEQ ID NO: 1807966 - RNA, 19 nt, Homo sapiens
  misc_RNA (1)...(19): siRNA sense strand
ugaggaaucuauuacagaa

SEQ ID NO: 1807967 - RNA, 19 nt, Homo sapiens
  misc_RNA (1)...(19): siRNA sense strand
caccagaucuacccuguga

SEQ ID NO: 1807968 - RNA, 19 nt, Homo sapiens
  misc_RNA (1)...(19): siRNA sense strand
uugagaagguuaaacauga

SEQ ID NO: 1807969 - RNA, 19 nt, Homo sapiens
  misc_RNA (1)...(19): siRNA sense strand
ucagagagcugugccuguu

SEQ ID NO: 1807970 - RNA, 19 nt, Homo sapiens
  misc_RNA (1)...(19): siRNA sense strand
gaauacaagcagaaaguug

SEQ ID NO: 1807971 - RNA, 19 nt, Homo sapiens
  misc_RNA (1)...(19): siRNA sense strand
gcaggucccucagccuauu

SEQ ID NO: 1807972 - RNA, 19 nt, Homo sapiens
  misc_RNA (1)...(19): siRNA sense strand
gcaagggagaccauagaaa

SEQ ID NO: 1807973 - RNA, 19 nt, Homo sapiens
  misc_RNA (1)...(19): siRNA sense strand
caagggagaccauagaaag

SEQ ID NO: 1807974 - RNA, 19 nt, Homo sapiens
  misc_RNA (1)...(19): siRNA sense strand
agugaugccuguccuuaaa

SEQ ID NO: 1807975 - RNA, 19 nt, Homo sapiens
  misc_RNA (1)...(19): siRNA sense strand
gaggaugaacaccaggaua

SEQ ID NO: 1807976 - RNA, 19 nt, Homo sapiens
  misc_RNA (1)...(19): siRNA sense strand
ucacugaucuugaaaaucu

SEQ ID NO: 1807977 - RNA, 19 nt, Homo sapiens
  misc_RNA (1)...(19): siRNA sense strand
gauaaaaucuaccccucuu

SEQ ID NO: 1807978 - RNA, 19 nt, Homo sapiens
  misc_RNA (1)...(19): siRNA sense strand
gaaaguugagaagguuaaa

SEQ ID NO: 1807979 - RNA, 19 nt, Homo sapiens
  misc_RNA (1)...(19): siRNA sense strand
ggaugaacaccaggauaaa

SEQ ID NO: 1807980 - RNA, 19 nt, Homo sapiens
  misc_RNA (1)...(19): siRNA sense strand
guccuuaaaucuccaacga

SEQ ID NO: 1807981 - RNA, 19 nt, Homo sapiens
  misc_RNA (1)...(19): siRNA sense strand
gagugaugccuguccuuaa

SEQ ID NO: 1807982 - RNA, 19 nt, Homo sapiens
  misc_RNA (1)...(19): siRNA sense strand
cagaauacaagcagaaagu

SEQ ID NO: 1807983 - RNA, 19 nt, Homo sapiens
  misc_RNA (1)...(19): siRNA sense strand
gaucuauccauucguugaa

SEQ ID NO: 1807984 - RNA, 19 nt, Homo sapiens
  misc_RNA (1)...(19): siRNA sense strand
ucugaucuauccauucguu

SEQ ID NO: 1807985 - RNA, 19 nt, Homo sapiens
  misc_RNA (1)...(19): siRNA sense strand
gcaaggagaggaugaacac

SEQ ID NO: 1807986 - RNA, 19 nt, Homo sapiens
  misc_RNA (1)...(19): siRNA sense strand
gcagugaggaaucuauuac

SEQ ID NO: 1807987 - RNA, 19 nt, Homo sapiens
  misc_RNA (1)...(19): siRNA sense strand
aauacaagcagaaaguuga

SEQ ID NO: 1807988 - RNA, 19 nt, Homo sapiens
  misc_RNA (1)...(19): siRNA sense strand
uaauggaagucccuaaagc

SEQ ID NO: 1807989 - RNA, 19 nt, Homo sapiens
  misc_RNA (1)...(19): siRNA sense strand
aggaugaacaccaggauaa

SEQ ID NO: 1807990 - RNA, 19 nt, Homo sapiens
  misc_RNA (1)...(19): siRNA sense strand
cagaaaguugagaagguua

SEQ ID NO: 1807991 - RNA, 19 nt, Homo sapiens
  misc_RNA (1)...(19): siRNA sense strand
agagagcugugccuguuca

SEQ ID NO: 1807992 - RNA, 19 nt, Homo sapiens
  misc_RNA (1)...(19): siRNA sense strand
guugagaagguuaaacaug

SEQ ID NO: 1807993 - RNA, 19 nt, Homo sapiens
  misc_RNA (1)...(19): siRNA sense strand
aaaacucacugaucuugaa

SEQ ID NO: 1807994 - RNA, 19 nt, Homo sapiens
  misc_RNA (1)...(19): siRNA sense strand
aauaauggaagucccuaaa

SEQ ID NO: 1807995 - RNA, 19 nt, Homo sapiens
  misc_RNA (1)...(19): siRNA sense strand
gugaggaaucuauuacaga

SEQ ID NO: 1807996 - RNA, 19 nt, Homo sapiens
  misc_RNA (1)...(19): siRNA sense strand
gccacagccucugaucuau

SEQ ID NO: 1807997 - RNA, 19 nt, Homo sapiens
  misc_RNA (1)...(19): siRNA sense strand
agagugaugccuguccuua

SEQ ID NO: 1807998 - RNA, 19 nt, Homo sapiens
  misc_RNA (1)...(19): siRNA sense strand
uggaagucccuaaagcuaa

SEQ ID NO: 1807999 - RNA, 19 nt, Homo sapiens
  misc_RNA (1)...(19): siRNA sense strand
ccugguggcucuugcucuu

SEQ ID NO: 1808000 - RNA, 19 nt, Homo sapiens
  misc_RNA (1)...(19): siRNA sense strand
ccucugaucuauccauucg

SEQ ID NO: 1808001 - RNA, 19 nt, Homo sapiens
  misc_RNA (1)...(19): siRNA sense strand
uuacagaauacaagcagaa

SEQ ID NO: 1808002 - RNA, 19 nt, Homo sapiens
  misc_RNA (1)...(19): siRNA sense strand
ugagaagguuaaacaugag

SEQ ID NO: 1808003 - RNA, 19 nt, Homo sapiens
  misc_RNA (1)...(19): siRNA sense strand
gcagcaaggagaggaugaa

SEQ ID NO: 1808004 - RNA, 19 nt, Homo sapiens
  misc_RNA (1)...(19): siRNA sense strand
guggugcccuacccucaga

SEQ ID NO: 1808005 - RNA, 19 nt, Homo sapiens
  misc_RNA (1)...(19): siRNA sense strand
agaaaguugagaagguuaa

SEQ ID NO: 1808006 - RNA, 19 nt, Homo sapiens
  misc_RNA (1)...(19): siRNA sense strand
guucauaaccccauuagug

SEQ ID NO: 1808007 - RNA, 19 nt, Homo sapiens
  misc_RNA (1)...(19): siRNA sense strand
caagcagugaggaaucuau

SEQ ID NO: 1808008 - RNA, 19 nt, Homo sapiens
  misc_RNA (1)...(19): siRNA sense strand
caaaacauucugccucuug

SEQ ID NO: 1808009 - RNA, 19 nt, Homo sapiens
  misc_RNA (1)...(19): siRNA sense strand
agccacagccucugaucua

SEQ ID NO: 1808010 - RNA, 19 nt, Homo sapiens
  misc_RNA (1)...(19): siRNA sense strand
ugaugccuguccuuaaauc

SEQ ID NO: 1808011 - RNA, 19 nt, Homo sapiens
  misc_RNA (1)...(19): siRNA sense strand
cccuaaagcuaaagacacu

SEQ ID NO: 1808012 - RNA, 19 nt, Homo sapiens
  misc_RNA (1)...(19): siRNA sense strand
acaagcagaaaguugagaa

SEQ ID NO: 1808013 - RNA, 19 nt, Homo sapiens
  misc_RNA (1)...(19): siRNA sense strand
aaacucacugaucuugaaa

SEQ ID NO: 1808014 - RNA, 19 nt, Homo sapiens
  misc_RNA (1)...(19): siRNA sense strand
ugaucuauccauucguuga

SEQ ID NO: 1808015 - RNA, 19 nt, Homo sapiens
  misc_RNA (1)...(19): siRNA sense strand
ccucaaaucccaaaacuca

SEQ ID NO: 1808016 - RNA, 19 nt, Homo sapiens
  misc_RNA (1)...(19): siRNA sense strand
gauccacacuucaacgaua

SEQ ID NO: 1808017 - RNA, 19 nt, Homo sapiens
  misc_RNA (1)...(19): siRNA sense strand
ggacaacuaugaccagcuu

SEQ ID NO: 1808018 - RNA, 19 nt, Homo sapiens
  misc_RNA (1)...(19): siRNA sense strand
gauuauagcuuggacaugu

SEQ ID NO: 1808019 - RNA, 19 nt, Homo sapiens
  misc_RNA (1)...(19): siRNA sense strand
gaagaaguaucacauagac

SEQ ID NO: 1808020 - RNA, 19 nt, Homo sapiens
  misc_RNA (1)...(19): siRNA sense strand
gaguuugggcuguauguua

SEQ ID NO: 1808021 - RNA, 19 nt, Homo sapiens
  misc_RNA (1)...(19): siRNA sense strand
gggaaaauauagugaagua

SEQ ID NO: 1808022 - RNA, 19 nt, Homo sapiens
  misc_RNA (1)...(19): siRNA sense strand
ccauuaauaucaccaacaa

SEQ ID NO: 1808023 - RNA, 19 nt, Homo sapiens
  misc_RNA (1)...(19): siRNA sense strand
uuaaagcucuggauuacug

SEQ ID NO: 1808024 - RNA, 19 nt, Homo sapiens
  misc_RNA (1)...(19): siRNA sense strand
ggacaaacuucugcgauac

SEQ ID NO: 1808025 - RNA, 19 nt, Homo sapiens
  misc_RNA (1)...(19): siRNA sense strand
uggacaaacuucugcgaua

SEQ ID NO: 1808026 - RNA, 19 nt, Homo sapiens
  misc_RNA (1)...(19): siRNA sense strand
gggacaacauucacggaaa

SEQ ID NO: 1808027 - RNA, 19 nt, Homo sapiens
  misc_RNA (1)...(19): siRNA sense strand
ggacaacauucacggaaac

SEQ ID NO: 1808028 - RNA, 19 nt, Homo sapiens
  misc_RNA (1)...(19): siRNA sense strand
agaccuagauccacacuuc

SEQ ID NO: 1808029 - RNA, 19 nt, Homo sapiens
  misc_RNA (1)...(19): siRNA sense strand
gcucaggaguacaauguuc

SEQ ID NO: 1808030 - RNA, 19 nt, Homo sapiens
  misc_RNA (1)...(19): siRNA sense strand
gguggaacaaauaucauua

SEQ ID NO: 1808031 - RNA, 19 nt, Homo sapiens
  misc_RNA (1)...(19): siRNA sense strand
auggguaucugaagaagua

SEQ ID NO: 1808032 - RNA, 19 nt, Homo sapiens
  misc_RNA (1)...(19): siRNA sense strand
gagacugacugccaaagag

SEQ ID NO: 1808033 - RNA, 19 nt, Homo sapiens
  misc_RNA (1)...(19): siRNA sense strand
gcaagcaugaucuuucgaa

SEQ ID NO: 1808034 - RNA, 19 nt, Homo sapiens
  misc_RNA (1)...(19): siRNA sense strand
gaaccuucgugguggaaca

SEQ ID NO: 1808035 - RNA, 19 nt, Homo sapiens
  misc_RNA (1)...(19): siRNA sense strand
ucaagaugauuaccaacug

SEQ ID NO: 1808036 - RNA, 19 nt, Homo sapiens
  misc_RNA (1)...(19): siRNA sense strand
uuaagcaacucuaccagau

SEQ ID NO: 1808037 - RNA, 19 nt, Homo sapiens
  misc_RNA (1)...(19): siRNA sense strand
gcuuggacauguggaguuu

SEQ ID NO: 1808038 - RNA, 19 nt, Homo sapiens
  misc_RNA (1)...(19): siRNA sense strand
gaagaacuguauggguauc

SEQ ID NO: 1808039 - RNA, 19 nt, Homo sapiens
  misc_RNA (1)...(19): siRNA sense strand
agacuuugauauccgguuu

SEQ ID NO: 1808040 - RNA, 19 nt, Homo sapiens
  misc_RNA (1)...(19): siRNA sense strand
gauagaucaccaacagaaa

SEQ ID NO: 1808041 - RNA, 19 nt, Homo sapiens
  misc_RNA (1)...(19): siRNA sense strand
ugaaguauuugaggccauu

SEQ ID NO: 1808042 - RNA, 19 nt, Homo sapiens
  misc_RNA (1)...(19): siRNA sense strand
ugggaaaacuuuauccaua

SEQ ID NO: 1808043 - RNA, 19 nt, Homo sapiens
  misc_RNA (1)...(19): siRNA sense strand
gaacuguauggguaucuga

SEQ ID NO: 1808044 - RNA, 19 nt, Homo sapiens
  misc_RNA (1)...(19): siRNA sense strand
uaagcugauugacacugua

SEQ ID NO: 1808045 - RNA, 19 nt, Homo sapiens
  misc_RNA (1)...(19): siRNA sense strand
gaaguaucacauagaccua

SEQ ID NO: 1808046 - RNA, 19 nt, Homo sapiens
  misc_RNA (1)...(19): siRNA sense strand
ugaagaaguaucacauaga

SEQ ID NO: 1808047 - RNA, 19 nt, Homo sapiens
  misc_RNA (1)...(19): siRNA sense strand
cugaagaaguaucacauag

SEQ ID NO: 1808048 - RNA, 19 nt, Homo sapiens
  misc_RNA (1)...(19): siRNA sense strand
gaccaucaacagagacuga

SEQ ID NO: 1808049 - RNA, 19 nt, Homo sapiens
  misc_RNA (1)...(19): siRNA sense strand
ucacggaaacgcugggaaa

SEQ ID NO: 1808050 - RNA, 19 nt, Homo sapiens
  misc_RNA (1)...(19): siRNA sense strand
ucacauagaccuagaucca

SEQ ID NO: 1808051 - RNA, 19 nt, Homo sapiens
  misc_RNA (1)...(19): siRNA sense strand
gaagauaaaacgagagguu

SEQ ID NO: 1808052 - RNA, 19 nt, Homo sapiens
  misc_RNA (1)...(19): siRNA sense strand
uaaaggaccccgugucaaa

SEQ ID NO: 1808053 - RNA, 19 nt, Homo sapiens
  misc_RNA (1)...(19): siRNA sense strand
auacgaccaucaacagaga

SEQ ID NO: 1808054 - RNA, 19 nt, Homo sapiens
  misc_RNA (1)...(19): siRNA sense strand
caacaaugagagagugguu

SEQ ID NO: 1808055 - RNA, 19 nt, Homo sapiens
  misc_RNA (1)...(19): siRNA sense strand
gggaaaacuuuauccauag

SEQ ID NO: 1808056 - RNA, 19 nt, Homo sapiens
  misc_RNA (1)...(19): siRNA sense strand
uacuuaaagcucuggauua

SEQ ID NO: 1808057 - RNA, 19 nt, Homo sapiens
  misc_RNA (1)...(19): siRNA sense strand
aacgagagguuaagauucu

SEQ ID NO: 1808058 - RNA, 19 nt, Homo sapiens
  misc_RNA (1)...(19): siRNA sense strand
uguaugaacuacuuaaagc

SEQ ID NO: 1808059 - RNA, 19 nt, Homo sapiens
  misc_RNA (1)...(19): siRNA sense strand
ucagauguaugauuauagc

SEQ ID NO: 1808060 - RNA, 19 nt, Homo sapiens
  misc_RNA (1)...(19): siRNA sense strand
uggacuaucagauguauga

SEQ ID NO: 1808061 - RNA, 19 nt, Homo sapiens
  misc_RNA (1)...(19): siRNA sense strand
ccacagcaagggaaucaug

SEQ ID NO: 1808062 - RNA, 19 nt, Homo sapiens
  misc_RNA (1)...(19): siRNA sense strand
cuacuuaaagcucuggauu

SEQ ID NO: 1808063 - RNA, 19 nt, Homo sapiens
  misc_RNA (1)...(19): siRNA sense strand
cagagcuccucguggacua

SEQ ID NO: 1808064 - RNA, 19 nt, Homo sapiens
  misc_RNA (1)...(19): siRNA sense strand
cccuagaucuucuggacaa

SEQ ID NO: 1808065 - RNA, 19 nt, Homo sapiens
  misc_RNA (1)...(19): siRNA sense strand
gauauccugggacaacauu

SEQ ID NO: 1808066 - RNA, 19 nt, Homo sapiens
  misc_RNA (1)...(19): siRNA sense strand
aagcugcgacugauagauu

SEQ ID NO: 1808067 - RNA, 19 nt, Homo sapiens
  misc_RNA (1)...(19): siRNA sense strand
aaugagagagugguuguaa

SEQ ID NO: 1808068 - RNA, 19 nt, Homo sapiens
  misc_RNA (1)...(19): siRNA sense strand
uagcaagcaugaucuuucg

SEQ ID NO: 1808069 - RNA, 19 nt, Homo sapiens
  misc_RNA (1)...(19): siRNA sense strand
ucuaccagauccugacaga

SEQ ID NO: 1808070 - RNA, 19 nt, Homo sapiens
  misc_RNA (1)...(19): siRNA sense strand
aaacgagagguuaagauuc

SEQ ID NO: 1808071 - RNA, 19 nt, Homo sapiens
  misc_RNA (1)...(19): siRNA sense strand
ucugaagaaguaucacaua

SEQ ID NO: 1808072 - RNA, 19 nt, Homo sapiens
  misc_RNA (1)...(19): siRNA sense strand
ugaccagcuuguucgcauu

SEQ ID NO: 1808073 - RNA, 19 nt, Homo sapiens
  misc_RNA (1)...(19): siRNA sense strand
caacuaugaccagcuuguu

SEQ ID NO: 1808074 - RNA, 19 nt, Homo sapiens
  misc_RNA (1)...(19): siRNA sense strand
ugauugacacuguaaagga

SEQ ID NO: 1808075 - RNA, 19 nt, Homo sapiens
  misc_RNA (1)...(19): siRNA sense strand
gaaguauuugaggccauua

SEQ ID NO: 1808076 - RNA, 19 nt, Homo sapiens
  misc_RNA (1)...(19): siRNA sense strand
uuaagcugauugacacugu

SEQ ID NO: 1808077 - RNA, 19 nt, Homo sapiens
  misc_RNA (1)...(19): siRNA sense strand
gcagacaaugcugugcuuu

SEQ ID NO: 1808078 - RNA, 19 nt, Homo sapiens
  misc_RNA (1)...(19): siRNA sense strand
ggaaaacuuuauccauagu

SEQ ID NO: 1808079 - RNA, 19 nt, Homo sapiens
  misc_RNA (1)...(19): siRNA sense strand
gaaacgcugggaaaacuuu

SEQ ID NO: 1808080 - RNA, 19 nt, Homo sapiens
  misc_RNA (1)...(19): siRNA sense strand
gaccagcuuguucgcauug

SEQ ID NO: 1808081 - RNA, 19 nt, Homo sapiens
  misc_RNA (1)...(19): siRNA sense strand
gaucuucuggacaaacuuc

SEQ ID NO: 1808082 - RNA, 19 nt, Homo sapiens
  misc_RNA (1)...(19): siRNA sense strand
cuucgugguggaacaaaua

SEQ ID NO: 1808083 - RNA, 19 nt, Homo sapiens
  misc_RNA (1)...(19): siRNA sense strand
gagcugggguaaucaagau

SEQ ID NO: 1808084 - RNA, 19 nt, Homo sapiens
  misc_RNA (1)...(19): siRNA sense strand
cacaaugucaugauagauc

SEQ ID NO: 1808085 - RNA, 19 nt, Homo sapiens
  misc_RNA (1)...(19): siRNA sense strand
acuuaaagcucuggauuac

SEQ ID NO: 1808086 - RNA, 19 nt, Homo sapiens
  misc_RNA (1)...(19): siRNA sense strand
gauccugacagacuuugau

SEQ ID NO: 1808087 - RNA, 19 nt, Homo sapiens
  misc_RNA (1)...(19): siRNA sense strand
ggaacaaauaucauuaagc

SEQ ID NO: 1808088 - RNA, 19 nt, Homo sapiens
  misc_RNA (1)...(19): siRNA sense strand
ccucguggacuaucagaug

SEQ ID NO: 1808089 - RNA, 19 nt, Homo sapiens
  misc_RNA (1)...(19): siRNA sense strand
ccauggacaggacaacuau

SEQ ID NO: 1808090 - RNA, 19 nt, Homo sapiens
  misc_RNA (1)...(19): siRNA sense strand
ccagauccugacagacuuu

SEQ ID NO: 1808091 - RNA, 19 nt, Homo sapiens
  misc_RNA (1)...(19): siRNA sense strand
ucucacggcagcacgauga

SEQ ID NO: 1808092 - RNA, 19 nt, Homo sapiens
  misc_RNA (1)...(19): siRNA sense strand
gagcagucccagccuugug

SEQ ID NO: 1808093 - RNA, 19 nt, Homo sapiens
  misc_RNA (1)...(19): siRNA sense strand
ggagcacccauacuucuac

SEQ ID NO: 1808094 - RNA, 19 nt, Homo sapiens
  misc_RNA (1)...(19): siRNA sense strand
gcgauacgaccaucaacag

SEQ ID NO: 1808095 - RNA, 19 nt, Homo sapiens
  misc_RNA (1)...(19): siRNA sense strand
acaaacuucugcgauacga

SEQ ID NO: 1808096 - RNA, 19 nt, Homo sapiens
  misc_RNA (1)...(19): siRNA sense strand
gguaucugaagaaguauca

SEQ ID NO: 1808097 - RNA, 19 nt, Homo sapiens
  misc_RNA (1)...(19): siRNA sense strand
cucacaaugucaugauaga

SEQ ID NO: 1808098 - RNA, 19 nt, Homo sapiens
  misc_RNA (1)...(19): siRNA sense strand
ccugacagacuuugauauc

SEQ ID NO: 1808099 - RNA, 19 nt, Homo sapiens
  misc_RNA (1)...(19): siRNA sense strand
cguggacuaucagauguau

SEQ ID NO: 1808100 - RNA, 19 nt, Homo sapiens
  misc_RNA (1)...(19): siRNA sense strand
gcccugaggcccuagaucu

SEQ ID NO: 1808101 - RNA, 19 nt, Homo sapiens
  misc_RNA (1)...(19): siRNA sense strand
uauguuagcaagcaugauc

SEQ ID NO: 1808102 - RNA, 19 nt, Homo sapiens
  misc_RNA (1)...(19): siRNA sense strand
uaauaucaccaacaaugag

SEQ ID NO: 1808103 - RNA, 19 nt, Homo sapiens
  misc_RNA (1)...(19): siRNA sense strand
ugagagagugguuguaaaa

SEQ ID NO: 1808104 - RNA, 19 nt, Homo sapiens
  misc_RNA (1)...(19): siRNA sense strand
uagaucuucuggacaaacu

SEQ ID NO: 1808105 - RNA, 19 nt, Homo sapiens
  misc_RNA (1)...(19): siRNA sense strand
guauggguaucugaagaag

SEQ ID NO: 1808106 - RNA, 19 nt, Homo sapiens
  misc_RNA (1)...(19): siRNA sense strand
uuagcaagcaugaucuuuc

SEQ ID NO: 1808107 - RNA, 19 nt, Homo sapiens
  misc_RNA (1)...(19): siRNA sense strand
gaaaccucacaaugucaug

SEQ ID NO: 1808108 - RNA, 19 nt, Homo sapiens
  misc_RNA (1)...(19): siRNA sense strand
augagagagugguuguaaa

SEQ ID NO: 1808109 - RNA, 19 nt, Homo sapiens
  misc_RNA (1)...(19): siRNA sense strand
cagacaaugcugugcuuuc

SEQ ID NO: 1808110 - RNA, 19 nt, Homo sapiens
  misc_RNA (1)...(19): siRNA sense strand
cuguauggguaucugaaga

SEQ ID NO: 1808111 - RNA, 19 nt, Homo sapiens
  misc_RNA (1)...(19): siRNA sense strand
agaagaacuguauggguau

SEQ ID NO: 1808112 - RNA, 19 nt, Homo sapiens
  misc_RNA (1)...(19): siRNA sense strand
aguuugggcuguauguuag

SEQ ID NO: 1808113 - RNA, 19 nt, Homo sapiens
  misc_RNA (1)...(19): siRNA sense strand
uaccagauccugacagacu

SEQ ID NO: 1808114 - RNA, 19 nt, Homo sapiens
  misc_RNA (1)...(19): siRNA sense strand
gcugauugacacuguaaag

SEQ ID NO: 1808115 - RNA, 19 nt, Homo sapiens
  misc_RNA (1)...(19): siRNA sense strand
guaaagggcccucuaauaa

SEQ ID NO: 1808116 - RNA, 19 nt, Homo sapiens
  misc_RNA (1)...(19): siRNA sense strand
gaagagaggucguucuaag

SEQ ID NO: 1808117 - RNA, 19 nt, Homo sapiens
  misc_RNA (1)...(19): siRNA sense strand
aagcagaugugcaugauua

SEQ ID NO: 1808118 - RNA, 19 nt, Homo sapiens
  misc_RNA (1)...(19): siRNA sense strand
gaacaagacuuagggaauc

SEQ ID NO: 1808119 - RNA, 19 nt, Homo sapiens
  misc_RNA (1)...(19): siRNA sense strand
caacaggaauugaaagaug

SEQ ID NO: 1808120 - RNA, 19 nt, Homo sapiens
  misc_RNA (1)...(19): siRNA sense strand
ccacuaagcugcucuccaa

SEQ ID NO: 1808121 - RNA, 19 nt, Homo sapiens
  misc_RNA (1)...(19): siRNA sense strand
gauugaagcugcaaagaau

SEQ ID NO: 1808122 - RNA, 19 nt, Homo sapiens
  misc_RNA (1)...(19): siRNA sense strand
ccucagagauggacaacua

SEQ ID NO: 1808123 - RNA, 19 nt, Homo sapiens
  misc_RNA (1)...(19): siRNA sense strand
gaauggaaaugagaaagaa

SEQ ID NO: 1808124 - RNA, 19 nt, Homo sapiens
  misc_RNA (1)...(19): siRNA sense strand
gaacaugccaacaaauuga

SEQ ID NO: 1808125 - RNA, 19 nt, Homo sapiens
  misc_RNA (1)...(19): siRNA sense strand
gaggaaugcuggcaaugaa

SEQ ID NO: 1808126 - RNA, 19 nt, Homo sapiens
  misc_RNA (1)...(19): siRNA sense strand
caucagugcugccaagaaa

SEQ ID NO: 1808127 - RNA, 19 nt, Homo sapiens
  misc_RNA (1)...(19): siRNA sense strand
gaggagaacuggcauaugc

SEQ ID NO: 1808128 - RNA, 19 nt, Homo sapiens
  misc_RNA (1)...(19): siRNA sense strand
uggcagaugucuacaaauu

SEQ ID NO: 1808129 - RNA, 19 nt, Homo sapiens
  misc_RNA (1)...(19): siRNA sense strand
gcugauagcuggccagagu

SEQ ID NO: 1808130 - RNA, 19 nt, Homo sapiens
  misc_RNA (1)...(19): siRNA sense strand
ugaagaagguguaaagcuu

SEQ ID NO: 1808131 - RNA, 19 nt, Homo sapiens
  misc_RNA (1)...(19): siRNA sense strand
gcagaugucuacaaauuac

SEQ ID NO: 1808132 - RNA, 19 nt, Homo sapiens
  misc_RNA (1)...(19): siRNA sense strand
ggaccugcguuucggagua

SEQ ID NO: 1808133 - RNA, 19 nt, Homo sapiens
  misc_RNA (1)...(19): siRNA sense strand
gggcaaugcuggacguaaa

SEQ ID NO: 1808134 - RNA, 19 nt, Homo sapiens
  misc_RNA (1)...(19): siRNA sense strand
cauaugcacucaauaacuu

SEQ ID NO: 1808135 - RNA, 19 nt, Homo sapiens
  misc_RNA (1)...(19): siRNA sense strand
aaagggcccucuaauaaga

SEQ ID NO: 1808136 - RNA, 19 nt, Homo sapiens
  misc_RNA (1)...(19): siRNA sense strand
gaucaggacucuggcaguu

SEQ ID NO: 1808137 - RNA, 19 nt, Homo sapiens
  misc_RNA (1)...(19): siRNA sense strand
guggauaagcugaacauua

SEQ ID NO: 1808138 - RNA, 19 nt, Homo sapiens
  misc_RNA (1)...(19): siRNA sense strand
uggaagaugugaacaaaug

SEQ ID NO: 1808139 - RNA, 19 nt, Homo sapiens
  misc_RNA (1)...(19): siRNA sense strand
gcaaagaauggaaaugaga

SEQ ID NO: 1808140 - RNA, 19 nt, Homo sapiens
  misc_RNA (1)...(19): siRNA sense strand
agacacagaccaagauuaa

SEQ ID NO: 1808141 - RNA, 19 nt, Homo sapiens
  misc_RNA (1)...(19): siRNA sense strand
gaugaaggcaccagagaaa

SEQ ID NO: 1808142 - RNA, 19 nt, Homo sapiens
  misc_RNA (1)...(19): siRNA sense strand
ggaaaugagaaagaaguua

SEQ ID NO: 1808143 - RNA, 19 nt, Homo sapiens
  misc_RNA (1)...(19): siRNA sense strand
guguaaagcuuguucgaau

SEQ ID NO: 1808144 - RNA, 19 nt, Homo sapiens
  misc_RNA (1)...(19): siRNA sense strand
gacauuacuuccauugaug

SEQ ID NO: 1808145 - RNA, 19 nt, Homo sapiens
  misc_RNA (1)...(19): siRNA sense strand
gaacaagcaacugagaauu

SEQ ID NO: 1808146 - RNA, 19 nt, Homo sapiens
  misc_RNA (1)...(19): siRNA sense strand
agaguaaacuggcccaaga

SEQ ID NO: 1808147 - RNA, 19 nt, Homo sapiens
  misc_RNA (1)...(19): siRNA sense strand
cauggcagaugucuacaaa

SEQ ID NO: 1808148 - RNA, 19 nt, Homo sapiens
  misc_RNA (1)...(19): siRNA sense strand
gcuuugcucucugcuguua

SEQ ID NO: 1808149 - RNA, 19 nt, Homo sapiens
  misc_RNA (1)...(19): siRNA sense strand
ccuguuccaucucaaauaa

SEQ ID NO: 1808150 - RNA, 19 nt, Homo sapiens
  misc_RNA (1)...(19): siRNA sense strand
gaugaucccugcucuucug

SEQ ID NO: 1808151 - RNA, 19 nt, Homo sapiens
  misc_RNA (1)...(19): siRNA sense strand
gaucccugcucuucuguga

SEQ ID NO: 1808152 - RNA, 19 nt, Homo sapiens
  misc_RNA (1)...(19): siRNA sense strand
gaagagagagaaacaggau

SEQ ID NO: 1808153 - RNA, 19 nt, Homo sapiens
  misc_RNA (1)...(19): siRNA sense strand
gggaacagguggccagcuu

SEQ ID NO: 1808154 - RNA, 19 nt, Homo sapiens
  misc_RNA (1)...(19): siRNA sense strand
ugacauuacuuccauugau

SEQ ID NO: 1808155 - RNA, 19 nt, Homo sapiens
  misc_RNA (1)...(19): siRNA sense strand
gcacucaauucugcaauag

SEQ ID NO: 1808156 - RNA, 19 nt, Homo sapiens
  misc_RNA (1)...(19): siRNA sense strand
gaacuggcauaugcacuca

SEQ ID NO: 1808157 - RNA, 19 nt, Homo sapiens
  misc_RNA (1)...(19): siRNA sense strand
gaaaccaauguuccacuuu

SEQ ID NO: 1808158 - RNA, 19 nt, Homo sapiens
  misc_RNA (1)...(19): siRNA sense strand
aaacgggcaucucagaaga

SEQ ID NO: 1808159 - RNA, 19 nt, Homo sapiens
  misc_RNA (1)...(19): siRNA sense strand
caagcuggaugcugaagug

SEQ ID NO: 1808160 - RNA, 19 nt, Homo sapiens
  misc_RNA (1)...(19): siRNA sense strand
ucaggacucuggcaguuga

SEQ ID NO: 1808161 - RNA, 19 nt, Homo sapiens
  misc_RNA (1)...(19): siRNA sense strand
gagacacagaccaagauua

SEQ ID NO: 1808162 - RNA, 19 nt, Homo sapiens
  misc_RNA (1)...(19): siRNA sense strand
aguaaagggcccucuaaua

SEQ ID NO: 1808163 - RNA, 19 nt, Homo sapiens
  misc_RNA (1)...(19): siRNA sense strand
caaccuuccugcuguguca

SEQ ID NO: 1808164 - RNA, 19 nt, Homo sapiens
  misc_RNA (1)...(19): siRNA sense strand
gugaacaugccaacaaauu

SEQ ID NO: 1808165 - RNA, 19 nt, Homo sapiens
  misc_RNA (1)...(19): siRNA sense strand
gaagcgaggcaacaugguu

SEQ ID NO: 1808166 - RNA, 19 nt, Homo sapiens
  misc_RNA (1)...(19): siRNA sense strand
ggaccacguuucagauucu

SEQ ID NO: 1808167 - RNA, 19 nt, Homo sapiens
  misc_RNA (1)...(19): siRNA sense strand
gcugaaaguuguggaagau

SEQ ID NO: 1808168 - RNA, 19 nt, Homo sapiens
  misc_RNA (1)...(19): siRNA sense strand
ggcagaugucuacaaauua

SEQ ID NO: 1808169 - RNA, 19 nt, Homo sapiens
  misc_RNA (1)...(19): siRNA sense strand
ggacguaaagaaagaagug

SEQ ID NO: 1808170 - RNA, 19 nt, Homo sapiens
  misc_RNA (1)...(19): siRNA sense strand
ggaugacucugacuuugag

SEQ ID NO: 1808171 - RNA, 19 nt, Homo sapiens
  misc_RNA (1)...(19): siRNA sense strand
ccaggagucuacacagaga

SEQ ID NO: 1808172 - RNA, 19 nt, Homo sapiens
  misc_RNA (1)...(19): siRNA sense strand
caaagaauggaaaugagaa

SEQ ID NO: 1808173 - RNA, 19 nt, Homo sapiens
  misc_RNA (1)...(19): siRNA sense strand
guaaacaccaauaguaaag

SEQ ID NO: 1808174 - RNA, 19 nt, Homo sapiens
  misc_RNA (1)...(19): siRNA sense strand
ugauggagaugacagacuu

SEQ ID NO: 1808175 - RNA, 19 nt, Homo sapiens
  misc_RNA (1)...(19): siRNA sense strand
cagaugugcaugauuauga

SEQ ID NO: 1808176 - RNA, 19 nt, Homo sapiens
  misc_RNA (1)...(19): siRNA sense strand
acacagucaugccacguuu

SEQ ID NO: 1808177 - RNA, 19 nt, Homo sapiens
  misc_RNA (1)...(19): siRNA sense strand
gaauuguggcagaguguaa

SEQ ID NO: 1808178 - RNA, 19 nt, Homo sapiens
  misc_RNA (1)...(19): siRNA sense strand
uggcauaugcacucaauaa

SEQ ID NO: 1808179 - RNA, 19 nt, Homo sapiens
  misc_RNA (1)...(19): siRNA sense strand
acaagcaacugagaauuuc

SEQ ID NO: 1808180 - RNA, 19 nt, Homo sapiens
  misc_RNA (1)...(19): siRNA sense strand
caacaaauugauugagguu

SEQ ID NO: 1808181 - RNA, 19 nt, Homo sapiens
  misc_RNA (1)...(19): siRNA sense strand
cuacgucgccucuaccaaa

SEQ ID NO: 1808182 - RNA, 19 nt, Homo sapiens
  misc_RNA (1)...(19): siRNA sense strand
aaagacaacaggaauugaa

SEQ ID NO: 1808183 - RNA, 19 nt, Homo sapiens
  misc_RNA (1)...(19): siRNA sense strand
ucaaagcuauggacagcau

SEQ ID NO: 1808184 - RNA, 19 nt, Homo sapiens
  misc_RNA (1)...(19): siRNA sense strand
gaugagacacagaccaaga

SEQ ID NO: 1808185 - RNA, 19 nt, Homo sapiens
  misc_RNA (1)...(19): siRNA sense strand
gacaacaggaauugaaaga

SEQ ID NO: 1808186 - RNA, 19 nt, Homo sapiens
  misc_RNA (1)...(19): siRNA sense strand
gcaggcaacauaaacuuca

SEQ ID NO: 1808187 - RNA, 19 nt, Homo sapiens
  misc_RNA (1)...(19): siRNA sense strand
ucagcgaguucaaagcuau

SEQ ID NO: 1808188 - RNA, 19 nt, Homo sapiens
  misc_RNA (1)...(19): siRNA sense strand
uaaagggcccucuaauaag

SEQ ID NO: 1808189 - RNA, 19 nt, Homo sapiens
  misc_RNA (1)...(19): siRNA sense strand
ggacgacaguggcaaugac

SEQ ID NO: 1808190 - RNA, 19 nt, Homo sapiens
  misc_RNA (1)...(19): siRNA sense strand
gaugugaacaaauguguca

SEQ ID NO: 1808191 - RNA, 19 nt, Homo sapiens
  misc_RNA (1)...(19): siRNA sense strand
guaaagcuuguucgaaugu

SEQ ID NO: 1808192 - RNA, 19 nt, Homo sapiens
  misc_RNA (1)...(19): siRNA sense strand
aacaagcaacugagaauuu

SEQ ID NO: 1808193 - RNA, 19 nt, Homo sapiens
  misc_RNA (1)...(19): siRNA sense strand
ggguauggcuucccucaac

SEQ ID NO: 1808194 - RNA, 19 nt, Homo sapiens
  misc_RNA (1)...(19): siRNA sense strand
ccaagcagaugugcaugau

SEQ ID NO: 1808195 - RNA, 19 nt, Homo sapiens
  misc_RNA (1)...(19): siRNA sense strand
gaagaugugaacaaaugug

SEQ ID NO: 1808196 - RNA, 19 nt, Homo sapiens
  misc_RNA (1)...(19): siRNA sense strand
uuacuuccauugaugacuu

SEQ ID NO: 1808197 - RNA, 19 nt, Homo sapiens
  misc_RNA (1)...(19): siRNA sense strand
gcaaugaacaagacuuagg

SEQ ID NO: 1808198 - RNA, 19 nt, Homo sapiens
  misc_RNA (1)...(19): siRNA sense strand
aaaacaaggugauuugaug

SEQ ID NO: 1808199 - RNA, 19 nt, Homo sapiens
  misc_RNA (1)...(19): siRNA sense strand
aaacaaggugauuugauga

SEQ ID NO: 1808200 - RNA, 19 nt, Homo sapiens
  misc_RNA (1)...(19): siRNA sense strand
uggcaaugaacaagacuua

SEQ ID NO: 1808201 - RNA, 19 nt, Homo sapiens
  misc_RNA (1)...(19): siRNA sense strand
ucuaagaaggcccauguuu

SEQ ID NO: 1808202 - RNA, 19 nt, Homo sapiens
  misc_RNA (1)...(19): siRNA sense strand
cuuguaaacaccaauagua

SEQ ID NO: 1808203 - RNA, 19 nt, Homo sapiens
  misc_RNA (1)...(19): siRNA sense strand
cgucuggaaagcaucauua

SEQ ID NO: 1808204 - RNA, 19 nt, Homo sapiens
  misc_RNA (1)...(19): siRNA sense strand
uaagaaggcccauguuuug

SEQ ID NO: 1808205 - RNA, 19 nt, Homo sapiens
  misc_RNA (1)...(19): siRNA sense strand
gcaugauuaugauggagau

SEQ ID NO: 1808206 - RNA, 19 nt, Homo sapiens
  misc_RNA (1)...(19): siRNA sense strand
ggaugagaaugaguuuauc

SEQ ID NO: 1808207 - RNA, 19 nt, Homo sapiens
  misc_RNA (1)...(19): siRNA sense strand
gaugacauuacuuccauug

SEQ ID NO: 1808208 - RNA, 19 nt, Homo sapiens
  misc_RNA (1)...(19): siRNA sense strand
guaaacuggcccaagagaa

SEQ ID NO: 1808209 - RNA, 19 nt, Homo sapiens
  misc_RNA (1)...(19): siRNA sense strand
ugaacaugccaacaaauug

SEQ ID NO: 1808210 - RNA, 19 nt, Homo sapiens
  misc_RNA (1)...(19): siRNA sense strand
ccgugaacaugccaacaaa

SEQ ID NO: 1808211 - RNA, 19 nt, Homo sapiens
  misc_RNA (1)...(19): siRNA sense strand
acucaauucugcaauagau

SEQ ID NO: 1808212 - RNA, 19 nt, Homo sapiens
  misc_RNA (1)...(19): siRNA sense strand
guuggagccucuuguuaca

SEQ ID NO: 1808213 - RNA, 19 nt, Homo sapiens
  misc_RNA (1)...(19): siRNA sense strand
uguagaagauguucgaaaa

SEQ ID NO: 1808214 - RNA, 19 nt, Homo sapiens
  misc_RNA (1)...(19): siRNA sense strand
gcagugcugaugauaagga

SEQ ID NO: 1808215 - RNA, 19 nt, Homo sapiens
  misc_RNA (1)...(19): siRNA sense strand
ccaaguacaacgccaacaa

SEQ ID NO: 1808216 - RNA, 19 nt, Homo sapiens
  misc_RNA (1)...(19): siRNA sense strand
uaccuugggugcagaagau

SEQ ID NO: 1808217 - RNA, 19 nt, Homo sapiens
  misc_RNA (1)...(19): siRNA sense strand
ggucguggcuggggaguuu

SEQ ID NO: 1808218 - RNA, 19 nt, Homo sapiens
  misc_RNA (1)...(19): siRNA sense strand
caaguacaacgccaacaag

SEQ ID NO: 1808219 - RNA, 19 nt, Homo sapiens
  misc_RNA (1)...(19): siRNA sense strand
uguccaggaucgugaaugg

SEQ ID NO: 1808220 - RNA, 19 nt, Homo sapiens
  misc_RNA (1)...(19): siRNA sense strand
ugacaucacccugcugaag

SEQ ID NO: 1808221 - RNA, 19 nt, Homo sapiens
  misc_RNA (1)...(19): siRNA sense strand
gcucugacgaggagaacau

SEQ ID NO: 1808222 - RNA, 19 nt, Homo sapiens
  misc_RNA (1)...(19): siRNA sense strand
ggacccuggugggcauugu

SEQ ID NO: 1808223 - RNA, 19 nt, Homo sapiens
  misc_RNA (1)...(19): siRNA sense strand
caacaagaccccugacaag

SEQ ID NO: 1808224 - RNA, 19 nt, Homo sapiens
  misc_RNA (1)...(19): siRNA sense strand
gcauucugaccgugaacaa

SEQ ID NO: 1808225 - RNA, 19 nt, Homo sapiens
  misc_RNA (1)...(19): siRNA sense strand
ggaaacacaugggugcuua

SEQ ID NO: 1808226 - RNA, 19 nt, Homo sapiens
  misc_RNA (1)...(19): siRNA sense strand
ggucauagccuacaacuga

SEQ ID NO: 1808227 - RNA, 19 nt, Homo sapiens
  misc_RNA (1)...(19): siRNA sense strand
acacgcaucucgccaguuu

SEQ ID NO: 1808228 - RNA, 19 nt, Homo sapiens
  misc_RNA (1)...(19): siRNA sense strand
caaacgaggcucugacuga

SEQ ID NO: 1808229 - RNA, 19 nt, Homo sapiens
  misc_RNA (1)...(19): siRNA sense strand
gcgcgcaccugcuguguau

SEQ ID NO: 1808230 - RNA, 19 nt, Homo sapiens
  misc_RNA (1)...(19): siRNA sense strand
cuaccaccaugaacaauga

SEQ ID NO: 1808231 - RNA, 19 nt, Homo sapiens
  misc_RNA (1)...(19): siRNA sense strand
aaacgaggcucugacugaa

SEQ ID NO: 1808232 - RNA, 19 nt, Homo sapiens
  misc_RNA (1)...(19): siRNA sense strand
cacccuagcuggaacucua

SEQ ID NO: 1808233 - RNA, 19 nt, Homo sapiens
  misc_RNA (1)...(19): siRNA sense strand
acacaugggugcuuauugg

SEQ ID NO: 1808234 - RNA, 19 nt, Homo sapiens
  misc_RNA (1)...(19): siRNA sense strand
gggcgaguaugaccgauca

SEQ ID NO: 1808235 - RNA, 19 nt, Homo sapiens
  misc_RNA (1)...(19): siRNA sense strand
caugggugcuuauugguau

SEQ ID NO: 1808236 - RNA, 19 nt, Homo sapiens
  misc_RNA (1)...(19): siRNA sense strand
ggaacucuaccaccaugaa

SEQ ID NO: 1808237 - RNA, 19 nt, Homo sapiens
  misc_RNA (1)...(19): siRNA sense strand
cugaaggccucacgugugu

SEQ ID NO: 1808238 - RNA, 19 nt, Homo sapiens
  misc_RNA (1)...(19): siRNA sense strand
gaaggccucacguguguca

SEQ ID NO: 1808239 - RNA, 19 nt, Homo sapiens
  misc_RNA (1)...(19): siRNA sense strand
cagcagcggcuuccacuuc

SEQ ID NO: 1808240 - RNA, 19 nt, Homo sapiens
  misc_RNA (1)...(19): siRNA sense strand
gaaacacaugggugcuuau

SEQ ID NO: 1808241 - RNA, 19 nt, Homo sapiens
  misc_RNA (1)...(19): siRNA sense strand
gcugcccacugcaauguca

SEQ ID NO: 1808242 - RNA, 19 nt, Homo sapiens
  misc_RNA (1)...(19): siRNA sense strand
aaacacaugggugcuuauu

SEQ ID NO: 1808243 - RNA, 19 nt, Homo sapiens
  misc_RNA (1)...(19): siRNA sense strand
uuacacacccuagcuggaa

SEQ ID NO: 1808244 - RNA, 19 nt, Homo sapiens
  misc_RNA (1)...(19): siRNA sense strand
gagcuucagccagaggauu

SEQ ID NO: 1808245 - RNA, 19 nt, Homo sapiens
  misc_RNA (1)...(19): siRNA sense strand
ucaguggcgugggcaaugu

SEQ ID NO: 1808246 - RNA, 19 nt, Homo sapiens
  misc_RNA (1)...(19): siRNA sense strand
gcuguguauacucgaguua

SEQ ID NO: 1808247 - RNA, 19 nt, Homo sapiens
  misc_RNA (1)...(19): siRNA sense strand
gaacucuaccaccaugaac

SEQ ID NO: 1808248 - RNA, 19 nt, Homo sapiens
  misc_RNA (1)...(19): siRNA sense strand
gcgcaccugcuguguauac

SEQ ID NO: 1808249 - RNA, 19 nt, Homo sapiens
  misc_RNA (1)...(19): siRNA sense strand
gccagaagggaaacacaug

SEQ ID NO: 1808250 - RNA, 19 nt, Homo sapiens
  misc_RNA (1)...(19): siRNA sense strand
gcagcggcuuccacuucug

SEQ ID NO: 1808251 - RNA, 19 nt, Homo sapiens
  misc_RNA (1)...(19): siRNA sense strand
guccgucucucgggccauu

SEQ ID NO: 1808252 - RNA, 19 nt, Homo sapiens
  misc_RNA (1)...(19): siRNA sense strand
auacucgaguuagcaaguu

SEQ ID NO: 1808253 - RNA, 19 nt, Homo sapiens
  misc_RNA (1)...(19): siRNA sense strand
acaugggugcuuauuggua

SEQ ID NO: 1808254 - RNA, 19 nt, Homo sapiens
  misc_RNA (1)...(19): siRNA sense strand
gggaaacacaugggugcuu

SEQ ID NO: 1808255 - RNA, 19 nt, Homo sapiens
  misc_RNA (1)...(19): siRNA sense strand
ggaaggauguggccaccaa

SEQ ID NO: 1808256 - RNA, 19 nt, Homo sapiens
  misc_RNA (1)...(19): siRNA sense strand
ggagggaucuguacuuacu

SEQ ID NO: 1808257 - RNA, 19 nt, Homo sapiens
  misc_RNA (1)...(19): siRNA sense strand
cgagagaguuguggcagua

SEQ ID NO: 1808258 - RNA, 19 nt, Homo sapiens
  misc_RNA (1)...(19): siRNA sense strand
gccaguaucugcacgcuau

SEQ ID NO: 1808259 - RNA, 19 nt, Homo sapiens
  misc_RNA (1)...(19): siRNA sense strand
guacgugaaugcuagugaa

SEQ ID NO: 1808260 - RNA, 19 nt, Homo sapiens
  misc_RNA (1)...(19): siRNA sense strand
cagcggaucugagcaauuc

SEQ ID NO: 1808261 - RNA, 19 nt, Homo sapiens
  misc_RNA (1)...(19): siRNA sense strand
guccaaagauuacccuaga

SEQ ID NO: 1808262 - RNA, 19 nt, Homo sapiens
  misc_RNA (1)...(19): siRNA sense strand
ccaaggagacccagcugua

SEQ ID NO: 1808263 - RNA, 19 nt, Homo sapiens
  misc_RNA (1)...(19): siRNA sense strand
ccaaggagacccagcugua

SEQ ID NO: 1808264 - RNA, 19 nt, Homo sapiens
  misc_RNA (1)...(19): siRNA sense strand
gagcagccucacauuuaua

SEQ ID NO: 1808265 - RNA, 19 nt, Homo sapiens
  misc_RNA (1)...(19): siRNA sense strand
gagaagaagccuccaugug

SEQ ID NO: 1808266 - RNA, 19 nt, Homo sapiens
  misc_RNA (1)...(19): siRNA sense strand
cagcggaucugagcaacuu

SEQ ID NO: 1808267 - RNA, 19 nt, Homo sapiens
  misc_RNA (1)...(19): siRNA sense strand
ccaaagggauucucuucgu

SEQ ID NO: 1808268 - RNA, 19 nt, Homo sapiens
  misc_RNA (1)...(19): siRNA sense strand
caacuugucagacgagaga

SEQ ID NO: 1808269 - RNA, 19 nt, Homo sapiens
  misc_RNA (1)...(19): siRNA sense strand
cccaagagguggccaagga

SEQ ID NO: 1808270 - RNA, 19 nt, Homo sapiens
  misc_RNA (1)...(19): siRNA sense strand
gguaucugcugccaugaau

SEQ ID NO: 1808271 - RNA, 19 nt, Homo sapiens
  misc_RNA (1)...(19): siRNA sense strand
ggguggaggugguggaaga

SEQ ID NO: 1808272 - RNA, 19 nt, Homo sapiens
  misc_RNA (1)...(19): siRNA sense strand
gaugggcgaucuccuggau

SEQ ID NO: 1808273 - RNA, 19 nt, Homo sapiens
  misc_RNA (1)...(19): siRNA sense strand
ccaugaauauugcuuuaag

SEQ ID NO: 1808274 - RNA, 19 nt, Homo sapiens
  misc_RNA (1)...(19): siRNA sense strand
cuggagggaucuguacuua

SEQ ID NO: 1808275 - RNA, 19 nt, Homo sapiens
  misc_RNA (1)...(19): siRNA sense strand
guagcguguugacugauuu

SEQ ID NO: 1808276 - RNA, 19 nt, Homo sapiens
  misc_RNA (1)...(19): siRNA sense strand
ggagacacaggcaccguuu

SEQ ID NO: 1808277 - RNA, 19 nt, Homo sapiens
  misc_RNA (1)...(19): siRNA sense strand
ugccaugaauauugcuuua

SEQ ID NO: 1808278 - RNA, 19 nt, Homo sapiens
  misc_RNA (1)...(19): siRNA sense strand
ccgagacuguccaaagauu

SEQ ID NO: 1808279 - RNA, 19 nt, Homo sapiens
  misc_RNA (1)...(19): siRNA sense strand
uccaagagguggccaagga

SEQ ID NO: 1808280 - RNA, 19 nt, Homo sapiens
  misc_RNA (1)...(19): siRNA sense strand
cgagacuguccaaagauua

SEQ ID NO: 1808281 - RNA, 19 nt, Homo sapiens
  misc_RNA (1)...(19): siRNA sense strand
gccaggcacccuacaauau

SEQ ID NO: 1808282 - RNA, 19 nt, Homo sapiens
  misc_RNA (1)...(19): siRNA sense strand
gcagcacuccauacucuga

SEQ ID NO: 1808283 - RNA, 19 nt, Homo sapiens
  misc_RNA (1)...(19): siRNA sense strand
gagacacaggcaccguuua

SEQ ID NO: 1808284 - RNA, 19 nt, Homo sapiens
  misc_RNA (1)...(19): siRNA sense strand
guaaaccgaugggcgaucu

SEQ ID NO: 1808285 - RNA, 19 nt, Homo sapiens
  misc_RNA (1)...(19): siRNA sense strand
gauccgagacuguccaaag

SEQ ID NO: 1808286 - RNA, 19 nt, Homo sapiens
  misc_RNA (1)...(19): siRNA sense strand
aggaggagguggugccauu

SEQ ID NO: 1808287 - RNA, 19 nt, Homo sapiens
  misc_RNA (1)...(19): siRNA sense strand
ccuagaacaucuugguauc

SEQ ID NO: 1808288 - RNA, 19 nt, Homo sapiens
  misc_RNA (1)...(19): siRNA sense strand
ugugggaaaugcuaugaga

SEQ ID NO: 1808289 - RNA, 19 nt, Homo sapiens
  misc_RNA (1)...(19): siRNA sense strand
cgugaaugcuagugaagug

SEQ ID NO: 1808290 - RNA, 19 nt, Homo sapiens
  misc_RNA (1)...(19): siRNA sense strand
uagaacaucuugguaucug

SEQ ID NO: 1808291 - RNA, 19 nt, Homo sapiens
  misc_RNA (1)...(19): siRNA sense strand
cuccucagaugaacagaaa

SEQ ID NO: 1808292 - RNA, 19 nt, Homo sapiens
  misc_RNA (1)...(19): siRNA sense strand
caagaggugaggaaauugu

SEQ ID NO: 1808293 - RNA, 19 nt, Homo sapiens
  misc_RNA (1)...(19): siRNA sense strand
uaucugcugccaugaauau

SEQ ID NO: 1808294 - RNA, 19 nt, Homo sapiens
  misc_RNA (1)...(19): siRNA sense strand
gccauucuccucagaugaa

SEQ ID NO: 1808295 - RNA, 19 nt, Homo sapiens
  misc_RNA (1)...(19): siRNA sense strand
uggcagcacuccauacucu

SEQ ID NO: 1808296 - RNA, 19 nt, Homo sapiens
  misc_RNA (1)...(19): siRNA sense strand
gcacuccuacguccuguca

SEQ ID NO: 1808297 - RNA, 19 nt, Homo sapiens
  misc_RNA (1)...(19): siRNA sense strand
caccugcucuggcaagauc

SEQ ID NO: 1808298 - RNA, 19 nt, Homo sapiens
  misc_RNA (1)...(19): siRNA sense strand
caggcacccuacaauauca

SEQ ID NO: 1808299 - RNA, 19 nt, Homo sapiens
  misc_RNA (1)...(19): siRNA sense strand
agacacaggcaccguuuau

SEQ ID NO: 1808300 - RNA, 19 nt, Homo sapiens
  misc_RNA (1)...(19): siRNA sense strand
gauccacuccuggcucaaa

SEQ ID NO: 1808301 - RNA, 19 nt, Homo sapiens
  misc_RNA (1)...(19): siRNA sense strand
gaggacgggccuucugaga

SEQ ID NO: 1808302 - RNA, 19 nt, Homo sapiens
  misc_RNA (1)...(19): siRNA sense strand
cagccucacauuuauauuc

SEQ ID NO: 1808303 - RNA, 19 nt, Homo sapiens
  misc_RNA (1)...(19): siRNA sense strand
caaagauuacccuagaaca

SEQ ID NO: 1808304 - RNA, 19 nt, Homo sapiens
  misc_RNA (1)...(19): siRNA sense strand
gaaugcuagugaagugucu

SEQ ID NO: 1808305 - RNA, 19 nt, Homo sapiens
  misc_RNA (1)...(19): siRNA sense strand
cgagcugcauggucacugu

SEQ ID NO: 1808306 - RNA, 19 nt, Homo sapiens
  misc_RNA (1)...(19): siRNA sense strand
agugugggauuugcaguaa

SEQ ID NO: 1808307 - RNA, 19 nt, Homo sapiens
  misc_RNA (1)...(19): siRNA sense strand
aaagauuacccuagaacau

SEQ ID NO: 1808308 - RNA, 19 nt, Homo sapiens
  misc_RNA (1)...(19): siRNA sense strand
ccaggcacccuacaauauc

SEQ ID NO: 1808309 - RNA, 19 nt, Homo sapiens
  misc_RNA (1)...(19): siRNA sense strand
cgccaggcacccuacaaua

SEQ ID NO: 1808310 - RNA, 19 nt, Homo sapiens
  misc_RNA (1)...(19): siRNA sense strand
gugccauucuccucagaug

SEQ ID NO: 1808311 - RNA, 19 nt, Homo sapiens
  misc_RNA (1)...(19): siRNA sense strand
gcugauaggaagagcaaca

SEQ ID NO: 1808312 - RNA, 19 nt, Homo sapiens
  misc_RNA (1)...(19): siRNA sense strand
ggaaaugcuaugagaagcu

SEQ ID NO: 1808313 - RNA, 19 nt, Homo sapiens
  misc_RNA (1)...(19): siRNA sense strand
gcugcaagcgguguucuga

SEQ ID NO: 1808314 - RNA, 19 nt, Homo sapiens
  misc_RNA (1)...(19): siRNA sense strand
gugaaggaguacgugaaug

SEQ ID NO: 1808315 - RNA, 19 nt, Homo sapiens
  misc_RNA (1)...(19): siRNA sense strand
caccaaagggauucucuuc

SEQ ID NO: 1808316 - RNA, 19 nt, Homo sapiens
  misc_RNA (1)...(19): siRNA sense strand
gcaaaggcagacccaaagg

SEQ ID NO: 1808317 - RNA, 19 nt, Homo sapiens
  misc_RNA (1)...(19): siRNA sense strand
caaccugcagaucccagua

SEQ ID NO: 1808318 - RNA, 19 nt, Homo sapiens
  misc_RNA (1)...(19): siRNA sense strand
gagacuguccaaagauuac

SEQ ID NO: 1808319 - RNA, 19 nt, Homo sapiens
  misc_RNA (1)...(19): siRNA sense strand
cauucgccauggagaagaa

SEQ ID NO: 1808320 - RNA, 19 nt, Homo sapiens
  misc_RNA (1)...(19): siRNA sense strand
aguagcguguugacugauu

SEQ ID NO: 1808321 - RNA, 19 nt, Homo sapiens
  misc_RNA (1)...(19): siRNA sense strand
gccaugaauauugcuuuaa

SEQ ID NO: 1808322 - RNA, 19 nt, Homo sapiens
  misc_RNA (1)...(19): siRNA sense strand
caacuggagggaucuguac

SEQ ID NO: 1808323 - RNA, 19 nt, Homo sapiens
  misc_RNA (1)...(19): siRNA sense strand
cuccagcucuaccaccaaa

SEQ ID NO: 1808324 - RNA, 19 nt, Homo sapiens
  misc_RNA (1)...(19): siRNA sense strand
gggccuuggcugauuguga

SEQ ID NO: 1808325 - RNA, 19 nt, Homo sapiens
  misc_RNA (1)...(19): siRNA sense strand
ccaaagauuacccuagaac

SEQ ID NO: 1808326 - RNA, 19 nt, Homo sapiens
  misc_RNA (1)...(19): siRNA sense strand
uccaaagauuacccuagaa

SEQ ID NO: 1808327 - RNA, 19 nt, Homo sapiens
  misc_RNA (1)...(19): siRNA sense strand
auccgagacuguccaaaga

SEQ ID NO: 1808328 - RNA, 19 nt, Homo sapiens
  misc_RNA (1)...(19): siRNA sense strand
aagggauucucuucgugaa

SEQ ID NO: 1808329 - RNA, 19 nt, Homo sapiens
  misc_RNA (1)...(19): siRNA sense strand
ggaucuguacuuacugcaa

SEQ ID NO: 1808330 - RNA, 19 nt, Homo sapiens
  misc_RNA (1)...(19): siRNA sense strand
ugaaggaguacgugaaugc

SEQ ID NO: 1808331 - RNA, 19 nt, Homo sapiens
  misc_RNA (1)...(19): siRNA sense strand
aauaucaggcgcagcucua

SEQ ID NO: 1808332 - RNA, 19 nt, Homo sapiens
  misc_RNA (1)...(19): siRNA sense strand
aagauuacccuagaacauc

SEQ ID NO: 1808333 - RNA, 19 nt, Homo sapiens
  misc_RNA (1)...(19): siRNA sense strand
uaucugcacgcuauagcaa

SEQ ID NO: 1808334 - RNA, 19 nt, Homo sapiens
  misc_RNA (1)...(19): siRNA sense strand
caaaagagcuguucaccua

SEQ ID NO: 1808335 - RNA, 19 nt, Homo sapiens
  misc_RNA (1)...(19): siRNA sense strand
guacuucgccugugacaau

SEQ ID NO: 1808336 - RNA, 19 nt, Homo sapiens
  misc_RNA (1)...(19): siRNA sense strand
gaaacagauucgacaacug

SEQ ID NO: 1808337 - RNA, 19 nt, Homo sapiens
  misc_RNA (1)...(19): siRNA sense strand
ggucagaaaugccugugau

SEQ ID NO: 1808338 - RNA, 19 nt, Homo sapiens
  misc_RNA (1)...(19): siRNA sense strand
ccaacuggcucugaaacuu

SEQ ID NO: 1808339 - RNA, 19 nt, Homo sapiens
  misc_RNA (1)...(19): siRNA sense strand
guccugagauucugcauca

SEQ ID NO: 1808340 - RNA, 19 nt, Homo sapiens
  misc_RNA (1)...(19): siRNA sense strand
gcuccuggcucgaguccuu

SEQ ID NO: 1808341 - RNA, 19 nt, Homo sapiens
  misc_RNA (1)...(19): siRNA sense strand
cagauguuguccugagauu

SEQ ID NO: 1808342 - RNA, 19 nt, Homo sapiens
  misc_RNA (1)...(19): siRNA sense strand
uggagccaguccugaguua

SEQ ID NO: 1808343 - RNA, 19 nt, Homo sapiens
  misc_RNA (1)...(19): siRNA sense strand
ccaguaugcuugcucucuu

SEQ ID NO: 1808344 - RNA, 19 nt, Homo sapiens
  misc_RNA (1)...(19): siRNA sense strand
gaagugggcccagcguuca

SEQ ID NO: 1808345 - RNA, 19 nt, Homo sapiens
  misc_RNA (1)...(19): siRNA sense strand
aaagagcuguucaccuauc

SEQ ID NO: 1808346 - RNA, 19 nt, Homo sapiens
  misc_RNA (1)...(19): siRNA sense strand
guucauucagguacuauuu

SEQ ID NO: 1808347 - RNA, 19 nt, Homo sapiens
  misc_RNA (1)...(19): siRNA sense strand
agaaaugccugugaucucu

SEQ ID NO: 1808348 - RNA, 19 nt, Homo sapiens
  misc_RNA (1)...(19): siRNA sense strand
uaugcuugcucucuucuug

SEQ ID NO: 1808349 - RNA, 19 nt, Homo sapiens
  misc_RNA (1)...(19): siRNA sense strand
caccugagccuuggaagaa

SEQ ID NO: 1808350 - RNA, 19 nt, Homo sapiens
  misc_RNA (1)...(19): siRNA sense strand
ccgugaugcuuaugagauu

SEQ ID NO: 1808351 - RNA, 19 nt, Homo sapiens
  misc_RNA (1)...(19): siRNA sense strand
gcuguucaccuaucagaug

SEQ ID NO: 1808352 - RNA, 19 nt, Homo sapiens
  misc_RNA (1)...(19): siRNA sense strand
guucaccuaucagauguug

SEQ ID NO: 1808353 - RNA, 19 nt, Homo sapiens
  misc_RNA (1)...(19): siRNA sense strand
caacuggcucugaaacuuc

SEQ ID NO: 1808354 - RNA, 19 nt, Homo sapiens
  misc_RNA (1)...(19): siRNA sense strand
gauguuguccugagauucu

SEQ ID NO: 1808355 - RNA, 19 nt, Homo sapiens
  misc_RNA (1)...(19): siRNA sense strand
ucauucagguacuauuugu

SEQ ID NO: 1808356 - RNA, 19 nt, Homo sapiens
  misc_RNA (1)...(19): siRNA sense strand
agaaacagauucgacaacu

SEQ ID NO: 1808357 - RNA, 19 nt, Homo sapiens
  misc_RNA (1)...(19): siRNA sense strand
guccugaguuacagaaaca

SEQ ID NO: 1808358 - RNA, 19 nt, Homo sapiens
  misc_RNA (1)...(19): siRNA sense strand
ggaggagucccaggaggaa

SEQ ID NO: 1808359 - RNA, 19 nt, Homo sapiens
  misc_RNA (1)...(19): siRNA sense strand
caaucgagccuuguacuuc

SEQ ID NO: 1808360 - RNA, 19 nt, Homo sapiens
  misc_RNA (1)...(19): siRNA sense strand
gagcuguucaccuaucaga

SEQ ID NO: 1808361 - RNA, 19 nt, Homo sapiens
  misc_RNA (1)...(19): siRNA sense strand
ccugugggcuggaaagucu

SEQ ID NO: 1808362 - RNA, 19 nt, Homo sapiens
  misc_RNA (1)...(19): siRNA sense strand
gaaaugccugugaucucuu

SEQ ID NO: 1808363 - RNA, 19 nt, Homo sapiens
  misc_RNA (1)...(19): siRNA sense strand
uaugagauucgccuacuga

SEQ ID NO: 1808364 - RNA, 19 nt, Homo sapiens
  misc_RNA (1)...(19): siRNA sense strand
gagccaguccugaguuaca

SEQ ID NO: 1808365 - RNA, 19 nt, Homo sapiens
  misc_RNA (1)...(19): siRNA sense strand
cuucauuccucuggacaaa

SEQ ID NO: 1808366 - RNA, 19 nt, Homo sapiens
  misc_RNA (1)...(19): siRNA sense strand
ugaguuacagaaacagauu

SEQ ID NO: 1808367 - RNA, 19 nt, Homo sapiens
  misc_RNA (1)...(19): siRNA sense strand
gagauucugcaucacuguu

SEQ ID NO: 1808368 - RNA, 19 nt, Homo sapiens
  misc_RNA (1)...(19): siRNA sense strand
ugcuagacguggucagaaa

SEQ ID NO: 1808369 - RNA, 19 nt, Homo sapiens
  misc_RNA (1)...(19): siRNA sense strand
gagccgugaugcuuaugag

SEQ ID NO: 1808370 - RNA, 19 nt, Homo sapiens
  misc_RNA (1)...(19): siRNA sense strand
caguaugcuugcucucuuc

SEQ ID NO: 1808371 - RNA, 19 nt, Homo sapiens
  misc_RNA (1)...(19): siRNA sense strand
ugccugugaucucuucauu

SEQ ID NO: 1808372 - RNA, 19 nt, Homo sapiens
  misc_RNA (1)...(19): siRNA sense strand
gauucugcaucacuguuag

SEQ ID NO: 1808373 - RNA, 19 nt, Homo sapiens
  misc_RNA (1)...(19): siRNA sense strand
aaaugccugugaucucuuc

SEQ ID NO: 1808374 - RNA, 19 nt, Homo sapiens
  misc_RNA (1)...(19): siRNA sense strand
ccuuguacuucgccuguga

SEQ ID NO: 1808375 - RNA, 19 nt, Homo sapiens
  misc_RNA (1)...(19): siRNA sense strand
agauucugcaucacuguua

SEQ ID NO: 1808376 - RNA, 19 nt, Homo sapiens
  misc_RNA (1)...(19): siRNA sense strand
ugucuauucucacccuaau

SEQ ID NO: 1808377 - RNA, 19 nt, Homo sapiens
  misc_RNA (1)...(19): siRNA sense strand
ccugugaucucuucauucc

SEQ ID NO: 1808378 - RNA, 19 nt, Homo sapiens
  misc_RNA (1)...(19): siRNA sense strand
uguccuccauccugucuau

SEQ ID NO: 1808379 - RNA, 19 nt, Homo sapiens
  misc_RNA (1)...(19): siRNA sense strand
cuggguaacucagcagaug

SEQ ID NO: 1808380 - RNA, 19 nt, Homo sapiens
  misc_RNA (1)...(19): siRNA sense strand
ucaaucgagccuuguacuu

SEQ ID NO: 1808381 - RNA, 19 nt, Homo sapiens
  misc_RNA (1)...(19): siRNA sense strand
ucauuccucuggacaaacu

SEQ ID NO: 1808382 - RNA, 19 nt, Homo sapiens
  misc_RNA (1)...(19): siRNA sense strand
cagaaaugccugugaucuc

SEQ ID NO: 1808383 - RNA, 19 nt, Homo sapiens
  misc_RNA (1)...(19): siRNA sense strand
gcuagacguggucagaaau

SEQ ID NO: 1808384 - RNA, 19 nt, Homo sapiens
  misc_RNA (1)...(19): siRNA sense strand
ccaccugagccuuggaaga

SEQ ID NO: 1808385 - RNA, 19 nt, Homo sapiens
  misc_RNA (1)...(19): siRNA sense strand
ucaccuaucagauguuguc

SEQ ID NO: 1808386 - RNA, 19 nt, Homo sapiens
  misc_RNA (1)...(19): siRNA sense strand
gaaagacuguguuccauua

SEQ ID NO: 1808387 - RNA, 19 nt, Homo sapiens
  misc_RNA (1)...(19): siRNA sense strand
acacaaaucugcuggaaua

SEQ ID NO: 1808388 - RNA, 19 nt, Homo sapiens
  misc_RNA (1)...(19): siRNA sense strand
agaaagagcuucgaaauau

SEQ ID NO: 1808389 - RNA, 19 nt, Homo sapiens
  misc_RNA (1)...(19): siRNA sense strand
gaaagaugguaacuuaugu

SEQ ID NO: 1808390 - RNA, 19 nt, Homo sapiens
  misc_RNA (1)...(19): siRNA sense strand
gaaagagcuucgaaauaug

SEQ ID NO: 1808391 - RNA, 19 nt, Homo sapiens
  misc_RNA (1)...(19): siRNA sense strand
agggaaagaugguaacuua

SEQ ID NO: 1808392 - RNA, 19 nt, Homo sapiens
  misc_RNA (1)...(19): siRNA sense strand
gaugguaacuuaugucuac

SEQ ID NO: 1808393 - RNA, 19 nt, Homo sapiens
  misc_RNA (1)...(19): siRNA sense strand
guaaacugcuauccuggua

SEQ ID NO: 1808394 - RNA, 19 nt, Homo sapiens
  misc_RNA (1)...(19): siRNA sense strand
ggaaagaugguaacuuaug

SEQ ID NO: 1808395 - RNA, 19 nt, Homo sapiens
  misc_RNA (1)...(19): siRNA sense strand
aaaccagauugaaguguua

SEQ ID NO: 1808396 - RNA, 19 nt, Homo sapiens
  misc_RNA (1)...(19): siRNA sense strand
aaagagaguugaguuggua

SEQ ID NO: 1808397 - RNA, 19 nt, Homo sapiens
  misc_RNA (1)...(19): siRNA sense strand
caacacaaaucugcuggaa

SEQ ID NO: 1808398 - RNA, 19 nt, Homo sapiens
  misc_RNA (1)...(19): siRNA sense strand
gaagaaagacuguguucca

SEQ ID NO: 1808399 - RNA, 19 nt, Homo sapiens
  misc_RNA (1)...(19): siRNA sense strand
ccauagagaaucacaguuu

SEQ ID NO: 1808400 - RNA, 19 nt, Homo sapiens
  misc_RNA (1)...(19): siRNA sense strand
aagaaagagcuucgaaaua

SEQ ID NO: 1808401 - RNA, 19 nt, Homo sapiens
  misc_RNA (1)...(19): siRNA sense strand
gaaucacaguuucuaaugg

SEQ ID NO: 1808402 - RNA, 19 nt, Homo sapiens
  misc_RNA (1)...(19): siRNA sense strand
agagaagacuuagcucaaa

SEQ ID NO: 1808403 - RNA, 19 nt, Homo sapiens
  misc_RNA (1)...(19): siRNA sense strand
gaaaaggucccauagagaa

SEQ ID NO: 1808404 - RNA, 19 nt, Homo sapiens
  misc_RNA (1)...(19): siRNA sense strand
gaaucuagaggaagacaga

SEQ ID NO: 1808405 - RNA, 19 nt, Homo sapiens
  misc_RNA (1)...(19): siRNA sense strand
aaagagcuucgaaauauga

SEQ ID NO: 1808406 - RNA, 19 nt, Homo sapiens
  misc_RNA (1)...(19): siRNA sense strand
gaguugaguugguauagag

SEQ ID NO: 1808407 - RNA, 19 nt, Homo sapiens
  misc_RNA (1)...(19): siRNA sense strand
cauagagaaucacaguuuc

SEQ ID NO: 1808408 - RNA, 19 nt, Homo sapiens
  misc_RNA (1)...(19): siRNA sense strand
agacuguguuccauuaaug

SEQ ID NO: 1808409 - RNA, 19 nt, Homo sapiens
  misc_RNA (1)...(19): siRNA sense strand
gaaaacaaacccucaacuu

SEQ ID NO: 1808410 - RNA, 19 nt, Homo sapiens
  misc_RNA (1)...(19): siRNA sense strand
gagaagacuuagcucaaaa

SEQ ID NO: 1808411 - RNA, 19 nt, Homo sapiens
  misc_RNA (1)...(19): siRNA sense strand
gaagaccaagaacugcuuu

SEQ ID NO: 1808412 - RNA, 19 nt, Homo sapiens
  misc_RNA (1)...(19): siRNA sense strand
aaacugcuauccugguauc

SEQ ID NO: 1808413 - RNA, 19 nt, Homo sapiens
  misc_RNA (1)...(19): siRNA sense strand
cgauauuagagaagacuua

SEQ ID NO: 1808414 - RNA, 19 nt, Homo sapiens
  misc_RNA (1)...(19): siRNA sense strand
guaucgauauuagagaaga

SEQ ID NO: 1808415 - RNA, 19 nt, Homo sapiens
  misc_RNA (1)...(19): siRNA sense strand
aauugaaucuagaggaaga

SEQ ID NO: 1808416 - RNA, 19 nt, Homo sapiens
  misc_RNA (1)...(19): siRNA sense strand
cagauugaaguguuagaaa

SEQ ID NO: 1808417 - RNA, 19 nt, Homo sapiens
  misc_RNA (1)...(19): siRNA sense strand
uauagaggccgaagaccaa

SEQ ID NO: 1808418 - RNA, 19 nt, Homo sapiens
  misc_RNA (1)...(19): siRNA sense strand
acccucaacuugcuccuuu

SEQ ID NO: 1808419 - RNA, 19 nt, Homo sapiens
  misc_RNA (1)...(19): siRNA sense strand
uagagaagacuuagcucaa

SEQ ID NO: 1808420 - RNA, 19 nt, Homo sapiens
  misc_RNA (1)...(19): siRNA sense strand
agaaagacuguguuccauu

SEQ ID NO: 1808421 - RNA, 19 nt, Homo sapiens
  misc_RNA (1)...(19): siRNA sense strand
cagaagaaagacuguguuc

SEQ ID NO: 1808422 - RNA, 19 nt, Homo sapiens
  misc_RNA (1)...(19): siRNA sense strand
ugguaucgauauuagagaa

SEQ ID NO: 1808423 - RNA, 19 nt, Homo sapiens
  misc_RNA (1)...(19): siRNA sense strand
ggccgaagaccaagaacug

SEQ ID NO: 1808424 - RNA, 19 nt, Homo sapiens
  misc_RNA (1)...(19): siRNA sense strand
gauauuagagaagacuuag

SEQ ID NO: 1808425 - RNA, 19 nt, Homo sapiens
  misc_RNA (1)...(19): siRNA sense strand
aagacuguguuccauuaau

SEQ ID NO: 1808426 - RNA, 19 nt, Homo sapiens
  misc_RNA (1)...(19): siRNA sense strand
gcgcucagcucggggaaaa

SEQ ID NO: 1808427 - RNA, 19 nt, Homo sapiens
  misc_RNA (1)...(19): siRNA sense strand
aagaaagacuguguuccau

SEQ ID NO: 1808428 - RNA, 19 nt, Homo sapiens
  misc_RNA (1)...(19): siRNA sense strand
agaguugaguugguauaga

SEQ ID NO: 1808429 - RNA, 19 nt, Homo sapiens
  misc_RNA (1)...(19): siRNA sense strand
gggaaagaugguaacuuau

SEQ ID NO: 1808430 - RNA, 19 nt, Homo sapiens
  misc_RNA (1)...(19): siRNA sense strand
cccaaugccagaagaaaga

SEQ ID NO: 1808431 - RNA, 19 nt, Homo sapiens
  misc_RNA (1)...(19): siRNA sense strand
aaaacaaacccucaacuug

SEQ ID NO: 1808432 - RNA, 19 nt, Homo sapiens
  misc_RNA (1)...(19): siRNA sense strand
gacuguguuccauuaauga

SEQ ID NO: 1808433 - RNA, 19 nt, Homo sapiens
  misc_RNA (1)...(19): siRNA sense strand
aaagacuguguuccauuaa

SEQ ID NO: 1808434 - RNA, 19 nt, Homo sapiens
  misc_RNA (1)...(19): siRNA sense strand
ccagaagaaagacuguguu

SEQ ID NO: 1808435 - RNA, 19 nt, Homo sapiens
  misc_RNA (1)...(19): siRNA sense strand
ccagauugaaguguuagaa

SEQ ID NO: 1808436 - RNA, 19 nt, Homo sapiens
  misc_RNA (1)...(19): siRNA sense strand
gagaguugaguugguauag

SEQ ID NO: 1808437 - RNA, 19 nt, Homo sapiens
  misc_RNA (1)...(19): siRNA sense strand
aaaaccagauugaaguguu

SEQ ID NO: 1808438 - RNA, 19 nt, Homo sapiens
  misc_RNA (1)...(19): siRNA sense strand
cgaagaccaagaacugcuu

SEQ ID NO: 1808439 - RNA, 19 nt, Homo sapiens
  misc_RNA (1)...(19): siRNA sense strand
ggaccagaagaaagacugu

SEQ ID NO: 1808440 - RNA, 19 nt, Homo sapiens
  misc_RNA (1)...(19): siRNA sense strand
caagaacugcuuuuacuca

SEQ ID NO: 1808441 - RNA, 19 nt, Homo sapiens
  misc_RNA (1)...(19): siRNA sense strand
aaacugaaaaggucccaua

SEQ ID NO: 1808442 - RNA, 19 nt, Homo sapiens
  misc_RNA (1)...(19): siRNA sense strand
ucaauugagagaaucuuag

SEQ ID NO: 1808443 - RNA, 19 nt, Homo sapiens
  misc_RNA (1)...(19): siRNA sense strand
gcaccaaccucaccuguca

SEQ ID NO: 1808444 - RNA, 19 nt, Homo sapiens
  misc_RNA (1)...(19): siRNA sense strand
agaauaagcugaacuugga

SEQ ID NO: 1808445 - RNA, 19 nt, Homo sapiens
  misc_RNA (1)...(19): siRNA sense strand
aaauauagcuaccaacaga

SEQ ID NO: 1808446 - RNA, 19 nt, Homo sapiens
  misc_RNA (1)...(19): siRNA sense strand
ugacagcccugauagagaa

SEQ ID NO: 1808447 - RNA, 19 nt, Homo sapiens
  misc_RNA (1)...(19): siRNA sense strand
ggaggugacagcccugaua

SEQ ID NO: 1808448 - RNA, 19 nt, Homo sapiens
  misc_RNA (1)...(19): siRNA sense strand
cauuaugccucccuuaguu

SEQ ID NO: 1808449 - RNA, 19 nt, Homo sapiens
  misc_RNA (1)...(19): siRNA sense strand
gaaaauggaugaugaagac

SEQ ID NO: 1808450 - RNA, 19 nt, Homo sapiens
  misc_RNA (1)...(19): siRNA sense strand
aguaaggucugcagaagaa

SEQ ID NO: 1808451 - RNA, 19 nt, Homo sapiens
  misc_RNA (1)...(19): siRNA sense strand
gcucagcuccgaccucaaa

SEQ ID NO: 1808452 - RNA, 19 nt, Homo sapiens
  misc_RNA (1)...(19): siRNA sense strand
gaagggauguaaaauauag

SEQ ID NO: 1808453 - RNA, 19 nt, Homo sapiens
  misc_RNA (1)...(19): siRNA sense strand
gaucaagacaagcaaguga

SEQ ID NO: 1808454 - RNA, 19 nt, Homo sapiens
  misc_RNA (1)...(19): siRNA sense strand
gaacuguccagcucaaugu

SEQ ID NO: 1808455 - RNA, 19 nt, Homo sapiens
  misc_RNA (1)...(19): siRNA sense strand
gaaacccgacauccacuuu

SEQ ID NO: 1808456 - RNA, 19 nt, Homo sapiens
  misc_RNA (1)...(19): siRNA sense strand
ccgcugggcuuccugcaaa

SEQ ID NO: 1808457 - RNA, 19 nt, Homo sapiens
  misc_RNA (1)...(19): siRNA sense strand
gggaccaccucucacauuc

SEQ ID NO: 1808458 - RNA, 19 nt, Homo sapiens
  misc_RNA (1)...(19): siRNA sense strand
gcacugcagaugcuccuuu

SEQ ID NO: 1808459 - RNA, 19 nt, Homo sapiens
  misc_RNA (1)...(19): siRNA sense strand
gcuggcggcuugaggagaa

SEQ ID NO: 1808460 - RNA, 19 nt, Homo sapiens
  misc_RNA (1)...(19): siRNA sense strand
aaacaacccagacagaaga

SEQ ID NO: 1808461 - RNA, 19 nt, Homo sapiens
  misc_RNA (1)...(19): siRNA sense strand
ggagagaggaagggaugua

SEQ ID NO: 1808462 - RNA, 19 nt, Homo sapiens
  misc_RNA (1)...(19): siRNA sense strand
cggcauagcccuagagauc

SEQ ID NO: 1808463 - RNA, 19 nt, Homo sapiens
  misc_RNA (1)...(19): siRNA sense strand
aaaaggagcuccauuaugc

SEQ ID NO: 1808464 - RNA, 19 nt, Homo sapiens
  misc_RNA (1)...(19): siRNA sense strand
caaccucaccugucagaug

SEQ ID NO: 1808465 - RNA, 19 nt, Homo sapiens
  misc_RNA (1)...(19): siRNA sense strand
gagagaggaagggauguaa

SEQ ID NO: 1808466 - RNA, 19 nt, Homo sapiens
  misc_RNA (1)...(19): siRNA sense strand
ucauggcccugcucuguau

SEQ ID NO: 1808467 - RNA, 19 nt, Homo sapiens
  misc_RNA (1)...(19): siRNA sense strand
ccacagaccaucaccaucu

SEQ ID NO: 1808468 - RNA, 19 nt, Homo sapiens
  misc_RNA (1)...(19): siRNA sense strand
aaccucaccugucagauga

SEQ ID NO: 1808469 - RNA, 19 nt, Homo sapiens
  misc_RNA (1)...(19): siRNA sense strand
gaggaagggauguaaaaua

SEQ ID NO: 1808470 - RNA, 19 nt, Homo sapiens
  misc_RNA (1)...(19): siRNA sense strand
gaagcgggaccaccucuca

SEQ ID NO: 1808471 - RNA, 19 nt, Homo sapiens
  misc_RNA (1)...(19): siRNA sense strand
cgaguaaggucugcagaag

SEQ ID NO: 1808472 - RNA, 19 nt, Homo sapiens
  misc_RNA (1)...(19): siRNA sense strand
cagagaaaauggaugauga

SEQ ID NO: 1808473 - RNA, 19 nt, Homo sapiens
  misc_RNA (1)...(19): siRNA sense strand
ggaacggcauagcccuaga

SEQ ID NO: 1808474 - RNA, 19 nt, Homo sapiens
  misc_RNA (1)...(19): siRNA sense strand
ggaggacacgggaagcuau

SEQ ID NO: 1808475 - RNA, 19 nt, Homo sapiens
  misc_RNA (1)...(19): siRNA sense strand
aagaagcccuggccagaca

SEQ ID NO: 1808476 - RNA, 19 nt, Homo sapiens
  misc_RNA (1)...(19): siRNA sense strand
gcaaaacaccucauaccuu

SEQ ID NO: 1808477 - RNA, 19 nt, Homo sapiens
  misc_RNA (1)...(19): siRNA sense strand
ggacacgggaagcuauuuc

SEQ ID NO: 1808478 - RNA, 19 nt, Homo sapiens
  misc_RNA (1)...(19): siRNA sense strand
ugaagucgagggagccuaa

SEQ ID NO: 1808479 - RNA, 19 nt, Homo sapiens
  misc_RNA (1)...(19): siRNA sense strand
caaacaacccagacagaag

SEQ ID NO: 1808480 - RNA, 19 nt, Homo sapiens
  misc_RNA (1)...(19): siRNA sense strand
gaccaccucucacauucuc

SEQ ID NO: 1808481 - RNA, 19 nt, Homo sapiens
  misc_RNA (1)...(19): siRNA sense strand
ccagcucaaugucuccuau

SEQ ID NO: 1808482 - RNA, 19 nt, Homo sapiens
  misc_RNA (1)...(19): siRNA sense strand
gcaaggccuggaacaucua

SEQ ID NO: 1808483 - RNA, 19 nt, Homo sapiens
  misc_RNA (1)...(19): siRNA sense strand
acucggagaucaagacaag

SEQ ID NO: 1808484 - RNA, 19 nt, Homo sapiens
  misc_RNA (1)...(19): siRNA sense strand
acaaacaacccagacagaa

SEQ ID NO: 1808485 - RNA, 19 nt, Homo sapiens
  misc_RNA (1)...(19): siRNA sense strand
gaacaaaaggagcuccauu

SEQ ID NO: 1808486 - RNA, 19 nt, Homo sapiens
  misc_RNA (1)...(19): siRNA sense strand
gaguaaggucugcagaaga

SEQ ID NO: 1808487 - RNA, 19 nt, Homo sapiens
  misc_RNA (1)...(19): siRNA sense strand
gggauguccagaagaagaa

SEQ ID NO: 1808488 - RNA, 19 nt, Homo sapiens
  misc_RNA (1)...(19): siRNA sense strand
auacuacgcugagguugug

SEQ ID NO: 1808489 - RNA, 19 nt, Homo sapiens
  misc_RNA (1)...(19): siRNA sense strand
gaggacacgggaagcuauu

SEQ ID NO: 1808490 - RNA, 19 nt, Homo sapiens
  misc_RNA (1)...(19): siRNA sense strand
agagaacuguccagcucaa

SEQ ID NO: 1808491 - RNA, 19 nt, Homo sapiens
  misc_RNA (1)...(19): siRNA sense strand
ggaagggauguaaaauaua

SEQ ID NO: 1808492 - RNA, 19 nt, Homo sapiens
  misc_RNA (1)...(19): siRNA sense strand
aggaagggauguaaaauau

SEQ ID NO: 1808493 - RNA, 19 nt, Homo sapiens
  misc_RNA (1)...(19): siRNA sense strand
gagaggaagggauguaaaa

SEQ ID NO: 1808494 - RNA, 19 nt, Homo sapiens
  misc_RNA (1)...(19): siRNA sense strand
ccucaccugucagaugaaa

SEQ ID NO: 1808495 - RNA, 19 nt, Homo sapiens
  misc_RNA (1)...(19): siRNA sense strand
ccaucaccaucuucaggaa

SEQ ID NO: 1808496 - RNA, 19 nt, Homo sapiens
  misc_RNA (1)...(19): siRNA sense strand
cacagaccaucaccaucuu

SEQ ID NO: 1808497 - RNA, 19 nt, Homo sapiens
  misc_RNA (1)...(19): siRNA sense strand
gaggugacagcccugauag

SEQ ID NO: 1808498 - RNA, 19 nt, Homo sapiens
  misc_RNA (1)...(19): siRNA sense strand
auagcuaccaacagaauaa

SEQ ID NO: 1808499 - RNA, 19 nt, Homo sapiens
  misc_RNA (1)...(19): siRNA sense strand
gagaucaagacaagcaagu

SEQ ID NO: 1808500 - RNA, 19 nt, Homo sapiens
  misc_RNA (1)...(19): siRNA sense strand
cacaaacaacccagacaga

SEQ ID NO: 1808501 - RNA, 19 nt, Homo sapiens
  misc_RNA (1)...(19): siRNA sense strand
cugcacaccugagcugguu

SEQ ID NO: 1808502 - RNA, 19 nt, Homo sapiens
  misc_RNA (1)...(19): siRNA sense strand
gcauagcccuagagauccu

SEQ ID NO: 1808503 - RNA, 19 nt, Homo sapiens
  misc_RNA (1)...(19): siRNA sense strand
gaacggcauagcccuagag

SEQ ID NO: 1808504 - RNA, 19 nt, Homo sapiens
  misc_RNA (1)...(19): siRNA sense strand
gauagagaaacccgacauc

SEQ ID NO: 1808505 - RNA, 19 nt, Homo sapiens
  misc_RNA (1)...(19): siRNA sense strand
uauagcuaccaacagaaua

SEQ ID NO: 1808506 - RNA, 19 nt, Homo sapiens
  misc_RNA (1)...(19): siRNA sense strand
cccuggagauccugguauu

SEQ ID NO: 1808507 - RNA, 19 nt, Homo sapiens
  misc_RNA (1)...(19): siRNA sense strand
caaaaggagcuccauuaug

SEQ ID NO: 1808508 - RNA, 19 nt, Homo sapiens
  misc_RNA (1)...(19): siRNA sense strand
ugcaaggccuggaacaucu

SEQ ID NO: 1808509 - RNA, 19 nt, Homo sapiens
  misc_RNA (1)...(19): siRNA sense strand
ggagcuucgucgaguaagg

SEQ ID NO: 1808510 - RNA, 19 nt, Homo sapiens
  misc_RNA (1)...(19): siRNA sense strand
ggugacagcccugauagag

SEQ ID NO: 1808511 - RNA, 19 nt, Homo sapiens
  misc_RNA (1)...(19): siRNA sense strand
caacagaauaagcugaacu

SEQ ID NO: 1808512 - RNA, 19 nt, Homo sapiens
  misc_RNA (1)...(19): siRNA sense strand
ccacggaguacucggagau

SEQ ID NO: 1808513 - RNA, 19 nt, Homo sapiens
  misc_RNA (1)...(19): siRNA sense strand
aacaaaaggagcuccauua

SEQ ID NO: 1808514 - RNA, 19 nt, Homo sapiens
  misc_RNA (1)...(19): siRNA sense strand
gucauggcccugcucugua

SEQ ID NO: 1808515 - RNA, 19 nt, Homo sapiens
  misc_RNA (1)...(19): siRNA sense strand
ucagaugaaacgccaagga

SEQ ID NO: 1808516 - RNA, 19 nt, Homo sapiens
  misc_RNA (1)...(19): siRNA sense strand
gugacagcccugauagaga

SEQ ID NO: 1808517 - RNA, 19 nt, Homo sapiens
  misc_RNA (1)...(19): siRNA sense strand
uuuacucccucccacaguu

SEQ ID NO: 1808518 - RNA, 19 nt, Homo sapiens
  misc_RNA (1)...(19): siRNA sense strand
gaugaugaagaccccauua

SEQ ID NO: 1808519 - RNA, 19 nt, Homo sapiens
  misc_RNA (1)...(19): siRNA sense strand
gaccagagaaaauggauga

SEQ ID NO: 1808520 - RNA, 19 nt, Homo sapiens
  misc_RNA (1)...(19): siRNA sense strand
cgggaccaccucucacauu

SEQ ID NO: 1808521 - RNA, 19 nt, Homo sapiens
  misc_RNA (1)...(19): siRNA sense strand
ggaguacucggagaucaag

SEQ ID NO: 1808522 - RNA, 19 nt, Homo sapiens
  misc_RNA (1)...(19): siRNA sense strand
gcaggagaagccaguguac

SEQ ID NO: 1808523 - RNA, 19 nt, Homo sapiens
  misc_RNA (1)...(19): siRNA sense strand
caucuucaggaacggcaua

SEQ ID NO: 1808524 - RNA, 19 nt, Homo sapiens
  misc_RNA (1)...(19): siRNA sense strand
ggacuuaaaugccaaauug

SEQ ID NO: 1808525 - RNA, 19 nt, Homo sapiens
  misc_RNA (1)...(19): siRNA sense strand
ggagaucaguccaaaguca

SEQ ID NO: 1808526 - RNA, 19 nt, Homo sapiens
  misc_RNA (1)...(19): siRNA sense strand
gaaauacagugagcaguuc

SEQ ID NO: 1808527 - RNA, 19 nt, Homo sapiens
  misc_RNA (1)...(19): siRNA sense strand
gcgaggaucugaaguaugg

SEQ ID NO: 1808528 - RNA, 19 nt, Homo sapiens
  misc_RNA (1)...(19): siRNA sense strand
ugggagggauugugaaaua

SEQ ID NO: 1808529 - RNA, 19 nt, Homo sapiens
  misc_RNA (1)...(19): siRNA sense strand
cgacagagcuuccaguacu

SEQ ID NO: 1808530 - RNA, 19 nt, Homo sapiens
  misc_RNA (1)...(19): siRNA sense strand
caagagaguagcaaacuuu

SEQ ID NO: 1808531 - RNA, 19 nt, Homo sapiens
  misc_RNA (1)...(19): siRNA sense strand
gcacaaacccacauuuaca

SEQ ID NO: 1808532 - RNA, 19 nt, Homo sapiens
  misc_RNA (1)...(19): siRNA sense strand
ggagaaagcagaggagauu

SEQ ID NO: 1808533 - RNA, 19 nt, Homo sapiens
  misc_RNA (1)...(19): siRNA sense strand
gcgaggcgcuggaucaaca

SEQ ID NO: 1808534 - RNA, 19 nt, Homo sapiens
  misc_RNA (1)...(19): siRNA sense strand
ggaaaucccaaccaagaug

SEQ ID NO: 1808535 - RNA, 19 nt, Homo sapiens
  misc_RNA (1)...(19): siRNA sense strand
agaaagcagaggagauuua

SEQ ID NO: 1808536 - RNA, 19 nt, Homo sapiens
  misc_RNA (1)...(19): siRNA sense strand
ccgcacaaacccacauuua

SEQ ID NO: 1808537 - RNA, 19 nt, Homo sapiens
  misc_RNA (1)...(19): siRNA sense strand
cagaggagauuuacaagcu

SEQ ID NO: 1808538 - RNA, 19 nt, Homo sapiens
  misc_RNA (1)...(19): siRNA sense strand
ccaagagaguagcaaacuu

SEQ ID NO: 1808539 - RNA, 19 nt, Homo sapiens
  misc_RNA (1)...(19): siRNA sense strand
uugaugagguccacaguga

SEQ ID NO: 1808540 - RNA, 19 nt, Homo sapiens
  misc_RNA (1)...(19): siRNA sense strand
ugaaauacagugagcaguu

SEQ ID NO: 1808541 - RNA, 19 nt, Homo sapiens
  misc_RNA (1)...(19): siRNA sense strand
gcuauugacccucaggaaa

SEQ ID NO: 1808542 - RNA, 19 nt, Homo sapiens
  misc_RNA (1)...(19): siRNA sense strand
guggaaaucccaaccaaga

SEQ ID NO: 1808543 - RNA, 19 nt, Homo sapiens
  misc_RNA (1)...(19): siRNA sense strand
gagaagcagccaacacugu

SEQ ID NO: 1808544 - RNA, 19 nt, Homo sapiens
  misc_RNA (1)...(19): siRNA sense strand
gagcgggaccugcuugaug

SEQ ID NO: 1808545 - RNA, 19 nt, Homo sapiens
  misc_RNA (1)...(19): siRNA sense strand
caacuucagcgaauugauc

SEQ ID NO: 1808546 - RNA, 19 nt, Homo sapiens
  misc_RNA (1)...(19): siRNA sense strand
gacagagcuuccaguacuu

SEQ ID NO: 1808547 - RNA, 19 nt, Homo sapiens
  misc_RNA (1)...(19): siRNA sense strand
gcagcugccacgauugaaa

SEQ ID NO: 1808548 - RNA, 19 nt, Homo sapiens
  misc_RNA (1)...(19): siRNA sense strand
gaaagcagaggagauuuac

SEQ ID NO: 1808549 - RNA, 19 nt, Homo sapiens
  misc_RNA (1)...(19): siRNA sense strand
aaucuccgaucuauaagga

SEQ ID NO: 1808550 - RNA, 19 nt, Homo sapiens
  misc_RNA (1)...(19): siRNA sense strand
gaucaacauagauggcaaa

SEQ ID NO: 1808551 - RNA, 19 nt, Homo sapiens
  misc_RNA (1)...(19): siRNA sense strand
cgaugggccuucaacuuca

SEQ ID NO: 1808552 - RNA, 19 nt, Homo sapiens
  misc_RNA (1)...(19): siRNA sense strand
caacauagauggcaaaacc

SEQ ID NO: 1808553 - RNA, 19 nt, Homo sapiens
  misc_RNA (1)...(19): siRNA sense strand
aagcagaggagauuuacaa

SEQ ID NO: 1808554 - RNA, 19 nt, Homo sapiens
  misc_RNA (1)...(19): siRNA sense strand
ucaggaaacaaccaagaaa

SEQ ID NO: 1808555 - RNA, 19 nt, Homo sapiens
  misc_RNA (1)...(19): siRNA sense strand
gcaguucucauccaacgau

SEQ ID NO: 1808556 - RNA, 19 nt, Homo sapiens
  misc_RNA (1)...(19): siRNA sense strand
gagaaagcagaggagauuu

SEQ ID NO: 1808557 - RNA, 19 nt, Homo sapiens
  misc_RNA (1)...(19): siRNA sense strand
gcauggcucuguccuucag

SEQ ID NO: 1808558 - RNA, 19 nt, Homo sapiens
  misc_RNA (1)...(19): siRNA sense strand
uccaguacuuccucaagaa

SEQ ID NO: 1808559 - RNA, 19 nt, Homo sapiens
  misc_RNA (1)...(19): siRNA sense strand
caucgggcuuggagcagaa

SEQ ID NO: 1808560 - RNA, 19 nt, Homo sapiens
  misc_RNA (1)...(19): siRNA sense strand
uucuuaugcucgcuauuua

SEQ ID NO: 1808561 - RNA, 19 nt, Homo sapiens
  misc_RNA (1)...(19): siRNA sense strand
gagaucaguccaaagucaa

SEQ ID NO: 1808562 - RNA, 19 nt, Homo sapiens
  misc_RNA (1)...(19): siRNA sense strand
ggagggauugugaaauaca

SEQ ID NO: 1808563 - RNA, 19 nt, Homo sapiens
  misc_RNA (1)...(19): siRNA sense strand
ggauucuuaugcucgcuau

SEQ ID NO: 1808564 - RNA, 19 nt, Homo sapiens
  misc_RNA (1)...(19): siRNA sense strand
ggcgcuggaucaacauaga

SEQ ID NO: 1808565 - RNA, 19 nt, Homo sapiens
  misc_RNA (1)...(19): siRNA sense strand
gaugagguccacagugaag

SEQ ID NO: 1808566 - RNA, 19 nt, Homo sapiens
  misc_RNA (1)...(19): siRNA sense strand
ccaguacuuccucaagaaa

SEQ ID NO: 1808567 - RNA, 19 nt, Homo sapiens
  misc_RNA (1)...(19): siRNA sense strand
aguccaaagucaaggagaa

SEQ ID NO: 1808568 - RNA, 19 nt, Homo sapiens
  misc_RNA (1)...(19): siRNA sense strand
ccaaaggucgacagagcuu

SEQ ID NO: 1808569 - RNA, 19 nt, Homo sapiens
  misc_RNA (1)...(19): siRNA sense strand
gaacgaugggccuucaacu

SEQ ID NO: 1808570 - RNA, 19 nt, Homo sapiens
  misc_RNA (1)...(19): siRNA sense strand
gaaauccaagagaguagca

SEQ ID NO: 1808571 - RNA, 19 nt, Homo sapiens
  misc_RNA (1)...(19): siRNA sense strand
ggacaugcaggccaaagcu

SEQ ID NO: 1808572 - RNA, 19 nt, Homo sapiens
  misc_RNA (1)...(19): siRNA sense strand
aguacuuccucaagaaaga

SEQ ID NO: 1808573 - RNA, 19 nt, Homo sapiens
  misc_RNA (1)...(19): siRNA sense strand
gagggauugugaaauacag

SEQ ID NO: 1808574 - RNA, 19 nt, Homo sapiens
  misc_RNA (1)...(19): siRNA sense strand
gccuucaacuucagcgaau

SEQ ID NO: 1808575 - RNA, 19 nt, Homo sapiens
  misc_RNA (1)...(19): siRNA sense strand
ggauugugaaauacaguga

SEQ ID NO: 1808576 - RNA, 19 nt, Homo sapiens
  misc_RNA (1)...(19): siRNA sense strand
ggaagccaaggcccgagaa

SEQ ID NO: 1808577 - RNA, 19 nt, Homo sapiens
  misc_RNA (1)...(19): siRNA sense strand
gggagggauugugaaauac

SEQ ID NO: 1808578 - RNA, 19 nt, Homo sapiens
  misc_RNA (1)...(19): siRNA sense strand
cuuaugcucgcuauuuaaa

SEQ ID NO: 1808579 - RNA, 19 nt, Homo sapiens
  misc_RNA (1)...(19): siRNA sense strand
ccugcgaggaucugaagua

SEQ ID NO: 1808580 - RNA, 19 nt, Homo sapiens
  misc_RNA (1)...(19): siRNA sense strand
gacaugcaggccaaagcua

SEQ ID NO: 1808581 - RNA, 19 nt, Homo sapiens
  misc_RNA (1)...(19): siRNA sense strand
cugcgaggaucugaaguau

SEQ ID NO: 1808582 - RNA, 19 nt, Homo sapiens
  misc_RNA (1)...(19): siRNA sense strand
guggaacgaugggccuuca

SEQ ID NO: 1808583 - RNA, 19 nt, Homo sapiens
  misc_RNA (1)...(19): siRNA sense strand
cagcugccacgauugaaau

SEQ ID NO: 1808584 - RNA, 19 nt, Homo sapiens
  misc_RNA (1)...(19): siRNA sense strand
acgaugggccuucaacuuc

SEQ ID NO: 1808585 - RNA, 19 nt, Homo sapiens
  misc_RNA (1)...(19): siRNA sense strand
gcuccacccucccuuuuau

SEQ ID NO: 1808586 - RNA, 19 nt, Homo sapiens
  misc_RNA (1)...(19): siRNA sense strand
gucgacagagcuuccagua

SEQ ID NO: 1808587 - RNA, 19 nt, Homo sapiens
  misc_RNA (1)...(19): siRNA sense strand
cacaaacccacauuuacau

SEQ ID NO: 1808588 - RNA, 19 nt, Homo sapiens
  misc_RNA (1)...(19): siRNA sense strand
ggaacgaugggccuucaac

SEQ ID NO: 1808589 - RNA, 19 nt, Homo sapiens
  misc_RNA (1)...(19): siRNA sense strand
gggacuuaaaugccaaauu

SEQ ID NO: 1808590 - RNA, 19 nt, Homo sapiens
  misc_RNA (1)...(19): siRNA sense strand
aaacccacauuuacaugcu

SEQ ID NO: 1808591 - RNA, 19 nt, Homo sapiens
  misc_RNA (1)...(19): siRNA sense strand
guacuuccucaagaaagaa

SEQ ID NO: 1808592 - RNA, 19 nt, Homo sapiens
  misc_RNA (1)...(19): siRNA sense strand
uuccaguacuuccucaaga

SEQ ID NO: 1808593 - RNA, 19 nt, Homo sapiens
  misc_RNA (1)...(19): siRNA sense strand
gaggcgcuggaucaacaua

SEQ ID NO: 1808594 - RNA, 19 nt, Homo sapiens
  misc_RNA (1)...(19): siRNA sense strand
gcaaagaccuuacgagaau

SEQ ID NO: 1808595 - RNA, 19 nt, Homo sapiens
  misc_RNA (1)...(19): siRNA sense strand
ggagcaaacugaauaauga

SEQ ID NO: 1808596 - RNA, 19 nt, Homo sapiens
  misc_RNA (1)...(19): siRNA sense strand
gaaauuaucagucucauga

SEQ ID NO: 1808597 - RNA, 19 nt, Homo sapiens
  misc_RNA (1)...(19): siRNA sense strand
gaaagaguauucaaacgaa

SEQ ID NO: 1808598 - RNA, 19 nt, Homo sapiens
  misc_RNA (1)...(19): siRNA sense strand
gaauguggcuuacaacaga

SEQ ID NO: 1808599 - RNA, 19 nt, Homo sapiens
  misc_RNA (1)...(19): siRNA sense strand
ccacuagucugacggauaa

SEQ ID NO: 1808600 - RNA, 19 nt, Homo sapiens
  misc_RNA (1)...(19): siRNA sense strand
gaagccaacuaccaucuuu

SEQ ID NO: 1808601 - RNA, 19 nt, Homo sapiens
  misc_RNA (1)...(19): siRNA sense strand
gauaauaccacuagucuga

SEQ ID NO: 1808602 - RNA, 19 nt, Homo sapiens
  misc_RNA (1)...(19): siRNA sense strand
caaauaaggagccauauga

SEQ ID NO: 1808603 - RNA, 19 nt, Homo sapiens
  misc_RNA (1)...(19): siRNA sense strand
gagcagcaguugauaaugu

SEQ ID NO: 1808604 - RNA, 19 nt, Homo sapiens
  misc_RNA (1)...(19): siRNA sense strand
guacuccgcuuucuguaaa

SEQ ID NO: 1808605 - RNA, 19 nt, Homo sapiens
  misc_RNA (1)...(19): siRNA sense strand
caagagaaauuaucagucu

SEQ ID NO: 1808606 - RNA, 19 nt, Homo sapiens
  misc_RNA (1)...(19): siRNA sense strand
gcacaaauacgaacuucaa

SEQ ID NO: 1808607 - RNA, 19 nt, Homo sapiens
  misc_RNA (1)...(19): siRNA sense strand
gaaggaaugugcuacuuac

SEQ ID NO: 1808608 - RNA, 19 nt, Homo sapiens
  misc_RNA (1)...(19): siRNA sense strand
ucacauggcuuuggaacaa

SEQ ID NO: 1808609 - RNA, 19 nt, Homo sapiens
  misc_RNA (1)...(19): siRNA sense strand
guaccaagcuaucuuugau

SEQ ID NO: 1808610 - RNA, 19 nt, Homo sapiens
  misc_RNA (1)...(19): siRNA sense strand
gacagaauguggcuuacaa

SEQ ID NO: 1808611 - RNA, 19 nt, Homo sapiens
  misc_RNA (1)...(19): siRNA sense strand
ugaaugacgucaacgcaaa

SEQ ID NO: 1808612 - RNA, 19 nt, Homo sapiens
  misc_RNA (1)...(19): siRNA sense strand
gaagaggacgugaagaguu

SEQ ID NO: 1808613 - RNA, 19 nt, Homo sapiens
  misc_RNA (1)...(19): siRNA sense strand
gaaggugucucuguguuuc

SEQ ID NO: 1808614 - RNA, 19 nt, Homo sapiens
  misc_RNA (1)...(19): siRNA sense strand
caaauacgaacuucaaaga

SEQ ID NO: 1808615 - RNA, 19 nt, Homo sapiens
  misc_RNA (1)...(19): siRNA sense strand
gaccaacuaucuaggaaau

SEQ ID NO: 1808616 - RNA, 19 nt, Homo sapiens
  misc_RNA (1)...(19): siRNA sense strand
aagaggacgugaagaguuu

SEQ ID NO: 1808617 - RNA, 19 nt, Homo sapiens
  misc_RNA (1)...(19): siRNA sense strand
gugaagaguuuaaagaaag

SEQ ID NO: 1808618 - RNA, 19 nt, Homo sapiens
  misc_RNA (1)...(19): siRNA sense strand
ggccuugccuccuuuaaga

SEQ ID NO: 1808619 - RNA, 19 nt, Homo sapiens
  misc_RNA (1)...(19): siRNA sense strand
gaacaggccagauguggau

SEQ ID NO: 1808620 - RNA, 19 nt, Homo sapiens
  misc_RNA (1)...(19): siRNA sense strand
ugagcgagauggacugaaa

SEQ ID NO: 1808621 - RNA, 19 nt, Homo sapiens
  misc_RNA (1)...(19): siRNA sense strand
cuacuagacagcacaaaua

SEQ ID NO: 1808622 - RNA, 19 nt, Homo sapiens
  misc_RNA (1)...(19): siRNA sense strand
ccagacauguccuugaaug

SEQ ID NO: 1808623 - RNA, 19 nt, Homo sapiens
  misc_RNA (1)...(19): siRNA sense strand
cgagauggacugaaagaaa

SEQ ID NO: 1808624 - RNA, 19 nt, Homo sapiens
  misc_RNA (1)...(19): siRNA sense strand
gaugaaauccagugacuuc

SEQ ID NO: 1808625 - RNA, 19 nt, Homo sapiens
  misc_RNA (1)...(19): siRNA sense strand
gagaccaacuaucuaggaa

SEQ ID NO: 1808626 - RNA, 19 nt, Homo sapiens
  misc_RNA (1)...(19): siRNA sense strand
ccagacagaauguggcuua

SEQ ID NO: 1808627 - RNA, 19 nt, Homo sapiens
  misc_RNA (1)...(19): siRNA sense strand
gagauggacugaaagaaaa

SEQ ID NO: 1808628 - RNA, 19 nt, Homo sapiens
  misc_RNA (1)...(19): siRNA sense strand
gaaaaggcgugauacacaa

SEQ ID NO: 1808629 - RNA, 19 nt, Homo sapiens
  misc_RNA (1)...(19): siRNA sense strand
gagcccagccugcagagua

SEQ ID NO: 1808630 - RNA, 19 nt, Homo sapiens
  misc_RNA (1)...(19): siRNA sense strand
cgugaagaguuuaaagaaa

SEQ ID NO: 1808631 - RNA, 19 nt, Homo sapiens
  misc_RNA (1)...(19): siRNA sense strand
gcaaauaaggagccauaug

SEQ ID NO: 1808632 - RNA, 19 nt, Homo sapiens
  misc_RNA (1)...(19): siRNA sense strand
ugaaggaaugugcuacuua

SEQ ID NO: 1808633 - RNA, 19 nt, Homo sapiens
  misc_RNA (1)...(19): siRNA sense strand
ggaaggugucucuguguuu

SEQ ID NO: 1808634 - RNA, 19 nt, Homo sapiens
  misc_RNA (1)...(19): siRNA sense strand
gacauuuccuggcauugaa

SEQ ID NO: 1808635 - RNA, 19 nt, Homo sapiens
  misc_RNA (1)...(19): siRNA sense strand
guaguacucugggcgauau

SEQ ID NO: 1808636 - RNA, 19 nt, Homo sapiens
  misc_RNA (1)...(19): siRNA sense strand
gggaaggugucucuguguu

SEQ ID NO: 1808637 - RNA, 19 nt, Homo sapiens
  misc_RNA (1)...(19): siRNA sense strand
gagaugaguacuccgcuuu

SEQ ID NO: 1808638 - RNA, 19 nt, Homo sapiens
  misc_RNA (1)...(19): siRNA sense strand
aagaagagccagcugcuaa

SEQ ID NO: 1808639 - RNA, 19 nt, Homo sapiens
  misc_RNA (1)...(19): siRNA sense strand
guacuggcauucagauugg

SEQ ID NO: 1808640 - RNA, 19 nt, Homo sapiens
  misc_RNA (1)...(19): siRNA sense strand
acaaugagcugagggaagu

SEQ ID NO: 1808641 - RNA, 19 nt, Homo sapiens
  misc_RNA (1)...(19): siRNA sense strand
aaauugaccaugacuauga

SEQ ID NO: 1808642 - RNA, 19 nt, Homo sapiens
  misc_RNA (1)...(19): siRNA sense strand
agaagaaaguguagaagag

SEQ ID NO: 1808643 - RNA, 19 nt, Homo sapiens
  misc_RNA (1)...(19): siRNA sense strand
ccacagagaagucggaugu

SEQ ID NO: 1808644 - RNA, 19 nt, Homo sapiens
  misc_RNA (1)...(19): siRNA sense strand
gcaaacugaauaaugaaga

SEQ ID NO: 1808645 - RNA, 19 nt, Homo sapiens
  misc_RNA (1)...(19): siRNA sense strand
ucacacagucucagauuga

SEQ ID NO: 1808646 - RNA, 19 nt, Homo sapiens
  misc_RNA (1)...(19): siRNA sense strand
guacugcccaagagaaauu

SEQ ID NO: 1808647 - RNA, 19 nt, Homo sapiens
  misc_RNA (1)...(19): siRNA sense strand
cagccaaccucaaguacug

SEQ ID NO: 1808648 - RNA, 19 nt, Homo sapiens
  misc_RNA (1)...(19): siRNA sense strand
ugaaauugaccaugacuau

SEQ ID NO: 1808649 - RNA, 19 nt, Homo sapiens
  misc_RNA (1)...(19): siRNA sense strand
uugaugaaauugaccauga

SEQ ID NO: 1808650 - RNA, 19 nt, Homo sapiens
  misc_RNA (1)...(19): siRNA sense strand
ugccuagucugcauaauau

SEQ ID NO: 1808651 - RNA, 19 nt, Homo sapiens
  misc_RNA (1)...(19): siRNA sense strand
caagucauaugccuagucu

SEQ ID NO: 1808652 - RNA, 19 nt, Homo sapiens
  misc_RNA (1)...(19): siRNA sense strand
gaaguacucccuggugaug

SEQ ID NO: 1808653 - RNA, 19 nt, Homo sapiens
  misc_RNA (1)...(19): siRNA sense strand
gaaauugaccaugacuaug

SEQ ID NO: 1808654 - RNA, 19 nt, Homo sapiens
  misc_RNA (1)...(19): siRNA sense strand
ggagaagggcaaccugaug

SEQ ID NO: 1808655 - RNA, 19 nt, Homo sapiens
  misc_RNA (1)...(19): siRNA sense strand
cuucugagcagcuugauuu

SEQ ID NO: 1808656 - RNA, 19 nt, Homo sapiens
  misc_RNA (1)...(19): siRNA sense strand
ccaacuaucuaggaaauac

SEQ ID NO: 1808657 - RNA, 19 nt, Homo sapiens
  misc_RNA (1)...(19): siRNA sense strand
aaccagacauguccuugaa

SEQ ID NO: 1808658 - RNA, 19 nt, Homo sapiens
  misc_RNA (1)...(19): siRNA sense strand
auaaacaccuggacccaau

SEQ ID NO: 1808659 - RNA, 19 nt, Homo sapiens
  misc_RNA (1)...(19): siRNA sense strand
gaacagcaggucccagagu

SEQ ID NO: 1808660 - RNA, 19 nt, Homo sapiens
  misc_RNA (1)...(19): siRNA sense strand
caaguacuguaucagaaca

SEQ ID NO: 1808661 - RNA, 19 nt, Homo sapiens
  misc_RNA (1)...(19): siRNA sense strand
gaagcucggccgacauuuc

SEQ ID NO: 1808662 - RNA, 19 nt, Homo sapiens
  misc_RNA (1)...(19): siRNA sense strand
gcuccugggcgucaucaua

SEQ ID NO: 1808663 - RNA, 19 nt, Homo sapiens
  misc_RNA (1)...(19): siRNA sense strand
ggacggcaccgcuaagaag

SEQ ID NO: 1808664 - RNA, 19 nt, Homo sapiens
  misc_RNA (1)...(19): siRNA sense strand
caaacugaauaaugaagag

SEQ ID NO: 1808665 - RNA, 19 nt, Homo sapiens
  misc_RNA (1)...(19): siRNA sense strand
uaaguaccaagcuaucuuu

SEQ ID NO: 1808666 - RNA, 19 nt, Homo sapiens
  misc_RNA (1)...(19): siRNA sense strand
caaagaccuuacgagaauu

SEQ ID NO: 1808667 - RNA, 19 nt, Homo sapiens
  misc_RNA (1)...(19): siRNA sense strand
gagcaaacugaauaaugaa

SEQ ID NO: 1808668 - RNA, 19 nt, Homo sapiens
  misc_RNA (1)...(19): siRNA sense strand
cgaaacagcagcccagaca

SEQ ID NO: 1808669 - RNA, 19 nt, Homo sapiens
  misc_RNA (1)...(19): siRNA sense strand
acgcaaagcccacagagaa

SEQ ID NO: 1808670 - RNA, 19 nt, Homo sapiens
  misc_RNA (1)...(19): siRNA sense strand
gcaccugaaugacgucaac

SEQ ID NO: 1808671 - RNA, 19 nt, Homo sapiens
  misc_RNA (1)...(19): siRNA sense strand
gaacaauggauuauauagc

SEQ ID NO: 1808672 - RNA, 19 nt, Homo sapiens
  misc_RNA (1)...(19): siRNA sense strand
gacgcagggucucccauga

SEQ ID NO: 1808673 - RNA, 19 nt, Homo sapiens
  misc_RNA (1)...(19): siRNA sense strand
cagagaagucggaugugua

SEQ ID NO: 1808674 - RNA, 19 nt, Homo sapiens
  misc_RNA (1)...(19): siRNA sense strand
ccaacugcauugagcacaa

SEQ ID NO: 1808675 - RNA, 19 nt, Homo sapiens
  misc_RNA (1)...(19): siRNA sense strand
gggacgaguucaucacuac

SEQ ID NO: 1808676 - RNA, 19 nt, Homo sapiens
  misc_RNA (1)...(19): siRNA sense strand
caaauucagccacagaaca

SEQ ID NO: 1808677 - RNA, 19 nt, Homo sapiens
  misc_RNA (1)...(19): siRNA sense strand
uagaagaaaguguagaaga

SEQ ID NO: 1808678 - RNA, 19 nt, Homo sapiens
  misc_RNA (1)...(19): siRNA sense strand
gcugcuaaguaccaagcua

SEQ ID NO: 1808679 - RNA, 19 nt, Homo sapiens
  misc_RNA (1)...(19): siRNA sense strand
agucucagauugaugaaau

SEQ ID NO: 1808680 - RNA, 19 nt, Homo sapiens
  misc_RNA (1)...(19): siRNA sense strand
aauaaggagccauaugaaa

SEQ ID NO: 1808681 - RNA, 19 nt, Homo sapiens
  misc_RNA (1)...(19): siRNA sense strand
gaugagggaaggcauaaag

SEQ ID NO: 1808682 - RNA, 19 nt, Homo sapiens
  misc_RNA (1)...(19): siRNA sense strand
caaccagacauguccuuga

SEQ ID NO: 1808683 - RNA, 19 nt, Homo sapiens
  misc_RNA (1)...(19): siRNA sense strand
aaacagcagcccagacaga

SEQ ID NO: 1808684 - RNA, 19 nt, Homo sapiens
  misc_RNA (1)...(19): siRNA sense strand
gacgugaagaguuuaaaga

SEQ ID NO: 1808685 - RNA, 19 nt, Homo sapiens
  misc_RNA (1)...(19): siRNA sense strand
gcugaaagccgagaugagu

SEQ ID NO: 1808686 - RNA, 19 nt, Homo sapiens
  misc_RNA (1)...(19): siRNA sense strand
cgaagaugaugaacagacu

SEQ ID NO: 1808687 - RNA, 19 nt, Homo sapiens
  misc_RNA (1)...(19): siRNA sense strand
caacagagaggaggaaagg

SEQ ID NO: 1808688 - RNA, 19 nt, Homo sapiens
  misc_RNA (1)...(19): siRNA sense strand
cgacauuuccuggcauuga

SEQ ID NO: 1808689 - RNA, 19 nt, Homo sapiens
  misc_RNA (1)...(19): siRNA sense strand
gaguacugcccaagagaaa

SEQ ID NO: 1808690 - RNA, 19 nt, Homo sapiens
  misc_RNA (1)...(19): siRNA sense strand
auaaugaagagcacaauga

SEQ ID NO: 1808691 - RNA, 19 nt, Homo sapiens
  misc_RNA (1)...(19): siRNA sense strand
agaaagaguauucaaacga

SEQ ID NO: 1808692 - RNA, 19 nt, Homo sapiens
  misc_RNA (1)...(19): siRNA sense strand
gaugaugaacagacugaga

SEQ ID NO: 1808693 - RNA, 19 nt, Homo sapiens
  misc_RNA (1)...(19): siRNA sense strand
guaucagaacaauggauua

SEQ ID NO: 1808694 - RNA, 19 nt, Homo sapiens
  misc_RNA (1)...(19): siRNA sense strand
gaaaguagcucaaagaaga

SEQ ID NO: 1808695 - RNA, 19 nt, Homo sapiens
  misc_RNA (1)...(19): siRNA sense strand
gagaaacaccaacauauua

SEQ ID NO: 1808696 - RNA, 19 nt, Homo sapiens
  misc_RNA (1)...(19): siRNA sense strand
gauggaagauugaaagaaa

SEQ ID NO: 1808697 - RNA, 19 nt, Homo sapiens
  misc_RNA (1)...(19): siRNA sense strand
ggacaaagaggaugaguuu

SEQ ID NO: 1808698 - RNA, 19 nt, Homo sapiens
  misc_RNA (1)...(19): siRNA sense strand
gcagauuugucuccuguua

SEQ ID NO: 1808699 - RNA, 19 nt, Homo sapiens
  misc_RNA (1)...(19): siRNA sense strand
gaggagagcugggaauauu

SEQ ID NO: 1808700 - RNA, 19 nt, Homo sapiens
  misc_RNA (1)...(19): siRNA sense strand
gaaaugcaguagaaccuuu

SEQ ID NO: 1808701 - RNA, 19 nt, Homo sapiens
  misc_RNA (1)...(19): siRNA sense strand
ggaaauagaguuaaguuga

SEQ ID NO: 1808702 - RNA, 19 nt, Homo sapiens
  misc_RNA (1)...(19): siRNA sense strand
guagagguauugcgacaua

SEQ ID NO: 1808703 - RNA, 19 nt, Homo sapiens
  misc_RNA (1)...(19): siRNA sense strand
cagcaaagaugacaguaaa

SEQ ID NO: 1808704 - RNA, 19 nt, Homo sapiens
  misc_RNA (1)...(19): siRNA sense strand
gcagggagaccagauauua

SEQ ID NO: 1808705 - RNA, 19 nt, Homo sapiens
  misc_RNA (1)...(19): siRNA sense strand
gauggucgauugcaaauug

SEQ ID NO: 1808706 - RNA, 19 nt, Homo sapiens
  misc_RNA (1)...(19): siRNA sense strand
guacagagcauuauaaaca

SEQ ID NO: 1808707 - RNA, 19 nt, Homo sapiens
  misc_RNA (1)...(19): siRNA sense strand
ggaauugacuugagaaagg

SEQ ID NO: 1808708 - RNA, 19 nt, Homo sapiens
  misc_RNA (1)...(19): siRNA sense strand
ggaaguaaauggcauaacu

SEQ ID NO: 1808709 - RNA, 19 nt, Homo sapiens
  misc_RNA (1)...(19): siRNA sense strand
cagaaugccucaucaauca

SEQ ID NO: 1808710 - RNA, 19 nt, Homo sapiens
  misc_RNA (1)...(19): siRNA sense strand
ggaccucaguucauuuaaa

SEQ ID NO: 1808711 - RNA, 19 nt, Homo sapiens
  misc_RNA (1)...(19): siRNA sense strand
guagaugaauccacauuug

SEQ ID NO: 1808712 - RNA, 19 nt, Homo sapiens
  misc_RNA (1)...(19): siRNA sense strand
guccaaggauuaggaauua

SEQ ID NO: 1808713 - RNA, 19 nt, Homo sapiens
  misc_RNA (1)...(19): siRNA sense strand
caucaaacauguucuggaa

SEQ ID NO: 1808714 - RNA, 19 nt, Homo sapiens
  misc_RNA (1)...(19): siRNA sense strand
acaacaaucuggaagagua

SEQ ID NO: 1808715 - RNA, 19 nt, Homo sapiens
  misc_RNA (1)...(19): siRNA sense strand
gacugcaucuuguccauua

SEQ ID NO: 1808716 - RNA, 19 nt, Homo sapiens
  misc_RNA (1)...(19): siRNA sense strand
gcuucuggcuuuacuauaa

SEQ ID NO: 1808717 - RNA, 19 nt, Homo sapiens
  misc_RNA (1)...(19): siRNA sense strand
cacaaaugaugcugacuua

SEQ ID NO: 1808718 - RNA, 19 nt, Homo sapiens
  misc_RNA (1)...(19): siRNA sense strand
gaaaccugcuugugaugaa

SEQ ID NO: 1808719 - RNA, 19 nt, Homo sapiens
  misc_RNA (1)...(19): siRNA sense strand
gcaucuggcuccauugaaa

SEQ ID NO: 1808720 - RNA, 19 nt, Homo sapiens
  misc_RNA (1)...(19): siRNA sense strand
gcagagcgcuugcaaacca

SEQ ID NO: 1808721 - RNA, 19 nt, Homo sapiens
  misc_RNA (1)...(19): siRNA sense strand
ggacuuaugugauauugag

SEQ ID NO: 1808722 - RNA, 19 nt, Homo sapiens
  misc_RNA (1)...(19): siRNA sense strand
gaagaaggguauccauuac

SEQ ID NO: 1808723 - RNA, 19 nt, Homo sapiens
  misc_RNA (1)...(19): siRNA sense strand
ucagaaaggugaagaaagu

SEQ ID NO: 1808724 - RNA, 19 nt, Homo sapiens
  misc_RNA (1)...(19): siRNA sense strand
caacuggugugauaguaaa

SEQ ID NO: 1808725 - RNA, 19 nt, Homo sapiens
  misc_RNA (1)...(19): siRNA sense strand
caaagauacuguccagcua

SEQ ID NO: 1808726 - RNA, 19 nt, Homo sapiens
  misc_RNA (1)...(19): siRNA sense strand
cagaugagcuucuagagau

SEQ ID NO: 1808727 - RNA, 19 nt, Homo sapiens
  misc_RNA (1)...(19): siRNA sense strand
gaauggaauugacuugaga

SEQ ID NO: 1808728 - RNA, 19 nt, Homo sapiens
  misc_RNA (1)...(19): siRNA sense strand
ugaaagaccagguaaauau

SEQ ID NO: 1808729 - RNA, 19 nt, Homo sapiens
  misc_RNA (1)...(19): siRNA sense strand
gggcugacgucaagcagua

SEQ ID NO: 1808730 - RNA, 19 nt, Homo sapiens
  misc_RNA (1)...(19): siRNA sense strand
gaaauacagggauuaagaa

SEQ ID NO: 1808731 - RNA, 19 nt, Homo sapiens
  misc_RNA (1)...(19): siRNA sense strand
ggccuaggauuaaguauug

SEQ ID NO: 1808732 - RNA, 19 nt, Homo sapiens
  misc_RNA (1)...(19): siRNA sense strand
cagcagcacuaacccauuu

SEQ ID NO: 1808733 - RNA, 19 nt, Homo sapiens
  misc_RNA (1)...(19): siRNA sense strand
ugaagaaagugagacauuu

SEQ ID NO: 1808734 - RNA, 19 nt, Homo sapiens
  misc_RNA (1)...(19): siRNA sense strand
cuauugagcugcagaagaa

SEQ ID NO: 1808735 - RNA, 19 nt, Homo sapiens
  misc_RNA (1)...(19): siRNA sense strand
gaaacaaccaucgagauuu

SEQ ID NO: 1808736 - RNA, 19 nt, Homo sapiens
  misc_RNA (1)...(19): siRNA sense strand
aaaugaugcugacuuagua

SEQ ID NO: 1808737 - RNA, 19 nt, Homo sapiens
  misc_RNA (1)...(19): siRNA sense strand
gaaagaccagguaaauauu

SEQ ID NO: 1808738 - RNA, 19 nt, Homo sapiens
  misc_RNA (1)...(19): siRNA sense strand
uaagaacagucgaaaugaa

SEQ ID NO: 1808739 - RNA, 19 nt, Homo sapiens
  misc_RNA (1)...(19): siRNA sense strand
gcaaguagcacaaguccuu

SEQ ID NO: 1808740 - RNA, 19 nt, Homo sapiens
  misc_RNA (1)...(19): siRNA sense strand
gcagugccguugagcauga

SEQ ID NO: 1808741 - RNA, 19 nt, Homo sapiens
  misc_RNA (1)...(19): siRNA sense strand
caaagucggagaucagaua

SEQ ID NO: 1808742 - RNA, 19 nt, Homo sapiens
  misc_RNA (1)...(19): siRNA sense strand
caagugaaguuauaucaag

SEQ ID NO: 1808743 - RNA, 19 nt, Homo sapiens
  misc_RNA (1)...(19): siRNA sense strand
gaacaacaauaugaaugug

SEQ ID NO: 1808744 - RNA, 19 nt, Homo sapiens
  misc_RNA (1)...(19): siRNA sense strand
caaaugcuauugaacaaca

SEQ ID NO: 1808745 - RNA, 19 nt, Homo sapiens
  misc_RNA (1)...(19): siRNA sense strand
uaaaagaacugccuauaga

SEQ ID NO: 1808746 - RNA, 19 nt, Homo sapiens
  misc_RNA (1)...(19): siRNA sense strand
agaagaaggguauccauua

SEQ ID NO: 1808747 - RNA, 19 nt, Homo sapiens
  misc_RNA (1)...(19): siRNA sense strand
gaagaaagugagacauuug

SEQ ID NO: 1808748 - RNA, 19 nt, Homo sapiens
  misc_RNA (1)...(19): siRNA sense strand
ccaugaaguuuaugaagaa

SEQ ID NO: 1808749 - RNA, 19 nt, Homo sapiens
  misc_RNA (1)...(19): siRNA sense strand
aaacaaccaucgagauuuc

SEQ ID NO: 1808750 - RNA, 19 nt, Homo sapiens
  misc_RNA (1)...(19): siRNA sense strand
gaaauaaagaugcagugaa

SEQ ID NO: 1808751 - RNA, 19 nt, Homo sapiens
  misc_RNA (1)...(19): siRNA sense strand
ucaaacauguucuggaaga

SEQ ID NO: 1808752 - RNA, 19 nt, Homo sapiens
  misc_RNA (1)...(19): siRNA sense strand
gaugaucguucgaagcauu

SEQ ID NO: 1808753 - RNA, 19 nt, Homo sapiens
  misc_RNA (1)...(19): siRNA sense strand
uguaaacgauguuaacuug

SEQ ID NO: 1808754 - RNA, 19 nt, Homo sapiens
  misc_RNA (1)...(19): siRNA sense strand
gcacauagagcuggagaaa

SEQ ID NO: 1808755 - RNA, 19 nt, Homo sapiens
  misc_RNA (1)...(19): siRNA sense strand
aaacagcagucuugaggaa

SEQ ID NO: 1808756 - RNA, 19 nt, Homo sapiens
  misc_RNA (1)...(19): siRNA sense strand
ggugaugugccuauauuua

SEQ ID NO: 1808757 - RNA, 19 nt, Homo sapiens
  misc_RNA (1)...(19): siRNA sense strand
gauacuggcuguagaugau

SEQ ID NO: 1808758 - RNA, 19 nt, Homo sapiens
  misc_RNA (1)...(19): siRNA sense strand
ggaacuauauacccagaau

SEQ ID NO: 1808759 - RNA, 19 nt, Homo sapiens
  misc_RNA (1)...(19): siRNA sense strand
ugaggaagcuguagaagca

SEQ ID NO: 1808760 - RNA, 19 nt, Homo sapiens
  misc_RNA (1)...(19): siRNA sense strand
caaaggauuaugggaauua

SEQ ID NO: 1808761 - RNA, 19 nt, Homo sapiens
  misc_RNA (1)...(19): siRNA sense strand
ggcuguagaugaugaaauu

SEQ ID NO: 1808762 - RNA, 19 nt, Homo sapiens
  misc_RNA (1)...(19): siRNA sense strand
gcacaaguccuuaggcaau

SEQ ID NO: 1808763 - RNA, 19 nt, Homo sapiens
  misc_RNA (1)...(19): siRNA sense strand
gcuaagcaauggagaagug

SEQ ID NO: 1808764 - RNA, 19 nt, Homo sapiens
  misc_RNA (1)...(19): siRNA sense strand
ggaaugacaguuagugcua

SEQ ID NO: 1808765 - RNA, 19 nt, Homo sapiens
  misc_RNA (1)...(19): siRNA sense strand
gcaaagacaggaugagaau

SEQ ID NO: 1808766 - RNA, 19 nt, Homo sapiens
  misc_RNA (1)...(19): siRNA sense strand
gcaagcacugugauuauaa

SEQ ID NO: 1808767 - RNA, 19 nt, Homo sapiens
  misc_RNA (1)...(19): siRNA sense strand
gagacgagcuauuggaagu

SEQ ID NO: 1808768 - RNA, 19 nt, Homo sapiens
  misc_RNA (1)...(19): siRNA sense strand
agaguuaaguugaugauug

SEQ ID NO: 1808769 - RNA, 19 nt, Homo sapiens
  misc_RNA (1)...(19): siRNA sense strand
gauacuguccagcuaguua

SEQ ID NO: 1808770 - RNA, 19 nt, Homo sapiens
  misc_RNA (1)...(19): siRNA sense strand
gaaaggucauagugguuug

SEQ ID NO: 1808771 - RNA, 19 nt, Homo sapiens
  misc_RNA (1)...(19): siRNA sense strand
ggaauggaccucagagaug

SEQ ID NO: 1808772 - RNA, 19 nt, Homo sapiens
  misc_RNA (1)...(19): siRNA sense strand
uaaacgauguuaacuugga

SEQ ID NO: 1808773 - RNA, 19 nt, Homo sapiens
  misc_RNA (1)...(19): siRNA sense strand
ggacuugguuuuagcauuu

SEQ ID NO: 1808774 - RNA, 19 nt, Homo sapiens
  misc_RNA (1)...(19): siRNA sense strand
cgauugaauuggugaauga

SEQ ID NO: 1808775 - RNA, 19 nt, Homo sapiens
  misc_RNA (1)...(19): siRNA sense strand
gcauaugucucuggaggaa

SEQ ID NO: 1808776 - RNA, 19 nt, Homo sapiens
  misc_RNA (1)...(19): siRNA sense strand
gggaauauuuguucaagag

SEQ ID NO: 1808777 - RNA, 19 nt, Homo sapiens
  misc_RNA (1)...(19): siRNA sense strand
gcgaggaccagauggcuua

SEQ ID NO: 1808778 - RNA, 19 nt, Homo sapiens
  misc_RNA (1)...(19): siRNA sense strand
gcucaaagaagaaugcauu

SEQ ID NO: 1808779 - RNA, 19 nt, Homo sapiens
  misc_RNA (1)...(19): siRNA sense strand
gaaaggccacacaugauga

SEQ ID NO: 1808780 - RNA, 19 nt, Homo sapiens
  misc_RNA (1)...(19): siRNA sense strand
cgaagaagauacacucagu

SEQ ID NO: 1808781 - RNA, 19 nt, Homo sapiens
  misc_RNA (1)...(19): siRNA sense strand
gauauugagcuaacagaaa

SEQ ID NO: 1808782 - RNA, 19 nt, Homo sapiens
  misc_RNA (1)...(19): siRNA sense strand
gcaaaggauuaugggaauu

SEQ ID NO: 1808783 - RNA, 19 nt, Homo sapiens
  misc_RNA (1)...(19): siRNA sense strand
cgagaaacaccaacauauu

SEQ ID NO: 1808784 - RNA, 19 nt, Homo sapiens
  misc_RNA (1)...(19): siRNA sense strand
gaaagugagacauuugaug

SEQ ID NO: 1808785 - RNA, 19 nt, Homo sapiens
  misc_RNA (1)...(19): siRNA sense strand
ugagaaaggccacacauga

SEQ ID NO: 1808786 - RNA, 19 nt, Homo sapiens
  misc_RNA (1)...(19): siRNA sense strand
gaagaaggagcagcaugua

SEQ ID NO: 1808787 - RNA, 19 nt, Homo sapiens
  misc_RNA (1)...(19): siRNA sense strand
aggcaacccuguagucuuu

SEQ ID NO: 1808788 - RNA, 19 nt, Homo sapiens
  misc_RNA (1)...(19): siRNA sense strand
gcacaaaugaugcugacuu

SEQ ID NO: 1808789 - RNA, 19 nt, Homo sapiens
  misc_RNA (1)...(19): siRNA sense strand
cagcugagauagaagaaau

SEQ ID NO: 1808790 - RNA, 19 nt, Homo sapiens
  misc_RNA (1)...(19): siRNA sense strand
ggccuuggguuuaguguug

SEQ ID NO: 1808791 - RNA, 19 nt, Homo sapiens
  misc_RNA (1)...(19): siRNA sense strand
gcaguauauuucaggauga

SEQ ID NO: 1808792 - RNA, 19 nt, Homo sapiens
  misc_RNA (1)...(19): siRNA sense strand
ugaaauacagggauuaaga

SEQ ID NO: 1808793 - RNA, 19 nt, Homo sapiens
  misc_RNA (1)...(19): siRNA sense strand
gcaaaugaagacaaacuga

SEQ ID NO: 1808794 - RNA, 19 nt, Homo sapiens
  misc_RNA (1)...(19): siRNA sense strand
caagagaucuauacacaua

SEQ ID NO: 1808795 - RNA, 19 nt, Homo sapiens
  misc_RNA (1)...(19): siRNA sense strand
uuaaagagcucaacaaaug

SEQ ID NO: 1808796 - RNA, 19 nt, Homo sapiens
  misc_RNA (1)...(19): siRNA sense strand
gaaauugcuuccaguugua

SEQ ID NO: 1808797 - RNA, 19 nt, Homo sapiens
  misc_RNA (1)...(19): siRNA sense strand
gcagugcacuugaagaauu

SEQ ID NO: 1808798 - RNA, 19 nt, Homo sapiens
  misc_RNA (1)...(19): siRNA sense strand
gaggugggauguuuaguaa

SEQ ID NO: 1808799 - RNA, 19 nt, Homo sapiens
  misc_RNA (1)...(19): siRNA sense strand
ggauguagcucacaaucaa

SEQ ID NO: 1808800 - RNA, 19 nt, Homo sapiens
  misc_RNA (1)...(19): siRNA sense strand
gaagaacuguauuugaaug

SEQ ID NO: 1808801 - RNA, 19 nt, Homo sapiens
  misc_RNA (1)...(19): siRNA sense strand
gagagaaccuacuuacuca

SEQ ID NO: 1808802 - RNA, 19 nt, Homo sapiens
  misc_RNA (1)...(19): siRNA sense strand
uaacaucacuucccuugga

SEQ ID NO: 1808803 - RNA, 19 nt, Homo sapiens
  misc_RNA (1)...(19): siRNA sense strand
acaacuaccugcugaaauu

SEQ ID NO: 1808804 - RNA, 19 nt, Homo sapiens
  misc_RNA (1)...(19): siRNA sense strand
cagcagaggugggauguuu

SEQ ID NO: 1808805 - RNA, 19 nt, Homo sapiens
  misc_RNA (1)...(19): siRNA sense strand
gaaccuagaagaacuguau

SEQ ID NO: 1808806 - RNA, 19 nt, Homo sapiens
  misc_RNA (1)...(19): siRNA sense strand
gaaauugcauaucuuaagg

SEQ ID NO: 1808807 - RNA, 19 nt, Homo sapiens
  misc_RNA (1)...(19): siRNA sense strand
gcagcaagcuuucaaucau

SEQ ID NO: 1808808 - RNA, 19 nt, Homo sapiens
  misc_RNA (1)...(19): siRNA sense strand
cuaaucagcucacaaagau

SEQ ID NO: 1808809 - RNA, 19 nt, Homo sapiens
  misc_RNA (1)...(19): siRNA sense strand
uaagagaguuggaucuaga

SEQ ID NO: 1808810 - RNA, 19 nt, Homo sapiens
  misc_RNA (1)...(19): siRNA sense strand
uaccuucgcuuuaaucgua

SEQ ID NO: 1808811 - RNA, 19 nt, Homo sapiens
  misc_RNA (1)...(19): siRNA sense strand
caaaggagauuggaaacug

SEQ ID NO: 1808812 - RNA, 19 nt, Homo sapiens
  misc_RNA (1)...(19): siRNA sense strand
caucaucaaucaaagaguu

SEQ ID NO: 1808813 - RNA, 19 nt, Homo sapiens
  misc_RNA (1)...(19): siRNA sense strand
gaaggacaaucaguuaaca

SEQ ID NO: 1808814 - RNA, 19 nt, Homo sapiens
  misc_RNA (1)...(19): siRNA sense strand
gaagagaacaaauuggaau

SEQ ID NO: 1808815 - RNA, 19 nt, Homo sapiens
  misc_RNA (1)...(19): siRNA sense strand
ggaugugucuggucucguu

SEQ ID NO: 1808816 - RNA, 19 nt, Homo sapiens
  misc_RNA (1)...(19): siRNA sense strand
gcaaugcagaggugauuaa

SEQ ID NO: 1808817 - RNA, 19 nt, Homo sapiens
  misc_RNA (1)...(19): siRNA sense strand
gaacuguauuugaaugaca

SEQ ID NO: 1808818 - RNA, 19 nt, Homo sapiens
  misc_RNA (1)...(19): siRNA sense strand
ggagagaaccuacuuacuc

SEQ ID NO: 1808819 - RNA, 19 nt, Homo sapiens
  misc_RNA (1)...(19): siRNA sense strand
ccacuaaucagcucacaaa

SEQ ID NO: 1808820 - RNA, 19 nt, Homo sapiens
  misc_RNA (1)...(19): siRNA sense strand
gauuaaagagcucaacaaa

SEQ ID NO: 1808821 - RNA, 19 nt, Homo sapiens
  misc_RNA (1)...(19): siRNA sense strand
gaccuuagcuagaaauugc

SEQ ID NO: 1808822 - RNA, 19 nt, Homo sapiens
  misc_RNA (1)...(19): siRNA sense strand
gaacacaaucgaaucaaca

SEQ ID NO: 1808823 - RNA, 19 nt, Homo sapiens
  misc_RNA (1)...(19): siRNA sense strand
uaaccaaccuugacuugca

SEQ ID NO: 1808824 - RNA, 19 nt, Homo sapiens
  misc_RNA (1)...(19): siRNA sense strand
gaaccuacuuacucaccuu

SEQ ID NO: 1808825 - RNA, 19 nt, Homo sapiens
  misc_RNA (1)...(19): siRNA sense strand
uuacuaaucucacacaucu

SEQ ID NO: 1808826 - RNA, 19 nt, Homo sapiens
  misc_RNA (1)...(19): siRNA sense strand
gaaagaugccaaagaugga

SEQ ID NO: 1808827 - RNA, 19 nt, Homo sapiens
  misc_RNA (1)...(19): siRNA sense strand
agaaauugcuuccaguugu

SEQ ID NO: 1808828 - RNA, 19 nt, Homo sapiens
  misc_RNA (1)...(19): siRNA sense strand
cagugcacuugaagaauua

SEQ ID NO: 1808829 - RNA, 19 nt, Homo sapiens
  misc_RNA (1)...(19): siRNA sense strand
ugagagaaauuccuucagu

SEQ ID NO: 1808830 - RNA, 19 nt, Homo sapiens
  misc_RNA (1)...(19): siRNA sense strand
augcagaggugauuaaaga

SEQ ID NO: 1808831 - RNA, 19 nt, Homo sapiens
  misc_RNA (1)...(19): siRNA sense strand
ggaaagagagcaaagaaaa

SEQ ID NO: 1808832 - RNA, 19 nt, Homo sapiens
  misc_RNA (1)...(19): siRNA sense strand
gcaauacccagaucauuag

SEQ ID NO: 1808833 - RNA, 19 nt, Homo sapiens
  misc_RNA (1)...(19): siRNA sense strand
gcauuggucaccuuacuaa

SEQ ID NO: 1808834 - RNA, 19 nt, Homo sapiens
  misc_RNA (1)...(19): siRNA sense strand
uaugaaggacaaucaguua

SEQ ID NO: 1808835 - RNA, 19 nt, Homo sapiens
  misc_RNA (1)...(19): siRNA sense strand
gauaaccaaccuugacuug

SEQ ID NO: 1808836 - RNA, 19 nt, Homo sapiens
  misc_RNA (1)...(19): siRNA sense strand
gaaauuagucuugacaaac

SEQ ID NO: 1808837 - RNA, 19 nt, Homo sapiens
  misc_RNA (1)...(19): siRNA sense strand
cagcaagcuuucaaucaug

SEQ ID NO: 1808838 - RNA, 19 nt, Homo sapiens
  misc_RNA (1)...(19): siRNA sense strand
ggaacacaaucgaaucaac

SEQ ID NO: 1808839 - RNA, 19 nt, Homo sapiens
  misc_RNA (1)...(19): siRNA sense strand
uggaauccuugccaaauga

SEQ ID NO: 1808840 - RNA, 19 nt, Homo sapiens
  misc_RNA (1)...(19): siRNA sense strand
uccaagagaucuauacaca

SEQ ID NO: 1808841 - RNA, 19 nt, Homo sapiens
  misc_RNA (1)...(19): siRNA sense strand
ucuugagguucuuaucuua

SEQ ID NO: 1808842 - RNA, 19 nt, Homo sapiens
  misc_RNA (1)...(19): siRNA sense strand
agcaauacccagaucauua

SEQ ID NO: 1808843 - RNA, 19 nt, Homo sapiens
  misc_RNA (1)...(19): siRNA sense strand
gcacucugcagcaagcuuu

SEQ ID NO: 1808844 - RNA, 19 nt, Homo sapiens
  misc_RNA (1)...(19): siRNA sense strand
ggaaaccuuaggaaguuaa

SEQ ID NO: 1808845 - RNA, 19 nt, Homo sapiens
  misc_RNA (1)...(19): siRNA sense strand
ggacaaucaguuaacauca

SEQ ID NO: 1808846 - RNA, 19 nt, Homo sapiens
  misc_RNA (1)...(19): siRNA sense strand
guacacagauaaccaaccu

SEQ ID NO: 1808847 - RNA, 19 nt, Homo sapiens
  misc_RNA (1)...(19): siRNA sense strand
gggaaagagagcaaagaaa

SEQ ID NO: 1808848 - RNA, 19 nt, Homo sapiens
  misc_RNA (1)...(19): siRNA sense strand
agggaaagaugccaaagau

SEQ ID NO: 1808849 - RNA, 19 nt, Homo sapiens
  misc_RNA (1)...(19): siRNA sense strand
caacauggaacacaaucga

SEQ ID NO: 1808850 - RNA, 19 nt, Homo sapiens
  misc_RNA (1)...(19): siRNA sense strand
uguauaggcuggauucucu

SEQ ID NO: 1808851 - RNA, 19 nt, Homo sapiens
  misc_RNA (1)...(19): siRNA sense strand
cuagaagaacuguauuuga

SEQ ID NO: 1808852 - RNA, 19 nt, Homo sapiens
  misc_RNA (1)...(19): siRNA sense strand
uugccugacucucuugaua

SEQ ID NO: 1808853 - RNA, 19 nt, Homo sapiens
  misc_RNA (1)...(19): siRNA sense strand
uagaagagaacaaauugga

SEQ ID NO: 1808854 - RNA, 19 nt, Homo sapiens
  misc_RNA (1)...(19): siRNA sense strand
ccaguaugguagaauugaa

SEQ ID NO: 1808855 - RNA, 19 nt, Homo sapiens
  misc_RNA (1)...(19): siRNA sense strand
gcaaaaguauuaaguaagc

SEQ ID NO: 1808856 - RNA, 19 nt, Homo sapiens
  misc_RNA (1)...(19): siRNA sense strand
ugccaaagauggaaagaag

SEQ ID NO: 1808857 - RNA, 19 nt, Homo sapiens
  misc_RNA (1)...(19): siRNA sense strand
ccaaagauggaaagaagga

SEQ ID NO: 1808858 - RNA, 19 nt, Homo sapiens
  misc_RNA (1)...(19): siRNA sense strand
cugaauaguuugaccuuag

SEQ ID NO: 1808859 - RNA, 19 nt, Homo sapiens
  misc_RNA (1)...(19): siRNA sense strand
ggacuuauccaagagaucu

SEQ ID NO: 1808860 - RNA, 19 nt, Homo sapiens
  misc_RNA (1)...(19): siRNA sense strand
caaagggaaagaugccaaa

SEQ ID NO: 1808861 - RNA, 19 nt, Homo sapiens
  misc_RNA (1)...(19): siRNA sense strand
caucacuucccuuggauuu

SEQ ID NO: 1808862 - RNA, 19 nt, Homo sapiens
  misc_RNA (1)...(19): siRNA sense strand
uaguaaaucucaugacacu

SEQ ID NO: 1808863 - RNA, 19 nt, Homo sapiens
  misc_RNA (1)...(19): siRNA sense strand
ucguauaacuacuguggaa

SEQ ID NO: 1808864 - RNA, 19 nt, Homo sapiens
  misc_RNA (1)...(19): siRNA sense strand
uuggaaaccuuaggaaguu

SEQ ID NO: 1808865 - RNA, 19 nt, Homo sapiens
  misc_RNA (1)...(19): siRNA sense strand
ucuauucccucaacaugga

SEQ ID NO: 1808866 - RNA, 19 nt, Homo sapiens
  misc_RNA (1)...(19): siRNA sense strand
aaacaacuaccugcugaaa

SEQ ID NO: 1808867 - RNA, 19 nt, Homo sapiens
  misc_RNA (1)...(19): siRNA sense strand
cgucuuggucugagauaua

SEQ ID NO: 1808868 - RNA, 19 nt, Homo sapiens
  misc_RNA (1)...(19): siRNA sense strand
ucaaugcguuuggacuuau

SEQ ID NO: 1808869 - RNA, 19 nt, Homo sapiens
  misc_RNA (1)...(19): siRNA sense strand
uaaagaugcaggguccaua

SEQ ID NO: 1808870 - RNA, 19 nt, Homo sapiens
  misc_RNA (1)...(19): siRNA sense strand
agaguuggaucuagaagag

SEQ ID NO: 1808871 - RNA, 19 nt, Homo sapiens
  misc_RNA (1)...(19): siRNA sense strand
guuaagagaguuggaucua

SEQ ID NO: 1808872 - RNA, 19 nt, Homo sapiens
  misc_RNA (1)...(19): siRNA sense strand
ggaauuuucuccagagcaa

SEQ ID NO: 1808873 - RNA, 19 nt, Homo sapiens
  misc_RNA (1)...(19): siRNA sense strand
gucuuggucugagauauaa

SEQ ID NO: 1808874 - RNA, 19 nt, Homo sapiens
  misc_RNA (1)...(19): siRNA sense strand
aaaggagauuggaaacugu

SEQ ID NO: 1808875 - RNA, 19 nt, Homo sapiens
  misc_RNA (1)...(19): siRNA sense strand
gcagaggugggauguuuag

SEQ ID NO: 1808876 - RNA, 19 nt, Homo sapiens
  misc_RNA (1)...(19): siRNA sense strand
caacaaaugccgggaagag

SEQ ID NO: 1808877 - RNA, 19 nt, Homo sapiens
  misc_RNA (1)...(19): siRNA sense strand
agaacaaauuggaauccuu

SEQ ID NO: 1808878 - RNA, 19 nt, Homo sapiens
  misc_RNA (1)...(19): siRNA sense strand
uggaaaccuuaggaaguua

SEQ ID NO: 1808879 - RNA, 19 nt, Homo sapiens
  misc_RNA (1)...(19): siRNA sense strand
ucucaccacucuuuaccuu

SEQ ID NO: 1808880 - RNA, 19 nt, Homo sapiens
  misc_RNA (1)...(19): siRNA sense strand
ugaagaagcugcggaugcu

SEQ ID NO: 1808881 - RNA, 19 nt, Homo sapiens
  misc_RNA (1)...(19): siRNA sense strand
agaggugggauguuuagua

SEQ ID NO: 1808882 - RNA, 19 nt, Homo sapiens
  misc_RNA (1)...(19): siRNA sense strand
acaaaugccgggaagagaa

SEQ ID NO: 1808883 - RNA, 19 nt, Homo sapiens
  misc_RNA (1)...(19): siRNA sense strand
gaaaauucacuuaccaguu

SEQ ID NO: 1808884 - RNA, 19 nt, Homo sapiens
  misc_RNA (1)...(19): siRNA sense strand
ggccuucuuucaucauuca

SEQ ID NO: 1808885 - RNA, 19 nt, Homo sapiens
  misc_RNA (1)...(19): siRNA sense strand
ucuagaagagaacaaauug

SEQ ID NO: 1808886 - RNA, 19 nt, Homo sapiens
  misc_RNA (1)...(19): siRNA sense strand
gaaguuaagagaguuggau

SEQ ID NO: 1808887 - RNA, 19 nt, Homo sapiens
  misc_RNA (1)...(19): siRNA sense strand
aaacugagagaaauuccuu

SEQ ID NO: 1808888 - RNA, 19 nt, Homo sapiens
  misc_RNA (1)...(19): siRNA sense strand
uucaaugcguuuggacuua

SEQ ID NO: 1808889 - RNA, 19 nt, Homo sapiens
  misc_RNA (1)...(19): siRNA sense strand
gagaguuggaucuagaaga

SEQ ID NO: 1808890 - RNA, 19 nt, Homo sapiens
  misc_RNA (1)...(19): siRNA sense strand
gacaaucaguuaacaucac

SEQ ID NO: 1808891 - RNA, 19 nt, Homo sapiens
  misc_RNA (1)...(19): siRNA sense strand
ucaaaacucagcaugcuua

SEQ ID NO: 1808892 - RNA, 19 nt, Homo sapiens
  misc_RNA (1)...(19): siRNA sense strand
uaacuacuguggaaaagga

SEQ ID NO: 1808893 - RNA, 19 nt, Homo sapiens
  misc_RNA (1)...(19): siRNA sense strand
ggaucuagaagagaacaaa

SEQ ID NO: 1808894 - RNA, 19 nt, Homo sapiens
  misc_RNA (1)...(19): siRNA sense strand
gcaaagaaguacaauauga

SEQ ID NO: 1808895 - RNA, 19 nt, Homo sapiens
  misc_RNA (1)...(19): siRNA sense strand
caaaggaacuucugauuga

SEQ ID NO: 1808896 - RNA, 19 nt, Homo sapiens
  misc_RNA (1)...(19): siRNA sense strand
gaaaagaguuugaagauga

SEQ ID NO: 1808897 - RNA, 19 nt, Homo sapiens
  misc_RNA (1)...(19): siRNA sense strand
gaagguggaugacuaugaa

SEQ ID NO: 1808898 - RNA, 19 nt, Homo sapiens
  misc_RNA (1)...(19): siRNA sense strand
gaaacagaaucauuuggaa

SEQ ID NO: 1808899 - RNA, 19 nt, Homo sapiens
  misc_RNA (1)...(19): siRNA sense strand
guucuaaacuugucucuga

SEQ ID NO: 1808900 - RNA, 19 nt, Homo sapiens
  misc_RNA (1)...(19): siRNA sense strand
gaaacagagucuucauuca

SEQ ID NO: 1808901 - RNA, 19 nt, Homo sapiens
  misc_RNA (1)...(19): siRNA sense strand
gaagaacagucaaguaagg

SEQ ID NO: 1808902 - RNA, 19 nt, Homo sapiens
  misc_RNA (1)...(19): siRNA sense strand
caacaguggcugcccauua

SEQ ID NO: 1808903 - RNA, 19 nt, Homo sapiens
  misc_RNA (1)...(19): siRNA sense strand
gaacagucaaguaagguua

SEQ ID NO: 1808904 - RNA, 19 nt, Homo sapiens
  misc_RNA (1)...(19): siRNA sense strand
guacugauauugccgaugu

SEQ ID NO: 1808905 - RNA, 19 nt, Homo sapiens
  misc_RNA (1)...(19): siRNA sense strand
gcaaauaugacuucaacuu

SEQ ID NO: 1808906 - RNA, 19 nt, Homo sapiens
  misc_RNA (1)...(19): siRNA sense strand
gcaaguagacauagcaaga

SEQ ID NO: 1808907 - RNA, 19 nt, Homo sapiens
  misc_RNA (1)...(19): siRNA sense strand
ggaaagacacuccauccaa

SEQ ID NO: 1808908 - RNA, 19 nt, Homo sapiens
  misc_RNA (1)...(19): siRNA sense strand
caaaguacaugaagaacag

SEQ ID NO: 1808909 - RNA, 19 nt, Homo sapiens
  misc_RNA (1)...(19): siRNA sense strand
caucugcaguugucaguuu

SEQ ID NO: 1808910 - RNA, 19 nt, Homo sapiens
  misc_RNA (1)...(19): siRNA sense strand
ggauguuccugaauucuug

SEQ ID NO: 1808911 - RNA, 19 nt, Homo sapiens
  misc_RNA (1)...(19): siRNA sense strand
gagauuauccuuuauuugg

SEQ ID NO: 1808912 - RNA, 19 nt, Homo sapiens
  misc_RNA (1)...(19): siRNA sense strand
ggagauggcacucaaaaua

SEQ ID NO: 1808913 - RNA, 19 nt, Homo sapiens
  misc_RNA (1)...(19): siRNA sense strand
caaauaugacuucaacuug

SEQ ID NO: 1808914 - RNA, 19 nt, Homo sapiens
  misc_RNA (1)...(19): siRNA sense strand
ggagaagcguagucaaagu

SEQ ID NO: 1808915 - RNA, 19 nt, Homo sapiens
  misc_RNA (1)...(19): siRNA sense strand
gcagcaaaguacaugaaga

SEQ ID NO: 1808916 - RNA, 19 nt, Homo sapiens
  misc_RNA (1)...(19): siRNA sense strand
uaaaggaaaguucuaguug

SEQ ID NO: 1808917 - RNA, 19 nt, Homo sapiens
  misc_RNA (1)...(19): siRNA sense strand
guaaaggaaaguucuaguu

SEQ ID NO: 1808918 - RNA, 19 nt, Homo sapiens
  misc_RNA (1)...(19): siRNA sense strand
aaauagcacuugaggaugu

SEQ ID NO: 1808919 - RNA, 19 nt, Homo sapiens
  misc_RNA (1)...(19): siRNA sense strand
gaaugggaagcuacaagua

SEQ ID NO: 1808920 - RNA, 19 nt, Homo sapiens
  misc_RNA (1)...(19): siRNA sense strand
aaaggaaaguucuaguugu

SEQ ID NO: 1808921 - RNA, 19 nt, Homo sapiens
  misc_RNA (1)...(19): siRNA sense strand
aaacagagucuucauucaa

SEQ ID NO: 1808922 - RNA, 19 nt, Homo sapiens
  misc_RNA (1)...(19): siRNA sense strand
gaauuaacaagcuaguuug

SEQ ID NO: 1808923 - RNA, 19 nt, Homo sapiens
  misc_RNA (1)...(19): siRNA sense strand
ucaaaggaacuucugauug

SEQ ID NO: 1808924 - RNA, 19 nt, Homo sapiens
  misc_RNA (1)...(19): siRNA sense strand
gagaaaugcgugugagaga

SEQ ID NO: 1808925 - RNA, 19 nt, Homo sapiens
  misc_RNA (1)...(19): siRNA sense strand
gacaugaugcugagaaaug

SEQ ID NO: 1808926 - RNA, 19 nt, Homo sapiens
  misc_RNA (1)...(19): siRNA sense strand
agacauagcaagaaagaga

SEQ ID NO: 1808927 - RNA, 19 nt, Homo sapiens
  misc_RNA (1)...(19): siRNA sense strand
cugagaagguggaugacua

SEQ ID NO: 1808928 - RNA, 19 nt, Homo sapiens
  misc_RNA (1)...(19): siRNA sense strand
aagcuaguuuguacugaua

SEQ ID NO: 1808929 - RNA, 19 nt, Homo sapiens
  misc_RNA (1)...(19): siRNA sense strand
aaacugaggauguuccaaa

SEQ ID NO: 1808930 - RNA, 19 nt, Homo sapiens
  misc_RNA (1)...(19): siRNA sense strand
cagcaaaguacaugaagaa

SEQ ID NO: 1808931 - RNA, 19 nt, Homo sapiens
  misc_RNA (1)...(19): siRNA sense strand
ggagccauauccugcaaau

SEQ ID NO: 1808932 - RNA, 19 nt, Homo sapiens
  misc_RNA (1)...(19): siRNA sense strand
caaauuucgugacccacaa

SEQ ID NO: 1808933 - RNA, 19 nt, Homo sapiens
  misc_RNA (1)...(19): siRNA sense strand
ugguaaagguggagauuug

SEQ ID NO: 1808934 - RNA, 19 nt, Homo sapiens
  misc_RNA (1)...(19): siRNA sense strand
gaaggcaauucaaagaaaa

SEQ ID NO: 1808935 - RNA, 19 nt, Homo sapiens
  misc_RNA (1)...(19): siRNA sense strand
gcaaaguacaugaagaaca

SEQ ID NO: 1808936 - RNA, 19 nt, Homo sapiens
  misc_RNA (1)...(19): siRNA sense strand
gaacaugcagcaaaguaca

SEQ ID NO: 1808937 - RNA, 19 nt, Homo sapiens
  misc_RNA (1)...(19): siRNA sense strand
uggcaaagaaguacaauau

SEQ ID NO: 1808938 - RNA, 19 nt, Homo sapiens
  misc_RNA (1)...(19): siRNA sense strand
guacuacucccaauagcuu

SEQ ID NO: 1808939 - RNA, 19 nt, Homo sapiens
  misc_RNA (1)...(19): siRNA sense strand
ugagcaggcugacaugaug

SEQ ID NO: 1808940 - RNA, 19 nt, Homo sapiens
  misc_RNA (1)...(19): siRNA sense strand
acagagucuucauucaaua

SEQ ID NO: 1808941 - RNA, 19 nt, Homo sapiens
  misc_RNA (1)...(19): siRNA sense strand
gggaagcuacaaguauuua

SEQ ID NO: 1808942 - RNA, 19 nt, Homo sapiens
  misc_RNA (1)...(19): siRNA sense strand
guagacauagcaagaaaga

SEQ ID NO: 1808943 - RNA, 19 nt, Homo sapiens
  misc_RNA (1)...(19): siRNA sense strand
gcaaaugagaguucuaaac

SEQ ID NO: 1808944 - RNA, 19 nt, Homo sapiens
  misc_RNA (1)...(19): siRNA sense strand
ggagauuauccuuuauuug

SEQ ID NO: 1808945 - RNA, 19 nt, Homo sapiens
  misc_RNA (1)...(19): siRNA sense strand
gaagaaggacacagcucaa

SEQ ID NO: 1808946 - RNA, 19 nt, Homo sapiens
  misc_RNA (1)...(19): siRNA sense strand
aaagagaaacugaggaugu

SEQ ID NO: 1808947 - RNA, 19 nt, Homo sapiens
  misc_RNA (1)...(19): siRNA sense strand
gcuaguuuguacugauauu

SEQ ID NO: 1808948 - RNA, 19 nt, Homo sapiens
  misc_RNA (1)...(19): siRNA sense strand
caagcuaguuuguacugau

SEQ ID NO: 1808949 - RNA, 19 nt, Homo sapiens
  misc_RNA (1)...(19): siRNA sense strand
aagagaaacugaggauguu

SEQ ID NO: 1808950 - RNA, 19 nt, Homo sapiens
  misc_RNA (1)...(19): siRNA sense strand
ggaaguugguuuggagaag

SEQ ID NO: 1808951 - RNA, 19 nt, Homo sapiens
  misc_RNA (1)...(19): siRNA sense strand
gguguuugccuuugagaaa

SEQ ID NO: 1808952 - RNA, 19 nt, Homo sapiens
  misc_RNA (1)...(19): siRNA sense strand
uugggaaccuuaaguaaau

SEQ ID NO: 1808953 - RNA, 19 nt, Homo sapiens
  misc_RNA (1)...(19): siRNA sense strand
gcaaaagcgucagugaauu

SEQ ID NO: 1808954 - RNA, 19 nt, Homo sapiens
  misc_RNA (1)...(19): siRNA sense strand
ggaagguguuguggauguu

SEQ ID NO: 1808955 - RNA, 19 nt, Homo sapiens
  misc_RNA (1)...(19): siRNA sense strand
aaggaaaguucuaguugug

SEQ ID NO: 1808956 - RNA, 19 nt, Homo sapiens
  misc_RNA (1)...(19): siRNA sense strand
agccauauccugcaaauga

SEQ ID NO: 1808957 - RNA, 19 nt, Homo sapiens
  misc_RNA (1)...(19): siRNA sense strand
cugaauucuuggucuauuu

SEQ ID NO: 1808958 - RNA, 19 nt, Homo sapiens
  misc_RNA (1)...(19): siRNA sense strand
gaacuucugauugacaaau

SEQ ID NO: 1808959 - RNA, 19 nt, Homo sapiens
  misc_RNA (1)...(19): siRNA sense strand
gaaaagguacgacagaaga

SEQ ID NO: 1808960 - RNA, 19 nt, Homo sapiens
  misc_RNA (1)...(19): siRNA sense strand
gacacuccauccaagaaga

SEQ ID NO: 1808961 - RNA, 19 nt, Homo sapiens
  misc_RNA (1)...(19): siRNA sense strand
ugucugucauuacucauuu

SEQ ID NO: 1808962 - RNA, 19 nt, Homo sapiens
  misc_RNA (1)...(19): siRNA sense strand
ggaugacuaugaacaugca

SEQ ID NO: 1808963 - RNA, 19 nt, Homo sapiens
  misc_RNA (1)...(19): siRNA sense strand
gauaagacgccuugaagcu

SEQ ID NO: 1808964 - RNA, 19 nt, Homo sapiens
  misc_RNA (1)...(19): siRNA sense strand
gagaaaacuugauccugaa

SEQ ID NO: 1808965 - RNA, 19 nt, Homo sapiens
  misc_RNA (1)...(19): siRNA sense strand
gaaccuuaaguaaaucaga

SEQ ID NO: 1808966 - RNA, 19 nt, Homo sapiens
  misc_RNA (1)...(19): siRNA sense strand
caugaagaacagucaagua

SEQ ID NO: 1808967 - RNA, 19 nt, Homo sapiens
  misc_RNA (1)...(19): siRNA sense strand
ggaccugggaugugguaaa

SEQ ID NO: 1808968 - RNA, 19 nt, Homo sapiens
  misc_RNA (1)...(19): siRNA sense strand
aacagagucuucauucaau

SEQ ID NO: 1808969 - RNA, 19 nt, Homo sapiens
  misc_RNA (1)...(19): siRNA sense strand
aaguagacauagcaagaaa

SEQ ID NO: 1808970 - RNA, 19 nt, Homo sapiens
  misc_RNA (1)...(19): siRNA sense strand
gaccugggaugugguaaag

SEQ ID NO: 1808971 - RNA, 19 nt, Homo sapiens
  misc_RNA (1)...(19): siRNA sense strand
gagauggcacucaaaauaa

SEQ ID NO: 1808972 - RNA, 19 nt, Homo sapiens
  misc_RNA (1)...(19): siRNA sense strand
augaagaacagucaaguaa

SEQ ID NO: 1808973 - RNA, 19 nt, Homo sapiens
  misc_RNA (1)...(19): siRNA sense strand
caaguagacauagcaagaa

SEQ ID NO: 1808974 - RNA, 19 nt, Homo sapiens
  misc_RNA (1)...(19): siRNA sense strand
aggaagaauuaacaagcua

SEQ ID NO: 1808975 - RNA, 19 nt, Homo sapiens
  misc_RNA (1)...(19): siRNA sense strand
aauaugacuucaacuugga

SEQ ID NO: 1808976 - RNA, 19 nt, Homo sapiens
  misc_RNA (1)...(19): siRNA sense strand
ucagaaacagaaucauuug

SEQ ID NO: 1808977 - RNA, 19 nt, Homo sapiens
  misc_RNA (1)...(19): siRNA sense strand
guugucaguuugucuguca

SEQ ID NO: 1808978 - RNA, 19 nt, Homo sapiens
  misc_RNA (1)...(19): siRNA sense strand
gagaaaagaguuugaagau

SEQ ID NO: 1808979 - RNA, 19 nt, Homo sapiens
  misc_RNA (1)...(19): siRNA sense strand
uggaagguguuguggaugu

SEQ ID NO: 1808980 - RNA, 19 nt, Homo sapiens
  misc_RNA (1)...(19): siRNA sense strand
gucaguuugucugucauua

SEQ ID NO: 1808981 - RNA, 19 nt, Homo sapiens
  misc_RNA (1)...(19): siRNA sense strand
gaugaucuuguaaaggaaa

SEQ ID NO: 1808982 - RNA, 19 nt, Homo sapiens
  misc_RNA (1)...(19): siRNA sense strand
agaaacagaaucauuugga

SEQ ID NO: 1808983 - RNA, 19 nt, Homo sapiens
  misc_RNA (1)...(19): siRNA sense strand
cguagucaaagucguauuu

SEQ ID NO: 1808984 - RNA, 19 nt, Homo sapiens
  misc_RNA (1)...(19): siRNA sense strand
gaaggacacagcucaacag

SEQ ID NO: 1808985 - RNA, 19 nt, Homo sapiens
  misc_RNA (1)...(19): siRNA sense strand
cugcaaauaugacuucaac

SEQ ID NO: 1808986 - RNA, 19 nt, Homo sapiens
  misc_RNA (1)...(19): siRNA sense strand
gagaagcguagucaaaguc

SEQ ID NO: 1808987 - RNA, 19 nt, Homo sapiens
  misc_RNA (1)...(19): siRNA sense strand
gcagcgguaugaggacaug

SEQ ID NO: 1808988 - RNA, 19 nt, Homo sapiens
  misc_RNA (1)...(19): siRNA sense strand
gcagaagaauaugaaaaga

SEQ ID NO: 1808989 - RNA, 19 nt, Homo sapiens
  misc_RNA (1)...(19): siRNA sense strand
gaaaugcgugugagagacu

SEQ ID NO: 1808990 - RNA, 19 nt, Homo sapiens
  misc_RNA (1)...(19): siRNA sense strand
ucagaagaaaggagauuau

SEQ ID NO: 1808991 - RNA, 19 nt, Homo sapiens
  misc_RNA (1)...(19): siRNA sense strand
guauuuacuugguguuugc

SEQ ID NO: 1808992 - RNA, 19 nt, Homo sapiens
  misc_RNA (1)...(19): siRNA sense strand
guggaugacuaugaacaug

SEQ ID NO: 1808993 - RNA, 19 nt, Homo sapiens
  misc_RNA (1)...(19): siRNA sense strand
gaaauggcaaagaaguaca

SEQ ID NO: 1808994 - RNA, 19 nt, Homo sapiens
  misc_RNA (1)...(19): siRNA sense strand
caaaagagcugaaacagua

SEQ ID NO: 1808995 - RNA, 19 nt, Homo sapiens
  misc_RNA (1)...(19): siRNA sense strand
cuaaagagccuaaagguua

SEQ ID NO: 1808996 - RNA, 19 nt, Homo sapiens
  misc_RNA (1)...(19): siRNA sense strand
gaaacaguaugacaacaaa

SEQ ID NO: 1808997 - RNA, 19 nt, Homo sapiens
  misc_RNA (1)...(19): siRNA sense strand
ccaaggagaugcuguuuga

SEQ ID NO: 1808998 - RNA, 19 nt, Homo sapiens
  misc_RNA (1)...(19): siRNA sense strand
gcagaagugucaucaauuc

SEQ ID NO: 1808999 - RNA, 19 nt, Homo sapiens
  misc_RNA (1)...(19): siRNA sense strand
ugaaauggauggacuuauu

SEQ ID NO: 1809000 - RNA, 19 nt, Homo sapiens
  misc_RNA (1)...(19): siRNA sense strand
ccagcaugcucucaaauua

SEQ ID NO: 1809001 - RNA, 19 nt, Homo sapiens
  misc_RNA (1)...(19): siRNA sense strand
gaaagcuacuugaaggaaa

SEQ ID NO: 1809002 - RNA, 19 nt, Homo sapiens
  misc_RNA (1)...(19): siRNA sense strand
uaaagagccuaaagguuaa

SEQ ID NO: 1809003 - RNA, 19 nt, Homo sapiens
  misc_RNA (1)...(19): siRNA sense strand
cuacaagggugauuauuug

SEQ ID NO: 1809004 - RNA, 19 nt, Homo sapiens
  misc_RNA (1)...(19): siRNA sense strand
ccaaagaagugagccauga

SEQ ID NO: 1809005 - RNA, 19 nt, Homo sapiens
  misc_RNA (1)...(19): siRNA sense strand
gaauuuccauuucguaaag

SEQ ID NO: 1809006 - RNA, 19 nt, Homo sapiens
  misc_RNA (1)...(19): siRNA sense strand
guaaagaucuucguaugca

SEQ ID NO: 1809007 - RNA, 19 nt, Homo sapiens
  misc_RNA (1)...(19): siRNA sense strand
cagcagaagugucaucaau

SEQ ID NO: 1809008 - RNA, 19 nt, Homo sapiens
  misc_RNA (1)...(19): siRNA sense strand
ugaccgaaaugacauagaa

SEQ ID NO: 1809009 - RNA, 19 nt, Homo sapiens
  misc_RNA (1)...(19): siRNA sense strand
gaagugucaucaauucugu

SEQ ID NO: 1809010 - RNA, 19 nt, Homo sapiens
  misc_RNA (1)...(19): siRNA sense strand
gcacugguuuccucauaug

SEQ ID NO: 1809011 - RNA, 19 nt, Homo sapiens
  misc_RNA (1)...(19): siRNA sense strand
auacaaaccuggucgaugu

SEQ ID NO: 1809012 - RNA, 19 nt, Homo sapiens
  misc_RNA (1)...(19): siRNA sense strand
ggaagguguuacuguuaaa

SEQ ID NO: 1809013 - RNA, 19 nt, Homo sapiens
  misc_RNA (1)...(19): siRNA sense strand
gaugauuauugacagagua

SEQ ID NO: 1809014 - RNA, 19 nt, Homo sapiens
  misc_RNA (1)...(19): siRNA sense strand
ugacaaauacuucaagguu

SEQ ID NO: 1809015 - RNA, 19 nt, Homo sapiens
  misc_RNA (1)...(19): siRNA sense strand
agacugggcucauugacaa

SEQ ID NO: 1809016 - RNA, 19 nt, Homo sapiens
  misc_RNA (1)...(19): siRNA sense strand
gagaauacugagaccuuua

SEQ ID NO: 1809017 - RNA, 19 nt, Homo sapiens
  misc_RNA (1)...(19): siRNA sense strand
gcucucaaauuaccuaaag

SEQ ID NO: 1809018 - RNA, 19 nt, Homo sapiens
  misc_RNA (1)...(19): siRNA sense strand
gaacccgggucaagugcuu

SEQ ID NO: 1809019 - RNA, 19 nt, Homo sapiens
  misc_RNA (1)...(19): siRNA sense strand
ugacaucuguacuucaaga

SEQ ID NO: 1809020 - RNA, 19 nt, Homo sapiens
  misc_RNA (1)...(19): siRNA sense strand
ugugagcgguuuaaugaaa

SEQ ID NO: 1809021 - RNA, 19 nt, Homo sapiens
  misc_RNA (1)...(19): siRNA sense strand
gaacgagaaauuauaaguc

SEQ ID NO: 1809022 - RNA, 19 nt, Homo sapiens
  misc_RNA (1)...(19): siRNA sense strand
uaacaacacaaccaaaguu

SEQ ID NO: 1809023 - RNA, 19 nt, Homo sapiens
  misc_RNA (1)...(19): siRNA sense strand
ccaccucuauugccagauu

SEQ ID NO: 1809024 - RNA, 19 nt, Homo sapiens
  misc_RNA (1)...(19): siRNA sense strand
ggaccaagauaugauaguc

SEQ ID NO: 1809025 - RNA, 19 nt, Homo sapiens
  misc_RNA (1)...(19): siRNA sense strand
uggaagguguuacuguuaa

SEQ ID NO: 1809026 - RNA, 19 nt, Homo sapiens
  misc_RNA (1)...(19): siRNA sense strand
ggaugaggauggaaagaag

SEQ ID NO: 1809027 - RNA, 19 nt, Homo sapiens
  misc_RNA (1)...(19): siRNA sense strand
gaacaacagcugggucuuc

SEQ ID NO: 1809028 - RNA, 19 nt, Homo sapiens
  misc_RNA (1)...(19): siRNA sense strand
uauaaguccucgacacgaa

SEQ ID NO: 1809029 - RNA, 19 nt, Homo sapiens
  misc_RNA (1)...(19): siRNA sense strand
caagggugauuauuugaag

SEQ ID NO: 1809030 - RNA, 19 nt, Homo sapiens
  misc_RNA (1)...(19): siRNA sense strand
ugauagagacaauucagua

SEQ ID NO: 1809031 - RNA, 19 nt, Homo sapiens
  misc_RNA (1)...(19): siRNA sense strand
uaggagagguacagcagaa

SEQ ID NO: 1809032 - RNA, 19 nt, Homo sapiens
  misc_RNA (1)...(19): siRNA sense strand
uaacucaaguaacaacaca

SEQ ID NO: 1809033 - RNA, 19 nt, Homo sapiens
  misc_RNA (1)...(19): siRNA sense strand
gaaugcaaauuugagaaca

SEQ ID NO: 1809034 - RNA, 19 nt, Homo sapiens
  misc_RNA (1)...(19): siRNA sense strand
ugagaauacugagaccuuu

SEQ ID NO: 1809035 - RNA, 19 nt, Homo sapiens
  misc_RNA (1)...(19): siRNA sense strand
gaaaagaacgguuaaaacu

SEQ ID NO: 1809036 - RNA, 19 nt, Homo sapiens
  misc_RNA (1)...(19): siRNA sense strand
gauagagacaauucaguau

SEQ ID NO: 1809037 - RNA, 19 nt, Homo sapiens
  misc_RNA (1)...(19): siRNA sense strand
cugaagccauacaaaguaa

SEQ ID NO: 1809038 - RNA, 19 nt, Homo sapiens
  misc_RNA (1)...(19): siRNA sense strand
gcacaaaucaaggugacaa

SEQ ID NO: 1809039 - RNA, 19 nt, Homo sapiens
  misc_RNA (1)...(19): siRNA sense strand
uguuggagguuaugaaaga

SEQ ID NO: 1809040 - RNA, 19 nt, Homo sapiens
  misc_RNA (1)...(19): siRNA sense strand
gaaaauggauuggaguauc

SEQ ID NO: 1809041 - RNA, 19 nt, Homo sapiens
  misc_RNA (1)...(19): siRNA sense strand
guguauagaacgagaaauu

SEQ ID NO: 1809042 - RNA, 19 nt, Homo sapiens
  misc_RNA (1)...(19): siRNA sense strand
cgagaugauuauugacaga

SEQ ID NO: 1809043 - RNA, 19 nt, Homo sapiens
  misc_RNA (1)...(19): siRNA sense strand
gaucuucguaugcauuuau

SEQ ID NO: 1809044 - RNA, 19 nt, Homo sapiens
  misc_RNA (1)...(19): siRNA sense strand
ugugugagcgguuuaauga

SEQ ID NO: 1809045 - RNA, 19 nt, Homo sapiens
  misc_RNA (1)...(19): siRNA sense strand
ggaaccauuuagcgucaga

SEQ ID NO: 1809046 - RNA, 19 nt, Homo sapiens
  misc_RNA (1)...(19): siRNA sense strand
ucgcacugguuuccucaua

SEQ ID NO: 1809047 - RNA, 19 nt, Homo sapiens
  misc_RNA (1)...(19): siRNA sense strand
acaaauacuucaagguucu

SEQ ID NO: 1809048 - RNA, 19 nt, Homo sapiens
  misc_RNA (1)...(19): siRNA sense strand
gaccacgcccuuuaaccua

SEQ ID NO: 1809049 - RNA, 19 nt, Homo sapiens
  misc_RNA (1)...(19): siRNA sense strand
gagaugcuguuugaguuca

SEQ ID NO: 1809050 - RNA, 19 nt, Homo sapiens
  misc_RNA (1)...(19): siRNA sense strand
caaacccugucaccaagga

SEQ ID NO: 1809051 - RNA, 19 nt, Homo sapiens
  misc_RNA (1)...(19): siRNA sense strand
caacagcugggucuucaug

SEQ ID NO: 1809052 - RNA, 19 nt, Homo sapiens
  misc_RNA (1)...(19): siRNA sense strand
gaauguuggccuccuguau

SEQ ID NO: 1809053 - RNA, 19 nt, Homo sapiens
  misc_RNA (1)...(19): siRNA sense strand
ccuggucgaugugaugaua

SEQ ID NO: 1809054 - RNA, 19 nt, Homo sapiens
  misc_RNA (1)...(19): siRNA sense strand
cgucagaaauaagccguuu

SEQ ID NO: 1809055 - RNA, 19 nt, Homo sapiens
  misc_RNA (1)...(19): siRNA sense strand
ugaggaugaugaagacgaa

SEQ ID NO: 1809056 - RNA, 19 nt, Homo sapiens
  misc_RNA (1)...(19): siRNA sense strand
ucuacaagggugauuauuu

SEQ ID NO: 1809057 - RNA, 19 nt, Homo sapiens
  misc_RNA (1)...(19): siRNA sense strand
caucuguacuucaagaaag

SEQ ID NO: 1809058 - RNA, 19 nt, Homo sapiens
  misc_RNA (1)...(19): siRNA sense strand
uaucaaauacucucuugga

SEQ ID NO: 1809059 - RNA, 19 nt, Homo sapiens
  misc_RNA (1)...(19): siRNA sense strand
guugauugauggcacaaau

SEQ ID NO: 1809060 - RNA, 19 nt, Homo sapiens
  misc_RNA (1)...(19): siRNA sense strand
ccugaagccauacaaagua

SEQ ID NO: 1809061 - RNA, 19 nt, Homo sapiens
  misc_RNA (1)...(19): siRNA sense strand
caacacaaccaaaguuagg

SEQ ID NO: 1809062 - RNA, 19 nt, Homo sapiens
  misc_RNA (1)...(19): siRNA sense strand
caaagaagugagccaugaa

SEQ ID NO: 1809063 - RNA, 19 nt, Homo sapiens
  misc_RNA (1)...(19): siRNA sense strand
acuuauagguguucauugu

SEQ ID NO: 1809064 - RNA, 19 nt, Homo sapiens
  misc_RNA (1)...(19): siRNA sense strand
aaagcuacuugaaggaaau

SEQ ID NO: 1809065 - RNA, 19 nt, Homo sapiens
  misc_RNA (1)...(19): siRNA sense strand
ucguaaagaucuucguaug

SEQ ID NO: 1809066 - RNA, 19 nt, Homo sapiens
  misc_RNA (1)...(19): siRNA sense strand
gguguucauuguacucaug

SEQ ID NO: 1809067 - RNA, 19 nt, Homo sapiens
  misc_RNA (1)...(19): siRNA sense strand
gcgguuuaaugaaagaaau

SEQ ID NO: 1809068 - RNA, 19 nt, Homo sapiens
  misc_RNA (1)...(19): siRNA sense strand
ugaaacaguaugacaacaa

SEQ ID NO: 1809069 - RNA, 19 nt, Homo sapiens
  misc_RNA (1)...(19): siRNA sense strand
ucaaguugcugaagaaaau

SEQ ID NO: 1809070 - RNA, 19 nt, Homo sapiens
  misc_RNA (1)...(19): siRNA sense strand
caaguaacaacacaaccaa

SEQ ID NO: 1809071 - RNA, 19 nt, Homo sapiens
  misc_RNA (1)...(19): siRNA sense strand
aaagguguaacucaaguaa

SEQ ID NO: 1809072 - RNA, 19 nt, Homo sapiens
  misc_RNA (1)...(19): siRNA sense strand
gagaaaagaacgguuaaaa

SEQ ID NO: 1809073 - RNA, 19 nt, Homo sapiens
  misc_RNA (1)...(19): siRNA sense strand
ggaaagaaggaaucagaac

SEQ ID NO: 1809074 - RNA, 19 nt, Homo sapiens
  misc_RNA (1)...(19): siRNA sense strand
gagcugaaacaguaugaca

SEQ ID NO: 1809075 - RNA, 19 nt, Homo sapiens
  misc_RNA (1)...(19): siRNA sense strand
aacaacacaaccaaaguua

SEQ ID NO: 1809076 - RNA, 19 nt, Homo sapiens
  misc_RNA (1)...(19): siRNA sense strand
aggagaugcuguuugaguu

SEQ ID NO: 1809077 - RNA, 19 nt, Homo sapiens
  misc_RNA (1)...(19): siRNA sense strand
aaagaagugagccaugaaa

SEQ ID NO: 1809078 - RNA, 19 nt, Homo sapiens
  misc_RNA (1)...(19): siRNA sense strand
caaaguaagcuggaaagca

SEQ ID NO: 1809079 - RNA, 19 nt, Homo sapiens
  misc_RNA (1)...(19): siRNA sense strand
ggauuggaguaucgaagca

SEQ ID NO: 1809080 - RNA, 19 nt, Homo sapiens
  misc_RNA (1)...(19): siRNA sense strand
ggagaugcuguuugaguuc

SEQ ID NO: 1809081 - RNA, 19 nt, Homo sapiens
  misc_RNA (1)...(19): siRNA sense strand
ucucaaacccugucaccaa

SEQ ID NO: 1809082 - RNA, 19 nt, Homo sapiens
  misc_RNA (1)...(19): siRNA sense strand
caugaaauggauggacuua

SEQ ID NO: 1809083 - RNA, 19 nt, Homo sapiens
  misc_RNA (1)...(19): siRNA sense strand
uuaaagguguaacucaagu

SEQ ID NO: 1809084 - RNA, 19 nt, Homo sapiens
  misc_RNA (1)...(19): siRNA sense strand
cuuggaagguguuacuguu

SEQ ID NO: 1809085 - RNA, 19 nt, Homo sapiens
  misc_RNA (1)...(19): siRNA sense strand
aaugggaggagaaggguua

SEQ ID NO: 1809086 - RNA, 19 nt, Homo sapiens
  misc_RNA (1)...(19): siRNA sense strand
caaaacacaggaaccauuu

SEQ ID NO: 1809087 - RNA, 19 nt, Homo sapiens
  misc_RNA (1)...(19): siRNA sense strand
ugauugauggcacaaauga

SEQ ID NO: 1809088 - RNA, 19 nt, Homo sapiens
  misc_RNA (1)...(19): siRNA sense strand
uagucaaguugcugaagaa

SEQ ID NO: 1809089 - RNA, 19 nt, Homo sapiens
  misc_RNA (1)...(19): siRNA sense strand
gugauuauuugaaggaacu

SEQ ID NO: 1809090 - RNA, 19 nt, Homo sapiens
  misc_RNA (1)...(19): siRNA sense strand
ggacagaagcgaaaacauc

SEQ ID NO: 1809091 - RNA, 19 nt, Homo sapiens
  misc_RNA (1)...(19): siRNA sense strand
agaagugagccaugaaaug

SEQ ID NO: 1809092 - RNA, 19 nt, Homo sapiens
  misc_RNA (1)...(19): siRNA sense strand
guaacaacacaaccaaagu

SEQ ID NO: 1809093 - RNA, 19 nt, Homo sapiens
  misc_RNA (1)...(19): siRNA sense strand
uaaagguguaacucaagua

SEQ ID NO: 1809094 - RNA, 19 nt, Homo sapiens
  misc_RNA (1)...(19): siRNA sense strand
ggacaaguaccgaguaagg

SEQ ID NO: 1809095 - RNA, 19 nt, Homo sapiens
  misc_RNA (1)...(19): siRNA sense strand
gcaacuaccgcgagcucua

SEQ ID NO: 1809096 - RNA, 19 nt, Homo sapiens
  misc_RNA (1)...(19): siRNA sense strand
guggacaaguaccgaguaa

SEQ ID NO: 1809097 - RNA, 19 nt, Homo sapiens
  misc_RNA (1)...(19): siRNA sense strand
gcugagaagcugcguggaa

SEQ ID NO: 1809098 - RNA, 19 nt, Homo sapiens
  misc_RNA (1)...(19): siRNA sense strand
ggaagagagcggcgaugug

SEQ ID NO: 1809099 - RNA, 19 nt, Homo sapiens
  misc_RNA (1)...(19): siRNA sense strand
cagcugcccaucuugaauu

SEQ ID NO: 1809100 - RNA, 19 nt, Homo sapiens
  misc_RNA (1)...(19): siRNA sense strand
ugggaccuguggacaagua

SEQ ID NO: 1809101 - RNA, 19 nt, Homo sapiens
  misc_RNA (1)...(19): siRNA sense strand
gcucuaucauauccuggaa

SEQ ID NO: 1809102 - RNA, 19 nt, Homo sapiens
  misc_RNA (1)...(19): siRNA sense strand
uaugugagacccuggaaga

SEQ ID NO: 1809103 - RNA, 19 nt, Homo sapiens
  misc_RNA (1)...(19): siRNA sense strand
caacuaccgcgagcucuau

SEQ ID NO: 1809104 - RNA, 19 nt, Homo sapiens
  misc_RNA (1)...(19): siRNA sense strand
acaaguaccgaguaaggaa

SEQ ID NO: 1809105 - RNA, 19 nt, Homo sapiens
  misc_RNA (1)...(19): siRNA sense strand
accgcgagcucuaucauau

SEQ ID NO: 1809106 - RNA, 19 nt, Homo sapiens
  misc_RNA (1)...(19): siRNA sense strand
cgacagcgagugcgacauc

SEQ ID NO: 1809107 - RNA, 19 nt, Homo sapiens
  misc_RNA (1)...(19): siRNA sense strand
cagcgagugcgacaucuga

SEQ ID NO: 1809108 - RNA, 19 nt, Homo sapiens
  misc_RNA (1)...(19): siRNA sense strand
gacaaguaccgaguaagga

SEQ ID NO: 1809109 - RNA, 19 nt, Homo sapiens
  misc_RNA (1)...(19): siRNA sense strand
caagaaugagucggugcua

SEQ ID NO: 1809110 - RNA, 19 nt, Homo sapiens
  misc_RNA (1)...(19): siRNA sense strand
cuacgcaggugggcaacug

SEQ ID NO: 1809111 - RNA, 19 nt, Homo sapiens
  misc_RNA (1)...(19): siRNA sense strand
ggacggcgaacagaagaca

SEQ ID NO: 1809112 - RNA, 19 nt, Homo sapiens
  misc_RNA (1)...(19): siRNA sense strand
gugggcaacugguucaaaa

SEQ ID NO: 1809113 - RNA, 19 nt, Homo sapiens
  misc_RNA (1)...(19): siRNA sense strand
gguaccugcaggauccaua

SEQ ID NO: 1809114 - RNA, 19 nt, Homo sapiens
  misc_RNA (1)...(19): siRNA sense strand
ugcaggauccauacccuaa

SEQ ID NO: 1809115 - RNA, 19 nt, Homo sapiens
  misc_RNA (1)...(19): siRNA sense strand
aagcauagauggagacaga

SEQ ID NO: 1809116 - RNA, 19 nt, Homo sapiens
  misc_RNA (1)...(19): siRNA sense strand
caagguagaucagcucuuc

SEQ ID NO: 1809117 - RNA, 19 nt, Homo sapiens
  misc_RNA (1)...(19): siRNA sense strand
guucugggccuaagucuaa

SEQ ID NO: 1809118 - RNA, 19 nt, Homo sapiens
  misc_RNA (1)...(19): siRNA sense strand
gaacugggucuacaagauc

SEQ ID NO: 1809119 - RNA, 19 nt, Homo sapiens
  misc_RNA (1)...(19): siRNA sense strand
uaaagccgcugcccucucu

SEQ ID NO: 1809120 - RNA, 19 nt, Homo sapiens
  misc_RNA (1)...(19): siRNA sense strand
gcagugacgcugacagaug

SEQ ID NO: 1809121 - RNA, 19 nt, Homo sapiens
  misc_RNA (1)...(19): siRNA sense strand
cgagagguaucggucauga

SEQ ID NO: 1809122 - RNA, 19 nt, Homo sapiens
  misc_RNA (1)...(19): siRNA sense strand
gcauagauggagacagaaa

SEQ ID NO: 1809123 - RNA, 19 nt, Homo sapiens
  misc_RNA (1)...(19): siRNA sense strand
gaguugcagaggaagauua

SEQ ID NO: 1809124 - RNA, 19 nt, Homo sapiens
  misc_RNA (1)...(19): siRNA sense strand
ggcgcauccuggagcauua

SEQ ID NO: 1809125 - RNA, 19 nt, Homo sapiens
  misc_RNA (1)...(19): siRNA sense strand
agaacugggucuacaagau

SEQ ID NO: 1809126 - RNA, 19 nt, Homo sapiens
  misc_RNA (1)...(19): siRNA sense strand
ggacuuccugcgagaggua

SEQ ID NO: 1809127 - RNA, 19 nt, Homo sapiens
  misc_RNA (1)...(19): siRNA sense strand
ggagaucaacacccaggaa

SEQ ID NO: 1809128 - RNA, 19 nt, Homo sapiens
  misc_RNA (1)...(19): siRNA sense strand
ccagggcacuucgacuuug

SEQ ID NO: 1809129 - RNA, 19 nt, Homo sapiens
  misc_RNA (1)...(19): siRNA sense strand
ucggaagcauguuguguga

SEQ ID NO: 1809130 - RNA, 19 nt, Homo sapiens
  misc_RNA (1)...(19): siRNA sense strand
ccaucaagguggcugacuu

SEQ ID NO: 1809131 - RNA, 19 nt, Homo sapiens
  misc_RNA (1)...(19): siRNA sense strand
gaucaacacccaggaagca

SEQ ID NO: 1809132 - RNA, 19 nt, Homo sapiens
  misc_RNA (1)...(19): siRNA sense strand
gagaggaugaaaggcauuu

SEQ ID NO: 1809133 - RNA, 19 nt, Homo sapiens
  misc_RNA (1)...(19): siRNA sense strand
gggccuaagucuaagaacu

SEQ ID NO: 1809134 - RNA, 19 nt, Homo sapiens
  misc_RNA (1)...(19): siRNA sense strand
acagaaagaaggcaaaucu

SEQ ID NO: 1809135 - RNA, 19 nt, Homo sapiens
  misc_RNA (1)...(19): siRNA sense strand
ucuaagaacugggucuaca

SEQ ID NO: 1809136 - RNA, 19 nt, Homo sapiens
  misc_RNA (1)...(19): siRNA sense strand
ucaacacccaggaagcaua

SEQ ID NO: 1809137 - RNA, 19 nt, Homo sapiens
  misc_RNA (1)...(19): siRNA sense strand
gccagggcacuucgacuuu

SEQ ID NO: 1809138 - RNA, 19 nt, Homo sapiens
  misc_RNA (1)...(19): siRNA sense strand
agagguaucggucaugaug

SEQ ID NO: 1809139 - RNA, 19 nt, Homo sapiens
  misc_RNA (1)...(19): siRNA sense strand
caacacccaggaagcauag

SEQ ID NO: 1809140 - RNA, 19 nt, Homo sapiens
  misc_RNA (1)...(19): siRNA sense strand
cuagaggagcuuaauguca

SEQ ID NO: 1809141 - RNA, 19 nt, Homo sapiens
  misc_RNA (1)...(19): siRNA sense strand
ggccuaagucuaagaacug

SEQ ID NO: 1809142 - RNA, 19 nt, Homo sapiens
  misc_RNA (1)...(19): siRNA sense strand
gagacagaaagaaggcaaa

SEQ ID NO: 1809143 - RNA, 19 nt, Homo sapiens
  misc_RNA (1)...(19): siRNA sense strand
ggccagggcacuucgacuu

SEQ ID NO: 1809144 - RNA, 19 nt, Homo sapiens
  misc_RNA (1)...(19): siRNA sense strand
gaauggucgcaccuucaaa

SEQ ID NO: 1809145 - RNA, 19 nt, Homo sapiens
  misc_RNA (1)...(19): siRNA sense strand
gggcacuucgacuuuguaa

SEQ ID NO: 1809146 - RNA, 19 nt, Homo sapiens
  misc_RNA (1)...(19): siRNA sense strand
ccucggacguguggauguu

SEQ ID NO: 1809147 - RNA, 19 nt, Homo sapiens
  misc_RNA (1)...(19): siRNA sense strand
ggagaggaugaaaggcauu

SEQ ID NO: 1809148 - RNA, 19 nt, Homo sapiens
  misc_RNA (1)...(19): siRNA sense strand
ccuccacgcccaccuuuau

SEQ ID NO: 1809149 - RNA, 19 nt, Homo sapiens
  misc_RNA (1)...(19): siRNA sense strand
caucaagguggcugacuuc

SEQ ID NO: 1809150 - RNA, 19 nt, Homo sapiens
  misc_RNA (1)...(19): siRNA sense strand
cagaauggucgcaccuuca

SEQ ID NO: 1809151 - RNA, 19 nt, Homo sapiens
  misc_RNA (1)...(19): siRNA sense strand
uaagaacugggucuacaag

SEQ ID NO: 1809152 - RNA, 19 nt, Homo sapiens
  misc_RNA (1)...(19): siRNA sense strand
cuaagaacugggucuacaa

SEQ ID NO: 1809153 - RNA, 19 nt, Homo sapiens
  misc_RNA (1)...(19): siRNA sense strand
cuuguccgauccugaguug

SEQ ID NO: 1809154 - RNA, 19 nt, Homo sapiens
  misc_RNA (1)...(19): siRNA sense strand
cagggcacuucgacuuugu

SEQ ID NO: 1809155 - RNA, 19 nt, Homo sapiens
  misc_RNA (1)...(19): siRNA sense strand
gggugacgcugugggagau

SEQ ID NO: 1809156 - RNA, 19 nt, Homo sapiens
  misc_RNA (1)...(19): siRNA sense strand
gcuccgggacauccaguug

SEQ ID NO: 1809157 - RNA, 19 nt, Homo sapiens
  misc_RNA (1)...(19): siRNA sense strand
gaucccagagggugcuguu

SEQ ID NO: 1809158 - RNA, 19 nt, Homo sapiens
  misc_RNA (1)...(19): siRNA sense strand
agaauggucgcaccuucaa

SEQ ID NO: 1809159 - RNA, 19 nt, Homo sapiens
  misc_RNA (1)...(19): siRNA sense strand
gaucuuagcuccaaucuug

SEQ ID NO: 1809160 - RNA, 19 nt, Homo sapiens
  misc_RNA (1)...(19): siRNA sense strand
gaaaugggaccuauaguua

SEQ ID NO: 1809161 - RNA, 19 nt, Homo sapiens
  misc_RNA (1)...(19): siRNA sense strand
gcugugaacucugaucuua

SEQ ID NO: 1809162 - RNA, 19 nt, Homo sapiens
  misc_RNA (1)...(19): siRNA sense strand
gagaagcggugacacgauu

SEQ ID NO: 1809163 - RNA, 19 nt, Homo sapiens
  misc_RNA (1)...(19): siRNA sense strand
aaagagaacuuacaaagca

SEQ ID NO: 1809164 - RNA, 19 nt, Homo sapiens
  misc_RNA (1)...(19): siRNA sense strand
gaagaaagaaugcaaaguc

SEQ ID NO: 1809165 - RNA, 19 nt, Homo sapiens
  misc_RNA (1)...(19): siRNA sense strand
ggaaaugggaccuauaguu

SEQ ID NO: 1809166 - RNA, 19 nt, Homo sapiens
  misc_RNA (1)...(19): siRNA sense strand
ggagaaaguuaaugagaca

SEQ ID NO: 1809167 - RNA, 19 nt, Homo sapiens
  misc_RNA (1)...(19): siRNA sense strand
aaacugggcuggagcaaga

SEQ ID NO: 1809168 - RNA, 19 nt, Homo sapiens
  misc_RNA (1)...(19): siRNA sense strand
cagaauagaugaucacaac

SEQ ID NO: 1809169 - RNA, 19 nt, Homo sapiens
  misc_RNA (1)...(19): siRNA sense strand
gugacacgauuucuaauga

SEQ ID NO: 1809170 - RNA, 19 nt, Homo sapiens
  misc_RNA (1)...(19): siRNA sense strand
ugaaaucaaugccgugaga

SEQ ID NO: 1809171 - RNA, 19 nt, Homo sapiens
  misc_RNA (1)...(19): siRNA sense strand
gcugaaagcuuuuaauaug

SEQ ID NO: 1809172 - RNA, 19 nt, Homo sapiens
  misc_RNA (1)...(19): siRNA sense strand
gacuacaacaugccaauua

SEQ ID NO: 1809173 - RNA, 19 nt, Homo sapiens
  misc_RNA (1)...(19): siRNA sense strand
gagaugaggacgaagauga

SEQ ID NO: 1809174 - RNA, 19 nt, Homo sapiens
  misc_RNA (1)...(19): siRNA sense strand
gaacuuacaaagcaauuuc

SEQ ID NO: 1809175 - RNA, 19 nt, Homo sapiens
  misc_RNA (1)...(19): siRNA sense strand
gagaacaaauucggaaaca

SEQ ID NO: 1809176 - RNA, 19 nt, Homo sapiens
  misc_RNA (1)...(19): siRNA sense strand
gaauuugacaugagugauu

SEQ ID NO: 1809177 - RNA, 19 nt, Homo sapiens
  misc_RNA (1)...(19): siRNA sense strand
gcaagucuccugcacauag

SEQ ID NO: 1809178 - RNA, 19 nt, Homo sapiens
  misc_RNA (1)...(19): siRNA sense strand
gcagcuaacuucggaauac

SEQ ID NO: 1809179 - RNA, 19 nt, Homo sapiens
  misc_RNA (1)...(19): siRNA sense strand
gaacgagaggcgagagaaa

SEQ ID NO: 1809180 - RNA, 19 nt, Homo sapiens
  misc_RNA (1)...(19): siRNA sense strand
ugacaugagugauucaaca

SEQ ID NO: 1809181 - RNA, 19 nt, Homo sapiens
  misc_RNA (1)...(19): siRNA sense strand
gaaacacgcuggacaaaag

SEQ ID NO: 1809182 - RNA, 19 nt, Homo sapiens
  misc_RNA (1)...(19): siRNA sense strand
uagaugaucacaacaguaa

SEQ ID NO: 1809183 - RNA, 19 nt, Homo sapiens
  misc_RNA (1)...(19): siRNA sense strand
gggcacaguucaauugcuu

SEQ ID NO: 1809184 - RNA, 19 nt, Homo sapiens
  misc_RNA (1)...(19): siRNA sense strand
ucacaacaguaaugggaaa

SEQ ID NO: 1809185 - RNA, 19 nt, Homo sapiens
  misc_RNA (1)...(19): siRNA sense strand
uggaacagaucauaaagau

SEQ ID NO: 1809186 - RNA, 19 nt, Homo sapiens
  misc_RNA (1)...(19): siRNA sense strand
uaucuuggcuucagcuugu

SEQ ID NO: 1809187 - RNA, 19 nt, Homo sapiens
  misc_RNA (1)...(19): siRNA sense strand
gcggugacacgauuucuaa

SEQ ID NO: 1809188 - RNA, 19 nt, Homo sapiens
  misc_RNA (1)...(19): siRNA sense strand
ggaacagaucauaaagaua

SEQ ID NO: 1809189 - RNA, 19 nt, Homo sapiens
  misc_RNA (1)...(19): siRNA sense strand
ccgagcggcugaaagcuuu

SEQ ID NO: 1809190 - RNA, 19 nt, Homo sapiens
  misc_RNA (1)...(19): siRNA sense strand
gaauggucccaaucucuaa

SEQ ID NO: 1809191 - RNA, 19 nt, Homo sapiens
  misc_RNA (1)...(19): siRNA sense strand
ccaaauggagaacaaauuc

SEQ ID NO: 1809192 - RNA, 19 nt, Homo sapiens
  misc_RNA (1)...(19): siRNA sense strand
agagagcuaugccuuccua

SEQ ID NO: 1809193 - RNA, 19 nt, Homo sapiens
  misc_RNA (1)...(19): siRNA sense strand
gaaaugccgccaagaggau

SEQ ID NO: 1809194 - RNA, 19 nt, Homo sapiens
  misc_RNA (1)...(19): siRNA sense strand
ccuauuccuucccaccuua

SEQ ID NO: 1809195 - RNA, 19 nt, Homo sapiens
  misc_RNA (1)...(19): siRNA sense strand
gacaauucccugaguauca

SEQ ID NO: 1809196 - RNA, 19 nt, Homo sapiens
  misc_RNA (1)...(19): siRNA sense strand
ccagcaagaugaugauucu

SEQ ID NO: 1809197 - RNA, 19 nt, Homo sapiens
  misc_RNA (1)...(19): siRNA sense strand
gaugucagcugugaacucu

SEQ ID NO: 1809198 - RNA, 19 nt, Homo sapiens
  misc_RNA (1)...(19): siRNA sense strand
ugaccagcaugauugacua

SEQ ID NO: 1809199 - RNA, 19 nt, Homo sapiens
  misc_RNA (1)...(19): siRNA sense strand
gaguccaacugaaaucaau

SEQ ID NO: 1809200 - RNA, 19 nt, Homo sapiens
  misc_RNA (1)...(19): siRNA sense strand
gaugaucacaacaguaaug

SEQ ID NO: 1809201 - RNA, 19 nt, Homo sapiens
  misc_RNA (1)...(19): siRNA sense strand
cgaauggucccaaucucua

SEQ ID NO: 1809202 - RNA, 19 nt, Homo sapiens
  misc_RNA (1)...(19): siRNA sense strand
ccaccuuacuucagcaguu

SEQ ID NO: 1809203 - RNA, 19 nt, Homo sapiens
  misc_RNA (1)...(19): siRNA sense strand
uaaacucacagcaagauga

SEQ ID NO: 1809204 - RNA, 19 nt, Homo sapiens
  misc_RNA (1)...(19): siRNA sense strand
cagcugaguccaacugaaa

SEQ ID NO: 1809205 - RNA, 19 nt, Homo sapiens
  misc_RNA (1)...(19): siRNA sense strand
gagaguaucuuggcuucag

SEQ ID NO: 1809206 - RNA, 19 nt, Homo sapiens
  misc_RNA (1)...(19): siRNA sense strand
acacggaugucagcuguga

SEQ ID NO: 1809207 - RNA, 19 nt, Homo sapiens
  misc_RNA (1)...(19): siRNA sense strand
aaacccagauggaacagau

SEQ ID NO: 1809208 - RNA, 19 nt, Homo sapiens
  misc_RNA (1)...(19): siRNA sense strand
gaaaagauccaggcuauca

SEQ ID NO: 1809209 - RNA, 19 nt, Homo sapiens
  misc_RNA (1)...(19): siRNA sense strand
caagaugaacagccacuga

SEQ ID NO: 1809210 - RNA, 19 nt, Homo sapiens
  misc_RNA (1)...(19): siRNA sense strand
ccagauggaacagaucaua

SEQ ID NO: 1809211 - RNA, 19 nt, Homo sapiens
  misc_RNA (1)...(19): siRNA sense strand
ggcgacaauucccugagua

SEQ ID NO: 1809212 - RNA, 19 nt, Homo sapiens
  misc_RNA (1)...(19): siRNA sense strand
caauggaaaugggaccuau

SEQ ID NO: 1809213 - RNA, 19 nt, Homo sapiens
  misc_RNA (1)...(19): siRNA sense strand
gaggaugcgucuggagaga

SEQ ID NO: 1809214 - RNA, 19 nt, Homo sapiens
  misc_RNA (1)...(19): siRNA sense strand
gagagugagaguagaaaug

SEQ ID NO: 1809215 - RNA, 19 nt, Homo sapiens
  misc_RNA (1)...(19): siRNA sense strand
gcauuuaaacccagaugga

SEQ ID NO: 1809216 - RNA, 19 nt, Homo sapiens
  misc_RNA (1)...(19): siRNA sense strand
gcaagaugaggaugaaagu

SEQ ID NO: 1809217 - RNA, 19 nt, Homo sapiens
  misc_RNA (1)...(19): siRNA sense strand
ucgagaaucagcugcauuu

SEQ ID NO: 1809218 - RNA, 19 nt, Homo sapiens
  misc_RNA (1)...(19): siRNA sense strand
gacagcuuguugcaggaua

SEQ ID NO: 1809219 - RNA, 19 nt, Homo sapiens
  misc_RNA (1)...(19): siRNA sense strand
ucucuaagcagcccaaaga

SEQ ID NO: 1809220 - RNA, 19 nt, Homo sapiens
  misc_RNA (1)...(19): siRNA sense strand
ccaugacgauucggagaaa

SEQ ID NO: 1809221 - RNA, 19 nt, Homo sapiens
  misc_RNA (1)...(19): siRNA sense strand
gaauagaugaucacaacag

SEQ ID NO: 1809222 - RNA, 19 nt, Homo sapiens
  misc_RNA (1)...(19): siRNA sense strand
acaauucccugaguaucaa

SEQ ID NO: 1809223 - RNA, 19 nt, Homo sapiens
  misc_RNA (1)...(19): siRNA sense strand
ugcaggauaucgagaauca

SEQ ID NO: 1809224 - RNA, 19 nt, Homo sapiens
  misc_RNA (1)...(19): siRNA sense strand
ccagcaugauugacuacaa

SEQ ID NO: 1809225 - RNA, 19 nt, Homo sapiens
  misc_RNA (1)...(19): siRNA sense strand
ccaggccacuuacucaaca

SEQ ID NO: 1809226 - RNA, 19 nt, Homo sapiens
  misc_RNA (1)...(19): siRNA sense strand
guagaaaugccgccaagag

SEQ ID NO: 1809227 - RNA, 19 nt, Homo sapiens
  misc_RNA (1)...(19): siRNA sense strand
uuucugaccucaagaugga

SEQ ID NO: 1809228 - RNA, 19 nt, Homo sapiens
  misc_RNA (1)...(19): siRNA sense strand
gaauacagaauagaugauc

SEQ ID NO: 1809229 - RNA, 19 nt, Homo sapiens
  misc_RNA (1)...(19): siRNA sense strand
gccaaauggagaacaaauu

SEQ ID NO: 1809230 - RNA, 19 nt, Homo sapiens
  misc_RNA (1)...(19): siRNA sense strand
caauuaccauggccuacau

SEQ ID NO: 1809231 - RNA, 19 nt, Homo sapiens
  misc_RNA (1)...(19): siRNA sense strand
cagauggaacagaucauaa

SEQ ID NO: 1809232 - RNA, 19 nt, Homo sapiens
  misc_RNA (1)...(19): siRNA sense strand
gauccaggcuaucauugac

SEQ ID NO: 1809233 - RNA, 19 nt, Homo sapiens
  misc_RNA (1)...(19): siRNA sense strand
ugagacagacggcguugaa

SEQ ID NO: 1809234 - RNA, 19 nt, Homo sapiens
  misc_RNA (1)...(19): siRNA sense strand
aaagauccaggcuaucauu

SEQ ID NO: 1809235 - RNA, 19 nt, Homo sapiens
  misc_RNA (1)...(19): siRNA sense strand
gagcuuuaauggcaaugag

SEQ ID NO: 1809236 - RNA, 19 nt, Homo sapiens
  misc_RNA (1)...(19): siRNA sense strand
cagcugacaaacaguguaa

SEQ ID NO: 1809237 - RNA, 19 nt, Homo sapiens
  misc_RNA (1)...(19): siRNA sense strand
aagcaagucuccugcacau

SEQ ID NO: 1809238 - RNA, 19 nt, Homo sapiens
  misc_RNA (1)...(19): siRNA sense strand
gcacaguucaauugcuuca

SEQ ID NO: 1809239 - RNA, 19 nt, Homo sapiens
  misc_RNA (1)...(19): siRNA sense strand
gaaaguucaauagaaagug

SEQ ID NO: 1809240 - RNA, 19 nt, Homo sapiens
  misc_RNA (1)...(19): siRNA sense strand
ggugacacgauuucuaaug

SEQ ID NO: 1809241 - RNA, 19 nt, Homo sapiens
  misc_RNA (1)...(19): siRNA sense strand
caagucuccugcacauagu

SEQ ID NO: 1809242 - RNA, 19 nt, Homo sapiens
  misc_RNA (1)...(19): siRNA sense strand
ggaacgagaggcgagagaa

SEQ ID NO: 1809243 - RNA, 19 nt, Homo sapiens
  misc_RNA (1)...(19): siRNA sense strand
ucuaauuucugaccucaag

SEQ ID NO: 1809244 - RNA, 19 nt, Homo sapiens
  misc_RNA (1)...(19): siRNA sense strand
gaaagugaugaauuugaca

SEQ ID NO: 1809245 - RNA, 19 nt, Homo sapiens
  misc_RNA (1)...(19): siRNA sense strand
acagcaagaugaggaugaa

SEQ ID NO: 1809246 - RNA, 19 nt, Homo sapiens
  misc_RNA (1)...(19): siRNA sense strand
cagcaugaagagacaauug

SEQ ID NO: 1809247 - RNA, 19 nt, Homo sapiens
  misc_RNA (1)...(19): siRNA sense strand
agauggaacagaucauaaa

SEQ ID NO: 1809248 - RNA, 19 nt, Homo sapiens
  misc_RNA (1)...(19): siRNA sense strand
gacgugcuguacaucaaug

SEQ ID NO: 1809249 - RNA, 19 nt, Homo sapiens
  misc_RNA (1)...(19): siRNA sense strand
aagaaaagauccaggcuau

SEQ ID NO: 1809250 - RNA, 19 nt, Homo sapiens
  misc_RNA (1)...(19): siRNA sense strand
cggaauacagaauagauga

SEQ ID NO: 1809251 - RNA, 19 nt, Homo sapiens
  misc_RNA (1)...(19): siRNA sense strand
gagaacuuacaaagcaauu

SEQ ID NO: 1809252 - RNA, 19 nt, Homo sapiens
  misc_RNA (1)...(19): siRNA sense strand
uaacuucggaauacagaau

SEQ ID NO: 1809253 - RNA, 19 nt, Homo sapiens
  misc_RNA (1)...(19): siRNA sense strand
gaacacacagcagggagau

SEQ ID NO: 1809254 - RNA, 19 nt, Homo sapiens
  misc_RNA (1)...(19): siRNA sense strand
gaaucuucauggccagcaa

SEQ ID NO: 1809255 - RNA, 19 nt, Homo sapiens
  misc_RNA (1)...(19): siRNA sense strand
agaaagugaugaauuugac

SEQ ID NO: 1809256 - RNA, 19 nt, Homo sapiens
  misc_RNA (1)...(19): siRNA sense strand
gugaugaauuugacaugag

SEQ ID NO: 1809257 - RNA, 19 nt, Homo sapiens
  misc_RNA (1)...(19): siRNA sense strand
ggcuucagcuugugagagu

SEQ ID NO: 1809258 - RNA, 19 nt, Homo sapiens
  misc_RNA (1)...(19): siRNA sense strand
caaaagagaacuuacaaag

SEQ ID NO: 1809259 - RNA, 19 nt, Homo sapiens
  misc_RNA (1)...(19): siRNA sense strand
gaagaaacagcaugaaauu

SEQ ID NO: 1809260 - RNA, 19 nt, Homo sapiens
  misc_RNA (1)...(19): siRNA sense strand
gaagaaaccaccagugauu

SEQ ID NO: 1809261 - RNA, 19 nt, Homo sapiens
  misc_RNA (1)...(19): siRNA sense strand
gaaaucaaaugggaagaaa

SEQ ID NO: 1809262 - RNA, 19 nt, Homo sapiens
  misc_RNA (1)...(19): siRNA sense strand
gaacauccauuccuugagu

SEQ ID NO: 1809263 - RNA, 19 nt, Homo sapiens
  misc_RNA (1)...(19): siRNA sense strand
gcccacaacucucuuagua

SEQ ID NO: 1809264 - RNA, 19 nt, Homo sapiens
  misc_RNA (1)...(19): siRNA sense strand
gaacgagugugaugugugu

SEQ ID NO: 1809265 - RNA, 19 nt, Homo sapiens
  misc_RNA (1)...(19): siRNA sense strand
caacaugguuccuuucuuc

SEQ ID NO: 1809266 - RNA, 19 nt, Homo sapiens
  misc_RNA (1)...(19): siRNA sense strand
ucaaggaccugcauuuguu

SEQ ID NO: 1809267 - RNA, 19 nt, Homo sapiens
  misc_RNA (1)...(19): siRNA sense strand
caacuuggcuacagcuaug

SEQ ID NO: 1809268 - RNA, 19 nt, Homo sapiens
  misc_RNA (1)...(19): siRNA sense strand
ggaagaaacagcaugaaau

SEQ ID NO: 1809269 - RNA, 19 nt, Homo sapiens
  misc_RNA (1)...(19): siRNA sense strand
ccacaacucucuuaguagu

SEQ ID NO: 1809270 - RNA, 19 nt, Homo sapiens
  misc_RNA (1)...(19): siRNA sense strand
caacugcaguguuuaugau

SEQ ID NO: 1809271 - RNA, 19 nt, Homo sapiens
  misc_RNA (1)...(19): siRNA sense strand
uuguguggcuccauuauua

SEQ ID NO: 1809272 - RNA, 19 nt, Homo sapiens
  misc_RNA (1)...(19): siRNA sense strand
caagagauacacagaagaa

SEQ ID NO: 1809273 - RNA, 19 nt, Homo sapiens
  misc_RNA (1)...(19): siRNA sense strand
ggaaggguuugauaaagca

SEQ ID NO: 1809274 - RNA, 19 nt, Homo sapiens
  misc_RNA (1)...(19): siRNA sense strand
ccuuagaucucgcgaagaa

SEQ ID NO: 1809275 - RNA, 19 nt, Homo sapiens
  misc_RNA (1)...(19): siRNA sense strand
ugacaauccucccuucuuc

SEQ ID NO: 1809276 - RNA, 19 nt, Homo sapiens
  misc_RNA (1)...(19): siRNA sense strand
ggccauagauuucucacau

SEQ ID NO: 1809277 - RNA, 19 nt, Homo sapiens
  misc_RNA (1)...(19): siRNA sense strand
gaacacugguggcuuuggu

SEQ ID NO: 1809278 - RNA, 19 nt, Homo sapiens
  misc_RNA (1)...(19): siRNA sense strand
ccauagauuucucacauca

SEQ ID NO: 1809279 - RNA, 19 nt, Homo sapiens
  misc_RNA (1)...(19): siRNA sense strand
gggaagaaacagcaugaaa

SEQ ID NO: 1809280 - RNA, 19 nt, Homo sapiens
  misc_RNA (1)...(19): siRNA sense strand
ugaaauugccaaccuuaaa

SEQ ID NO: 1809281 - RNA, 19 nt, Homo sapiens
  misc_RNA (1)...(19): siRNA sense strand
gaaacugucugugauagcu

SEQ ID NO: 1809282 - RNA, 19 nt, Homo sapiens
  misc_RNA (1)...(19): siRNA sense strand
gcaugaaauugccaaccuu

SEQ ID NO: 1809283 - RNA, 19 nt, Homo sapiens
  misc_RNA (1)...(19): siRNA sense strand
gaagguuugcugagaagaa

SEQ ID NO: 1809284 - RNA, 19 nt, Homo sapiens
  misc_RNA (1)...(19): siRNA sense strand
gaaacuuugccggcuauaa

SEQ ID NO: 1809285 - RNA, 19 nt, Homo sapiens
  misc_RNA (1)...(19): siRNA sense strand
ccagaacucuaccuucagu

SEQ ID NO: 1809286 - RNA, 19 nt, Homo sapiens
  misc_RNA (1)...(19): siRNA sense strand
gacgauccgacucugauua

SEQ ID NO: 1809287 - RNA, 19 nt, Homo sapiens
  misc_RNA (1)...(19): siRNA sense strand
caaggaccugcauuuguua

SEQ ID NO: 1809288 - RNA, 19 nt, Homo sapiens
  misc_RNA (1)...(19): siRNA sense strand
ggaagaaaccaccagugau

SEQ ID NO: 1809289 - RNA, 19 nt, Homo sapiens
  misc_RNA (1)...(19): siRNA sense strand
ugggaacacugguggcuuu

SEQ ID NO: 1809290 - RNA, 19 nt, Homo sapiens
  misc_RNA (1)...(19): siRNA sense strand
uaugaagguuugcugagaa

SEQ ID NO: 1809291 - RNA, 19 nt, Homo sapiens
  misc_RNA (1)...(19): siRNA sense strand
gcaccgguaccauuuguug

SEQ ID NO: 1809292 - RNA, 19 nt, Homo sapiens
  misc_RNA (1)...(19): siRNA sense strand
ggcagaacauccauuccuu

SEQ ID NO: 1809293 - RNA, 19 nt, Homo sapiens
  misc_RNA (1)...(19): siRNA sense strand
gaacccagccgcaguuugc

SEQ ID NO: 1809294 - RNA, 19 nt, Homo sapiens
  misc_RNA (1)...(19): siRNA sense strand
uguacaacaugguuccuuu

SEQ ID NO: 1809295 - RNA, 19 nt, Homo sapiens
  misc_RNA (1)...(19): siRNA sense strand
gaaauugccaaccuuaaaa

SEQ ID NO: 1809296 - RNA, 19 nt, Homo sapiens
  misc_RNA (1)...(19): siRNA sense strand
caugaaauugccaaccuua

SEQ ID NO: 1809297 - RNA, 19 nt, Homo sapiens
  misc_RNA (1)...(19): siRNA sense strand
gggaaacugucugugauag

SEQ ID NO: 1809298 - RNA, 19 nt, Homo sapiens
  misc_RNA (1)...(19): siRNA sense strand
cuacagggccauagauuuc

SEQ ID NO: 1809299 - RNA, 19 nt, Homo sapiens
  misc_RNA (1)...(19): siRNA sense strand
cuacagcuaugccaucgau

SEQ ID NO: 1809300 - RNA, 19 nt, Homo sapiens
  misc_RNA (1)...(19): siRNA sense strand
cauacgagauugccugucu

SEQ ID NO: 1809301 - RNA, 19 nt, Homo sapiens
  misc_RNA (1)...(19): siRNA sense strand
cggaagaaaccaccaguga

SEQ ID NO: 1809302 - RNA, 19 nt, Homo sapiens
  misc_RNA (1)...(19): siRNA sense strand
aaacuuugccggcuauaau

SEQ ID NO: 1809303 - RNA, 19 nt, Homo sapiens
  misc_RNA (1)...(19): siRNA sense strand
gaucugccaguuucaguug

SEQ ID NO: 1809304 - RNA, 19 nt, Homo sapiens
  misc_RNA (1)...(19): siRNA sense strand
gcugggaaacugucuguga

SEQ ID NO: 1809305 - RNA, 19 nt, Homo sapiens
  misc_RNA (1)...(19): siRNA sense strand
cagaacauccauuccuuga

SEQ ID NO: 1809306 - RNA, 19 nt, Homo sapiens
  misc_RNA (1)...(19): siRNA sense strand
cuucauuccuuuacugaug

SEQ ID NO: 1809307 - RNA, 19 nt, Homo sapiens
  misc_RNA (1)...(19): siRNA sense strand
gugauagcuuggaugacua

SEQ ID NO: 1809308 - RNA, 19 nt, Homo sapiens
  misc_RNA (1)...(19): siRNA sense strand
gccugucucuccagaaguu

SEQ ID NO: 1809309 - RNA, 19 nt, Homo sapiens
  misc_RNA (1)...(19): siRNA sense strand
ccaucgaucugccaguuuc

SEQ ID NO: 1809310 - RNA, 19 nt, Homo sapiens
  misc_RNA (1)...(19): siRNA sense strand
cgugagcuguggccaagaa

SEQ ID NO: 1809311 - RNA, 19 nt, Homo sapiens
  misc_RNA (1)...(19): siRNA sense strand
gugcagagucggccaaugu

SEQ ID NO: 1809312 - RNA, 19 nt, Homo sapiens
  misc_RNA (1)...(19): siRNA sense strand
gcaagagauacacagaaga

SEQ ID NO: 1809313 - RNA, 19 nt, Homo sapiens
  misc_RNA (1)...(19): siRNA sense strand
gcugagaagaaaucaaaug

SEQ ID NO: 1809314 - RNA, 19 nt, Homo sapiens
  misc_RNA (1)...(19): siRNA sense strand
uaaaagacauacgagauug

SEQ ID NO: 1809315 - RNA, 19 nt, Homo sapiens
  misc_RNA (1)...(19): siRNA sense strand
caacugcgagcggaagaaa

SEQ ID NO: 1809316 - RNA, 19 nt, Homo sapiens
  misc_RNA (1)...(19): siRNA sense strand
gcagcaagagauacacaga

SEQ ID NO: 1809317 - RNA, 19 nt, Homo sapiens
  misc_RNA (1)...(19): siRNA sense strand
cuaugaagguuugcugaga

SEQ ID NO: 1809318 - RNA, 19 nt, Homo sapiens
  misc_RNA (1)...(19): siRNA sense strand
agucggaacucaagauucu

SEQ ID NO: 1809319 - RNA, 19 nt, Homo sapiens
  misc_RNA (1)...(19): siRNA sense strand
gaucuccagcgacucauug

SEQ ID NO: 1809320 - RNA, 19 nt, Homo sapiens
  misc_RNA (1)...(19): siRNA sense strand
caucaaggaccugcauuug

SEQ ID NO: 1809321 - RNA, 19 nt, Homo sapiens
  misc_RNA (1)...(19): siRNA sense strand
ccaacugcaguguuuauga

SEQ ID NO: 1809322 - RNA, 19 nt, Homo sapiens
  misc_RNA (1)...(19): siRNA sense strand
uuucaggaaugcuuuggaa

SEQ ID NO: 1809323 - RNA, 19 nt, Homo sapiens
  misc_RNA (1)...(19): siRNA sense strand
acaacucucuuaguaguca

SEQ ID NO: 1809324 - RNA, 19 nt, Homo sapiens
  misc_RNA (1)...(19): siRNA sense strand
uccagugacuaaugaagaa

SEQ ID NO: 1809325 - RNA, 19 nt, Homo sapiens
  misc_RNA (1)...(19): siRNA sense strand
gagccuucauaauuugguu

SEQ ID NO: 1809326 - RNA, 19 nt, Homo sapiens
  misc_RNA (1)...(19): siRNA sense strand
uagcuuggaugacuacaac

SEQ ID NO: 1809327 - RNA, 19 nt, Homo sapiens
  misc_RNA (1)...(19): siRNA sense strand
uguggagacugcaaguuug

SEQ ID NO: 1809328 - RNA, 19 nt, Homo sapiens
  misc_RNA (1)...(19): siRNA sense strand
uuccagaacucuaccuuca

SEQ ID NO: 1809329 - RNA, 19 nt, Homo sapiens
  misc_RNA (1)...(19): siRNA sense strand
gcuccauuauuauucuguu

SEQ ID NO: 1809330 - RNA, 19 nt, Homo sapiens
  misc_RNA (1)...(19): siRNA sense strand
gaggaacgagugugaugug

SEQ ID NO: 1809331 - RNA, 19 nt, Homo sapiens
  misc_RNA (1)...(19): siRNA sense strand
caaugagucuuuugcuuug

SEQ ID NO: 1809332 - RNA, 19 nt, Homo sapiens
  misc_RNA (1)...(19): siRNA sense strand
gucccuacauccuacgaaa

SEQ ID NO: 1809333 - RNA, 19 nt, Homo sapiens
  misc_RNA (1)...(19): siRNA sense strand
aagguuugcugagaagaaa

SEQ ID NO: 1809334 - RNA, 19 nt, Homo sapiens
  misc_RNA (1)...(19): siRNA sense strand
guucuucauuccuuuacug

SEQ ID NO: 1809335 - RNA, 19 nt, Homo sapiens
  misc_RNA (1)...(19): siRNA sense strand
gacucuggauucucaagug

SEQ ID NO: 1809336 - RNA, 19 nt, Homo sapiens
  misc_RNA (1)...(19): siRNA sense strand
agaaacagcaugaaauugc

SEQ ID NO: 1809337 - RNA, 19 nt, Homo sapiens
  misc_RNA (1)...(19): siRNA sense strand
ccuacagggccauagauuu

SEQ ID NO: 1809338 - RNA, 19 nt, Homo sapiens
  misc_RNA (1)...(19): siRNA sense strand
gcuguuggcuuuucuucaa

SEQ ID NO: 1809339 - RNA, 19 nt, Homo sapiens
  misc_RNA (1)...(19): siRNA sense strand
aaucaaaugggaagaaaca

SEQ ID NO: 1809340 - RNA, 19 nt, Homo sapiens
  misc_RNA (1)...(19): siRNA sense strand
ugugauagcuuggaugacu

SEQ ID NO: 1809341 - RNA, 19 nt, Homo sapiens
  misc_RNA (1)...(19): siRNA sense strand
gggaggaacgagugugaug

SEQ ID NO: 1809342 - RNA, 19 nt, Homo sapiens
  misc_RNA (1)...(19): siRNA sense strand
gccauagauuucucacauc

SEQ ID NO: 1809343 - RNA, 19 nt, Homo sapiens
  misc_RNA (1)...(19): siRNA sense strand
cagcaagagauacacagaa

SEQ ID NO: 1809344 - RNA, 19 nt, Homo sapiens
  misc_RNA (1)...(19): siRNA sense strand
auagauuucucacaucaag

SEQ ID NO: 1809345 - RNA, 19 nt, Homo sapiens
  misc_RNA (1)...(19): siRNA sense strand
uuugccaacugcaguguuu

SEQ ID NO: 1809346 - RNA, 19 nt, Homo sapiens
  misc_RNA (1)...(19): siRNA sense strand
acugcaguguuuaugauuu

SEQ ID NO: 1809347 - RNA, 19 nt, Homo sapiens
  misc_RNA (1)...(19): siRNA sense strand
uguugugucuggaaagaga

SEQ ID NO: 1809348 - RNA, 19 nt, Homo sapiens
  misc_RNA (1)...(19): siRNA sense strand
acaacaugguuccuuucuu

SEQ ID NO: 1809349 - RNA, 19 nt, Homo sapiens
  misc_RNA (1)...(19): siRNA sense strand
guacaacaugguuccuuuc

SEQ ID NO: 1809350 - RNA, 19 nt, Homo sapiens
  misc_RNA (1)...(19): siRNA sense strand
gcuuuggaaggguuugaua

SEQ ID NO: 1809351 - RNA, 19 nt, Homo sapiens
  misc_RNA (1)...(19): siRNA sense strand
cuggucaccuugugcaaug

SEQ ID NO: 1809352 - RNA, 19 nt, Homo sapiens
  misc_RNA (1)...(19): siRNA sense strand
acucuggauucucaaguga

SEQ ID NO: 1809353 - RNA, 19 nt, Homo sapiens
  misc_RNA (1)...(19): siRNA sense strand
uugcugagaagaaaucaaa

SEQ ID NO: 1809354 - RNA, 19 nt, Homo sapiens
  misc_RNA (1)...(19): siRNA sense strand
uuagaucucgcgaagaaga

SEQ ID NO: 1809355 - RNA, 19 nt, Homo sapiens
  misc_RNA (1)...(19): siRNA sense strand
cauuuaagcagcaagagau

SEQ ID NO: 1809356 - RNA, 19 nt, Homo sapiens
  misc_RNA (1)...(19): siRNA sense strand
ugaacgggacaaacgcuuu

SEQ ID NO: 1809357 - RNA, 19 nt, Homo sapiens
  misc_RNA (1)...(19): siRNA sense strand
ucccuccagugacuaauga

SEQ ID NO: 1809358 - RNA, 19 nt, Homo sapiens
  misc_RNA (1)...(19): siRNA sense strand
agcaagagauacacagaag

SEQ ID NO: 1809359 - RNA, 19 nt, Homo sapiens
  misc_RNA (1)...(19): siRNA sense strand
ccaaugagcugcggaaugg

SEQ ID NO: 1809360 - RNA, 19 nt, Homo sapiens
  misc_RNA (1)...(19): siRNA sense strand
ggaagagaccaucgguaua

SEQ ID NO: 1809361 - RNA, 19 nt, Homo sapiens
  misc_RNA (1)...(19): siRNA sense strand
gaagagaccaucgguauag

SEQ ID NO: 1809362 - RNA, 19 nt, Homo sapiens
  misc_RNA (1)...(19): siRNA sense strand
gaccaucgguauaguggaa

SEQ ID NO: 1809363 - RNA, 19 nt, Homo sapiens
  misc_RNA (1)...(19): siRNA sense strand
gccaaaguaucccacauga

SEQ ID NO: 1809364 - RNA, 19 nt, Homo sapiens
  misc_RNA (1)...(19): siRNA sense strand
gagaggcaguccaggaaau

SEQ ID NO: 1809365 - RNA, 19 nt, Homo sapiens
  misc_RNA (1)...(19): siRNA sense strand
ggaaaugaaggaccauaug

SEQ ID NO: 1809366 - RNA, 19 nt, Homo sapiens
  misc_RNA (1)...(19): siRNA sense strand
gaaaugaaggaccauaugg

SEQ ID NO: 1809367 - RNA, 19 nt, Homo sapiens
  misc_RNA (1)...(19): siRNA sense strand
ggccacaucucgcuacauc

SEQ ID NO: 1809368 - RNA, 19 nt, Homo sapiens
  misc_RNA (1)...(19): siRNA sense strand
guucucaucuuacuauucu

SEQ ID NO: 1809369 - RNA, 19 nt, Homo sapiens
  misc_RNA (1)...(19): siRNA sense strand
ucuccucguucucaucuua

SEQ ID NO: 1809370 - RNA, 19 nt, Homo sapiens
  misc_RNA (1)...(19): siRNA sense strand
cccaacagccguagcauuu

SEQ ID NO: 1809371 - RNA, 19 nt, Homo sapiens
  misc_RNA (1)...(19): siRNA sense strand
ucaggaaguuggccaaagu

SEQ ID NO: 1809372 - RNA, 19 nt, Homo sapiens
  misc_RNA (1)...(19): siRNA sense strand
caagccagcugcccagaag

SEQ ID NO: 1809373 - RNA, 19 nt, Homo sapiens
  misc_RNA (1)...(19): siRNA sense strand
gaggaauaacagagagaua

SEQ ID NO: 1809374 - RNA, 19 nt, Homo sapiens
  misc_RNA (1)...(19): siRNA sense strand
gaaguuggccaaaguaucc

SEQ ID NO: 1809375 - RNA, 19 nt, Homo sapiens
  misc_RNA (1)...(19): siRNA sense strand
ggaauggccugcgcagcau

SEQ ID NO: 1809376 - RNA, 19 nt, Homo sapiens
  misc_RNA (1)...(19): siRNA sense strand
gcauccagguucugaagca

SEQ ID NO: 1809377 - RNA, 19 nt, Homo sapiens
  misc_RNA (1)...(19): siRNA sense strand
gcgagaggcaguccaggaa

SEQ ID NO: 1809378 - RNA, 19 nt, Homo sapiens
  misc_RNA (1)...(19): siRNA sense strand
uaucccacaugacgaguga

SEQ ID NO: 1809379 - RNA, 19 nt, Homo sapiens
  misc_RNA (1)...(19): siRNA sense strand
uggaagagaccaucgguau

SEQ ID NO: 1809380 - RNA, 19 nt, Homo sapiens
  misc_RNA (1)...(19): siRNA sense strand
ggacgagcagggcaucaug

SEQ ID NO: 1809381 - RNA, 19 nt, Homo sapiens
  misc_RNA (1)...(19): siRNA sense strand
ggaccucgaggaccuggaa

SEQ ID NO: 1809382 - RNA, 19 nt, Homo sapiens
  misc_RNA (1)...(19): siRNA sense strand
ggaaguuggccaaaguauc

SEQ ID NO: 1809383 - RNA, 19 nt, Homo sapiens
  misc_RNA (1)...(19): siRNA sense strand
gcaagccagcugcccagaa

SEQ ID NO: 1809384 - RNA, 19 nt, Homo sapiens
  misc_RNA (1)...(19): siRNA sense strand
ccacaucucgcuacaucga

SEQ ID NO: 1809385 - RNA, 19 nt, Homo sapiens
  misc_RNA (1)...(19): siRNA sense strand
ggaauaacagagagauacu

SEQ ID NO: 1809386 - RNA, 19 nt, Homo sapiens
  misc_RNA (1)...(19): siRNA sense strand
ggccaaaguaucccacaug

SEQ ID NO: 1809387 - RNA, 19 nt, Homo sapiens
  misc_RNA (1)...(19): siRNA sense strand
gagcauccagguucugaag

SEQ ID NO: 1809388 - RNA, 19 nt, Homo sapiens
  misc_RNA (1)...(19): siRNA sense strand
gagaggaauaacagagaga

SEQ ID NO: 1809389 - RNA, 19 nt, Homo sapiens
  misc_RNA (1)...(19): siRNA sense strand
caggaaguuggccaaagua

SEQ ID NO: 1809390 - RNA, 19 nt, Homo sapiens
  misc_RNA (1)...(19): siRNA sense strand
gcccaacagccguagcauu

SEQ ID NO: 1809391 - RNA, 19 nt, Homo sapiens
  misc_RNA (1)...(19): siRNA sense strand
cgagaggcaguccaggaaa

SEQ ID NO: 1809392 - RNA, 19 nt, Homo sapiens
  misc_RNA (1)...(19): siRNA sense strand
gaagccaacccaggcaagu

SEQ ID NO: 1809393 - RNA, 19 nt, Homo sapiens
  misc_RNA (1)...(19): siRNA sense strand
gggagcauccagguucuga

SEQ ID NO: 1809394 - RNA, 19 nt, Homo sapiens
  misc_RNA (1)...(19): siRNA sense strand
gaggcaguccaggaaauga

SEQ ID NO: 1809395 - RNA, 19 nt, Homo sapiens
  misc_RNA (1)...(19): siRNA sense strand
ggacuggacgaccaaugag

SEQ ID NO: 1809396 - RNA, 19 nt, Homo sapiens
  misc_RNA (1)...(19): siRNA sense strand
uggacuggacgaccaauga

SEQ ID NO: 1809397 - RNA, 19 nt, Homo sapiens
  misc_RNA (1)...(19): siRNA sense strand
gaaugggccuccuacaaga

SEQ ID NO: 1809398 - RNA, 19 nt, Homo sapiens
  misc_RNA (1)...(19): siRNA sense strand
gaaaagaagacauggaaua

SEQ ID NO: 1809399 - RNA, 19 nt, Homo sapiens
  misc_RNA (1)...(19): siRNA sense strand
uaaacuggaugacaccaaa

SEQ ID NO: 1809400 - RNA, 19 nt, Homo sapiens
  misc_RNA (1)...(19): siRNA sense strand
ggaagaaaugguuaugauu

SEQ ID NO: 1809401 - RNA, 19 nt, Homo sapiens
  misc_RNA (1)...(19): siRNA sense strand
ggaaugggccuccuacaag

SEQ ID NO: 1809402 - RNA, 19 nt, Homo sapiens
  misc_RNA (1)...(19): siRNA sense strand
gagagaagcaccagcuaug

SEQ ID NO: 1809403 - RNA, 19 nt, Homo sapiens
  misc_RNA (1)...(19): siRNA sense strand
uggaggaccuguucuacaa

SEQ ID NO: 1809404 - RNA, 19 nt, Homo sapiens
  misc_RNA (1)...(19): siRNA sense strand
gaauaugcccugcguaaac

SEQ ID NO: 1809405 - RNA, 19 nt, Homo sapiens
  misc_RNA (1)...(19): siRNA sense strand
gggugaaacuuccuacauc

SEQ ID NO: 1809406 - RNA, 19 nt, Homo sapiens
  misc_RNA (1)...(19): siRNA sense strand
gaaaugguuaugauuaugg

SEQ ID NO: 1809407 - RNA, 19 nt, Homo sapiens
  misc_RNA (1)...(19): siRNA sense strand
ggacuuggaggaccuguuc

SEQ ID NO: 1809408 - RNA, 19 nt, Homo sapiens
  misc_RNA (1)...(19): siRNA sense strand
aagaagacauggaauaugc

SEQ ID NO: 1809409 - RNA, 19 nt, Homo sapiens
  misc_RNA (1)...(19): siRNA sense strand
uggaagaaaugguuaugau

SEQ ID NO: 1809410 - RNA, 19 nt, Homo sapiens
  misc_RNA (1)...(19): siRNA sense strand
ggaauaugcccugcguaaa

SEQ ID NO: 1809411 - RNA, 19 nt, Homo sapiens
  misc_RNA (1)...(19): siRNA sense strand
ccacacuacuucucuccuu

SEQ ID NO: 1809412 - RNA, 19 nt, Homo sapiens
  misc_RNA (1)...(19): siRNA sense strand
ccaaauuccgcucucauga

SEQ ID NO: 1809413 - RNA, 19 nt, Homo sapiens
  misc_RNA (1)...(19): siRNA sense strand
augcagaggaugcuauuua

SEQ ID NO: 1809414 - RNA, 19 nt, Homo sapiens
  misc_RNA (1)...(19): siRNA sense strand
gaggaccuguucuacaagu

SEQ ID NO: 1809415 - RNA, 19 nt, Homo sapiens
  misc_RNA (1)...(19): siRNA sense strand
caccagcuauggcuacuca

SEQ ID NO: 1809416 - RNA, 19 nt, Homo sapiens
  misc_RNA (1)...(19): siRNA sense strand
ggaugucuguuaugcugau

SEQ ID NO: 1809417 - RNA, 19 nt, Homo sapiens
  misc_RNA (1)...(19): siRNA sense strand
ugcagaggaugcuauuuau

SEQ ID NO: 1809418 - RNA, 19 nt, Homo sapiens
  misc_RNA (1)...(19): siRNA sense strand
gaguuuauccugagagaag

SEQ ID NO: 1809419 - RNA, 19 nt, Homo sapiens
  misc_RNA (1)...(19): siRNA sense strand
uggaauaugcccugcguaa

SEQ ID NO: 1809420 - RNA, 19 nt, Homo sapiens
  misc_RNA (1)...(19): siRNA sense strand
cuacaagaagaucugauuu

SEQ ID NO: 1809421 - RNA, 19 nt, Homo sapiens
  misc_RNA (1)...(19): siRNA sense strand
gcagaggaugcuauuuaug

SEQ ID NO: 1809422 - RNA, 19 nt, Homo sapiens
  misc_RNA (1)...(19): siRNA sense strand
cacacuacuucucuccuuu

SEQ ID NO: 1809423 - RNA, 19 nt, Homo sapiens
  misc_RNA (1)...(19): siRNA sense strand
cagaggaugcuauuuaugg

SEQ ID NO: 1809424 - RNA, 19 nt, Homo sapiens
  misc_RNA (1)...(19): siRNA sense strand
gaugcuauuuauggaagaa

SEQ ID NO: 1809425 - RNA, 19 nt, Homo sapiens
  misc_RNA (1)...(19): siRNA sense strand
gauggucgaguaucucaga

SEQ ID NO: 1809426 - RNA, 19 nt, Homo sapiens
  misc_RNA (1)...(19): siRNA sense strand
gauuuccgaguucuuguuu

SEQ ID NO: 1809427 - RNA, 19 nt, Homo sapiens
  misc_RNA (1)...(19): siRNA sense strand
agaggaugcuauuuaugga

SEQ ID NO: 1809428 - RNA, 19 nt, Homo sapiens
  misc_RNA (1)...(19): siRNA sense strand
cuuccuacauccgaguuua

SEQ ID NO: 1809429 - RNA, 19 nt, Homo sapiens
  misc_RNA (1)...(19): siRNA sense strand
ggucgaguaucucagaaaa

SEQ ID NO: 1809430 - RNA, 19 nt, Homo sapiens
  misc_RNA (1)...(19): siRNA sense strand
gaucugauuuccgaguucu

SEQ ID NO: 1809431 - RNA, 19 nt, Homo sapiens
  misc_RNA (1)...(19): siRNA sense strand
ccuacaagaagaucugauu

SEQ ID NO: 1809432 - RNA, 19 nt, Homo sapiens
  misc_RNA (1)...(19): siRNA sense strand
ggaccugaaggaucacaug

SEQ ID NO: 1809433 - RNA, 19 nt, Homo sapiens
  misc_RNA (1)...(19): siRNA sense strand
gaggaugcuauuuauggaa

SEQ ID NO: 1809434 - RNA, 19 nt, Homo sapiens
  misc_RNA (1)...(19): siRNA sense strand
gagaugcagaggaugcuau

SEQ ID NO: 1809435 - RNA, 19 nt, Homo sapiens
  misc_RNA (1)...(19): siRNA sense strand
ggaugcuauuuauggaaga

SEQ ID NO: 1809436 - RNA, 19 nt, Homo sapiens
  misc_RNA (1)...(19): siRNA sense strand
acaagaagaucugauuucc

SEQ ID NO: 1809437 - RNA, 19 nt, Homo sapiens
  misc_RNA (1)...(19): siRNA sense strand
caaauuccgcucucaugag

SEQ ID NO: 1809438 - RNA, 19 nt, Homo sapiens
  misc_RNA (1)...(19): siRNA sense strand
aaagaagacauggaauaug

SEQ ID NO: 1809439 - RNA, 19 nt, Homo sapiens
  misc_RNA (1)...(19): siRNA sense strand
uacaagaagaucugauuuc

SEQ ID NO: 1809440 - RNA, 19 nt, Homo sapiens
  misc_RNA (1)...(19): siRNA sense strand
ugagagaagcaccagcuau

SEQ ID NO: 1809441 - RNA, 19 nt, Homo sapiens
  misc_RNA (1)...(19): siRNA sense strand
ccgaguuuauccugagaga

SEQ ID NO: 1809442 - RNA, 19 nt, Homo sapiens
  misc_RNA (1)...(19): siRNA sense strand
gaguggggauggucgagua

SEQ ID NO: 1809443 - RNA, 19 nt, Homo sapiens
  misc_RNA (1)...(19): siRNA sense strand
aagaucugauuuccgaguu

SEQ ID NO: 1809444 - RNA, 19 nt, Homo sapiens
  misc_RNA (1)...(19): siRNA sense strand
augcugaugugcagaagga

SEQ ID NO: 1809445 - RNA, 19 nt, Homo sapiens
  misc_RNA (1)...(19): siRNA sense strand
uuuccgaguucuuguuuca

SEQ ID NO: 1809446 - RNA, 19 nt, Homo sapiens
  misc_RNA (1)...(19): siRNA sense strand
guaaacuggaugacaccaa

SEQ ID NO: 1809447 - RNA, 19 nt, Homo sapiens
  misc_RNA (1)...(19): siRNA sense strand
gggauggucgaguaucuca

SEQ ID NO: 1809448 - RNA, 19 nt, Homo sapiens
  misc_RNA (1)...(19): siRNA sense strand
ggaccuguucuacaaguac

SEQ ID NO: 1809449 - RNA, 19 nt, Homo sapiens
  misc_RNA (1)...(19): siRNA sense strand
guucuuguuucaggacuuc

SEQ ID NO: 1809450 - RNA, 19 nt, Homo sapiens
  misc_RNA (1)...(19): siRNA sense strand
ccgugacucuccauaccaa

SEQ ID NO: 1809451 - RNA, 19 nt, Homo sapiens
  misc_RNA (1)...(19): siRNA sense strand
cagaaaagaagacauggaa

SEQ ID NO: 1809452 - RNA, 19 nt, Homo sapiens
  misc_RNA (1)...(19): siRNA sense strand
ucgaguaucucagaaaaga

SEQ ID NO: 1809453 - RNA, 19 nt, Homo sapiens
  misc_RNA (1)...(19): siRNA sense strand
aauaugcccugcguaaacu

SEQ ID NO: 1809454 - RNA, 19 nt, Homo sapiens
  misc_RNA (1)...(19): siRNA sense strand
gugcgaagcuucaaguacu

SEQ ID NO: 1809455 - RNA, 19 nt, Homo sapiens
  misc_RNA (1)...(19): siRNA sense strand
ggucagggagaaccucaaa

SEQ ID NO: 1809456 - RNA, 19 nt, Homo sapiens
  misc_RNA (1)...(19): siRNA sense strand
ccgugggccucaucaugua

SEQ ID NO: 1809457 - RNA, 19 nt, Homo sapiens
  misc_RNA (1)...(19): siRNA sense strand
guggagaacaugagcauca

SEQ ID NO: 1809458 - RNA, 19 nt, Homo sapiens
  misc_RNA (1)...(19): siRNA sense strand
cagagcauccuggacauga

SEQ ID NO: 1809459 - RNA, 19 nt, Homo sapiens
  misc_RNA (1)...(19): siRNA sense strand
ggaccaccuuccuccacau

SEQ ID NO: 1809460 - RNA, 19 nt, Homo sapiens
  misc_RNA (1)...(19): siRNA sense strand
acgccaaggucgcccugua

SEQ ID NO: 1809461 - RNA, 19 nt, Homo sapiens
  misc_RNA (1)...(19): siRNA sense strand
ucagggagaaccucaaagu

SEQ ID NO: 1809462 - RNA, 19 nt, Homo sapiens
  misc_RNA (1)...(19): siRNA sense strand
gcgaagcuucaaguacuuu

SEQ ID NO: 1809463 - RNA, 19 nt, Homo sapiens
  misc_RNA (1)...(19): siRNA sense strand
ucuacaacaccaagaagaa

SEQ ID NO: 1809464 - RNA, 19 nt, Homo sapiens
  misc_RNA (1)...(19): siRNA sense strand
gccggacgguggagaacau

SEQ ID NO: 1809465 - RNA, 19 nt, Homo sapiens
  misc_RNA (1)...(19): siRNA sense strand
agggagaaccucaaagugu

SEQ ID NO: 1809466 - RNA, 19 nt, Homo sapiens
  misc_RNA (1)...(19): siRNA sense strand
gaagcuucaaguacuuuua

SEQ ID NO: 1809467 - RNA, 19 nt, Homo sapiens
  misc_RNA (1)...(19): siRNA sense strand
ccucaaaguguggaucuau

SEQ ID NO: 1809468 - RNA, 19 nt, Homo sapiens
  misc_RNA (1)...(19): siRNA sense strand
gggaccugcugccuuuuaa

SEQ ID NO: 1809469 - RNA, 19 nt, Homo sapiens
  misc_RNA (1)...(19): siRNA sense strand
ggaaugggauccagcaauu

SEQ ID NO: 1809470 - RNA, 19 nt, Homo sapiens
  misc_RNA (1)...(19): siRNA sense strand
gcaauucucuucauuuauc

SEQ ID NO: 1809471 - RNA, 19 nt, Homo sapiens
  misc_RNA (1)...(19): siRNA sense strand
gaacaaagagucacuggaa

SEQ ID NO: 1809472 - RNA, 19 nt, Homo sapiens
  misc_RNA (1)...(19): siRNA sense strand
cugauuagcuucaucuuua

SEQ ID NO: 1809473 - RNA, 19 nt, Homo sapiens
  misc_RNA (1)...(19): siRNA sense strand
ugaucaagcuugcagauua

SEQ ID NO: 1809474 - RNA, 19 nt, Homo sapiens
  misc_RNA (1)...(19): siRNA sense strand
uguaauagaugcccuagua

SEQ ID NO: 1809475 - RNA, 19 nt, Homo sapiens
  misc_RNA (1)...(19): siRNA sense strand
gaacagcaaccuuuccuaa

SEQ ID NO: 1809476 - RNA, 19 nt, Homo sapiens
  misc_RNA (1)...(19): siRNA sense strand
gaaagaacauaaacucaag

SEQ ID NO: 1809477 - RNA, 19 nt, Homo sapiens
  misc_RNA (1)...(19): siRNA sense strand
gaacauaaacucaagaaag

SEQ ID NO: 1809478 - RNA, 19 nt, Homo sapiens
  misc_RNA (1)...(19): siRNA sense strand
guaaugaucuuggcacuug

SEQ ID NO: 1809479 - RNA, 19 nt, Homo sapiens
  misc_RNA (1)...(19): siRNA sense strand
gaaggaggaugagaagaaa

SEQ ID NO: 1809480 - RNA, 19 nt, Homo sapiens
  misc_RNA (1)...(19): siRNA sense strand
cuacugacauguaccauaa

SEQ ID NO: 1809481 - RNA, 19 nt, Homo sapiens
  misc_RNA (1)...(19): siRNA sense strand
cggcaauucucuucauuua

SEQ ID NO: 1809482 - RNA, 19 nt, Homo sapiens
  misc_RNA (1)...(19): siRNA sense strand
gcucccaucuugaaguuua

SEQ ID NO: 1809483 - RNA, 19 nt, Homo sapiens
  misc_RNA (1)...(19): siRNA sense strand
ggacauguauggagaaagg

SEQ ID NO: 1809484 - RNA, 19 nt, Homo sapiens
  misc_RNA (1)...(19): siRNA sense strand
ggaguagcaucccuuaaug

SEQ ID NO: 1809485 - RNA, 19 nt, Homo sapiens
  misc_RNA (1)...(19): siRNA sense strand
ggaaagaacauaaacucaa

SEQ ID NO: 1809486 - RNA, 19 nt, Homo sapiens
  misc_RNA (1)...(19): siRNA sense strand
gaaaggauccaucaugcuu

SEQ ID NO: 1809487 - RNA, 19 nt, Homo sapiens
  misc_RNA (1)...(19): siRNA sense strand
gccauuaucuuguccauuc

SEQ ID NO: 1809488 - RNA, 19 nt, Homo sapiens
  misc_RNA (1)...(19): siRNA sense strand
aaccugaacuuaaggauaa

SEQ ID NO: 1809489 - RNA, 19 nt, Homo sapiens
  misc_RNA (1)...(19): siRNA sense strand
caaguaggauguuuaccaa

SEQ ID NO: 1809490 - RNA, 19 nt, Homo sapiens
  misc_RNA (1)...(19): siRNA sense strand
guacucagguggagagaau

SEQ ID NO: 1809491 - RNA, 19 nt, Homo sapiens
  misc_RNA (1)...(19): siRNA sense strand
gagauggaguggaaggaaa

SEQ ID NO: 1809492 - RNA, 19 nt, Homo sapiens
  misc_RNA (1)...(19): siRNA sense strand
uugagaggcuucuauuuaa

SEQ ID NO: 1809493 - RNA, 19 nt, Homo sapiens
  misc_RNA (1)...(19): siRNA sense strand
gauagagccuccuaagagu

SEQ ID NO: 1809494 - RNA, 19 nt, Homo sapiens
  misc_RNA (1)...(19): siRNA sense strand
ggagaaaggauccaucaug

SEQ ID NO: 1809495 - RNA, 19 nt, Homo sapiens
  misc_RNA (1)...(19): siRNA sense strand
uccaugacauugcuuauaa

SEQ ID NO: 1809496 - RNA, 19 nt, Homo sapiens
  misc_RNA (1)...(19): siRNA sense strand
gaacgcauccgauucaucu

SEQ ID NO: 1809497 - RNA, 19 nt, Homo sapiens
  misc_RNA (1)...(19): siRNA sense strand
ggauagagccuccuaagag

SEQ ID NO: 1809498 - RNA, 19 nt, Homo sapiens
  misc_RNA (1)...(19): siRNA sense strand
gcagaacgcauccgauuca

SEQ ID NO: 1809499 - RNA, 19 nt, Homo sapiens
  misc_RNA (1)...(19): siRNA sense strand
aggaccagcugaagaauaa

SEQ ID NO: 1809500 - RNA, 19 nt, Homo sapiens
  misc_RNA (1)...(19): siRNA sense strand
cauugucccuucauaguuu

SEQ ID NO: 1809501 - RNA, 19 nt, Homo sapiens
  misc_RNA (1)...(19): siRNA sense strand
ggcaggagauggaguggaa

SEQ ID NO: 1809502 - RNA, 19 nt, Homo sapiens
  misc_RNA (1)...(19): siRNA sense strand
agagaaagaucaccaacau

SEQ ID NO: 1809503 - RNA, 19 nt, Homo sapiens
  misc_RNA (1)...(19): siRNA sense strand
gaguccaccuguucacuuu

SEQ ID NO: 1809504 - RNA, 19 nt, Homo sapiens
  misc_RNA (1)...(19): siRNA sense strand
ggagagaauguucagauga

SEQ ID NO: 1809505 - RNA, 19 nt, Homo sapiens
  misc_RNA (1)...(19): siRNA sense strand
cagaguauuugccaacuau

SEQ ID NO: 1809506 - RNA, 19 nt, Homo sapiens
  misc_RNA (1)...(19): siRNA sense strand
ucauuuaucuggcaacugu

SEQ ID NO: 1809507 - RNA, 19 nt, Homo sapiens
  misc_RNA (1)...(19): siRNA sense strand
ucaagaagaugaucaagcu

SEQ ID NO: 1809508 - RNA, 19 nt, Homo sapiens
  misc_RNA (1)...(19): siRNA sense strand
guucaauacuucacacguu

SEQ ID NO: 1809509 - RNA, 19 nt, Homo sapiens
  misc_RNA (1)...(19): siRNA sense strand
cugaugagguguuccauga

SEQ ID NO: 1809510 - RNA, 19 nt, Homo sapiens
  misc_RNA (1)...(19): siRNA sense strand
gaagggaagucuggacagu

SEQ ID NO: 1809511 - RNA, 19 nt, Homo sapiens
  misc_RNA (1)...(19): siRNA sense strand
gggaacaacuguaauuuug

SEQ ID NO: 1809512 - RNA, 19 nt, Homo sapiens
  misc_RNA (1)...(19): siRNA sense strand
gagaggcuucuauuuaauu

SEQ ID NO: 1809513 - RNA, 19 nt, Homo sapiens
  misc_RNA (1)...(19): siRNA sense strand
guucugugguggacuaauu

SEQ ID NO: 1809514 - RNA, 19 nt, Homo sapiens
  misc_RNA (1)...(19): siRNA sense strand
gaugagguguuccaugaca

SEQ ID NO: 1809515 - RNA, 19 nt, Homo sapiens
  misc_RNA (1)...(19): siRNA sense strand
gaaugggauccagcaauua

SEQ ID NO: 1809516 - RNA, 19 nt, Homo sapiens
  misc_RNA (1)...(19): siRNA sense strand
gaacaaccaaaguuucuag

SEQ ID NO: 1809517 - RNA, 19 nt, Homo sapiens
  misc_RNA (1)...(19): siRNA sense strand
caagaaaggagcaggguau

SEQ ID NO: 1809518 - RNA, 19 nt, Homo sapiens
  misc_RNA (1)...(19): siRNA sense strand
ccaacuaugucuucuacug

SEQ ID NO: 1809519 - RNA, 19 nt, Homo sapiens
  misc_RNA (1)...(19): siRNA sense strand
gaucaagcuugcagauuac

SEQ ID NO: 1809520 - RNA, 19 nt, Homo sapiens
  misc_RNA (1)...(19): siRNA sense strand
uuugagaggcuucuauuua

SEQ ID NO: 1809521 - RNA, 19 nt, Homo sapiens
  misc_RNA (1)...(19): siRNA sense strand
ggaugccacugacaacaug

SEQ ID NO: 1809522 - RNA, 19 nt, Homo sapiens
  misc_RNA (1)...(19): siRNA sense strand
caauggacaucauggaaca

SEQ ID NO: 1809523 - RNA, 19 nt, Homo sapiens
  misc_RNA (1)...(19): siRNA sense strand
guaaacaggaaagaacaua

SEQ ID NO: 1809524 - RNA, 19 nt, Homo sapiens
  misc_RNA (1)...(19): siRNA sense strand
ugacccagcuaauaucuca

SEQ ID NO: 1809525 - RNA, 19 nt, Homo sapiens
  misc_RNA (1)...(19): siRNA sense strand
gaguuucgccuuuggauug

SEQ ID NO: 1809526 - RNA, 19 nt, Homo sapiens
  misc_RNA (1)...(19): siRNA sense strand
gcaaguaggauguuuacca

SEQ ID NO: 1809527 - RNA, 19 nt, Homo sapiens
  misc_RNA (1)...(19): siRNA sense strand
agaaagaucaccaacauuc

SEQ ID NO: 1809528 - RNA, 19 nt, Homo sapiens
  misc_RNA (1)...(19): siRNA sense strand
ucauggcucuuccguggua

SEQ ID NO: 1809529 - RNA, 19 nt, Homo sapiens
  misc_RNA (1)...(19): siRNA sense strand
ucagcaaggacaauaauuu

SEQ ID NO: 1809530 - RNA, 19 nt, Homo sapiens
  misc_RNA (1)...(19): siRNA sense strand
ugagacaggccuauugaaa

SEQ ID NO: 1809531 - RNA, 19 nt, Homo sapiens
  misc_RNA (1)...(19): siRNA sense strand
caucaacuccaacuucaaa

SEQ ID NO: 1809532 - RNA, 19 nt, Homo sapiens
  misc_RNA (1)...(19): siRNA sense strand
gagaaggaccagcugaaga

SEQ ID NO: 1809533 - RNA, 19 nt, Homo sapiens
  misc_RNA (1)...(19): siRNA sense strand
ggagaugauuguugaccau

SEQ ID NO: 1809534 - RNA, 19 nt, Homo sapiens
  misc_RNA (1)...(19): siRNA sense strand
caaccuuuccuaagcgaua

SEQ ID NO: 1809535 - RNA, 19 nt, Homo sapiens
  misc_RNA (1)...(19): siRNA sense strand
ggagaacaaccaaaguuuc

SEQ ID NO: 1809536 - RNA, 19 nt, Homo sapiens
  misc_RNA (1)...(19): siRNA sense strand
gaaacagccagguggauca

SEQ ID NO: 1809537 - RNA, 19 nt, Homo sapiens
  misc_RNA (1)...(19): siRNA sense strand
ccagaguauuugccaacua

SEQ ID NO: 1809538 - RNA, 19 nt, Homo sapiens
  misc_RNA (1)...(19): siRNA sense strand
caaccacucacuauucuga

SEQ ID NO: 1809539 - RNA, 19 nt, Homo sapiens
  misc_RNA (1)...(19): siRNA sense strand
ggucaaccacucacuauuc

SEQ ID NO: 1809540 - RNA, 19 nt, Homo sapiens
  misc_RNA (1)...(19): siRNA sense strand
gugguggacuaauuaaaga

SEQ ID NO: 1809541 - RNA, 19 nt, Homo sapiens
  misc_RNA (1)...(19): siRNA sense strand
gaggacauguauggagaaa

SEQ ID NO: 1809542 - RNA, 19 nt, Homo sapiens
  misc_RNA (1)...(19): siRNA sense strand
uaugguguguuccuguaua

SEQ ID NO: 1809543 - RNA, 19 nt, Homo sapiens
  misc_RNA (1)...(19): siRNA sense strand
guuugaagauggagacaga

SEQ ID NO: 1809544 - RNA, 19 nt, Homo sapiens
  misc_RNA (1)...(19): siRNA sense strand
gcucuuccgugguauguag

SEQ ID NO: 1809545 - RNA, 19 nt, Homo sapiens
  misc_RNA (1)...(19): siRNA sense strand
guuggucacuauacugauu

SEQ ID NO: 1809546 - RNA, 19 nt, Homo sapiens
  misc_RNA (1)...(19): siRNA sense strand
acugacauguaccauaaua

SEQ ID NO: 1809547 - RNA, 19 nt, Homo sapiens
  misc_RNA (1)...(19): siRNA sense strand
caacuaugucuucuacuga

SEQ ID NO: 1809548 - RNA, 19 nt, Homo sapiens
  misc_RNA (1)...(19): siRNA sense strand
gagcugaggacauguaugg

SEQ ID NO: 1809549 - RNA, 19 nt, Homo sapiens
  misc_RNA (1)...(19): siRNA sense strand
caaauuacagcugugauug

SEQ ID NO: 1809550 - RNA, 19 nt, Homo sapiens
  misc_RNA (1)...(19): siRNA sense strand
caacaaauuacagcuguga

SEQ ID NO: 1809551 - RNA, 19 nt, Homo sapiens
  misc_RNA (1)...(19): siRNA sense strand
ccaugacauugcuuauaaa

SEQ ID NO: 1809552 - RNA, 19 nt, Homo sapiens
  misc_RNA (1)...(19): siRNA sense strand
agaaggaggaugagaagaa

SEQ ID NO: 1809553 - RNA, 19 nt, Homo sapiens
  misc_RNA (1)...(19): siRNA sense strand
gaagaaggaguguucaaaa

SEQ ID NO: 1809554 - RNA, 19 nt, Homo sapiens
  misc_RNA (1)...(19): siRNA sense strand
guaccauaauacuaccuuu

SEQ ID NO: 1809555 - RNA, 19 nt, Homo sapiens
  misc_RNA (1)...(19): siRNA sense strand
ccaccugacccagcuaaua

SEQ ID NO: 1809556 - RNA, 19 nt, Homo sapiens
  misc_RNA (1)...(19): siRNA sense strand
ugagaggcuucuauuuaau

SEQ ID NO: 1809557 - RNA, 19 nt, Homo sapiens
  misc_RNA (1)...(19): siRNA sense strand
uugaugaguuccuagauga

SEQ ID NO: 1809558 - RNA, 19 nt, Homo sapiens
  misc_RNA (1)...(19): siRNA sense strand
agaaggaccagcugaagaa

SEQ ID NO: 1809559 - RNA, 19 nt, Homo sapiens
  misc_RNA (1)...(19): siRNA sense strand
gagaaagaucaccaacauu

SEQ ID NO: 1809560 - RNA, 19 nt, Homo sapiens
  misc_RNA (1)...(19): siRNA sense strand
gcgcagaguccaccuguuc

SEQ ID NO: 1809561 - RNA, 19 nt, Homo sapiens
  misc_RNA (1)...(19): siRNA sense strand
cuggaacccuuguguuuau

SEQ ID NO: 1809562 - RNA, 19 nt, Homo sapiens
  misc_RNA (1)...(19): siRNA sense strand
aacauaaacucaagaaagg

SEQ ID NO: 1809563 - RNA, 19 nt, Homo sapiens
  misc_RNA (1)...(19): siRNA sense strand
gaaccuacaccucuuccau

SEQ ID NO: 1809564 - RNA, 19 nt, Homo sapiens
  misc_RNA (1)...(19): siRNA sense strand
gaaggaguguucaaaauac

SEQ ID NO: 1809565 - RNA, 19 nt, Homo sapiens
  misc_RNA (1)...(19): siRNA sense strand
cgaagaaggaguguucaaa

SEQ ID NO: 1809566 - RNA, 19 nt, Homo sapiens
  misc_RNA (1)...(19): siRNA sense strand
gcaacuguaacuaaugcua

SEQ ID NO: 1809567 - RNA, 19 nt, Homo sapiens
  misc_RNA (1)...(19): siRNA sense strand
aaaccugaacuuaaggaua

SEQ ID NO: 1809568 - RNA, 19 nt, Homo sapiens
  misc_RNA (1)...(19): siRNA sense strand
gcucacaucgacaguuuga

SEQ ID NO: 1809569 - RNA, 19 nt, Homo sapiens
  misc_RNA (1)...(19): siRNA sense strand
gaacagcaguccuuccauu

SEQ ID NO: 1809570 - RNA, 19 nt, Homo sapiens
  misc_RNA (1)...(19): siRNA sense strand
ggagaacucuuuaaacuca

SEQ ID NO: 1809571 - RNA, 19 nt, Homo sapiens
  misc_RNA (1)...(19): siRNA sense strand
guaaagaccugcuagacaa

SEQ ID NO: 1809572 - RNA, 19 nt, Homo sapiens
  misc_RNA (1)...(19): siRNA sense strand
ugacaaggcugcauuauca

SEQ ID NO: 1809573 - RNA, 19 nt, Homo sapiens
  misc_RNA (1)...(19): siRNA sense strand
gcaaacaaaugagccauaa

SEQ ID NO: 1809574 - RNA, 19 nt, Homo sapiens
  misc_RNA (1)...(19): siRNA sense strand
gaacuugccuuagugaaga

SEQ ID NO: 1809575 - RNA, 19 nt, Homo sapiens
  misc_RNA (1)...(19): siRNA sense strand
gagaggaagucgaaaucua

SEQ ID NO: 1809576 - RNA, 19 nt, Homo sapiens
  misc_RNA (1)...(19): siRNA sense strand
ugagagaacuuaccauaga

SEQ ID NO: 1809577 - RNA, 19 nt, Homo sapiens
  misc_RNA (1)...(19): siRNA sense strand
gaagaggagucugaggaua

SEQ ID NO: 1809578 - RNA, 19 nt, Homo sapiens
  misc_RNA (1)...(19): siRNA sense strand
ggacaaagcgaaugaugaa

SEQ ID NO: 1809579 - RNA, 19 nt, Homo sapiens
  misc_RNA (1)...(19): siRNA sense strand
ccagggagguaaagacaua

SEQ ID NO: 1809580 - RNA, 19 nt, Homo sapiens
  misc_RNA (1)...(19): siRNA sense strand
ggagagcauuguggaaaua

SEQ ID NO: 1809581 - RNA, 19 nt, Homo sapiens
  misc_RNA (1)...(19): siRNA sense strand
caagaaacccuguagugua

SEQ ID NO: 1809582 - RNA, 19 nt, Homo sapiens
  misc_RNA (1)...(19): siRNA sense strand
cuacaagcaucgauaguaa

SEQ ID NO: 1809583 - RNA, 19 nt, Homo sapiens
  misc_RNA (1)...(19): siRNA sense strand
ucacuaagccuacaauuga

SEQ ID NO: 1809584 - RNA, 19 nt, Homo sapiens
  misc_RNA (1)...(19): siRNA sense strand
aagaggagcuuuccauuga

SEQ ID NO: 1809585 - RNA, 19 nt, Homo sapiens
  misc_RNA (1)...(19): siRNA sense strand
guucaugccugccuguaua

SEQ ID NO: 1809586 - RNA, 19 nt, Homo sapiens
  misc_RNA (1)...(19): siRNA sense strand
gaggaugccuucuacaaau

SEQ ID NO: 1809587 - RNA, 19 nt, Homo sapiens
  misc_RNA (1)...(19): siRNA sense strand
gccauugacucuugaauug

SEQ ID NO: 1809588 - RNA, 19 nt, Homo sapiens
  misc_RNA (1)...(19): siRNA sense strand
agaagaagcugagccagua

SEQ ID NO: 1809589 - RNA, 19 nt, Homo sapiens
  misc_RNA (1)...(19): siRNA sense strand
caaaagagauucagaacaa

SEQ ID NO: 1809590 - RNA, 19 nt, Homo sapiens
  misc_RNA (1)...(19): siRNA sense strand
ugacagaugugaacucuca

SEQ ID NO: 1809591 - RNA, 19 nt, Homo sapiens
  misc_RNA (1)...(19): siRNA sense strand
gcaagcacuuuaugcacua

SEQ ID NO: 1809592 - RNA, 19 nt, Homo sapiens
  misc_RNA (1)...(19): siRNA sense strand
caaaguacuugaaucugaa

SEQ ID NO: 1809593 - RNA, 19 nt, Homo sapiens
  misc_RNA (1)...(19): siRNA sense strand
ucgagaaacucauuauuga

SEQ ID NO: 1809594 - RNA, 19 nt, Homo sapiens
  misc_RNA (1)...(19): siRNA sense strand
gucaagugcuuccaguuua

SEQ ID NO: 1809595 - RNA, 19 nt, Homo sapiens
  misc_RNA (1)...(19): siRNA sense strand
ccagaaagaucaucacagu

SEQ ID NO: 1809596 - RNA, 19 nt, Homo sapiens
  misc_RNA (1)...(19): siRNA sense strand
gaagaggcguaccuuuguu

SEQ ID NO: 1809597 - RNA, 19 nt, Homo sapiens
  misc_RNA (1)...(19): siRNA sense strand
gaagaggagcuuuccauug

SEQ ID NO: 1809598 - RNA, 19 nt, Homo sapiens
  misc_RNA (1)...(19): siRNA sense strand
ggacacugcuguuaucaag

SEQ ID NO: 1809599 - RNA, 19 nt, Homo sapiens
  misc_RNA (1)...(19): siRNA sense strand
aaauucagcugguaccuaa

SEQ ID NO: 1809600 - RNA, 19 nt, Homo sapiens
  misc_RNA (1)...(19): siRNA sense strand
aaagaaccaugaugaagaa

SEQ ID NO: 1809601 - RNA, 19 nt, Homo sapiens
  misc_RNA (1)...(19): siRNA sense strand
acaaaguacuugaaucuga

SEQ ID NO: 1809602 - RNA, 19 nt, Homo sapiens
  misc_RNA (1)...(19): siRNA sense strand
gaaaugaaacuggagugua

SEQ ID NO: 1809603 - RNA, 19 nt, Homo sapiens
  misc_RNA (1)...(19): siRNA sense strand
gcacugaggcugagcgaaa

SEQ ID NO: 1809604 - RNA, 19 nt, Homo sapiens
  misc_RNA (1)...(19): siRNA sense strand
agaaagaucaucacaguuu

SEQ ID NO: 1809605 - RNA, 19 nt, Homo sapiens
  misc_RNA (1)...(19): siRNA sense strand
gaagagaacccagaaagau

SEQ ID NO: 1809606 - RNA, 19 nt, Homo sapiens
  misc_RNA (1)...(19): siRNA sense strand
aaaugaaacuggaguguau

SEQ ID NO: 1809607 - RNA, 19 nt, Homo sapiens
  misc_RNA (1)...(19): siRNA sense strand
ugagaaggcuauugaugaa

SEQ ID NO: 1809608 - RNA, 19 nt, Homo sapiens
  misc_RNA (1)...(19): siRNA sense strand
gagagaacuuaccauagaa

SEQ ID NO: 1809609 - RNA, 19 nt, Homo sapiens
  misc_RNA (1)...(19): siRNA sense strand
gaccaguacuuuaaucaga

SEQ ID NO: 1809610 - RNA, 19 nt, Homo sapiens
  misc_RNA (1)...(19): siRNA sense strand
ggaagaagccaaggacaaa

SEQ ID NO: 1809611 - RNA, 19 nt, Homo sapiens
  misc_RNA (1)...(19): siRNA sense strand
ggaagaaaauggagaagaa

SEQ ID NO: 1809612 - RNA, 19 nt, Homo sapiens
  misc_RNA (1)...(19): siRNA sense strand
ucaaguaccuagacucaga

SEQ ID NO: 1809613 - RNA, 19 nt, Homo sapiens
  misc_RNA (1)...(19): siRNA sense strand
gaugauauaugcaagaaac

SEQ ID NO: 1809614 - RNA, 19 nt, Homo sapiens
  misc_RNA (1)...(19): siRNA sense strand
cagaugacauggccauuga

SEQ ID NO: 1809615 - RNA, 19 nt, Homo sapiens
  misc_RNA (1)...(19): siRNA sense strand
ggaauuggcagaugacaug

SEQ ID NO: 1809616 - RNA, 19 nt, Homo sapiens
  misc_RNA (1)...(19): siRNA sense strand
gauguuagaggcagaauug

SEQ ID NO: 1809617 - RNA, 19 nt, Homo sapiens
  misc_RNA (1)...(19): siRNA sense strand
gcagagagugccgaucuua

SEQ ID NO: 1809618 - RNA, 19 nt, Homo sapiens
  misc_RNA (1)...(19): siRNA sense strand
caaaugagccauaagaaag

SEQ ID NO: 1809619 - RNA, 19 nt, Homo sapiens
  misc_RNA (1)...(19): siRNA sense strand
ucgaacagauucacaaaga

SEQ ID NO: 1809620 - RNA, 19 nt, Homo sapiens
  misc_RNA (1)...(19): siRNA sense strand
caccacagauguucaauca

SEQ ID NO: 1809621 - RNA, 19 nt, Homo sapiens
  misc_RNA (1)...(19): siRNA sense strand
ccacugguuucuaguacua

SEQ ID NO: 1809622 - RNA, 19 nt, Homo sapiens
  misc_RNA (1)...(19): siRNA sense strand
ugaaaucugucacggcauu

SEQ ID NO: 1809623 - RNA, 19 nt, Homo sapiens
  misc_RNA (1)...(19): siRNA sense strand
caaagaggcuaaaauagaa

SEQ ID NO: 1809624 - RNA, 19 nt, Homo sapiens
  misc_RNA (1)...(19): siRNA sense strand
uaaagaaccaugaugaaga

SEQ ID NO: 1809625 - RNA, 19 nt, Homo sapiens
  misc_RNA (1)...(19): siRNA sense strand
ccacagauguucaaucaac

SEQ ID NO: 1809626 - RNA, 19 nt, Homo sapiens
  misc_RNA (1)...(19): siRNA sense strand
ccaaagacauggaagaaac

SEQ ID NO: 1809627 - RNA, 19 nt, Homo sapiens
  misc_RNA (1)...(19): siRNA sense strand
caagucagccgguguauca

SEQ ID NO: 1809628 - RNA, 19 nt, Homo sapiens
  misc_RNA (1)...(19): siRNA sense strand
ugacauggccauugauauu

SEQ ID NO: 1809629 - RNA, 19 nt, Homo sapiens
  misc_RNA (1)...(19): siRNA sense strand
ucaagugcuuccaguuuaa

SEQ ID NO: 1809630 - RNA, 19 nt, Homo sapiens
  misc_RNA (1)...(19): siRNA sense strand
ggagagcgcucaucuugcu

SEQ ID NO: 1809631 - RNA, 19 nt, Homo sapiens
  misc_RNA (1)...(19): siRNA sense strand
ccucacaucuugcacagaa

SEQ ID NO: 1809632 - RNA, 19 nt, Homo sapiens
  misc_RNA (1)...(19): siRNA sense strand
uaaagcagaugaugauguc

SEQ ID NO: 1809633 - RNA, 19 nt, Homo sapiens
  misc_RNA (1)...(19): siRNA sense strand
agaaacaucagacccuuua

SEQ ID NO: 1809634 - RNA, 19 nt, Homo sapiens
  misc_RNA (1)...(19): siRNA sense strand
aaacaaaugagccauaaga

SEQ ID NO: 1809635 - RNA, 19 nt, Homo sapiens
  misc_RNA (1)...(19): siRNA sense strand
gaccuaaggcugugcaauu

SEQ ID NO: 1809636 - RNA, 19 nt, Homo sapiens
  misc_RNA (1)...(19): siRNA sense strand
ggaagaggcguaccuuugu

SEQ ID NO: 1809637 - RNA, 19 nt, Homo sapiens
  misc_RNA (1)...(19): siRNA sense strand
gaucaaccaacccaaauug

SEQ ID NO: 1809638 - RNA, 19 nt, Homo sapiens
  misc_RNA (1)...(19): siRNA sense strand
gcaagaaacccuguagugu

SEQ ID NO: 1809639 - RNA, 19 nt, Homo sapiens
  misc_RNA (1)...(19): siRNA sense strand
ggaagggcguggcucugaa

SEQ ID NO: 1809640 - RNA, 19 nt, Homo sapiens
  misc_RNA (1)...(19): siRNA sense strand
ggagaagauguacauaauu

SEQ ID NO: 1809641 - RNA, 19 nt, Homo sapiens
  misc_RNA (1)...(19): siRNA sense strand
caggaaguauugccauuga

SEQ ID NO: 1809642 - RNA, 19 nt, Homo sapiens
  misc_RNA (1)...(19): siRNA sense strand
gacgagagcauaagaacuu

SEQ ID NO: 1809643 - RNA, 19 nt, Homo sapiens
  misc_RNA (1)...(19): siRNA sense strand
aagaggaacuggagaggaa

SEQ ID NO: 1809644 - RNA, 19 nt, Homo sapiens
  misc_RNA (1)...(19): siRNA sense strand
gaagagcagcggagagaga

SEQ ID NO: 1809645 - RNA, 19 nt, Homo sapiens
  misc_RNA (1)...(19): siRNA sense strand
ggucaagugcuuccaguuu

SEQ ID NO: 1809646 - RNA, 19 nt, Homo sapiens
  misc_RNA (1)...(19): siRNA sense strand
ucagugaugugguucuuga

SEQ ID NO: 1809647 - RNA, 19 nt, Homo sapiens
  misc_RNA (1)...(19): siRNA sense strand
ccaacaauauccaguucaa

SEQ ID NO: 1809648 - RNA, 19 nt, Homo sapiens
  misc_RNA (1)...(19): siRNA sense strand
gugaaggaauagaugcuaa

SEQ ID NO: 1809649 - RNA, 19 nt, Homo sapiens
  misc_RNA (1)...(19): siRNA sense strand
gaacugcaagcacuuuaug

SEQ ID NO: 1809650 - RNA, 19 nt, Homo sapiens
  misc_RNA (1)...(19): siRNA sense strand
gaaagugggagccuuaugg

SEQ ID NO: 1809651 - RNA, 19 nt, Homo sapiens
  misc_RNA (1)...(19): siRNA sense strand
caugagagaacuuaccaua

SEQ ID NO: 1809652 - RNA, 19 nt, Homo sapiens
  misc_RNA (1)...(19): siRNA sense strand
gaugacauggccauugaua

SEQ ID NO: 1809653 - RNA, 19 nt, Homo sapiens
  misc_RNA (1)...(19): siRNA sense strand
gaacaagaagagcaaagga

SEQ ID NO: 1809654 - RNA, 19 nt, Homo sapiens
  misc_RNA (1)...(19): siRNA sense strand
guauggaccaguacuuuaa

SEQ ID NO: 1809655 - RNA, 19 nt, Homo sapiens
  misc_RNA (1)...(19): siRNA sense strand
agacaagccugguaacaca

SEQ ID NO: 1809656 - RNA, 19 nt, Homo sapiens
  misc_RNA (1)...(19): siRNA sense strand
ugucaggacuuacuguuga

SEQ ID NO: 1809657 - RNA, 19 nt, Homo sapiens
  misc_RNA (1)...(19): siRNA sense strand
gggguuacauuuccauuua

SEQ ID NO: 1809658 - RNA, 19 nt, Homo sapiens
  misc_RNA (1)...(19): siRNA sense strand
gagaagacacaauuccuau

SEQ ID NO: 1809659 - RNA, 19 nt, Homo sapiens
  misc_RNA (1)...(19): siRNA sense strand
gcaacagcucggccaaaua

SEQ ID NO: 1809660 - RNA, 19 nt, Homo sapiens
  misc_RNA (1)...(19): siRNA sense strand
uggugaagcugcuaaagaa

SEQ ID NO: 1809661 - RNA, 19 nt, Homo sapiens
  misc_RNA (1)...(19): siRNA sense strand
ucagucagcaccuaucaua

SEQ ID NO: 1809662 - RNA, 19 nt, Homo sapiens
  misc_RNA (1)...(19): siRNA sense strand
gagcauuguggaaauagua

SEQ ID NO: 1809663 - RNA, 19 nt, Homo sapiens
  misc_RNA (1)...(19): siRNA sense strand
gaagacacaauuccuauac

SEQ ID NO: 1809664 - RNA, 19 nt, Homo sapiens
  misc_RNA (1)...(19): siRNA sense strand
ugaaauaaauggaguuagc

SEQ ID NO: 1809665 - RNA, 19 nt, Homo sapiens
  misc_RNA (1)...(19): siRNA sense strand
cuugcuaucugaaauauug

SEQ ID NO: 1809666 - RNA, 19 nt, Homo sapiens
  misc_RNA (1)...(19): siRNA sense strand
ccagaaauuucagcaaugu

SEQ ID NO: 1809667 - RNA, 19 nt, Homo sapiens
  misc_RNA (1)...(19): siRNA sense strand
gacaaucagucucaagaag

SEQ ID NO: 1809668 - RNA, 19 nt, Homo sapiens
  misc_RNA (1)...(19): siRNA sense strand
guauugccauugacucuug

SEQ ID NO: 1809669 - RNA, 19 nt, Homo sapiens
  misc_RNA (1)...(19): siRNA sense strand
guggagagcucaaccagua

SEQ ID NO: 1809670 - RNA, 19 nt, Homo sapiens
  misc_RNA (1)...(19): siRNA sense strand
ccacaacucuugaacauca

SEQ ID NO: 1809671 - RNA, 19 nt, Homo sapiens
  misc_RNA (1)...(19): siRNA sense strand
gaucaacgacauccaguua

SEQ ID NO: 1809672 - RNA, 19 nt, Homo sapiens
  misc_RNA (1)...(19): siRNA sense strand
gaaagcagcuggcccuucu

SEQ ID NO: 1809673 - RNA, 19 nt, Homo sapiens
  misc_RNA (1)...(19): siRNA sense strand
gaagaucccuugcaaugac

SEQ ID NO: 1809674 - RNA, 19 nt, Homo sapiens
  misc_RNA (1)...(19): siRNA sense strand
ccacaguacuuugaauuug

SEQ ID NO: 1809675 - RNA, 19 nt, Homo sapiens
  misc_RNA (1)...(19): siRNA sense strand
gaagaagaguuuggaagag

SEQ ID NO: 1809676 - RNA, 19 nt, Homo sapiens
  misc_RNA (1)...(19): siRNA sense strand
acaaugagcccuacaugaa

SEQ ID NO: 1809677 - RNA, 19 nt, Homo sapiens
  misc_RNA (1)...(19): siRNA sense strand
ggagagcucaaccaguaua

SEQ ID NO: 1809678 - RNA, 19 nt, Homo sapiens
  misc_RNA (1)...(19): siRNA sense strand
ggagagguguuggugaaug

SEQ ID NO: 1809679 - RNA, 19 nt, Homo sapiens
  misc_RNA (1)...(19): siRNA sense strand
ccauuacgcagauuaagua

SEQ ID NO: 1809680 - RNA, 19 nt, Homo sapiens
  misc_RNA (1)...(19): siRNA sense strand
cacaguacuuugaauuuga

SEQ ID NO: 1809681 - RNA, 19 nt, Homo sapiens
  misc_RNA (1)...(19): siRNA sense strand
caaggacccuaucgucaau

SEQ ID NO: 1809682 - RNA, 19 nt, Homo sapiens
  misc_RNA (1)...(19): siRNA sense strand
gagagguguuggugaaugu

SEQ ID NO: 1809683 - RNA, 19 nt, Homo sapiens
  misc_RNA (1)...(19): siRNA sense strand
aauuugaguuugaggcuua

SEQ ID NO: 1809684 - RNA, 19 nt, Homo sapiens
  misc_RNA (1)...(19): siRNA sense strand
ggacaacacagccaagcuu

SEQ ID NO: 1809685 - RNA, 19 nt, Homo sapiens
  misc_RNA (1)...(19): siRNA sense strand
ggccaugagcgguccauua

SEQ ID NO: 1809686 - RNA, 19 nt, Homo sapiens
  misc_RNA (1)...(19): siRNA sense strand
gaggccagguucuuccauu

SEQ ID NO: 1809687 - RNA, 19 nt, Homo sapiens
  misc_RNA (1)...(19): siRNA sense strand
ccauuuggccuuugaagaa

SEQ ID NO: 1809688 - RNA, 19 nt, Homo sapiens
  misc_RNA (1)...(19): siRNA sense strand
caccaggauuggcaaguuu

SEQ ID NO: 1809689 - RNA, 19 nt, Homo sapiens
  misc_RNA (1)...(19): siRNA sense strand
ugaagaagaguuuggaaga

SEQ ID NO: 1809690 - RNA, 19 nt, Homo sapiens
  misc_RNA (1)...(19): siRNA sense strand
cgagccagauugacaacaa

SEQ ID NO: 1809691 - RNA, 19 nt, Homo sapiens
  misc_RNA (1)...(19): siRNA sense strand
ucaacgacauccaguuauc

SEQ ID NO: 1809692 - RNA, 19 nt, Homo sapiens
  misc_RNA (1)...(19): siRNA sense strand
ccaccaggauuggcaaguu

SEQ ID NO: 1809693 - RNA, 19 nt, Homo sapiens
  misc_RNA (1)...(19): siRNA sense strand
gugagaggcugggcaccua

SEQ ID NO: 1809694 - RNA, 19 nt, Homo sapiens
  misc_RNA (1)...(19): siRNA sense strand
gagcucaaccaguauagug

SEQ ID NO: 1809695 - RNA, 19 nt, Homo sapiens
  misc_RNA (1)...(19): siRNA sense strand
gaccugcgguuuugacuuu

SEQ ID NO: 1809696 - RNA, 19 nt, Homo sapiens
  misc_RNA (1)...(19): siRNA sense strand
caacaaugagcccuacaug

SEQ ID NO: 1809697 - RNA, 19 nt, Homo sapiens
  misc_RNA (1)...(19): siRNA sense strand
ccaaggacccuaucgucaa

SEQ ID NO: 1809698 - RNA, 19 nt, Homo sapiens
  misc_RNA (1)...(19): siRNA sense strand
gauccgagccagauugaca

SEQ ID NO: 1809699 - RNA, 19 nt, Homo sapiens
  misc_RNA (1)...(19): siRNA sense strand
gagguguuggugaauguua

SEQ ID NO: 1809700 - RNA, 19 nt, Homo sapiens
  misc_RNA (1)...(19): siRNA sense strand
gacccuaucgucaauguau

SEQ ID NO: 1809701 - RNA, 19 nt, Homo sapiens
  misc_RNA (1)...(19): siRNA sense strand
acaugaagaucccuugcaa

SEQ ID NO: 1809702 - RNA, 19 nt, Homo sapiens
  misc_RNA (1)...(19): siRNA sense strand
gacaacacagccaagcuuu

SEQ ID NO: 1809703 - RNA, 19 nt, Homo sapiens
  misc_RNA (1)...(19): siRNA sense strand
aaugagcccuacaugaaga

SEQ ID NO: 1809704 - RNA, 19 nt, Homo sapiens
  misc_RNA (1)...(19): siRNA sense strand
guucuuccauuuggccuuu

SEQ ID NO: 1809705 - RNA, 19 nt, Homo sapiens
  misc_RNA (1)...(19): siRNA sense strand
ucaggaagccauggaugua

SEQ ID NO: 1809706 - RNA, 19 nt, Homo sapiens
  misc_RNA (1)...(19): siRNA sense strand
cuggagagguguuggugaa

SEQ ID NO: 1809707 - RNA, 19 nt, Homo sapiens
  misc_RNA (1)...(19): siRNA sense strand
gagaccuccucuuuacugu

SEQ ID NO: 1809708 - RNA, 19 nt, Homo sapiens
  misc_RNA (1)...(19): siRNA sense strand
agucaagggucacuuugga

SEQ ID NO: 1809709 - RNA, 19 nt, Homo sapiens
  misc_RNA (1)...(19): siRNA sense strand
gcagcuggcccuucucaag

SEQ ID NO: 1809710 - RNA, 19 nt, Homo sapiens
  misc_RNA (1)...(19): siRNA sense strand
cagcuggcccuucucaaga

SEQ ID NO: 1809711 - RNA, 19 nt, Homo sapiens
  misc_RNA (1)...(19): siRNA sense strand
gaagaguuuggaagaguca

SEQ ID NO: 1809712 - RNA, 19 nt, Homo sapiens
  misc_RNA (1)...(19): siRNA sense strand
aagaagaguuuggaagagu

SEQ ID NO: 1809713 - RNA, 19 nt, Homo sapiens
  misc_RNA (1)...(19): siRNA sense strand
uugaacaucagaagacuuu

SEQ ID NO: 1809714 - RNA, 19 nt, Homo sapiens
  misc_RNA (1)...(19): siRNA sense strand
ccagugcuuugugagcuuu

SEQ ID NO: 1809715 - RNA, 19 nt, Homo sapiens
  misc_RNA (1)...(19): siRNA sense strand
ugaagaucccuugcaauga

SEQ ID NO: 1809716 - RNA, 19 nt, Homo sapiens
  misc_RNA (1)...(19): siRNA sense strand
agaacguccugucaacuca

SEQ ID NO: 1809717 - RNA, 19 nt, Homo sapiens
  misc_RNA (1)...(19): siRNA sense strand
guaugguacucugugaaug

SEQ ID NO: 1809718 - RNA, 19 nt, Homo sapiens
  misc_RNA (1)...(19): siRNA sense strand
gacccacaguacuuugaau

SEQ ID NO: 1809719 - RNA, 19 nt, Homo sapiens
  misc_RNA (1)...(19): siRNA sense strand
gagcacucccggcagauca

SEQ ID NO: 1809720 - RNA, 19 nt, Homo sapiens
  misc_RNA (1)...(19): siRNA sense strand
gccaugagcgguccauuac

SEQ ID NO: 1809721 - RNA, 19 nt, Homo sapiens
  misc_RNA (1)...(19): siRNA sense strand
gccagguucuuccauuugg

SEQ ID NO: 1809722 - RNA, 19 nt, Homo sapiens
  misc_RNA (1)...(19): siRNA sense strand
caggaagccauggauguaa

SEQ ID NO: 1809723 - RNA, 19 nt, Homo sapiens
  misc_RNA (1)...(19): siRNA sense strand
ggcuaccagugcuuuguga

SEQ ID NO: 1809724 - RNA, 19 nt, Homo sapiens
  misc_RNA (1)...(19): siRNA sense strand
gguccauuacgcagauuaa

SEQ ID NO: 1809725 - RNA, 19 nt, Homo sapiens
  misc_RNA (1)...(19): siRNA sense strand
ggccuuugaagaagaguuu

SEQ ID NO: 1809726 - RNA, 19 nt, Homo sapiens
  misc_RNA (1)...(19): siRNA sense strand
aggccagguucuuccauuu

SEQ ID NO: 1809727 - RNA, 19 nt, Homo sapiens
  misc_RNA (1)...(19): siRNA sense strand
gcaaguuugaggccagguu

SEQ ID NO: 1809728 - RNA, 19 nt, Homo sapiens
  misc_RNA (1)...(19): siRNA sense strand
cuccacaacucuugaacau

SEQ ID NO: 1809729 - RNA, 19 nt, Homo sapiens
  misc_RNA (1)...(19): siRNA sense strand
caaugagcccuacaugaag

SEQ ID NO: 1809730 - RNA, 19 nt, Homo sapiens
  misc_RNA (1)...(19): siRNA sense strand
augaagaucccuugcaaug

SEQ ID NO: 1809731 - RNA, 19 nt, Homo sapiens
  misc_RNA (1)...(19): siRNA sense strand
gggauccgagccagauuga

SEQ ID NO: 1809732 - RNA, 19 nt, Homo sapiens
  misc_RNA (1)...(19): siRNA sense strand
ggccagguucuuccauuug

SEQ ID NO: 1809733 - RNA, 19 nt, Homo sapiens
  misc_RNA (1)...(19): siRNA sense strand
gaacaucagaagacuuucc

SEQ ID NO: 1809734 - RNA, 19 nt, Homo sapiens
  misc_RNA (1)...(19): siRNA sense strand
aauguaugguacucuguga

SEQ ID NO: 1809735 - RNA, 19 nt, Homo sapiens
  misc_RNA (1)...(19): siRNA sense strand
gaugggcuaccagugcuuu

SEQ ID NO: 1809736 - RNA, 19 nt, Homo sapiens
  misc_RNA (1)...(19): siRNA sense strand
cccacaguacuuugaauuu

SEQ ID NO: 1809737 - RNA, 19 nt, Homo sapiens
  misc_RNA (1)...(19): siRNA sense strand
ccaguauagugccaagucu

SEQ ID NO: 1809738 - RNA, 19 nt, Homo sapiens
  misc_RNA (1)...(19): siRNA sense strand
ugcaaugacucuaaaauca

SEQ ID NO: 1809739 - RNA, 19 nt, Homo sapiens
  misc_RNA (1)...(19): siRNA sense strand
aacaaugagcccuacauga

SEQ ID NO: 1809740 - RNA, 19 nt, Homo sapiens
  misc_RNA (1)...(19): siRNA sense strand
ccaguuauccagggacaug

SEQ ID NO: 1809741 - RNA, 19 nt, Homo sapiens
  misc_RNA (1)...(19): siRNA sense strand
gcccuucucaagaccaauu

SEQ ID NO: 1809742 - RNA, 19 nt, Homo sapiens
  misc_RNA (1)...(19): siRNA sense strand
aagagucaagggucacuuu

SEQ ID NO: 1809743 - RNA, 19 nt, Homo sapiens
  misc_RNA (1)...(19): siRNA sense strand
uaaguauaaccgcgaagga

SEQ ID NO: 1809744 - RNA, 19 nt, Homo sapiens
  misc_RNA (1)...(19): siRNA sense strand
caccaagcauguccucacu

SEQ ID NO: 1809745 - RNA, 19 nt, Homo sapiens
  misc_RNA (1)...(19): siRNA sense strand
ggacccuaucgucaaugua

SEQ ID NO: 1809746 - RNA, 19 nt, Homo sapiens
  misc_RNA (1)...(19): siRNA sense strand
ccauggauguaaccacaac

SEQ ID NO: 1809747 - RNA, 19 nt, Homo sapiens
  misc_RNA (1)...(19): siRNA sense strand
agaagacuuuccggacaga

SEQ ID NO: 1809748 - RNA, 19 nt, Homo sapiens
  misc_RNA (1)...(19): siRNA sense strand
aaucaccagugcuguuugg

SEQ ID NO: 1809749 - RNA, 19 nt, Homo sapiens
  misc_RNA (1)...(19): siRNA sense strand
acaagcagaugggcuacca

SEQ ID NO: 1809750 - RNA, 19 nt, Homo sapiens
  misc_RNA (1)...(19): siRNA sense strand
ccacaaccuccaccaggau

SEQ ID NO: 1809751 - RNA, 19 nt, Homo sapiens
  misc_RNA (1)...(19): siRNA sense strand
ggaaauugaugacuugaaa

SEQ ID NO: 1809752 - RNA, 19 nt, Homo sapiens
  misc_RNA (1)...(19): siRNA sense strand
gaagaacaauuagcagaua

SEQ ID NO: 1809753 - RNA, 19 nt, Homo sapiens
  misc_RNA (1)...(19): siRNA sense strand
cgaagaaccuaaagugcua

SEQ ID NO: 1809754 - RNA, 19 nt, Homo sapiens
  misc_RNA (1)...(19): siRNA sense strand
gaggauauguacaagacua

SEQ ID NO: 1809755 - RNA, 19 nt, Homo sapiens
  misc_RNA (1)...(19): siRNA sense strand
gagaugacuuuacagaguu

SEQ ID NO: 1809756 - RNA, 19 nt, Homo sapiens
  misc_RNA (1)...(19): siRNA sense strand
gaaauuacaggaagaguca

SEQ ID NO: 1809757 - RNA, 19 nt, Homo sapiens
  misc_RNA (1)...(19): siRNA sense strand
ggaugacgaugaugaugaa

SEQ ID NO: 1809758 - RNA, 19 nt, Homo sapiens
  misc_RNA (1)...(19): siRNA sense strand
gauaaacugcggcuaaaga

SEQ ID NO: 1809759 - RNA, 19 nt, Homo sapiens
  misc_RNA (1)...(19): siRNA sense strand
uaacugggaugacgaugau

SEQ ID NO: 1809760 - RNA, 19 nt, Homo sapiens
  misc_RNA (1)...(19): siRNA sense strand
agagucagaccucgaauua

SEQ ID NO: 1809761 - RNA, 19 nt, Homo sapiens
  misc_RNA (1)...(19): siRNA sense strand
uuacagaguuuggaaaguu

SEQ ID NO: 1809762 - RNA, 19 nt, Homo sapiens
  misc_RNA (1)...(19): siRNA sense strand
cagauaaacugcggcuaaa

SEQ ID NO: 1809763 - RNA, 19 nt, Homo sapiens
  misc_RNA (1)...(19): siRNA sense strand
gaagaagaaaggugugguu

SEQ ID NO: 1809764 - RNA, 19 nt, Homo sapiens
  misc_RNA (1)...(19): siRNA sense strand
caagagaugacuuuacaga

SEQ ID NO: 1809765 - RNA, 19 nt, Homo sapiens
  misc_RNA (1)...(19): siRNA sense strand
uacagaguuuggaaaguua

SEQ ID NO: 1809766 - RNA, 19 nt, Homo sapiens
  misc_RNA (1)...(19): siRNA sense strand
gaaagaacggcaacagaag

SEQ ID NO: 1809767 - RNA, 19 nt, Homo sapiens
  misc_RNA (1)...(19): siRNA sense strand
ggaagagucagaccucgaa

SEQ ID NO: 1809768 - RNA, 19 nt, Homo sapiens
  misc_RNA (1)...(19): siRNA sense strand
gagaaagaacggcaacaga

SEQ ID NO: 1809769 - RNA, 19 nt, Homo sapiens
  misc_RNA (1)...(19): siRNA sense strand
gaagaaaggugugguuccu

SEQ ID NO: 1809770 - RNA, 19 nt, Homo sapiens
  misc_RNA (1)...(19): siRNA sense strand
gaaaaggcaagaagaaauu

SEQ ID NO: 1809771 - RNA, 19 nt, Homo sapiens
  misc_RNA (1)...(19): siRNA sense strand
agagaugacuuuacagagu

SEQ ID NO: 1809772 - RNA, 19 nt, Homo sapiens
  misc_RNA (1)...(19): siRNA sense strand
agaaagaacggcaacagaa

SEQ ID NO: 1809773 - RNA, 19 nt, Homo sapiens
  misc_RNA (1)...(19): siRNA sense strand
acgaggacgucaaggauaa

SEQ ID NO: 1809774 - RNA, 19 nt, Homo sapiens
  misc_RNA (1)...(19): siRNA sense strand
gcuaacaccagaagaacaa

SEQ ID NO: 1809775 - RNA, 19 nt, Homo sapiens
  misc_RNA (1)...(19): siRNA sense strand
acaauuagcagauaaacug

SEQ ID NO: 1809776 - RNA, 19 nt, Homo sapiens
  misc_RNA (1)...(19): siRNA sense strand
gaagaaaaggcaagaagaa

SEQ ID NO: 1809777 - RNA, 19 nt, Homo sapiens
  misc_RNA (1)...(19): siRNA sense strand
gauauguacaagacuauga

SEQ ID NO: 1809778 - RNA, 19 nt, Homo sapiens
  misc_RNA (1)...(19): siRNA sense strand
cgagauguguguauuucau

SEQ ID NO: 1809779 - RNA, 19 nt, Homo sapiens
  misc_RNA (1)...(19): siRNA sense strand
gggaugacgaugaugauga

SEQ ID NO: 1809780 - RNA, 19 nt, Homo sapiens
  misc_RNA (1)...(19): siRNA sense strand
gcuaaagaaauuacaggaa

SEQ ID NO: 1809781 - RNA, 19 nt, Homo sapiens
  misc_RNA (1)...(19): siRNA sense strand
aaacugcggcuaaagaaau

SEQ ID NO: 1809782 - RNA, 19 nt, Homo sapiens
  misc_RNA (1)...(19): siRNA sense strand
gaagaacccgaagaaccua

SEQ ID NO: 1809783 - RNA, 19 nt, Homo sapiens
  misc_RNA (1)...(19): siRNA sense strand
guuagaagaacccgaagaa

SEQ ID NO: 1809784 - RNA, 19 nt, Homo sapiens
  misc_RNA (1)...(19): siRNA sense strand
guacaagacuaugaagacu

SEQ ID NO: 1809785 - RNA, 19 nt, Homo sapiens
  misc_RNA (1)...(19): siRNA sense strand
cauuggaaauugaugacuu

SEQ ID NO: 1809786 - RNA, 19 nt, Homo sapiens
  misc_RNA (1)...(19): siRNA sense strand
uucaagagaugacuuuaca

SEQ ID NO: 1809787 - RNA, 19 nt, Homo sapiens
  misc_RNA (1)...(19): siRNA sense strand
gagauguguguauuucauu

SEQ ID NO: 1809788 - RNA, 19 nt, Homo sapiens
  misc_RNA (1)...(19): siRNA sense strand
gaguuuggaaaguuacuaa

SEQ ID NO: 1809789 - RNA, 19 nt, Homo sapiens
  misc_RNA (1)...(19): siRNA sense strand
aaagaacggcaacagaaga

SEQ ID NO: 1809790 - RNA, 19 nt, Homo sapiens
  misc_RNA (1)...(19): siRNA sense strand
cagauuauggugguuauga

SEQ ID NO: 1809791 - RNA, 19 nt, Homo sapiens
  misc_RNA (1)...(19): siRNA sense strand
cagagaagauaaaagagaa

SEQ ID NO: 1809792 - RNA, 19 nt, Homo sapiens
  misc_RNA (1)...(19): siRNA sense strand
aagccaccaugaaagauga

SEQ ID NO: 1809793 - RNA, 19 nt, Homo sapiens
  misc_RNA (1)...(19): siRNA sense strand
aacaccagaagaacaauua

SEQ ID NO: 1809794 - RNA, 19 nt, Homo sapiens
  misc_RNA (1)...(19): siRNA sense strand
uaaacugcggcuaaagaaa

SEQ ID NO: 1809795 - RNA, 19 nt, Homo sapiens
  misc_RNA (1)...(19): siRNA sense strand
gaaguaaaaccagagguaa

SEQ ID NO: 1809796 - RNA, 19 nt, Homo sapiens
  misc_RNA (1)...(19): siRNA sense strand
gaacaauuagcagauaaac

SEQ ID NO: 1809797 - RNA, 19 nt, Homo sapiens
  misc_RNA (1)...(19): siRNA sense strand
uaacaccagaagaacaauu

SEQ ID NO: 1809798 - RNA, 19 nt, Homo sapiens
  misc_RNA (1)...(19): siRNA sense strand
gaagaaccuaaagugcuaa

SEQ ID NO: 1809799 - RNA, 19 nt, Homo sapiens
  misc_RNA (1)...(19): siRNA sense strand
gaaccuaaagugcuaacac

SEQ ID NO: 1809800 - RNA, 19 nt, Homo sapiens
  misc_RNA (1)...(19): siRNA sense strand
gauggaggauauguacaag

SEQ ID NO: 1809801 - RNA, 19 nt, Homo sapiens
  misc_RNA (1)...(19): siRNA sense strand
gcaagaaaagcaaagcaaa

SEQ ID NO: 1809802 - RNA, 19 nt, Homo sapiens
  misc_RNA (1)...(19): siRNA sense strand
agauguguguauuucauug

SEQ ID NO: 1809803 - RNA, 19 nt, Homo sapiens
  misc_RNA (1)...(19): siRNA sense strand
guucgagauguguguauuu

SEQ ID NO: 1809804 - RNA, 19 nt, Homo sapiens
  misc_RNA (1)...(19): siRNA sense strand
agucuuaguucgagaugug

SEQ ID NO: 1809805 - RNA, 19 nt, Homo sapiens
  misc_RNA (1)...(19): siRNA sense strand
gaacggcaacagaagaaaa

SEQ ID NO: 1809806 - RNA, 19 nt, Homo sapiens
  misc_RNA (1)...(19): siRNA sense strand
gauuauggugguuaugaug

SEQ ID NO: 1809807 - RNA, 19 nt, Homo sapiens
  misc_RNA (1)...(19): siRNA sense strand
ggcagauuauggugguuau

SEQ ID NO: 1809808 - RNA, 19 nt, Homo sapiens
  misc_RNA (1)...(19): siRNA sense strand
gcagagaagauaaaagaga

SEQ ID NO: 1809809 - RNA, 19 nt, Homo sapiens
  misc_RNA (1)...(19): siRNA sense strand
agucagaccucgaauuagc

SEQ ID NO: 1809810 - RNA, 19 nt, Homo sapiens
  misc_RNA (1)...(19): siRNA sense strand
aaagaggaagcagaaguaa

SEQ ID NO: 1809811 - RNA, 19 nt, Homo sapiens
  misc_RNA (1)...(19): siRNA sense strand
uaaaagccaccaugaaaga

SEQ ID NO: 1809812 - RNA, 19 nt, Homo sapiens
  misc_RNA (1)...(19): siRNA sense strand
agaugacuuuacagaguuu

SEQ ID NO: 1809813 - RNA, 19 nt, Homo sapiens
  misc_RNA (1)...(19): siRNA sense strand
ugauggaggauauguacaa

SEQ ID NO: 1809814 - RNA, 19 nt, Homo sapiens
  misc_RNA (1)...(19): siRNA sense strand
ucaaggauaacugggauga

SEQ ID NO: 1809815 - RNA, 19 nt, Homo sapiens
  misc_RNA (1)...(19): siRNA sense strand
cgaauuagcaaaggaaacu

SEQ ID NO: 1809816 - RNA, 19 nt, Homo sapiens
  misc_RNA (1)...(19): siRNA sense strand
uggaggauauguacaagac

SEQ ID NO: 1809817 - RNA, 19 nt, Homo sapiens
  misc_RNA (1)...(19): siRNA sense strand
ggaagucuuaguucgagau

SEQ ID NO: 1809818 - RNA, 19 nt, Homo sapiens
  misc_RNA (1)...(19): siRNA sense strand
agaggaagcagaaguaaaa

SEQ ID NO: 1809819 - RNA, 19 nt, Homo sapiens
  misc_RNA (1)...(19): siRNA sense strand
aaaagaggaagcagaagua

SEQ ID NO: 1809820 - RNA, 19 nt, Homo sapiens
  misc_RNA (1)...(19): siRNA sense strand
gaagucuuaguucgagaug

SEQ ID NO: 1809821 - RNA, 19 nt, Homo sapiens
  misc_RNA (1)...(19): siRNA sense strand
agaagaacaauuagcagau

SEQ ID NO: 1809822 - RNA, 19 nt, Homo sapiens
  misc_RNA (1)...(19): siRNA sense strand
uagcagagaagauaaaaga

SEQ ID NO: 1809823 - RNA, 19 nt, Homo sapiens
  misc_RNA (1)...(19): siRNA sense strand
auaaacugcggcuaaagaa

SEQ ID NO: 1809824 - RNA, 19 nt, Homo sapiens
  misc_RNA (1)...(19): siRNA sense strand
ggauaacugggaugacgau

SEQ ID NO: 1809825 - RNA, 19 nt, Homo sapiens
  misc_RNA (1)...(19): siRNA sense strand
aagaacggcaacagaagaa

SEQ ID NO: 1809826 - RNA, 19 nt, Homo sapiens
  misc_RNA (1)...(19): siRNA sense strand
auuggaaauugaugacuug

SEQ ID NO: 1809827 - RNA, 19 nt, Homo sapiens
  misc_RNA (1)...(19): siRNA sense strand
aaggaaacuuuugguguua

SEQ ID NO: 1809828 - RNA, 19 nt, Homo sapiens
  misc_RNA (1)...(19): siRNA sense strand
aacugcggcuaaagaaauu

SEQ ID NO: 1809829 - RNA, 19 nt, Homo sapiens
  misc_RNA (1)...(19): siRNA sense strand
ggaaacuuuugguguuaau

SEQ ID NO: 1809830 - RNA, 19 nt, Homo sapiens
  misc_RNA (1)...(19): siRNA sense strand
gcaguuuauggaauagaug

SEQ ID NO: 1809831 - RNA, 19 nt, Homo sapiens
  misc_RNA (1)...(19): siRNA sense strand
aaagcaaagcaaagccaaa

SEQ ID NO: 1809832 - RNA, 19 nt, Homo sapiens
  misc_RNA (1)...(19): siRNA sense strand
cacuauauuaugccaguuu

SEQ ID NO: 1809833 - RNA, 19 nt, Homo sapiens
  misc_RNA (1)...(19): siRNA sense strand
gaagagucagaccucgaau

SEQ ID NO: 1809834 - RNA, 19 nt, Homo sapiens
  misc_RNA (1)...(19): siRNA sense strand
agauuauggugguuaugau

SEQ ID NO: 1809835 - RNA, 19 nt, Homo sapiens
  misc_RNA (1)...(19): siRNA sense strand
aagaggaagcagaaguaaa

SEQ ID NO: 1809836 - RNA, 19 nt, Homo sapiens
  misc_RNA (1)...(19): siRNA sense strand
gcaagaaguucaagauugu

SEQ ID NO: 1809837 - RNA, 19 nt, Homo sapiens
  misc_RNA (1)...(19): siRNA sense strand
uaaagacagugacagagua

SEQ ID NO: 1809838 - RNA, 19 nt, Homo sapiens
  misc_RNA (1)...(19): siRNA sense strand
ggcaagaaguucaagauug

SEQ ID NO: 1809839 - RNA, 19 nt, Homo sapiens
  misc_RNA (1)...(19): siRNA sense strand
ggucaucaacggaaacaua

SEQ ID NO: 1809840 - RNA, 19 nt, Homo sapiens
  misc_RNA (1)...(19): siRNA sense strand
gcaucuaccuggcuaagga

SEQ ID NO: 1809841 - RNA, 19 nt, Homo sapiens
  misc_RNA (1)...(19): siRNA sense strand
gaacaagacagggaaguau

SEQ ID NO: 1809842 - RNA, 19 nt, Homo sapiens
  misc_RNA (1)...(19): siRNA sense strand
gcaaagaggaccugaacug

SEQ ID NO: 1809843 - RNA, 19 nt, Homo sapiens
  misc_RNA (1)...(19): siRNA sense strand
ggaggacccuaugaacaaa

SEQ ID NO: 1809844 - RNA, 19 nt, Homo sapiens
  misc_RNA (1)...(19): siRNA sense strand
ggaaacauaaagacaguga

SEQ ID NO: 1809845 - RNA, 19 nt, Homo sapiens
  misc_RNA (1)...(19): siRNA sense strand
ggaggaagaacuggaagaa

SEQ ID NO: 1809846 - RNA, 19 nt, Homo sapiens
  misc_RNA (1)...(19): siRNA sense strand
aggaagaacuggaagaagu

SEQ ID NO: 1809847 - RNA, 19 nt, Homo sapiens
  misc_RNA (1)...(19): siRNA sense strand
ugacagaguacaagauaga

SEQ ID NO: 1809848 - RNA, 19 nt, Homo sapiens
  misc_RNA (1)...(19): siRNA sense strand
guccgcaccuucaggauug

SEQ ID NO: 1809849 - RNA, 19 nt, Homo sapiens
  misc_RNA (1)...(19): siRNA sense strand
caacggaaacauaaagaca

SEQ ID NO: 1809850 - RNA, 19 nt, Homo sapiens
  misc_RNA (1)...(19): siRNA sense strand
cagaguacaagauagauga

SEQ ID NO: 1809851 - RNA, 19 nt, Homo sapiens
  misc_RNA (1)...(19): siRNA sense strand
gaggaggacccuaugaaca

SEQ ID NO: 1809852 - RNA, 19 nt, Homo sapiens
  misc_RNA (1)...(19): siRNA sense strand
caagaccacuggccaaucc

SEQ ID NO: 1809853 - RNA, 19 nt, Homo sapiens
  misc_RNA (1)...(19): siRNA sense strand
caaggaggaagaacuggaa

SEQ ID NO: 1809854 - RNA, 19 nt, Homo sapiens
  misc_RNA (1)...(19): siRNA sense strand
gucaucaacggaaacauaa

SEQ ID NO: 1809855 - RNA, 19 nt, Homo sapiens
  misc_RNA (1)...(19): siRNA sense strand
gaggauggcaagaaguuca

SEQ ID NO: 1809856 - RNA, 19 nt, Homo sapiens
  misc_RNA (1)...(19): siRNA sense strand
aaacauaaagacagugaca

SEQ ID NO: 1809857 - RNA, 19 nt, Homo sapiens
  misc_RNA (1)...(19): siRNA sense strand
gaggaggaggacccuauga

SEQ ID NO: 1809858 - RNA, 19 nt, Homo sapiens
  misc_RNA (1)...(19): siRNA sense strand
ugacguucaucaccagcaa

SEQ ID NO: 1809859 - RNA, 19 nt, Homo sapiens
  misc_RNA (1)...(19): siRNA sense strand
ccaagccguccaccaacua

SEQ ID NO: 1809860 - RNA, 19 nt, Homo sapiens
  misc_RNA (1)...(19): siRNA sense strand
cagcugggccugucuacug

SEQ ID NO: 1809861 - RNA, 19 nt, Homo sapiens
  misc_RNA (1)...(19): siRNA sense strand
acauaaagacagugacaga

SEQ ID NO: 1809862 - RNA, 19 nt, Homo sapiens
  misc_RNA (1)...(19): siRNA sense strand
gagcagcugggccugucua

SEQ ID NO: 1809863 - RNA, 19 nt, Homo sapiens
  misc_RNA (1)...(19): siRNA sense strand
ggaggaggacccuaugaac

SEQ ID NO: 1809864 - RNA, 19 nt, Homo sapiens
  misc_RNA (1)...(19): siRNA sense strand
cagugacgaugucucuaug

SEQ ID NO: 1809865 - RNA, 19 nt, Homo sapiens
  misc_RNA (1)...(19): siRNA sense strand
agugacagaguacaagaua

SEQ ID NO: 1809866 - RNA, 19 nt, Homo sapiens
  misc_RNA (1)...(19): siRNA sense strand
gggaggacgacaaaugugu

SEQ ID NO: 1809867 - RNA, 19 nt, Homo sapiens
  misc_RNA (1)...(19): siRNA sense strand
caagccguccaccaacuaa

SEQ ID NO: 1809868 - RNA, 19 nt, Homo sapiens
  misc_RNA (1)...(19): siRNA sense strand
agaacaagacagggaagua

SEQ ID NO: 1809869 - RNA, 19 nt, Homo sapiens
  misc_RNA (1)...(19): siRNA sense strand
ggaggaggaggacccuaug

SEQ ID NO: 1809870 - RNA, 19 nt, Homo sapiens
  misc_RNA (1)...(19): siRNA sense strand
ucagugacgaugucucuau

SEQ ID NO: 1809871 - RNA, 19 nt, Homo sapiens
  misc_RNA (1)...(19): siRNA sense strand
guacaagauagaugaggau

SEQ ID NO: 1809872 - RNA, 19 nt, Homo sapiens
  misc_RNA (1)...(19): siRNA sense strand
ucagaggacacgcgugaga

SEQ ID NO: 1809873 - RNA, 19 nt, Homo sapiens
  misc_RNA (1)...(19): siRNA sense strand
aggaggacccuaugaacaa

SEQ ID NO: 1809874 - RNA, 19 nt, Homo sapiens
  misc_RNA (1)...(19): siRNA sense strand
caucaacggaaacauaaag

SEQ ID NO: 1809875 - RNA, 19 nt, Homo sapiens
  misc_RNA (1)...(19): siRNA sense strand
uagaugaggauggcaagaa

SEQ ID NO: 1809876 - RNA, 19 nt, Homo sapiens
  misc_RNA (1)...(19): siRNA sense strand
gaucgugcgcgugccauug

SEQ ID NO: 1809877 - RNA, 19 nt, Homo sapiens
  misc_RNA (1)...(19): siRNA sense strand
cagcaaagaggaccugaac

SEQ ID NO: 1809878 - RNA, 19 nt, Homo sapiens
  misc_RNA (1)...(19): siRNA sense strand
aaacucaagggccagaaga

SEQ ID NO: 1809879 - RNA, 19 nt, Homo sapiens
  misc_RNA (1)...(19): siRNA sense strand
gacaagaccacuggccaau

SEQ ID NO: 1809880 - RNA, 19 nt, Homo sapiens
  misc_RNA (1)...(19): siRNA sense strand
agaugaggauggcaagaag

SEQ ID NO: 1809881 - RNA, 19 nt, Homo sapiens
  misc_RNA (1)...(19): siRNA sense strand
uggcaagaaguucaagauu

SEQ ID NO: 1809882 - RNA, 19 nt, Homo sapiens
  misc_RNA (1)...(19): siRNA sense strand
gccaagccguccaccaacu

SEQ ID NO: 1809883 - RNA, 19 nt, Homo sapiens
  misc_RNA (1)...(19): siRNA sense strand
gugacagaguacaagauag

SEQ ID NO: 1809884 - RNA, 19 nt, Homo sapiens
  misc_RNA (1)...(19): siRNA sense strand
acaagacagggaaguaugu

SEQ ID NO: 1809885 - RNA, 19 nt, Homo sapiens
  misc_RNA (1)...(19): siRNA sense strand
agacagugacagaguacaa

SEQ ID NO: 1809886 - RNA, 19 nt, Homo sapiens
  misc_RNA (1)...(19): siRNA sense strand
guucaucaccagcaaagag

SEQ ID NO: 1809887 - RNA, 19 nt, Homo sapiens
  misc_RNA (1)...(19): siRNA sense strand
acggaaacauaaagacagu

SEQ ID NO: 1809888 - RNA, 19 nt, Homo sapiens
  misc_RNA (1)...(19): siRNA sense strand
gaagaucggcuugaaauua

SEQ ID NO: 1809889 - RNA, 19 nt, Homo sapiens
  misc_RNA (1)...(19): siRNA sense strand
ccaaggaucucucucacua

SEQ ID NO: 1809890 - RNA, 19 nt, Homo sapiens
  misc_RNA (1)...(19): siRNA sense strand
gaagucagcuguugcagau

SEQ ID NO: 1809891 - RNA, 19 nt, Homo sapiens
  misc_RNA (1)...(19): siRNA sense strand
gcagauagauggccuugug

SEQ ID NO: 1809892 - RNA, 19 nt, Homo sapiens
  misc_RNA (1)...(19): siRNA sense strand
gauggaaguuuguaaagaa

SEQ ID NO: 1809893 - RNA, 19 nt, Homo sapiens
  misc_RNA (1)...(19): siRNA sense strand
gaagaagugccgauuguaa

SEQ ID NO: 1809894 - RNA, 19 nt, Homo sapiens
  misc_RNA (1)...(19): siRNA sense strand
gaaaugagccaagauauag

SEQ ID NO: 1809895 - RNA, 19 nt, Homo sapiens
  misc_RNA (1)...(19): siRNA sense strand
gagccaagauauaguuaaa

SEQ ID NO: 1809896 - RNA, 19 nt, Homo sapiens
  misc_RNA (1)...(19): siRNA sense strand
ggacagaguggaugaaaug

SEQ ID NO: 1809897 - RNA, 19 nt, Homo sapiens
  misc_RNA (1)...(19): siRNA sense strand
gaugaaaugagccaagaua

SEQ ID NO: 1809898 - RNA, 19 nt, Homo sapiens
  misc_RNA (1)...(19): siRNA sense strand
guacauguuugaagaagug

SEQ ID NO: 1809899 - RNA, 19 nt, Homo sapiens
  misc_RNA (1)...(19): siRNA sense strand
gaagugccgauuguaauua

SEQ ID NO: 1809900 - RNA, 19 nt, Homo sapiens
  misc_RNA (1)...(19): siRNA sense strand
uacuauggcucauucguua

SEQ ID NO: 1809901 - RNA, 19 nt, Homo sapiens
  misc_RNA (1)...(19): siRNA sense strand
ugaaaugagccaagauaua

SEQ ID NO: 1809902 - RNA, 19 nt, Homo sapiens
  misc_RNA (1)...(19): siRNA sense strand
gaaaagaagucagcuguug

SEQ ID NO: 1809903 - RNA, 19 nt, Homo sapiens
  misc_RNA (1)...(19): siRNA sense strand
ggaagaaucuacaguugcu

SEQ ID NO: 1809904 - RNA, 19 nt, Homo sapiens
  misc_RNA (1)...(19): siRNA sense strand
gaggaauacuaguaaacaa

SEQ ID NO: 1809905 - RNA, 19 nt, Homo sapiens
  misc_RNA (1)...(19): siRNA sense strand
cauacagacugacuccuaa

SEQ ID NO: 1809906 - RNA, 19 nt, Homo sapiens
  misc_RNA (1)...(19): siRNA sense strand
gcugguaucaguccacaua

SEQ ID NO: 1809907 - RNA, 19 nt, Homo sapiens
  misc_RNA (1)...(19): siRNA sense strand
gcucauugcaggccagaua

SEQ ID NO: 1809908 - RNA, 19 nt, Homo sapiens
  misc_RNA (1)...(19): siRNA sense strand
guaaacaacagcagcagaa

SEQ ID NO: 1809909 - RNA, 19 nt, Homo sapiens
  misc_RNA (1)...(19): siRNA sense strand
gcauacagacugacuccua

SEQ ID NO: 1809910 - RNA, 19 nt, Homo sapiens
  misc_RNA (1)...(19): siRNA sense strand
gaaucugucguucucauuu

SEQ ID NO: 1809911 - RNA, 19 nt, Homo sapiens
  misc_RNA (1)...(19): siRNA sense strand
caggccagauaaacacuua

SEQ ID NO: 1809912 - RNA, 19 nt, Homo sapiens
  misc_RNA (1)...(19): siRNA sense strand
cuaaaggcauacagacuga

SEQ ID NO: 1809913 - RNA, 19 nt, Homo sapiens
  misc_RNA (1)...(19): siRNA sense strand
ggaugaugcugacuuugau

SEQ ID NO: 1809914 - RNA, 19 nt, Homo sapiens
  misc_RNA (1)...(19): siRNA sense strand
gccagaacaucaaggaguu

SEQ ID NO: 1809915 - RNA, 19 nt, Homo sapiens
  misc_RNA (1)...(19): siRNA sense strand
aaucugucguucucauuua

SEQ ID NO: 1809916 - RNA, 19 nt, Homo sapiens
  misc_RNA (1)...(19): siRNA sense strand
ugaagcaagugcagauaga

SEQ ID NO: 1809917 - RNA, 19 nt, Homo sapiens
  misc_RNA (1)...(19): siRNA sense strand
gaagguaccggcucuacug

SEQ ID NO: 1809918 - RNA, 19 nt, Homo sapiens
  misc_RNA (1)...(19): siRNA sense strand
uagauggccuugugguauu

SEQ ID NO: 1809919 - RNA, 19 nt, Homo sapiens
  misc_RNA (1)...(19): siRNA sense strand
gaugaaguccaauaucaga

SEQ ID NO: 1809920 - RNA, 19 nt, Homo sapiens
  misc_RNA (1)...(19): siRNA sense strand
agucagcuguugcagauaa

SEQ ID NO: 1809921 - RNA, 19 nt, Homo sapiens
  misc_RNA (1)...(19): siRNA sense strand
aaggaucucucucacuaaa

SEQ ID NO: 1809922 - RNA, 19 nt, Homo sapiens
  misc_RNA (1)...(19): siRNA sense strand
gauagauggccuuguggua

SEQ ID NO: 1809923 - RNA, 19 nt, Homo sapiens
  misc_RNA (1)...(19): siRNA sense strand
acacauacaugaggaauac

SEQ ID NO: 1809924 - RNA, 19 nt, Homo sapiens
  misc_RNA (1)...(19): siRNA sense strand
agaggaugaugcugacuuu

SEQ ID NO: 1809925 - RNA, 19 nt, Homo sapiens
  misc_RNA (1)...(19): siRNA sense strand
gcagaaacaucaguaucag

SEQ ID NO: 1809926 - RNA, 19 nt, Homo sapiens
  misc_RNA (1)...(19): siRNA sense strand
gcggagccuucgccaugua

SEQ ID NO: 1809927 - RNA, 19 nt, Homo sapiens
  misc_RNA (1)...(19): siRNA sense strand
ggaauacuaguaaacaaca

SEQ ID NO: 1809928 - RNA, 19 nt, Homo sapiens
  misc_RNA (1)...(19): siRNA sense strand
caugaggaauacuaguaaa

SEQ ID NO: 1809929 - RNA, 19 nt, Homo sapiens
  misc_RNA (1)...(19): siRNA sense strand
cuccuggacucucaguuua

SEQ ID NO: 1809930 - RNA, 19 nt, Homo sapiens
  misc_RNA (1)...(19): siRNA sense strand
ggaucucucucacuaaagg

SEQ ID NO: 1809931 - RNA, 19 nt, Homo sapiens
  misc_RNA (1)...(19): siRNA sense strand
ucaagaagaaggacaagga

SEQ ID NO: 1809932 - RNA, 19 nt, Homo sapiens
  misc_RNA (1)...(19): siRNA sense strand
uagaagaucggcuugaaau

SEQ ID NO: 1809933 - RNA, 19 nt, Homo sapiens
  misc_RNA (1)...(19): siRNA sense strand
ucugaucaauguccuaaug

SEQ ID NO: 1809934 - RNA, 19 nt, Homo sapiens
  misc_RNA (1)...(19): siRNA sense strand
ugauggaaguuuguaaaga

SEQ ID NO: 1809935 - RNA, 19 nt, Homo sapiens
  misc_RNA (1)...(19): siRNA sense strand
ugaaauuaccaacugcuuu

SEQ ID NO: 1809936 - RNA, 19 nt, Homo sapiens
  misc_RNA (1)...(19): siRNA sense strand
guagaagaucggcuugaaa

SEQ ID NO: 1809937 - RNA, 19 nt, Homo sapiens
  misc_RNA (1)...(19): siRNA sense strand
caagaagaaggacaaggaa

SEQ ID NO: 1809938 - RNA, 19 nt, Homo sapiens
  misc_RNA (1)...(19): siRNA sense strand
gggcacuccuggacucuca

SEQ ID NO: 1809939 - RNA, 19 nt, Homo sapiens
  misc_RNA (1)...(19): siRNA sense strand
uugaguacauguuugaaga

SEQ ID NO: 1809940 - RNA, 19 nt, Homo sapiens
  misc_RNA (1)...(19): siRNA sense strand
cagacugacuccuaaacug

SEQ ID NO: 1809941 - RNA, 19 nt, Homo sapiens
  misc_RNA (1)...(19): siRNA sense strand
uguagaagaucggcuugaa

SEQ ID NO: 1809942 - RNA, 19 nt, Homo sapiens
  misc_RNA (1)...(19): siRNA sense strand
aaaggcggcucgggagauu

SEQ ID NO: 1809943 - RNA, 19 nt, Homo sapiens
  misc_RNA (1)...(19): siRNA sense strand
aagaucggcuugaaauuac

SEQ ID NO: 1809944 - RNA, 19 nt, Homo sapiens
  misc_RNA (1)...(19): siRNA sense strand
gaagaaggacaaggaacug

SEQ ID NO: 1809945 - RNA, 19 nt, Homo sapiens
  misc_RNA (1)...(19): siRNA sense strand
uugaagaagugccgauugu

SEQ ID NO: 1809946 - RNA, 19 nt, Homo sapiens
  misc_RNA (1)...(19): siRNA sense strand
agacugacuccuaaacuga

SEQ ID NO: 1809947 - RNA, 19 nt, Homo sapiens
  misc_RNA (1)...(19): siRNA sense strand
caacagcagcagaaacauc

SEQ ID NO: 1809948 - RNA, 19 nt, Homo sapiens
  misc_RNA (1)...(19): siRNA sense strand
uacaugaggaauacuagua

SEQ ID NO: 1809949 - RNA, 19 nt, Homo sapiens
  misc_RNA (1)...(19): siRNA sense strand
aagugccgauuguaauuaa

SEQ ID NO: 1809950 - RNA, 19 nt, Homo sapiens
  misc_RNA (1)...(19): siRNA sense strand
caauaucagauggaaauga

SEQ ID NO: 1809951 - RNA, 19 nt, Homo sapiens
  misc_RNA (1)...(19): siRNA sense strand
guccuaaugugggaacuug

SEQ ID NO: 1809952 - RNA, 19 nt, Homo sapiens
  misc_RNA (1)...(19): siRNA sense strand
agaagugccgauuguaauu

SEQ ID NO: 1809953 - RNA, 19 nt, Homo sapiens
  misc_RNA (1)...(19): siRNA sense strand
agauggccuugugguauua

SEQ ID NO: 1809954 - RNA, 19 nt, Homo sapiens
  misc_RNA (1)...(19): siRNA sense strand
aaacauugaucaucuucac

SEQ ID NO: 1809955 - RNA, 19 nt, Homo sapiens
  misc_RNA (1)...(19): siRNA sense strand
gaaggacaaggaacugaag

SEQ ID NO: 1809956 - RNA, 19 nt, Homo sapiens
  misc_RNA (1)...(19): siRNA sense strand
uggacucucaguuuaguua

SEQ ID NO: 1809957 - RNA, 19 nt, Homo sapiens
  misc_RNA (1)...(19): siRNA sense strand
gaugcugacuuugaugaag

SEQ ID NO: 1809958 - RNA, 19 nt, Homo sapiens
  misc_RNA (1)...(19): siRNA sense strand
gaguacauguuugaagaag

SEQ ID NO: 1809959 - RNA, 19 nt, Homo sapiens
  misc_RNA (1)...(19): siRNA sense strand
caaggaucucucucacuaa

SEQ ID NO: 1809960 - RNA, 19 nt, Homo sapiens
  misc_RNA (1)...(19): siRNA sense strand
gcacacagaggaugaugcu

SEQ ID NO: 1809961 - RNA, 19 nt, Homo sapiens
  misc_RNA (1)...(19): siRNA sense strand
aaauaucaccuuugaguac

SEQ ID NO: 1809962 - RNA, 19 nt, Homo sapiens
  misc_RNA (1)...(19): siRNA sense strand
cacgugggcugguaucagu

SEQ ID NO: 1809963 - RNA, 19 nt, Homo sapiens
  misc_RNA (1)...(19): siRNA sense strand
guaaacauugaucaucuuc

SEQ ID NO: 1809964 - RNA, 19 nt, Homo sapiens
  misc_RNA (1)...(19): siRNA sense strand
gcagcagaaacaucaguau

SEQ ID NO: 1809965 - RNA, 19 nt, Homo sapiens
  misc_RNA (1)...(19): siRNA sense strand
uggaugaaaugagccaaga

SEQ ID NO: 1809966 - RNA, 19 nt, Homo sapiens
  misc_RNA (1)...(19): siRNA sense strand
ugaagaagugccgauugua

SEQ ID NO: 1809967 - RNA, 19 nt, Homo sapiens
  misc_RNA (1)...(19): siRNA sense strand
cuccuaaacugauggaagu

SEQ ID NO: 1809968 - RNA, 19 nt, Homo sapiens
  misc_RNA (1)...(19): siRNA sense strand
gcaugccauugaagaaucu

SEQ ID NO: 1809969 - RNA, 19 nt, Homo sapiens
  misc_RNA (1)...(19): siRNA sense strand
uuaccagcaugccauugaa

SEQ ID NO: 1809970 - RNA, 19 nt, Homo sapiens
  misc_RNA (1)...(19): siRNA sense strand
guuaccagcaugccauuga

SEQ ID NO: 1809971 - RNA, 19 nt, Homo sapiens
  misc_RNA (1)...(19): siRNA sense strand
ggcuugaaauuaccaacug

SEQ ID NO: 1809972 - RNA, 19 nt, Homo sapiens
  misc_RNA (1)...(19): siRNA sense strand
ugaucaauguccuaaugug

SEQ ID NO: 1809973 - RNA, 19 nt, Homo sapiens
  misc_RNA (1)...(19): siRNA sense strand
aaacuuaggcaagcucuuc

SEQ ID NO: 1809974 - RNA, 19 nt, Homo sapiens
  misc_RNA (1)...(19): siRNA sense strand
ggaguucacugcccaaaac

SEQ ID NO: 1809975 - RNA, 19 nt, Homo sapiens
  misc_RNA (1)...(19): siRNA sense strand
ggggaagaaucuacaguug

SEQ ID NO: 1809976 - RNA, 19 nt, Homo sapiens
  misc_RNA (1)...(19): siRNA sense strand
caucugaucaauguccuaa

SEQ ID NO: 1809977 - RNA, 19 nt, Homo sapiens
  misc_RNA (1)...(19): siRNA sense strand
gaagcaagugcagauagau

SEQ ID NO: 1809978 - RNA, 19 nt, Homo sapiens
  misc_RNA (1)...(19): siRNA sense strand
uaaacaacagcagcagaaa

SEQ ID NO: 1809979 - RNA, 19 nt, Homo sapiens
  misc_RNA (1)...(19): siRNA sense strand
gaauacuaguaaacaacag

SEQ ID NO: 1809980 - RNA, 19 nt, Homo sapiens
  misc_RNA (1)...(19): siRNA sense strand
acaugaggaauacuaguaa

SEQ ID NO: 1809981 - RNA, 19 nt, Homo sapiens
  misc_RNA (1)...(19): siRNA sense strand
gcaaucauuuggggaagaa

SEQ ID NO: 1809982 - RNA, 19 nt, Homo sapiens
  misc_RNA (1)...(19): siRNA sense strand
gcucuacugccaccucuuc

SEQ ID NO: 1809983 - RNA, 19 nt, Homo sapiens
  misc_RNA (1)...(19): siRNA sense strand
ugaaguccaauaucagaug

SEQ ID NO: 1809984 - RNA, 19 nt, Homo sapiens
  misc_RNA (1)...(19): siRNA sense strand
gcagauaaacaugaauugc

SEQ ID NO: 1809985 - RNA, 19 nt, Homo sapiens
  misc_RNA (1)...(19): siRNA sense strand
ugugggaacuugaaaagaa

SEQ ID NO: 1809986 - RNA, 19 nt, Homo sapiens
  misc_RNA (1)...(19): siRNA sense strand
gauggacucgcugcucauu

SEQ ID NO: 1809987 - RNA, 19 nt, Homo sapiens
  misc_RNA (1)...(19): siRNA sense strand
guucacugcccaaaacuua

SEQ ID NO: 1809988 - RNA, 19 nt, Homo sapiens
  misc_RNA (1)...(19): siRNA sense strand
gaaagaaucucacacaaga

SEQ ID NO: 1809989 - RNA, 19 nt, Homo sapiens
  misc_RNA (1)...(19): siRNA sense strand
ucacaaagguucuaaauug

SEQ ID NO: 1809990 - RNA, 19 nt, Homo sapiens
  misc_RNA (1)...(19): siRNA sense strand
gaauuggccuuauuaauga

SEQ ID NO: 1809991 - RNA, 19 nt, Homo sapiens
  misc_RNA (1)...(19): siRNA sense strand
ggauauggauggcauuaua

SEQ ID NO: 1809992 - RNA, 19 nt, Homo sapiens
  misc_RNA (1)...(19): siRNA sense strand
ggagaaacauggaugauga

SEQ ID NO: 1809993 - RNA, 19 nt, Homo sapiens
  misc_RNA (1)...(19): siRNA sense strand
ggacaggucucauagaaga

SEQ ID NO: 1809994 - RNA, 19 nt, Homo sapiens
  misc_RNA (1)...(19): siRNA sense strand
agacagagauuuauucgua

SEQ ID NO: 1809995 - RNA, 19 nt, Homo sapiens
  misc_RNA (1)...(19): siRNA sense strand
ggacagagauaaucaagau

SEQ ID NO: 1809996 - RNA, 19 nt, Homo sapiens
  misc_RNA (1)...(19): siRNA sense strand
gaaauuagaagaaguggaa

SEQ ID NO: 1809997 - RNA, 19 nt, Homo sapiens
  misc_RNA (1)...(19): siRNA sense strand
gaacagagaauuaaagaca

SEQ ID NO: 1809998 - RNA, 19 nt, Homo sapiens
  misc_RNA (1)...(19): siRNA sense strand
ccagcaagcuuucaaauuc

SEQ ID NO: 1809999 - RNA, 19 nt, Homo sapiens
  misc_RNA (1)...(19): siRNA sense strand
gaggacaggucucauagaa

SEQ ID NO: 1810000 - RNA, 19 nt, Homo sapiens
  misc_RNA (1)...(19): siRNA sense strand
gaacgccgaugaugacaga

SEQ ID NO: 1810001 - RNA, 19 nt, Homo sapiens
  misc_RNA (1)...(19): siRNA sense strand
gaagguggcuggagaagag

SEQ ID NO: 1810002 - RNA, 19 nt, Homo sapiens
  misc_RNA (1)...(19): siRNA sense strand
gcagauggucuuagauaua

SEQ ID NO: 1810003 - RNA, 19 nt, Homo sapiens
  misc_RNA (1)...(19): siRNA sense strand
gccaaagcauucaaagaua

SEQ ID NO: 1810004 - RNA, 19 nt, Homo sapiens
  misc_RNA (1)...(19): siRNA sense strand
guacggcaaucaaucuuaa

SEQ ID NO: 1810005 - RNA, 19 nt, Homo sapiens
  misc_RNA (1)...(19): siRNA sense strand
aaagagcgcuuacgaggaa

SEQ ID NO: 1810006 - RNA, 19 nt, Homo sapiens
  misc_RNA (1)...(19): siRNA sense strand
caacgaauuucuugagguu

SEQ ID NO: 1810007 - RNA, 19 nt, Homo sapiens
  misc_RNA (1)...(19): siRNA sense strand
ggucagauuuaauguacua

SEQ ID NO: 1810008 - RNA, 19 nt, Homo sapiens
  misc_RNA (1)...(19): siRNA sense strand
ggaucguacugacagauua

SEQ ID NO: 1810009 - RNA, 19 nt, Homo sapiens
  misc_RNA (1)...(19): siRNA sense strand
cgaauuggccuuauuaaug

SEQ ID NO: 1810010 - RNA, 19 nt, Homo sapiens
  misc_RNA (1)...(19): siRNA sense strand
ggaauuggauccagauuuu

SEQ ID NO: 1810011 - RNA, 19 nt, Homo sapiens
  misc_RNA (1)...(19): siRNA sense strand
ugaaauacuuggaacuuug

SEQ ID NO: 1810012 - RNA, 19 nt, Homo sapiens
  misc_RNA (1)...(19): siRNA sense strand
ccaaagcauucaaagauau

SEQ ID NO: 1810013 - RNA, 19 nt, Homo sapiens
  misc_RNA (1)...(19): siRNA sense strand
cagcaggugucacagauuu

SEQ ID NO: 1810014 - RNA, 19 nt, Homo sapiens
  misc_RNA (1)...(19): siRNA sense strand
ucaaagcuguggaagauau

SEQ ID NO: 1810015 - RNA, 19 nt, Homo sapiens
  misc_RNA (1)...(19): siRNA sense strand
aaagggaguuggaaauuga

SEQ ID NO: 1810016 - RNA, 19 nt, Homo sapiens
  misc_RNA (1)...(19): siRNA sense strand
caaagggaguuggaaauug

SEQ ID NO: 1810017 - RNA, 19 nt, Homo sapiens
  misc_RNA (1)...(19): siRNA sense strand
caagaggaagaaagaauua

SEQ ID NO: 1810018 - RNA, 19 nt, Homo sapiens
  misc_RNA (1)...(19): siRNA sense strand
uaaaccagcucauauacug

SEQ ID NO: 1810019 - RNA, 19 nt, Homo sapiens
  misc_RNA (1)...(19): siRNA sense strand
gaauuaugcuacucgagaa

SEQ ID NO: 1810020 - RNA, 19 nt, Homo sapiens
  misc_RNA (1)...(19): siRNA sense strand
gaagaaaggcauaaucgau

SEQ ID NO: 1810021 - RNA, 19 nt, Homo sapiens
  misc_RNA (1)...(19): siRNA sense strand
uaaagaagaacgcaggaua

SEQ ID NO: 1810022 - RNA, 19 nt, Homo sapiens
  misc_RNA (1)...(19): siRNA sense strand
caaacgcgccaacgaauuu

SEQ ID NO: 1810023 - RNA, 19 nt, Homo sapiens
  misc_RNA (1)...(19): siRNA sense strand
uagaagaaguggaaaggaa

SEQ ID NO: 1810024 - RNA, 19 nt, Homo sapiens
  misc_RNA (1)...(19): siRNA sense strand
gaagagcgauuagcagaag

SEQ ID NO: 1810025 - RNA, 19 nt, Homo sapiens
  misc_RNA (1)...(19): siRNA sense strand
acaauuggcuugaaguaga

SEQ ID NO: 1810026 - RNA, 19 nt, Homo sapiens
  misc_RNA (1)...(19): siRNA sense strand
gaagaacgcaggauaacau

SEQ ID NO: 1810027 - RNA, 19 nt, Homo sapiens
  misc_RNA (1)...(19): siRNA sense strand
gcaacaagaggaagaaaga

SEQ ID NO: 1810028 - RNA, 19 nt, Homo sapiens
  misc_RNA (1)...(19): siRNA sense strand
gaacaacuggagaaagaaa

SEQ ID NO: 1810029 - RNA, 19 nt, Homo sapiens
  misc_RNA (1)...(19): siRNA sense strand
uaucauggcuaaacagguu

SEQ ID NO: 1810030 - RNA, 19 nt, Homo sapiens
  misc_RNA (1)...(19): siRNA sense strand
uaaacugugugacaauuug

SEQ ID NO: 1810031 - RNA, 19 nt, Homo sapiens
  misc_RNA (1)...(19): siRNA sense strand
gucaacaggugaacauaaa

SEQ ID NO: 1810032 - RNA, 19 nt, Homo sapiens
  misc_RNA (1)...(19): siRNA sense strand
gaagaaauuagaagaagug

SEQ ID NO: 1810033 - RNA, 19 nt, Homo sapiens
  misc_RNA (1)...(19): siRNA sense strand
gagaagggcagaagaacaa

SEQ ID NO: 1810034 - RNA, 19 nt, Homo sapiens
  misc_RNA (1)...(19): siRNA sense strand
caagaacgccuaaagaauc

SEQ ID NO: 1810035 - RNA, 19 nt, Homo sapiens
  misc_RNA (1)...(19): siRNA sense strand
uugaagaccuugaggaauu

SEQ ID NO: 1810036 - RNA, 19 nt, Homo sapiens
  misc_RNA (1)...(19): siRNA sense strand
gaucugauuugaauuaugc

SEQ ID NO: 1810037 - RNA, 19 nt, Homo sapiens
  misc_RNA (1)...(19): siRNA sense strand
aaacauagaacauggcaaa

SEQ ID NO: 1810038 - RNA, 19 nt, Homo sapiens
  misc_RNA (1)...(19): siRNA sense strand
gauauggucagauuuaaug

SEQ ID NO: 1810039 - RNA, 19 nt, Homo sapiens
  misc_RNA (1)...(19): siRNA sense strand
gagaagacuuggcgauagu

SEQ ID NO: 1810040 - RNA, 19 nt, Homo sapiens
  misc_RNA (1)...(19): siRNA sense strand
gacagagauuuauucguaa

SEQ ID NO: 1810041 - RNA, 19 nt, Homo sapiens
  misc_RNA (1)...(19): siRNA sense strand
ggucuuagauauagaggau

SEQ ID NO: 1810042 - RNA, 19 nt, Homo sapiens
  misc_RNA (1)...(19): siRNA sense strand
gagagaagacuuggcgaua

SEQ ID NO: 1810043 - RNA, 19 nt, Homo sapiens
  misc_RNA (1)...(19): siRNA sense strand
gcagagaagggcagaagaa

SEQ ID NO: 1810044 - RNA, 19 nt, Homo sapiens
  misc_RNA (1)...(19): siRNA sense strand
cagcagauggucuuagaua

SEQ ID NO: 1810045 - RNA, 19 nt, Homo sapiens
  misc_RNA (1)...(19): siRNA sense strand
gacgugggauggaugauga

SEQ ID NO: 1810046 - RNA, 19 nt, Homo sapiens
  misc_RNA (1)...(19): siRNA sense strand
aaagauacacgaaccaauu

SEQ ID NO: 1810047 - RNA, 19 nt, Homo sapiens
  misc_RNA (1)...(19): siRNA sense strand
cuagagaaaugagaaagaa

SEQ ID NO: 1810048 - RNA, 19 nt, Homo sapiens
  misc_RNA (1)...(19): siRNA sense strand
caaagucucaacuguguuu

SEQ ID NO: 1810049 - RNA, 19 nt, Homo sapiens
  misc_RNA (1)...(19): siRNA sense strand
gaucagaacgugaagaagu

SEQ ID NO: 1810050 - RNA, 19 nt, Homo sapiens
  misc_RNA (1)...(19): siRNA sense strand
aaagaaagggacagagaua

SEQ ID NO: 1810051 - RNA, 19 nt, Homo sapiens
  misc_RNA (1)...(19): siRNA sense strand
ggaggaacgccgaugauga

SEQ ID NO: 1810052 - RNA, 19 nt, Homo sapiens
  misc_RNA (1)...(19): siRNA sense strand
ggcgauaguucccuuucua

SEQ ID NO: 1810053 - RNA, 19 nt, Homo sapiens
  misc_RNA (1)...(19): siRNA sense strand
gcagaagaacaaaugcuaa

SEQ ID NO: 1810054 - RNA, 19 nt, Homo sapiens
  misc_RNA (1)...(19): siRNA sense strand
gcucauauacugcaagaga

SEQ ID NO: 1810055 - RNA, 19 nt, Homo sapiens
  misc_RNA (1)...(19): siRNA sense strand
ggaacaaccugaaaaggaa

SEQ ID NO: 1810056 - RNA, 19 nt, Homo sapiens
  misc_RNA (1)...(19): siRNA sense strand
aaacugaagcugcuaaaga

SEQ ID NO: 1810057 - RNA, 19 nt, Homo sapiens
  misc_RNA (1)...(19): siRNA sense strand
ggaaauugaagaacgagaa

SEQ ID NO: 1810058 - RNA, 19 nt, Homo sapiens
  misc_RNA (1)...(19): siRNA sense strand
aaaaggcucuugaacauaa

SEQ ID NO: 1810059 - RNA, 19 nt, Homo sapiens
  misc_RNA (1)...(19): siRNA sense strand
ggauauugcucgacuucug

SEQ ID NO: 1810060 - RNA, 19 nt, Homo sapiens
  misc_RNA (1)...(19): siRNA sense strand
gagcgccuguaccaugaua

SEQ ID NO: 1810061 - RNA, 19 nt, Homo sapiens
  misc_RNA (1)...(19): siRNA sense strand
cauuaaaccagcucauaua

SEQ ID NO: 1810062 - RNA, 19 nt, Homo sapiens
  misc_RNA (1)...(19): siRNA sense strand
gauaguucccuuucuagaa

SEQ ID NO: 1810063 - RNA, 19 nt, Homo sapiens
  misc_RNA (1)...(19): siRNA sense strand
agaaaggcauaaucgauug

SEQ ID NO: 1810064 - RNA, 19 nt, Homo sapiens
  misc_RNA (1)...(19): siRNA sense strand
gcuugaagacagagauuua

SEQ ID NO: 1810065 - RNA, 19 nt, Homo sapiens
  misc_RNA (1)...(19): siRNA sense strand
acacgaauuggccuuauua

SEQ ID NO: 1810066 - RNA, 19 nt, Homo sapiens
  misc_RNA (1)...(19): siRNA sense strand
gaaucucuccgucguacua

SEQ ID NO: 1810067 - RNA, 19 nt, Homo sapiens
  misc_RNA (1)...(19): siRNA sense strand
gcacggcagucuguuuaug

SEQ ID NO: 1810068 - RNA, 19 nt, Homo sapiens
  misc_RNA (1)...(19): siRNA sense strand
gaacuucaagaacgccuaa

SEQ ID NO: 1810069 - RNA, 19 nt, Homo sapiens
  misc_RNA (1)...(19): siRNA sense strand
aagcugaacuccagaaagu

SEQ ID NO: 1810070 - RNA, 19 nt, Homo sapiens
  misc_RNA (1)...(19): siRNA sense strand
ugacuucuuugguuccuuu

SEQ ID NO: 1810071 - RNA, 19 nt, Homo sapiens
  misc_RNA (1)...(19): siRNA sense strand
cagauggucuuagauauag

SEQ ID NO: 1810072 - RNA, 19 nt, Homo sapiens
  misc_RNA (1)...(19): siRNA sense strand
ggaccacaguacgacguua

SEQ ID NO: 1810073 - RNA, 19 nt, Homo sapiens
  misc_RNA (1)...(19): siRNA sense strand
ccagguggauggagagaga

SEQ ID NO: 1810074 - RNA, 19 nt, Homo sapiens
  misc_RNA (1)...(19): siRNA sense strand
aaagaagaacgcaggauaa

SEQ ID NO: 1810075 - RNA, 19 nt, Homo sapiens
  misc_RNA (1)...(19): siRNA sense strand
gaggaagaaagaauuacua

SEQ ID NO: 1810076 - RNA, 19 nt, Homo sapiens
  misc_RNA (1)...(19): siRNA sense strand
uugaacaacuggagaaaga

SEQ ID NO: 1810077 - RNA, 19 nt, Homo sapiens
  misc_RNA (1)...(19): siRNA sense strand
agagaaggagcguaucuua

SEQ ID NO: 1810078 - RNA, 19 nt, Homo sapiens
  misc_RNA (1)...(19): siRNA sense strand
gaaagaauuacuacaaugc

SEQ ID NO: 1810079 - RNA, 19 nt, Homo sapiens
  misc_RNA (1)...(19): siRNA sense strand
cagaagaccuagggaugaa

SEQ ID NO: 1810080 - RNA, 19 nt, Homo sapiens
  misc_RNA (1)...(19): siRNA sense strand
ggacagagagagagaugug

SEQ ID NO: 1810081 - RNA, 19 nt, Homo sapiens
  misc_RNA (1)...(19): siRNA sense strand
caaggacccugagagagaa

SEQ ID NO: 1810082 - RNA, 19 nt, Homo sapiens
  misc_RNA (1)...(19): siRNA sense strand
ccagacgaauugccgauga

SEQ ID NO: 1810083 - RNA, 19 nt, Homo sapiens
  misc_RNA (1)...(19): siRNA sense strand
cuucagagcagauaagaaa

SEQ ID NO: 1810084 - RNA, 19 nt, Homo sapiens
  misc_RNA (1)...(19): siRNA sense strand
gaaagggacagagauaauc

SEQ ID NO: 1810085 - RNA, 19 nt, Homo sapiens
  misc_RNA (1)...(19): siRNA sense strand
aggaagagcuacgagagua

SEQ ID NO: 1810086 - RNA, 19 nt, Homo sapiens
  misc_RNA (1)...(19): siRNA sense strand
acaggaacaugaacaaauc

SEQ ID NO: 1810087 - RNA, 19 nt, Homo sapiens
  misc_RNA (1)...(19): siRNA sense strand
ugagaaagaagaauuggaa

SEQ ID NO: 1810088 - RNA, 19 nt, Homo sapiens
  misc_RNA (1)...(19): siRNA sense strand
ugaaguggcuguugacaug

SEQ ID NO: 1810089 - RNA, 19 nt, Homo sapiens
  misc_RNA (1)...(19): siRNA sense strand
gaguugaccugaucaugaa

SEQ ID NO: 1810090 - RNA, 19 nt, Homo sapiens
  misc_RNA (1)...(19): siRNA sense strand
ugaguacaguguugcaaua

SEQ ID NO: 1810091 - RNA, 19 nt, Homo sapiens
  misc_RNA (1)...(19): siRNA sense strand
ggaauuugcuaagaauaug

SEQ ID NO: 1810092 - RNA, 19 nt, Homo sapiens
  misc_RNA (1)...(19): siRNA sense strand
ggaguugaccugaucauga

SEQ ID NO: 1810093 - RNA, 19 nt, Homo sapiens
  misc_RNA (1)...(19): siRNA sense strand
guugggaacugucgacaaa

SEQ ID NO: 1810094 - RNA, 19 nt, Homo sapiens
  misc_RNA (1)...(19): siRNA sense strand
gaauauguaugaacugcau

SEQ ID NO: 1810095 - RNA, 19 nt, Homo sapiens
  misc_RNA (1)...(19): siRNA sense strand
ggacacaagucuccagaac

SEQ ID NO: 1810096 - RNA, 19 nt, Homo sapiens
  misc_RNA (1)...(19): siRNA sense strand
caguggaggucaccaauug

SEQ ID NO: 1810097 - RNA, 19 nt, Homo sapiens
  misc_RNA (1)...(19): siRNA sense strand
caacaucaaugaccuuuug

SEQ ID NO: 1810098 - RNA, 19 nt, Homo sapiens
  misc_RNA (1)...(19): siRNA sense strand
ugauuggacucucaaguga

SEQ ID NO: 1810099 - RNA, 19 nt, Homo sapiens
  misc_RNA (1)...(19): siRNA sense strand
ggaggucaccaauugcuuu

SEQ ID NO: 1810100 - RNA, 19 nt, Homo sapiens
  misc_RNA (1)...(19): siRNA sense strand
gacauggaauuugcuaaga

SEQ ID NO: 1810101 - RNA, 19 nt, Homo sapiens
  misc_RNA (1)...(19): siRNA sense strand
gcaauaugcagaggaugua

SEQ ID NO: 1810102 - RNA, 19 nt, Homo sapiens
  misc_RNA (1)...(19): siRNA sense strand
guacaguguugcaauaugc

SEQ ID NO: 1810103 - RNA, 19 nt, Homo sapiens
  misc_RNA (1)...(19): siRNA sense strand
gcacaaugagucagaagau

SEQ ID NO: 1810104 - RNA, 19 nt, Homo sapiens
  misc_RNA (1)...(19): siRNA sense strand
aagaugaaguggcuguuga

SEQ ID NO: 1810105 - RNA, 19 nt, Homo sapiens
  misc_RNA (1)...(19): siRNA sense strand
caucggaguugaccugauc

SEQ ID NO: 1810106 - RNA, 19 nt, Homo sapiens
  misc_RNA (1)...(19): siRNA sense strand
gaagaugaaguggcuguug

SEQ ID NO: 1810107 - RNA, 19 nt, Homo sapiens
  misc_RNA (1)...(19): siRNA sense strand
cauggaauuugcuaagaau

SEQ ID NO: 1810108 - RNA, 19 nt, Homo sapiens
  misc_RNA (1)...(19): siRNA sense strand
gaggauguacugucuggaa

SEQ ID NO: 1810109 - RNA, 19 nt, Homo sapiens
  misc_RNA (1)...(19): siRNA sense strand
acauggaauuugcuaagaa

SEQ ID NO: 1810110 - RNA, 19 nt, Homo sapiens
  misc_RNA (1)...(19): siRNA sense strand
gaucaugaagaccugcuuu

SEQ ID NO: 1810111 - RNA, 19 nt, Homo sapiens
  misc_RNA (1)...(19): siRNA sense strand
acucugugcugauccauga

SEQ ID NO: 1810112 - RNA, 19 nt, Homo sapiens
  misc_RNA (1)...(19): siRNA sense strand
acaaugagucagaagauga

SEQ ID NO: 1810113 - RNA, 19 nt, Homo sapiens
  misc_RNA (1)...(19): siRNA sense strand
caaugagucagaagaugaa

SEQ ID NO: 1810114 - RNA, 19 nt, Homo sapiens
  misc_RNA (1)...(19): siRNA sense strand
cacaaugagucagaagaug

SEQ ID NO: 1810115 - RNA, 19 nt, Homo sapiens
  misc_RNA (1)...(19): siRNA sense strand
aagccuacgucagcacuuu

SEQ ID NO: 1810116 - RNA, 19 nt, Homo sapiens
  misc_RNA (1)...(19): siRNA sense strand
agucacagauugcacucaa

SEQ ID NO: 1810117 - RNA, 19 nt, Homo sapiens
  misc_RNA (1)...(19): siRNA sense strand
gugauuggacucucaagug

SEQ ID NO: 1810118 - RNA, 19 nt, Homo sapiens
  misc_RNA (1)...(19): siRNA sense strand
gggaggaccaugggaguga

SEQ ID NO: 1810119 - RNA, 19 nt, Homo sapiens
  misc_RNA (1)...(19): siRNA sense strand
ucaacagcaacaucaauga

SEQ ID NO: 1810120 - RNA, 19 nt, Homo sapiens
  misc_RNA (1)...(19): siRNA sense strand
gcucaacagcaacaucaau

SEQ ID NO: 1810121 - RNA, 19 nt, Homo sapiens
  misc_RNA (1)...(19): siRNA sense strand
gcugauccaugaguacuac

SEQ ID NO: 1810122 - RNA, 19 nt, Homo sapiens
  misc_RNA (1)...(19): siRNA sense strand
gauguacugucuggaaagg

SEQ ID NO: 1810123 - RNA, 19 nt, Homo sapiens
  misc_RNA (1)...(19): siRNA sense strand
ugggaacugucgacaaaca

SEQ ID NO: 1810124 - RNA, 19 nt, Homo sapiens
  misc_RNA (1)...(19): siRNA sense strand
aggauguacugucuggaaa

SEQ ID NO: 1810125 - RNA, 19 nt, Homo sapiens
  misc_RNA (1)...(19): siRNA sense strand
ugaccuaccuggccaaccu

SEQ ID NO: 1810126 - RNA, 19 nt, Homo sapiens
  misc_RNA (1)...(19): siRNA sense strand
ugacauggaauuugcuaag

SEQ ID NO: 1810127 - RNA, 19 nt, Homo sapiens
  misc_RNA (1)...(19): siRNA sense strand
gcuaagaauauguaugaac

SEQ ID NO: 1810128 - RNA, 19 nt, Homo sapiens
  misc_RNA (1)...(19): siRNA sense strand
gauguucacgccucugaca

SEQ ID NO: 1810129 - RNA, 19 nt, Homo sapiens
  misc_RNA (1)...(19): siRNA sense strand
ggaggaccaugggagugau

SEQ ID NO: 1810130 - RNA, 19 nt, Homo sapiens
  misc_RNA (1)...(19): siRNA sense strand
ugagucagaagaugaagug

SEQ ID NO: 1810131 - RNA, 19 nt, Homo sapiens
  misc_RNA (1)...(19): siRNA sense strand
ccucacacagucacagauu

SEQ ID NO: 1810132 - RNA, 19 nt, Homo sapiens
  misc_RNA (1)...(19): siRNA sense strand
gaguacaguguugcaauau

SEQ ID NO: 1810133 - RNA, 19 nt, Homo sapiens
  misc_RNA (1)...(19): siRNA sense strand
cuacgucagcacuuuaaug

SEQ ID NO: 1810134 - RNA, 19 nt, Homo sapiens
  misc_RNA (1)...(19): siRNA sense strand
gcuguugacauggaauuug

SEQ ID NO: 1810135 - RNA, 19 nt, Homo sapiens
  misc_RNA (1)...(19): siRNA sense strand
gcaucggaguugaccugau

SEQ ID NO: 1810136 - RNA, 19 nt, Homo sapiens
  misc_RNA (1)...(19): siRNA sense strand
gaccaugggagugauguuc

SEQ ID NO: 1810137 - RNA, 19 nt, Homo sapiens
  misc_RNA (1)...(19): siRNA sense strand
ggucaccaauugcuuuuca

SEQ ID NO: 1810138 - RNA, 19 nt, Homo sapiens
  misc_RNA (1)...(19): siRNA sense strand
caacagcaacaucaaugac

SEQ ID NO: 1810139 - RNA, 19 nt, Homo sapiens
  misc_RNA (1)...(19): siRNA sense strand
ccgaugacuuugagaccau

SEQ ID NO: 1810140 - RNA, 19 nt, Homo sapiens
  misc_RNA (1)...(19): siRNA sense strand
aguacaguguugcaauaug

SEQ ID NO: 1810141 - RNA, 19 nt, Homo sapiens
  misc_RNA (1)...(19): siRNA sense strand
ucaguggaggucaccaauu

SEQ ID NO: 1810142 - RNA, 19 nt, Homo sapiens
  misc_RNA (1)...(19): siRNA sense strand
ggagacagaggaagagaua

SEQ ID NO: 1810143 - RNA, 19 nt, Homo sapiens
  misc_RNA (1)...(19): siRNA sense strand
gcaccaggaucaucuacga

SEQ ID NO: 1810144 - RNA, 19 nt, Homo sapiens
  misc_RNA (1)...(19): siRNA sense strand
ggucacaacuccuccaaca

SEQ ID NO: 1810145 - RNA, 19 nt, Homo sapiens
  misc_RNA (1)...(19): siRNA sense strand
ugcaagaacucacccauug

SEQ ID NO: 1810146 - RNA, 19 nt, Homo sapiens
  misc_RNA (1)...(19): siRNA sense strand
aggaagagauacccgauga

SEQ ID NO: 1810147 - RNA, 19 nt, Homo sapiens
  misc_RNA (1)...(19): siRNA sense strand
ugaaggagcaggagacaga

SEQ ID NO: 1810148 - RNA, 19 nt, Homo sapiens
  misc_RNA (1)...(19): siRNA sense strand
gauacccgaugacgcacaa

SEQ ID NO: 1810149 - RNA, 19 nt, Homo sapiens
  misc_RNA (1)...(19): siRNA sense strand
gaucaucuacgaccgaaag

SEQ ID NO: 1810150 - RNA, 19 nt, Homo sapiens
  misc_RNA (1)...(19): siRNA sense strand
caucuacgaccgaaaguuc

SEQ ID NO: 1810151 - RNA, 19 nt, Homo sapiens
  misc_RNA (1)...(19): siRNA sense strand
uccacuagcugcccgauuc

SEQ ID NO: 1810152 - RNA, 19 nt, Homo sapiens
  misc_RNA (1)...(19): siRNA sense strand
gaugacgcacaauuugaaa

SEQ ID NO: 1810153 - RNA, 19 nt, Homo sapiens
  misc_RNA (1)...(19): siRNA sense strand
cgaugacgcacaauuugaa

SEQ ID NO: 1810154 - RNA, 19 nt, Homo sapiens
  misc_RNA (1)...(19): siRNA sense strand
gugcaagaacucacccauu

SEQ ID NO: 1810155 - RNA, 19 nt, Homo sapiens
  misc_RNA (1)...(19): siRNA sense strand
ggaggcaccaggaucaucu

SEQ ID NO: 1810156 - RNA, 19 nt, Homo sapiens
  misc_RNA (1)...(19): siRNA sense strand
ccgaugacgcacaauuuga

SEQ ID NO: 1810157 - RNA, 19 nt, Homo sapiens
  misc_RNA (1)...(19): siRNA sense strand
caacagccccucucuccaa

SEQ ID NO: 1810158 - RNA, 19 nt, Homo sapiens
  misc_RNA (1)...(19): siRNA sense strand
ggagcaggagacagaggaa

SEQ ID NO: 1810159 - RNA, 19 nt, Homo sapiens
  misc_RNA (1)...(19): siRNA sense strand
gaacagagauggaaauaca

SEQ ID NO: 1810160 - RNA, 19 nt, Homo sapiens
  misc_RNA (1)...(19): siRNA sense strand
ggacaagggugguuuaauu

SEQ ID NO: 1810161 - RNA, 19 nt, Homo sapiens
  misc_RNA (1)...(19): siRNA sense strand
cagaguaucuuaucacuua

SEQ ID NO: 1810162 - RNA, 19 nt, Homo sapiens
  misc_RNA (1)...(19): siRNA sense strand
ggaaguagcugaauaucuu

SEQ ID NO: 1810163 - RNA, 19 nt, Homo sapiens
  misc_RNA (1)...(19): siRNA sense strand
gcaugaagcugcuauuaaa

SEQ ID NO: 1810164 - RNA, 19 nt, Homo sapiens
  misc_RNA (1)...(19): siRNA sense strand
caacagaguucgaauaguu

SEQ ID NO: 1810165 - RNA, 19 nt, Homo sapiens
  misc_RNA (1)...(19): siRNA sense strand
ucacagaacugcuacuaaa

SEQ ID NO: 1810166 - RNA, 19 nt, Homo sapiens
  misc_RNA (1)...(19): siRNA sense strand
guaaacaagugacagaauu

SEQ ID NO: 1810167 - RNA, 19 nt, Homo sapiens
  misc_RNA (1)...(19): siRNA sense strand
ccaaggagcugauccaaau

SEQ ID NO: 1810168 - RNA, 19 nt, Homo sapiens
  misc_RNA (1)...(19): siRNA sense strand
gcauggagcuuguguuaau

SEQ ID NO: 1810169 - RNA, 19 nt, Homo sapiens
  misc_RNA (1)...(19): siRNA sense strand
ggacaggucaugcuauaua

SEQ ID NO: 1810170 - RNA, 19 nt, Homo sapiens
  misc_RNA (1)...(19): siRNA sense strand
gcauggagcugauguuaau

SEQ ID NO: 1810171 - RNA, 19 nt, Homo sapiens
  misc_RNA (1)...(19): siRNA sense strand
cauagcggcuuuauugaua

SEQ ID NO: 1810172 - RNA, 19 nt, Homo sapiens
  misc_RNA (1)...(19): siRNA sense strand
caaccucacuggcccuuua

SEQ ID NO: 1810173 - RNA, 19 nt, Homo sapiens
  misc_RNA (1)...(19): siRNA sense strand
gaagaucgaugugugcauu

SEQ ID NO: 1810174 - RNA, 19 nt, Homo sapiens
  misc_RNA (1)...(19): siRNA sense strand
ggaaauacaccuuuggauu

SEQ ID NO: 1810175 - RNA, 19 nt, Homo sapiens
  misc_RNA (1)...(19): siRNA sense strand
gaagagaugcaaaguacua

SEQ ID NO: 1810176 - RNA, 19 nt, Homo sapiens
  misc_RNA (1)...(19): siRNA sense strand
ugacauagcggcuuuauug

SEQ ID NO: 1810177 - RNA, 19 nt, Homo sapiens
  misc_RNA (1)...(19): siRNA sense strand
gcacggagcugacccaaac

SEQ ID NO: 1810178 - RNA, 19 nt, Homo sapiens
  misc_RNA (1)...(19): siRNA sense strand
gcaaaguacuauucgagaa

SEQ ID NO: 1810179 - RNA, 19 nt, Homo sapiens
  misc_RNA (1)...(19): siRNA sense strand
gaagaagagaugcaaagua

SEQ ID NO: 1810180 - RNA, 19 nt, Homo sapiens
  misc_RNA (1)...(19): siRNA sense strand
gguaccagcuguugcagua

SEQ ID NO: 1810181 - RNA, 19 nt, Homo sapiens
  misc_RNA (1)...(19): siRNA sense strand
caagaaagacgaacuccua

SEQ ID NO: 1810182 - RNA, 19 nt, Homo sapiens
  misc_RNA (1)...(19): siRNA sense strand
gaaagacgaacuccuagaa

SEQ ID NO: 1810183 - RNA, 19 nt, Homo sapiens
  misc_RNA (1)...(19): siRNA sense strand
guagaagucugcucuuugu

SEQ ID NO: 1810184 - RNA, 19 nt, Homo sapiens
  misc_RNA (1)...(19): siRNA sense strand
ggacuugugccucuucaua

SEQ ID NO: 1810185 - RNA, 19 nt, Homo sapiens
  misc_RNA (1)...(19): siRNA sense strand
ggaaggagacacagauauu

SEQ ID NO: 1810186 - RNA, 19 nt, Homo sapiens
  misc_RNA (1)...(19): siRNA sense strand
cgaaagagcccauaaugau

SEQ ID NO: 1810187 - RNA, 19 nt, Homo sapiens
  misc_RNA (1)...(19): siRNA sense strand
gacaaaugcucuucuguag

SEQ ID NO: 1810188 - RNA, 19 nt, Homo sapiens
  misc_RNA (1)...(19): siRNA sense strand
caaccaauauguuuaugga

SEQ ID NO: 1810189 - RNA, 19 nt, Homo sapiens
  misc_RNA (1)...(19): siRNA sense strand
gagaguacaccuauacgua

SEQ ID NO: 1810190 - RNA, 19 nt, Homo sapiens
  misc_RNA (1)...(19): siRNA sense strand
gaacagauuacacuagaug

SEQ ID NO: 1810191 - RNA, 19 nt, Homo sapiens
  misc_RNA (1)...(19): siRNA sense strand
gugacagaauuguuacuua

SEQ ID NO: 1810192 - RNA, 19 nt, Homo sapiens
  misc_RNA (1)...(19): siRNA sense strand
guacuucugauguugauua

SEQ ID NO: 1810193 - RNA, 19 nt, Homo sapiens
  misc_RNA (1)...(19): siRNA sense strand
gcacuucgcugcagguuuu

SEQ ID NO: 1810194 - RNA, 19 nt, Homo sapiens
  misc_RNA (1)...(19): siRNA sense strand
gaacaggcauacccagagu

SEQ ID NO: 1810195 - RNA, 19 nt, Homo sapiens
  misc_RNA (1)...(19): siRNA sense strand
ggaagugucugaggagaau

SEQ ID NO: 1810196 - RNA, 19 nt, Homo sapiens
  misc_RNA (1)...(19): siRNA sense strand
gaaagagcccauaaugaug

SEQ ID NO: 1810197 - RNA, 19 nt, Homo sapiens
  misc_RNA (1)...(19): siRNA sense strand
cagaacagauuacacuaga

SEQ ID NO: 1810198 - RNA, 19 nt, Homo sapiens
  misc_RNA (1)...(19): siRNA sense strand
agggauaacuggaacuaua

SEQ ID NO: 1810199 - RNA, 19 nt, Homo sapiens
  misc_RNA (1)...(19): siRNA sense strand
acacagagauggugguaau

SEQ ID NO: 1810200 - RNA, 19 nt, Homo sapiens
  misc_RNA (1)...(19): siRNA sense strand
caugaagaguugaaagaaa

SEQ ID NO: 1810201 - RNA, 19 nt, Homo sapiens
  misc_RNA (1)...(19): siRNA sense strand
ggauaucuuugaaacagaa

SEQ ID NO: 1810202 - RNA, 19 nt, Homo sapiens
  misc_RNA (1)...(19): siRNA sense strand
gaauaucagccaauuucua

SEQ ID NO: 1810203 - RNA, 19 nt, Homo sapiens
  misc_RNA (1)...(19): siRNA sense strand
gggagagauugacuuauga

SEQ ID NO: 1810204 - RNA, 19 nt, Homo sapiens
  misc_RNA (1)...(19): siRNA sense strand
ugagcgacaugcauacaua

SEQ ID NO: 1810205 - RNA, 19 nt, Homo sapiens
  misc_RNA (1)...(19): siRNA sense strand
gagcauggagcugauguua

SEQ ID NO: 1810206 - RNA, 19 nt, Homo sapiens
  misc_RNA (1)...(19): siRNA sense strand
ucauggaaguucugcauaa

SEQ ID NO: 1810207 - RNA, 19 nt, Homo sapiens
  misc_RNA (1)...(19): siRNA sense strand
caaccgcagucucaugaaa

SEQ ID NO: 1810208 - RNA, 19 nt, Homo sapiens
  misc_RNA (1)...(19): siRNA sense strand
cagcacagaugggcaauga

SEQ ID NO: 1810209 - RNA, 19 nt, Homo sapiens
  misc_RNA (1)...(19): siRNA sense strand
ggcaacagcugacgauauc

SEQ ID NO: 1810210 - RNA, 19 nt, Homo sapiens
  misc_RNA (1)...(19): siRNA sense strand
acacagauauucaggacuu

SEQ ID NO: 1810211 - RNA, 19 nt, Homo sapiens
  misc_RNA (1)...(19): siRNA sense strand
gcggacuuauggaaauuua

SEQ ID NO: 1810212 - RNA, 19 nt, Homo sapiens
  misc_RNA (1)...(19): siRNA sense strand
gaaggaaggauguuguaga

SEQ ID NO: 1810213 - RNA, 19 nt, Homo sapiens
  misc_RNA (1)...(19): siRNA sense strand
acagauaagugggcguuua

SEQ ID NO: 1810214 - RNA, 19 nt, Homo sapiens
  misc_RNA (1)...(19): siRNA sense strand
ggucucaucccgcuucaua

SEQ ID NO: 1810215 - RNA, 19 nt, Homo sapiens
  misc_RNA (1)...(19): siRNA sense strand
caagaaccguguagaaguc

SEQ ID NO: 1810216 - RNA, 19 nt, Homo sapiens
  misc_RNA (1)...(19): siRNA sense strand
gaaagaaauaggcaucaau

SEQ ID NO: 1810217 - RNA, 19 nt, Homo sapiens
  misc_RNA (1)...(19): siRNA sense strand
ugacagaauuguuacuuag

SEQ ID NO: 1810218 - RNA, 19 nt, Homo sapiens
  misc_RNA (1)...(19): siRNA sense strand
gaagcagacuuagcuaaag

SEQ ID NO: 1810219 - RNA, 19 nt, Homo sapiens
  misc_RNA (1)...(19): siRNA sense strand
gugcugauguucaugcaaa

SEQ ID NO: 1810220 - RNA, 19 nt, Homo sapiens
  misc_RNA (1)...(19): siRNA sense strand
ucaaugggcuggcauaugc

SEQ ID NO: 1810221 - RNA, 19 nt, Homo sapiens
  misc_RNA (1)...(19): siRNA sense strand
gaacacagagaugguggua

SEQ ID NO: 1810222 - RNA, 19 nt, Homo sapiens
  misc_RNA (1)...(19): siRNA sense strand
aagaagagaugcaaaguac

SEQ ID NO: 1810223 - RNA, 19 nt, Homo sapiens
  misc_RNA (1)...(19): siRNA sense strand
aaggaaggauguuguagaa

SEQ ID NO: 1810224 - RNA, 19 nt, Homo sapiens
  misc_RNA (1)...(19): siRNA sense strand
aaggacaggucaugcuaua

SEQ ID NO: 1810225 - RNA, 19 nt, Homo sapiens
  misc_RNA (1)...(19): siRNA sense strand
gaagucugcucuuuguuac

SEQ ID NO: 1810226 - RNA, 19 nt, Homo sapiens
  misc_RNA (1)...(19): siRNA sense strand
agaagucugcucuuuguua

SEQ ID NO: 1810227 - RNA, 19 nt, Homo sapiens
  misc_RNA (1)...(19): siRNA sense strand
gacaggucaugcuauauau

SEQ ID NO: 1810228 - RNA, 19 nt, Homo sapiens
  misc_RNA (1)...(19): siRNA sense strand
gaaaguaugaaaucugcaa

SEQ ID NO: 1810229 - RNA, 19 nt, Homo sapiens
  misc_RNA (1)...(19): siRNA sense strand
gagaagcagacuuagcuaa

SEQ ID NO: 1810230 - RNA, 19 nt, Homo sapiens
  misc_RNA (1)...(19): siRNA sense strand
agacaaaugcucuucugua

SEQ ID NO: 1810231 - RNA, 19 nt, Homo sapiens
  misc_RNA (1)...(19): siRNA sense strand
gggcaccgccacaaauuaa

SEQ ID NO: 1810232 - RNA, 19 nt, Homo sapiens
  misc_RNA (1)...(19): siRNA sense strand
aaacuaauggcuuuacuga

SEQ ID NO: 1810233 - RNA, 19 nt, Homo sapiens
  misc_RNA (1)...(19): siRNA sense strand
cuagauguguuggcugaua

SEQ ID NO: 1810234 - RNA, 19 nt, Homo sapiens
  misc_RNA (1)...(19): siRNA sense strand
cggcaaacguaaaugcaaa

SEQ ID NO: 1810235 - RNA, 19 nt, Homo sapiens
  misc_RNA (1)...(19): siRNA sense strand
gaaacugugaagcaacuuu

SEQ ID NO: 1810236 - RNA, 19 nt, Homo sapiens
  misc_RNA (1)...(19): siRNA sense strand
gagcuuagggagagauuga

SEQ ID NO: 1810237 - RNA, 19 nt, Homo sapiens
  misc_RNA (1)...(19): siRNA sense strand
gggcgaaagucgacuccuu

SEQ ID NO: 1810238 - RNA, 19 nt, Homo sapiens
  misc_RNA (1)...(19): siRNA sense strand
gcacagaugggcaaugaag

SEQ ID NO: 1810239 - RNA, 19 nt, Homo sapiens
  misc_RNA (1)...(19): siRNA sense strand
gggcaccacucagucauug

SEQ ID NO: 1810240 - RNA, 19 nt, Homo sapiens
  misc_RNA (1)...(19): siRNA sense strand
gaaggagacacagauauuc

SEQ ID NO: 1810241 - RNA, 19 nt, Homo sapiens
  misc_RNA (1)...(19): siRNA sense strand
gaaaucugcaagcuccuuu

SEQ ID NO: 1810242 - RNA, 19 nt, Homo sapiens
  misc_RNA (1)...(19): siRNA sense strand
cuacaacagaguucgaaua

SEQ ID NO: 1810243 - RNA, 19 nt, Homo sapiens
  misc_RNA (1)...(19): siRNA sense strand
ucacuuaccagaucaugaa

SEQ ID NO: 1810244 - RNA, 19 nt, Homo sapiens
  misc_RNA (1)...(19): siRNA sense strand
ggaacaggcugcccuacac

SEQ ID NO: 1810245 - RNA, 19 nt, Homo sapiens
  misc_RNA (1)...(19): siRNA sense strand
aaucaaaggaguagaaaga

SEQ ID NO: 1810246 - RNA, 19 nt, Homo sapiens
  misc_RNA (1)...(19): siRNA sense strand
gcuaaaggaaaguaugaaa

SEQ ID NO: 1810247 - RNA, 19 nt, Homo sapiens
  misc_RNA (1)...(19): siRNA sense strand
ucaaacaaccgcagucuca

SEQ ID NO: 1810248 - RNA, 19 nt, Homo sapiens
  misc_RNA (1)...(19): siRNA sense strand
cauaaugccuguucuuuug

SEQ ID NO: 1810249 - RNA, 19 nt, Homo sapiens
  misc_RNA (1)...(19): siRNA sense strand
acucuuagguggacaacaa

SEQ ID NO: 1810250 - RNA, 19 nt, Homo sapiens
  misc_RNA (1)...(19): siRNA sense strand
ggucuugacaugaauauca

SEQ ID NO: 1810251 - RNA, 19 nt, Homo sapiens
  misc_RNA (1)...(19): siRNA sense strand
agggagagauugacuuaug

SEQ ID NO: 1810252 - RNA, 19 nt, Homo sapiens
  misc_RNA (1)...(19): siRNA sense strand
ccgcagagcagaagaccua

SEQ ID NO: 1810253 - RNA, 19 nt, Homo sapiens
  misc_RNA (1)...(19): siRNA sense strand
gagauggaaauacaccuuu

SEQ ID NO: 1810254 - RNA, 19 nt, Homo sapiens
  misc_RNA (1)...(19): siRNA sense strand
gcgugucuguuguagagua

SEQ ID NO: 1810255 - RNA, 19 nt, Homo sapiens
  misc_RNA (1)...(19): siRNA sense strand
gagugagaguacaccuaua

SEQ ID NO: 1810256 - RNA, 19 nt, Homo sapiens
  misc_RNA (1)...(19): siRNA sense strand
ggucagacugcuuugcaua

SEQ ID NO: 1810257 - RNA, 19 nt, Homo sapiens
  misc_RNA (1)...(19): siRNA sense strand
gcucuggaaaucauuaauu

SEQ ID NO: 1810258 - RNA, 19 nt, Homo sapiens
  misc_RNA (1)...(19): siRNA sense strand
gagaugcaaaguacuauuc

SEQ ID NO: 1810259 - RNA, 19 nt, Homo sapiens
  misc_RNA (1)...(19): siRNA sense strand
gaaauuggcucaacagaaa

SEQ ID NO: 1810260 - RNA, 19 nt, Homo sapiens
  misc_RNA (1)...(19): siRNA sense strand
gcaguuagaugcaucagaa

SEQ ID NO: 1810261 - RNA, 19 nt, Homo sapiens
  misc_RNA (1)...(19): siRNA sense strand
gaagaaaucagaagaugaa

SEQ ID NO: 1810262 - RNA, 19 nt, Homo sapiens
  misc_RNA (1)...(19): siRNA sense strand
guucgaaugucaccaguua

SEQ ID NO: 1810263 - RNA, 19 nt, Homo sapiens
  misc_RNA (1)...(19): siRNA sense strand
gaaaucagaagaugaagaa

SEQ ID NO: 1810264 - RNA, 19 nt, Homo sapiens
  misc_RNA (1)...(19): siRNA sense strand
gaugacaaauccaaaucua

SEQ ID NO: 1810265 - RNA, 19 nt, Homo sapiens
  misc_RNA (1)...(19): siRNA sense strand
caacagaaauaaccuuuac

SEQ ID NO: 1810266 - RNA, 19 nt, Homo sapiens
  misc_RNA (1)...(19): siRNA sense strand
gaagacgccgcuaaagaua

SEQ ID NO: 1810267 - RNA, 19 nt, Homo sapiens
  misc_RNA (1)...(19): siRNA sense strand
agacaaaguuggaauugaa

SEQ ID NO: 1810268 - RNA, 19 nt, Homo sapiens
  misc_RNA (1)...(19): siRNA sense strand
gagcguggcugugugacua

SEQ ID NO: 1810269 - RNA, 19 nt, Homo sapiens
  misc_RNA (1)...(19): siRNA sense strand
ucaagaaccuaaagaccaa

SEQ ID NO: 1810270 - RNA, 19 nt, Homo sapiens
  misc_RNA (1)...(19): siRNA sense strand
uaaacgagguguaaaugca

SEQ ID NO: 1810271 - RNA, 19 nt, Homo sapiens
  misc_RNA (1)...(19): siRNA sense strand
gaucaucgcuugguaaacg

SEQ ID NO: 1810272 - RNA, 19 nt, Homo sapiens
  misc_RNA (1)...(19): siRNA sense strand
gaagugauuguucgaaugu

SEQ ID NO: 1810273 - RNA, 19 nt, Homo sapiens
  misc_RNA (1)...(19): siRNA sense strand
ggaauugggaugacaaauc

SEQ ID NO: 1810274 - RNA, 19 nt, Homo sapiens
  misc_RNA (1)...(19): siRNA sense strand
gcaaaggcuaaauuuauug

SEQ ID NO: 1810275 - RNA, 19 nt, Homo sapiens
  misc_RNA (1)...(19): siRNA sense strand
aauugaagcugccgaaaug

SEQ ID NO: 1810276 - RNA, 19 nt, Homo sapiens
  misc_RNA (1)...(19): siRNA sense strand
cauccagccuguucaagaa

SEQ ID NO: 1810277 - RNA, 19 nt, Homo sapiens
  misc_RNA (1)...(19): siRNA sense strand
acauuuaucuggacuggaa

SEQ ID NO: 1810278 - RNA, 19 nt, Homo sapiens
  misc_RNA (1)...(19): siRNA sense strand
caccacagaucgauuauac

SEQ ID NO: 1810279 - RNA, 19 nt, Homo sapiens
  misc_RNA (1)...(19): siRNA sense strand
gugaagaaaucagaagaug

SEQ ID NO: 1810280 - RNA, 19 nt, Homo sapiens
  misc_RNA (1)...(19): siRNA sense strand
gaauugaagcugccgaaau

SEQ ID NO: 1810281 - RNA, 19 nt, Homo sapiens
  misc_RNA (1)...(19): siRNA sense strand
caagaccagcugauuguuu

SEQ ID NO: 1810282 - RNA, 19 nt, Homo sapiens
  misc_RNA (1)...(19): siRNA sense strand
ugaagaagacgccgcuaaa

SEQ ID NO: 1810283 - RNA, 19 nt, Homo sapiens
  misc_RNA (1)...(19): siRNA sense strand
gggagugugugccucuuga

SEQ ID NO: 1810284 - RNA, 19 nt, Homo sapiens
  misc_RNA (1)...(19): siRNA sense strand
gaagaucaaagguggaauc

SEQ ID NO: 1810285 - RNA, 19 nt, Homo sapiens
  misc_RNA (1)...(19): siRNA sense strand
gaaugucaccaguuaaaca

SEQ ID NO: 1810286 - RNA, 19 nt, Homo sapiens
  misc_RNA (1)...(19): siRNA sense strand
ggaauccacacagcagaua

SEQ ID NO: 1810287 - RNA, 19 nt, Homo sapiens
  misc_RNA (1)...(19): siRNA sense strand
ugaagugauuguucgaaug

SEQ ID NO: 1810288 - RNA, 19 nt, Homo sapiens
  misc_RNA (1)...(19): siRNA sense strand
gcagacaaaguuggaauug

SEQ ID NO: 1810289 - RNA, 19 nt, Homo sapiens
  misc_RNA (1)...(19): siRNA sense strand
gaccuccacuggcuguuug

SEQ ID NO: 1810290 - RNA, 19 nt, Homo sapiens
  misc_RNA (1)...(19): siRNA sense strand
gaucgauuauacagugaug

SEQ ID NO: 1810291 - RNA, 19 nt, Homo sapiens
  misc_RNA (1)...(19): siRNA sense strand
cagacaaaguuggaauuga

SEQ ID NO: 1810292 - RNA, 19 nt, Homo sapiens
  misc_RNA (1)...(19): siRNA sense strand
uaucuggacuggaaaugau

SEQ ID NO: 1810293 - RNA, 19 nt, Homo sapiens
  misc_RNA (1)...(19): siRNA sense strand
gcugugugacuaagauaua

SEQ ID NO: 1810294 - RNA, 19 nt, Homo sapiens
  misc_RNA (1)...(19): siRNA sense strand
ugucaccaguuaaacaauu

SEQ ID NO: 1810295 - RNA, 19 nt, Homo sapiens
  misc_RNA (1)...(19): siRNA sense strand
guaaaugcagacaaaguug

SEQ ID NO: 1810296 - RNA, 19 nt, Homo sapiens
  misc_RNA (1)...(19): siRNA sense strand
gugaagugauuguucgaau

SEQ ID NO: 1810297 - RNA, 19 nt, Homo sapiens
  misc_RNA (1)...(19): siRNA sense strand
uggaagagcuuucguugcu

SEQ ID NO: 1810298 - RNA, 19 nt, Homo sapiens
  misc_RNA (1)...(19): siRNA sense strand
gagaagaucaaagguggaa

SEQ ID NO: 1810299 - RNA, 19 nt, Homo sapiens
  misc_RNA (1)...(19): siRNA sense strand
gaagaagacgccgcuaaag

SEQ ID NO: 1810300 - RNA, 19 nt, Homo sapiens
  misc_RNA (1)...(19): siRNA sense strand
ugaaauggcaccacagauc

SEQ ID NO: 1810301 - RNA, 19 nt, Homo sapiens
  misc_RNA (1)...(19): siRNA sense strand
gcuggaucaucgcuuggua

SEQ ID NO: 1810302 - RNA, 19 nt, Homo sapiens
  misc_RNA (1)...(19): siRNA sense strand
uaacugagcguggcugugu

SEQ ID NO: 1810303 - RNA, 19 nt, Homo sapiens
  misc_RNA (1)...(19): siRNA sense strand
agaagacgccgcuaaagau

SEQ ID NO: 1810304 - RNA, 19 nt, Homo sapiens
  misc_RNA (1)...(19): siRNA sense strand
aagaagacgccgcuaaaga

SEQ ID NO: 1810305 - RNA, 19 nt, Homo sapiens
  misc_RNA (1)...(19): siRNA sense strand
gcaccacagaucgauuaua

SEQ ID NO: 1810306 - RNA, 19 nt, Homo sapiens
  misc_RNA (1)...(19): siRNA sense strand
ccgcuaaagauacuuauau

SEQ ID NO: 1810307 - RNA, 19 nt, Homo sapiens
  misc_RNA (1)...(19): siRNA sense strand
ugaagaaaucagaagauga

SEQ ID NO: 1810308 - RNA, 19 nt, Homo sapiens
  misc_RNA (1)...(19): siRNA sense strand
gguaaacgagguguaaaug

SEQ ID NO: 1810309 - RNA, 19 nt, Homo sapiens
  misc_RNA (1)...(19): siRNA sense strand
uuugaaagguggaacuaau

SEQ ID NO: 1810310 - RNA, 19 nt, Homo sapiens
  misc_RNA (1)...(19): siRNA sense strand
gcaaaccgcgauacauuuu

SEQ ID NO: 1810311 - RNA, 19 nt, Homo sapiens
  misc_RNA (1)...(19): siRNA sense strand
gggcagaaauuggcucaac

SEQ ID NO: 1810312 - RNA, 19 nt, Homo sapiens
  misc_RNA (1)...(19): siRNA sense strand
uggcaccacagaucgauua

SEQ ID NO: 1810313 - RNA, 19 nt, Homo sapiens
  misc_RNA (1)...(19): siRNA sense strand
ggcagaaauuggcucaaca

SEQ ID NO: 1810314 - RNA, 19 nt, Homo sapiens
  misc_RNA (1)...(19): siRNA sense strand
auacagugauggucuucaa

SEQ ID NO: 1810315 - RNA, 19 nt, Homo sapiens
  misc_RNA (1)...(19): siRNA sense strand
agaaauuggcucaacagaa

SEQ ID NO: 1810316 - RNA, 19 nt, Homo sapiens
  misc_RNA (1)...(19): siRNA sense strand
ggaccaguuacacuccaua

SEQ ID NO: 1810317 - RNA, 19 nt, Homo sapiens
  misc_RNA (1)...(19): siRNA sense strand
ggccagauccugagagucu

SEQ ID NO: 1810318 - RNA, 19 nt, Homo sapiens
  misc_RNA (1)...(19): siRNA sense strand
gcugaaauggcaccacaga

SEQ ID NO: 1810319 - RNA, 19 nt, Homo sapiens
  misc_RNA (1)...(19): siRNA sense strand
uguaaaugcagacaaaguu

SEQ ID NO: 1810320 - RNA, 19 nt, Homo sapiens
  misc_RNA (1)...(19): siRNA sense strand
ggcaauggaaauggaauaa

SEQ ID NO: 1810321 - RNA, 19 nt, Homo sapiens
  misc_RNA (1)...(19): siRNA sense strand
ucgaaugucaccaguuaaa

SEQ ID NO: 1810322 - RNA, 19 nt, Homo sapiens
  misc_RNA (1)...(19): siRNA sense strand
ccacagaucgauuauacag

SEQ ID NO: 1810323 - RNA, 19 nt, Homo sapiens
  misc_RNA (1)...(19): siRNA sense strand
gcaauggaaauggaauaau

SEQ ID NO: 1810324 - RNA, 19 nt, Homo sapiens
  misc_RNA (1)...(19): siRNA sense strand
aaucagaagaugaagaaga

SEQ ID NO: 1810325 - RNA, 19 nt, Homo sapiens
  misc_RNA (1)...(19): siRNA sense strand
acgcaaaccgcgauacauu

SEQ ID NO: 1810326 - RNA, 19 nt, Homo sapiens
  misc_RNA (1)...(19): siRNA sense strand
gcugguguuuugccauuua

SEQ ID NO: 1810327 - RNA, 19 nt, Homo sapiens
  misc_RNA (1)...(19): siRNA sense strand
gacaaauccaaaucuauag

SEQ ID NO: 1810328 - RNA, 19 nt, Homo sapiens
  misc_RNA (1)...(19): siRNA sense strand
gaagcugccgaaaugcuau

SEQ ID NO: 1810329 - RNA, 19 nt, Homo sapiens
  misc_RNA (1)...(19): siRNA sense strand
ugaagcugccgaaaugcua

SEQ ID NO: 1810330 - RNA, 19 nt, Homo sapiens
  misc_RNA (1)...(19): siRNA sense strand
cagaucgauuauacaguga

SEQ ID NO: 1810331 - RNA, 19 nt, Homo sapiens
  misc_RNA (1)...(19): siRNA sense strand
ggaauugaagcugccgaaa

SEQ ID NO: 1810332 - RNA, 19 nt, Homo sapiens
  misc_RNA (1)...(19): siRNA sense strand
uccacuggcuguuuguuug

SEQ ID NO: 1810333 - RNA, 19 nt, Homo sapiens
  misc_RNA (1)...(19): siRNA sense strand
uuagaugcaucagaaagga

SEQ ID NO: 1810334 - RNA, 19 nt, Homo sapiens
  misc_RNA (1)...(19): siRNA sense strand
gucaccaguuaaacaauug

SEQ ID NO: 1810335 - RNA, 19 nt, Homo sapiens
  misc_RNA (1)...(19): siRNA sense strand
agguguaaaugcagacaaa

SEQ ID NO: 1810336 - RNA, 19 nt, Homo sapiens
  misc_RNA (1)...(19): siRNA sense strand
cgcaaaccgcgauacauuu

SEQ ID NO: 1810337 - RNA, 19 nt, Homo sapiens
  misc_RNA (1)...(19): siRNA sense strand
uggaacuaaugcugaaaug

SEQ ID NO: 1810338 - RNA, 19 nt, Homo sapiens
  misc_RNA (1)...(19): siRNA sense strand
gcaagaccagcugauuguu

SEQ ID NO: 1810339 - RNA, 19 nt, Homo sapiens
  misc_RNA (1)...(19): siRNA sense strand
ggucuucaagccaauuguu

SEQ ID NO: 1810340 - RNA, 19 nt, Homo sapiens
  misc_RNA (1)...(19): siRNA sense strand
gaaccuaaagaccaagcau

SEQ ID NO: 1810341 - RNA, 19 nt, Homo sapiens
  misc_RNA (1)...(19): siRNA sense strand
gcagaaauuggcucaacag

SEQ ID NO: 1810342 - RNA, 19 nt, Homo sapiens
  misc_RNA (1)...(19): siRNA sense strand
gauucgagauuugugugau

SEQ ID NO: 1810343 - RNA, 19 nt, Homo sapiens
  misc_RNA (1)...(19): siRNA sense strand
caaggaauugggaugacaa

SEQ ID NO: 1810344 - RNA, 19 nt, Homo sapiens
  misc_RNA (1)...(19): siRNA sense strand
uauugaaugccaaggaauu

SEQ ID NO: 1810345 - RNA, 19 nt, Homo sapiens
  misc_RNA (1)...(19): siRNA sense strand
cacagcagauaccaagaca

SEQ ID NO: 1810346 - RNA, 19 nt, Homo sapiens
  misc_RNA (1)...(19): siRNA sense strand
uccgggauuuguauguuaa

SEQ ID NO: 1810347 - RNA, 19 nt, Homo sapiens
  misc_RNA (1)...(19): siRNA sense strand
aaucuuagacaugguggua

SEQ ID NO: 1810348 - RNA, 19 nt, Homo sapiens
  misc_RNA (1)...(19): siRNA sense strand
caccagagaagaucaaagg

SEQ ID NO: 1810349 - RNA, 19 nt, Homo sapiens
  misc_RNA (1)...(19): siRNA sense strand
aaacaggaccaguuacacu

SEQ ID NO: 1810350 - RNA, 19 nt, Homo sapiens
  misc_RNA (1)...(19): siRNA sense strand
aagaccagcugauuguuuu

SEQ ID NO: 1810351 - RNA, 19 nt, Homo sapiens
  misc_RNA (1)...(19): siRNA sense strand
gcggccagauccugagagu

SEQ ID NO: 1810352 - RNA, 19 nt, Homo sapiens
  misc_RNA (1)...(19): siRNA sense strand
gugacuaagauauauggaa

SEQ ID NO: 1810353 - RNA, 19 nt, Homo sapiens
  misc_RNA (1)...(19): siRNA sense strand
auuauugaaugccaaggaa

SEQ ID NO: 1810354 - RNA, 19 nt, Homo sapiens
  misc_RNA (1)...(19): siRNA sense strand
guaaacgagguguaaaugc

SEQ ID NO: 1810355 - RNA, 19 nt, Homo sapiens
  misc_RNA (1)...(19): siRNA sense strand
accuaaagaccaagcauuu

SEQ ID NO: 1810356 - RNA, 19 nt, Homo sapiens
  misc_RNA (1)...(19): siRNA sense strand
agaaaucagaagaugaaga

SEQ ID NO: 1810357 - RNA, 19 nt, Homo sapiens
  misc_RNA (1)...(19): siRNA sense strand
ucaaugccguguguucucu

SEQ ID NO: 1810358 - RNA, 19 nt, Homo sapiens
  misc_RNA (1)...(19): siRNA sense strand
agacgccgcuaaagauacu

SEQ ID NO: 1810359 - RNA, 19 nt, Homo sapiens
  misc_RNA (1)...(19): siRNA sense strand
gaaccuggcacgcaagauu

SEQ ID NO: 1810360 - RNA, 19 nt, Homo sapiens
  misc_RNA (1)...(19): siRNA sense strand
acaacgagcuggucaagug

SEQ ID NO: 1810361 - RNA, 19 nt, Homo sapiens
  misc_RNA (1)...(19): siRNA sense strand
ugaggcagcugacagagaa

SEQ ID NO: 1810362 - RNA, 19 nt, Homo sapiens
  misc_RNA (1)...(19): siRNA sense strand
uagaggagcugugccagaa

SEQ ID NO: 1810363 - RNA, 19 nt, Homo sapiens
  misc_RNA (1)...(19): siRNA sense strand
ucaagauccuggagagcuu

SEQ ID NO: 1810364 - RNA, 19 nt, Homo sapiens
  misc_RNA (1)...(19): siRNA sense strand
gagcuggucaagugcauag

SEQ ID NO: 1810365 - RNA, 19 nt, Homo sapiens
  misc_RNA (1)...(19): siRNA sense strand
caacaacgagcuggucaag

SEQ ID NO: 1810366 - RNA, 19 nt, Homo sapiens
  misc_RNA (1)...(19): siRNA sense strand
gagaaccuggcacgcaaga

SEQ ID NO: 1810367 - RNA, 19 nt, Homo sapiens
  misc_RNA (1)...(19): siRNA sense strand
ggaggaggaggacgagaag

SEQ ID NO: 1810368 - RNA, 19 nt, Homo sapiens
  misc_RNA (1)...(19): siRNA sense strand
ggagagcuuccagacuuug

SEQ ID NO: 1810369 - RNA, 19 nt, Homo sapiens
  misc_RNA (1)...(19): siRNA sense strand
gaaaauagcugaagaacug

SEQ ID NO: 1810370 - RNA, 19 nt, Homo sapiens
  misc_RNA (1)...(19): siRNA sense strand
caaaguuucuucucaguuu

SEQ ID NO: 1810371 - RNA, 19 nt, Homo sapiens
  misc_RNA (1)...(19): siRNA sense strand
uaaagaagcugucaagaag

SEQ ID NO: 1810372 - RNA, 19 nt, Homo sapiens
  misc_RNA (1)...(19): siRNA sense strand
ggaagacaaguuugauuua

SEQ ID NO: 1810373 - RNA, 19 nt, Homo sapiens
  misc_RNA (1)...(19): siRNA sense strand
gaagugacauguacauucu

SEQ ID NO: 1810374 - RNA, 19 nt, Homo sapiens
  misc_RNA (1)...(19): siRNA sense strand
ugacugagcuggaagacaa

SEQ ID NO: 1810375 - RNA, 19 nt, Homo sapiens
  misc_RNA (1)...(19): siRNA sense strand
gaugaagccucagguguaa

SEQ ID NO: 1810376 - RNA, 19 nt, Homo sapiens
  misc_RNA (1)...(19): siRNA sense strand
gaaggcagcugagcaaaca

SEQ ID NO: 1810377 - RNA, 19 nt, Homo sapiens
  misc_RNA (1)...(19): siRNA sense strand
gcagggaagaugaaaguua

SEQ ID NO: 1810378 - RNA, 19 nt, Homo sapiens
  misc_RNA (1)...(19): siRNA sense strand
gaagagacaccaugccauu

SEQ ID NO: 1810379 - RNA, 19 nt, Homo sapiens
  misc_RNA (1)...(19): siRNA sense strand
uagaauggcuacagaaaga

SEQ ID NO: 1810380 - RNA, 19 nt, Homo sapiens
  misc_RNA (1)...(19): siRNA sense strand
ggagacagguugcuucagu

SEQ ID NO: 1810381 - RNA, 19 nt, Homo sapiens
  misc_RNA (1)...(19): siRNA sense strand
ggacaucugccucaagaaa

SEQ ID NO: 1810382 - RNA, 19 nt, Homo sapiens
  misc_RNA (1)...(19): siRNA sense strand
ggaugaagccucaggugua

SEQ ID NO: 1810383 - RNA, 19 nt, Homo sapiens
  misc_RNA (1)...(19): siRNA sense strand
gcacauccuuaucaauaug

SEQ ID NO: 1810384 - RNA, 19 nt, Homo sapiens
  misc_RNA (1)...(19): siRNA sense strand
cccauuaccugcuauauau

SEQ ID NO: 1810385 - RNA, 19 nt, Homo sapiens
  misc_RNA (1)...(19): siRNA sense strand
gaagacaaguuugauuuac

SEQ ID NO: 1810386 - RNA, 19 nt, Homo sapiens
  misc_RNA (1)...(19): siRNA sense strand
gaagaaggcagcugagcaa

SEQ ID NO: 1810387 - RNA, 19 nt, Homo sapiens
  misc_RNA (1)...(19): siRNA sense strand
caagcucucucuaaggaaa

SEQ ID NO: 1810388 - RNA, 19 nt, Homo sapiens
  misc_RNA (1)...(19): siRNA sense strand
gaacagaaacaagagaaga

SEQ ID NO: 1810389 - RNA, 19 nt, Homo sapiens
  misc_RNA (1)...(19): siRNA sense strand
ccacagaacagaaacaaga

SEQ ID NO: 1810390 - RNA, 19 nt, Homo sapiens
  misc_RNA (1)...(19): siRNA sense strand
ccacagcugucaucacguu

SEQ ID NO: 1810391 - RNA, 19 nt, Homo sapiens
  misc_RNA (1)...(19): siRNA sense strand
ggaauuugcaguugacuug

SEQ ID NO: 1810392 - RNA, 19 nt, Homo sapiens
  misc_RNA (1)...(19): siRNA sense strand
gaaaagcucuugaauuguc

SEQ ID NO: 1810393 - RNA, 19 nt, Homo sapiens
  misc_RNA (1)...(19): siRNA sense strand
gaagagagagcgagcaaca

SEQ ID NO: 1810394 - RNA, 19 nt, Homo sapiens
  misc_RNA (1)...(19): siRNA sense strand
uaaagugacugagcuggaa

SEQ ID NO: 1810395 - RNA, 19 nt, Homo sapiens
  misc_RNA (1)...(19): siRNA sense strand
gcugagagauuggagaaug

SEQ ID NO: 1810396 - RNA, 19 nt, Homo sapiens
  misc_RNA (1)...(19): siRNA sense strand
ucagaaaccucucccucaa

SEQ ID NO: 1810397 - RNA, 19 nt, Homo sapiens
  misc_RNA (1)...(19): siRNA sense strand
cuaaagaagcugucaagaa

SEQ ID NO: 1810398 - RNA, 19 nt, Homo sapiens
  misc_RNA (1)...(19): siRNA sense strand
gcugucaucacguuauuua

SEQ ID NO: 1810399 - RNA, 19 nt, Homo sapiens
  misc_RNA (1)...(19): siRNA sense strand
gcucaagucugaaguugca

SEQ ID NO: 1810400 - RNA, 19 nt, Homo sapiens
  misc_RNA (1)...(19): siRNA sense strand
cugaagaacugccuaagga

SEQ ID NO: 1810401 - RNA, 19 nt, Homo sapiens
  misc_RNA (1)...(19): siRNA sense strand
cgacagcuuugugaaguuu

SEQ ID NO: 1810402 - RNA, 19 nt, Homo sapiens
  misc_RNA (1)...(19): siRNA sense strand
gcucuugaauugucaggaa

SEQ ID NO: 1810403 - RNA, 19 nt, Homo sapiens
  misc_RNA (1)...(19): siRNA sense strand
gacauagaauggcuacaga

SEQ ID NO: 1810404 - RNA, 19 nt, Homo sapiens
  misc_RNA (1)...(19): siRNA sense strand
gaagaagcaccuuaacaca

SEQ ID NO: 1810405 - RNA, 19 nt, Homo sapiens
  misc_RNA (1)...(19): siRNA sense strand
ccgaggagaugcucagcua

SEQ ID NO: 1810406 - RNA, 19 nt, Homo sapiens
  misc_RNA (1)...(19): siRNA sense strand
cauuaaggaucgaaguaaa

SEQ ID NO: 1810407 - RNA, 19 nt, Homo sapiens
  misc_RNA (1)...(19): siRNA sense strand
ggaaacagcaaauccaaag

SEQ ID NO: 1810408 - RNA, 19 nt, Homo sapiens
  misc_RNA (1)...(19): siRNA sense strand
aagaagcugucaagaagaa

SEQ ID NO: 1810409 - RNA, 19 nt, Homo sapiens
  misc_RNA (1)...(19): siRNA sense strand
caaacccaaugcucagaaa

SEQ ID NO: 1810410 - RNA, 19 nt, Homo sapiens
  misc_RNA (1)...(19): siRNA sense strand
gacagaggcuucagguaca

SEQ ID NO: 1810411 - RNA, 19 nt, Homo sapiens
  misc_RNA (1)...(19): siRNA sense strand
acgaaaagcucuugaauug

SEQ ID NO: 1810412 - RNA, 19 nt, Homo sapiens
  misc_RNA (1)...(19): siRNA sense strand
gaagaaacgacucaaaauu

SEQ ID NO: 1810413 - RNA, 19 nt, Homo sapiens
  misc_RNA (1)...(19): siRNA sense strand
gaugaaaguuacggauaug

SEQ ID NO: 1810414 - RNA, 19 nt, Homo sapiens
  misc_RNA (1)...(19): siRNA sense strand
gaucaucuccugaaacucu

SEQ ID NO: 1810415 - RNA, 19 nt, Homo sapiens
  misc_RNA (1)...(19): siRNA sense strand
gcagaugcagugcuucaaa

SEQ ID NO: 1810416 - RNA, 19 nt, Homo sapiens
  misc_RNA (1)...(19): siRNA sense strand
caaaccacaugaugcugaa

SEQ ID NO: 1810417 - RNA, 19 nt, Homo sapiens
  misc_RNA (1)...(19): siRNA sense strand
ugacacccauuaccugcua

SEQ ID NO: 1810418 - RNA, 19 nt, Homo sapiens
  misc_RNA (1)...(19): siRNA sense strand
uaaugaaccuagugcugaa

SEQ ID NO: 1810419 - RNA, 19 nt, Homo sapiens
  misc_RNA (1)...(19): siRNA sense strand
gaccucagcucaaguuucg

SEQ ID NO: 1810420 - RNA, 19 nt, Homo sapiens
  misc_RNA (1)...(19): siRNA sense strand
gcaacaagcgacccaagga

SEQ ID NO: 1810421 - RNA, 19 nt, Homo sapiens
  misc_RNA (1)...(19): siRNA sense strand
agaagcaccuuaacacaca

SEQ ID NO: 1810422 - RNA, 19 nt, Homo sapiens
  misc_RNA (1)...(19): siRNA sense strand
gagacaccaugccauuuca

SEQ ID NO: 1810423 - RNA, 19 nt, Homo sapiens
  misc_RNA (1)...(19): siRNA sense strand
gggugucgcagcaacauua

SEQ ID NO: 1810424 - RNA, 19 nt, Homo sapiens
  misc_RNA (1)...(19): siRNA sense strand
ggcagcagaucaacgaaau

SEQ ID NO: 1810425 - RNA, 19 nt, Homo sapiens
  misc_RNA (1)...(19): siRNA sense strand
gauauguacugccaaacca

SEQ ID NO: 1810426 - RNA, 19 nt, Homo sapiens
  misc_RNA (1)...(19): siRNA sense strand
cagcucaaguuucgagaga

SEQ ID NO: 1810427 - RNA, 19 nt, Homo sapiens
  misc_RNA (1)...(19): siRNA sense strand
gcaaauccaaaguuucuuc

SEQ ID NO: 1810428 - RNA, 19 nt, Homo sapiens
  misc_RNA (1)...(19): siRNA sense strand
gaacaucauggaguccuuu

SEQ ID NO: 1810429 - RNA, 19 nt, Homo sapiens
  misc_RNA (1)...(19): siRNA sense strand
gucaucacguuauuuaaug

SEQ ID NO: 1810430 - RNA, 19 nt, Homo sapiens
  misc_RNA (1)...(19): siRNA sense strand
gguaccacaugccugauug

SEQ ID NO: 1810431 - RNA, 19 nt, Homo sapiens
  misc_RNA (1)...(19): siRNA sense strand
gaaaguuacggauauguac

SEQ ID NO: 1810432 - RNA, 19 nt, Homo sapiens
  misc_RNA (1)...(19): siRNA sense strand
agaugaaaguuacggauau

SEQ ID NO: 1810433 - RNA, 19 nt, Homo sapiens
  misc_RNA (1)...(19): siRNA sense strand
auacagaccuauagaagag

SEQ ID NO: 1810434 - RNA, 19 nt, Homo sapiens
  misc_RNA (1)...(19): siRNA sense strand
ccucagguguaaacaagaa

SEQ ID NO: 1810435 - RNA, 19 nt, Homo sapiens
  misc_RNA (1)...(19): siRNA sense strand
aaacagcaaauccaaaguu

SEQ ID NO: 1810436 - RNA, 19 nt, Homo sapiens
  misc_RNA (1)...(19): siRNA sense strand
gcccagugcugagagauug

SEQ ID NO: 1810437 - RNA, 19 nt, Homo sapiens
  misc_RNA (1)...(19): siRNA sense strand
aaaugaggcuggagaugug

SEQ ID NO: 1810438 - RNA, 19 nt, Homo sapiens
  misc_RNA (1)...(19): siRNA sense strand
ugaccugccugaugcaaau

SEQ ID NO: 1810439 - RNA, 19 nt, Homo sapiens
  misc_RNA (1)...(19): siRNA sense strand
uugcacauccuuaucaaua

SEQ ID NO: 1810440 - RNA, 19 nt, Homo sapiens
  misc_RNA (1)...(19): siRNA sense strand
acacaccauuucuuccuaa

SEQ ID NO: 1810441 - RNA, 19 nt, Homo sapiens
  misc_RNA (1)...(19): siRNA sense strand
ggaugaguccuaccuugaa

SEQ ID NO: 1810442 - RNA, 19 nt, Homo sapiens
  misc_RNA (1)...(19): siRNA sense strand
aacagcaaauccaaaguuu

SEQ ID NO: 1810443 - RNA, 19 nt, Homo sapiens
  misc_RNA (1)...(19): siRNA sense strand
gcgagccucuucccugaug

SEQ ID NO: 1810444 - RNA, 19 nt, Homo sapiens
  misc_RNA (1)...(19): siRNA sense strand
ugaaaguuacggauaugua

SEQ ID NO: 1810445 - RNA, 19 nt, Homo sapiens
  misc_RNA (1)...(19): siRNA sense strand
caacguggacucaaacaag

SEQ ID NO: 1810446 - RNA, 19 nt, Homo sapiens
  misc_RNA (1)...(19): siRNA sense strand
gcagaguaaugcaguacca

SEQ ID NO: 1810447 - RNA, 19 nt, Homo sapiens
  misc_RNA (1)...(19): siRNA sense strand
acaucugccucaagaaauu

SEQ ID NO: 1810448 - RNA, 19 nt, Homo sapiens
  misc_RNA (1)...(19): siRNA sense strand
uggaagacaaguuugauuu

SEQ ID NO: 1810449 - RNA, 19 nt, Homo sapiens
  misc_RNA (1)...(19): siRNA sense strand
gagaagaaacgacucaaaa

SEQ ID NO: 1810450 - RNA, 19 nt, Homo sapiens
  misc_RNA (1)...(19): siRNA sense strand
cagggaagaugaaaguuac

SEQ ID NO: 1810451 - RNA, 19 nt, Homo sapiens
  misc_RNA (1)...(19): siRNA sense strand
ggacucaaacaagcaauau

SEQ ID NO: 1810452 - RNA, 19 nt, Homo sapiens
  misc_RNA (1)...(19): siRNA sense strand
ugaugccaaugauguaauu

SEQ ID NO: 1810453 - RNA, 19 nt, Homo sapiens
  misc_RNA (1)...(19): siRNA sense strand
cagcugucaucacguuauu

SEQ ID NO: 1810454 - RNA, 19 nt, Homo sapiens
  misc_RNA (1)...(19): siRNA sense strand
gacuuuggguuguauguag

SEQ ID NO: 1810455 - RNA, 19 nt, Homo sapiens
  misc_RNA (1)...(19): siRNA sense strand
cauagaauggcuacagaaa

SEQ ID NO: 1810456 - RNA, 19 nt, Homo sapiens
  misc_RNA (1)...(19): siRNA sense strand
cgaagugacauguacauuc

SEQ ID NO: 1810457 - RNA, 19 nt, Homo sapiens
  misc_RNA (1)...(19): siRNA sense strand
gacaccaugccauuucaua

SEQ ID NO: 1810458 - RNA, 19 nt, Homo sapiens
  misc_RNA (1)...(19): siRNA sense strand
gcucaaguuucgagagaag

SEQ ID NO: 1810459 - RNA, 19 nt, Homo sapiens
  misc_RNA (1)...(19): siRNA sense strand
aauccaaaguuucuucuca

SEQ ID NO: 1810460 - RNA, 19 nt, Homo sapiens
  misc_RNA (1)...(19): siRNA sense strand
acaacuggccacagagaua

SEQ ID NO: 1810461 - RNA, 19 nt, Homo sapiens
  misc_RNA (1)...(19): siRNA sense strand
caucauggaguccuuugaa

SEQ ID NO: 1810462 - RNA, 19 nt, Homo sapiens
  misc_RNA (1)...(19): siRNA sense strand
guacaacuggccacagaga

SEQ ID NO: 1810463 - RNA, 19 nt, Homo sapiens
  misc_RNA (1)...(19): siRNA sense strand
cagcaaauccaaaguuucu

SEQ ID NO: 1810464 - RNA, 19 nt, Homo sapiens
  misc_RNA (1)...(19): siRNA sense strand
caagagaagaaacgacuca

SEQ ID NO: 1810465 - RNA, 19 nt, Homo sapiens
  misc_RNA (1)...(19): siRNA sense strand
gucaggaauuugcaguuga

SEQ ID NO: 1810466 - RNA, 19 nt, Homo sapiens
  misc_RNA (1)...(19): siRNA sense strand
gaaacaagagaagaaacga

SEQ ID NO: 1810467 - RNA, 19 nt, Homo sapiens
  misc_RNA (1)...(19): siRNA sense strand
cauuuaggaugaucagcaa

SEQ ID NO: 1810468 - RNA, 19 nt, Homo sapiens
  misc_RNA (1)...(19): siRNA sense strand
caacgaaaugcaccuuuua

SEQ ID NO: 1810469 - RNA, 19 nt, Homo sapiens
  misc_RNA (1)...(19): siRNA sense strand
caaaugagauucagaguaa

SEQ ID NO: 1810470 - RNA, 19 nt, Homo sapiens
  misc_RNA (1)...(19): siRNA sense strand
gcacugagauacuaaagaa

SEQ ID NO: 1810471 - RNA, 19 nt, Homo sapiens
  misc_RNA (1)...(19): siRNA sense strand
gcagauaacuauucucaca

SEQ ID NO: 1810472 - RNA, 19 nt, Homo sapiens
  misc_RNA (1)...(19): siRNA sense strand
ccaaagcacugagauacua

SEQ ID NO: 1810473 - RNA, 19 nt, Homo sapiens
  misc_RNA (1)...(19): siRNA sense strand
ggaagaacaugcagauaac

SEQ ID NO: 1810474 - RNA, 19 nt, Homo sapiens
  misc_RNA (1)...(19): siRNA sense strand
gcauuucugucaucauuug

SEQ ID NO: 1810475 - RNA, 19 nt, Homo sapiens
  misc_RNA (1)...(19): siRNA sense strand
uagcauuucugucaucauu

SEQ ID NO: 1810476 - RNA, 19 nt, Homo sapiens
  misc_RNA (1)...(19): siRNA sense strand
gccaaacucuggaaugaau

SEQ ID NO: 1810477 - RNA, 19 nt, Homo sapiens
  misc_RNA (1)...(19): siRNA sense strand
gcaauucuguacuuguguu

SEQ ID NO: 1810478 - RNA, 19 nt, Homo sapiens
  misc_RNA (1)...(19): siRNA sense strand
gucgacauguuaccgauua

SEQ ID NO: 1810479 - RNA, 19 nt, Homo sapiens
  misc_RNA (1)...(19): siRNA sense strand
gaacaugcagauaacuauu

SEQ ID NO: 1810480 - RNA, 19 nt, Homo sapiens
  misc_RNA (1)...(19): siRNA sense strand
uauccgugcuccaaguuua

SEQ ID NO: 1810481 - RNA, 19 nt, Homo sapiens
  misc_RNA (1)...(19): siRNA sense strand
guucuaagcuacugucaag

SEQ ID NO: 1810482 - RNA, 19 nt, Homo sapiens
  misc_RNA (1)...(19): siRNA sense strand
gagauucagaguaacauuu

SEQ ID NO: 1810483 - RNA, 19 nt, Homo sapiens
  misc_RNA (1)...(19): siRNA sense strand
gaacaacagacacuacaca

SEQ ID NO: 1810484 - RNA, 19 nt, Homo sapiens
  misc_RNA (1)...(19): siRNA sense strand
ccagaagcuugaaggguuu

SEQ ID NO: 1810485 - RNA, 19 nt, Homo sapiens
  misc_RNA (1)...(19): siRNA sense strand
caacagacacuacacaucu

SEQ ID NO: 1810486 - RNA, 19 nt, Homo sapiens
  misc_RNA (1)...(19): siRNA sense strand
gugccaaacucuggaauga

SEQ ID NO: 1810487 - RNA, 19 nt, Homo sapiens
  misc_RNA (1)...(19): siRNA sense strand
ugaaggguuugguuaagaa

SEQ ID NO: 1810488 - RNA, 19 nt, Homo sapiens
  misc_RNA (1)...(19): siRNA sense strand
uggaaugaaugguguagaa

SEQ ID NO: 1810489 - RNA, 19 nt, Homo sapiens
  misc_RNA (1)...(19): siRNA sense strand
guacuuguguuauacugau

SEQ ID NO: 1810490 - RNA, 19 nt, Homo sapiens
  misc_RNA (1)...(19): siRNA sense strand
gaauauaguacacgaccuu

SEQ ID NO: 1810491 - RNA, 19 nt, Homo sapiens
  misc_RNA (1)...(19): siRNA sense strand
ugcagaagaucaacaguau

SEQ ID NO: 1810492 - RNA, 19 nt, Homo sapiens
  misc_RNA (1)...(19): siRNA sense strand
gaugacaacaaaugagauu

SEQ ID NO: 1810493 - RNA, 19 nt, Homo sapiens
  misc_RNA (1)...(19): siRNA sense strand
gacauguuaccgauuauaa

SEQ ID NO: 1810494 - RNA, 19 nt, Homo sapiens
  misc_RNA (1)...(19): siRNA sense strand
cagaagaucaacaguauca

SEQ ID NO: 1810495 - RNA, 19 nt, Homo sapiens
  misc_RNA (1)...(19): siRNA sense strand
gaagaucaacaguaucagu

SEQ ID NO: 1810496 - RNA, 19 nt, Homo sapiens
  misc_RNA (1)...(19): siRNA sense strand
aggaagaacaugcagauaa

SEQ ID NO: 1810497 - RNA, 19 nt, Homo sapiens
  misc_RNA (1)...(19): siRNA sense strand
gaacaaccgaauauaguac

SEQ ID NO: 1810498 - RNA, 19 nt, Homo sapiens
  misc_RNA (1)...(19): siRNA sense strand
gauaacuauucucacaugu

SEQ ID NO: 1810499 - RNA, 19 nt, Homo sapiens
  misc_RNA (1)...(19): siRNA sense strand
ucagugcaguugcuauguu

SEQ ID NO: 1810500 - RNA, 19 nt, Homo sapiens
  misc_RNA (1)...(19): siRNA sense strand
acaaaugagauucagagua

SEQ ID NO: 1810501 - RNA, 19 nt, Homo sapiens
  misc_RNA (1)...(19): siRNA sense strand
agaacaaccgaauauagua

SEQ ID NO: 1810502 - RNA, 19 nt, Homo sapiens
  misc_RNA (1)...(19): siRNA sense strand
gcuagaacaaccgaauaua

SEQ ID NO: 1810503 - RNA, 19 nt, Homo sapiens
  misc_RNA (1)...(19): siRNA sense strand
ucaaagacucggcguguug

SEQ ID NO: 1810504 - RNA, 19 nt, Homo sapiens
  misc_RNA (1)...(19): siRNA sense strand
gcaguagcauuucugucau

SEQ ID NO: 1810505 - RNA, 19 nt, Homo sapiens
  misc_RNA (1)...(19): siRNA sense strand
uaaucacaguggaagcuuu

SEQ ID NO: 1810506 - RNA, 19 nt, Homo sapiens
  misc_RNA (1)...(19): siRNA sense strand
gcuccaaguuuauaauugc

SEQ ID NO: 1810507 - RNA, 19 nt, Homo sapiens
  misc_RNA (1)...(19): siRNA sense strand
acacagaauuucaaagacu

SEQ ID NO: 1810508 - RNA, 19 nt, Homo sapiens
  misc_RNA (1)...(19): siRNA sense strand
agauaacuauucucacaug

SEQ ID NO: 1810509 - RNA, 19 nt, Homo sapiens
  misc_RNA (1)...(19): siRNA sense strand
gaaugaaugguguagaaca

SEQ ID NO: 1810510 - RNA, 19 nt, Homo sapiens
  misc_RNA (1)...(19): siRNA sense strand
caaggaagaacaugcagau

SEQ ID NO: 1810511 - RNA, 19 nt, Homo sapiens
  misc_RNA (1)...(19): siRNA sense strand
aaugaaugguguagaacaa

SEQ ID NO: 1810512 - RNA, 19 nt, Homo sapiens
  misc_RNA (1)...(19): siRNA sense strand
guugcuauguugcagaaga

SEQ ID NO: 1810513 - RNA, 19 nt, Homo sapiens
  misc_RNA (1)...(19): siRNA sense strand
caaagcacugagauacuaa

SEQ ID NO: 1810514 - RNA, 19 nt, Homo sapiens
  misc_RNA (1)...(19): siRNA sense strand
ugaaugguguagaacaaca

SEQ ID NO: 1810515 - RNA, 19 nt, Homo sapiens
  misc_RNA (1)...(19): siRNA sense strand
gcuugaaggguuugguuaa

SEQ ID NO: 1810516 - RNA, 19 nt, Homo sapiens
  misc_RNA (1)...(19): siRNA sense strand
uagaacaaccgaauauagu

SEQ ID NO: 1810517 - RNA, 19 nt, Homo sapiens
  misc_RNA (1)...(19): siRNA sense strand
caguaucaguggcuggaaa

SEQ ID NO: 1810518 - RNA, 19 nt, Homo sapiens
  misc_RNA (1)...(19): siRNA sense strand
ugacaacaaaugagauuca

SEQ ID NO: 1810519 - RNA, 19 nt, Homo sapiens
  misc_RNA (1)...(19): siRNA sense strand
cagugcaguugcuauguug

SEQ ID NO: 1810520 - RNA, 19 nt, Homo sapiens
  misc_RNA (1)...(19): siRNA sense strand
uuuggaaguuucuuugcua

SEQ ID NO: 1810521 - RNA, 19 nt, Homo sapiens
  misc_RNA (1)...(19): siRNA sense strand
cuagaacaaccgaauauag

SEQ ID NO: 1810522 - RNA, 19 nt, Homo sapiens
  misc_RNA (1)...(19): siRNA sense strand
cgacauguuaccgauuaua

SEQ ID NO: 1810523 - RNA, 19 nt, Homo sapiens
  misc_RNA (1)...(19): siRNA sense strand
aaauauccgugcuccaagu

SEQ ID NO: 1810524 - RNA, 19 nt, Homo sapiens
  misc_RNA (1)...(19): siRNA sense strand
cugaugugaugaaauuaga

SEQ ID NO: 1810525 - RNA, 19 nt, Homo sapiens
  misc_RNA (1)...(19): siRNA sense strand
caguugcuauguugcagaa

SEQ ID NO: 1810526 - RNA, 19 nt, Homo sapiens
  misc_RNA (1)...(19): siRNA sense strand
aggguuugguuaagaauau

SEQ ID NO: 1810527 - RNA, 19 nt, Homo sapiens
  misc_RNA (1)...(19): siRNA sense strand
aagaacaugcagauaacua

SEQ ID NO: 1810528 - RNA, 19 nt, Homo sapiens
  misc_RNA (1)...(19): siRNA sense strand
caauucuguacuuguguua

SEQ ID NO: 1810529 - RNA, 19 nt, Homo sapiens
  misc_RNA (1)...(19): siRNA sense strand
guguuauacugaugugaug

SEQ ID NO: 1810530 - RNA, 19 nt, Homo sapiens
  misc_RNA (1)...(19): siRNA sense strand
uugcagaagaucaacagua

SEQ ID NO: 1810531 - RNA, 19 nt, Homo sapiens
  misc_RNA (1)...(19): siRNA sense strand
gacaacaaaugagauucag

SEQ ID NO: 1810532 - RNA, 19 nt, Homo sapiens
  misc_RNA (1)...(19): siRNA sense strand
caucuuuggaaguuucuuu

SEQ ID NO: 1810533 - RNA, 19 nt, Homo sapiens
  misc_RNA (1)...(19): siRNA sense strand
uugaaggguuugguuaaga

SEQ ID NO: 1810534 - RNA, 19 nt, Homo sapiens
  misc_RNA (1)...(19): siRNA sense strand
gcagccuuccuucuccuuu

SEQ ID NO: 1810535 - RNA, 19 nt, Homo sapiens
  misc_RNA (1)...(19): siRNA sense strand
gugcuccaaguuuauaauu

SEQ ID NO: 1810536 - RNA, 19 nt, Homo sapiens
  misc_RNA (1)...(19): siRNA sense strand
ugcaguagcauuucuguca

SEQ ID NO: 1810537 - RNA, 19 nt, Homo sapiens
  misc_RNA (1)...(19): siRNA sense strand
ggguuugguuaagaauauu

SEQ ID NO: 1810538 - RNA, 19 nt, Homo sapiens
  misc_RNA (1)...(19): siRNA sense strand
gaaggguuugguuaagaau

SEQ ID NO: 1810539 - RNA, 19 nt, Homo sapiens
  misc_RNA (1)...(19): siRNA sense strand
cagccuuccuucuccuuuc

SEQ ID NO: 1810540 - RNA, 19 nt, Homo sapiens
  misc_RNA (1)...(19): siRNA sense strand
agaacaugcagauaacuau

SEQ ID NO: 1810541 - RNA, 19 nt, Homo sapiens
  misc_RNA (1)...(19): siRNA sense strand
ggcguguuguccauugcua

SEQ ID NO: 1810542 - RNA, 19 nt, Homo sapiens
  misc_RNA (1)...(19): siRNA sense strand
caguagcauuucugucauc

SEQ ID NO: 1810543 - RNA, 19 nt, Homo sapiens
  misc_RNA (1)...(19): siRNA sense strand
guuaugaauucaggagucu

SEQ ID NO: 1810544 - RNA, 19 nt, Homo sapiens
  misc_RNA (1)...(19): siRNA sense strand
guuauacugaugugaugaa

SEQ ID NO: 1810545 - RNA, 19 nt, Homo sapiens
  misc_RNA (1)...(19): siRNA sense strand
gcagaagaucaacaguauc

SEQ ID NO: 1810546 - RNA, 19 nt, Homo sapiens
  misc_RNA (1)...(19): siRNA sense strand
gaagaacaugcagauaacu

SEQ ID NO: 1810547 - RNA, 19 nt, Homo sapiens
  misc_RNA (1)...(19): siRNA sense strand
uagaacaacagacacuaca

SEQ ID NO: 1810548 - RNA, 19 nt, Homo sapiens
  misc_RNA (1)...(19): siRNA sense strand
caaagacucggcguguugu

SEQ ID NO: 1810549 - RNA, 19 nt, Homo sapiens
  misc_RNA (1)...(19): siRNA sense strand
acaugcagauaacuauucu

SEQ ID NO: 1810550 - RNA, 19 nt, Homo sapiens
  misc_RNA (1)...(19): siRNA sense strand
gagaagggcuguugcuaau

SEQ ID NO: 1810551 - RNA, 19 nt, Homo sapiens
  misc_RNA (1)...(19): siRNA sense strand
gaagauccuuagagaguug

SEQ ID NO: 1810552 - RNA, 19 nt, Homo sapiens
  misc_RNA (1)...(19): siRNA sense strand
ugacugagaugcucgagaa

SEQ ID NO: 1810553 - RNA, 19 nt, Homo sapiens
  misc_RNA (1)...(19): siRNA sense strand
agaagaagauccuuagaga

SEQ ID NO: 1810554 - RNA, 19 nt, Homo sapiens
  misc_RNA (1)...(19): siRNA sense strand
ugaagaagcuaaggauuga

SEQ ID NO: 1810555 - RNA, 19 nt, Homo sapiens
  misc_RNA (1)...(19): siRNA sense strand
uaaggaaucugacccugaa

SEQ ID NO: 1810556 - RNA, 19 nt, Homo sapiens
  misc_RNA (1)...(19): siRNA sense strand
ggagaagggcuguugcuaa

SEQ ID NO: 1810557 - RNA, 19 nt, Homo sapiens
  misc_RNA (1)...(19): siRNA sense strand
ggcaauaucuucucucuac

SEQ ID NO: 1810558 - RNA, 19 nt, Homo sapiens
  misc_RNA (1)...(19): siRNA sense strand
gcucugaaguuuccauaau

SEQ ID NO: 1810559 - RNA, 19 nt, Homo sapiens
  misc_RNA (1)...(19): siRNA sense strand
ucaguaacuugauggauuu

SEQ ID NO: 1810560 - RNA, 19 nt, Homo sapiens
  misc_RNA (1)...(19): siRNA sense strand
aggaaaggcucacucagua

SEQ ID NO: 1810561 - RNA, 19 nt, Homo sapiens
  misc_RNA (1)...(19): siRNA sense strand
gaccugaaacaucgauuua

SEQ ID NO: 1810562 - RNA, 19 nt, Homo sapiens
  misc_RNA (1)...(19): siRNA sense strand
gaaaggaaaggcucacuca

SEQ ID NO: 1810563 - RNA, 19 nt, Homo sapiens
  misc_RNA (1)...(19): siRNA sense strand
gaagaagcccguggaagaa

SEQ ID NO: 1810564 - RNA, 19 nt, Homo sapiens
  misc_RNA (1)...(19): siRNA sense strand
gcagcgaggucugagaauu

SEQ ID NO: 1810565 - RNA, 19 nt, Homo sapiens
  misc_RNA (1)...(19): siRNA sense strand
gcugaaagcucugaagaag

SEQ ID NO: 1810566 - RNA, 19 nt, Homo sapiens
  misc_RNA (1)...(19): siRNA sense strand
ugagugagaugaaagaaca

SEQ ID NO: 1810567 - RNA, 19 nt, Homo sapiens
  misc_RNA (1)...(19): siRNA sense strand
gaagggcuguugcuaaugc

SEQ ID NO: 1810568 - RNA, 19 nt, Homo sapiens
  misc_RNA (1)...(19): siRNA sense strand
ugaagaagcccguggaaga

SEQ ID NO: 1810569 - RNA, 19 nt, Homo sapiens
  misc_RNA (1)...(19): siRNA sense strand
cagcgaggucugagaauua

SEQ ID NO: 1810570 - RNA, 19 nt, Homo sapiens
  misc_RNA (1)...(19): siRNA sense strand
ucucgaggcugaccugaaa

SEQ ID NO: 1810571 - RNA, 19 nt, Homo sapiens
  misc_RNA (1)...(19): siRNA sense strand
ggaaaggcucacucaguaa

SEQ ID NO: 1810572 - RNA, 19 nt, Homo sapiens
  misc_RNA (1)...(19): siRNA sense strand
ccugguggaugcugguuua

SEQ ID NO: 1810573 - RNA, 19 nt, Homo sapiens
  misc_RNA (1)...(19): siRNA sense strand
gcuaagagccuacagaaaa

SEQ ID NO: 1810574 - RNA, 19 nt, Homo sapiens
  misc_RNA (1)...(19): siRNA sense strand
ggacugcgggcucacauug

SEQ ID NO: 1810575 - RNA, 19 nt, Homo sapiens
  misc_RNA (1)...(19): siRNA sense strand
gaagacuggucagaacuca

SEQ ID NO: 1810576 - RNA, 19 nt, Homo sapiens
  misc_RNA (1)...(19): siRNA sense strand
uaucuucucucuacaccaa

SEQ ID NO: 1810577 - RNA, 19 nt, Homo sapiens
  misc_RNA (1)...(19): siRNA sense strand
uuacugaggcugcaagaaa

SEQ ID NO: 1810578 - RNA, 19 nt, Homo sapiens
  misc_RNA (1)...(19): siRNA sense strand
gcugacaccuacacucuag

SEQ ID NO: 1810579 - RNA, 19 nt, Homo sapiens
  misc_RNA (1)...(19): siRNA sense strand
caaugauggugacauggaa

SEQ ID NO: 1810580 - RNA, 19 nt, Homo sapiens
  misc_RNA (1)...(19): siRNA sense strand
gagucucauuuguccaaua

SEQ ID NO: 1810581 - RNA, 19 nt, Homo sapiens
  misc_RNA (1)...(19): siRNA sense strand
gaaggauagugcccgaagu

SEQ ID NO: 1810582 - RNA, 19 nt, Homo sapiens
  misc_RNA (1)...(19): siRNA sense strand
gaaguugcugcuuggcaua

SEQ ID NO: 1810583 - RNA, 19 nt, Homo sapiens
  misc_RNA (1)...(19): siRNA sense strand
ccuacaugguuaucucuaa

SEQ ID NO: 1810584 - RNA, 19 nt, Homo sapiens
  misc_RNA (1)...(19): siRNA sense strand
aggcugagcuggauuugug

SEQ ID NO: 1810585 - RNA, 19 nt, Homo sapiens
  misc_RNA (1)...(19): siRNA sense strand
agaccugacuuuccugaga

SEQ ID NO: 1810586 - RNA, 19 nt, Homo sapiens
  misc_RNA (1)...(19): siRNA sense strand
gaacugccggagucucauu

SEQ ID NO: 1810587 - RNA, 19 nt, Homo sapiens
  misc_RNA (1)...(19): siRNA sense strand
gagugggacuuggcuaaga

SEQ ID NO: 1810588 - RNA, 19 nt, Homo sapiens
  misc_RNA (1)...(19): siRNA sense strand
cucaguaacuugauggauu

SEQ ID NO: 1810589 - RNA, 19 nt, Homo sapiens
  misc_RNA (1)...(19): siRNA sense strand
ugguaacacugaagucauu

SEQ ID NO: 1810590 - RNA, 19 nt, Homo sapiens
  misc_RNA (1)...(19): siRNA sense strand
gaagugcucuugguaacac

SEQ ID NO: 1810591 - RNA, 19 nt, Homo sapiens
  misc_RNA (1)...(19): siRNA sense strand
ugacuuuccugagagguuu

SEQ ID NO: 1810592 - RNA, 19 nt, Homo sapiens
  misc_RNA (1)...(19): siRNA sense strand
gacaaugaccugcaaccuu

SEQ ID NO: 1810593 - RNA, 19 nt, Homo sapiens
  misc_RNA (1)...(19): siRNA sense strand
gggaagugcucuugguaac

SEQ ID NO: 1810594 - RNA, 19 nt, Homo sapiens
  misc_RNA (1)...(19): siRNA sense strand
cugaaagguuuauggagaa

SEQ ID NO: 1810595 - RNA, 19 nt, Homo sapiens
  misc_RNA (1)...(19): siRNA sense strand
gcaauaucuucucucuaca

SEQ ID NO: 1810596 - RNA, 19 nt, Homo sapiens
  misc_RNA (1)...(19): siRNA sense strand
ugacacauacgacacauuc

SEQ ID NO: 1810597 - RNA, 19 nt, Homo sapiens
  misc_RNA (1)...(19): siRNA sense strand
acaccuggcugacugagau

SEQ ID NO: 1810598 - RNA, 19 nt, Homo sapiens
  misc_RNA (1)...(19): siRNA sense strand
caccuacacucuagaugug

SEQ ID NO: 1810599 - RNA, 19 nt, Homo sapiens
  misc_RNA (1)...(19): siRNA sense strand
cgacuucagugccggagau

SEQ ID NO: 1810600 - RNA, 19 nt, Homo sapiens
  misc_RNA (1)...(19): siRNA sense strand
aagaagauccuuagagagu

SEQ ID NO: 1810601 - RNA, 19 nt, Homo sapiens
  misc_RNA (1)...(19): siRNA sense strand
aaucugacccugaaagguu

SEQ ID NO: 1810602 - RNA, 19 nt, Homo sapiens
  misc_RNA (1)...(19): siRNA sense strand
gaaaggcucacucaguaac

SEQ ID NO: 1810603 - RNA, 19 nt, Homo sapiens
  misc_RNA (1)...(19): siRNA sense strand
augguuaucucuaagcaaa

SEQ ID NO: 1810604 - RNA, 19 nt, Homo sapiens
  misc_RNA (1)...(19): siRNA sense strand
uuagagaguugaugaacgu

SEQ ID NO: 1810605 - RNA, 19 nt, Homo sapiens
  misc_RNA (1)...(19): siRNA sense strand
ucugaaguuuccauaauuc

SEQ ID NO: 1810606 - RNA, 19 nt, Homo sapiens
  misc_RNA (1)...(19): siRNA sense strand
gaagggaagacuggucaga

SEQ ID NO: 1810607 - RNA, 19 nt, Homo sapiens
  misc_RNA (1)...(19): siRNA sense strand
ccacuugggcaauaucuuc

SEQ ID NO: 1810608 - RNA, 19 nt, Homo sapiens
  misc_RNA (1)...(19): siRNA sense strand
gguccugagugagaugaaa

SEQ ID NO: 1810609 - RNA, 19 nt, Homo sapiens
  misc_RNA (1)...(19): siRNA sense strand
agaagaggcugagcuggau

SEQ ID NO: 1810610 - RNA, 19 nt, Homo sapiens
  misc_RNA (1)...(19): siRNA sense strand
acaacuuccuguacaaaca

SEQ ID NO: 1810611 - RNA, 19 nt, Homo sapiens
  misc_RNA (1)...(19): siRNA sense strand
gucauuagggaauacauuu

SEQ ID NO: 1810612 - RNA, 19 nt, Homo sapiens
  misc_RNA (1)...(19): siRNA sense strand
cugaagaagcuaaggauug

SEQ ID NO: 1810613 - RNA, 19 nt, Homo sapiens
  misc_RNA (1)...(19): siRNA sense strand
uggauccacuugggcaaua

SEQ ID NO: 1810614 - RNA, 19 nt, Homo sapiens
  misc_RNA (1)...(19): siRNA sense strand
gugcuacucuuggcauuag

SEQ ID NO: 1810615 - RNA, 19 nt, Homo sapiens
  misc_RNA (1)...(19): siRNA sense strand
agucucauuuguccaauau

SEQ ID NO: 1810616 - RNA, 19 nt, Homo sapiens
  misc_RNA (1)...(19): siRNA sense strand
agaagauccuuagagaguu

SEQ ID NO: 1810617 - RNA, 19 nt, Homo sapiens
  misc_RNA (1)...(19): siRNA sense strand
ccaaugauggugacaugga

SEQ ID NO: 1810618 - RNA, 19 nt, Homo sapiens
  misc_RNA (1)...(19): siRNA sense strand
caagaagaagauccuuaga

SEQ ID NO: 1810619 - RNA, 19 nt, Homo sapiens
  misc_RNA (1)...(19): siRNA sense strand
cuacaugguuaucucuaag

SEQ ID NO: 1810620 - RNA, 19 nt, Homo sapiens
  misc_RNA (1)...(19): siRNA sense strand
acacauacgacacauucaa

SEQ ID NO: 1810621 - RNA, 19 nt, Homo sapiens
  misc_RNA (1)...(19): siRNA sense strand
aggcauggagugacacaua

SEQ ID NO: 1810622 - RNA, 19 nt, Homo sapiens
  misc_RNA (1)...(19): siRNA sense strand
gcugcuacauccugaaagg

SEQ ID NO: 1810623 - RNA, 19 nt, Homo sapiens
  misc_RNA (1)...(19): siRNA sense strand
acucacaacuuccuguaca

SEQ ID NO: 1810624 - RNA, 19 nt, Homo sapiens
  misc_RNA (1)...(19): siRNA sense strand
ccacucacaacuuccugua

SEQ ID NO: 1810625 - RNA, 19 nt, Homo sapiens
  misc_RNA (1)...(19): siRNA sense strand
cugaagucauuagggaaua

SEQ ID NO: 1810626 - RNA, 19 nt, Homo sapiens
  misc_RNA (1)...(19): siRNA sense strand
agagagaccugacuuuccu

SEQ ID NO: 1810627 - RNA, 19 nt, Homo sapiens
  misc_RNA (1)...(19): siRNA sense strand
gguaacacugaagucauua

SEQ ID NO: 1810628 - RNA, 19 nt, Homo sapiens
  misc_RNA (1)...(19): siRNA sense strand
ugaccugaaacaucgauuu

SEQ ID NO: 1810629 - RNA, 19 nt, Homo sapiens
  misc_RNA (1)...(19): siRNA sense strand
acaagaagaagauccuuag

SEQ ID NO: 1810630 - RNA, 19 nt, Homo sapiens
  misc_RNA (1)...(19): siRNA sense strand
aacaagaagaagauccuua

SEQ ID NO: 1810631 - RNA, 19 nt, Homo sapiens
  misc_RNA (1)...(19): siRNA sense strand
cucugaaguuuccauaauu

SEQ ID NO: 1810632 - RNA, 19 nt, Homo sapiens
  misc_RNA (1)...(19): siRNA sense strand
ggcauggagugacacauac

SEQ ID NO: 1810633 - RNA, 19 nt, Homo sapiens
  misc_RNA (1)...(19): siRNA sense strand
gaagaggcugagcuggauu

SEQ ID NO: 1810634 - RNA, 19 nt, Homo sapiens
  misc_RNA (1)...(19): siRNA sense strand
gggcuguugcuaaugcuaa

SEQ ID NO: 1810635 - RNA, 19 nt, Homo sapiens
  misc_RNA (1)...(19): siRNA sense strand
gaccaguuaaggaaucuga

SEQ ID NO: 1810636 - RNA, 19 nt, Homo sapiens
  misc_RNA (1)...(19): siRNA sense strand
gaggcaagagcaccagaga

SEQ ID NO: 1810637 - RNA, 19 nt, Homo sapiens
  misc_RNA (1)...(19): siRNA sense strand
gggccuacaugguuaucuc

SEQ ID NO: 1810638 - RNA, 19 nt, Homo sapiens
  misc_RNA (1)...(19): siRNA sense strand
ggcauuagccaagaagaau

SEQ ID NO: 1810639 - RNA, 19 nt, Homo sapiens
  misc_RNA (1)...(19): siRNA sense strand
ggauccacuugggcaauau

SEQ ID NO: 1810640 - RNA, 19 nt, Homo sapiens
  misc_RNA (1)...(19): siRNA sense strand
ugagagagaccugacuuuc

SEQ ID NO: 1810641 - RNA, 19 nt, Homo sapiens
  misc_RNA (1)...(19): siRNA sense strand
ucacaacuuccuguacaaa

SEQ ID NO: 1810642 - RNA, 19 nt, Homo sapiens
  misc_RNA (1)...(19): siRNA sense strand
gaagaaaacaggcauuugc

SEQ ID NO: 1810643 - RNA, 19 nt, Homo sapiens
  misc_RNA (1)...(19): siRNA sense strand
ggaccucccuggaaaagca

SEQ ID NO: 1810644 - RNA, 19 nt, Homo sapiens
  misc_RNA (1)...(19): siRNA sense strand
uaagcaaaccagagaacug

SEQ ID NO: 1810645 - RNA, 19 nt, Homo sapiens
  misc_RNA (1)...(19): siRNA sense strand
ggugcuacucuuggcauua

SEQ ID NO: 1810646 - RNA, 19 nt, Homo sapiens
  misc_RNA (1)...(19): siRNA sense strand
ggaagugcucuugguaaca

SEQ ID NO: 1810647 - RNA, 19 nt, Homo sapiens
  misc_RNA (1)...(19): siRNA sense strand
ggaagacuggucagaacuc

SEQ ID NO: 1810648 - RNA, 19 nt, Homo sapiens
  misc_RNA (1)...(19): siRNA sense strand
gugcugaaagcucugaaga

SEQ ID NO: 1810649 - RNA, 19 nt, Homo sapiens
  misc_RNA (1)...(19): siRNA sense strand
uggcauccgggacaagaua

SEQ ID NO: 1810650 - RNA, 19 nt, Homo sapiens
  misc_RNA (1)...(19): siRNA sense strand
guucaccgcugucaguuua

SEQ ID NO: 1810651 - RNA, 19 nt, Homo sapiens
  misc_RNA (1)...(19): siRNA sense strand
gcaaagcccuucaaaugca

SEQ ID NO: 1810652 - RNA, 19 nt, Homo sapiens
  misc_RNA (1)...(19): siRNA sense strand
gugcaaagcccuucaaaug

SEQ ID NO: 1810653 - RNA, 19 nt, Homo sapiens
  misc_RNA (1)...(19): siRNA sense strand
gcagacaugccuugaauug

SEQ ID NO: 1810654 - RNA, 19 nt, Homo sapiens
  misc_RNA (1)...(19): siRNA sense strand
gggacaaguugcuaucuga

SEQ ID NO: 1810655 - RNA, 19 nt, Homo sapiens
  misc_RNA (1)...(19): siRNA sense strand
cagcagacaugccuugaau

SEQ ID NO: 1810656 - RNA, 19 nt, Homo sapiens
  misc_RNA (1)...(19): siRNA sense strand
agacaugccuugaauugga

SEQ ID NO: 1810657 - RNA, 19 nt, Homo sapiens
  misc_RNA (1)...(19): siRNA sense strand
gcucuucucuagacagcua

SEQ ID NO: 1810658 - RNA, 19 nt, Homo sapiens
  misc_RNA (1)...(19): siRNA sense strand
gccggaaaguuuauacaaa

SEQ ID NO: 1810659 - RNA, 19 nt, Homo sapiens
  misc_RNA (1)...(19): siRNA sense strand
gugaggacuuggacuguuu

SEQ ID NO: 1810660 - RNA, 19 nt, Homo sapiens
  misc_RNA (1)...(19): siRNA sense strand
gugagaagccuuauaagug

SEQ ID NO: 1810661 - RNA, 19 nt, Homo sapiens
  misc_RNA (1)...(19): siRNA sense strand
gagcgacagugaccaagga

SEQ ID NO: 1810662 - RNA, 19 nt, Homo sapiens
  misc_RNA (1)...(19): siRNA sense strand
caggugagaagccuuauaa

SEQ ID NO: 1810663 - RNA, 19 nt, Homo sapiens
  misc_RNA (1)...(19): siRNA sense strand
caacgcagugaccucauua

SEQ ID NO: 1810664 - RNA, 19 nt, Homo sapiens
  misc_RNA (1)...(19): siRNA sense strand
gcugaagcaugucccgaaa

SEQ ID NO: 1810665 - RNA, 19 nt, Homo sapiens
  misc_RNA (1)...(19): siRNA sense strand
ugaaacugguggccaagaa

SEQ ID NO: 1810666 - RNA, 19 nt, Homo sapiens
  misc_RNA (1)...(19): siRNA sense strand
gacaugccuugaauuggaa

SEQ ID NO: 1810667 - RNA, 19 nt, Homo sapiens
  misc_RNA (1)...(19): siRNA sense strand
ucaacgcagugaccucauu

SEQ ID NO: 1810668 - RNA, 19 nt, Homo sapiens
  misc_RNA (1)...(19): siRNA sense strand
gcucucagcuccguaaagg

SEQ ID NO: 1810669 - RNA, 19 nt, Homo sapiens
  misc_RNA (1)...(19): siRNA sense strand
caucuugcccuccacauga

SEQ ID NO: 1810670 - RNA, 19 nt, Homo sapiens
  misc_RNA (1)...(19): siRNA sense strand
ggugagaagccuuauaagu

SEQ ID NO: 1810671 - RNA, 19 nt, Homo sapiens
  misc_RNA (1)...(19): siRNA sense strand
gaaacacacaggugcaaag

SEQ ID NO: 1810672 - RNA, 19 nt, Homo sapiens
  misc_RNA (1)...(19): siRNA sense strand
caaagcccuucaaaugcaa

SEQ ID NO: 1810673 - RNA, 19 nt, Homo sapiens
  misc_RNA (1)...(19): siRNA sense strand
acacaggugagaagccuua

SEQ ID NO: 1810674 - RNA, 19 nt, Homo sapiens
  misc_RNA (1)...(19): siRNA sense strand
caugaagagacauaucuaa

SEQ ID NO: 1810675 - RNA, 19 nt, Homo sapiens
  misc_RNA (1)...(19): siRNA sense strand
ggugaggacuuggacuguu

SEQ ID NO: 1810676 - RNA, 19 nt, Homo sapiens
  misc_RNA (1)...(19): siRNA sense strand
gaagcggccaucugugaga

SEQ ID NO: 1810677 - RNA, 19 nt, Homo sapiens
  misc_RNA (1)...(19): siRNA sense strand
ucacgaggcacuacaggaa

SEQ ID NO: 1810678 - RNA, 19 nt, Homo sapiens
  misc_RNA (1)...(19): siRNA sense strand
ccacgacaccggcuacuuc

SEQ ID NO: 1810679 - RNA, 19 nt, Homo sapiens
  misc_RNA (1)...(19): siRNA sense strand
ggccagcucuucucuagac

SEQ ID NO: 1810680 - RNA, 19 nt, Homo sapiens
  misc_RNA (1)...(19): siRNA sense strand
gcucggcaguggacaucuu

SEQ ID NO: 1810681 - RNA, 19 nt, Homo sapiens
  misc_RNA (1)...(19): siRNA sense strand
gaccuuuggugaggacuug

SEQ ID NO: 1810682 - RNA, 19 nt, Homo sapiens
  misc_RNA (1)...(19): siRNA sense strand
ugaauuggaacgcuaccua

SEQ ID NO: 1810683 - RNA, 19 nt, Homo sapiens
  misc_RNA (1)...(19): siRNA sense strand
cgacaccggcuacuucuca

SEQ ID NO: 1810684 - RNA, 19 nt, Homo sapiens
  misc_RNA (1)...(19): siRNA sense strand
ggaaacacacaggugcaaa

SEQ ID NO: 1810685 - RNA, 19 nt, Homo sapiens
  misc_RNA (1)...(19): siRNA sense strand
gcuaggggcugaagcaugu

SEQ ID NO: 1810686 - RNA, 19 nt, Homo sapiens
  misc_RNA (1)...(19): siRNA sense strand
ccggaaaguuuauacaaaa

SEQ ID NO: 1810687 - RNA, 19 nt, Homo sapiens
  misc_RNA (1)...(19): siRNA sense strand
gcagcagacaugccuugaa

SEQ ID NO: 1810688 - RNA, 19 nt, Homo sapiens
  misc_RNA (1)...(19): siRNA sense strand
gcacggugacguugaaacu

SEQ ID NO: 1810689 - RNA, 19 nt, Homo sapiens
  misc_RNA (1)...(19): siRNA sense strand
gacaaguugcuaucugaga

SEQ ID NO: 1810690 - RNA, 19 nt, Homo sapiens
  misc_RNA (1)...(19): siRNA sense strand
cguguuggcuaguuauagu

SEQ ID NO: 1810691 - RNA, 19 nt, Homo sapiens
  misc_RNA (1)...(19): siRNA sense strand
uggaagcggccaucuguga

SEQ ID NO: 1810692 - RNA, 19 nt, Homo sapiens
  misc_RNA (1)...(19): siRNA sense strand
ggacguguuggcuaguuau

SEQ ID NO: 1810693 - RNA, 19 nt, Homo sapiens
  misc_RNA (1)...(19): siRNA sense strand
uuggaacgcuaccuacaga

SEQ ID NO: 1810694 - RNA, 19 nt, Homo sapiens
  misc_RNA (1)...(19): siRNA sense strand
gcucaugggagggauguga

SEQ ID NO: 1810695 - RNA, 19 nt, Homo sapiens
  misc_RNA (1)...(19): siRNA sense strand
gaaacugguggccaagaag

SEQ ID NO: 1810696 - RNA, 19 nt, Homo sapiens
  misc_RNA (1)...(19): siRNA sense strand
ccggccagcucuucucuag

SEQ ID NO: 1810697 - RNA, 19 nt, Homo sapiens
  misc_RNA (1)...(19): siRNA sense strand
gcggccaucugugagaaga

SEQ ID NO: 1810698 - RNA, 19 nt, Homo sapiens
  misc_RNA (1)...(19): siRNA sense strand
cggcuacuucucagcuuua

SEQ ID NO: 1810699 - RNA, 19 nt, Homo sapiens
  misc_RNA (1)...(19): siRNA sense strand
uaacgggugccggaaaguu

SEQ ID NO: 1810700 - RNA, 19 nt, Homo sapiens
  misc_RNA (1)...(19): siRNA sense strand
guggacagagcgacaguga

SEQ ID NO: 1810701 - RNA, 19 nt, Homo sapiens
  misc_RNA (1)...(19): siRNA sense strand
gcacuacaggaaacacaca

SEQ ID NO: 1810702 - RNA, 19 nt, Homo sapiens
  misc_RNA (1)...(19): siRNA sense strand
ggaugugaguggcguuuug

SEQ ID NO: 1810703 - RNA, 19 nt, Homo sapiens
  misc_RNA (1)...(19): siRNA sense strand
ccggcuacuucucagcuuu

SEQ ID NO: 1810704 - RNA, 19 nt, Homo sapiens
  misc_RNA (1)...(19): siRNA sense strand
cagccgccaucuggucaaa

SEQ ID NO: 1810705 - RNA, 19 nt, Homo sapiens
  misc_RNA (1)...(19): siRNA sense strand
gacguguuggcuaguuaua

SEQ ID NO: 1810706 - RNA, 19 nt, Homo sapiens
  misc_RNA (1)...(19): siRNA sense strand
ggucaaaaccucacaaacu

SEQ ID NO: 1810707 - RNA, 19 nt, Homo sapiens
  misc_RNA (1)...(19): siRNA sense strand
ggugcaaagcccuucaaau

SEQ ID NO: 1810708 - RNA, 19 nt, Homo sapiens
  misc_RNA (1)...(19): siRNA sense strand
ccacaugaagagacauauc

SEQ ID NO: 1810709 - RNA, 19 nt, Homo sapiens
  misc_RNA (1)...(19): siRNA sense strand
cgggacaaguugcuaucug

SEQ ID NO: 1810710 - RNA, 19 nt, Homo sapiens
  misc_RNA (1)...(19): siRNA sense strand
cguggaagcggccaucugu

SEQ ID NO: 1810711 - RNA, 19 nt, Homo sapiens
  misc_RNA (1)...(19): siRNA sense strand
gauggcacggugacguuga

SEQ ID NO: 1810712 - RNA, 19 nt, Homo sapiens
  misc_RNA (1)...(19): siRNA sense strand
gucaaaaccucacaaacuc

SEQ ID NO: 1810713 - RNA, 19 nt, Homo sapiens
  misc_RNA (1)...(19): siRNA sense strand
ggacuuggguuccaugaau

SEQ ID NO: 1810714 - RNA, 19 nt, Homo sapiens
  misc_RNA (1)...(19): siRNA sense strand
gagguacgcuguggaauga

SEQ ID NO: 1810715 - RNA, 19 nt, Homo sapiens
  misc_RNA (1)...(19): siRNA sense strand
uagaaaggcugaaggacaa

SEQ ID NO: 1810716 - RNA, 19 nt, Homo sapiens
  misc_RNA (1)...(19): siRNA sense strand
caacauacuacccaaauug

SEQ ID NO: 1810717 - RNA, 19 nt, Homo sapiens
  misc_RNA (1)...(19): siRNA sense strand
caacucagcaucccacaaa

SEQ ID NO: 1810718 - RNA, 19 nt, Homo sapiens
  misc_RNA (1)...(19): siRNA sense strand
ggaccuaguggaaggguua

SEQ ID NO: 1810719 - RNA, 19 nt, Homo sapiens
  misc_RNA (1)...(19): siRNA sense strand
cgacaugcaucgccucuuc

SEQ ID NO: 1810720 - RNA, 19 nt, Homo sapiens
  misc_RNA (1)...(19): siRNA sense strand
ccaacauacuacccaaauu

SEQ ID NO: 1810721 - RNA, 19 nt, Homo sapiens
  misc_RNA (1)...(19): siRNA sense strand
guggaaggguuacaugaug

SEQ ID NO: 1810722 - RNA, 19 nt, Homo sapiens
  misc_RNA (1)...(19): siRNA sense strand
gaggguggguucagcuaug

SEQ ID NO: 1810723 - RNA, 19 nt, Homo sapiens
  misc_RNA (1)...(19): siRNA sense strand
aauaagcgcuaccucuuca

SEQ ID NO: 1810724 - RNA, 19 nt, Homo sapiens
  misc_RNA (1)...(19): siRNA sense strand
gcaucagcguccucacauu

SEQ ID NO: 1810725 - RNA, 19 nt, Homo sapiens
  misc_RNA (1)...(19): siRNA sense strand
cuccugaacucgaugauga

SEQ ID NO: 1810726 - RNA, 19 nt, Homo sapiens
  misc_RNA (1)...(19): siRNA sense strand
cauacuacccaaauugaaa

SEQ ID NO: 1810727 - RNA, 19 nt, Homo sapiens
  misc_RNA (1)...(19): siRNA sense strand
caaggguuaugcccacaga

SEQ ID NO: 1810728 - RNA, 19 nt, Homo sapiens
  misc_RNA (1)...(19): siRNA sense strand
gcgagaagccgacaugcau

SEQ ID NO: 1810729 - RNA, 19 nt, Homo sapiens
  misc_RNA (1)...(19): siRNA sense strand
gcuccuggccaacauacua

SEQ ID NO: 1810730 - RNA, 19 nt, Homo sapiens
  misc_RNA (1)...(19): siRNA sense strand
gacuugaagcccaccaaua

SEQ ID NO: 1810731 - RNA, 19 nt, Homo sapiens
  misc_RNA (1)...(19): siRNA sense strand
gcuguggaaugagauagaa

SEQ ID NO: 1810732 - RNA, 19 nt, Homo sapiens
  misc_RNA (1)...(19): siRNA sense strand
gguacgcuguggaaugaga

SEQ ID NO: 1810733 - RNA, 19 nt, Homo sapiens
  misc_RNA (1)...(19): siRNA sense strand
guucagcuauguggaccua

SEQ ID NO: 1810734 - RNA, 19 nt, Homo sapiens
  misc_RNA (1)...(19): siRNA sense strand
gaaucaagcaugcauccau

SEQ ID NO: 1810735 - RNA, 19 nt, Homo sapiens
  misc_RNA (1)...(19): siRNA sense strand
ccacaaagccccaggcauu

SEQ ID NO: 1810736 - RNA, 19 nt, Homo sapiens
  misc_RNA (1)...(19): siRNA sense strand
ugaagcgaauccuguguca

SEQ ID NO: 1810737 - RNA, 19 nt, Homo sapiens
  misc_RNA (1)...(19): siRNA sense strand
ccauucaugccaaggguua

SEQ ID NO: 1810738 - RNA, 19 nt, Homo sapiens
  misc_RNA (1)...(19): siRNA sense strand
gcuauaugccaugauguuu

SEQ ID NO: 1810739 - RNA, 19 nt, Homo sapiens
  misc_RNA (1)...(19): siRNA sense strand
acaauaagcgcuaccucuu

SEQ ID NO: 1810740 - RNA, 19 nt, Homo sapiens
  misc_RNA (1)...(19): siRNA sense strand
caauaagcgcuaccucuuc

SEQ ID NO: 1810741 - RNA, 19 nt, Homo sapiens
  misc_RNA (1)...(19): siRNA sense strand
uauaugccaugauguuugg

SEQ ID NO: 1810742 - RNA, 19 nt, Homo sapiens
  misc_RNA (1)...(19): siRNA sense strand
caggcauucuucagcauug

SEQ ID NO: 1810743 - RNA, 19 nt, Homo sapiens
  misc_RNA (1)...(19): siRNA sense strand
auauauugcuuggagauga

SEQ ID NO: 1810744 - RNA, 19 nt, Homo sapiens
  misc_RNA (1)...(19): siRNA sense strand
guuacaugauggacacuuc

SEQ ID NO: 1810745 - RNA, 19 nt, Homo sapiens
  misc_RNA (1)...(19): siRNA sense strand
caucagcguccucacauuc

SEQ ID NO: 1810746 - RNA, 19 nt, Homo sapiens
  misc_RNA (1)...(19): siRNA sense strand
ugaagcccaccaauauauu

SEQ ID NO: 1810747 - RNA, 19 nt, Homo sapiens
  misc_RNA (1)...(19): siRNA sense strand
gccaacauacuacccaaau

SEQ ID NO: 1810748 - RNA, 19 nt, Homo sapiens
  misc_RNA (1)...(19): siRNA sense strand
acuugaagcccaccaauau

SEQ ID NO: 1810749 - RNA, 19 nt, Homo sapiens
  misc_RNA (1)...(19): siRNA sense strand
ggggaacugucaucauuga

SEQ ID NO: 1810750 - RNA, 19 nt, Homo sapiens
  misc_RNA (1)...(19): siRNA sense strand
cgugcuauaugccaugaug

SEQ ID NO: 1810751 - RNA, 19 nt, Homo sapiens
  misc_RNA (1)...(19): siRNA sense strand
gcagagucacugugucauc

SEQ ID NO: 1810752 - RNA, 19 nt, Homo sapiens
  misc_RNA (1)...(19): siRNA sense strand
ggaaggguuacaugaugga

SEQ ID NO: 1810753 - RNA, 19 nt, Homo sapiens
  misc_RNA (1)...(19): siRNA sense strand
cuugaagcccaccaauaua

SEQ ID NO: 1810754 - RNA, 19 nt, Homo sapiens
  misc_RNA (1)...(19): siRNA sense strand
ugcaucgccucuucaauca

SEQ ID NO: 1810755 - RNA, 19 nt, Homo sapiens
  misc_RNA (1)...(19): siRNA sense strand
gugcagagucacuguguca

SEQ ID NO: 1810756 - RNA, 19 nt, Homo sapiens
  misc_RNA (1)...(19): siRNA sense strand
uugaagcccaccaauauau

SEQ ID NO: 1810757 - RNA, 19 nt, Homo sapiens
  misc_RNA (1)...(19): siRNA sense strand
gacuuggguuccaugaauc

SEQ ID NO: 1810758 - RNA, 19 nt, Homo sapiens
  misc_RNA (1)...(19): siRNA sense strand
ggaggguggguucagcuau

SEQ ID NO: 1810759 - RNA, 19 nt, Homo sapiens
  misc_RNA (1)...(19): siRNA sense strand
ucagcuauguggaccuagu

SEQ ID NO: 1810760 - RNA, 19 nt, Homo sapiens
  misc_RNA (1)...(19): siRNA sense strand
cuauaugccaugauguuug

SEQ ID NO: 1810761 - RNA, 19 nt, Homo sapiens
  misc_RNA (1)...(19): siRNA sense strand
agagguacgcuguggaaug

SEQ ID NO: 1810762 - RNA, 19 nt, Homo sapiens
  misc_RNA (1)...(19): siRNA sense strand
ccuggcugcugcuaccauu

SEQ ID NO: 1810763 - RNA, 19 nt, Homo sapiens
  misc_RNA (1)...(19): siRNA sense strand
agagagguacgcuguggaa

SEQ ID NO: 1810764 - RNA, 19 nt, Homo sapiens
  misc_RNA (1)...(19): siRNA sense strand
gggaggguggguucagcua

SEQ ID NO: 1810765 - RNA, 19 nt, Homo sapiens
  misc_RNA (1)...(19): siRNA sense strand
ccagcgagaagccgacaug

SEQ ID NO: 1810766 - RNA, 19 nt, Homo sapiens
  misc_RNA (1)...(19): siRNA sense strand
aacauacuacccaaauuga

SEQ ID NO: 1810767 - RNA, 19 nt, Homo sapiens
  misc_RNA (1)...(19): siRNA sense strand
ccaggcauucuucagcauu

SEQ ID NO: 1810768 - RNA, 19 nt, Homo sapiens
  misc_RNA (1)...(19): siRNA sense strand
ucggggaacugucaucauu

SEQ ID NO: 1810769 - RNA, 19 nt, Homo sapiens
  misc_RNA (1)...(19): siRNA sense strand
agauagaaaggcugaagga

SEQ ID NO: 1810770 - RNA, 19 nt, Homo sapiens
  misc_RNA (1)...(19): siRNA sense strand
gaagaacaguuaaccaaua

SEQ ID NO: 1810771 - RNA, 19 nt, Homo sapiens
  misc_RNA (1)...(19): siRNA sense strand
ggagaaagcucgccuagaa

SEQ ID NO: 1810772 - RNA, 19 nt, Homo sapiens
  misc_RNA (1)...(19): siRNA sense strand
caagagaccuccuucagua

SEQ ID NO: 1810773 - RNA, 19 nt, Homo sapiens
  misc_RNA (1)...(19): siRNA sense strand
gaugaugucuuucuaccua

SEQ ID NO: 1810774 - RNA, 19 nt, Homo sapiens
  misc_RNA (1)...(19): siRNA sense strand
ggaaagaggagcaaccuaa

SEQ ID NO: 1810775 - RNA, 19 nt, Homo sapiens
  misc_RNA (1)...(19): siRNA sense strand
gagaacaacuucacagaca

SEQ ID NO: 1810776 - RNA, 19 nt, Homo sapiens
  misc_RNA (1)...(19): siRNA sense strand
cgugggaacugcauaauaa

SEQ ID NO: 1810777 - RNA, 19 nt, Homo sapiens
  misc_RNA (1)...(19): siRNA sense strand
aaaggaagcuggaggagaa

SEQ ID NO: 1810778 - RNA, 19 nt, Homo sapiens
  misc_RNA (1)...(19): siRNA sense strand
cagaagugaugaaugauaa

SEQ ID NO: 1810779 - RNA, 19 nt, Homo sapiens
  misc_RNA (1)...(19): siRNA sense strand
gaggauuuguugcaguuua

SEQ ID NO: 1810780 - RNA, 19 nt, Homo sapiens
  misc_RNA (1)...(19): siRNA sense strand
agagggaaguggaauauuu

SEQ ID NO: 1810781 - RNA, 19 nt, Homo sapiens
  misc_RNA (1)...(19): siRNA sense strand
ccaagaugcuuucauggaa

SEQ ID NO: 1810782 - RNA, 19 nt, Homo sapiens
  misc_RNA (1)...(19): siRNA sense strand
ggaaguggaauauuucaaa

SEQ ID NO: 1810783 - RNA, 19 nt, Homo sapiens
  misc_RNA (1)...(19): siRNA sense strand
gcacuggugucacagauca

SEQ ID NO: 1810784 - RNA, 19 nt, Homo sapiens
  misc_RNA (1)...(19): siRNA sense strand
caccagagacuccaaauuu

SEQ ID NO: 1810785 - RNA, 19 nt, Homo sapiens
  misc_RNA (1)...(19): siRNA sense strand
cuaaagauauugaccuaga

SEQ ID NO: 1810786 - RNA, 19 nt, Homo sapiens
  misc_RNA (1)...(19): siRNA sense strand
gaaagaggagcaaccuaaa

SEQ ID NO: 1810787 - RNA, 19 nt, Homo sapiens
  misc_RNA (1)...(19): siRNA sense strand
gaacaguuaaccaauaaga

SEQ ID NO: 1810788 - RNA, 19 nt, Homo sapiens
  misc_RNA (1)...(19): siRNA sense strand
ggaggaggaugaggaagaa

SEQ ID NO: 1810789 - RNA, 19 nt, Homo sapiens
  misc_RNA (1)...(19): siRNA sense strand
ggagacagagucaacaauu

SEQ ID NO: 1810790 - RNA, 19 nt, Homo sapiens
  misc_RNA (1)...(19): siRNA sense strand
gcaccaacaaguagaaauu

SEQ ID NO: 1810791 - RNA, 19 nt, Homo sapiens
  misc_RNA (1)...(19): siRNA sense strand
gagacagagucaacaauuc

SEQ ID NO: 1810792 - RNA, 19 nt, Homo sapiens
  misc_RNA (1)...(19): siRNA sense strand
gugaaugucauguuuguaa

SEQ ID NO: 1810793 - RNA, 19 nt, Homo sapiens
  misc_RNA (1)...(19): siRNA sense strand
gaacaagcuccaaacacuu

SEQ ID NO: 1810794 - RNA, 19 nt, Homo sapiens
  misc_RNA (1)...(19): siRNA sense strand
gaagaagaaaggagacaga

SEQ ID NO: 1810795 - RNA, 19 nt, Homo sapiens
  misc_RNA (1)...(19): siRNA sense strand
gaagaugugcuugcgauga

SEQ ID NO: 1810796 - RNA, 19 nt, Homo sapiens
  misc_RNA (1)...(19): siRNA sense strand
ucuaucaacugguccaauu

SEQ ID NO: 1810797 - RNA, 19 nt, Homo sapiens
  misc_RNA (1)...(19): siRNA sense strand
guucagaaucacacaaaua

SEQ ID NO: 1810798 - RNA, 19 nt, Homo sapiens
  misc_RNA (1)...(19): siRNA sense strand
ugaacaagcuccaaacacu

SEQ ID NO: 1810799 - RNA, 19 nt, Homo sapiens
  misc_RNA (1)...(19): siRNA sense strand
ggaagcaaauaaaguuguc

SEQ ID NO: 1810800 - RNA, 19 nt, Homo sapiens
  misc_RNA (1)...(19): siRNA sense strand
ggacugacaccaucugcaa

SEQ ID NO: 1810801 - RNA, 19 nt, Homo sapiens
  misc_RNA (1)...(19): siRNA sense strand
gaaauuaugcagaaaugag

SEQ ID NO: 1810802 - RNA, 19 nt, Homo sapiens
  misc_RNA (1)...(19): siRNA sense strand
gaaaggagacagagucaac

SEQ ID NO: 1810803 - RNA, 19 nt, Homo sapiens
  misc_RNA (1)...(19): siRNA sense strand
gacaugcucacuagaaauu

SEQ ID NO: 1810804 - RNA, 19 nt, Homo sapiens
  misc_RNA (1)...(19): siRNA sense strand
ucacagaucaggcuaggaa

SEQ ID NO: 1810805 - RNA, 19 nt, Homo sapiens
  misc_RNA (1)...(19): siRNA sense strand
gagcaaggcauaagcaaag

SEQ ID NO: 1810806 - RNA, 19 nt, Homo sapiens
  misc_RNA (1)...(19): siRNA sense strand
uccaaacacuugugaaugu

SEQ ID NO: 1810807 - RNA, 19 nt, Homo sapiens
  misc_RNA (1)...(19): siRNA sense strand
agaaggagaggccaaguaa

SEQ ID NO: 1810808 - RNA, 19 nt, Homo sapiens
  misc_RNA (1)...(19): siRNA sense strand
cagcaccuguucagaauca

SEQ ID NO: 1810809 - RNA, 19 nt, Homo sapiens
  misc_RNA (1)...(19): siRNA sense strand
gcaaggaggaccacagaca

SEQ ID NO: 1810810 - RNA, 19 nt, Homo sapiens
  misc_RNA (1)...(19): siRNA sense strand
gaaaagagaggagagaaaa

SEQ ID NO: 1810811 - RNA, 19 nt, Homo sapiens
  misc_RNA (1)...(19): siRNA sense strand
gcgaagcgagcaaggcaua

SEQ ID NO: 1810812 - RNA, 19 nt, Homo sapiens
  misc_RNA (1)...(19): siRNA sense strand
ggacgagagugcagaugag

SEQ ID NO: 1810813 - RNA, 19 nt, Homo sapiens
  misc_RNA (1)...(19): siRNA sense strand
acagaagacugggagcuuu

SEQ ID NO: 1810814 - RNA, 19 nt, Homo sapiens
  misc_RNA (1)...(19): siRNA sense strand
ccaaagggcaagaacaaga

SEQ ID NO: 1810815 - RNA, 19 nt, Homo sapiens
  misc_RNA (1)...(19): siRNA sense strand
auaaauagcuccgaaacca

SEQ ID NO: 1810816 - RNA, 19 nt, Homo sapiens
  misc_RNA (1)...(19): siRNA sense strand
ucagaagugaugaaugaua

SEQ ID NO: 1810817 - RNA, 19 nt, Homo sapiens
  misc_RNA (1)...(19): siRNA sense strand
gccagcaccuguucagaau

SEQ ID NO: 1810818 - RNA, 19 nt, Homo sapiens
  misc_RNA (1)...(19): siRNA sense strand
ugaagauguugcaccauug

SEQ ID NO: 1810819 - RNA, 19 nt, Homo sapiens
  misc_RNA (1)...(19): siRNA sense strand
ccaacacucucagaaacaa

SEQ ID NO: 1810820 - RNA, 19 nt, Homo sapiens
  misc_RNA (1)...(19): siRNA sense strand
caccuuugcugcccacuga

SEQ ID NO: 1810821 - RNA, 19 nt, Homo sapiens
  misc_RNA (1)...(19): siRNA sense strand
caaagggcaagaacaagaa

SEQ ID NO: 1810822 - RNA, 19 nt, Homo sapiens
  misc_RNA (1)...(19): siRNA sense strand
agagaaaagucaacaguaa

SEQ ID NO: 1810823 - RNA, 19 nt, Homo sapiens
  misc_RNA (1)...(19): siRNA sense strand
gaagaggaucgacgccuau

SEQ ID NO: 1810824 - RNA, 19 nt, Homo sapiens
  misc_RNA (1)...(19): siRNA sense strand
uucaguaggugacguguuu

SEQ ID NO: 1810825 - RNA, 19 nt, Homo sapiens
  misc_RNA (1)...(19): siRNA sense strand
cauggaagcaaauaaaguu

SEQ ID NO: 1810826 - RNA, 19 nt, Homo sapiens
  misc_RNA (1)...(19): siRNA sense strand
gaagugaugaaugauaaga

SEQ ID NO: 1810827 - RNA, 19 nt, Homo sapiens
  misc_RNA (1)...(19): siRNA sense strand
gguauucaaugcaucucuu

SEQ ID NO: 1810828 - RNA, 19 nt, Homo sapiens
  misc_RNA (1)...(19): siRNA sense strand
gacaccaucugcaaugaca

SEQ ID NO: 1810829 - RNA, 19 nt, Homo sapiens
  misc_RNA (1)...(19): siRNA sense strand
gcagcaccauaaagaagga

SEQ ID NO: 1810830 - RNA, 19 nt, Homo sapiens
  misc_RNA (1)...(19): siRNA sense strand
gaaggagaggccaaguaaa

SEQ ID NO: 1810831 - RNA, 19 nt, Homo sapiens
  misc_RNA (1)...(19): siRNA sense strand
cagcaguaguuccucagaa

SEQ ID NO: 1810832 - RNA, 19 nt, Homo sapiens
  misc_RNA (1)...(19): siRNA sense strand
gggaggaggaggaggauga

SEQ ID NO: 1810833 - RNA, 19 nt, Homo sapiens
  misc_RNA (1)...(19): siRNA sense strand
ccaccuccaucuagcaaug

SEQ ID NO: 1810834 - RNA, 19 nt, Homo sapiens
  misc_RNA (1)...(19): siRNA sense strand
caucagguauucaaugcau

SEQ ID NO: 1810835 - RNA, 19 nt, Homo sapiens
  misc_RNA (1)...(19): siRNA sense strand
agaagcugaugaugaagaa

SEQ ID NO: 1810836 - RNA, 19 nt, Homo sapiens
  misc_RNA (1)...(19): siRNA sense strand
gacaguggcucggcaccaa

SEQ ID NO: 1810837 - RNA, 19 nt, Homo sapiens
  misc_RNA (1)...(19): siRNA sense strand
gcaaacugaagaaccagaa

SEQ ID NO: 1810838 - RNA, 19 nt, Homo sapiens
  misc_RNA (1)...(19): siRNA sense strand
caccaacaaguagaaauua

SEQ ID NO: 1810839 - RNA, 19 nt, Homo sapiens
  misc_RNA (1)...(19): siRNA sense strand
ggccaacacucucagaaac

SEQ ID NO: 1810840 - RNA, 19 nt, Homo sapiens
  misc_RNA (1)...(19): siRNA sense strand
gaagauguugcaccauugu

SEQ ID NO: 1810841 - RNA, 19 nt, Homo sapiens
  misc_RNA (1)...(19): siRNA sense strand
ggauccugcuccugacuau

SEQ ID NO: 1810842 - RNA, 19 nt, Homo sapiens
  misc_RNA (1)...(19): siRNA sense strand
caccucaccuugcaaaucu

SEQ ID NO: 1810843 - RNA, 19 nt, Homo sapiens
  misc_RNA (1)...(19): siRNA sense strand
ugaaugauaagaacuggaa

SEQ ID NO: 1810844 - RNA, 19 nt, Homo sapiens
  misc_RNA (1)...(19): siRNA sense strand
acauggcccugaaggauga

SEQ ID NO: 1810845 - RNA, 19 nt, Homo sapiens
  misc_RNA (1)...(19): siRNA sense strand
gcucucccaucacaauuca

SEQ ID NO: 1810846 - RNA, 19 nt, Homo sapiens
  misc_RNA (1)...(19): siRNA sense strand
ucacacacaguaaggcuuu

SEQ ID NO: 1810847 - RNA, 19 nt, Homo sapiens
  misc_RNA (1)...(19): siRNA sense strand
cauccacaauggcucacua

SEQ ID NO: 1810848 - RNA, 19 nt, Homo sapiens
  misc_RNA (1)...(19): siRNA sense strand
ggacaugcucacuagaaau

SEQ ID NO: 1810849 - RNA, 19 nt, Homo sapiens
  misc_RNA (1)...(19): siRNA sense strand
ggaggaggaggaugaggaa

SEQ ID NO: 1810850 - RNA, 19 nt, Homo sapiens
  misc_RNA (1)...(19): siRNA sense strand
aaauagcuccgaaaccaaa

SEQ ID NO: 1810851 - RNA, 19 nt, Homo sapiens
  misc_RNA (1)...(19): siRNA sense strand
ggaaagcgucguugaccau

SEQ ID NO: 1810852 - RNA, 19 nt, Homo sapiens
  misc_RNA (1)...(19): siRNA sense strand
gcacuuucuugccagauac

SEQ ID NO: 1810853 - RNA, 19 nt, Homo sapiens
  misc_RNA (1)...(19): siRNA sense strand
gaggguggaggauuuguug

SEQ ID NO: 1810854 - RNA, 19 nt, Homo sapiens
  misc_RNA (1)...(19): siRNA sense strand
uggacaugcucacuagaaa

SEQ ID NO: 1810855 - RNA, 19 nt, Homo sapiens
  misc_RNA (1)...(19): siRNA sense strand
caccaugaggcacguguua

SEQ ID NO: 1810856 - RNA, 19 nt, Homo sapiens
  misc_RNA (1)...(19): siRNA sense strand
gagggaaguggaauauuuc

SEQ ID NO: 1810857 - RNA, 19 nt, Homo sapiens
  misc_RNA (1)...(19): siRNA sense strand
ugaaugggaagcagcauga

SEQ ID NO: 1810858 - RNA, 19 nt, Homo sapiens
  misc_RNA (1)...(19): siRNA sense strand
gggccaacacucucagaaa

SEQ ID NO: 1810859 - RNA, 19 nt, Homo sapiens
  misc_RNA (1)...(19): siRNA sense strand
acaaauaagcaucagguau

SEQ ID NO: 1810860 - RNA, 19 nt, Homo sapiens
  misc_RNA (1)...(19): siRNA sense strand
agccaaauuugcugauauu

SEQ ID NO: 1810861 - RNA, 19 nt, Homo sapiens
  misc_RNA (1)...(19): siRNA sense strand
augaagauguugcaccauu

SEQ ID NO: 1810862 - RNA, 19 nt, Homo sapiens
  misc_RNA (1)...(19): siRNA sense strand
guagugaugaugaagaugu

SEQ ID NO: 1810863 - RNA, 19 nt, Homo sapiens
  misc_RNA (1)...(19): siRNA sense strand
gcuuacggcugaccaagag

SEQ ID NO: 1810864 - RNA, 19 nt, Homo sapiens
  misc_RNA (1)...(19): siRNA sense strand
gacgagcagaugacaauga

SEQ ID NO: 1810865 - RNA, 19 nt, Homo sapiens
  misc_RNA (1)...(19): siRNA sense strand
acgagcagaugacaaugaa

SEQ ID NO: 1810866 - RNA, 19 nt, Homo sapiens
  misc_RNA (1)...(19): siRNA sense strand
gggacgagagugcagauga

SEQ ID NO: 1810867 - RNA, 19 nt, Homo sapiens
  misc_RNA (1)...(19): siRNA sense strand
ggaauccacagcgaauuga

SEQ ID NO: 1810868 - RNA, 19 nt, Homo sapiens
  misc_RNA (1)...(19): siRNA sense strand
caucaugcagcaccauaaa

SEQ ID NO: 1810869 - RNA, 19 nt, Homo sapiens
  misc_RNA (1)...(19): siRNA sense strand
agacagagucaacaauuca

SEQ ID NO: 1810870 - RNA, 19 nt, Homo sapiens
  misc_RNA (1)...(19): siRNA sense strand
gaaggagucugacaucuua

SEQ ID NO: 1810871 - RNA, 19 nt, Homo sapiens
  misc_RNA (1)...(19): siRNA sense strand
gaacacagaugaaccaaug

SEQ ID NO: 1810872 - RNA, 19 nt, Homo sapiens
  misc_RNA (1)...(19): siRNA sense strand
gagcacaauuugaauauga

SEQ ID NO: 1810873 - RNA, 19 nt, Homo sapiens
  misc_RNA (1)...(19): siRNA sense strand
caaaggaacuaaagcguau

SEQ ID NO: 1810874 - RNA, 19 nt, Homo sapiens
  misc_RNA (1)...(19): siRNA sense strand
uaaagaagcuggcauucga

SEQ ID NO: 1810875 - RNA, 19 nt, Homo sapiens
  misc_RNA (1)...(19): siRNA sense strand
gaacauaugcacacuacuu

SEQ ID NO: 1810876 - RNA, 19 nt, Homo sapiens
  misc_RNA (1)...(19): siRNA sense strand
gcugaaacauccacacauu

SEQ ID NO: 1810877 - RNA, 19 nt, Homo sapiens
  misc_RNA (1)...(19): siRNA sense strand
gacaucauccagauuauua

SEQ ID NO: 1810878 - RNA, 19 nt, Homo sapiens
  misc_RNA (1)...(19): siRNA sense strand
ugcaagacaucucuaauaa

SEQ ID NO: 1810879 - RNA, 19 nt, Homo sapiens
  misc_RNA (1)...(19): siRNA sense strand
cugaaaggaucacuguuua

SEQ ID NO: 1810880 - RNA, 19 nt, Homo sapiens
  misc_RNA (1)...(19): siRNA sense strand
ucaagauugugccaaguua

SEQ ID NO: 1810881 - RNA, 19 nt, Homo sapiens
  misc_RNA (1)...(19): siRNA sense strand
aaagagagccuuacggaaa

SEQ ID NO: 1810882 - RNA, 19 nt, Homo sapiens
  misc_RNA (1)...(19): siRNA sense strand
cuacuucgaucucacaauu

SEQ ID NO: 1810883 - RNA, 19 nt, Homo sapiens
  misc_RNA (1)...(19): siRNA sense strand
augcagaucuugucacaua

SEQ ID NO: 1810884 - RNA, 19 nt, Homo sapiens
  misc_RNA (1)...(19): siRNA sense strand
cauguuacccugagaauaa

SEQ ID NO: 1810885 - RNA, 19 nt, Homo sapiens
  misc_RNA (1)...(19): siRNA sense strand
gaaacuaaagggugcagua

SEQ ID NO: 1810886 - RNA, 19 nt, Homo sapiens
  misc_RNA (1)...(19): siRNA sense strand
ggaaugcuuuacaugguuu

SEQ ID NO: 1810887 - RNA, 19 nt, Homo sapiens
  misc_RNA (1)...(19): siRNA sense strand
ugucacauaugaagaagua

SEQ ID NO: 1810888 - RNA, 19 nt, Homo sapiens
  misc_RNA (1)...(19): siRNA sense strand
guacgacgauguaucaaca

SEQ ID NO: 1810889 - RNA, 19 nt, Homo sapiens
  misc_RNA (1)...(19): siRNA sense strand
ggaaaacacuagucuuauu

SEQ ID NO: 1810890 - RNA, 19 nt, Homo sapiens
  misc_RNA (1)...(19): siRNA sense strand
guaaggaugaucauaauug

SEQ ID NO: 1810891 - RNA, 19 nt, Homo sapiens
  misc_RNA (1)...(19): siRNA sense strand
ggaagaaauuucauguuac

SEQ ID NO: 1810892 - RNA, 19 nt, Homo sapiens
  misc_RNA (1)...(19): siRNA sense strand
gaaaggaucacuguuuaug

SEQ ID NO: 1810893 - RNA, 19 nt, Homo sapiens
  misc_RNA (1)...(19): siRNA sense strand
ggugacaucauccagauua

SEQ ID NO: 1810894 - RNA, 19 nt, Homo sapiens
  misc_RNA (1)...(19): siRNA sense strand
gaauaacgacgcaaaggaa

SEQ ID NO: 1810895 - RNA, 19 nt, Homo sapiens
  misc_RNA (1)...(19): siRNA sense strand
aguauuaccuucaagauug

SEQ ID NO: 1810896 - RNA, 19 nt, Homo sapiens
  misc_RNA (1)...(19): siRNA sense strand
gagaacauaugcacacuac

SEQ ID NO: 1810897 - RNA, 19 nt, Homo sapiens
  misc_RNA (1)...(19): siRNA sense strand
caagacaucucuaauaacg

SEQ ID NO: 1810898 - RNA, 19 nt, Homo sapiens
  misc_RNA (1)...(19): siRNA sense strand
ccaaggcaguggagccaua

SEQ ID NO: 1810899 - RNA, 19 nt, Homo sapiens
  misc_RNA (1)...(19): siRNA sense strand
ggucauagcagcacuaaca

SEQ ID NO: 1810900 - RNA, 19 nt, Homo sapiens
  misc_RNA (1)...(19): siRNA sense strand
caaugggaaucacuuuaaa

SEQ ID NO: 1810901 - RNA, 19 nt, Homo sapiens
  misc_RNA (1)...(19): siRNA sense strand
gcugaaaggaucacuguuu

SEQ ID NO: 1810902 - RNA, 19 nt, Homo sapiens
  misc_RNA (1)...(19): siRNA sense strand
ggacgacagaucuauguaa

SEQ ID NO: 1810903 - RNA, 19 nt, Homo sapiens
  misc_RNA (1)...(19): siRNA sense strand
gaaauucgagaaaucaaug

SEQ ID NO: 1810904 - RNA, 19 nt, Homo sapiens
  misc_RNA (1)...(19): siRNA sense strand
cacaugaaguuuacaguga

SEQ ID NO: 1810905 - RNA, 19 nt, Homo sapiens
  misc_RNA (1)...(19): siRNA sense strand
uagagcagcugaggaaauu

SEQ ID NO: 1810906 - RNA, 19 nt, Homo sapiens
  misc_RNA (1)...(19): siRNA sense strand
uuaaggagcgggaucguua

SEQ ID NO: 1810907 - RNA, 19 nt, Homo sapiens
  misc_RNA (1)...(19): siRNA sense strand
ggcauucgauucagaguug

SEQ ID NO: 1810908 - RNA, 19 nt, Homo sapiens
  misc_RNA (1)...(19): siRNA sense strand
gaaacugggcaacaauuug

SEQ ID NO: 1810909 - RNA, 19 nt, Homo sapiens
  misc_RNA (1)...(19): siRNA sense strand
gaagagauucaugcgcuua

SEQ ID NO: 1810910 - RNA, 19 nt, Homo sapiens
  misc_RNA (1)...(19): siRNA sense strand
caagguacacuucauguug

SEQ ID NO: 1810911 - RNA, 19 nt, Homo sapiens
  misc_RNA (1)...(19): siRNA sense strand
aagaagcaguacaaagaua

SEQ ID NO: 1810912 - RNA, 19 nt, Homo sapiens
  misc_RNA (1)...(19): siRNA sense strand
gaaacauccacacauugua

SEQ ID NO: 1810913 - RNA, 19 nt, Homo sapiens
  misc_RNA (1)...(19): siRNA sense strand
ccaaugggaaucacuuuaa

SEQ ID NO: 1810914 - RNA, 19 nt, Homo sapiens
  misc_RNA (1)...(19): siRNA sense strand
uuacagugaugaagcauug

SEQ ID NO: 1810915 - RNA, 19 nt, Homo sapiens
  misc_RNA (1)...(19): siRNA sense strand
gaagaaauuucauguuacc

SEQ ID NO: 1810916 - RNA, 19 nt, Homo sapiens
  misc_RNA (1)...(19): siRNA sense strand
gagcagaucuguguuuuga

SEQ ID NO: 1810917 - RNA, 19 nt, Homo sapiens
  misc_RNA (1)...(19): siRNA sense strand
acauauagcucagauggaa

SEQ ID NO: 1810918 - RNA, 19 nt, Homo sapiens
  misc_RNA (1)...(19): siRNA sense strand
acuaaagggugcaguacua

SEQ ID NO: 1810919 - RNA, 19 nt, Homo sapiens
  misc_RNA (1)...(19): siRNA sense strand
gacgauguaucaacagaga

SEQ ID NO: 1810920 - RNA, 19 nt, Homo sapiens
  misc_RNA (1)...(19): siRNA sense strand
acagagagccaaagaggua

SEQ ID NO: 1810921 - RNA, 19 nt, Homo sapiens
  misc_RNA (1)...(19): siRNA sense strand
gccaguaucugucauaugc

SEQ ID NO: 1810922 - RNA, 19 nt, Homo sapiens
  misc_RNA (1)...(19): siRNA sense strand
gaggaaaacacuagucuua

SEQ ID NO: 1810923 - RNA, 19 nt, Homo sapiens
  misc_RNA (1)...(19): siRNA sense strand
cgacagaucuauguaagag

SEQ ID NO: 1810924 - RNA, 19 nt, Homo sapiens
  misc_RNA (1)...(19): siRNA sense strand
cacaucaaguccaggguua

SEQ ID NO: 1810925 - RNA, 19 nt, Homo sapiens
  misc_RNA (1)...(19): siRNA sense strand
cugaagaguuaccagauuu

SEQ ID NO: 1810926 - RNA, 19 nt, Homo sapiens
  misc_RNA (1)...(19): siRNA sense strand
gcagaucuguguuuugaaa

SEQ ID NO: 1810927 - RNA, 19 nt, Homo sapiens
  misc_RNA (1)...(19): siRNA sense strand
gcucagauggaaugcuuua

SEQ ID NO: 1810928 - RNA, 19 nt, Homo sapiens
  misc_RNA (1)...(19): siRNA sense strand
ggagacauauagcucagau

SEQ ID NO: 1810929 - RNA, 19 nt, Homo sapiens
  misc_RNA (1)...(19): siRNA sense strand
gaagccaguaucugucaua

SEQ ID NO: 1810930 - RNA, 19 nt, Homo sapiens
  misc_RNA (1)...(19): siRNA sense strand
gcacacuacuucgaucuca

SEQ ID NO: 1810931 - RNA, 19 nt, Homo sapiens
  misc_RNA (1)...(19): siRNA sense strand
ggacaaaacuggagaccau

SEQ ID NO: 1810932 - RNA, 19 nt, Homo sapiens
  misc_RNA (1)...(19): siRNA sense strand
cagagaaacugggcaacaa

SEQ ID NO: 1810933 - RNA, 19 nt, Homo sapiens
  misc_RNA (1)...(19): siRNA sense strand
ucccaccucucccuauuua

SEQ ID NO: 1810934 - RNA, 19 nt, Homo sapiens
  misc_RNA (1)...(19): siRNA sense strand
aaagagguauuggaagaaa

SEQ ID NO: 1810935 - RNA, 19 nt, Homo sapiens
  misc_RNA (1)...(19): siRNA sense strand
aaggaucacuguuuaugaa

SEQ ID NO: 1810936 - RNA, 19 nt, Homo sapiens
  misc_RNA (1)...(19): siRNA sense strand
gcuacugccaugauaauaa

SEQ ID NO: 1810937 - RNA, 19 nt, Homo sapiens
  misc_RNA (1)...(19): siRNA sense strand
cugcagaguuugcuccuuu

SEQ ID NO: 1810938 - RNA, 19 nt, Homo sapiens
  misc_RNA (1)...(19): siRNA sense strand
gcacugaagguccugagaa

SEQ ID NO: 1810939 - RNA, 19 nt, Homo sapiens
  misc_RNA (1)...(19): siRNA sense strand
cacaaagucuucaccacaa

SEQ ID NO: 1810940 - RNA, 19 nt, Homo sapiens
  misc_RNA (1)...(19): siRNA sense strand
cuacgcuacugccaugaua

SEQ ID NO: 1810941 - RNA, 19 nt, Homo sapiens
  misc_RNA (1)...(19): siRNA sense strand
ccacgaggaugcgauguau

SEQ ID NO: 1810942 - RNA, 19 nt, Homo sapiens
  misc_RNA (1)...(19): siRNA sense strand
gaagcuggcauucgauuca

SEQ ID NO: 1810943 - RNA, 19 nt, Homo sapiens
  misc_RNA (1)...(19): siRNA sense strand
gagaaacugggcaacaauu

SEQ ID NO: 1810944 - RNA, 19 nt, Homo sapiens
  misc_RNA (1)...(19): siRNA sense strand
aaggaaagauuguuugaag

SEQ ID NO: 1810945 - RNA, 19 nt, Homo sapiens
  misc_RNA (1)...(19): siRNA sense strand
guagccagccauuauauga

SEQ ID NO: 1810946 - RNA, 19 nt, Homo sapiens
  misc_RNA (1)...(19): siRNA sense strand
caaugcagaucuugucaca

SEQ ID NO: 1810947 - RNA, 19 nt, Homo sapiens
  misc_RNA (1)...(19): siRNA sense strand
uguaagagcacaauuugaa

SEQ ID NO: 1810948 - RNA, 19 nt, Homo sapiens
  misc_RNA (1)...(19): siRNA sense strand
cauagcagcacuaacaauu

SEQ ID NO: 1810949 - RNA, 19 nt, Homo sapiens
  misc_RNA (1)...(19): siRNA sense strand
gaguucggcugguacaguu

SEQ ID NO: 1810950 - RNA, 19 nt, Homo sapiens
  misc_RNA (1)...(19): siRNA sense strand
ggauggagcagaucugugu

SEQ ID NO: 1810951 - RNA, 19 nt, Homo sapiens
  misc_RNA (1)...(19): siRNA sense strand
ugggguagcuauucaauua

SEQ ID NO: 1810952 - RNA, 19 nt, Homo sapiens
  misc_RNA (1)...(19): siRNA sense strand
uaacacaaccucauuucau

SEQ ID NO: 1810953 - RNA, 19 nt, Homo sapiens
  misc_RNA (1)...(19): siRNA sense strand
gaaccaaugggaaucacuu

SEQ ID NO: 1810954 - RNA, 19 nt, Homo sapiens
  misc_RNA (1)...(19): siRNA sense strand
ccugaagaguuaccagauu

SEQ ID NO: 1810955 - RNA, 19 nt, Homo sapiens
  misc_RNA (1)...(19): siRNA sense strand
gaagcaguacaaagauaaa

SEQ ID NO: 1810956 - RNA, 19 nt, Homo sapiens
  misc_RNA (1)...(19): siRNA sense strand
agaaaucaauggcaucagu

SEQ ID NO: 1810957 - RNA, 19 nt, Homo sapiens
  misc_RNA (1)...(19): siRNA sense strand
ccaccucucccuauuuaaa

SEQ ID NO: 1810958 - RNA, 19 nt, Homo sapiens
  misc_RNA (1)...(19): siRNA sense strand
ggacagccuggaagagauu

SEQ ID NO: 1810959 - RNA, 19 nt, Homo sapiens
  misc_RNA (1)...(19): siRNA sense strand
caacuauuacuccagguuu

SEQ ID NO: 1810960 - RNA, 19 nt, Homo sapiens
  misc_RNA (1)...(19): siRNA sense strand
gacgacagaucuauguaag

SEQ ID NO: 1810961 - RNA, 19 nt, Homo sapiens
  misc_RNA (1)...(19): siRNA sense strand
gaguauuaccuucaagauu

SEQ ID NO: 1810962 - RNA, 19 nt, Homo sapiens
  misc_RNA (1)...(19): siRNA sense strand
gaucacuguuuaugaagca

SEQ ID NO: 1810963 - RNA, 19 nt, Homo sapiens
  misc_RNA (1)...(19): siRNA sense strand
uaaaugaggaugaaucucu

SEQ ID NO: 1810964 - RNA, 19 nt, Homo sapiens
  misc_RNA (1)...(19): siRNA sense strand
ggccagcuguacuugguuu

SEQ ID NO: 1810965 - RNA, 19 nt, Homo sapiens
  misc_RNA (1)...(19): siRNA sense strand
uaaggaugaucauaauugg

SEQ ID NO: 1810966 - RNA, 19 nt, Homo sapiens
  misc_RNA (1)...(19): siRNA sense strand
cugaaucacccauggcuua

SEQ ID NO: 1810967 - RNA, 19 nt, Homo sapiens
  misc_RNA (1)...(19): siRNA sense strand
gaaggcauuauuaaaggaa

SEQ ID NO: 1810968 - RNA, 19 nt, Homo sapiens
  misc_RNA (1)...(19): siRNA sense strand
cagaucuugucacauauga

SEQ ID NO: 1810969 - RNA, 19 nt, Homo sapiens
  misc_RNA (1)...(19): siRNA sense strand
gcaagguacacuucauguu

SEQ ID NO: 1810970 - RNA, 19 nt, Homo sapiens
  misc_RNA (1)...(19): siRNA sense strand
gggaauagcugggcugaga

SEQ ID NO: 1810971 - RNA, 19 nt, Homo sapiens
  misc_RNA (1)...(19): siRNA sense strand
gagcagaacuuggcagcaa

SEQ ID NO: 1810972 - RNA, 19 nt, Homo sapiens
  misc_RNA (1)...(19): siRNA sense strand
ggacacggccuucauguac

SEQ ID NO: 1810973 - RNA, 19 nt, Homo sapiens
  misc_RNA (1)...(19): siRNA sense strand
gcauuugguugcucacgaa

SEQ ID NO: 1810974 - RNA, 19 nt, Homo sapiens
  misc_RNA (1)...(19): siRNA sense strand
gcugagaccuacaggaauc

SEQ ID NO: 1810975 - RNA, 19 nt, Homo sapiens
  misc_RNA (1)...(19): siRNA sense strand
ggaaguggccgagaucugu

SEQ ID NO: 1810976 - RNA, 19 nt, Homo sapiens
  misc_RNA (1)...(19): siRNA sense strand
ucacgaaugucccaacuac

SEQ ID NO: 1810977 - RNA, 19 nt, Homo sapiens
  misc_RNA (1)...(19): siRNA sense strand
gggcugagaccuacaggaa

SEQ ID NO: 1810978 - RNA, 19 nt, Homo sapiens
  misc_RNA (1)...(19): siRNA sense strand
guacaaguaugaggacaag

SEQ ID NO: 1810979 - RNA, 19 nt, Homo sapiens
  misc_RNA (1)...(19): siRNA sense strand
gaaguggccgagaucugua

SEQ ID NO: 1810980 - RNA, 19 nt, Homo sapiens
  misc_RNA (1)...(19): siRNA sense strand
guggaugccuuuaaucaag

SEQ ID NO: 1810981 - RNA, 19 nt, Homo sapiens
  misc_RNA (1)...(19): siRNA sense strand
uggagcagcuggagcagaa

SEQ ID NO: 1810982 - RNA, 19 nt, Homo sapiens
  misc_RNA (1)...(19): siRNA sense strand
gguggcgacugcagaguga

SEQ ID NO: 1810983 - RNA, 19 nt, Homo sapiens
  misc_RNA (1)...(19): siRNA sense strand
aaucaagccuggcauuugg

SEQ ID NO: 1810984 - RNA, 19 nt, Homo sapiens
  misc_RNA (1)...(19): siRNA sense strand
ugacuggcaaguacaagua

SEQ ID NO: 1810985 - RNA, 19 nt, Homo sapiens
  misc_RNA (1)...(19): siRNA sense strand
cuggagacgucauugaaga

SEQ ID NO: 1810986 - RNA, 19 nt, Homo sapiens
  misc_RNA (1)...(19): siRNA sense strand
ugucguggaugccuuuaau

SEQ ID NO: 1810987 - RNA, 19 nt, Homo sapiens
  misc_RNA (1)...(19): siRNA sense strand
gcugggaaguggccgagau

SEQ ID NO: 1810988 - RNA, 19 nt, Homo sapiens
  misc_RNA (1)...(19): siRNA sense strand
ccauugcguugguggagaa

SEQ ID NO: 1810989 - RNA, 19 nt, Homo sapiens
  misc_RNA (1)...(19): siRNA sense strand
gagguucuaugccuacaac

SEQ ID NO: 1810990 - RNA, 19 nt, Homo sapiens
  misc_RNA (1)...(19): siRNA sense strand
ggauguaccaccacucaca

SEQ ID NO: 1810991 - RNA, 19 nt, Homo sapiens
  misc_RNA (1)...(19): siRNA sense strand
uaaucaagccuggcauuug
